United States Patent Application Publication US 2011/0014706 A2 - sequence listing, part 58

SEQ ID NO: 185681 - DNA, 700 bp, Arabidopsis thaliana landsberg
atggtgtcgttgtttttcgtagaacacgtggtggttccggctgcggcggggagggttcttactgaaaaatcgggagatggaagtgcgactatgacggtggagaagatgaaatcgacggtggattcttggtttcagcgtttggcgtcgggtccaagtccaagaggtcgcggccattaaattttccttttttacttttttttttcctggccggaggagattaattaatctcgatataccccatatgtataccagaacaaacggtgaaaactgtattccattcatttatttcattatttgttttttttttctttaggcaaagttcatatagttagtgacagaaactaaaaccctcaatatacatgtacatgatttttgcttttgctggttgctaattttaataagattttatacttctggtttatgtttgggaacgaacttattcaaaaaaaaaaaaaaaaagatacaccgaggaaacaagtgagtcgtgcacgccatctatgtaaaattgtaaatatgtagccgggctagctgggtcaccctttcaacattttaataatattacatagttttggccaaatccggaaacaacgagaggagcctttgcatgtcacaaattgaagttggagtgcgtacaaaccaagaacttgaagttccagggcagcaaaccaaagagcccataatcaataagccaagtttatag

SEQ ID NO: 185682 - DNA, 70 bp, Arabidopsis thaliana landsberg
atgttatcatcatatcggcaagaaaattactattacaacatatgtttccgtgcttcgatttgtcgatcag

SEQ ID NO: 185683 - DNA, 39 bp, Arabidopsis thaliana landsberg
gtaatctccggaccaatcggatacccacaagtttactaa

SEQ ID NO: 185684 - DNA, 453 bp, Arabidopsis thaliana landsberg
aaaatggtagaacttcaagatcatccgagccaccaagaataacaaaaaagaaaaagtttacttacgtggaagttactgaaatgacaaataactttagaagtgttcttgggaaaggagggttcggtatggtttatcatggatatgtaaatggtagagagcaagttgctgttaaagtactctcacacgcttcaaaacatggccataaacaattcaaagcagaggtacttataacaccaaaatattcctctatgcaagtgtcttttgttagttttcaataaatatggaccatagatttgaaatatatgtgtgcttttgtggttcattaggttgaacttcttttgagagttcatcacaagaatttggtaagcctagttggatactgcgaaaaagggaaggaattggctcttgtctacgaatacatggctaatggagacttaaaagagtttttctcag

SEQ ID NO: 185685 - DNA, 432 bp, Arabidopsis thaliana landsberg
ttcacgccactgctgctgctgcttctcataacggcgtcgtttctgagcttcgtcgtcaagtcgaggagcttcgtgagagagaagctctgttgaaaacagagaatctcgaggttaagcttcttagagaatctgtttctgttattccgttgcttgaatcgcagatcgctgataagaacggcgaaatcgaggagcttaggaaagagacggcgagattagcggaggacaacgagagattacggcgagaatttgaccggagcgaggaaatgaggagagagtgtgagacgagggagaaggaaatggaggcggagattgttgagcttcggaaacttgtttcgtcggagagtgacgaccacgcgctctctgtttctcagaggtttcagggtttaatggatgtgtcggcgaaatctaacctaatcagaagtttaaaacgtg

SEQ ID NO: 185686 - DNA, 707 bp, Arabidopsis thaliana landsberg
atgttattacaataccggggatacaagctcgaaagtgagccgaaaaacataaagcgcagtggaagagaacatccgtcaggctttgtcggagctcataaagccagcaaaatccggtgacgttttattcgtgcattacagcggacacggcacgagagtcccaccggaaacaggggaagaggatgatacaggttttgatgagtgtattgttccttccgacttgaatccaattcctggtaagagtttattatggaatggttccttagtttaatgaagaaaaacagagtgctctgtttagaatctgtttacccctctctttgactctgttaagtctcaaggctagttttgaattatgttgacatggacactaatagaaatgattgaggttgttttttttaatccttaaacctgtatcgtgtgaaccatagcgataagccttaaaccgtaaaccctaactctaaaccctaagccgtacaccctaaaccttagaacctaaaaccctaaacgcaaaaccttaaccttaaaccttaaaccctgaatcctactttaacttccaagttcttattgcgtttctagtttttataccgaatgataaacataacatcaagttaatttggactacaaaaacacaaaccaaccttcttcatgattctcaaagctttgatggtgaacccgaagttcttaatagtttttggttttcaatcgtataa

SEQ ID NO: 185687 - DNA, 951 bp, Arabidopsis thaliana landsberg
ggccattaccatccaaccgatcgcaacgaggccaatcgactgaaacacaggagcagtgatttcacaatagtcaagggtcagctttacaaaaagggaatcagccagcctatgctgaaatgcataaccgaaaccgaaggcctagagatccttcgcaaagtccacggcggaacctacgagtcacactcagggcccagggtcctcgcagccaaggtgattcgtcaaggattttactggcccacgataatatgacagccaaccgagtcaccaggacatgtgaagcatgccaaaaaattctctcctcactcaggcgccccttcgcaattcaccaagtcatcgcccacatctggccacttcagtgttgggggctggacatcgtcggaccacgtactacggctcaagggaacctaaagttcaccttcgtcgccgtcagaatattttaccaagtggatctaaagccagagcagtatccacgataacgtcaaagactgcccagaaatttttctggtaaaacattatttgcagattaggagtcccgtctgagctcacagtcgacaatggcaaacagtttgacagccaggacttcagggacttctgcttctccatcggcaccaagctcgcctttgcctcggtataccacccccaatctaacggcgtcgtcgagcgcgccaacggcaaggattttcatcactatcaagaaaaggctgctcgacgacaggaagggtaaatgggccgaccagctatctgaagtagtctgggcactaaacatgaatgaatgccggtcaactggattcacccctttcgtctactatatggatcggaggccatgaccccacaggaaataaaacatgggtcaccctgaacaagcagatcagtcatccccgatgtagacgaaccaatgtccaaagaccttatcgacggagaccacgtctttgccccgcaaaccctcaacaa

SEQ ID NO: 185688 - DNA, 204 bp, Arabidopsis thaliana landsberg
atgaagaagaagatgattccgacgacgatcttactctcagctctcattttctctctatcaccgatctgtgaagctgtgtggcttactgtacctcacaccggatcaaagtgcgtctccgaagaaatccaaagcaacgtcatcgttttagctgattaccttgttatctccgaggaacattctatcttccctactgtctccgttaag

SEQ ID NO: 185689 - DNA, 155 bp, Arabidopsis thaliana landsberg
atggaagtagcgtctcgaatttctgatccggatcctaatctcttcgaagacaacaagtaggttttggatccgcctgagagtttctctgaagctttgtttattggtagagaagtgtttcgacttgaatgtgagaatgtcgccggcgagttgaatca

SEQ ID NO: 185690 - DNA, 1166 bp, Arabidopsis thaliana landsberg
atagtcttggatcagcccttagtcatgggtgttcatgttccatgggattctcagctggagtattatatgtgtcacaatgactgggatgaagttcttaagctgttggatctcattcctgaggatgttttatatgatggaagtttgcaaattgctttggatggtccgaaacagtcttctggctgtcaatcatgtaactctttctccggagaggtatatatgctacatttgagaaatatctgccggacttatggatgatccttatatcaggatatttagatcgcctggagatatgcagtgctccttgtggctacaacactcatgtagcaggaactggcacgtaaacttatatttttaaaagactattgggaaaacgctctagatgtagtatatcttctggccccggcaggggtcatccttggtaattgtgaagtttctttaaggaggaaacttgacgccatcgctaaatctttgtttgtcataaaggatggaggagcaaatgttgatacccttgatgctgaacacaagctattcatacattactgcacacagtataatctgccaaaccttctggatctgtaccttgatcatcacgaattggtcctagataatgattcactcagttcattgcaggaagctgtggtaagtgctttccacgtccgtaatatatttgtgtccataagtctgttctttgtacgcctatggtttgtcttttgaagacttaatttttactgagaatgccaagaatctgtccatgtattcagggtgattctcactgggcaaaatggttgctactctccaggatcaagggccgggagtatgatgcttcattttcaaacgcacgctcaattatgtcacgtaacggggcaccaaatagtgaacccagtgttccagagattgatgaaatggtttgtactgttgatgacattgccgatggggcaggagaaatggcagctttagcaactatgatgtgtgctccagtgccaattcaaaaatccttgagtactggcagtgtgaacaggcacactaactcttctgcgcagtgcactttggagaatttgagatcatttcttcagagattccctaccttatggagtaagcttgttagtgcttgtcttggggaagatatatccgggaaccttttgcggaccaagactaagaatggttaa

SEQ ID NO: 185691 - DNA, 382 bp, Arabidopsis thaliana landsberg
atgagtgagattattgcagtaaacaacaaatcaaaagatggaggaggatcatcgtctattcaatgtccgatgttgaataacacaaactatacggtatggtgtatgaggatggaggctgcactacgagtgcataaagtctggggaacaatcgatcctggattagaggacgaagagaaaaacgacctagcccgagcccttctcttccaatctattccggagtcacttattctccaagtcggaaaactgaagacttcaaaggcagtatgggataagattcaatctaggaatcttggagcagaacgagtcaaagaagcaaagctacaaactcttatggcagagtttgacaaactcaagatgaaggacaatgaaactattgatgaat

SEQ ID NO: 185692 - DNA, 135 bp, Arabidopsis thaliana landsberg
gcgacagcgtgcggatctcgcgtagatgaggcagcagacaataaggcccgatcgacggcggagatgactacgacggcggcaatggggacgcgacggcggccggaaggagagatggtggatggaactaaaatctaa

SEQ ID NO: 185693 - DNA, 398 bp, Arabidopsis thaliana landsberg
ctgcgtcctgctccgttggcgtgcttggctgcaagatcaacaccaaccgcgtcgcctactggccggactccgtcgactgcaacaacctttgcgtcaagctgagctacggcggccgctccgtctacctgctgcgtgtcgaccagtcgggtggggcctatgacatcagctatgacgcctggaactacctgcagacgggcgagtcggctactaccgaccctattgcgggcggcgccgtcgccatggactacgaagacgtggacgcgtccgagtgtgccgacttgatctacaccgatggctccaagctgcccctcagcgcgcccaacagcatgaacttcgtggccagctgcctcgctcagccgagcagctgggttgccaacaactacgttctgtacaacatc

SEQ ID NO: 185694 - DNA, 492 bp, Arabidopsis thaliana landsberg
atgtcgattaatatgagaacgctaacgcaagcactagccaaaacggctgcagtgattgagaagacggttcaaaccacagtccaggaggttacaggtcccaaacctctacaagactacgagcttctcgatcagatcggttccggtggtcctggtctcgcttggaagctttactccgccaaggcacgtgactccacgcggcctcagcagtatccaacagtttgcgtctgggtgcttgataagcgcgctttatctgaggctcgtgctagggcgggattatctaaagctgctgaagatgcgtttctcgatttgattcgtgctgattcggggaagcttgtgcggttgagacatcccggtgtggttcatgttgttcaggcgcttgatgagaataagaatgctatggctatggttacggagccgctcttcgcatccgtggctaatgcgcttgggaatgtggaaaatgttgataacgttcccaaagatcttaagtccatg

SEQ ID NO: 185695 - DNA, 81 bp, Arabidopsis thaliana landsberg
atgtgcaaagtgaatttcaagaggatcgagatgaaaaggtttacccttgagcaaatcaaccatgtactgggaacaactgag

SEQ ID NO: 185696 - DNA, 295 bp, Arabidopsis thaliana landsberg
atggcttcacttggtcatcctgaccgtttccagtctgaggaagcgctcaacctggtgcgcgacctgcttgggtggagcgcactaggctcaccggaagaatccgcgccggtgccgctcccctcggcgatcttgctgccggggagttcgtgctgttcacctcttacatttcctgcaggttggcgctgcaatatcgcccttcttcttgctgctgctggaggagttcgggcttcagttcagcactcacgaccactccatcctcaggcggtcacttcgtccactctgcgagatgtcgtag

SEQ ID NO: 185697 - DNA, 362 bp, Arabidopsis thaliana landsberg
taagacatggtgagatcttcgagtttgaaggagaagaggatgagatcgatatcgaggagaattcggaggaagaagagggatacaattcatcgagttcgcaagatgaatcagccacccattcttcgattgaagaagaagatggagagatagaagctttagagatcgagaagatgatccgtactacacatgaaaacggtatgcgttgcacatttatagacttagttagagccatctcgcttgacacttcgtttttggaagcctgggagaagttttcggtgaaacgactcttcatggaaatttatatctccaagaatcgcgttcgagattatattcgagaagacaagagaatcaatttttcgtaa

SEQ ID NO: 185698 - DNA, 559 bp, Arabidopsis thaliana landsberg
  unsure (1)..(559): unsure at all n locations
gctacaaggccctgctgcaacgctacggcaccgattacacccgcgtggccgaacgctacgccgacgatgccagcatgcgtgcatggttcggcgccggctggcgcggcggtgcccgcttcgaacacagccagcagctggacttcgaaagcctgcgcggccgcctgatgtcgtcgtcctatgccccccgggccggtcacccgcagcacgcgcccatgctcgccgcgctgcgtgacctgttcgaccgctgccagacgaacgaccggataagcttcgactacgacacccgcattttcaccggaacagtgagctgagcatgtacgactacctgcgccccctgctgttcgcgctcgacgccgagaccgcgcaccgnctcaccctgttcggcctgggcgtagctcaccgcagcaacctcgccagatacgtggccacgcccgcagacgacctgccggtggaagcgttcggcatccgctttcccaacccggtgggcctggccgccggactcgacaagaatgccgagcatttggacgaactgggcgcgctcggtttcggcttcgtcgag

SEQ ID NO: 185699 - DNA, 307 bp, Arabidopsis thaliana landsberg
atttttcagctcctccttgattttcaaaaccatggacaagaattttcgtgtcaacactaacgacgaacgtaacatctggtcgtccacggcggtgaatgagaatctgacaatggcgtcgtcgtcatctcagccacaaccaatatcgtctccgtttcatcaaccagagaatcaggtcaacagagttaatcctggaagtcattattatgatttggaaaccctagaatcttcttttggtgggctttctttcaacgattcaagtgttcgtcagaatggtgattcgattcacctccctcgtcgaaccaatcag

SEQ ID NO: 185700 - DNA, 1008 bp, Arabidopsis thaliana landsberg
atggatcaatatgggattccagtagagagaaaagagatgaagcataaggggagaaatgttatatggtctgttggaatggataagtgtttgattgaagctttggctgtccaggccaaaaacgggaacaaagttgacaaatgtttcaacgataaagcttacactgctgcttgtgatgcggttaatactcgtttcaatcttaacttgactagccagaaagccatcaatcgcctcaagacgatcaagaaaaggtacagagttatgagagacatacttagccgggatggattctggtggaactcgagcacaaaaatgatcgattgcgaaagtgatgagctctggagaagatatattgctgtaagtcccattatcccttctcttttactaagagatcatccttcttttgtgcatcattatcaaacttaaaaatggttggaataggtaaacccagacgcaaaagcatttaggggaaagcaaattgagatgtacgaagaacttagaacagtatgcggtgactatcaaactccaggtaaatataacaaagtgaagaaggaaagcagtcatcatcttaatgacgtaaaacaatttgaagaagactctgtttccttccctttaggaagttctgaagaacatagcgatacagatggaacagagtcatacgcaggagcaagtgagtatatgcatgaagagtctcaagatcttcctcctcctcgagatcctttaagacgaccttctaaacgttctcgaaactcggatccttgtcaagaagcaatgttagtggttgcttctagcattcgccgcctagctgatgcagtggttcaaagcaaaactttgattaacacagaggaattgttgaaagcagtgatggagattgatgaattggaagaagcaaaacagatgtatgcgtttgagtatctgaatggtgatccagtcaaagctagagctttcatggcttataataataggatgaggaagatgtttttgtttcgacagttttggtggtggaagtaa

SEQ ID NO: 185701 - DNA, 313 bp, Arabidopsis thaliana landsberg
ttgacagagagtatttcaatgcaagcttcgtgtcaagcttttgcagctgtttcttaccttactattggagatgctgaatcatcatctaaggtttgacattttcatgcagttaactggatgtttatacttgatttactttattgccggagcttaagaagattgctttcaatcctctgatttgtctttaggcacttgatttaattggaccactcaatggaatgacgaattcactatctggtgttcgagaggaagctagtattctctttgcttacggtcttctcttgatgaagcaacgagatctacaggacgcaag

SEQ ID NO: 185702 - DNA, 484 bp, Arabidopsis thaliana landsberg
attaatgaagacgaaactaagaatgaaagaacaattgatgccatagaatttgaagcttcaattgcttatgtggtcaacgatatgtttggtgttaatgatccgttgttacgtctagagaggtttgttcttgcaccattgcctgaaatgggttctccaaagcttgtgcaggttagtctcctatgtctcaacgttaacgtctattagaagttattggtaatgtttttttgaaggaaattatttcatgtgaatctagatttccaatctccgtatacagcataatatggaacccgatgagaagcaattagccgattatggtagatgggctttggaggtatttgttcttgaccatatattctgcaacaaaattgagttcacatatgaagaaactattgcattgaaaaggcaagaagaacttattcatgaagaggaagcagagaagaacactaaactcaaaaaaacatttgttggtaaaaaagtgaactaa

SEQ ID NO: 185703 - DNA, 149 bp, Arabidopsis thaliana landsberg
catacaagccttctacagatgatgcgtacgctcacaacaccctggcagaatacaaccttgtaaatataaggctgtgcttgtccttattagtggcgtgtatcactgctctgcgggaacaggtgctttcggtcctttatgtttcagggttt

SEQ ID NO: 185704 - DNA, 58 bp, Arabidopsis thaliana landsberg
atgggcagctaccgcgcccggccagtctcgctgcccatcgtccaggcgcgccttggac

SEQ ID NO: 185705 - DNA, 25 bp, Arabidopsis thaliana landsberg
atgggaaacgcgtataccaaagatg

SEQ ID NO: 185706 - DNA, 291 bp, Arabidopsis thaliana landsberg
  unsure (1)..(291): unsure at all n locations
atgctcgacgccttcagccacgcggccaatatgccgctttcgctggaacccgcggaaatctgccatgccgtnnnnnnnnnnnnnnnnnnnnnnnnnnnnnnnnnnnnnnnnnnnnnnnnnnnnnnnnnnnnnnnnnnnnnnnnnnnnnnnnnnnnnnnnnnnnnnnnnnnnnnnnnnnnnnnnnnnnnnnntcaggtcgcccctgaaaacgataacgacgcgcaaatccgccagctcgtggccgccaacggccaaggcagccatgccgtggcgctgcgcgtaaaaccctga

SEQ ID NO: 185707 - DNA, 227 bp, Arabidopsis thaliana landsberg
gagttactttgatacacgtcaaggaaaaaggtaaactaaaggtgaatggagaatttgataagtttgaaatgacgaagaaacttaagaaggtgtatgaatttgttgacattatcgcggttgggccggatggagaaccggcacaaaatcagaagctggttaaaaagcctgaacctaaagtgaagaaagcaccatcttaccgtggttggaatttgggtttctttaagtga

SEQ ID NO: 185708 - DNA, 978 bp, Arabidopsis thaliana landsberg
  unsure (1)..(978): unsure at all n locations
atgactcatgatatagtttttaatcaaaagttgttccaatgcagagagaaatcaaggattacactatccatcaaacaactagaagatgatcctcttctagaaacattagacaaagtgattttgaaggtaaaacaatgtgaatgaatgtgttttctgtctcttgtgggtcttagtgatttttaatagataattgaatattgttacaggacagttctactggatctccttcgctaagctcgaacaatggggatacaattgaacctcttccagggctagaaacaatacttgaagagcttttaaaggaagatgggtatatagacaatatcattttataatttaaatttactatgcagtcctagtcagctctttgcataacatctgcttattataagtgactaggatcacctctactctactagatttgntcactcctcgatttgcgattggatatatacatgtcaatagctattgctggctgatactttttctgaacccatgatgagttggatattgttaattgcattacttatagaatctttgtttcaggcataacattttggttccagtgtgtaactaatattcatttctatattgcagaatagaagctgtgaaaatcaaccggcaaggatttgagaaaagagtggtttcacaagacctacaactttggctctcaaatgtgagttctgtttctctttactttcccgtaagaataaactctgctctgtgaaaattctgattctatgcgcatgttcacacgcagacaccgccttctgatgggaagtttgttcttcttgcccgtgctggaagacaggtaaatctcagaagctacccatttatatggccatagatagagagattcttggtttgattttaagtaaaatattaacattacaggtgcaagagatacacttgacaacgtctctggaacaaggaggaatcaagaaagcgcttcagcatgtactagaacgcgtcccctaa

SEQ ID NO: 185709 - DNA, 419 bp, Arabidopsis thaliana landsberg
gaaagaaacttggcaaggacttgaacaagatattacaaccagggttgcttctggaatgaactatactgtatcaacttgtgttggtgtgtctggtcctttcaatgaatcagctgaggttctttctactgtgaggcttgagcatgaagactctcctaccgagtatttgtgtatcggaaagtatgtttttttttatggttatatctttgaaatttgattgagcttttgtagagatttctgatgaagtggaacttatctgcagaacatatgcctcgagagacaagtgggttgatctggaaggaacgttttcgatatcaaatatgcctgatcgtgttgttctctatctggaaggtcccgctccagggaaagatctccttatacgctctgttcccgttagatcctccacttctagtgacttccag

SEQ ID NO: 185710 - DNA, 752 bp, Arabidopsis thaliana landsberg
gtacacctctgctgtatgcgaactcgatcaacaggcaatcagaacctccttttcaacgacaacatcgaccgcatagctcgcgaactcagagaaaggagaaacacagtcaaccttgtacctcagcaaccactcgcaatggctgaagaacagaatcatctttatgggctgccaacattggtgctggagatgcaccacgagatcaccgttagaggaaagaaattgcacctcctgctatccagaacaacaacttcgagattaagagtggtctcatctcgatgattcaggggaacaaattccatggtttgccaatggaggatccactcgaccaccttgatgaattcgataggctctacaacctgacaaagatcaatggtgtcaatgaagacggattcaagctccggttgttttcattctccttgggcgacaaagcacacatctggggaaaaaatctgccgcatgactcaatcaccatctgggatgattgcaaaaaagcctttctagcaaaggttttctccaacgccagaactgcaagactcagaaatgagatctctggtttttcacaaaaggctggtgaaagcttatgtgaagcatgggagcgtttcaaaggttacattaaccaatgccctcatcatgacttcaagaaagcctctctgctcagcactctatacaaaggtgttctaccacggataagaatgcttctggataccgccatcaatggaaatttccagaataaagatgttgaagaatgctga

SEQ ID NO: 185711 - DNA, 464 bp, Arabidopsis thaliana landsberg
atggctggaaatctcgtactagccgtgcttggcgtaaacgcgccggccccggtaacagatgcgtacgtgaagcgcatttatgcccgtgcgtttgggtgtgtgagctccattggcgggttatttaatgcgcgctgttgcctgcctctgtggtctgtgctgtgtctgcaggagcgggtgttgcggtgccaggaagcgatcgggtccatggcgtcctcggcggccattgacgacgacgctaccgtgccaccgaaatctgcgagacgcaggagctcccccgtgcccgtgcccgtgcccgtgccgcagagccctgtgggggtgctggacgcggccggctgcctcagctacaggagcgaagaggcagcgactgcgactgcgactgctgctgcctcacatggcgcctcttccagctcgtcctcgacctcctcggtgaccagcaaccgcccccaactcgccagccgatgtga

SEQ ID NO: 185712 - DNA, 51 bp, Arabidopsis thaliana landsberg
atgcacgtaggtcttagtgttggtgctacagggtatccatatgcgcagcag

SEQ ID NO: 185713 - DNA, 433 bp, Arabidopsis thaliana landsberg
gaagcagttgagacaatgtctgcatgctctgccatggcattgcaaaagtcaagtggaaataaggaagaagagtctttgtcaccaaatagtgaatgggctaagtggaaacgtggaggcatagttggagcggctgctttaacagggggtacattgatggccatcactggtggtatgatgtcttctaactgttaatatctcttccaacgtttagaaaattaagagtatgtgtttggaaaatgctaattcttaatctgttttgattacatattatgtgaaacaggattggctgctccagcaatagctgcagggttcggtgcattggctccaactctaggcacaatagttccggtaattggagccagtgggtttgctgcagctgctgaggctgccggaactgttgctggttctgttgctgttgcagcatcttttggag

SEQ ID NO: 185714 - DNA, 300 bp, Arabidopsis thaliana landsberg
gaccaaaaggttttgcttgtggctgatgatgtttataagcttgaacagttagatgctcttgcagaggatttcaacgggtttggtccgggaagtgttgttatcatcactacacaagacaagcatctgtttgtttctgctggtataaagcttgtctacgaagtggagcttttgaaattccagaaagtttgtgaactcttccgacaattcgcctttaaaaagagagacatttctgctgcggtcaagttggtttactatagggcaacaaatttgttaggttgtctaagtggtagatctggttag

SEQ ID NO: 185715 - DNA, 453 bp, Arabidopsis thaliana landsberg
atgagccggcatgccatgcgggtcgccaacctcgacgagcgggtgcacatcgacatcgtacggaacctcgagcgcggccaggcgtggcccgagcgcaccgcgccgccgcgcgagctcgagtgccaagcgcgcttcgggcacgctgccgacgcactcgaacggggtgtgatcgccgaggccgagcaggtcgcgaaagtggccggcgttgccaggccgctcgccgaaattatcgccgaacgtcgcgtcgacgacgtgcgctggcaggtgcgcggcgaactgcagccagacatacgcacacttcgcgcactcgccgcaccacggcttcttgatgttgcaagagtgcgtgagcggagcgagctcggcatcgcgcgcgagcaattcgaagatgacctcgtcgtgaatcggtgcgaggacgctgaagtagcggacgttggcgaggagctgcgactgcac

SEQ ID NO: 185716 - DNA, 103 bp, Arabidopsis thaliana landsberg
ttgggctattcgcgtgtacaatacacgcgttcggtcggagcttgaagttgttgatgaagacactttgtcttcagtctttttcccttgtcgtaacactgtctga

SEQ ID NO: 185717 - DNA, 306 bp, Arabidopsis thaliana landsberg
tacccccctggggccccggaccccgagccaggccccacacctgcggggcgcggggcccagtcttcaccgaaccccactggacactcttcttcgacgggtctgcccgccaagagacgtctggcgcaggagtggtcctcgtcggcccagacggggaccagttgaagtatgtggtacgcctcgagttcaaagccaccaacaacatggcagaacatgaggcactgatcttcggcctatctacggccctatccctaggggtccgccagctccttgtgaagggggactctcagctaatcatcaagcagaccc

SEQ ID NO: 185718 - DNA, 865 bp, Arabidopsis thaliana landsberg
atggcgcgtgaaagctcttcttctaaagatccaaatctgtggaagcaaccaaagtaagagataattaaataaatctccacaatccgaaacacgaggataataaaattaaaaataacgcacaactggacccagctttgatggcaataccgctcaattaaccatttcccaatttctaaatgtagaatttattttatatcgtttcaatttttacatcgttttttatagacaaaccaaaccaaaattcgttcataaccgaacctttcactaatgtaagcaaacaatgtaacataaagcatagcaaaccaaatcaaaccgatagagtattgtctctaaactcgcaacaaaccaaaataaaatcaggttgaaccgaccacatttcaacatttttgtctactaaatccatcatcactcatatatatatatatacacacacacagttacacatatccacattccttacttgttcattattctctcagactcatcattcatctctctctttctttcaatggaagaaactctagccactcccgacgccacgagacgctctctgtcaccgtcatgctcagccaccgtgaaatcacgcgccgctggtttcgagcgcagaaccaaacggagattgtcagagactaacgcaagcgtacgtgaagaccgagaagaagcagaagaagaagaagatgaggtcaaggaaaagattgaggcgttgcagaggattatccccggaggagcggcgcttggtgtggacgcgctcttcgaagagacagctggttacattctgtctctacaatgtcagatcaaaaccattaaagtccttacttcgtttcttcaacgcatagatcaagaagacatgaagttcggaggttga

SEQ ID NO: 185719 - DNA, 229 bp, Arabidopsis thaliana landsberg
atgctgctggcgatcctcggcctggtgcttgtccactaccaccagaccggctcgatcagcttcgatcacatggtgctgctgaagcccgtgatgtcgccgctggtccagatggtgctgatgctcggcttcttcgtcgcgttcgcggtcaacacgccgatggtgccgctgcattcctggctgccggacgcgcattcgcaggcgccgaccgccggttcggtcgttctcgccg

SEQ ID NO: 185720 - DNA, 84 bp, Arabidopsis thaliana landsberg
atgttagtgcaaaaaagtcttgtgacacctgatgtaacaagtaccaaccgacgtcgtttaatttatccatcagaaacatcacag

SEQ ID NO: 185721 - DNA, 99 bp, Arabidopsis thaliana landsberg
atgccttctttgtacagccgcctttcgggtgcccacgagatgatgagggctaaagaaatcagagtagacctccatgaaaaaattctcaaccacgtcgag

SEQ ID NO: 185722 - DNA, 2093 bp, Arabidopsis thaliana landsberg
atgtgtgtagatatattcatcaggtttaaaggagacgatggaaattttaagaaatgtctgaatgatgatgtaagaggtatgctaagcttctatgaagcgtcacactttgggacaacgacagaagatatccttgaagaagcaatgagtttcacacaaaaacacttggagttatttttggtaggcgagaaagccaaacattatccacacatcaccaagctcatacaagctgctctttatatacctcagaatttcaatttggaaatattggtggcaagggaatatattgacttctacgaactagagactgatcacaatgaaatgttactaaagttggccaaactcaactttaggttcctccagctgcaatacattcaagatctgaaaacactaaccacgtatgtatattcatttatatagatgcttcatatatatgtatattttctgaaagttttatcgattaggtgtatgtatgcagatggtggaaggagctagatttagtatctaagataccagtttacttcagagagagattggcagagccttatttctgggcgactgggatttattacgagccacaatattcagctgcacgaatcatgctggccaaatccatcattttagtggacattgtggacaacacttttgatgtatatggtactattgatgaagttaagagcctcgttcaagccattgaaaggtacgaactatatacgatcatttgttaggtgctttgtaatcacactcatggtataaacgaaaaacgaaaaaagttacaaagtggaatgaatttaaaggattaaaaagtcatatttaaaggatataaaagctcaacatctaggtctctttatattgttggaatgttggtgttctatttaattataaatcattagatgtgatccctaataattgtatggatccaatattaagtaaaggtgggactccgacgccgtagatgtcctaccggactatctcaaagtcgtcttcagaacaacgtttgacttgtttaaagaacttcgaagaatatgtgagctctgaagcaagatcttttactatgcaatacgcgtatgagcaggtactggttcttcatctatttcttaaatctaagccaaactattgcatctataaaaatagttactatacaactaatggtttaaaatgtctccaaacaacaccattctcttatatgagtaaaacaataaggagagcatttggatgttgggaatgttcatttcctacgtggtattctttcctagatcatttagctccacaaattcagccaaaaaataaaatatatatctctatattaaacgaagaattgaaggttatatatagttcgtatttaatataatgttttgcagctaaggatactcatgaaaggatacctgcaagaagccgaatggtcaaatagagggcacctgccaagccatgaagaatacatagaggtcggggtagcttcaaccgcaggtgaagtgctgctagcaatgaccttcatccctatgggagatgctgcaggagtcggagtttatgaatggctgaggtcaagaccaaaactgacccatgctctttttgtgaaatctcgtctcagagatgatattgctacctataaggtaacagaagtcctatatatatatatatatatatatatatatatatatatatatgtatattttaaatgcaaattataaaaataaaatgctaataaatcttatcgtatagtatttcacgtcataaactactttttagttatttgattgataattttgacatgatcgaaatatatgatgaatttgcatcaggaggagatgaagagaggagatgtttgtaatgggatcacctgttatacgaagcaacacaaagtaagtgaggaagaagcgtgtattgagtttgagaaaaagactaatcacatgtctaaggtcatgaacgaagagttcttgaaggcagccaaatttataccgcttcatattctaaggcctgttttgaattacggacgcttagcagatgtgtgctataagtatggagatgggtacaccttcgctggagagaagatcaaagattatatcacctctttgtatgtcgatctcatcactctttaa

SEQ ID NO: 185723 - DNA, 530 bp, Arabidopsis thaliana landsberg
atgcaagtattggcgggtgctgtctggctgtttgcctttgtttgcctgctgacgcatctgccggtgccgaaatatcgctggcatgacgaactggctatccggcagcagctggagcagctcaacctggtcgatcagcaagcccagcatcactggcagcagattgtgctggaaggcagggcaggaagtgccagttttgatgagttggctgcgcaaatggatgcacaggtggtagcgccttatgcgcaaacttttgaggccctgtctgccttgccggatgaccctcagcttccttctgcaggcttgatggggcaggccagggtgtatgccttgaagcgcagcgaggcgggcaaggcggcggcagaaaagttgcggaatatgccatttatgccacatcagtccccggagtaaatacaggcccggtcatcacgactcgccggaatttcgggtgttcagactcctcgggtcttgttgctggccagacgaatcagtatatcggcctcggcgctaccatcgatttcctgcataagctg

SEQ ID NO: 185724 - DNA, 53 bp, Arabidopsis thaliana landsberg
aatccagtgccgacgttgaggaggagcttatggaacaaatgttccacgtctaa

SEQ ID NO: 185725 - DNA, 58 bp, Arabidopsis thaliana landsberg
atggctctagatatctgcgtgaaggttgccgtcggtgctcctgatgttctcggcgact

SEQ ID NO: 185726 - DNA, 78 bp, Arabidopsis thaliana landsberg
atggagcacttacctatacacttaccagatgaagccgagcttggcggtccaattcgatatagatggatgtatcctttt

SEQ ID NO: 185727 - DNA, 215 bp, Arabidopsis thaliana landsberg
atgtcgccggaatcttggaaagaccagcttagtctggtttcggctgatgattatcggatcatgggtcgaaatcggatccccaatgccgtcacgaagctttccggtctcgaaaccgacgatcctaacggcggcgcgtgggttacgaaaccgaaacgaatcgtggtttcgaatcagcttcctcttcgtgctcacagagacatttcgtcgaacaagtg

SEQ ID NO: 185728 - DNA, 327 bp, Arabidopsis thaliana landsberg
atgcatcaaggcggttgcaagaaacacgcctccggcgaattgtgtaccaagaaccaaaaacccttggctccatttcaagaaataaggagatacaccgcttatgaacgtgaggacaaagatgatgacaagacatgcgatcttgacggagattaaggatttggatttgagatcggaactcttaacgtgcggagcctcatcgtcgtcgtggtctcctccggttccatgggagagacaagggacgaccaagacaagaaagaggaagaagaagacaagagaacgagacatttgaatgttcagtgggtttgtgtgtctgaaattcgaagttaa

SEQ ID NO: 185729 - DNA, 58 bp, Arabidopsis thaliana landsberg
atgagcataatatatgatgcttgcaatttggaaaaacgccgttcaactggaaattcag

SEQ ID NO: 185730 - DNA, 2032 bp, Arabidopsis thaliana landsberg
atgcacacatcggcggaattcatcaatctgaaacccaacatgtggaagaagaatcctgttcgggcctcgggttcttgctgtctgggcagcagcagtggtgatgaaatctctcggaaaaggaagcttccgattctcctcttcgacgtcatggacaccatcgtccgtgaccccttttaccaggacgttccggccttcttcgggtgagaaagtgaaatcctcgaatttatttctcgattcatcaatgataaactgaggttgtggatcagaatgccaatgaagcaactactagagtgcaagcacccgatggtctggatcgaatttgaaaagggtttgattgatgaggtgaggtaccaccactctttctttctttttttcttcatattatctcctctgacttttggttttaggaggagcttgctagaaacttctttatagatgggagggattttgatttggaaggtgagattgccatatagatagataggtaaatacacagagagagggtttcctcgtacctatttcaatcctctttattgcagggcttaaggagtgcatgaggtcaggttactcctacttagatggcatgcaagagctccttcaaactttggcagctgacgacttcgagattcatgctttcactaactatcccatctggtttccatcccttgcctttcactctttgaaacggagcttcatgtctctttgtttactcttgtcgtgtttccataggtacaacattatcgaagacaagttaaagctttctgcctacttatcatggacgttttgctcctgtattgctggtacatcacacatctcttgcctctttttactacttattgcttgtcagatccaaaccattcctactacatacaaagctcctcatgtgttatatctttcagggaagagaaagcctgatccagagttctacctcgaggttgtgggacacctcggagttgaaccttgcgactgtatattcattgatgacaggttataacatgaactcaatgcctttataacttaaaagaaagaaaccattttgatctgaaggagtgtctgatacgcaggccaaccaacgtcaagtgtgctatagagatagggatgggtgggttatgctttgagaatgcagattcgctcgctaaggatctctcagatctagggatcaacgtctctgtacccaaattatgattgtaatttcatcacaacgcatcatcttaaatgtattgcatcagagaaatactcaaaagagaaatacattgtttttgggattgcaagtagagtctttgttggattatataaagcagcgaaaatattgagactagggagtggagagcacaaggacagtaaagaaggaagaggaagcgaggaagatgaaggagaggaagactaagaggagagacagggcgacatgattgcagaaagaagaaagggtcttgcagaagtcggggagaggagtgtgcctgatgccggttttgttgaggttggtaactccggaaccggctgatccagcgctcatcatcaaataacaaaagagctgcgtgcacacagtaaatcaaatgggttacattcggaagaaaagggaatggagaaaaggagacgaggaacctgatcggaggtgaagcaaagccaagcttgcaagcgggaaggcgtgatgggagatccggtgacgagtctgtaaacaccgaggcagagctgtaacagggagtagagcacggtccctgcgcatgcccccaccacaaaccttaacaccaaacaactctttcttagtgagatgaatgaaatatacactatatataatcacaaagtttaaaactagctaggacacacaataatgtcatgttgttgtttggttcacggatgtgtttctgttcaccggaatatctgtcatccgaacacacacattctgttttgctgcttttcttttattataatatatatatatgcattcagataaaaagaaaattctaattgctatgtctgtccctaattataatgcacgtaagaagaagaagacgaagaagaagaagactgactg

SEQ ID NO: 185731 - DNA, 402 bp, Arabidopsis thaliana landsberg
cctgccggcccaggtgttcgaccccaagggctcggagctgtccaaggacatcccgctgatctcctcgaccaccgagaccgagagcgcctcctggggcgcccccgtgaccccgctggacgacggccagctgaccaccacgatcaagaacgccacccgcatccccgacgcggacgtcgcgaccctgatcggcgccttcaaggcggcctatccgggcaaggacaacatgtacctggcccagctgatcgtcagccagtggtcgttcaacgacaacgtcctgacccaggccgagaagaaggccgagcaggccaaggccggcggcgcgccggactacttcttctacttcgcccaccagcccgacgtgcgcggtggggtgctgcacgcgccgcacacgttcgagatccc

SEQ ID NO: 185732 - DNA, 131 bp, Arabidopsis thaliana landsberg
atcctttctatgccggagttgaagcactagatagaagaaacagagacgtccaacaatccatcgaatccgggttattaattggaggtaaaagtaatggttttgcctatcggcggccgacagatcggcggtga

SEQ ID NO: 185733 - DNA, 141 bp, Arabidopsis thaliana landsberg
atgagcaacgaagaagatgaagaagaagaagaagaagagaagcatgatatgagtgaagaagatgataaagaagaagaagacgaacaagaagaagaagagaagaccaagaagaagaagagaggacctggatgtttctcatgg

SEQ ID NO: 185734 - DNA, 1334 bp, Arabidopsis thaliana landsberg
atgacggtgcttgtggaggttagagaatacgacccaagtaaagacttagccactgtagaagatgttgaacggcggtgcgaagttggcccagccggaaaactttctctcttcaccgatctcttaggtgaccctatttgccgtgtccgacattcaccttcttacctcatgctggtaaattactcataacacctaaatcttaaaatatataaaaaaatacagttttctaaatttaagttgttaaccaaaatatattttatcactaattagtgagaaatctaatttcttttcataatgacgaagcaaatatacgaattattaacttacaaaaaaaagattgtgtttgtttatcaaaataaaaaatggtttgttttgttttgttttatagttaattaattaaaaaatgataagtgaaacgacattcaccttcttgcctcatgctggttacaactcaaaccgaagatattaaaaacccgtttctttatataaagagcaattacatgaactaactaacccaaaagctttattattattattattattattattattattattttattgttattattattgttaactattaaataaaaagaaggttttaacttaaaattggaatttgtaataggtggctgagattggtccgaaagagaagaaagagttagttggaatgattcggggatgtatcaaaaccgttacatgtggtatcaccaccaaaagacttgatttaactcataacaaatcccaaaacgatgtcgttattaccaaaccactttacactaaactcgcttacattttgggtctccgcgtttctcctacacaccggtacgttttaattaaatctcacgcatttaacgctaaaccaatcacgagtaattaacgcttaaactaatcacgtttttttttaattaattacttcaggagacaagggatagggtttaagctcgtgaaggctatggaagattggtttagtcaaaacggggctgaatattcctattttgcaactgaaaacgacaatcacgcttccgtcaatcttttcaccggaaaatgtggttacgccgagtttcgtacaccgtctattttggttacccggtttacgcacaccgggtcaacatttctcgtcgggttaccgtaattaagcttgaaccgtctgatgctgagttactataccggcttcggtttagcacaaccgagtttttccctcgcgacattgactctgttttgaataacaaactctcgttaggaacattcgtcgcggttccacgtggcagttgttacggatccgggtctaggtcatggcccggttcggctaagttcttggagtatcctccggactc

SEQ ID NO: 185735 - DNA, 343 bp, Arabidopsis thaliana landsberg
ctgggcaactaccacgtgggcgtagtgctggactacggcgtggaagcaatggaaggtgaagacagctacgatgcggccgttcctgaatttatacgcgctatccgctatgccgcttcccggcccgatataccttttattgccatcaaaataacgggcttcgccaggtttgagctgctggaaaaagtgcatcgcggagataccctgacagcagcggaaacgcaggaatatacccgtgtgcgtaaccgcatatttgccattgcggaagccggcgccgtgcataacgtagccatcctggtagatgccgaggaatcatggatacaaaacccggtggatgcgcaggccg

SEQ ID NO: 185736 - DNA, 421 bp, Arabidopsis thaliana landsberg
atttgaaaaaaggaaacacatttattcttcccctgaagatacaaatcgatttcgaggatcggaggtatctagggttcttctgtatatcaatatttttctctaataatcagctgaggttggtttgctcgtcctttagtttttttcccgcgttatattagttacaaatcagagaatccgttagttagtgattcgccattaccagacaccggaatctaacccaaagaaagacacgaaattgatcggcggtgtaagcttgtcgtcgggaattccactaaaccgagaccgaagcggacaaaactataccggccaaaagttccttatgcttgcttgttggagaatcctgcagatttgtgacgtctctcgccttaattctggtaaaacttattgtcttcctgttttgttctggattgatgtagattga

SEQ ID NO: 185737 - DNA, 101 bp, Arabidopsis thaliana landsberg
gcataagggtcacccagatcttaagttaatcgatgcagtcgccagtaaaagcattagattgggaaaaatcgagatcggaaaaggagaaagagagcaaagag

SEQ ID NO: 185738 - DNA, 114 bp, Arabidopsis thaliana landsberg
atgtgttttaataacattgaaactggtgatgaagtggaaaccgagaggcaagtgtttggttcatctgaagaagatgaatttcgagttgaagatactgctagaaataccaacaat

SEQ ID NO: 185739 - DNA, 2173 bp, Arabidopsis thaliana landsberg
  unsure (1)..(2173): unsure at all n locations
atgaacctgcaatttcattctaattctacacaagatgcaaatctcaacttaaattcacttttaaaacttgttattattgtaaattttttgaatagcacagttggaagtaaaaatccaccgtaccagtgtaccggtaacgtggaagtataaaccaattcgccaatttctttcttcctatcacaannnnnnnnnnnnnnnnnnnnnnnnnngttagaatgctgagttataccgggttattaagataacctttgttttcgttaaccgaacaaacgcgactgagtttcactggaaaaaaaaaaaaaaaaagaagcttctttagcttttgtgacgaataggagggaactgagttttaggttcgtcttgatacggcttactctgtgaatcgagaagaaattgaattcgtttttttcgtctttctctgcaaattaacccatttgactgtttgtagtttctttcgcagatttataaagttggtcttcttctcttctaatcggatcgattctgcttccggttaaccggttttgttccccggcgacaatcagcaatctcctccccggccaatgatatacacgttgacgagaggttcgcttctcggctctacctgtaagctacgctactcttctttattttcttatctgagcacagctgcgctgagattgggttttgaaaaccctactaatggaaatccgatggataattcttcgcatcacattggttatgtaaatgggtttaacggtggagaacaatcgcttggtgggtttcagcagaattcatatgagcagagtttaaaccctgttcctgggcagaatccgacgaataggttttatcaaaacggatacaatcggaatcagagttatggggaacatagtgaaattattaatcagagaaatcaaaattggcaaagtagtgatggttgttcctcgtatggaactactggaaatggagttccacaagagaataatactggtgggaatcattttcagcaagatcatagtggtcatagctcgttggacgaattggattcgatttgcagagaagggaaggttaaaaaagctgttgaaattattaaatcatgaagaaatgagggttatgttgtggatttacctagactgttttggatagcacagctttgtggagatgcacaagctttcaagaagcccaagttgttcatgagtttattacttcttcggttgggatttcagatatcagcgcttgcaactcgataatcgaaatgtactctggttgtggttctgtggaagatgcattaaccgttttcaatagtatgcctgagagaaacttggagacttggtgtggtgttataaggtgttttgcaaagaatgggcaaggggaagacgccattgatacgttctctcggtttaaacaagaaggaaacaaacctgatggtgaaatgtttaaagagatcttctttgcgtgtggtgttcttggtgacatgaacgagggactgttgcactttgagtccatgtacaaagagtatggaattatcccttgtatggaacattacgtgagcctcgttaaaatgttggcggagcctggttatttagatgaagccttgagatttgttgaatcgatggaaccaaatgtagatttgtgggaaaccctgatgaatctatcacgggttcatggggatttaattcttggcgaccggtgtcaagatatggttgagcagcttgatgcaagtagactgaacaaagagtcaaaggcgggtcttgtacctgtgaaatcatcagacctagtaaaagagaaattacaaagaatggccaaagggccaaattatgggattcgatatatggcagctggagatatttctcgtccagaaaacagagagttgtatatggcattgaagagtttaaaggagcatatgatagaaattggttatgtacctctatctaaacttgcattgcacgacgtggaccaagagagcaaagacgaaaaccttttcaatcataacgagagattcgctttcatctcgacatttcttgacactcctgcgcgttcattaatacgagtaatgaaaaatctacgtgtatgcgcagattgccataacgcatttgagttgatgtcaaagatagttggaagagagttattttcgcaagatgcaaagaggtttcaccatatgaaagatggtgtttgctcctgtagagagtattggtaa

SEQ ID NO: 185740 - DNA, 22 bp, Arabidopsis thaliana landsberg
atgacgcgacgccataccagag

SEQ ID NO: 185741 - DNA, 117 bp, Arabidopsis thaliana landsberg
atggttgatataaccatcctcataatagatgcctgcttagacaaaaccgataccaccaaaaaaccgagaaaaactgaccgagcctcaaccggaatccggacttgcttgctcctataa

SEQ ID NO: 185742 - DNA, 739 bp, Arabidopsis thaliana landsberg
gcattgagaacactcttcaacatcgctcacaggttgcatgacgtgttgggcccatcatgggtgttggtgagtgttttgcttcaactatgttcaagtaatctatctcttgataacgaaaatcctaaatgaatacaggttcttgaaactctggcagccctagatcgagctattcattctcctcatgcaactacccaggtaaatttggcaaaaccccatgcaggattctgtctttttacttgtataatacaacttgatatttattatagttaggttatcactttatctttttctctgatatctgaatgctcttacaaagcttatagggcaatataatattatcttttataggaggttgcaactgcagtcccaaagcttaccagagagccttctaagcagtacgctgattttagcattctatcctccttaaattctcaggtaagccatatcaattttcttctatagtctatgcccttggattgctcttgttaaatcacttcttgcaaactggatcctgaacatctgattcttgactcattgctttcatcttgccagctgtttgagagctcagcgctgatgcaagtgtcttctgttaaatcacttctttctgcactccatatgttgtcccatcaatccatgacagaaacttcaggcagtgtttcatcagcttcaagtaaacaaattgggagcatcagtttttcggtggacagaatgatatctatactcgtaaataatcttcaca

SEQ ID NO: 185743 - DNA, 345 bp, Arabidopsis thaliana landsberg
atgatctctttcgaaagccatctagattacatctatgggactcagaacttagaggatttttcagagaaagtcattgaaaacattctctatctcgatgaacaagaagaagaagaggaagatgttaaaggatgtagtagtaatgctgctaagtttgttctgtcctctggaagatggactgttaaccaaggtaaagaaaaccggattttggtttgaccgtattgattcaatgaaccggggattcactaacttggtttcatgtgtacagatgattctactctacatgagacaaagaagcctaccattgatcaagaatttgaacaatacttctcaacgctaatgctgtga

SEQ ID NO: 185744 - DNA, 757 bp, Arabidopsis thaliana landsberg
atggatctggtcaacaagatggttttgttccatgtgatggcttcgtctagtgagaaggttcgatggaagcagaacgttttgtaagtgatagatgtagtgtggcatcgccaaaggtgtagctcgatgtgattattgatgcttagcaagattggagattagttcggcgatttgatgaggattactttgtagcttagtgaagaacgctcaatcgtttccttcggggatgggaatgctttgtagttcgctgaggactgaacgctccgtattttagagctagaaacacttgttggttctgcgatgaacgcttggtaagtaacgctcgcctgttaggcaaggattgaacgttggaggtttttgagctaggaacgtttgacagttttgttaagaacgcctggtgagtaatgctctgcaaggaacgcttggctgggaacgcttgcttagtggatatagatttacggagattgacattaggtttttgtggatccgtgtcgagtagcgaggaagtaagtccgcttagcacaatcgtcgaaatcgatcagtgtgaatgttggttgattttgcgtggtaccaaacttggttggcattacgatggattgttatggccgtgagtgcggcaaacttgttttggcgagcgaggagatgacgtaagactgagtgatgatgttgattttgcggatcttcttctaggcatggggagatcggcacgactttaagttatgtcgtggatcgtgtctttgtcaagcgttttaggaaatga

SEQ ID NO: 185745 - DNA, 65 bp, Arabidopsis thaliana landsberg
aaaacacggtcaatggcggagaaaagaaaaacgccgatatagaacaagctcaaacgcaccacaag

SEQ ID NO: 185746 - DNA, 236 bp, Arabidopsis thaliana landsberg
atggtggtcatccgctccagcccggtgagcagggccgtggccatgtggaaggcgtctgtgttcacggactccggatcgccctccatttggaagacgagcaggacgagcaccggccgtgagcccgaatggcgcatgcgcagcatccgttcgtcgccattgaccgagaaggtgttgcgcaagtgcagggggcgcgaatgcctgcgccagaaaacatactatgcgccgacgaaatcccg

SEQ ID NO: 185747 - DNA, 223 bp, Arabidopsis thaliana landsberg
atgcgaatccaaaataggaaagaagtgactcaacgactcttaagtgaggtaaggtgtagcataactcgggtggggaaccttatggaaagtttggagtgtcttcttgattcccttacacggatcattaataagggtaatgtccctttccttatttggcatcgaataatcttgtacgaaaagtacttcagcaagtccttcagggagtccttcagcgaaaccttcg

SEQ ID NO: 185748 - DNA, 116 bp, Arabidopsis thaliana landsberg
gaatgcaaggaaacattactctcgctgccgcagatctgatacaatctggagttgtagatcgtttcattggccttattcgcgatgaagaattccctaggcttcaagttagaagatag

SEQ ID NO: 185749 - DNA, 69 bp, Arabidopsis thaliana landsberg
gttccgcagtccgtatccgcaaaagcattcaagcataattttgaatcagctgagtacattaaaccttga

SEQ ID NO: 185750 - DNA, 521 bp, Arabidopsis thaliana landsberg
atggctaatcttccttcttttgatgatccatcagctccaaacaaaccaaaatcaggtaataatactaatctcttagattctaaaaaactcacattttgtttgctcacttagtaaatctgcagtttttcgtctgttcttgttatgggtttgctttaatttgtggggttagggtttgttaaaggcttaaagcagagaaaaagttataaagtctcttcctttttggaattaaactcttgtttagattgatttgccttttcggggtatgttttgttgtgtggttacagtaaatggggaccaagtggatcaggaaatccaaaatttcaaagaatttgaactaaatgagttgaggaaagctaccaatgggtttagtcctagctgcattgtctctgaaggtggagagaaagctcctaatgtcgttcacagagggaagcttgaagggaatcatcttgtagctatcaagcgattctctaggcaatcttggcctgatgctcaccagtttgtggtacgatatctgagaaaag

SEQ ID NO: 185751 - DNA, 890 bp, Arabidopsis thaliana landsberg
atgaaagttcatacaagttggaactatgaaaatataaagcaagaaaagatagaggctcatgagtttttcaaggaaattgaaaaatctgttcaaaccatagcggattcgaccatgaagacgggcttcgcgaaatcctcgaccaacaagtggtcaaaagtggctcgtgcggataacacataggagttcttagaaacgttctccacataggaggttattagataaggaaggttgcagaagctttggtaaccacctatctttgagacggggtcaaaatgtcgttctccttcaaactcttaaaacttttcaaaatagccatgaatgtgctgaaacctcttaaggagaataccataagaaataatgcccggatgatccaccaatcgtatatgaaagataacatttgcttaagctctggattcaaaggcaacgaatataacaagtagcggatgtttcggtaatcaccgcttcgtaaagacgggatcataatgccgaattccttcaagttttaagtttcataagcattggttccattactcaaatccctagttgtaactaaaggaagggttctcaaaagatttttatacccaactagtaacaaatgtgcgttatgtccgaattgatgtcctagctcaattgaatacatcaaacaacagaaagattgactaagattgggtaaaaaggagtttaaaacagacctgaatatttgctagataaggcttggatcacaacatttgaagttgggctttggatactgtaatgtgacgaaaaatgcagtgcccacctgaagaaaacctaatttccctttggttggcagattacggttctcagagcagctgccgtacggagaggctgaagggttttgcggtggctcgagcaactctggtggacgggag

SEQ ID NO: 185752 - DNA, 111 bp, Arabidopsis thaliana landsberg
atcatcgcagtctttaggcaaaaagaactctaagacgaaatcagcagagcccgtgtggatgcaccgcaggcgaattgcaaccgcgccatgtaaaccgtacatattagcatg

SEQ ID NO: 185753 - DNA, 185 bp, Arabidopsis thaliana landsberg
gatacactcttgcgtatgaagattcttgttcgacagatgaagaatgcagaagaaactgcctatgtgatgtagcatattgcgacaaaagccgtgataagtgcgattatggatttatgaatagagttgatgtccgttttcccaaacatccttatatttcaaaaaataaagatggtagtggtagatga

SEQ ID NO: 185754 - DNA, 804 bp, Arabidopsis thaliana landsberg
atctcagttcggaatacaaacgccaggcggttaatgaactagagaccgaggttacttgctggtacaatagcttttgcaagttagtaaattcccagcgagaatacgtgaaaacactctgtacgtggatccaacttactgatcgcctctctaacgaagacaaccaaagaagtagcttgcctgttgctgctcgtaagctctgcaaagagtggcagcttgtatttgaaaagcttcctgataaggttcttctatcacttgcagcttatttgtattattctagttcatggctctatgaaagccatctttaatacgtgcaaatgcaactgttttgggtgtgcgtaggtaacttcagaggccattaaaagctttctgatgtcaattaaatctattattcatcaacaagctgaggaatacaacctgcgtaggaaatgcaataaacttgagaggaggcttgagaaagagctaatttcactggctgagattgaaagaaggctcgaggggattttagcaatggaagaggaggaagtaagctcaacgagtttgggctctaagcatccgttgtcaatcaaacaagccaagatcgaagccttgagaaaacgagtggatattgagaaaactaagtacttaaactcggtcgaggttagtaagagaatgacactagacaacctcaaatcaagccttcccaatgtctttcagatgttgactgctctagctaatgtctttgccaatgggtttgaatccgttaatggccaaaccggtacagatgtttccgacacatcccaacattccgatgaatctcaaccctaa

SEQ ID NO: 185755 - DNA, 2409 bp, Arabidopsis thaliana landsberg
atgaagcctactgcagtatcttcagctggtccagatatgcatgctaaacctgaaattactgatctacaggctttgaatcatatggttggtacatgcagtgagtttcctgcatcagaacagctttctccacttggcgagaagagtgaagaagcatcaatggaaaatgatgaatatatgaaaacacccacggacagagatacacctgctcaaatacaagatgctgaagccttgggtctctttaagtggtttgcctcatctcaggctgcagaggacataaactcagatgatgagattctccgggaaactatccttagtcctcttttgcctttagcgtctattaacaaggttcttgaaatggctagtacagattatgtgagccaatcccaaaaggaatgtcaagacattcttgattctcaggaaaatcttccagactttgggagttcgactaagagagctttacctagtaatcctgatagccagaatcttagaacttcatccgacaaacaatctcttgaaatagaagtcgctagtgatgttccagatagctccacttcaaatggagcaagcgaaaattcattccggagatacagaaagagtgatttacatacgagtgaagtaatggagtataagaacaggagcttctctaagagcaacaagcctagcaactcagtatggggacctttaccttttacactgaccaaaaatcttcagaaggactttgactgtacaaatgctagtgataaacttggtttaacaaagattagttcttaccccatgaatgagatgacagacaattatattgttccagtcaaagaacatcaagcagatgtttgtaatacaattgacagaaacgttttggctggatgttctctgcgggacttgatgagaaaaaaacggttatgccatggagaatcgcctgtttcacagcatatgaagtctaggaaggttagagattcccgacacggggaaaaaaatgagtgcaccttgagatgtgaggccaaaaaacaaggtcctgctctttctgcagaatttagcgaatttgtttgtggcgatactccaaatttatctcctatagatgctggaaattgcgagtgtaatatatccactgagtcatctgaacttcattctgttgatagatgttcagctaaagagacagcaagtcaaaacagtgatgaagttttaaggaatttgtcatctaccactgttccatttggtaaggatccacaaactgtggaatcaggaacactagtgtctagcaatatacatgttgggattgaaatagatagtgtccaaaaatcggggagggagcaagagtcaactgccaatgaaactgatgagacgggaagattaatatgcctaaccttaagcaagaagcctccttctctcgattgcctaagtgctggactgcaggattctgcacattctcatgaaattcatgccagggaaaaacagcatgatgaatatggtacctttacccatcttgttctggttctagtttctgccacttctacagttaatgcaaatgcggttgaaatataaatttataaaactgaagttaggtcaacttaagttcttgcagaacttctctctggctgtgctctttatttatttttacttcgacctgagatacttctgacatcctgtttgttttttgttctcttggaagagggaaattccaacgacatcccgttttttcccttggaggacaacaaggaggaaaagaaacactttttccaaggaacttcccttggtattcccttgcatcatctcaatgacggctccaatctttacctactgacccctgccttttcacccccttctgtggattctgttttacaatggatatcgaatgacaaaggtattgtgtagagttagtcggaagtcactggactgcctaatttaattcaatttaacatattctcaaagtttcaatatacatgcttaaagcgttttcccttacgaaaatggtactgtccctgattaagatattcatttcattaaaagtaagtgaaaatgataacttttgttttaaacttttgaatttttccacgtccaggagactctaatattgattcagaaaaacaaccattacgagataatcataatgatcgtggagcaagtttcactgatcttgcttctgcatctaatgtggtgtctgtgtctgagcacgtggagcagcataataacctttttgtgaattcagaatcaaatgcttatacagagtcggagatagatctgaaacccaaaggaacgtttcttaatcttaacttgcaggccagtgtttcccaagagctgtctcagatttcaggccctgatgggaaatctgggcccactcccttaagtcaaatgggattccgagatcctgcgagcatgggtgctgggcaacagcttacaattctgagtatagag

SEQ ID NO: 185756 - DNA, 1520 bp, Arabidopsis thaliana landsberg
atgccggtgaatgatgttacttttgaaactaatattgaagcggtgcgtaatggatctgtagttaatttcctgtgagcttttaatgcagtgtgccataaaaatggatgattgggatacttttgttgagattaataaatgatagggttctctatgtaaaagaccaaaagaaatgagataaataagcaatatagatacattatgtagccgacttcgaatcgggtgagaagaaaaaggagggaaaaaatctggttggttgggattgagattctggatgaccttagtatgaagcgtgtgggttccaccaagaaaaagcggccgccgcagctaatcttgtttcacacgtgtctctcagtattttatttttggttaagatttaaaatgaattattattcccactcgaatattataatgctaatatatttttaattaagatgtgatcctgatatccatatctgcaactaacctgtattttattaattctacacatgacccatcacccatgtgtataattagtatgcctatttctctgcatattcttcttctttttattttttttaatgtaaaaattaatcttattgtctaaagtttctggtattgaaaaattgtgggaggtggggtttctttgggacaagatgatgagatgaggggccaaaatgaaattacctcaatttacggagtccttcacgtaaacaaataaggctagtaaatatataataaatcaatgaaatgaaaagaaagacagtgagaatcaaactttatcggacggtggagatgcacgtgaagacaacccaatatcccgacataaacctcgtcaacacggaatttacatcccatgccactttcacacgcgccatatgctcaaccacacacatcttctgtaaaaattccggttttcacttaagaaatatgttaacagagtcaatcgaaccggatttttaaggcatattaggtcaattataattggtggacttctacttggataactaccaataggaaaagtaaatattaatttttttattttaagtgattttatcttcatgaactgttacgggcatacaatgttttcctctgcaaaattgtctctcttttaaaaacaggagtttaacttatcaaattaacttctaaaatatacctcaactattctgtctgagtgaaattatttgaatacgataaaagatgcgtaaaaacattctttatttctagatatatatatatatttgtaaacataatttactcgctataaatactctctttgagaggacaaagactttgaaataatactactaaaaagtcttattctcataaatatattattaaaaaaaatgggaatgtgggcgccaccgtctctgattcggtctcttctgaaaaggatgatgatgactcgcgctgcttggccgtcggtgccgcttcactctttttttttttttgcgtagttaataaacatgaaagtgtatgatccagacacgtggataagaatagaatctagccgttggatctacacgagaatcacgaaaggatag

SEQ ID NO: 185757 - DNA, 445 bp, Arabidopsis thaliana landsberg
atggatccaaatgagagcttgtataattcgatcatagggctatcgtcatcttttgatcgcaaggtggtggagtcgtggttgacggtggagtgtgtgagtgacacgtgtactgacttgggatggtatcacatcctggagcagctaggccgcatggatcaggcagaggagagagtgatgaggatgttagaggttgacacgtgtccatggttagtgtcggatgggtcaaaccgggtctgttgggtaaaccgggcctaccggaggatgatgggagctcccgacgtggatgttatcagggtgtggctggtggtggccatggaccttatggaggagatagcatgcatggtggagttatacggtgcggtgacgtgcagggttagggttaggtacgagccgtccacgtggaggaagatgacggtgccgtgtgatgtatggaggataagatcag

SEQ ID NO: 185758 - DNA, 136 bp, Arabidopsis thaliana landsberg
atgcagagtctgagccagatcggtggagtactagctcggatcaccaacgatataccttgcacgctcgacatagagggttaccgacaaatcctcactcggacggcaaatcatctccttctgtcgacctatccagagg

SEQ ID NO: 185759 - DNA, 826 bp, Arabidopsis thaliana landsberg
atgaaatgcttttatgaattaagatcgacgacgaagaaaagatcaaggcgattggtcgaagaatcatcgatagatggacaagctaacgagcttggaaggtacggagttaatgtgtcgaaaacttgttaaaaagagaagatgtaacactcaatttctttgcatgcagtgaattagctggaaacattttgtgtgaaatgtcaatatgagtatcttcaaagattgttaaagactgttgacataactaaagctgcttcgttggaccaattttaacaccaatatttggatatcttggatggttggaattgatggtacggttgatgccaagaggttgcttgggggaactgaaagggaccggtaagttgtgttatttaaatattcgtgagtaaacactaatcttaattccatttacctatcaaactatgacattttcaaaatttatatgcttaaatatatatttttaattaatattatgtaacgtgtacaatttcatcataaatatatgtttttaattaattttatgtaatgtgattttctttataataatgtagtttaaataaaattgttgaactatttgtttactaaaaataaatagaaaaagttcataagtttaaaaagtaaaaagtattattaataaatattaataaaataaagatataatatacttagaatattctttttaaaatagaaaataaaggaaactattggaaatgttttgcttcatttttttcttcaattttgaagaaactttaattttgaaaaatatttgaaggtaaccattgaagatgtccttaatgatatcgtttacgtttgcttttcggagaattga

SEQ ID NO: 185760 - DNA, 95 bp, Arabidopsis thaliana landsberg
atgattgtggactacaaacttacgtatcctagtggaaccactacatcgatgttgattaacagtttccacaacaacactagagctgagcttgcaag

SEQ ID NO: 185761 - DNA, 363 bp, Arabidopsis thaliana landsberg
gcttgcccgcttctatggcgaaattgaaacaggcgctcaatatgcccgaaaccgtggcaacgatcagtcctttcacaagactgaattcctgtaccggagcccttcttctgctcttccggcaattctttttccttacgtataccggcgcggccgcagatgaatatgcctgtgaggcataccagcacgccgagcaataccatacgcccgccgtcactgccgagcatctgcgcaatggtaaccttaccttccgcaccggaaaaataataatagacgggagggatcagcgagccgaatgcagaacagaaacccagtatcaccgagttgccgagcgacatacccaggaaccggacaccgaggccataa

SEQ ID NO: 185762 - DNA, 18 bp, Arabidopsis thaliana landsberg
actgttgaagaaaattag

SEQ ID NO: 185763 - DNA, 114 bp, Arabidopsis thaliana landsberg
gctcctatttccgatttggtattcatcaagcgagcaatgcagacaattcaagccttctggctctggcctgtaccctacgcacgtgttactcgcgactgtctccaattactaaga

SEQ ID NO: 185764 - DNA, 64 bp, Arabidopsis thaliana landsberg
atgaatgtttggggtagcctggaaatagttgatgttacctgtgtgacaacagaaacgatcgaat

SEQ ID NO: 185765 - DNA, 329 bp, Arabidopsis thaliana landsberg
cagcgcgccgccgacagcggtcagtgccctgagcatgcggtcatacacggcggcgtggatgatcacgctgttttccgacgagcaactggtcgcgttgtcgaaaatcttcgagcgcatgatcttttgcgcagcgtcatcgcagtctgcgctttcatcgacgatcaccgcgacgttgccggcgccgacgcccagcgccggcgtaccgctggagtagccggcgcgcacattggcttgcgagccggtgacgacgaccagatcggcctgtttcatcggctccaaactcaccgcctcggtcaccggctgcggcagcatctgaaacagaacattgg

SEQ ID NO: 185766 - DNA, 136 bp, Arabidopsis thaliana landsberg
atgagcatacaacaacatctcccctggcaaactaagccgaaccctaaatcacggccggtagtgacagtcactcagctttcaataaacatgcgaaagtgttcctcctcaaaacaccatcccaatctatcaaaacaag

SEQ ID NO: 185767 - DNA, 43 bp, Arabidopsis thaliana landsberg
ctaacccaaagaaagaagaacaagaagaagaagaagaagagag

SEQ ID NO: 185768 - DNA, 409 bp, Arabidopsis thaliana landsberg
atattatcgaacaaattggctaactgaaaaaagtgatgtatatagtatgggcattgtcctgttagagattatcacaaaccagcctgtgattcagcaagttcgtgaaaagcctcatatagccgaatgggtggggttgatgcttactaaaggagatattaaaagtataatggatccaaagctgaatggggaatatgactcaagttccgtttggaaggctcttgagctagctatgtcatgtgtgaacccctcttcagggggaagaccaaccatgtctcaggttataagtgaacttaaagaatgtcttatttatgagaactcaagaaaagaaggacgatcagaagtagactcaaaaagttccattgaactgtccaccagtttcaccgctgaagtgacccctgatgcacggtaa

SEQ ID NO: 185769 - DNA, 889 bp, Arabidopsis thaliana landsberg
atgaccgtcttgtcatacagaactgggcttcctccatgcgctgtgccagccaactgcaagaaatgtaagtacatattgagccgttctaacgtatctctaacatgcattagatattttgacgtactcacatttgttcatcctttttttcttaaaaattaataatttcacgtctactttttctactgatggtgatgaattgtagatcagcgatttctacatataaactgtggtggagaagaagtatctattagaaactccttgggtaaaataacgtatcaaactgataacagtcgtcaaaccaacgctgcatcaaatcagcagttcgattattggggagtcagtaacacaggtgactttaccgatgataatagtgatcatgatgagtactacaggtcaactaatttaaccctgtctggagactatcctgatctttataagactgcacgtcgatctgctctatctcttgtttattatgcattctgcttggaaaatggaaactacaatgtgaaactacattttatggagattcagttttctgacaaagaagtatacagccgtcttggcagacgcatatttgatgtctatgttcaggtggttaagcatcacttactacttagtaattgtttctttgattataagttgcatggaagattgacgttcatttgctattcgtcatttctcctgccctgttagggaaaattattcttgagggattttaacatcaacaaggaggctaatggaaatatgaagcctgttattaaagaaataaacgcgactgtgaccaatcatatgttggagattcgtttgtattgggcggggaaagggacaaccctcattcctaaaagaggaaattatggtcctcttatctctgcaatctccttgtgtcaca

SEQ ID NO: 185770 - DNA, 790 bp, Arabidopsis thaliana landsberg
  unsure (1)..(790): unsure at all n locations
caaagcattgctcctaatcaacaatgttgtcacgagtcttacaacaaaggttatcgacaacgaacggaaaatctcagttgaggcttccatacctagcaaggaggataacgatttagctgtcacttcttctaaccaagcccaaccactgcccgttactctgactacaacagaagcgatgttagcacaattccttggattgatcaaaactgatcttttttgaaagaaaacgtgacattcggaaaaacaatgagtcttcgaccatagcatatgtcaatgcagtcacacnnnnnnnnnnnnnnnnnnnnnnnnnnnnnnnnnnnnnnnnnnnnnnagcaaaagccccaccttcttcagtcacaaaaaagcttcggtgttgatcgatacactagggggtcgatcgacaccaattgatattgataactctgttatgcctatgtcgagtgaaatcgacaatttcacagaggaggaacttatacacgatagtgtcgatcgacacccacctcaggtcgatcgacacctagctcgttcaaacaatgttcaaacctcagctgaagcaaagttagcaaatcataagattctttttcctaagtaccccaagaaggcgagacaagctttagatgatattaggtgtaaggctatgattgacaaactgattattgagatgcctcttattgaagccattcatctctctcctacaataagaaagtatgccaagacaatggttaccaagaatttgacgaatgagtgtagtgttatgatgatcttagagcaaggcagcgaaatcatttag

SEQ ID NO: 185771 - DNA, 93 bp, Arabidopsis thaliana landsberg
atgtattccagaggcgaaaacacctcggcagacgccttggaagcgctcggtgcctcctcgattattacgacacgagccctatttcggggaaag

SEQ ID NO: 185772 - DNA, 422 bp, Arabidopsis thaliana landsberg
tggaacgcatcggcgtgctgatcaacgctgacatgctggcgcggcaaagcgatgaaatcgctgaaaagctgcgcgacatcgaagcacaggcgttcgagttggcgggcggctcgttcaacttgaattcacccaagcagatcggcgaattgctgtttggcaaactgcaactgcctgtggtcaagaaaaccgccagtggcgcaccttcaaccgatgaagaggtgttgtccaaactggccgaagattaccccctgcctgccaagctgctggaacaccgcagccttgccaagttaaaaagcacttacaccgacaagttgcccaaaatggtgaacgccagaactgggcgagttcacaccaactacgcgcaggccgtggctgtcacgggtcgtctggccagcaacgacccccatttggcaaatatttca

SEQ ID NO: 185773 - DNA, 1253 bp, Arabidopsis thaliana landsberg
atggatctcaagagggctccagcaaaggtaacaaaagctgttgaatctcagaagcgcacttgggataatcgtggtgcgggaccaggccagaatggtcagcagtgtgccacatgtggtaagaggcacagcggggcttgttggagtaatactgggatatgctacaattgtagacaaaatggtcatacatggtcgaattgtccagggaaagacaataattgcaagagatgtgaaaagcctggccattatgcaagggagtgcactacgtttctagttgaagggaatcagtagaacgaaaatgagggggaccaaccactccctaagatacaagctttaagacctcgtgtgtacgctataggagaccaaaggattgatgttgagaaagataaagtttgaaattcaaattccaaggtcgtacaagttcatgttggagtaggcggtctaatcgttttaagtgacgatttcttttaggaattcattctattttttttatattagagtttcagttgttggcttatgcttaaacatttttattcatttttttaatggtcaattgaattgttttaaatttgtgttgggaattaacaaagtttttctaaatgcatgagtggagaatatagtcgaataagaagtattgaattcggggacgatttcactttcagtgggggagaattgtgagacccatctctctaatgaggcccaataacagcccaatttctctaatatcaaaaacctaatcgtgaaagtgtgtgtgcatacgtatgtatatatataggtgcttatatcctcttcttcgttatgccatcacatccttgtatccatatcaaaacctgagagaagcaacaacaatcgttccttgttgtggatcacttgtgagtcagcagcactcgttcatttttgttgtcatgttgtgagccatcactcatcaccatcgatctctacgttcaccggagtcgtgattcgttctcattgtttttgggtaaggaaaggaaaccttaccttatgttgatctcttttcatgacaggccgtgtatgatacaggaaaagggaagagtagctgacgtggaagaatgaaggaagatgattggtggagacgtgaatgatgcgttggcagctgacgtggagatagagagttggagctatatagagtattatcgatcatttgcagaaaataaccagaaaaaaattgtaaacgtttgttatcgtcttctttggatcgcttgttgttgctaggtttctctcatgtcgagagctag

SEQ ID NO: 185774 - DNA, 224 bp, Arabidopsis thaliana landsberg
atggcatatggttactatgatgaaattgctttgccaaggctggtatgtctttagttagattacggatattaatttctgaaaatatatataaccatacatatcaagtaatcattgtaatggtttattaggtagcagatttcgggtcactggagctttctccagttgatggtcgcactttgactgatttcatgcatataagaggactccaaatgcgttctctatga

SEQ ID NO: 185775 - DNA, 460 bp, Arabidopsis thaliana landsberg
atggtgagttgatatttaagaattctttttaaactaaataaatggataaaaatatatatatcctttatgtatacaaaactcatgtattgcttatatcatgaatttcagggaaattgggtattcacgttaggagatactaatcaagataccaagcaaaaagctctaacctgtatttatagttttgatggtatgttaacacaatctaatggttatgtacttatgttaagctataatgaaccattttatatatattacatataaaacattgcaatttggctttcaaattttaaaatatgtttacaaatttacaaatgtatttatttttttgttaggagttgtatctgtacgttattatgcacaaatgaacgcattttgcgtgtttggagaaggtatcaacgaggctgaaattcatttgtggtcgatgagatttataacccaaactaggagagttggtccctag

SEQ ID NO: 185776 - DNA, 638 bp, Arabidopsis thaliana landsberg
aggatgtggataaaaaacatgttggaaaatgggaatccaaagattcaagaaacctgttctacagtttccatcgtgatgaggtgtttgctgaatctgtgaagcacaagtgtgttgtgaatttcgtgccggaaaataagcaaatcccaaaccgtagagagcatccttgcttcatcgtgcaaaatgtttatgattttgttaagaagaagctgaggaagttcactgataagaactttgacgtgcaccaaaagaatgagattgatcgtcttgtggcaaagacgagtttatgccttggtgatcttcctgacattgagaaagaccaagtgactaagacttcaaagggtaaaagaactgttcagagaaagagtcctaaaaccagtacggtttataagtcgatcttggaggattttgatttgttaaccggtgattcggatcgtgacaagcgattgggggagctcctggaagcagttaagcacgagtgtcgtacaagtaagaagaaaggggctcgtgatgatgattcttactggccagatgatgttgttccggtggttcgagctcttgagcatgtcttttatgattctatggcagaagatatgtcaaagtatcatcacaagttggagattctggttgatgaactcaag

SEQ ID NO: 185777 - DNA, 262 bp, Arabidopsis thaliana landsberg
cctttatcccttccggatcgaggtgacaggccgtacgaagttttacattaatgcctttggcgaagaagtcattgtggataatgcggaccgcgctattgctgaggcttgccgggaaaccggtgcgatcgtgaatgattataccgtcgccccggtatattttaatgaacaaaccaacggagcccacgaatggctggtggagtttgagcagccaccaccggatctgggacatttcagtgcggtacttgacaaggctctgcaggag

SEQ ID NO: 185778 - DNA, 1637 bp, Arabidopsis thaliana landsberg
atgctgaaaacgaatatcttgggatcgtttcacgaaatttggggttcagagttttgttctaagcctatcgcttcggtcgatgaagcagagatgttctttcagataaagctcctggataccctcgggatttatgtggtacgttgatctgtcatattattaattttgttgtgttgttgttaatagattacattttcttgtgtttagtaataactaataacagggtgtcttattgtttaaaccctccgtgtcagaatcttagttttgattttcgaggaaatggttttgctttactaacccagtttcttttgtcaatttgatttactttattttattattgctaatatgtcttggcattagtagtaggcttggacgttcctcctcatctgtacttgacgactagatgtttttcatccttgcagcgttctgtgcctaatgtgcctaaagggttgtttgatgtcttcatgaaatttctgagcagttcttcaagtatgccagctgaattgcagagagctctgttgtctttactgaatgagtacatcttttggaggccaaagtctcaatttgagagagttcctagaaaaattccaccacttatgttcaagcatttgcatgtatttataaatttgttacttttttcatcacacaacgaggtgaaggttctatcatataatttagcacgggtatctatgagcagcaccggtgcatttgacataaatccaagtgaaattgaggcatggttcctgtttctaccaagtgttggaaagattaaactacctcttaaggctcagagcatatcatcatttgtcatctcctttttatgtgatgcagttacggctgttggaaatactttattccagcaatgtgcaattgtcagaagctccttgtcccatttaaaaggtatatgtattttgtgccctcaaaatcaatgattcggtatagatgaatatataatatcttgctcctatatatgttaattcaggtatacattattttccatttctgtttttagattcattatctgcacaaagatgattatctaatgtctctgcaactatggcaatgttttaaatcaacttaatctcatacaaggttattgactggcgtatcttttctgtgtttgttgcaggtgtatcaattggttttagccccctaattgtttgtattctgcagaagtgtgtgaagctactaaattctgaatctcaagcatattctttaccaaacaagtcagcagtatctttgtacgtctacagctcattgaaatatattttgcaaactcaggtacatacgtctgcatattttataaataaatatatatatgtataactcaccatgcgatatgtttatgttctattttacaccgcttacgataccaataccttttctgttaattgaatattgtaggtagatcccagaccactctcatgtttggtccagtcagttttgtctgaggtggttgatggatctaaggattctttatgtgaatggttgccattgagagtgttgctgctttttacacaatctttgtcagaacctttcatcttgcattccggaaggacaacatgtcgacttgctgacacttcttttgctgccactaatgataagataaaaggactgatgagaagtattactccggataa

SEQ ID NO: 185779 - DNA, 80 bp, Arabidopsis thaliana landsberg
atgcagccatgtcgagtggtgcaccgaacagtgactgtgcgctatccgttgtgcaccagacaggcactgtacactgtccg

SEQ ID NO: 185780 - DNA, 624 bp, Arabidopsis thaliana landsberg
atgacaaaaacgtgagtagattaaacgattatagttaacgattacgcatacgtaatatcacatcgaaatatggttctttaaattttaattttaattccaatatcatcatcactaaaacattcttttttccttcaatattccattagtggctaatagacaatcccatatattatttgaaaaacctagacatttaaaaaaatttcgtcaacaaccaagatggtgctcctctaacaagtcttgattaaaccgaaccggaaaataaaaccggtttacacaaaccgtaattagttcagaggttttagctaatcactcgccgctttttcctatccgagatttcatcatcttcttcggaaggagcttatcgttccacaccaatggcttcttctgtccttaatctcttcaaatcatgtagacccttcactccaatacgcttctcttctcttcccaagtctcaattcagaatccaatttcccctcagacccggaaaagaaactcaactacgtcgctgtttcacgactctgtcatcattaacggacggtggagcaccaatttccggtgggaaggagctgtggctgcacaacacgatgagccggaagaaggagctgtttaagcctaaggtcgaag

SEQ ID NO: 185781 - DNA, 638 bp, Arabidopsis thaliana landsberg
atggagagaaatattggagctggcctaaaacacatatcagaaggaggatgcgaagaaaaggtccaaatcctctcaataacccccaacgtggaggtcaaaaacttctaaggattcaacatcagcgccaaaacgaaatatttttaagagtatgccaaattttatccatatatatatatgtcttcattgtgtggattcagaaatttttttaaatcgagtatatatgtccattttagatgtttttacaaccaaacaaagacaacgtaacacacttatctctttagaatatgctctaacagtctttctgactcaaaaacttaccgtaagagaatcattgagatgaccctctacttcttagaaatagatatgtaactcccttgcttttgttaattagtttctaaccaacaacttcaacttctgtctaaaccatctacaccattggatgtgaaactcgtgagcccattttctacttttttacttgctttcagggattttacaaaattagagctgtgccacggccacgtacaggtaaatctttagatagacacgcattgatgattgtgggccgtggacgaactctagagggacaagactttttcattgtacaaaaactcatgggaaaatacttggggcatgaatgg

SEQ ID NO: 185782 - DNA, 860 bp, Arabidopsis thaliana landsberg
atgccaccaatcaaaaattctgcacacctagccagaccggtggagcctagggaagttagtcatggtgagattgattatgatgacataatggaggtaatattctttttacaactagggaaaattttttaaatcataagtactttttccatgagaacaagaaactttttctcaattcggatttgtagtaccagtaaaatgtataacatatattatgaaaaagtttgtggtatactctttacagagtttgcaccatttttcagtgaactaaaatgaaatcttttcataattacttgtgccgaataacagaatagattaactccaacatgtgctaactttggagcgcagattattgacgtagaccagattgcgatggaacactgcccttcaacgtgtaccaagcaaccatcagtatctaagtttgtggatatatttacttccagaagagaagaagagcaaggtttgcctcctgaattatgttccaactgtagtcatggaataaaggtatgctaccaattctctcattttctccatagttacttcataaaccaattgggtttctcatgttgtttgctttgatatccacgcagctagggctttgtcctgaagcttctacccatgtggaacaaatgaaggatacgctgcttgcaatatcaaatgaaatcctcgacaatacttatgacctgggccctgatcatgttgaacagcttcatcaaaagaggttcgcattcccatcactcttcaactatattccctttttctttgctttgtcctatttggaaaatgatttagcttcttcaataggctgtgatacattacacagaaaagttgttaggaacttatacagcaagaaggaattagat

SEQ ID NO: 185783 - DNA, 172 bp, Arabidopsis thaliana landsberg
ttggatttcggcgtataagagagatcaatcgattacaaacattaaagttataataagttcaaccatagttgagccgaaacatctcattttggacgaagaaacttccttgcagaaccggaatcaagtgaaacgtctgcaattaataaataatgttattattcaagtcagctaa

SEQ ID NO: 185784 - DNA, 2155 bp, Arabidopsis thaliana landsberg
gcttgagttcttagaaggtcttgcttttgaagaggggatattagagccttatcccatttttgtcgatacagtgttgaatcacataagtggtgattcacctgaattttcgctggctgttaattgcctaaaagagctatttaaaacacttggtatggtaactattgtcgttttataaactagccagtttatcttgaagatatatattctgttagttgacacattcatatgatgaaaggttgtaagctctggcttagggctaccttgtccccaagtgtgatgcgtaacacattgctgggtcagtgtttccatacaaaatctgagaagatccacaaagccatttttgatcttttccagccactattacaggcaagcttgcattagtttctctcttacatatatgatttcgccaatgagattaacatgatttcattttacttacattgccatattatgcatatcctgttttgtccagtcccttgaggctttgcgagatggtgagcatgaaaagcaacgcaggcactttctctactttctccttcatcaggtcccagttagcagtaacttcagccttttagcaagaagaattggccacaaggtagttctagttcttcctcactaagacacatctgcagcatttttttatcttggaatgaagctcctttatcttcatatcttcacctagctttttaattttatcttcagattgctcttcttattgtcctcagaggatacaagatgaacccaccttgccctccctttgagtgtgctcacatgtggttagtacaactgggcctatctgttgttttgcatctgtttgttgcgtctgttacttacttgaggaattggcttttcttccatccttggttttgaatttctatcaaatacattttacatgacatgaatgatattaagtaagatggttctagtttcatatctaaatttttgtagttgttatcgtttctttctccctgcaacttgcatgttagctttacatggatgccagttattttgacagtcctatgtggagaatacatcaagttcactgggatctgcgtgcagcatgtcaagatagataactttcatgttttgaatgctgtgtttggtgtatgttttggcataaattttttggatgttagataaggacagtaagttttctcatagaattcatgaaagtcaactgatttgacaggggcccatctcttgtgtcatcgtataaagattcttcacttcatatttcattgcgacaacctgccattgatcttgtccaagctatcctggtatctgatgcaacagccttactagcttcgttgctacgtaataatactggtaaatttatgggctatgagattcaatatgacgacgatgacagtaatctccccttttcccatactactgaagatgtaagtgatcgttcctggagtgactttacccagcagagcaaaattactcttggggaatgtaaagagtggatgtgcattccgatgctgtggattactactcttacaaatacaaattttctaaaccttccagtatcgctatcccaagcagtcttttggtctcgatcacgtttttgtttagtggaatctgaaaagaatgatgaaatgacagttgatatagaaacttggctttcatcttctgctgttgaaatcaaaggcacgcttggatggaaggtagcaacaggatctgatgacggggggccaggaaaggagtccaaaaactcagtgacagtatcaaagatgtgtcttacattgatacgaacattaaagaggtacttttccatttgactgttgtggtagcctggtaggaaagctgctaagttttctattacgctttatgataatgaggcttttgggtttttgatttgtagattgaccacttgttatctggtacaaattggtgacgagtgtcgaaaacagtggacctgggtaccagagatgggcgaaacgttcatcctttctctttcagacccagatgacgtacgtaacgacctgtaatgattgcttggttccatcataagagatgcatacttgatagttattactctctgttctggtttaattgtgtataaagttgaccatgttgctagtgttgttttgttaacagaatgtaaggcagtttggaaagtctatgctggaacacgtttcaaataccagag

SEQ ID NO: 185785 - DNA, 957 bp, Arabidopsis thaliana landsberg
atgaaacggtaagttaaaagtttaatatttgattattactttatttagaaatgtattagaaagggaaagaacccattaacccccaatacgaagtttccttatcatcattaatcatgcctatgaaaaccctaaccggcctacatatttgcagtctcttttaggtcaggaatctaatgagaatgaattattttattttatttaacaataattggagcatgtcattaattctctttattcttcttacacaactaatcatttagatgtgttacaatattatttcctttagtcattttcataattttaatacctccgtacttttcactaatacctccccttttaattttcattatttcttcttttctatcagtctatgcatgcattcttttgaatattaaaatgcattttatattcttttgacaactatgcacaagccttttgagacacatctacacaatataatagcacaagcctttatgagacatatctacacaatatcattgctacttgtagactatttggaatacgtatttacatattccattgtatcatccctttgcaaatgttttatacatataactaacatatacattattcgtaactttgttcccctatatcgaaaaatgtgggctacacatataactaacatatatatatatgtatgtttatatgatatagtctccatgtctatatatcttatatattacatgtttcatgtttacggtcaagggagtatttttatacgcatacacaatcatacacacttaaccctacttataatgatgtaggttcatatatttatcttattttaggatcattcgatcacaaattatacggaccctcatactctctaaagatatacaaaatccgctatgtcatatccgatccgaattagcagctaaagaaaaacaaacacatgcatctactgaagatttgagtctcgagtgcttagttacatga

SEQ ID NO: 185786 - DNA, 118 bp, Arabidopsis thaliana landsberg
cttataccgatcacattgcttctctccggcgtccatcaaaagtacggccacgctcgccgtcgagcatgcacctcccaatgacaaaaacgacaaaaccttaacaaatccaaatgtttaa

SEQ ID NO: 185787 - DNA, 84 bp, Arabidopsis thaliana landsberg
tatttggatatgaccgaaatcaatgagctagatgagaacggggagaagaagaaggttccttgcacctattacctaaagtattga

SEQ ID NO: 185788 - DNA, 147 bp, Arabidopsis thaliana landsberg
ctttttggactggcaaatatcgtacctgaaccggactcgcggctactagtaaaccggcgaggccaccgcctactacacgtccatcgggacttgctaacgatacactcattcctcccgttctacttcgtgttccgcctgaatcattag

SEQ ID NO: 185789 - DNA, 180 bp, Arabidopsis thaliana landsberg
atggtggtgatagacggcatcgaggggtgtggggtcgactcagtcgacggttgggtatcgaacatgttcgaccgcgtcctcgggatcgggacgaacgacaactattatgcgatccacctggtatttgtcacgtatcagacaccgaagtcgtacggcttcggaaagtggtgctctgcctgg

SEQ ID NO: 185790 - DNA, 219 bp, Arabidopsis thaliana landsberg
atggaacacgcaacagagaatggcaacgtaaggtagattgccgaagcaaactataaagcatgcaaatgcattaagactccagttttactaagttttaaagggcccgatatgctgccttcaaaaacaacaccaaacacacacactcccgtgatttcctgcgttacaaccacaaaggtattcaaccagagcatcactaccaaacgctacaccgtcgtgtag

SEQ ID NO: 185791 - DNA, 279 bp, Arabidopsis thaliana landsberg
ttgaagagtcgatatggaggatcctatgtattgactgtgacaacctcggaggaacatgagaaagaagtagagcaattagtgcataacatctctacgaatgcaaagaagatatatcgaaccgcggggactcagaagtttgagctgccaaagcaagaggtgaagattggtgaggtgtttaaggctttggagaaggcgaagacaatgtttccagtagttgcttggggacttgcagacacaactcttgaagatgtctttataaaggttgctcaaacttcttaa

SEQ ID NO: 185792 - DNA, 45 bp, Arabidopsis thaliana landsberg
atgccggtaactacttgcttggactgcaagaaacgaaccgaaacg

SEQ ID NO: 185793 - DNA, 49 bp, Arabidopsis thaliana landsberg
atggtatcatccaattctctcttgcgtgtcgaagaacttacgatttctc

SEQ ID NO: 185794 - DNA, 350 bp, Arabidopsis thaliana landsberg
ggcaagcggttcgagaacgccgagggctcgatgtccaagctgttcgccggcgagaccgcgatcagggtgaccggccaggcgatgcagatcctcggcggcaacggcttcacccgcgagtaccccgtcgagcggatggcccgcgacgccaggatctacacgatcttcgagggcacctcggagatccagcggctggtgatcgcacggtcgatctcgggcgcgcccatccgctaggcggcacggtgccgtacctggacctgcgcggcgtgcgcagctaccacgaggtcgccggcgacggtccggccgtcgtgctcctgcacggcggcttctgctcgctggagaacctgcggccg

SEQ ID NO: 185795 - DNA, 10 bp, Arabidopsis thaliana landsberg
atggcgtacg

SEQ ID NO: 185796 - DNA, 3415 bp, Arabidopsis thaliana landsberg
gttgcgagggtattacaccttatgtataggttggttgtacagccgaatgctgcaagagctcagatgtttgcagaggtatttataacgtctggtggtatagaaacacttcttgttctgctgcagagagaagctaaaactggtgaggataatgttttagctatgggtaggagtggaaaaaggtcatcgactgatccaagtgaaaagagtccgtacaacgagtctggttcggtaaaacagttggattcagttccacaagataatgagattggctttgaccttcctggtcctgatggaaattctgttgaggatgataatgttgggtctctgaatgtaccagagtcagttcgacaagtaaaagtgcatggttccacacctgtcatttgtgatagtgactcagtttccatctccaattccataaatgctgagagactatcagctgaaattggtggtataagtctttcaataagtgctgatagtgcaagaaataacgtgtacaatgttgacaatagagatgctgttgtggttgggatcatcagattgattggtgctttaatttctagtgggcacttaacattttccgttggtgcccgttctgatgtgacaagtaacctcatgggtagtgggctccatgaaaatggtggaacaatgtttgatgataaagtcgcattgcttctatttgctctgctgaaagcatttcaagcagctccaaacagattgatgaccgacaatgtctacacaactttgcttggggcctcggtatggcatgttcttgatatatcttacatttgtttgatctatctttaagcgtatctggtttaatgtcaagaatttggtggaaaaagagagtctctgaggtgcaacttttttttagtcaaatttatatgtatacctgggttaatgtcaaggatctttcttgcagatcaatgcttcatcaacagaagatggccttaacttttacgattcaggtcatcgctttgaacatcctcaacttttgttagtcctcctgcggtctctaccatctgcatctaaggcactacaaaatcgagcacttcaggtataaatgtcatagttaaagacacttttgtgcaccaaatgcaccttgtgaaagtgctctacaaacttctacttgtccggtctctacaatgtctctttctgaactcactttttctacgtcaggatattctatttttggcttgtagccatccagaaaataggagtagtctgaccaaaatggaagagtggcctgagtggatcttggagattttaatctctaactacgaggtataactcaaacgttaaaaattttaaagttcgcctccatgattattgtatcagtaatgagccaagttggctatatttacactagtgtgataaggcgagttacattttttatctggcaagtctcttaagcatgtaccataaaactttaaaaatgctgactattctgcgtacacacagaaagatgcagggaaacaatctgcttcacccggttctgctgaagtggaggatctgattcataacttcttgatcataatgttggaacattcaatgcgccagaaggatggctggaaggtaaatttgtttgtttcagcggtctaccagattaattccctttcacgttttttccaagctcatttgtgtttatttatatttttcgctacatctgattccttttacaggatattgaggctacaattcattgtgcagagtggcttacttttgttggtgggtctagcactggggagaaacgaattaggtattttcatgcactactgtgccacattttacgcgtgccttttgggatgccaataacattttgagtgtcatctgtttttcttgtcacattgttagtttgtgaaggtatcttttggatcatattgttgttgcactgtagtgcttcttccatgtattttgagataagcatgtttctgttcaattatttttacacttttttcctaatacttttttcaaaggcgtgaggaatcactgccaattttcaaacgaagacttttaggtggattgctagactttgctgccagtgaactgcaagctcaggtatagctcctgttttatctttgacttatatggttagttatacaattccttgctagagaaacacgaagttcgtcttacacatgcattgtatagttgacattggtcgtactctcacaagaaaatattgtcagatctttttttatttgctctatattagctataatattgataaagacagtaagctttcaagccttgttctgttatgttggtcgactgctataatttaactacaaattaaactttccccaaacagactcaagttatagctgcagcatctgctggtttcgcggcagagagtctaacaccaaaagatgcaaaagcgggagtagaaaatgctgcactgctttcagtgtttctagtggaaaatacagttgtgattttgatgcttgtcgaagatcatttgcgactacaaagcaagcaaaattgtgctgcaagcgcagttgatgtctctccatctcctctttcacttgtttatcctcccaactaccgttcacacacattgccaacggtcggagaatcatcagaggtttctagtagccgtgcttcagtgtccagtgattcaggaggggtccatttagatgtaagtggaaattactctcaatttctttcttccggatcaatatctccccttatttattggcttttttcctttttgtttttataacatcatttaagaaagatagttctgatcatctgattaacattctgctatttccctgcttttactttttcttcagatacttgcttcaatggccgatgcaagtggccagatatctacagccgtaatggagcgtcttgctgctgctgctgcagctgagccctatgaatctgtttcttgcgcttttgtttcatatggaagttgtaccagggatttggctgatgcttggaagtacagaagtcgattgtggtacggtgttggactaccttctaaaactagttgttttggtggtggtggaagtggttgggactcttggaagcatgctctacaaaaagatgctcagggtaactggatcgaacttcctttggttaaaaaatcagtatccatgcttcaagccttgctgctagatgagtctggacttggaggtggcctaggaattggtggaggatctggtaccgggatgggagggatgtcaggcctctaccagttgctagatagtgatcagcctttcttatgcatgcttcgaatggtactcttgtctttgagggaagaagaccatggtggagatagtctgttgatgaaaaatttaagttctgaagatggtataactggtggactccagtgccccttaggaaattctgcctcagtagatatcagttctcagttgtctatgcgacagtcaccatcagctttattgtggag

SEQ ID NO: 185797 - DNA, 122 bp, Arabidopsis thaliana landsberg
tcctaacgatcaatcgttccatttatagaagaatggtcatggtccacaacaattgcacagtttgctttctgtttcaaccatatttttgctgtcggatggttcagtctctaatgattggctag

SEQ ID NO: 185798 - DNA, 701 bp, Arabidopsis thaliana landsberg
catcaatttcttcagtgatgttggagaagttgttagcgctcgacttattgtagaccacaggggtaagcatgtgggctgtggctttgttgagtttgcttctgcttacaaagcaaagaaggtgagactagtttaatgatgaaaagtatataagtagtcatttgaaaagttgtgtatacttatgatgtcaaatttacaagtagttatttggaagcacgattgctaatcaaagcttttatactataaggcgctggaaaagaagaacctaagaagattgcggaatcgttatgttgttcttgtcgaggctgagatagctccataccctctccgacccaagttaattgattttccatgttattgagatttgtttctctaactgcttattagagttttgatgtcattgtacaagtttaatgctattgtttcttgttaattaggtacaaccttgcagagaagctttggtaagggatttaactaaattgccttttgagttttgttatcaagagcacattgggtgaaatttttggtaaacaaggagagatgacaagggtttttgttattccaggtacgaagactaccttcgagaagaaagccttttgatagaagctgatgatttggagaacaaacagaagaaaaagaagattaaagagaaatatttaggcgtattttgcggtgtcaagactaccttctctgacgacgattga

SEQ ID NO: 185799 - DNA, 633 bp, Arabidopsis thaliana landsberg
atggagttgcagttagccttgcaggtgtctgaaaaacgcgttctgagaatgcagacactatcatgtgatatgcttctacgtgactcaccagcggggattgtcacgcagaggcctagtatcatggatttagtaaaatgtaatggtgcagcatttctttaccaagggaagtattattcgttgggtgtgactccaactgattctcagattaatgacattgtggagtggttgcttgctaaccattctgattctaccgggttaagcacagatagtttaggcgatgcgggttatcctcgggcagctgctttgggagatgctgtgtgcggtatggcagtcgcgtgtatcacaaaaagggacttccttttctggtttcggtctcatactgagaaagaaatcaaatggggaggggctaagcaccatcctgaggacaaagatgatggtcagcggatgaatccgcgttcttcgttccaggcttttctcgaagttgttaagagccgatgtcagccatgggaaactgctgaaatggacgccattcactcgctccagcttattctaagagactctttcaaagagtctgaagcgatggactctaaagctgcaacaactggggcggttcagccacatggagatgatatg

SEQ ID NO: 185800 - DNA, 186 bp, Arabidopsis thaliana landsberg
gagaaccgttttcgcgttctcatcgccactgatgtcgctgcccgtggtcttgatattccgaaagtatcacatgtcataaattatgatgtgccaagcacgtacgaggattatgtacaccgcatcggccgtaccggccgcgctggtgaacgaggtcaggcactcaccttcatcgaagatatccggtag

SEQ ID NO: 185801 - DNA, 366 bp, Arabidopsis thaliana landsberg
atgtgtaactctatattggttgcagctattaatgtaatggctggagttggacttctctcaacaccttatacagtgaaagaagctggttgggcaagtatggtaattcttctcttatttgcggttatttgttgttacactgctactttaatgaaagactgtttcgagaacaagaccggcattatcacttatcctgatattggagaagcagcttttggcaaatatggtcgtattcttatctgtgtaagtggttccatagattttatcttccttttgattattttgatcagttgttctgttttcagttgcttatggtttctgcaatgttatgtgtcttttgtgcagatgctattgtacacagaactatat

SEQ ID NO: 185802 - DNA, 818 bp, Arabidopsis thaliana landsberg
atgcatcaggctggtgggcttcccagaagatggccagcctctcaacaaagaaggcgcaaagtttaatgatatcaaaagaaccaccaccaataatcccattcagagtgttgcttctacggctctttcaaacccttgaattccttccaaacagtctcctctggaaaaaaacaacacagtattttcccgccgatatcttggcagaataatgcctcaaataaaacccaatcgtttctatttttttgggttagactcttttgatccggttgtcacaaagaaacaacaacttgttgagaagaaaaagatttgaccatcctcatccaccgcgtgaacatacgtgtcgttatgtaccaccacatcatgttggattttgtggggcatcttgggcgttaacacagacaacaagtcccaagttcgggtttcatatcaaaaacctctacacagtttgaggaatcagcaacaacattcccagtaccttccaaacacgtatatcttcttgccgtctaccaagcttgtcgatgctcggcttcaagccatcttcatgggggtaaggcggtgcattgtgtgttgtatacagtcgaataaaggacttccgatgtgggtttgccgttcatgagtccacaaataatgtagattccgcaatcctacctcacgaaacataatcctgattcaaggaaaggacacaagctcgattggaccggtttgagcagacgttgcatgggggtggtggacgaaccaccataggcttggattttgatgcatctgcatatatacgtacaaacatggctcgacgttacccatccaaaatttcaatgtcctga

SEQ ID NO: 185803 - DNA, 76 bp, Arabidopsis thaliana landsberg
atgagaagcagtaagctcgctgcattctttgagtttgtggagtttgaggctccatttgctgaaggggcatctgcag

SEQ ID NO: 185804 - DNA, 532 bp, Arabidopsis thaliana landsberg
atgaaagtatcattcacgcgccctgttgtgcacattcccatcttgggctggtgtccttgcggaattccgcagcatcgccctcaactcatcactgatgtttggggtgcggagatggacggtggaaatccgcagtatctcaggacgaacatgtaagctattttactccgtagatctgtttattggggggatgaaggtgtggtcgtagctggagttcctcggctctcaaatcctctgcacgcccgttgtcggggattgaatttccaacccgcagaatctattgaacatcatctgataagcaaagatttttctagatccgccacaatcttcccctcctccgtactgatgtcattctgcagtcttccccctagccggttccaaaaacgaaaaggttccatccatgccacgccaggatcccgcgatggtcactgcgacagaaactacgccgacaagtactggtccaagatggccgaaaatttctccataggcaccccttcttcctcaagccaactaccaagacaacagattccagaat

SEQ ID NO: 185805 - DNA, 405 bp, Arabidopsis thaliana landsberg
  unsure (1)..(405): unsure at all n locations
gcaggaaaccctggccctatcccaggtcacggaccgtccggcccctggtcgcggaccatccgcgcctatgcagagagcaccgccgccggttctcacgtagtgattggcgcccaaaaaaggcaccaacacacttttggcgactccgctgggaagaacacatatagactcgtcaaatcggccctcaatggccggttcaagggatagctctgacatctccccagcaatattatagagccgacttgggagaccttgccggctgacgaacaactcaagttcgaggagcagctgatccaagaagcgaaggcaaaattcctagccaacttcaatgtgaacaggaacaacaaggtctttcggcaacgggcgactgatccgacttcgctccgatccacaccagattttcncaat

SEQ ID NO: 185806 - DNA, 497 bp, Arabidopsis thaliana landsberg
atgttcacattcggcgccaactcgctctatcttgcaccggaatattatgggcatgtgtccgctttaagtacagccatcgtaggatttgccattggcatttttgtgatgagctggaatatcaccacattcatcctcaatggcaggaatgtactttttttggccaccacggcccagcccttcctgaaatactgtatcaacaatgccatgcttccgttgctgttcctgttcttctacctgttcagggcagtggattataaccaccaccagcaattgctgaacaatatgcagattgtcctgctgatctgcggcttcatactggggttcatattatcgatagcgctatcctttatttattttttcggggccgacagaacgatctaccggagcatcggcaatgtgatcaaatcggagaatacacggtataatgaaatgatcgccaaatccgtacttccgaaggaacgtgcagatatgcatgtggaatggttcctgagtgccag

SEQ ID NO: 185807 - DNA, 811 bp, Arabidopsis thaliana landsberg
gattttcattctgttacttcatcatggagtgttatttttgtttttccatgaatccaaggcaatctccatagctgcagaagcaaaacgagaagaagagaaagcaaagggtgtgaatccagagagtagagctgagaacccagacattgtgccgtttgaagacaatgaagaagaggaagaggaagaagatgaaagtgaggaggaagaagagagcatggcggggggtcctcaaggcagaggaagaggaagaggaataatgtggcctcctcaaatgcctttaggacgcggaatcagaccgatgcctggaatgggaggtttccctctcggagtaatgggccctggcgatgcatttccctatgggcctggtggatataatggtatgccagatccatttggcatgggtccaagaccctttggaccgtatggaccgaggttcggtggtgatttcagaggaccagtacctgggatgatgtttcctggtaggcctccgcaacagtttccacatggcggttatggtatgatgggaggcggacgaggcccgcatatgggaggaatgggaaacgctcctagaggagggaggccgatgtattatccaccagcaacatcatcagctcgacctggcccaagcaaccgaaaaacacctgagagaagcgatgagagaggagtgtcgggggatcaacaaaatcaggatgcatcacatgacatggagcagttcgaggttggaaacagtttaagaaacgaagagagtgaaagtgaagacgaagacgaagctccaagacgatcaagacatggagaaggaaagaagcgtcggtga

SEQ ID NO: 185808 - DNA, 629 bp, Arabidopsis thaliana landsberg
attggatttcaagccattgctgaagctcttggacttgctgcaatcaaagcagcagttgctatcactggcataattgctggtggccgtctcgtaagtctcaatggttttctagtttctgttttgagactcatatccgaataagttaaacaacaaaagagagatccagataagtgatgaggaaacattagattttgtaaagaatgggtttgcatgaacatataatgaaactctatagctaatgctgcttctgcggtgctgaatcatagttttacaatgcattggttttctggtacacacagcttctgcggccgatatacaagcaaattgcagaaaaccgaaatgctgagatattctccgccaatacacttctggttattcttgggactagtttacttacagctagggtatgttcttgattttctgtgttggtgcttggtattctcgtagttttgctttgtcttttgtttcgttaagataaattgtttctttctttaaattaggcgggactttccatggcattaggagcgtttttggctggtctactacttgcagagactgaattttccttgcaagttgaatcagatatcgctccataccgtggtcttctgttgggactcttcttcatgacg

SEQ ID NO: 185809 - DNA, 355 bp, Arabidopsis thaliana landsberg
atggacattcttcgtcgaatgaacgcaatagccaaaatacattgtatgtcaaattttacatttgttttttcttgtattcacttgtatcaaacgtcacgaattaaacaattatcatattttcccatcaatttgatggaacctcaacaccacatttaaatccaccaaaaagtgaataaatattttatcagaccaaaaaaagtgcaagagggatcaaaaggaagcacgtgacaatgacccaactcttgcaatttcattgaccgcagggttaaaccctaagcagcctaaccagccttgcttgtacggcaagaatgtcttcctcttcaattcttccgatactgctctgttcgcagtgtaa

SEQ ID NO: 185810 - DNA, 243 bp, Arabidopsis thaliana landsberg
atttgaactgcagcgaacagagaccgaagatatatatatatatacaataaacagagttttatcaaaatcagagatcatagatatgttatcgagaaaggtcattaaaaagatatatgcagattttgagaatgaaggttatggtactgtcgttaggcaaggcatcaccaagtaagttttcttctttttttctttctcaattttctcaggaaaaatccaatgacttcaccttcaagtttcatataa

SEQ ID NO: 185811 - DNA, 97 bp, Arabidopsis thaliana landsberg
atgttgtagtttgaaattgccttgttatgggaacaatcgtctttatgttggccgcttatcatccataactcgtactgacacattaacgtctatttag

SEQ ID NO: 185812 - DNA, 333 bp, Arabidopsis thaliana landsberg
atgaacacaaccaacaacgtgtttgatgtgtcaccgttcttgcttttagaagcatctgcagattccgaagctggccacgacagcgttgacgatgataaatgcgttaaggattacgatcttggtcatgagtcttgtagtgccagttcttgcgagacgtcttgcgtgagtcagagaacgagtttgttaggttttgacctgcaggacgatacggtgaatcatgaagaaagagacgccggagatgaagaagacgaagacggagaaggagaagtgaatagctacataagatgtgggagaagccaacgtgaaaatctggctgtggattctgctgcggtg

SEQ ID NO: 185813 - DNA, 470 bp, Arabidopsis thaliana landsberg
atgacgggtgatgagaggggacgcttcgacggcggaagcagcggcggaggaaacgtcttcccatatttccgagaaggcacggacgatgatgccgtgatgatagtgagaattgaggctgaggaaacattgaagaagctctctaagttcatctttcgagtaaatctggttctctagtatcatttgaagcatagactgccggaaatctaggtacggatcgtcagaatctttctccacggcgacggatgcggtgccaaaggcgtggaggagggtgtggcggaggagatggaggagtggcagtgacggtaagtagacgagggacgtttaggctttttggagaaaaagttgaaaatagaggcgaaagttggttttatacagttgccgcagctgatgtcgacaacagatacagtcttcaggatcttcttcttgcttttagtcgccattgttctgactctgtatctgctaaagactaa

SEQ ID NO: 185814 - DNA, 234 bp, Arabidopsis thaliana landsberg
atggacatacaagttgattactttaccaatacaaggaagcagtttgataagcttttgggtcaagataaagctagagattacattagaaagagatccttattttctgtagttatcggttcaaacgattttctcaacaattacctagtcccttttgtcgcggctcaagcaagactaacacaaactcctgaaactttcgtcgatgacatgattagccacctccgcaaccagctcaag

SEQ ID NO: 185815 - DNA, 415 bp, Arabidopsis thaliana landsberg
atggatggaactgtttctgctgcatcttcccacacagaaagcgtaggagcgtctacagatccacttgcatctagctcttgggaagaggtaaacagtctaagcaagtggtctctagtataatctggttgaaaaatgtgactattattaagacatcacactaaatggaatacgaaataatccaatttagtctactttaccaattatttatttgttccgccaaaattaggacatacttggcatcgtggctcatgggatgaaccacttccacttgtcgtcaaatgaattaccaatgttattgttatgtgtgcaggttcctccaaataatatactactgacgccagtgcagtgtaagtcactgtggagacagttcaaatctgagaccgagtatactgtaacccaagctatttcggcacag

SEQ ID NO: 185816 - DNA, 910 bp, Arabidopsis thaliana landsberg
atgtttccggttcagattgatgaaaaggaagacgtaattgttgaatttaattacttatccttggttgcctccaaaatgttctcgttgtggtaaatggggtcatctaggggatgtgtgcgtgattaaacctcggattttttggtacgtctcattactttgttctgagtgagacagagaaaaattcagatacagacggagtacacgcaggtactcaagttgaggaaaaattggaggaagagatagatacaacagttaagggccaagttcaaaatgcagaggatgtgaaggaaaattctattgacatggaaaaaactggttctttgagaactactctttcacaaagacttcacaaaagttctttcggagacttttactcaaaaagcaagggacaccgtcccatgcacttcgagcaaaatatactccacaaacgtcattatttgacgggtttcttctggaatgtacgcggtttcaataaatcaaataaacattttttagttcgttggatgtctgttggaaacgagggtgaaagaaaaaagagccaacaaaataatctcaaaggtgtttcatggttggtcttttattacaaattatgaacgtagtctattgggaaaaatttgggtggtttggaagaatactgtaagaattactcctgttttcaaaagcggacaaatgattacttgttctaatctgacagatgagagtgaggccgagttttgtctatgcatcgaattttgtggaagaaagaagagaattatgggaagatatcagacaacactatgaaatgccagtgttccgagctaagggctgggtgacactcgatgatttcaataaaatattagagggggacgagcattccaatttggaaaactctcctattattttgcaaggaatgagagagtttctagacact

SEQ ID NO: 185817 - DNA, 2248 bp, Arabidopsis thaliana landsberg
ggtttttcgaatcaagaagggcttgttgtggaacgggtacaatggaaacttcgttcctatgtaatgcattgtcggtgggtacatgctcgaatgctacgaattacgtgttttgggatggttttcatccatccgaggcagccaatcgtgttatcgcaaataatcttcttgtccaaggaatacccctcatctcttaaacctaactttattccaaaacattgactcaaacagtcaaaaatatgaatatatgatgaaaatatatcctagatcgttatatagttcaatgaatggttggagattattaactaaaggtttggtttggaaattattgctttctttaataaataaatttgtaaataaataatttcagttacggggatatttgatcatatcaatagtaaagagcgaaatgtatatatttcccactaatatagggaccttaaataaattgcttgattacaaaaatggtccttctcttctgaagtaaatagaacaagtgagaaaggtttatccatggcgatttaggcgcccaaaagctcaaaaattcattcatgtccaccgttaatcatcactgccaaatttaggaagtaaaagataagggaaagttagtttctttcacatgatttagcatgtgatctcttcgtgtctcgtttgactaaacccaacgaatgataatctaattaacaaatgagtcccgaaatagtaaaaagaaaaatattttgtttcttgttattgcatgaatagtgtgagaggtaacgtatgtcatctttaaattcgaaaacgacgacgttactacggaagcatgcagcttcaaacaaactaaaatttttatcttcttttttcaagtaacttcctttaatctctctccctataaaaccctaatcattcacgacttcttcgtactcagtcatctcaaaatattttactgcattcaaacagaaaatgaagatgtttattacaatgtcgatgagcatatcggttatcgcctgtttctacgccggcgttgggaccggtgagccacttgtaccggctctaatcataatgggagattcagttgttgatgccggtaacaacaaccaccgtattaccctcgtcaaagccaattttcctccctacggacgtgacttcgtcgcccacagtgcaactggccgtttctctaacggaaaacttgccacagactttaccggttcgaaccagcctagctaattcacattatagtacaatctatcatgcatttcctttttccttaaaatttgtttgttgttgagcagctgagaatttagggtttacatcttacccggtggcttaccttagccaagacgcaaatgagacaaatttgttaaccggagccaatttcgcatctggagcttccggttttgacgacgcaactgccatattttacgtaactaattaatctcctcaagcctgtttaatgtagctatatattaagttagtaataaataacattgatatggtcttatcgatcattattgtagaatgcaataacattgagccagcagctgaaaaactacaaagagtaccaaaacaaggtgacgaacattgtgggaaaagaaagagcaaatgagatattctcaggtgcaattcatcttctaagcacaggatcaagcgattttcttcaaagctattacatcaatccgatccttaaccggattttcacgcctgatcaatactcagatcgtctcatgaaaccctattccacctttgtccaagtaacttaaccaacaccacaccgtacctatctttaacttttccggtttactctaaaccgatggtccaatccttttctgttttggcagaatttgtatgatttaggagctagaaagattggagtgacgacgttaccgccattgggttgtttaccggcggcaataaccttgtttggtgaaaccgggaacaataatacgtgcgtggaaagactaaaccaggatgcggtttccttcaataccaaactcaacaacacgtctatgaacttaaccaacaatcttcctggtctgaaattggtcgtctttgacatctataatcctctcttaaacatggtcatgaaccctgtccagaatggtacgatttctatcaaaccgcaactttatttgacgactaagaccgacactttaatttctcgtttgaaatatttcaattttttatatctttgaacgtagggttttgcgaatcaagaagggcttgttgtggaacgggaacaatggaaacctcgttcctatgtaatgcattgtcg

SEQ ID NO: 185818 - DNA, 767 bp, Arabidopsis thaliana landsberg
atggaagtggagaatcaggatgaggaggatgacgatggtgatgacgacccagaggaagatcctgaggaggatcctgaagaagaccctgaagaagatccggaagaagatccagaagaatgcgaggaaatggacgttgcaaatactgagcaagaagagcctgctgaagaggtatgatttactcatttgactctttcaaattgaatccaacaacaagatgttttcttcataaatcttctcattttgtttcatgtctcttcttcagccgcagaagaaagaagaaaaccttgagaaaactagtggcactgttgctgatcctataactgaagccgaaactgataatagaaaagaagaaagaggtcctaacgactcaaaaactgaaatcaaacccaagtcggaaacggaaaagcacgggaaacaagatggaggaacatctgatgcagcaaaacgagaagaaacagttgataaagagctgttgcaggtaaataaataatccctacaaaacttgagaaatcggtttaaatgatactgcggttaaggtgctaaatctttcttcactttgtttctttggctcaggctttcagattttttgaccgtaaccaggcagggtatgttagggtaagaagaagactaatttgtcttgtacataaagccatctcatagtctctgtgaatgcagctgaagtactgtttcgtgtaattttacaggttgaagatatgagagtaaccattcacagcttgggaaagtttctatctcaccgtgaagtcaag

SEQ ID NO: 185819 - DNA, 276 bp, Arabidopsis thaliana landsberg
atgcagccattgatgctcattgctccggatgttcaagatgtgtatacacctttagaaacagatgtcattgttcagctatctgaggtaagctcttgtcattgttccgggtgcgccctgcttatatttcttacagtgtcaattcctaatctctttcttattctctgttattctactggatttcagtgccgtcaacacctagagattttgctggaaagtatcccaacaatgtttcaggaaagtaagagtcctgaatctgcttttggtgcagcagttaag

SEQ ID NO: 185820 - DNA, 413 bp, Arabidopsis thaliana landsberg
ggctcggactcgggctcagcccggaagacgacgaactccgcttcgcccgaccccagggctcggactcggggtcagccccggaagacgacgaactccgctccgcccgaccccagggctcggactcgggctcagccccggaagacgatgaactccgcttcgcccgaccccagggctcggactcagccctggcctcagccgacggtctccgcctcgcccgacccaggggctcggactcgacctcggccttggaagacagactcgacctcgacctcggaggagcctccacatcgcccaacctagggctcggaccgaccacgtcaacaggaggcgccatcattaccctaccccaagctgactcaggctacggggaacaagaccaacgtctcatctggctcgctccgccagacaagtaa

SEQ ID NO: 185821 - DNA, 409 bp, Arabidopsis thaliana landsberg
  unsure (1)..(409): unsure at all n locations
ccacagcgcatctccaaagaagggcagccacactctggacccgcgtcggtcgaggcatggcatctacaccagcggctttattcctgagcttttcgagcttagatgccgcaaaaacaaatctcttggtgacacttgttctcttaccggtttgatctactgtcggaaatttgtaggcctcattagcaggtnnnnnnnnnnnnnnnnnnnnnnnnnnnnnnnntgctatcgagtctctctctcctcgagccgtggcagtccaagcctgaatgaaattggcaagagatgttgcatcagcgagcttatgggagatgcagattccgatggccatgccgccgcattggaagtaggtcgcctttaccagcagcaatggccatgtaggagtggcctcagcgtcaagcggaagcaatag

SEQ ID NO: 185822 - DNA, 90 bp, Arabidopsis thaliana landsberg
atggctgttatccatgcaaaggaaaaacatccaaataaagtgatgtccatcacatacatcttaagtaaagtaataatgggcctagctaag

SEQ ID NO: 185823 - DNA, 71 bp, Arabidopsis thaliana landsberg
atgttttcccacttcttgtcaaggaggctgcatttcctttaaaagaagaccgtgacatcgatacttcactg

SEQ ID NO: 185824 - DNA, 757 bp, Arabidopsis thaliana landsberg
atggattcttcctcaataccggaagacttcaataccaagaatgaaaatcaaactcaagaagcagaagttgattggaggacttctgataataaaggaaaaaggaaggaagttccagggaaaggtgcatatatatagttttaaggcaaagactacaaaaataggaaaacaaggtttacagtgtgggagcattatacaatattcaaggacaataaagtcaagtgcaaatgtcaatattatacagagatttttacttactccgctctacaatatttgtgaaagatttaaggatcttattatcgagaatgaattgtatcgagtagcaaaacaacaagtaacaacagtgaaagtgactttatattgctaagagtcgtcctctacaaaagattgtttgtcctcttttatagccacgagctctaatgctcctattgtcatttaatacgaggcttttcctctaaatacattgattacaatatctgccatcacccctctgttgcttaattacaacgcgaatctcatcctagcatttattggtattagctccagagtttcttacttcttttccaagctcgtctttcgctaacgggccattttgttgctcaattcgaggcctatcatttgagtcgacaaatgttgggcctcaacttgcgatataggcccagttaaaggtagcacagcatttcgggttggatcctgtgcgagatttgacaccaacggtttgcaagccaagtcttgcaagctaaaagttcaaaagacgtaa

SEQ ID NO: 185825 - DNA, 190 bp, Arabidopsis thaliana landsberg
aattcatcgcaattgtgtcgtcactgttgcgatgaaacagatacctcgcagaacccacacaatataaacgttgcaaagtacacgcaattttgcgatgaaatagcatcaaatttttccgacccaatgttgcgtcaaattagcatcgaatgtttccttgcaacttcgttgctagttagtgatgaatacgcaa

SEQ ID NO: 185826 - DNA, 336 bp, Arabidopsis thaliana landsberg
atgccgaacttcttaactctaaaggacgacaaactacgattgggtaagcgagtctcggatagggtccatagtaagcttagtaactgatctcgacaaaagtacctatcattccagtcaaggtaaatcattactctgtttgcgtggcgtccataaccagccaaaacagagatagatggtgctgaagggaggaaacttgacaggagatcagcgataattgacatgggcagcaactctctaggattccaaagaggaactaccctccaaacgattcaaaatcagactccaacaaagaaacaagcggaccaaacgataagaactagcaaccaggttttgtga

SEQ ID NO: 185827 - DNA, 237 bp, Arabidopsis thaliana landsberg
atggacgcgatgctcggcaagaacgtgttcaagtcacggttgagcgaagaccggcagcggtgggagcaggcgtcgacgatgagccacgtcggcccgcacgcgccgcccatgttcatgctgcacggcaccaacgactcgctcgtgcccgtagagcaggcgcgctcgatcgccgagatgctgcacaaggaatcgacgaaccacgtggtgtacgccgaactgtcgggcgcgcaacacgcg

SEQ ID NO: 185828 - DNA, 124 bp, Arabidopsis thaliana landsberg
agacccttgtgaagaaaccaatcaaattctcgaattcgacacgttaccaacaaaatgtagcaacgggaacaaaaacccagaaatgctgcggactgtttacgcacaaaatcgattaaagacctaa

SEQ ID NO: 185829 - DNA, 621 bp, Arabidopsis thaliana landsberg
aattaggtattcatcggcacatcactggggatctttagctctaggcatagtgagtagcacgggacatcaccggttactttatattagtgatttgagtttaagaacggttcgaacacatagtgagtagctctacctcctaccacaaggaccacataccaagacccaagattttaagatattatgaaacatatggttaatcaaacacatagaatcatcaatatctttactcaacataacctcccaaacataagcttttaagcataagaatctaaaagatcacatatgcggcctaaatctatcattcacactattaatcaatactcatgtaattcataaaaccaatcaatgaatgaaatagtataatcatgcaaccaaaccatatccggaactcactccagtttccaacaaggtgtttgagatgatacggaccgagctcctttgatgataacacttcttttcaactatttcttggcaggttttctcgattacatacgatcactcaataacatgacggcctttcggttctctctctttctccccctacaaaattctttaggccgatcgagcttatatagtggtaacaagggcgagtcagctagtatatgtttcatccgcccgtga

SEQ ID NO: 185830 - DNA, 542 bp, Arabidopsis thaliana landsberg
atgatcgcctgcctgctgctcggtggggctgccgcaatcacccggaacaagatcctcggctacgcccaggtggtgctctcggtactggccgcgctgctctgcttcgtcggccatcgccagctcgtcagcttcgcgggcggcatcgaccactcgttggcggtgtacgccggcacggcgggctacctggtgtacgcggccgcaggtttggctgcggcgcgctcgacccgtgaggtcgccgatccccgtggcttcctcgagaccctgatgggctggcggcccggtctgccgatggcggtgatcggcgtcctgctcggtctcatcgcctatctcgatgccacctggttctcgccactgcagaagaacatcgacttcgcgacgacccgcaccgacttcaagggcaccggcctgcggccactggcgaccgcctacctgaattggctggggctcgtgctgttcgcggcggctgcgatcgtcacgctggccgcctgctggttgcggcaccgacttgtctgttgggccgcggtcgagatcaagcctgtccg

SEQ ID NO: 185831 - DNA, 229 bp, Arabidopsis thaliana landsberg
atgcagaaagtttgctggccttactttgatcctgatttcgacaatcttggtgaacgcatatacggtccaccgtaagctcttctctcttcctatgtgataaattcgttgaacaacaatgtgaatccatatacatttttcatcacgatcatcttcttttttggtgtgtgtaatttacagatgcagggtctatattgacaatgacagcattcaagattgcaccgttgtgaag

SEQ ID NO: 185832 - DNA, 270 bp, Arabidopsis thaliana landsberg
gcgcagcacaaatacccattgataccgtttatggcattatcaatgtagacttcacatacgcctcctctgatgcagatctgggctccgaagaatattacctggctgctttcgacagctgcggaaacatcagccctataggcactgccatgaatactatattcctgagctcagtgtctcagatctgtgatcgcagtgtagtgttgaactggacagcttatggcgctatcggcaccggactcgcaggttacaacatttttgaatcaacaacag

SEQ ID NO: 185833 - DNA, 413 bp, Arabidopsis thaliana landsberg
gtatcaccaaatcaggatgaaagagtccgaccagctcgtgacttctttcatcacacccttcggcatgtactgctatgtcaccatcgcgttcggcttgaggaatgcgggcgcgacgtaccagcggtgcatgaaccatgtgttcggcaaacacattggccgcacggtcgaggcctacgtcgatgacatcgtagtcaagacaaggaaagcttccgacctcctttctgaccttgaagtgacattccgatgtctcaaggcgaaaggcgtcaagctcaatcccgagaagtgtcttcggggtgccccgaggcatgctcttggggttcatcgtctccgagcggggcatcgaagccaacccggagaagatcgcagccatcaccagcatggggcccatcaaggacttgaaaggcgtacagagg

SEQ ID NO: 185834 - DNA, 345 bp, Arabidopsis thaliana landsberg
  unsure (1)..(345): unsure at all n locations
cgattctgtgcggcgagtcgtcgcacgctggcaagcccctgctatgtgcgcaatccctggccctgctcccttttggcgccgacatcgagccccagccgcctcgccggcgagcagccgcgctcccatcctctttgtcgtgcgccctccacccctgctgcttggctaagcaccggcgccccgcttccannnnnnnnnnnnnnnnnnnnnnnnggctggctcgtccttgcaggcgtcgcgccgtcgcccctggccgaccccctctcccttccccatagcagttactgcgtggaagaagaacgtgaggaaggagatgacaatttcttaaaaagaagctcaagcctgatg

SEQ ID NO: 185835 - DNA, 407 bp, Arabidopsis thaliana landsberg
gatacaataagtgtttctggaggtaaagtttctgaagatggtgttgttgagagttttgataacgacgatgaggctttggatgcatttgataatggagttgtggtatgtaacttaactttggagctctttggatttgcattatcatttttgtttgatcaaaacttgctttataggttgtggacctctcacattttgggagaattcgaggtatatccttgtttatctgctgtcttatttgacattgaattcgttctaatttgcttagcttttcgctctgaatttgcctatgaatactaccttaagttttttttttttaatctattttccatcaagttagtggagatgaccgtgctcatttccttcataaccaaaccactgcaaattttgaaagcctttatgaaggacag

SEQ ID NO: 185836 - DNA, 333 bp, Arabidopsis thaliana landsberg
ggcctctaccagcgcttcgcgggcatcgcggcgaccctggaggaaggaagcgattatacgatcgacgagaagcaccgttccatcgcgctcaccgacgccggcatcgagaaggccgagcgggccctcgagatcgggtgcatctataccgacgccggcatcaagtacgtccatcacctcgagacggcggcgcgcgccaaggcgatctacaagcgcgacaaggaatacgtcttgcgcggcggcgaagtcgtcatcgacgacgaattcaccggccgcatgcagccgggacgccgctggagcgacggcctgcatcatgccatcgaggccaaggagggc

SEQ ID NO: 185837 - DNA, 249 bp, Arabidopsis thaliana landsberg
acgagactattaatataaccctaaaacctaaaacgaatttaggatcggagaaatttacacgagaagtgacggtgagaggaagaggagactcgtgctcgtcgtgaacaaggtatacatctttctcttcgtctttttcctgcgatagcaccataatatcagatcagagaaaaaggggaaaaaatcaaaatcaaaatctggctctgcgaaaagagggagagataaatgtgggggtaatgatgaacgcaaaag

SEQ ID NO: 185838 - DNA, 348 bp, Arabidopsis thaliana landsberg
atggaaacgatcggctttggaagtgaaattggcgattggtggatgagaaacaagcaagctgagagatttgtgaagccatcgtcgagatctgataccgaaaaattggaagtgaaaagtcaaaagggaaagaaatggagaatcggagcgtggtcagcacgagagatggagtggttgatctagccggcgttcaggactgactgactaaaaagacgatactgatcggacaatcttgaccgtccgctcgtttgattttgaagttgttcggtcaaaatgttgcgaagaaattacgcgcatatgacaatttcggtttagtgtggtttaatctttgactttagggatcggagatga

SEQ ID NO: 185839 - DNA, 38 bp, Arabidopsis thaliana landsberg
atgggctatgcgaccagaagcatcggaatgaaaaatcg

SEQ ID NO: 185840 - DNA, 439 bp, Arabidopsis thaliana landsberg
atgaaaaagaagcgacatgaaccacgacaaagagaaaagttagataaatttaaagttgagtgagaacttgaagtctttaattctcattatacaagcaacaattttctttcttcggagagaaagaaatgagagattgcacaacacttcaagttctctcctaagattgttttgtggcagattgacataaccatccgtgacaatatcgcaaaggttgtggaagattgttgtcccaaatccaatggttcacccaaacctagttactatagttggctcttgacttgtattagtttcagttttttttttttttttttgttggggtccatatctagaagcttgtccaaagtaaataacaatgttttttttggtaatagtaattcacattttatcctaaaaaaatcttcaaaaaatgaatatgaaaagtacgacttacgagagaaat

SEQ ID NO: 185841 - DNA, 412 bp, Arabidopsis thaliana landsberg
gggccttagcgttcaacgacacggacgaagatgattttctatactgtctcccgaacaacaaagagatattcgtctgccggaagatggccaaaagtatgggatttccgaagctcgaagttggcctctccgccatgtcaaagaatgacctcgcggacagccttgcatacaacagtctgaaggtagaaaagttgtgaacttaaagtctatggacttggaaattaagtattttattctcatgctaatcctttgtccttttttgcagggcttaattcttagcaacgccttgagggcgcaaaagaatgcagaggatgagagctgcacgatagctcttagcaaccttcgatcagaagtcattaaactgagaaacaaagccttagagaaggacaaaattctactttcattggtggataaa

SEQ ID NO: 185842 - DNA, 899 bp, Arabidopsis thaliana landsberg
aatattgcttcgaataatttggatacatgataaaaatttgattagaaagaagggacattgtggtaaaatacgaaggaagaaaagacctttgactagtagtatctccgacgcggagagcacttctgtcgacaaaactaaagatccgaaccgtccattattcactaccgattcatatcttccaaaggtgccacgagacgacccacgtgtatggccacgtttttgccatcatggaatcaccataaaaggaaaaataaaaaatacttttttagtttattttctttcattattatgaaaagaaaacaataaagaaaaggcccacaagcccgacaactgcttcgaatccaacggctgggataaacaaatgatccaacggtataaactaagccacgccagtagatagttattggcatttagaggctaaagggccaacgaggctttttttttttgcgttggcgtaaaagagcttctatccacgaagtggtccctacattacaaaatgcgactcacatggatgtatctacgtgtcggttatccattgggtgatgtagtaaatattgtctgggctctctatttttgtttatttttattttgtgtactgtagaaagaaatcagagagcataatactagtactagtattattcaacttaggttttcggtgacgtaagcaaaggtacagaccacatcagctttgaatctagaccgttgatctcggtttctcgattagaaaaaaatcgacggttaagctgcaataaaaacgtgtgttttatataacttcgaatcatctgacgtggccatcaatattttgtagtggaaaaaaaatgtggggtcgataagtcagaaaaggagattaatcatccaacggctcaaacgtgtccccgacaaaatgacgtgtccgtctg

SEQ ID NO: 185843 - DNA, 1215 bp, Arabidopsis thaliana landsberg
atgcccaagtgttcgatagaaacgatcatctgtgttatcccacattgtgtggtgaggaaggtcattacaaggaatcttgcccaactacaaatccattccaacaacgcaaccgtcattaacaatgtgtttcccattagtctgcgcctcaagaagatagtcaataaggcaaaggtaaagaaaatcaagattattccttaggattagattatccaaaccttcatgacctgaaaaggttccgtgacaggtaagtaggggttctaacagcacttgtttgattgtgtgtgcattgattgcttgcttgcttgcataattgcttgggcgctttattttaagtattgtttacttagttttgttaagcgtagtatcatatgggtaatggtaaccccaagtgagtgttgctagcttaagtcgtttatttttagtctgagtgagtggagagttaggattagaatcttttagtaacctgaagactttgaacccttagagctaggaatctagagttttaggtaaaccataggtttctaggatgactaccttttacccttttctcggtggtaacttgaggtgtgcggtgtggctaaaggcaaatctgaatgctaggatagtaagcaaccctagcagttctgtgaaaagaaatcccgtttaccaaagtgaagtttaagtggatcaaggtagagcagagtatgaagccgcttaacctactgtgggaagaacccaagtatggttactttttgctgtggctcgcataggagatcaaggtagaaagaaataagaatgaagtttggtccaaggggaggagccaaattcacatgtcatcaagtaattacaagattatgagaagaggaatcagagaatttattcaatggaaaggataagttaagaagagccatatggaggaggcctaaactttacacacaatgggatgtgttataaacttaatacgaagacaatgaagacgaagaaaagagttatgaagggtgtgaaccaaaaggaacggttacactatgttaagcatggaagttgtatgattagtcaaatgggaggagcaataccaagacaaaccttagagatttaggtgaaacccttttagtctttcagtggtagagttgtctcttaatccttagaattcgaggacgaattcttttgagggaagaatgtaatgcccctgaccaagacgacggcttggccgaggaatggctatcgaggaaaacttga

SEQ ID NO: 185844 - DNA, 92 bp, Arabidopsis thaliana landsberg
aaaatgatcgtcataaccggatttataacaaggaacattctgaaactagtcttgggatcacggttgatttagcaacaaagtatagaacataa

SEQ ID NO: 185845 - DNA, 203 bp, Arabidopsis thaliana landsberg
gcctactctgacgcgcctagagggaacgagcggctggctttggatctaaagagcatagggaaatgtttgaatctacaggtcagcttcatcttctcttgttttctctgtttcagttcttgttcaaggataaaaacagagaaacgttggataaaacttcaaggaacttaaagagatatagacgtgacgtagatggagaaatatga

SEQ ID NO: 185846 - DNA, 316 bp, Arabidopsis thaliana landsberg
ggtttcttcagccgccggtaatggacttttcagatgatgacatgattgataacaaatcaggggaggagaattacagctatggtggtggtaacgaatccgatgactacaacgatgtggtagacacaattattccatcggagaaaagttacgtggttctcaaggaagaagacattctcaagcttcaaagagacgatatcgaacgagtttcatcgattctttctctaagccaagtggaagtgattgttctgcttcttcactataactggtgtgttagtaaagtcgaagacgaatggtttacggacgaagaaagaatccc

SEQ ID NO: 185847 - DNA, 57 bp, Arabidopsis thaliana landsberg
atggtgcctccagagctaggattcaacgagtgtctcggacagggttcatacggttcg

SEQ ID NO: 185848 - DNA, 749 bp, Arabidopsis thaliana landsberg
atgcttcctggtgtccttgtcatgcttcacaggatcaatgactatgtcgcggagatttttgaggtctccaacttgacatttgccttcaaaggcccatggttctctggaatgaacatgttgatcactgcagatccttcaaatattcaacacgttttcagctccaacttctccaattacgacaaaggaccggagttcaaagagatgtttgattttctaggaaatgggatcttcactgctgactccaaactatgggaggatatgaggaaatccgcattggtcgtgcttagccatcaagggtttcaaagcttctcattgacgaccatcacgcgtaaaatcaagaacgggcttgtcccggttcttgatcattttgcggaggcgaatacgattttcgatttacaagacgtgttccagaggttagcattcgatgtaacccttactctggttacgggttatgactcaagttctctttccattgaaatgccaaagaatgagtatgctaaagctatggatgatgctgaagaagtggttgtgtatagacatgttaagcctgtggtcttgtggaagctgcaaaactggattggactcggagaagagaatatgatgaaggaagctaatgccgctttcgacagatcttgtgcaaagtatatatctgcaaagagagaggagataatcagtcatcattctaatattggaggagaaactcatgcagaggatttattaagcgtctacatgaatctagatatttccaa

SEQ ID NO: 185849 - DNA, 147 bp, Arabidopsis thaliana landsberg
gttccaccaggcgaatataggctgtctgctttggctgctacaccaaagggtgcttctgagcttctgtttttgccagcttatgttgatgttgccgttaaaagtcctttgttgaacatagaattctctcaggtgattcgctttgaatga

SEQ ID NO: 185850 - DNA, 923 bp, Arabidopsis thaliana landsberg
atgcatagagcttcttctaagcacactaatgcgaagaaagaagcaatctctacttcgaaaattcgagataataatgtgagagtcactagatcaagagctaaggccttaggagtgtcgaattctccatcaaaacccgcttttaaacatgaaacgaagcgtgttgctagaccgagtaataaacgaatggcatcggataatatcacagtttgtaatcagaaaagacgagcggtgctcaaggatgtgactaacactttggcagaaagtataatttctacagaaggcaatgttaaggtagcaaatttttatgctttctttgcattttcttgattagtatatgttttggtttagaatttgttgttaatgatacaatgtggcaggcttgcaagcgaggtggtaaagaaactaagcaaatagaagaagatggtttggtagatgtggatggcgaaaaatctaaactagcagaagatttgtcaaagattagaatggttgaatctttagatgcatctgcttcaaagcaaagtaagaaacttcactactaaagaatgtgtttgtaccagagtgtttgtttctcaaatttactcaagaattagtggattgtgcagaagaagacagatctgatgtcacagattgtgttcagattgtagatatagattcaggtgtccaagatcctcagttttgtagcttatatgctgcaagtatatatgacagcataaatgttgcagaggtttgcattacataatctcaatgcttggtcttattctatcttcccaaaagatgatttacattttgagattttgagttacttatattaaccaatactttttgtacagcttgaacaaagaccttcaactagctatatggtgcaagtgcagcgagatatcgatccaacgatgcgcggaattctgattgattggctcgtggag

SEQ ID NO: 185851 - DNA, 2220 bp, Arabidopsis thaliana landsberg
atgctagaagacaacgacaagatctcgagggccaaagctagtgacgatggtgagctccgacgaatcggcgactacgatggtatagacagaaaggagaagcgagggtggtagcttacatatcaagatgtaattttgatgaagatgacatataatcttcataattatgggattcaagtcgtcgagatctctaattttcaaaatttcagaaaaaaagaaagaaaagagatttacgcttctcaattgtaaattgataaacaataaaatagttaactaaaaggatttcaagcatttgctttgggtttttgttaattgacaaatattatatcatcttttccaagtaaatagacaaatttgattttatctctttttacaatttgatagaaaaaggggaaaatgatgaatacttacaatatgtttggttttccaattgggttttctatgtacactatcctttaggggttcgtttttgtgaacgtagtcggagcaaaaattcttaattgatttgatgagcctctaagattagaatttttaggttccataaacactatcttattagggtttagtttttttctatgaaaacttatttaattgaatttattaggttcgtctcacgagatttgttggcaacgaagatcggttgtgcaaaatgaaaccatgaagaagattggcaacgaagaaggaagaaggaagaagaaagaagaaagaagaaaaaaggaaaaagagaatgaaggggtaaaatcgtccaattgcagagtctaaagtgctctttttcaaaggccatcccgattgtgcccaaaatcaaagtttttagaaatgttcccattatgggattggcactataaagtgatgggcattgtctaattaggcatttcttatagtctttgtggattatggcacttctctctcacaaacatgactattttaccatgtcactcctaaattctaaattgaagcagatcggagttcctgcgtttgttgcatccaaacatcatcttccaccttcaaaatccaaacaaatctcattacaactctctctctctctctctcttcctaacaaagtataatagagaaggaaaggattatctcttcgaaatttgttaattgttatcatcggatatctcgccgttggtaaatacaatttcctcactcattcaagcccagatcgaattatactcgaattcaaaagccacaatcggctttgagttccacgctcggagcatggtcattctggtttccagatcctgttttattaacaacgatgatgaacttcgttgaccatatggaacaaatttggtctagaattagtgatgaattggagattaactgattcgaaccgcgtgtaagattagaacccaaaggttccctagatagtatccctttagggattagatttttttcatcaaaaattgtttaatttgattgatcgagttaatcggagaagacgtgttggtagcggtgagagttggaaatgaaagagatagtgttttgatggaattaaaagtgacggtgttgacaaatatggcgtccatgaagcaagtgcagcagtgagaaatgaggattgaagatttttgttgcagggaaatttgttgacaacgatgaagtgttgttatcaacactataacctcacacaaggggcaaaaccgtcatatcccttaccaatatatgcttatttccataagtccattcaaaaaattcattttttctaatttttttttttttttttttcgtcgaaacaccatttctattaagtaatcggaaagagactttcttctagagagagccaatcaggaaccgacttgcttacatgggaaaaaagactattgcgggctcgtgctttttttgcaaggcaatcggcccgcacattgtaaatatgagaaaagaacttaatagtaaaagaagagaaaaaacagacaagggaactaaaagtcaccaactcagcaagaaaggtaggccactccgaaggattttcaagaagagagataagatcaacactgtcagatgcgaaagagcgattcattttttctaattattgggctaaaatgtgtccaatcttacaaaagccccatcttatttggctacattctattattgtgtggtccccaaacacttttaaaccgtatagagttggcataagcgtattttacatttatagggacaagggtcaaacacaggccatccagtcaccacgaaaggatcggatatatctcaacgtgaaaacac

SEQ ID NO: 185852 - DNA, 221 bp, Arabidopsis thaliana landsberg
tgaggagaggttactggggtaacaagattggaaagccacatacggttccttgtaaggtgactggaaagtgtggatctgtgacagtgaggatggttccagctcctagaggttctggtattgtggctgctagagttcctaagaaggttcttcaattcgctggaattgatgatgttttcacttcctccaggggatccaccaaaactcttggaaacttcgtcaag

SEQ ID NO: 185853 - DNA, 103 bp, Arabidopsis thaliana landsberg
atggacacgcaaaactttagccttcctttcatattctcatcatttagacttggtgtaatagcattagtatggcgtcgaagtgtaccttccttaagacgcttat

SEQ ID NO: 185854 - DNA, 279 bp, Arabidopsis thaliana landsberg
atgaacaggatcgtgtccaacatagaacacattgttatcattattgcctttcataacgggtaattccacaacctgtcttgtgttgaggttacaaattcgtactcttctccaatttctgtacagagctcacgaagcggccaccctctattgtcggaatggtcagatcttggccgattacagagaccgatgtgtccgagtgatcatgattcgaagatgtgtgcaacgcatacttgctatgtttttcgctctccacaaaataggtgagataacgacttcgtg

SEQ ID NO: 185855 - DNA, 411 bp, Arabidopsis thaliana landsberg
gcccgttctcgtcgaaacgatgccttggttttggaagttgtatctcatcagtttcttacaaacgcgtttgttgtatctgaacattcgcgtctctatgtttcatacatttctgattttccctataagttcaatacactagcaacgtcgatgattagggtactataatctcttcgtcacacacatttctttgcatctacatttgtaaaagagactctctcttcttcttttggtctatcaaagatgcaagaaacccaaacgaagttgtctctgagtgtaacaccagttaatgcaaatgccccactcccacagaatcccgcaattcctctaggcttgattgctccatatcatcaacaagcaaaagacattaaccatatgttacaggttttgatctgttcttatatattacgatga

SEQ ID NO: 185856 - DNA, 1861 bp, Arabidopsis thaliana landsberg
atgtccggcgataattcaacggaaactggacgaagacgtagccgaggcgcggaggcgtcgagtaggaaagacacactcgagcgtctgaaggcgattcgacaaggaggaatccgttctgcgtcaggtggtgggtacgatattaggctgcagaagccaatcttcgataccgttgatgacgaagagtacgacgcacttgtttcccggcggcgcgaggaggctcgcgggtttgtagttgaagatggggaaggtggcgatttgggatatctcgacgaaggtgaggaggaggattggtcgaagccaagtggaccagaatcgactgatgaatcagacgacggtggtaggtttagtgggagacttaagaagaagaagaaagggaaagagcaaacgcagcaacctcaggttaagaaggtgaatccggcgttaaaagctgcggctactatcactggtgaaggtagactttcgtctatgttcacatcttcgagtttcaagaaagttaaggagactgataaggcacagtatgagggtattcttgacgagataatagctcaggttactccagatgagtcggatagaaaaaagcatacgaggagaaaactaccaggtactgttccagttaccatcttcaagaataaaaaactgttttctgttgcctcgagtatgggaatgaaagagtctgaaccaacaccttcaacttatgagggtgattctgtttccatggataatgaattgatgaaagaggaagatatgaaagaatctgaagtcattccttctgagactatggaattacttggaagtgatattgtcaaagaggatggatcaaacaagataaggaaaactgaagtgaagagtgagttaggtgtcaaggaggtatttacattgaatgcaacgattgatatgaaagagaaggattcggctttaagtgccactgctggttggaaggaagcgatgggaaaagttggaactgagaatggggctttgcttggttctagttctgaagggaaaccggaatttgatttggatgctgacggatcacttcgtttcttcattcttgacgcttatgaggaggcttttggtgcgagcatgggcacaatatatctgtttgggaaggtgaatctctagatttttcattcatttttaaagttgttcttttggccttaatctagagaatgaattcggtctctctttttttaacaattcaggttaaaaagggaagatactcacaagagttgctgtgtggtagttaagaatatccagaggtgtgtttatgctattccaaatgattccatatttccttcccatgaactaatcatgctcgagcaagaggtgaaagactctcgactttctcctgaatccttccgtgggaaattgcatgtgagtttgactacctttgttacatgctaagaggaagcaatctattttcctctgttgttcattgtttttggctgtgtcttctcaggaaatggcatcaaaactgaaaaacgaaattgctcaggaattgttacagctcaatgtttcaaattttagcatggcgcctgtcaaggtttggatatttgacttctttttcatgtattctagcagcaatacttttcttttgactctctattctgctctttatgtacgaatatcagagaaactatgcttttgagaggcctgatgtgcctgctggcgaacaatatgttttgaagataaattattcatttaaggtacatttcagctgttcaaaataaaactaaaaatcgtctgttttcttacatctcaacaatatgacaagtttcctcttttataacaggatcgtccacttccagaagatcttaaaggcgagtctttctccgctttgctcgggtctcataccaggttctag

SEQ ID NO: 185857 - DNA, 161 bp, Arabidopsis thaliana landsberg
ctacttatgttgcatttaacgatttgcaacttggaactcacgtccaccatgttattggccgtatggttagaatgtgggaagttcatactgaaatacgtactgtcaacgaccgtgatggattctttgaaaactcactcctactgcttgatgagatggtataa

SEQ ID NO: 185858 - DNA, 54 bp, Arabidopsis thaliana landsberg
agttttgaacctttgaaccagcgagctgtagctcagttaaaagaaaatgagtag

SEQ ID NO: 185859 - DNA, 443 bp, Arabidopsis thaliana landsberg
ctttggatcgcctctctacgggagatcgaatggctaattggaaaggggtttcttcaggatcatgtgtcttctgcaatcatcccacaaaatctcgtgatcacctcttttttaactgcccctattcttctgaagtctggacagtcacagcaaagaacattctaacgacgcgtttcacaacggattggcacctcctccttaacacggtttctagtttacagcaaaatcgagttgaaaactttcttgtgcgttatgcctttcaagcttcggtttactcaatctggagcgaacgcaacagaagacgacatgggaacactctgcattcagcaactcggctaattggttggatcgacaaacaagtgagaaacattctttcatcaattcgaataaagggagatagacactacgatgcgggactccaaatgtggtttgatacaagagcctaa

SEQ ID NO: 185860 - DNA, 714 bp, Arabidopsis thaliana landsberg
atggaacaagatgtgagtttctgttctttgctattgaagataatttgcaacatctttttaaatgaaatcaccaaactttgattaaaaatgttttatcttgcttttgtattttccttgttaaattctgcagaacaatagaaaagcatggatttcacaaccgagtggtcttaactttgtttggggaggtgactcgagatattgggttatccctaaagaaccaaggtatcatccgattcattccgacttaaccgataaacccaactttggtttactgataccaaaaatcttaaactgattcatttgattgttggttttaggatgcctgctgagctgaagatggtgagttggttagaagtaaccggttcattcgacaagattgaacccgggaaaacatatcgaatcggttttaaaatctcgtttaaaccggatgcgaccggttgggacaaagcccctgttttcatgtctgctaaaatcgggaagaaaggcaagacagtgtggaaaagaatcaaatccgttagccagaactttggtatactgaaaggtggatcagaacccgtcaatatacctgacgagtccgatggcctgtttgaaatcttggttagtcccacagcgcttaaccaagttactaagcttcagtttggtctgtatgaggtgtggactggacgatggaagacaggtctgttgatccacgaagcctttgttcaagaagtgtaa

SEQ ID NO: 185861 - DNA, 146 bp, Arabidopsis thaliana landsberg
tgtctaaggttactgcaaaagaaaaggagctgtggtgttgccagggagaccagagcctgtcaacagcctctgcacgaatgctgacaaatggcagttaccacatcaagactcatttctttagattccactcagatgaagatgcttaa

SEQ ID NO: 185862 - DNA, 730 bp, Arabidopsis thaliana landsberg
atggcagctttggcacctggaattcttcaaaagctaatccaaggtatgaaaacaggaattaaaccaactagagagcaccgaagctctatgttacaggtcacagatatcgttcccattgatctcgacgagaagtctctggagccgaaacaagggtttctcatcaaaatctctgattcctctcactcgatctacgtctctctcccttcggatcaagacgacgtcgttctcagcaataagttgcagttgggtcagtttatctacgttgatcggctcgaacctggatcccctgttcctgtcattaaaggggcaaaacccatacctggccggcaccccttgcttgggacgccggagacattggtggttccgaaagaaagaactgatcaagagattgggtcgaagcctagaagaggatcttggggacaaaacgtcgacttttcttcgtctccgtttgttgtgaaaccaatggcgttggagtttgaccattccacgccggcgaagaggtctgtttcagctagatttgcagcgtctccgatcagaagaggtggagtgagatgctcttttggtggaggggttttggggaaattggaaggagagagtccggcgacggcgatgctaaggaagagttgttttgtttcgtcggcttcgaagtttccgagaagtagaagtgtttgtgacagacaggccaaaaagaacaatgcttctctttttagtcccttcaaatcctctctag

SEQ ID NO: 185863 - DNA, 775 bp, Arabidopsis thaliana landsberg
agcaagcatagatggaaactacaatcggataggctagaaactagtcttgatagaaagattgaggacgtattaaaatcggcatatgaaaaattgtccaagaaagagcaagttctctttcttcacattgcatgcttcttcaacaatacatacattagtgttgtgaaaacgttacttgctgatagtaacctggacgtcagaaatgggttgaagaccctagccgataaatgtcttgtacatatatccagggttgaccggatatttatgcatcctttgcttcaacaattaggtagatacatagttcttgaacagtccgatgagcccgagaaacgtcagtttctagtagaggccgaagagattcgtgatgtgttggcaaatgaaaccgtaagtttttactatattccctaaagatcttgctcaataaatttagcatgttgttgcgataataatttcaccagtcttcttttggaataatttttagggtactggatctgtattaggaatatcatttgacatgtctaaggtcagtgagttctctataagtgggcgagcctttgaagcaatgcgtaatcttcgattcttaagaatttatcggagaagttctagtaaaaaggttacattacggatagtagaagacatgaagtatctacctcggctaaggttactacattgggaacattacccaagaaaaagtcttcctcggagattccagccagaacgtctcgtggtactccatatgccacacagcaatctagagaagctctggggaggaatccag

SEQ ID NO: 185864 - DNA, 153 bp, Arabidopsis thaliana landsberg
aatctagctgatagcgataacatagaagaaaccctaacttcgcgagctttgttcatcaacgcgtgtgagaaaaaaatgggtcgggacaacgatcagaagaagaataagaagaagagaaacagaagtaatgagcatgacaagagtgttgagaaa

SEQ ID NO: 185865 - DNA, 76 bp, Arabidopsis thaliana landsberg
atgaatgtttcgaagttcggtaacggagtaattatgactgctaatatccttcgggttaccgtgaactacacgttat

SEQ ID NO: 185866 - DNA, 587 bp, Arabidopsis thaliana landsberg
atgaaaacggatactactctacccataatcgccgaagacggcgactgtggcgacagcaagagggtaagagtggctgattcaggatataccgttggcggtcaggacagacctgtaaaattaccaaaaatcgaaaacaatggtacgtagttttactagatatgaaagacactaattttccttgttttctgaattttcaagagtgtttctaaatattgttcattctaaataattctttaaaacatttcatacttgaagaaaaactatatttacttttattttgtttaaggtcttaacaacataaaaataaacacagatttagtgtggttttatcgaaacaaaatttattttaaaacatcattacaacaatgtttttccaccatcgaggactaataaagtttcttctacatgtatcttataggagatgttgggacatcagaaggaacacacgttttagtcgatgcactaatggccgaagtggcaattaaagataaagacggaaaaacaaacgccggccacggtgtagtctcagtcatgggacgacagagagctatgacaaccgccgtttccaccgtcgtcgacgagattcc

SEQ ID NO: 185867 - DNA, 419 bp, Arabidopsis thaliana landsberg
ttcttggatgcttatacaagccaagatcaacgtgaaatacccttgtccatactcgagtaccgttattttgtcggtctttggtacgcttcaatgcgcccttcttagtttaattaagactagacatttggaagattggatccttagagatgagcttaccatcatcaccgtcgttatagcggtatataagacaatgtttcgtcagacatataaataatttggatccacacaataatcagatattgatctattgttaatatatgtttatagggagtggttgcacaaggtatgtgtacggtgggcatgtcgtggtgtatcaaacaacaaggacctgtcgtttcctcatcatttagtcctgtcgtgcttatgtctgcaaccgtgttcgatttcttgattcttcatcgtgagatttatttgggaag

SEQ ID NO: 185868 - DNA, 210 bp, Arabidopsis thaliana landsberg
atggcagcatgggccaaacccaaacgtcgtatatattgcgatgctaccaaagttccaattcataatttgggaaacaacgcaatcgttgaaaatggtaaaattatgtggcgtacgtagaatctccttcattcaccagctccaaccatcaaacatggccgacgccctccgggtttggttccactcgagagcctaacaaaggctctgttttga

SEQ ID NO: 185869 - DNA, 376 bp, Arabidopsis thaliana landsberg
aatcttgatcaccagtccggtgacgttctccgtcttggaagcggaggaggaggaggaggagccgcttcacgctcttcttctgatctcattgctgcgaatgcttcaggctacttcatgcaagagcaaaaccctagctttcatgatcaacaagatcatcatcatcatcatcatcatcatcaacaagggtttttggctgggaacaataacatcaagcaatcaccaatgagttttcaacagaatctgatgcagttctcacatgataaccataattctgctccctccaatgtcttcaatctcagcttcctctccggaaacaacggagttacttctgccacaagtaaccctaatgctgccgccgctgctgctgtttcttctg

SEQ ID NO: 185870 - DNA, 478 bp, Arabidopsis thaliana landsberg
ttgatcaagtgagaagccaagactcgctaatcaacgatgtggtagtatctaggaggggttacacatccaaagaaaaaaaaagtgagtacctagagcttccattgttggagttggaagctcttgccacggcaacaaacaatttttctaacgacaacaagcttggacaaggtggattcggtattgtttacaaggtaaaagtgattcaaaacatattgaaaatctaccactgcacaaggtttcattgtataatcacatgtgtggtaatagggaagattacttgacggaaaagaaattgcggtaaagagactatcgaaaatgtcctcacaagggactgatgagttcatgaacgaggttagattaattgcaaagcttcagcacataaaccttgtccggcttctaggttgttgcgtcgataagggtgagaagatgttgatctatgagtacttggagaatttaagccttgactcgcatctctttg

SEQ ID NO: 185871 - DNA, 150 bp, Arabidopsis thaliana landsberg
agacgccctcgagagcacaatgtggtagtctctaccactgggcactgtcctataaccactctgtcgaggaaacaccagtccttcttttgtcgaccgcggttcgggtcctgcccttgtgccccctactggcttggactgtagagcagaaag

SEQ ID NO: 185872 - DNA, 191 bp, Arabidopsis thaliana landsberg
atgtggaagctcgcaaccggatctgtagaacctcggagaaatactatcgcgaattttgcggccatgcaggaaacgacgattgcctttcaaaatcaaccaaaaaacctaaaccatttaaatgtgtttgccatgataataggcttctgattgatataataactgcatatgtaccttttattgctaagtcttaa

SEQ ID NO: 185873 - DNA, 718 bp, Arabidopsis thaliana landsberg
  unsure (1)..(718): unsure at all n locations
atgagtaagaaggattcagtatttcagtcgcaagcggatgatttctctggtggctttgaatttggagccgacgacgaggattttatgattgacatagaggcgatttatcggattctggatgaaaagcctgtttctatggaggtatggtttcgccaattgaaaaactgatgttgttcaaatgcttaatttctggactataatgattctcgtctgatcgaaactgaacttttgagtgattacttccaggttagtcaagaacccatgtccccggttggttcatctgtggtagagacaggcgagtttaggaacacactgatccanagtggttagtagacctagaggactcttttgtttactgtcacatttcttttgattactctgcctggaattgaagtgtggaattaattccaaagctttgatttattggaccacgtaatccattaggatcatcttggtaactgtttaatgtttgtaagtatatatgtttcttgcttaggatctcaggccactggttggtttccttaccgggatttgtatggtcttggagcctcacaaagtgaaatagcagagccaagttcattttctgaccctgagaatggacgattgggactaagtgcgacttgttattctgactacggtggcaatgtggtctcctttcctgtaaattgtgaagatggcactgtatccatcctggatgacatgagaattgattccaaat

SEQ ID NO: 185874 - DNA, 688 bp, Arabidopsis thaliana landsberg
atggtgtcagttcactttgtaatttctgatttggtgggcgtctgcgctggcttgtttctctgttgttcgtgcttgtggaagaaaggagaaggtgaaaggatcgaccttctcaaagaaccactcttgagcagtgctgaatctagtgataatgaagaggtcactgcacctttttcaaaagctgggattctaagccgcatgagtttctcctggatgagccctttgattaccttaggaaatgagaaaatcatagacatcaaggatgttcctcaacttgaccgtagtgacacaactgagagcctattttggatatttaggagtaagcttgaatgggacgatggtgaaagaaggatcaccacgtataagcttattaaggcactcttcttttcagtgtggcgagatattctattgtcaactctgtttgcttttgtctatacagtgtcttgctacgttgcaccgtatctcatggatactttcgttcagtacctgaacggtcaacgacagtattcaaatcaaggggttgttttagtgacaactttttttgttgctaagcttgtagaatgccaagcgcggaggaattggtatttcaggttgcagaaagctgggattggaatgagatcagtcctggtttcaatgatctacgaaaagggcttgacccttccctgttattcaaagcaaggacacaccagtg

SEQ ID NO: 185875 - DNA, 1640 bp, Arabidopsis thaliana landsberg
acatgtcttggctactctagctgaagagtttttttttgttgttgttgctgctctgcttttaggtaagcgagagagccagaagatgatttggagaccaaaccgattctgaagaaacataaggaaaattccgaggatgaggagaagaaggtaaccacttgattcttcttctttgggaacaagtttctttacacactttgttatagtagtggctactcatgtaacaggagcagatcaaaggaacggtcgagttttttttatgccattacagattactaatgctattactttttgttaattaggtattgcatatatcacaaggtttggtaagggattcaactatttgcctcttgagtttgttaccatgagcacattaggtgaagtttttggtatagcaggtacgaagactacattcaacaagaaagccttccgattgaagaagaggagacacctcccaatattgttcaggtacctttgttcttattatcttcgaaatctgtcaggctcagaagaaacgcttattctgtctcggggatgagtctacttttttgttgttatgcatatttaagcccttttctccttaagagtggcgctaacacacttggctgttccattcaggcagctgctgtaagaaaaaatacgctctttgttgccaatctctctccccaaactaaaatattacatatgtaagtagcacctttaatttttgctttcgttctcggaggaagttttccatgactgatattttatccttccacttttacagactcgatttcttcaatgatgttggagaagttgttagtgttcgacttattgtaagccccgagagtaagcatgtgggctatggctatgttgagtttgcttctccttgcttagcaaacatggtgagactagttttgtagtaatgatttaaaaattatcaaagtcatttgaaaattagtgtatacttatgatgaaaaacattcagcagttatttgaaagtaggataactgattaaatctcacacactgtaggcgctggaaaagaagaatggtgaatatttgcacgatcataagatttttcttggtgtggctaagacagctccgtaccctccacgaatcaagtaaattgattttccattttatggagatttgtttcagtaacactagttgtaacttattgctagagttgtgatgccattaccgaagactaacgctattacttttgttaagtaggtacaaccttgcagagaagctttggtaagttcttttgcctttgagttttgttatcaagagcacattgggtgaaggttttggtatacatggagagatcacaagggtttttgatattccaggtacgaagactatcttctacgagatagccttctgatagaagaagatgagacagtggaaggccttgatgaaactcctagttgtgttgaggtacttgttcttattatcttcaaaatatttcattacccttaaaaaaaatgactttattctgaggatgaatctttagatgaggctacttcttgttatgcaattcaagtccttttctccttagactcgtgctaacacacttgactgttgaattcaggcagttgccttaagagaaaaggtgctctttattgcgcatgtccctcgccgaacaaaaatatcacatat

SEQ ID NO: 185876 - DNA, 768 bp, Arabidopsis thaliana landsberg
atgaataagcatggagtggaacctgattctgtgacatacaatattcttgagaaagggtttcatcttctcggtatgatcagtggggcttgggaggtgattcaagatatgttggataaaggattgagtcctgatgttattacatacacaattttactatgtggacaatgtcagttaggaaatattgacatgggtttagtattgctgaaggatatgttgtcgaggggatttgagttaaacagtatcatcccatgcagtgtaatgctcagtggtttatgtaaaacaggaagaatagatgaagctttgtcgttattcaatcaaatgaaagccgatggtctgagccctgatcttgtagcatattctattgtgattcatggcctctgcaagttaggaaaatttgatatggctctttggctttacgacgagatgtgtgacaaaagaattcttccgaattcgaggactcatggtgctcttttgctcggtttatgtcagaaagggatgttacttgaggcaagatcgcttttggattctctgatttcaagtggagagacactggatattgttctgtacaatatcgtaattgacgggtatgcaaagtctggttgcattgaggaggcgttagagttattcaaagtagtcattgagactgggataactcctagcgttgcaacttttaattctttgatatacgggtattgcaaaacccagaatatagataaggctagaaaaatcttagatgtcatcaagttatatggattggctccaagtgtt

SEQ ID NO: 185877 - DNA, 263 bp, Arabidopsis thaliana landsberg
  unsure (1)..(263): unsure at all n locations
atgaaacgagttgatgtgcatgaaaatgaagcaaacattgcaacaataggtaccatgaaacgaattgatgtgcatgaaaatgaaaacgaattgatgtgtgtctatcacnnnnnnnnnnnnnnnnnnnnnncgcctgtaatctgtgtttttcacaggcggtttttgattgaccgcctgtgatgttgttttacatcacaggcggtgcaccacaagcggttcctggaaccgcctgtgtagtggcgaaccagaccgcctgtacagag

SEQ ID NO: 185878 - DNA, 893 bp, Arabidopsis thaliana landsberg
atgaacggtgacggcgccagagaaggcgactctgtttcacacgaaccatcaacatctaaaagtcctaaagaaggagaagagacgaagaaagaggaaaaaagcgaagaaaaggccaacacagttcctttctacaagctatttgcgtttgcagattcttctgatgtgctcttgatgatatgtggctcaatcggagctattgggaatggaatgtctttacctttcatgacattgttgtttggtgatctcatcgattcgtttggaaaaaatcagaacaacaaagacattgttgatgttgtctcaaaggtaaaaatccaaactttactaattagttgtttgacaattgttgtttggtgatctcattctacttaatgatgtggcttctaataggtttgtcttaaatttgtctaccttggacttggaacacttggagcagcttttcttcgtaagtttacactttacttggaattgaggaaggaaagttttctttttggtttcttcattgcatttttggtgctcttgttattgtagaggtggcttgttggatgatcacgggagagagacaagccgcgaggataagaagtacatatctgaaaacaattcttagacaagacattggattcttcgatgtggaaacaaacacaggagaggttgttggtagaatgtctggagatacggttcttattcaagatgccatgggtgaaaaggtaatgcagttaacagagaaacttccgtattgcgatttcaggcttagatataatgattggattcgtttttgaagtttgttacacttttcttgaatgttgcaggtggggaagtttattcagctggtatctactttcgttggcggatttgctttagcttctgctaaaggatggtcgctaacattgggtatg

SEQ ID NO: 185879 - DNA, 129 bp, Arabidopsis thaliana landsberg
aatttctttggttgggttccaaagccaaaacgagagattacaatggcaccatcacgtaacatcgctgtagccaccggattggttctcttcgcatctgcaggcttagcattccccttttacatggcctaa

SEQ ID NO: 185880 - DNA, 159 bp, Arabidopsis thaliana landsberg
atgggccaaaatattaagaagcctagcacaataagtcttaaatcagcatcattgcttcaagttgaagccttcgacgttaccgatgatggtttgaacgacctcggtttgtcttgttatgaaaggaatacagagccgagagaaagagcatatcacttttga

SEQ ID NO: 185881 - DNA, 118 bp, Arabidopsis thaliana landsberg
ctttcttgaacgaggccatccgttcaataaaatgttgaaaatccgaacagaaggaacccaattcgaatccatcgtccctcctattctctccaaatacattgaagcttctctaacatga

SEQ ID NO: 185882 - DNA, 78 bp, Arabidopsis thaliana landsberg
atgctaaacctaatgcacaacattcagaccacacaagaggtgcttctgagtgatgcagctcaagttcatgcaaagaag

SEQ ID NO: 185883 - DNA, 77 bp, Arabidopsis thaliana landsberg
atggttcggaggaagaatcttcccaagtccagcaacatgtgtaaatttggcatcatcgcttctatcatgatactcag

SEQ ID NO: 185884 - DNA, 362 bp, Arabidopsis thaliana landsberg
cattctacaaaccggagggctaccggcgcggtgaatacgagatttaccttcgctatctccgagcggggggcgaattgtattcgccaggcgcccaattgccgaacggaaagaccgacctgggagcctggcacgacctctcccataatttgtatggcttgaataccgactatccacaggcatcttatgctaaacgcagacaaatactgagctatcacgagcgattcaccaaagggcttttctacttcctggccactgacgaggaagtaggaagcctggcgccgcagttgcaaagggaatgggctcagtggggctatgcgagggatgaattcacagcccccgagaactttccccgcatgttctaa

SEQ ID NO: 185885 - DNA, 802 bp, Arabidopsis thaliana landsberg
gttggtttagaactagtttcaagagattttgacttcgattctccaaatcctttcatgagctctgacattattggattggtacctgtgtgcaaggttcgcctctccatgatccaattttagtttgactaatagagattcggtcacaatctgttatttatctacggctgcttcgattttatggttcaaattctagagagtaatctttaagatatatgttcgtttgaacagcatgtgctgtgtatttcatctgacggaaggacactcttggagtcatcaaaacttgctcttgacaaaggaaaactagatgatgctgtgagctatggaacaaaggtgtcatttcttttgatagctacatgatcatcattctaaccaactgaattgttatctaagagatgctgacttcttgcatttcctaggcattagtcaagatgattgctgtctgtgggccttatcatagaaatactgcatgtgcgtacagtcttctcgcagttgtactataccacactggtgattttaaccaggtatcatcatcttttatcttcttcccaaatggaaactttgatttcaagtaacaaatagagagtttgatgttctcgttctaggcactgtatataaataaattgatgagaggtaccgtcatctctgattttttatcctctcttgatcaggcaacaatatatcagcagaaggctctagatataaatgagagagaacttggtctcgaccatcccgacactatgaaaagctatggggatctttctgtattttactatcgtcttcaacattttgaattggcactaaa

SEQ ID NO: 185886 - DNA, 349 bp, Arabidopsis thaliana landsberg
atgattgattattcaaccagtgaatttgcgcgcatccgcctgcaactggctcgggacgaatcaagccagaccaaagctgacaaccaggtgctgcttcagtaccaaatgagtttgggtgcccacggcgcccacgcctactaaggagtccatgatgaaaacgatttatcaagcattggctggtttggccctggtggtcagcgtgaattgcgcccatgccgctttgaatgtgtttgcctgcgagcccgaatgggccgccttgtcgcaggaattggcgggcgacaaagccagcgggttttttgccaccaatgccttgcaggacgtgcatcacatcgaggccaagcccagcctg

SEQ ID NO: 185887 - DNA, 460 bp, Arabidopsis thaliana landsberg
atgccacacagtttcctgcagcatgagaagtctattcccttcacaggcaaatcagacagccatgcgctcgttttcataaaactgctggccgataccctgaagaagaaaataatgatcgttgatggaaaaacagggtcttatcctttcagggtcatgcattcacagcctactgattcgatgctctccatcatgatgcatcgcagcgataatttttttgctgagcaatccctgcttatggtaagcaatgaacggctgggttatatgagtgatgcaaagatgatagacacgctgcttaagagtgactacctggatatgccgcagaaacccaagtgggtggatggcagcgggctgagcaggtacaacctggtttcgccccgtgattatgtgtggctgctcacaaaaatgaagaatgaatttgcctggcaacgtattaccgccatacttcctacaggcggcacag

SEQ ID NO: 185888 - DNA, 570 bp, Arabidopsis thaliana landsberg
cgcagcggcgcgccggatcgacagatcgcgcatttcgtcgcggcacggcgcggacaatgcggcatcgtctatgccggctcgcgccggcgggtcgagcattatgcggcgctgctgaagcgcgaaggccatcatgcgctgccttaccatgccggtctcgcgcatatggagcgacgggccaatcaggaggtgttccaggcgcgcgccgatgtggtgatggtggccacgatcgccttcgggctcggcatcgacaagcccgatgtccgtttcgtgctgcactaccagttgccggcgacgctggaggcctactaccaggaggcgggacggaccgggcgcgacggcgagacggcgcgctgcacgctgctgttcctgcgcggcgacaaggcgatccagcagttcttcctggccggccgctatccgggcgaggacgacgccgccgcgatcgtgcaagcgctcgcgacggagccggcggaggccgacgcctggacgctgccgctgctgcaggcgcgactggcgcggccgcgcgcgaagatccaggtggcgctgggcctgctgcgcaaggacaagctggtg

SEQ ID NO: 185889 - DNA, 606 bp, Arabidopsis thaliana landsberg
atgagcgagctttgtacgaatcctaagaaacccaaactcaaagaagaagatgaagaagaagaagctaatgtctcttgcagagaagagcaagaagaagttcttgttgctttagtagagcaccgttctaatgaaattgagcgtctcaacaatcacatatctaattaccaaaccaaggtctctctctctctcttcaaagttttgatttttctctgtttctattttgcttttcttgatttattcaaagtgcaatgatttgaatgattggtgggtttttttcagcttattgaagcatagagaagtttgcagaattcaaaagctaagctagctcaacttcgtggagttgcagttccatctatcagtggtgcaaagaaagatcataaaccattgaagactttgagaaatgtgaatgtgagtgaagactatgcatctccatcacctagcaagactctaaggccctctgatagctctgatcatcctagaagtagttgtggtagtagtgtctccaaggctaagactgttgttgtgaagcaaaaatctgaaacatctcgtgatagtcctaatgttaaagatagagggatcaagaggaaatttggtaaccaattttga

SEQ ID NO: 185890 - DNA, 373 bp, Arabidopsis thaliana landsberg
gaatgagcatcctgttgtcccaattatcaaagaacaccgcactttggcaaagctcttaaattgtacacttggatcaatttgttcgcttgctaaactacgcttgagcacgcaaaggtacactttgcatggccgctggcttcaaacatcaacagcaactgggcggctttccatagaagagcctaatctccaagtatgacttctgctatgtttgctctttcattctatcgtgtatcttaaaatcaataaccatgttacttttctgcagtctgttgagcatgaagtagagttcaaattggataaaaatggaagggacgtaagttcagatgctgatcgttacaaaataaatgcacgtgatttctttgttcctactcag

SEQ ID NO: 185891 - DNA, 302 bp, Arabidopsis thaliana landsberg
atgctggccgaaggagaggagagggagaagagcaatcctcggaaaagatataggatagtgaatagatccgcggtaatattcttcatcattgttagttcgttgttaatttcttaaaaagcgattcacatatatgtctttcatcgtcacacatcctaaccctctgtcgcttctagagttcctttataaagagagtaccacgctttggtggaaatgaaacaatctgtaacgatgagtcttctccatgtcctgccttggttatcctttatgccaggctcggccttcatcgttacaatttgctccag

SEQ ID NO: 185892 - DNA, 951 bp, Arabidopsis thaliana landsberg
atgtacgtgaacaatattaatgatggcacgggttacgacttgtgagttgatatacagctcattgaaatggggagattagtttataaatttaacttcaaagaaagatcctgtttttcttctatgtggctgatagttaacctacaattttttgtttttctataatcagattttacattatgtatttcaacttcatatatggacaattgtagtcctacatcgagttttacattcgaatatcaatagaaattattagaaaaatccagtaaattaaactaattaactagtactctctttgtagtgttgtggttagaggtaatagatcttcctaagcaacagaacagctgttctcgtgttgttgagtttttgagatttcagatttctcgtgtcttgtccatgtggctcttgtgagacctccacacgtggcaggaaaatattaccaatacagatatcaaaaaagaaacttggattcatgtttaaaccaaaaaggatgatcatcatattatcataatgtatacacacaagaaagaactcgtagtaatacaaattacaaagtccaatatatgcaaaataaagtgtgaaacgaatccctaaatcaattgtgtacctgtgcctaattctaaagctagtcattattattttgggctcaaaaatcaaaaaccaaaactcattgcataatctagtacttcactacttatcacaacaacatgttttcttgtatggtttgataccaatattttgaaatgctgatgaaacaataactttttccaacctctcttgtgctttaaaacattcatactataagtaatcgtctttgatgctcaaatgctcaatgcatttttttaaaaaaggaagaagaaacggatcatctcaaaagtacatcacaacggcattcaaatggttccaatggaaacaaatgctacttggaacgagattctttttgcacgtccatga

SEQ ID NO: 185893 - DNA, 438 bp, Arabidopsis thaliana landsberg
atgatagcagtcaataccattaaatgcattgccgaggcggtggtgagaatgtatgacgggtcggtgcgatagatcccatctcgcaaattcagtatcgagttctttattagtgcctccttcatagccgttatcccaaaaaatgattgacgtatggttcctgtctctcaacaccatttccttcaccagcttacggcctgttccggtagcgtaatatttctgccatcccgccagttcatccagtacatacaatccaagggaatcgcataactccaggaaacgcctgtctggcgggtaatgcgagcaacgcactgcattcatgttcatttctttcagcagcaatacatcctgcagctgtatatcattactgagtgtacggcctgtttccggccagaagcaatgacggttggtgcctttcatctttacctgtacaccgttcag

SEQ ID NO: 185894 - DNA, 158 bp, Arabidopsis thaliana landsberg
cgaatttcgaaactgcaaaggcccggatttctccgagcctcgcgaattttccaacgtgtggactcgatgcctcagttgttctggcgccgcaggaaggcggggatgtcgaattccttcgattcctgggcttcgggctgtaccggaacctgatggccctg

SEQ ID NO: 185895 - DNA, 689 bp, Arabidopsis thaliana landsberg
attattgatggtaactcggtatggtaagaacgatctcttccgagttccgacaacattttctctaaatgggtttctttatttgttttaatagtaggagattagttgatcaaggaccacacatccaaggtccaaaaagaagagcccgcatcaattaaagtatcccatggggacacagggaacatgcatggttaggtttctgcatattctccgatccattccttgctttcgctatttacttatttctcaacatttattgttacaattattaattattcatttatttgtatcttttaatgtgtgccaagtaaattgattttgtgtccaggttcaagtgcaagaaatactagtataaaactaaataatgcttatatcatatgtttggtctgacgataccttgatggtgaaatctcttcgatatctggttcttattatgaaccattttcatatatattaaataaaaatcaatacatatatacacgttgaagtaatttttatatggacttaaagaattgtgtcgagtatgtggagtgagtcagcataagtcgggataattttgtctgcttcctcgcaaataattaaacggtgatgtgcatatttaactaactaaatgtatgtttttttatcatatagtttatgggcatcgcgtaatatacaaatcagatgacaacgctgaaggaggcactcattga

SEQ ID NO: 185896 - DNA, 143 bp, Arabidopsis thaliana landsberg
atgtggcgtaaggaggtgacagaatataatagcaggaaaatctggagtagcatcgaaggggacaatggctcatgtgcgtgccttcttgagagtttaaagtgaccgtcttggatcccattgcagatggggaagatagcggctga

SEQ ID NO: 185897 - DNA, 188 bp, Arabidopsis thaliana landsberg
atccttccgttaccgaattgaagtcggatcggcttttgaactgctgggcttttaacgggccctcttgccagactgagccttttcctggatatcaaattgcgggccagaccaaaaacgagatccgacatccacaaccacaaaataagattgcatataattatgttagatcaaaagtcaacatattataa

SEQ ID NO: 185898 - DNA, 344 bp, Arabidopsis thaliana landsberg
gcggtgcaccacaagcggttcctggaaccgcctgtgtagtggcgaaccagaccgcctgtacagaggtatcatgtagtagtgctagcaccagcactagcaccagcatcaacgtcagaaccagcaacagcagtaccagagacagtttcctcagtagcagcagcagtaccgttagaacaaccagtagggtggaaatcattatcagcgttagagcaaccaggcacctcgccttcctgccccagcaaccaaccagaacaaccaagcagctccagcgcaaggaggaggccgtgcgtgtttccactgtggggaacaaggccactgggcgtcgcattgctcaaagaaagtag

SEQ ID NO: 185899 - DNA, 81 bp, Arabidopsis thaliana landsberg
atggcagatttggtgaatctagaattagaaggaatgattccagaattggatcaacttcaacaactggagttatttaccaag

SEQ ID NO: 185900 - DNA, 81 bp, Arabidopsis thaliana landsberg
atgaacaccggtggtcggttaatcgccggttctcacaacaggaatgagtttgtcctcattaatgccgatgagaatgcccga

SEQ ID NO: 185901 - DNA, 468 bp, Arabidopsis thaliana landsberg
atgccggagaatgaacttgttgctgttaaagaagtggaagcaacattaacagaagaaaggaagtttaggagctctgcatccaagataggaacaatgcatcacaagaacctagcaaaccttgaaggttattgctgcgagctaggcaggaggtttctggtttacgaatatgctaagaatggatctatacttgaccatattgttgaccctttacgaagcaagaaactaacttggaggataagaactgatacctgcttaagcgtggctaaagctctttgttacctccacatggaatgcagagaatttgtcagtcatgggaacttgaactgcggaaacattctgcttggggaggatttggaagctaagttaacagaatatggattcggtttatgtgctgcagatacagatgttgacgattttggaaagacggttttagctctaataacgggtaggtacgaaccagaaggagta

SEQ ID NO: 185902 - DNA, 116 bp, Arabidopsis thaliana landsberg
atggagaagctggtagcccgctgcgatgtgatagcatgccccacaacgagctcgcgcacaggacgagcaaggagccgtgcgctgcgctgggcgatccaggacgcgcagggaacttc

SEQ ID NO: 185903 - DNA, 536 bp, Arabidopsis thaliana landsberg
aggaacttgaaaatcatgattgatatgggagattctgcaacccgagaaaaggatactaggttcaagcaaatcaacaatgaagttcttgatatgataaaggccaaagtttctttgatggaatcacaggttctctctctctctctctgttctaatcttaagttgcttgataggcatttctttcatccatggcttttctatcttattacattcttggaagtgtcattaacttttatgaaatctggagttctctctgataatggttttccgtagatcaagctcttcattcttttgttttcgatgttccctgtgggtcaatctgcctttgtagcgtattttcctcctattaatatgttgaggcacctgtgacatttatgatatttcttgcactatcattttatgttccataggcaatcaaaccagaaggtgcaacatcagacgattttcaggactcagtagaaaagccatctttgaagaagtttgtcatggatgcggcattggaggataaattgtgtgacctatatgacatatttatcgac

SEQ ID NO: 185904 - DNA, 121 bp, Arabidopsis thaliana landsberg
atgagcgaagaaggagcggccaaggcagaggagcagagacaaaacgagaactcgtttcttcttacttggcttggtcttggtatcgtcatcctcatcgaaggcattattctcgctgcttcag

SEQ ID NO: 185905 - DNA, 459 bp, Arabidopsis thaliana landsberg
ggcgaggcgatcgcgcacgccatcgtgcagaacatctcctattcgcaggacgcttattgcggctgcctcgcgtggtccggattcgactacccgtccggcaacggcaaccagttccagggcgtgaagtacacgggcgtcgtggacctcttccgcgtgccgaagcccggcgcggccgtctaccgggcgcaggccgacccggcggtgacgccggtcatcgccccggcgttctactgggatttcaacccccaaagcccggtcacgagcctggcaccggcgctgatcgcgtccaacctggacgagctgaaggtctacgtcggaggcgacctgctcgccacggtcacgccggacacggcggactacgggagcctcccgtacccgccctcgacggtggacttcagcgcggtcgacgggtcggcgctgcccgggctccgcatcgacgggtaccgcgacggcgtcaag

SEQ ID NO: 185906 - DNA, 53 bp, Arabidopsis thaliana landsberg
gtgtttgtctaatcacagaaccagaaactagagagaaacatgaacgagagtaa

SEQ ID NO: 185907 - DNA, 75 bp, Arabidopsis thaliana landsberg
atgaaactgaattgctcggaattaggaatggcggcagttgatgatgcgattcaaatcctaaaatatctttggaag

SEQ ID NO: 185908 - DNA, 748 bp, Arabidopsis thaliana landsberg
atgcccaatgacgccttcagcaaaagtactctatcgcagcctcggagccctgccagggcaaatcactctatcgcaaccccggagaagcaaacagctcagtttcactcaatcgcgaagccggaggaatcaccccatcagaaccactcgatcaccaggaagcctatctgctcattctgcactcaaccagacaagctaagaacaaagaagagaagagaagccgaagaaaccactcgatcaccacctcatgacatccactcgatcgcactcgatcacagggtcacttgaaaattcaatttagggatcatagtagcttagctttatctatgtcctctctctaattctcttgtaaatctcaataatacctcttcacttaatctttttaatatttctcttttggatggtgaggatttgtgttttcatggttttcttgttgttcttcattccttctccagtctccgccggtttctatacaaactcctcagccattccgccggagcttctccgaaacgccaccggaaacccctggaactcattcttgaatttcactggatgtcacgccggcaagaaatacgatgggctctataagctcaaacaatattttcaacattttggttacatcaccgaaactaatctctccggaaacttcactgacgacttcgacgatattctcaagaacgccgtcgaaatgtaccagagaaacttccagctaaacgtcaccggagtactcgacgagctcactctcaaacac

SEQ ID NO: 185909 - DNA, 263 bp, Arabidopsis thaliana landsberg
tccaaaacatcgtccacccactcccaggcaacctccacgtcccgcgactcctctcaaagtaccacttattcaccggattactactcctgctgcgccaacacacgccctcagggaagcaatcccgcaccatagccttgaacaccacatccgccacccctccactcccctggctccgcttcagcacagccagcttatccaggtacggcacccagcgcccctcgggctcaggactcccagggtcgatgccggggggtaattcccag

SEQ ID NO: 185910 - DNA, 279 bp, Arabidopsis thaliana landsberg
atgccaggggaaactggatttgactcttatggtgcttccaagtcttttaatgttttagctgagtacctctttggtaaggtactcatgaaccattccttatgactttttgctgtacttttgtttgatttttgaatcttgttttgctttaaatctggatacttgtgttttcaatagaacacaataaaggagaaaatggagatgacgacccctgttgttactcggaaagtccaatctgttggagagaagatggaaatgacaactccagtgataactagcaag

SEQ ID NO: 185911 - DNA, 990 bp, Arabidopsis thaliana landsberg
tttcgtttaagagagaacgctcccaacattagggctaaagctttgcgagcagtaagtgagcaatgtgtataaacacatagttaattctgtttgtgcgcaaagtcagaatatagttgtgctattctagcgatgataatacattctatcattggccatgacaggttagtataattgttgaagctgatgcagaggtactgtgtgataagcgtgttcagttggctgttgagggaaggttttgtgattctgcaatatctgttagagaagcagcactggaacttgttggtaggcatattgcatcacatcctgatgttggtataaaggtaattgacctgtatcaatattgttataacacattacccactattgctgtttctttgctgacccatggcatttttgtgcagtactttgagaaggtcgctgagaggattaaggatactggagtgagtgttcgaaaacgagccatcaagataatacgtgacatgtgtacttcaaatcccaacttctctgaatttacaagtgcgtgcgctgagatattatctcgtatcagtgatgatgagtctagtgttcaggtaatgttgtatccagtatgcattgtcttcatttttagtgtgatattatgcttacgcacaagatctataatagagatttcttcatctacaggatcttgtgtgcaaaactttctatgaattttggtttgaggaacctccagggcatcatactcagtttgctagtgatgctagctccattccactggaactggagaagaaaaccaagcaaatggtagggttgttaagcaggaccccaaatcaacagctgcttgtaacaattattaagcgtgccctggccctggatttttttcctcaagcagctaaagctgctggtattaacccagttgctcttgcatcagtacgcaggcgctgcgagctgatgtgcaagtgcttactggaaaaaatattacaggtcaacaataatgcttcacgactgcattga

SEQ ID NO: 185912 - DNA, 402 bp, Arabidopsis thaliana landsberg
ggcattgtgctggcacgccgtgacgatgcggcgctgcgcgccgtcgcgaatgccggaggtggccgctacgcggtattgcaggcggatggcagcggcaccacggcgttcaccgcgcccgtggccgaagccgcgcaggccagtcatggcgagcatgccgagctgtggcgcgatggcggcgcctggctgttgccggtgttgctggtgttggcggccttggcgtttcgacgcggctggctgctggtgcttgccgtgctggtgttgcccgcgtggatgcctgcggcgcatgcggcgacgtggtcgtcgctgtttgccaatcgcgaccagcaggccctggcggccttgcagcagggtgacgcgcaacgcgcgcagcaactggcgacgactccggcgttgcggggcgcg

SEQ ID NO: 185913 - DNA, 88 bp, Arabidopsis thaliana landsberg
tcatgcatatgctaaggttgttgtcttcagtaagatcccactccccaactataggtttgatttagatgacaagaagccacagagggag

SEQ ID NO: 185914 - DNA, 89 bp, Arabidopsis thaliana landsberg
atcaaggagcgaaccagggagctctggcaatgatgcaagtcttctgcagccagttagatcaagtgaaaacagctgatgaagagctttga

SEQ ID NO: 185915 - DNA, 110 bp, Arabidopsis thaliana landsberg
catcgcagttttcttcggttaaagttgaagataatccttacaaatgggttaatgtcaatggtaattgctcttcctggactgatctttctgctttcggctcttctcgttga

SEQ ID NO: 185916 - DNA, 694 bp, Arabidopsis thaliana landsberg
atggagcagagaaagcggaagaaggagagtgaggaaatgcttttgaataagaaagcaaagttagagtggagaccggaggattatgcgcaggcaattggattatctcataagtgtactggtaagggagaaaagaagaaatgtcattacaagacatttcagtttcatgccaataaatatggactggtgagttttgttttgcttttcagattatgctgatttgaagattttgacatttgactgattacaacatttatctagtatttgagtgtttactatgctggctaaattgtatgtgatcttttcatttgatatattgcattttttggatgtaaatctgaaacttttttgtttcatatcatcttatgaaaatcttaaaccagtactagttttgtcactataaatgcgatctatcacttaatgaaagtttataacaacaatttttaaatcaagtttagatcaacttttaaagagttatgccaagcataacaactttttcaaaaacaattgtgtaataagactcaaacgatatttatagtgaaacctatttttgtctccacttctttcattgtatctattgtattaccatttctaatagatttttacttcttcttgttttttttttaaatcttcataggaggactcagtgctattggttccagaggatggagaaaagccctatgttgcgatcataaag

SEQ ID NO: 185917 - DNA, 225 bp, Arabidopsis thaliana landsberg
gatagtgccgtgtaggaaaaagcgaatttgtggactagtgtaagtcaaataacacattcgcatttcattatgactatatattgactaaccataattttcaaatgtattaatataaagtgttcacaccaaccaaccttccttaggattcgtgtgactaacgtgcgccttacgaaaaatataacagttttcggctatcatcgaaccagaaacatccaggtcacgtag

SEQ ID NO: 185918 - DNA, 142 bp, Arabidopsis thaliana landsberg
acaccagtgtgtacgaaagcggcacctggcatctcctcgcctcggacatcttagccgggaacacataatgatcaagccattgagccacctgctctactaccataaacccccgggcgctcctcgggcttactgtgaacagcct

SEQ ID NO: 185919 - DNA, 151 bp, Arabidopsis thaliana landsberg
ggatcaaaacaatgaatcctcgtcaatgatcatctattattgcacgagcaacaaaacactttcccaattcgaaaatgaaactaaaatcactcatcctcagaattctgtgatatttacctgggaacgagctgaagaagatgaaacagagtag

SEQ ID NO: 185920 - DNA, 294 bp, Arabidopsis thaliana landsberg
atgctcgaaaacgacggcgtcggtgttggcgagaacgtcgcggacgcggtcacaactggcgccttcgtcagcgtcggcatcaccgacacgctcggcgacaaagacgaactcaccgaccacgacggcgacgcggaagacgactgcgacgcggggaacgacactgacggcgtcgcaatcagcgtgctcgacgcactcagccgctccgtgacactcgccgttgccgacgcgctgaacgaagacgtcggcgatgtcgacgccgaacgcgacggcgatcgcaccagcgacggcgttcgc

SEQ ID NO: 185921 - DNA, 556 bp, Arabidopsis thaliana landsberg
gttgaaaattctgtgaaaaccagtccaaagaacaaacgtatgtgggtaacatttctgattatcgtcttctttctaatcggggctcttggtaaggcgcatgagaaacacttggcagcaaaggagagaaacttttctcagaattggaaagtgataagacctggactggaagctcttctttcatgcagctgtttgatgcttttttattattatgcctctttggtattttcgtttgtttgctcattctttgtttcatgatatatgagtctacttggtgagttggtgttatggttttgtctttgctccaaagtttgtgtagtactttgtaatggagtcgcttagttccgttaaacaaaatggtttaagctatgttacttggtgaaaaagtaatttcgtatgtcttaacggagtctggtgaataggacaagcttttttggtaaactggaactggagtatgttacagtctgatttcaggactctaagtgggtgattgtttcgtctgtaactgtatattaattgctgtagaatttttgttgtaggtgtgatggctgtagcttga

SEQ ID NO: 185922 - DNA, 438 bp, Arabidopsis thaliana landsberg
gttctggacgatgatgaggacacgacctaccacctcgcgtcacctccctatggattgtccgaggttggaagccgacgagcatccgctggccgcgttccgcttccctggcagctaatagaggaccggtgcggccgtcctgatacgcgacgcggaatgtaccggtacggccagcgaaataggagcgctgacgtatcacgcggacatcgtcacgtgtctcattgcccggcaggacagctgcgctcaggtgcccgcttgcatgtcatgccgtttgagttcctaccgactgccatgggggttacggtgagagtgctggttgccggagatcgcggctacatcggagcggtcctcgttccgttcttccgcgacgcaggccacgaggtcgaccggctcgacctcgacctgtacgagggctgcgatttcgggcaacaccagcgggcg

SEQ ID NO: 185923 - DNA, 44 bp, Arabidopsis thaliana landsberg
aatttaaacatattgatcggatttgttttgcttatgatgtttag

SEQ ID NO: 185924 - DNA, 598 bp, Arabidopsis thaliana landsberg
tcttcagaagaattgaagaaggagattgcatcaattgagatagagattctacacatggaacgatatctcttatctctttacagaaaatcatttgagcaacaacttcctaattccttctctaatctctctgttactactaccttacctcgttctgtgactacttcaccaacatcactaactcattatcaagcttaccaaaaaccaatctcatatcctcggagtttcaacactagtttaaaagccttatcttcaagggtaaactttaactataatcaagtctttcttgtaaacaaaacatttaagtgacttgtttatgtgttttctcttttgcaggaagggactagagtagtttctggtactcacagtcttggagagcttttaggatcatctcatatagttgatcataacaacttcataaacccgaataaactctctgaagatatcatgagatgcatttcttctgtgtattgtacactttcaagaggatcaacgagtaccacttccacttgttttcctgcttctccggtttcctccaatgcctcaaccattttctcttccaaatttaattatgaagataaatggagcttgaatggcgcaa

SEQ ID NO: 185925 - DNA, 93 bp, Arabidopsis thaliana landsberg
gagcgcgtcgcggcgggcgtttcatattccgacatgttgaaggagttcggctgggccggctgtttgatcgtgtcctacttcatggccggcgcg

SEQ ID NO: 185926 - DNA, 225 bp, Arabidopsis thaliana landsberg
agagcagtttggacgtcttctgaagaggattatgtgtcttcttcggatgcccccgagcagacgactcccttcacggctcgggaagataacaatgccgacattgctcgagaattggatctgcccgatgatcccgagccgcctctcgttcggaggtcttttgccccgatggctgacgaaaccgggatatccaattggcgagatgtgcccgagcccttcatgctgacg

SEQ ID NO: 185927 - DNA, 1336 bp, Arabidopsis thaliana landsberg
atggttaatcttcttaatagatatgagagagaggtcaatcatggtcattgttctgcaatcaagaggattctgagtggtgatgctccagcttcttcaatgatggtcctctgcatatcagctattaatccaaggaccgataatggttctcaggaagcacattgttctgataattgcagcaatgtgaaagtcgaactcactgatgggtggtatgaaattgctactgctgttctgttacctgttttcttgtctcatttccataggatttttttttaaatcacaggtactcgatgaatgctgctctggatgtcgtgctaaccaagcagctgaatgctggcaaattgtttgtggggcagaagcttcgagtaagttatattcatgcaagatatactttgttttgcaacacagattttggttagatcactgacttgcagcatgcttacgttcttatctcttatctgaagatcctcggggcaggactttctggctgggctaccccaacatcaccacttgaggtttcctagactttgcattttataagattttctgatatcttctcaggttggtttgttcttagagttttcgttcaaccaaactttcaggcagtgatttcaagtaccaatctgtttgttgttgaatattaatgggacatacagagctcactgggcggaccgactaggcttctgtaagtagctttatgctgtgggcctcactacatcatctgagttcttattgctttcatattgttatctttccattgatcgtttataatctcttccttcctcaaggtaaagaaattggtgtccctctggctttaaattgtatcaagtgcaatgggggtccagtgcctaaaacgctagctggcatcaaacgaatataccccatcctatacaaggaaaggtcaatataaatgtgtgcctgttaatgcattttggtcttctttatacttctcgcaaagcattatattttcttgatgtatacaggttaggtgaaaagaagtcaatagttcgatcagagagaatagaaagtagaattatacagctgcataatcagaggcaagtttccttataactgtagagagcaatttttagtaacatttatgtgatcaatttagcacatgcatctctttctaagaagtgtcagattaactcattccagcgtaaatcattttgtgctatactggaatttccatctccaatcccagtataagaacttacctctaccctttgcattcatgaatcctttaagccctttttctaatcattcttttcttttctcttaactctaggaaaagctttctcaacactttgatacatctagcggatttggatttctttaa

SEQ ID NO: 185928 - DNA, 890 bp, Arabidopsis thaliana landsberg
atggcgaccgaggacgtgaagctgatcggctcatgggcgagtgtttacgtcatgagggcgaggatcgctctccacctcaaatctattagctacgaattccttcaggagacgtatggttcaaagagcgaattgctcctcaaatcaaacccggttcacaagaagatgccggttctgattcacgctgacaaaccggtgtgcgagtccaacatcatcgttcattatatcgacgaggcttggaactcttctggaccttccattctcccgtcccatccatacgaccgggccattgctcggttttgggctgcctacatagacgatcaggttcatagattgttcttcacttgctcttttcactttgattgcatgtaataaagtataccgggaattaatgagggattgatttggttttgattgctttaattttgatacatccccaaaactttagcggttcttttatgattgttattggtttaatccggttaataatctagaataacacgatatgaccgatttaaaccggatagggtttgactatagtccagcttcaactaactttaatttctagtttatacggatagttaggtaattagtcaacttttatgttgaaagaaattagacattttgtttatcttccttactatatatgacataatcaagtaaatcttaaatcttatatgttctgacttaaatttgatatgaatggaagtggtttatctctgtgagaagtatcctaacagctcaaggagacgaagagaagaaagcagccatagctcaagttgaagaaaggaccaagcttctggagaaagcattcaacgattgtagccaaggaaaaccgttcttcaacggtgaccatatcggttacctcgacattgccttggggagcttcttag

SEQ ID NO: 185929 - DNA, 849 bp, Arabidopsis thaliana landsberg
atggtaccaggccatgattctcccacgaatcgaatagcgaggataaaggtatggtatctttgggccctcaaccttggttgcagcaaggggccaagaactctacgagagcaagagataagataaccttgatccttttaaacatccccatattattattgttctttatccgcaataactaaataataaatttataaaatgaaccctgattaggagttcactttgtgttatttatatatctaatattgtatcggaaattggctctatgggattatcaacaagcgctagttggtgtttatatatggatttcaaacttggttatatttggatgatgattagtaaccacatatattttagtaaatgaatgttgtttttctagagttccatatatagtgtttgtcttgacgtaagttacgcgaactatgtttaaacaaagacgactcgtcgatttaaataattctaaggaaatggtttctagaattatagtaaaatttgcgtacatatgaaagatttttatttttatgttgcattcaacatttcctactgcccctgctgaagcaataagttcctcgactggagtttgctctttagcatacttacttgaagggttttggggaggttcttttgtaaaaatgtacagagacttaaaaaaaggttcaaaaacaagcaacgtcttgctagatgaccaaatattgaatccaaaaattcaagagtgacgctaggatcttgttagaacgaatccattttcatcttgttcaactccttttagtggatgcaagaaatatcggaatttgaacggatgtcgaaaagaatcatctacagcttgaaagagagtagagaagagatagagag

SEQ ID NO: 185930 - DNA, 123 bp, Arabidopsis thaliana landsberg
ataattcattggatgcggacgaagatgatgttgatgacgacgaggatgatgaggatgaagaggaagaatttgacagtaatgacagtgatgatgaaggaatggaaacaattgcgaaacagtttg

SEQ ID NO: 185931 - DNA, 142 bp, Arabidopsis thaliana landsberg
atgcaagctgctgtgatcgttggtacaggatgttcactgggtcctgagggacctagcgttgacattggaaaatcatgtgccaacggttatgcactcatgatggaaaacaacagagaaagaagaatagctctcaccgcagctg

SEQ ID NO: 185932 - DNA, 114 bp, Arabidopsis thaliana landsberg
atgatgaattactgcgcactctacaaaagggtttcaaatatatcgaggaggaatctttcgccagcaccttccgtggatagttctcggagatcaacctggcttcggacaaactgg

SEQ ID NO: 185933 - DNA, 116 bp, Arabidopsis thaliana landsberg
atataaagcaaaaacagtctgacagcgagaaaagtatccgtagtggcatatgcgataaaaatatatataaagcggcattattaagagtagtaatcagccccaatcgtgacagatga

SEQ ID NO: 185934 - DNA, 360 bp, Arabidopsis thaliana landsberg
  unsure (1)..(360): unsure at all n locations
atgaacgatattgcaagcttgctgaaaagcgaaatctcacgtctttccaaaaagacgatccgccagcacatggcgcctgtacaggcggccacgacttcccatcgccgccagctcgccgcgatgaagcgtcagattgcccagcttgagcaggaagtgaagaagctgcnccgtgtcgcagggtcgagcgcgcaatcgaaggcgttggaagagggcggcaaacttcgatttgtcgccaagggtttgaagtcgttacgcgcgcgcttgggcctcagtgccgaggagctcggcgcgctgctgaacgtcagcggccaatcggtttataactgggaaagcaagaagaccgtgccgcgcgcggcgcag

SEQ ID NO: 185935 - DNA, 127 bp, Arabidopsis thaliana landsberg
atggcgaagaagagagacagtccgaagctcatcaaaatcaaagacgccattaaactcatcaaccaagaagtcagtctcattggtatcgtccttgaacaaagagaaccaaaacaatgtcgcaacaatg

SEQ ID NO: 185936 - DNA, 877 bp, Arabidopsis thaliana landsberg
atgggtacgtaagcggctcggaaacgagttcagcttctaatcaaatttgttttattcattaaaagggaaaggagtttgattgtgcgaacaaacaaagcaaagaaaagttcgacagtgcgaacatgcaaatacaggaaacaaaatgacgtttattcaagcaatcagcaaaaaagacaagtttcaccacgcacgcatttcgagttaggaaacctttctcgacggagagaacacttggactccttgaccagcgaggtcaaggatcaacatcataaaattcgggatgcgagcaaattcggagatttcgagcttgatccagtcacaggggtgagagtgagggtgtaaagctcccttgatatcgcggtgaccctacgtaacattcgattaatcttttttcgaagcttccttttttccaacgaacgcttttggtgctgaactgtaagagctttgatgaaagccatcgcgatttcttgatttcaatcccaaaggcctttgatcagtgcacatggagctcgaatttaggaccggaagaagccacgaggttgagaaggccctctcccgggcacgtttgggatgtcttcgtgatatgatcatggatagcattaacgatatggagcatgaaccggagcatgaacgtgatcttgtagccgaggaaggagctaaacttgtagctgaggatgagcttgtagctgaggagaagcttgtagcggaggatgttcttgtcacaccggccgttccaatgactcgttctagagctaagctattcaaccaagccattggcgggatgtttaaccacatttgggaccgaccaaatgacttgagccaagtcactacctctttggttttgattcaagctcaaggacctcatcaagatggataa

SEQ ID NO: 185937 - DNA, 121 bp, Arabidopsis thaliana landsberg
atgactacttctacacaattcaacatcgaccggtcactcatgtgcgtggtccacagggacactgatacgctgtatcgttcacaggacaccacagagatttgtacttcagtttttagtttat

SEQ ID NO: 185938 - DNA, 60 bp, Arabidopsis thaliana landsberg
aaaatacatattgaaccacaacgctactatgaactttttgagaaacaggattataattaa

SEQ ID NO: 185939 - DNA, 101 bp, Arabidopsis thaliana landsberg
aaatacagcttgttgatgttgcttttctctccgatctagacatcgatcgtgtttttcttcgatcaatagatagtgatggtgatgtttttctttcttgttag

SEQ ID NO: 185940 - DNA, 226 bp, Arabidopsis thaliana landsberg
aatctctcggagcttttttcaacaacaatggctgttcaagctcatcacatgaacattttctctcagtttatatcaccaaacaggtaaaaatctcatttttatattctcctcacaaacaaacttcctctgtttttattttcctctaatctttttatttttgttatttgcagagattgtgttaaatttcaagaaaacatgaaccacggcgagtttgagtttaccgacg

SEQ ID NO: 185941 - DNA, 135 bp, Arabidopsis thaliana landsberg
atgaacaagggagaagaaggaggagaagacaaggaagtggtttctcttcaaactctgagtaagaaaatggatgattttgcaaaagctagagattgggagaagtatcacagtccaaggaatctccttcttgctatg

SEQ ID NO: 185942 - DNA, 378 bp, Arabidopsis thaliana landsberg
atgggatcgcatgcctcgcaactggccattgcggtttgcatctacagcccgcttcaatcccttttctggtatgatcgtccggaaggcgctctgttacatactggagaagcaggggggactatctccgttatcagggagacgcctgagttgacattttttgaccggttaccgactgtgtgggatgatactaaggtattggaaggctatccggggaaatatatttctgttgcccgaagaaaaggaagcaattggtttattggttgtattaatggtaaggaagaacgggaattcaggatcaacctgggcttcttgcccgaaggaaagcaataccaggctgttatttatgatgacgatccttctcagcagacaataacaaaa

SEQ ID NO: 185943 - DNA, 433 bp, Arabidopsis thaliana landsberg
atgaagcaatccggagacagcgctcgatcgggctgcgctgctggattgcttcaccgcttcgcggctcgcaatgacgggggtcccaattcaggaccgatgcggcgccttttcgggcaagacagccgcaccgttcgcttatgcgggtcgaatcgccagcaccctgccctcggcgtcgccggccacgtaaagcgtgccgtcgacggcagcggtgacgccggcaaacggccccatcggtccggacatatcgccgatcgcgccgaggaacttcggcgtgacgccggcaggtgcgccgaccggcagcccggaggcgattacccggcgcgcgccaccggcgaggtcggattcgatcagagtcttggcgccggcgtcgacgacatagagcttgctgccgcgcacgaccaggccctgcggtttttgcaggccgtcgagcacg

SEQ ID NO: 185944 - DNA, 83 bp, Arabidopsis thaliana landsberg
atggctatgccccaacggaataccaaaaattggaagttcaggcccatacggtggcgcaacggttccaaggctttcagatcgcg

SEQ ID NO: 185945 - DNA, 192 bp, Arabidopsis thaliana landsberg
agtagccggaggtacaccgccagctccgttacagaggaaagaaccaccacagtctccggtggcgcagcgaccacggccagatctgtcaaaggagcaaccgtggcggccccagaagcgaccggaccagagcggtggaagttggagagtgtaagctctgttcggcgacagtttaaatccgccgccggcgagtaa

SEQ ID NO: 185946 - DNA, 232 bp, Arabidopsis thaliana landsberg
gatctaatgtcttaatgattgaacatggatttttaaggctttttattgatcctaagttcaatgatcttgatataccagcctatatgtaagtgtcaattagccaatattaaggtgtttttaaaaaagtgaattttgtagagttaattgttcacacattgttcgcatttgtggattccctgatcaagaagatgaagacgatgatttgatgatggagatcgttgaagagaactga

SEQ ID NO: 185947 - DNA, 559 bp, Arabidopsis thaliana landsberg
aaaccatgccatgagattgcctctcttgcaatttatattcttcgtcgtttgagaatttacgaggttatatcaagatatgaggtactctccatatcaagaatcttgtgttgtttggcattatgttgataggccctttatgttaatattgttattaatattctgtctatcagtttgcagtgttgtcagcactggaaggtctctctaattctcatggggctgcaactcataatctgaatatgctatctgatgctaagtcacaacttcaaaagctccaggtttgtttctgcttttaatttcatgtgatttgctcgcttatacaatcagtaaaccaacaatttaacattctaactggtgttactgctgactatcaattcagaacctgatgaagtcacttggatcagttgaagatccctcaccatcagcctacgcagaaagaagtttggtttctgatcattctgaagggtggttgtcatacaaagccacaagtaaactaacttcttcatggacatgtcccttttatagctctggaattgattcgcacatattggcacttctgaag

SEQ ID NO: 185948 - DNA, 658 bp, Arabidopsis thaliana landsberg
atgtcagagaacaggcgtagaggaggaaggcgtgctcagcaggagcgagccgctccgcaggatgaggtgccccagcagcagcacctgccgcccccgcccccgatgtcgattgagcagatgtttctgatgcagactcaggcagttcaagccatcggtcagactctggccgccattcagcagcagcagcagcagcaacagcagcaagcaccaccccagcctcagatgcctcagatgcctagagacaagcgtgctgaattcatgagaggtcatccaccaacgttcgctcactcttctgaccccatggatgctgaagattggctgcgcactgtggagcgggagttgcataccgctcagtgcgatgacagggagaaagtcttatatggtccccgtctgttgagaggagcagcccagtcatggtgggagtcttacctcgccacccatgccaaccccgacaccatcacctgggaagaattccgaggtagctttcgtcagtaccatgtgcctgcaggtctgatgacagtgaagaaggaggagttcctggcccttaagcaagggtcatcgtctgtcagtgagtatcgagacaggtttctgcaattgtctcgctatgctcctgaagatgtcaacaccgacgccaagcgacagtaccgttttctgagag

SEQ ID NO: 185949 - DNA, 228 bp, Arabidopsis thaliana landsberg
atggggctttcatgtgcttggtcgagacgagagacatgtcattatcagtccgtaagctgaaattgtcccttcaaaagattcgtaatttctctctaatcctcttctcgttttcactgaaaacttcccaacaattctcgttcgcagaacatgctagcctctctccgtgacaacgacagcaaactctctctttctctctctctccctctgtcggtttttgtggtcgattag

SEQ ID NO: 185950 - DNA, 1301 bp, Arabidopsis thaliana landsberg
gctgtggtttggtcaaaaagaatgcggcgcaagagaagatttgtgacagtgtacagagcttttccagaaggttgtggtgttccttcagaacctatagccaatggtgatgaaagttttatgcaatctaagttccataaggtaagagatagtcatcatcatattgtactcagactttgtaatgttttgaatgcttagtgattaattagaatcctgtttgaaatgttccaaggatggaattgtcctgcaggctcataaagacttctcagagataacaaaggagtcatcgaatcattcggagaccgagaattctagaactgaagatttgttggatgaaggatcggttcttgattctaatggaagtgttactgattgtcaagagaacagagaaagagagatgagctcggtgaagaagagatgtttgagttcacataacttaacaagtgaagttgagacagagaggataggtatagttttgggacttgcagctaaggcgaaatgcccttggagacaaccgaagatccgaggttcaagacaggtgaatggtttgaactgagtcaaattgagtctgagtttatgtgtattggtttcttgtttgagaagtttgttctggtaactctgagaacaagactctttgcttggttattatagtcactaggtttattagaagtaagtaaagtaatctcataatttagcaaacttgacgacttattttgtcagtactttggtacttttctttcatcttaatttttgttaacactgacactcaatgaaggggtgatcaatttggataaccaaaacaaactaacggacaaaatcggatttgaaacctaaccaaacataaattgaccaaaaccagtccctactattttagttttagtgtggtcagtggtaactattttccccaaataaaaaacctgaaaaatccaaaacctacttaaccagaaacggaaccgaaccgaaccgatgttaaaacataaaccatattgtacttgttctttatccaaattgagaaaataaactgaaatttcgaagcaaaacctattgatcctattcgttaatcacttgagttaatgcaattacttgcgtttggattcgattcgattagattcggtttgactgatacagcaaaaatatttatactgaatgtaaccggaactaaaccggttttcattcccgtctctttcaataaacacttcgttgtaggaggattctcaatcggagacaaaaatcaaaaatcgaaatgcagagatcgattgcgatgacggcgaagagatttcttcatcgcaatcttctcgagaatg

SEQ ID NO: 185951 - DNA, 330 bp, Arabidopsis thaliana landsberg
atttcctggagagaggtgtttccagagtatgcggcgtcatataggaaacacgagaagtcgaaaaggacccttgaagagactattgatgaaagggtacaaaaggctattaatgatgtgatgaacaaaatgaagaaaacagaatgcatatcatttgaactcaagccaggccacatgagtccacctatagtccctagcagcgtaggatctgtgcaagaattcgtatcgggcaccaagtaccctgtagacgatattgttgaggacaagccttgctttcttcatattccaatcaatcgatctgggacaaaaacaaaacaagctgctactggtttg

SEQ ID NO: 185952 - DNA, 982 bp, Arabidopsis thaliana landsberg
atggtttcccgagttaccctcctcctcgtttctcttcaacagaactgtagattccagtttttgaaaccaaaatttgaaaagcgattattgattgaatcatcatcgtcaaagtaatgatcttttgctcaatttgattgtccaggatttagtttcagcaatctttggttgtttcgttgagattccagcaatcaatcctcatgcccgacgacgataaagagttgcaggaacccaaggaagaagactcctacgtttgggacagcgatacgcagctatatatccatcacaggctacgtctcttcccaaatctatcgattctatagcctaatttccttagtttgctttagttttgattgaatataagcagaaattgtccattgtgtttaggtttgattgtcttagtgttaaaagctttatctgctatttatcgtttttaactataaagagtgatgaaaaaggcagagactttattgagattgatgcttaattccattgaactaaggactctattcatttttgcatgctaacttttgtttcgatttgtgaattgcagtagtgggttttaccatgacccaaatgctggttggtattattgtagcaaggatggtcgttactacaagcatgaaaatggcgaatatgttcccttggaatacgacgagtcttcggtgaaccctcctggagatattgtcacctatgagccatctgaagatgacttaggcagaaaatgtgcattttctcaggctgagaatgttgaaaatggatgtgaagtttctctgagtaatcctggagaaactccttcaggtaaattttcatctagtgttccggtggattattgagtagcatctataatatttaactgatactgatagacacgttatttgctcgaaagagtcaacagggtgcccaaatgaccaggaacctgaacatcgtcaacgaccttcctcatggttggcggttatatcctttagtagatcatggagattaa

SEQ ID NO: 185953 - DNA, 776 bp, Arabidopsis thaliana landsberg
cccgcacagtgcctgacactacaataacaaagactattgttagaatgcacccgtcttacgaactacgatacctgataacgaaccgatccgttacggaacaaattgaagatattctgagaagaccagggcatggttcgatcatacaagatccatcatgagacaaccctttaagctctctgttgaacatattataacgacaagcaccttatgagcaaccgggttatgttcaacatctcctgactcttaccatttggattaccttcgaatgttcaatcactgtcgtccctgatccaccaacacacagtctattcaaccgaatttgtaaacagcccattggtttcaagtactgcaaccacacaatcccatactcagtaggtcgacgacaaacttgaatcagaacaatcgcgaagataaccgcatttcaagcttggatcaacgggatacaaacgctccatcacatcaaagattctcttcttccgagagtgaaggacaaactatacacagcacagtttgacgcttgtaggaaagcttataagataggtgatgctcatttagacaacgcgttgaactatttgtatttacgagattatagattcatgagagcgtatcaagctcttgcacttgtgaatattttcatgtgcaggactagttttttccatccgacgcctatggtttatgcgaattggaacatgaagatgttgacggatatagcgatttatgctggcaagattctttctcctcctcctcctcttacgaagaagagcaagtcgccatga

SEQ ID NO: 185954 - DNA, 110 bp, Arabidopsis thaliana landsberg
taattttatttggtggcatgtttaagatcggtcggaaatttaaccgctcgtttgattaccaatcagataagccgttgaaatgtaggaatagatcgatgttgttgaaatag

SEQ ID NO: 185955 - DNA, 929 bp, Arabidopsis thaliana landsberg
attactggtttgcctagagactctgcggttagagatgctctgagagggaatgactggtggatctctgcgagtcgcagcaggaaccttatcatcagtttgattaaggggattcttcctcctgtggcaaataaagcagagaagaggattataggtttctatggaaaccgaatcataggtctcctaagtctcttttctcctctgcagatacttggcttgccctccacccaattggtaaccgtgtcgattggcataaagcagtttggttcaagaaccacatcccgaagcatgccttcatttgttgggtgtccgcttggaatcgtcttcacactcgggataggctgagaagatggagcctcaacattccctcctcctgcgttctctgcaactcttgtgatgagactagagaccacctgttttttgattgccactttagcagccaggtttggagattcttcatttctgcttctggtctctctccgccgttttctttcaaggattctcttctttgggagaggtcgccttctccagataaaaaaatatccttcattctttagatcctctttcaagctgtgatttacttcacttggaaggagcgcaacgcgaggatccactccgcaacgttccgttcatctgctcaggtcattaaggacatctagttgactgttcgggcgctcctcgaccctctctctcgtcttcagcatcagaagtccccggtccttctctgtaagcctgttggttcagtgtttttcaggtgcactaaggtccttcttcgtgcggtgttatcagggtaagtcttccttttcttttgggcctctgagcttcctcttttctgcttttcttcagttcttatcttttgttaaggcctgcgtgcccctcctttgggcttcggccttgtaatgttgggtctgcgtacccttggttgggcctga

SEQ ID NO: 185956 - DNA, 86 bp, Arabidopsis thaliana landsberg
aagtaggccgctgctccctaggagaaatcttctgcaacaaattcagcacaagtttagagcagtgtggcaaaccaaaaccgtcatga

SEQ ID NO: 185957 - DNA, 135 bp, Arabidopsis thaliana landsberg
cttcaacgacgaaacaaacaaagtgtgaaaaatgaagaagatagtacctggaaatacagagtgggaaagagatcgatgaacaacatgagaaggagcattggatacaaatctcacatcggtctcgacgagagctag

SEQ ID NO: 185958 - DNA, 101 bp, Arabidopsis thaliana landsberg
atgagacaagctcaaggtgcatgtatgggtgccaatttcgacgacgcaaattggacggtgtacgtgtttccttcgacgtttttattcatcatctattcatg

SEQ ID NO: 185959 - DNA, 296 bp, Arabidopsis thaliana landsberg
cgaaagctcgacgaagttgagcttaatggaaatatcgtggatgatagcaatcaaacatctgattcttctcaggctaaacgagcgaagctagaagatgaagctcaagatggtttaggtgtttctgtctctttggcttcttataaactaaagttttgatttttatgatgttctatggttatagttttcaaaaaaagagatttctttgagtttgttgataaatcagtctttctcattgttgttcttcggcctttgttgtagattatgggaatacacaagaaaatgggtcttcaatggag

SEQ ID NO: 185960 - DNA, 2105 bp, Arabidopsis thaliana landsberg
  unsure (1)..(2105): unsure at all n locations
atgtgtgacatcagtggttttggggtttctcttatctctcgtttactccaccctcatgatcggctacagacttcacaagcgttcactgtttggttcgttctttaccaaccattaatggattctttttctttagttcttggaagattacttatttctgtaaatcatttcagagaaatacaacatcaggaataacttcatcaacaaggtaatcaacttacgatcatcacattgtactgaaagatttgaaagaaattttgaaacgtgttgttgaatggttgtttattcaggatcttaactggagagaacgtgaagctctggaatcaattccatctcttttcacaaaagaggtccttggtgttctttgttttgctgcttacgttcttccgatcctttgttggtacaagtaacttactagcgtttgaaacaggtccttgatgttctcaattccaccacctccagtgacaatcctttgagccttgattcactcaggaagaatcattcagtggctaactcagttcaaacttcttctgaggtagatagatacttatggttcttctctactttcttgacctgtacgaaatgactgatgcttgttgtttgaagggaaacgaggacaaaatggttcctcgttttggtcatggaacctggataggaaaagcatttaannnnnnnnnnnnnnnnnnnnntgaaagggtaacttttaatctttctttactctcttcacattggttacatgatggcttttatctgatttgatatgttctgttgtgtttttctcagagtctgagacaggaaaaaagattggaaagggctaatgagctgatgaatgatgatagtctgcaaaagcttgagacggcagccatggcacgttccagatctgtcgattctgcaccactaggaaactacaccatttggaaaaatgaataccggaggggcaagagttttgaagatatgttacgtctgatgcaagatcaaatcatcatggcacgagtttacagtggacttgcaaagtttacaaacaatctcgccttgcaccaagagatagaaacacaactaatgaaactagcttgggaggaagaatctactgatattgatcaggagcagaggtatcatcggcagtacatattgttcttaagataaactcttaaaaagtttaatctttttgttgttgtggcagagtacttgacagtataagagacatgggacaaatactggctagagcacacgagcagctatatgaatgcaagttggtgacaaataagttgagagcaatgctacaaacagttgaagatgaactcgaaaacgagcagacttatataacgttcttgactcagctagcttccaaggcactaccagatgctatccactgcttgaccatgcgcttgaatctagagtatcatctcctgcctttaccgatgagaaattttccaaggagggagaatttggagaatccaaaactttaccactacgctctcttctctgataatgtactggctgcatcagttgttgtcaactccacagtcatgaatgcacaggtaatgatcaatccctagtaattgttgcaagaataagtgctttaaacttacaaggcctactgggtttatttggcaggatccttcaaggcatgttttccaccttgtgactgataagctcaactttggagcaatgagtatgtggtttctgttgaaccctcctggagaagcgaccatccatgtccaaaggtttgaagattttacttggctcaactcatcttactctccagttttgagtcagctcgagtcagcagctatgaagaagttctacttcaagacagcgaggtctgaatcagttgaatcaggctcagaaaacctcaagtaccggtacccgaaatacatgtcaatgcttaaccacttgaggttctacatccctaggatcttcccaaagttggagaaaatcttgtttgttgacgatgatgtggttgttcagaaggatttaactcccctatggtccattgatcttaaagggaaagtgaatggtgcagtagaaacctgtggtgttaccttccatcgccttgatacttacttaaacttcagtgataaacacatttcagaacactttgatcccaa

SEQ ID NO: 185961 - DNA, 230 bp, Arabidopsis thaliana landsberg
atgattaattcaggtgttagggagatactcttggcttctcaaaaccggtggcttaatgctcaggaggtgcgatccttattcatgaggtatgatcaattcaccttgtccacaacggacccgccagtcaacactacgggacttcatttctaccagtccaagaagttcaccgacaacgagaaagactatgccgaaacaatggtaacaggaggacacaatctaaaaaaaaattg

SEQ ID NO: 185962 - DNA, 749 bp, Arabidopsis thaliana landsberg
gctcatagcttagtacatggtgatttgaagccggcaaatatcctactcgattccaatctcgttagcaagttaagtgactttgggacctgctcactacttcatcctaacggaagcaaaagtgtgagaactgacgttacaggcacagttgcctatttggatccagaagcttccagtagtggagagctaactcctaagtcagatgtttactcgtttgggattatcttattgcgcttgttgaccgggagacctgccttacggatatcaaatgaagtgaaatatgccctcgataatggaacattgaacgacctcttggaccctttagcaggggactggccctttgttcaggctgagcagcttgctcgcttagcattgagatgctgcgagactgtcagcgagaatcgtccagatcttggaactgaagtgtggagggtacttgaacctatgagggcttctagtggaggatcttcatctttccatcttggccgtaacgagcaccggatagcccctccatacttcatttgccccattttccaggtaactaatctgtatatttgagtatggatttccagtattattatcaatctgagaagacttcgatcacaaagtcattaaaatttgcttatctgaggtctcaaaccgttatgttgcagtctaatggtactcaacccgttcttcctctgctttgttttcaaatatttcaggaagtcatgcaggatccacacgtggctgcagacggtttcacatactaa

SEQ ID NO: 185963 - DNA, 761 bp, Arabidopsis thaliana landsberg
gctttggaacctccgagtgaaagtgctataaactctgcaattttattgttgcacaaggtaccatgtacttgtattggagataagtctttattttataaaaattattagttcctgatacctccaaaagttataatacatatagttgatgtctctactttatgttatctcaaccactgattttaatatccagtcagtaaaaactatgtgtatatacctttgtatcttctctgctgatatttctttatgaaccctgtattttttaggtcggcgctcttgaaggggacaaagagttgacaccactaggacatcatttagcaaaacttcctgttaatttgttaattggaaaggtttgcttcagtaacatcattgttgtactaataaaggccgctcaaacatatgttttgttatcatcactacaccttttaaataatgcagatgctgttatatggtggcatttttggttgcttatcacctattctctcgattgctgctttcttgagctgctgcaaatcgccgtttgtatatgccaaagatgaggtatgtttatactttctcggaaacttggctgttttgtgcaaggaggttttgaactgactctatgtttgctcttcttttctttcaagcaaaatgtggaccgggtgaaacttgctcttttgtctgataagctggagagttcgagtaatttaaacaacaatgatagacaatctgatcacctccttatggtggttgcatatgaaaaatgggtgaggatactgcatgag

SEQ ID NO: 185964 - DNA, 968 bp, Arabidopsis thaliana landsberg
atgtcttcaggtaatgtggttgttgtggggagatttctctaggaacttgagtcttcatcaacaaggtctaagccaacaatagtgcgatcaattaactgaactggctatgaaaaacctgcaaatgacaccatataaagataacactcattatctgatagctaaagaacatgaaaacatcatcattgaccaaacaaatccacaattcagattggttcttattatgattgatgcaatcaagacgtttccattttgggcaatatctgaacaaatgaattttcatgttccaataatcacaaaatgatatatcaatgttttggtttaaagtttatgaaattaaaatgaaaacttaccaaattcagctacagatccagaatcattaccatataacataagtacagtataaagctcttttcttttaagttcttttggtttgacgaaaagatatggattcatttttgaaaatttgaacaagagccaatttttttgatggcattgcatcaaaatttaccaggatcgtgcaaccgacaacacaggaaaatgaaaaatcaaattttgaatcaaactcaagagagggtaaagagagaggtgggacctgtgagggaagagagcagcagcgacaccgttctgaaggcggacctcggcggtttcggtggcggagatggaaggaagattgaggtgagtggtcagaagaagattccggtgaatgaggaatccagttccagaagtaacaccatttggtccggagacagagattcgagccatcgccggagctttgccggtaaaaatggaacctttcatcttctcgcttttgcctactcctttacaaaagcaccatgagtccaatatcactcccattgtctctctatctcttgattatgctctcagatgggttttatgtcaaattccctaatttggcaatctgggttttggaggagagtgttttggatctgaaaaggatgggaatttag

SEQ ID NO: 185965 - DNA, 517 bp, Arabidopsis thaliana landsberg
atgttcccggaatttgccccttcgccggtggttggtaagtgttttcaagatttttaaactcttgcggttatgattctaccagctccgacttacgaatgatgagcttgtagggcatgtgatttatgtgggaggattttggaaaactttaatttttctaatgatgttaccttcgttaagaatgccgcttgacaggtatgtatactccagagagtttcttcactatgatgctatatctttttttcgtgccctttgaaaatatttcttgtgcctgcagagccaagcgtcagataacatagtgacgagtgttcagagtgggcattcaagctcacgtgataggagaaggagaatatgtatatagagatgactttgctttttttttttcaaatatcattccttttgttcatttggctcatcttttgttttggcagctatagatgagttaaggaatttgaaagattccttgagaattggtgatgagagagataatgtggttgatatggctgttgtattctatgaa

SEQ ID NO: 185966 - DNA, 459 bp, Arabidopsis thaliana landsberg
  unsure (1)..(459): unsure at all n locations
aaaaatccatcgaaggacaaatcatcgatgatgagcgggttggtgaatggaagtactatgataaatacgggaacctgacaacgcttgaaaaatacaaagacgggaaattaaccgacactttgaaagagttcttttccaacggacaattggagagcttcagtttagtgaacgaaggaagaagagacggtttgttccaggtattcaacatcttcggcgccttggtttccgaaggatattattcannnnnnnnnnnnnnnnnnnnnnggatcgggtattactccgacggcagtttcaaatacaagaacttcttcgttcagggaagaaaacaaggatatcagctctcttacgatgtgagcggcaaactggaagaactcgatgagtttgacgacgggttgttgattgcacatacacaatttgacacaacggaaaacattatcagtcaaatgggagaatacaacg

SEQ ID NO: 185967 - DNA, 189 bp, Arabidopsis thaliana landsberg
atgataaagagcagttcagtgaaatatcgactgcggaatgtggaatcccatagctttgatacgcaacgaaatctcgctatagactttgccgacaatttcaagagtatctccaatacgagatcgtatgggatctgttccaagtttactccttcattcatcggattcgaacaagctcgtgtcttcatcatg

SEQ ID NO: 185968 - DNA, 44 bp, Arabidopsis thaliana landsberg
atgcagtacggaaataggcggatgttcctgagagtccacaaccg

SEQ ID NO: 185969 - DNA, 194 bp, Arabidopsis thaliana landsberg
aattacaaggaaaactagaagcagaacaaaacaatttacagaaaataaaagaacaacattacaactctaattgcaaaggatcgccgatgagtgatcaaggccaagttaggaggagaaacaccgatttcgagtccgcgaacgtcggaaatttgcgttgttgccgcagtaccgaagtattggaatcctcatcctag

SEQ ID NO: 185970 - DNA, 833 bp, Arabidopsis thaliana landsberg
gtaatagtaatttgaaaaacgttggggttgcacaaaatgagttgagtagactggaagcgtttcctcctgcaaatcgggcttcacccttggagcgtgacggaaataatgttaaacggaatggtttgaccattcttaaacatacaggcaagatacctcgcattgtaaagggagatgttatgcagggttgttcttcacggaaggctaagttggtggaactaagtgatgatgaggagactccggtagagaggagatgtgaagtagtggatctagaaagcgacaactgtgagatgcagacctgtgtaactgaagtgcttgcatcaagcacatgtttcaacacaatgggactaaaaaaaaagcgaaaggttccagagagtcagggaagtgcatcgtcgtcagtgttgacagcgaaagggaatggaggtggtgataaaaaggaagcaagtgcatctgcgtttttgagtcaagttagatcctaaaccctctatttccatgtttctcttttgtatatccagttatttgcttacattggaagacatgcggtgatgatcttactaggtcaaagagaaactcaacacagaagaatataagaagttcattggatacatgcaagcattgaagaagaaggagattaagttagcaaacgtgatgcagtccattgtgcaactgttctggggaagtgagagggatcatcttctaatgggatacaaagactttgtgccagtaaagtatcgttctgcctacgaggaatgcattaaaacgagaaaaagacaatcgatcatctttggtaactcaaatgaacattgttactcgctcttcattctttttgtaagtaa

SEQ ID NO: 185971 - DNA, 278 bp, Arabidopsis thaliana landsberg
cccccgcggccgccgtcaatgccatccgcagcacattctccgacggcactgagggctggggcttgtatgctgacggcgtcaatatgcagtacattgccagtggtggcgaccccggcggattcatccaggccaccgacgatggcaagggcagccagtggggcttcgaggctcccaacacattctacggcaacctcagtgcattctacggcggagtcctcagctttcaactgaaaatgatcagccatacttccactccagtggaggactcgtcaaacgtg

SEQ ID NO: 185972 - DNA, 80 bp, Arabidopsis thaliana landsberg
ggggctataaacttgctgatgcgtgtttggtgaaatgtgaatttacaggtatgggaggctatctaacagattctggtgag

SEQ ID NO: 185973 - DNA, 352 bp, Arabidopsis thaliana landsberg
atgctattggagtcatatcaagtgtctcaactgtgtcaagatttccatatgtctgtcgtgaaggggaaacagactttgaggccagatatgtgacatttacaatcaaagataatctgtaagttctcaagtaatacgaatattgctatagtctgtaagttaggaacataatgcattttgtagtatgataatttggtttttggttggttgtagtgatatgatcataacatgtgttgctagagggagtgcgtgtcagtcctttctgagaaagtgttatcgacttattggtttgaaacttataactacgagccaatcactgcagttctccggttctgaagagcctccacttttaaag

SEQ ID NO: 185974 - DNA, 303 bp, Arabidopsis thaliana landsberg
acttcagtgatgcttgcattgcgcttggtggtctttctgctttccacatcttagtcttgcttttcactacgtggtccgtggatttcaagtgttttgtccagtttagcaaggtaaacaggcagtccaatggctgttacctattttcttttacagatgaatcttgagttactggtattgaccggtcctgtgtctgtgtctgtttactcacaggttaacagtatcgaccaggcagatgcatgtaaagttacaccagccaaattttctggttttaaagaagttgtgcctcttcattttgcgagccca

SEQ ID NO: 185975 - DNA, 67 bp, Arabidopsis thaliana landsberg
atgtttcgaataaatatggagattcggcaagctttgtccatgagagtcgggcacttcaagacgacgt

SEQ ID NO: 185976 - DNA, 72 bp, Arabidopsis thaliana landsberg
atgattgatcaaactagtggtagatttgatggaaagaccaaactatggtacaaatgtgagcttgaacaagat

SEQ ID NO: 185977 - DNA, 1098 bp, Arabidopsis thaliana landsberg
atgggcgatgtcatcgtacgagattctgtactttttatggatgacctgttggtaaatgccaaatcaagagacaatcataagaacgcacaaacctcttaccaccagatataagaaataaggaaaatagaatagtggattttttcttataatcagacaagagtaaaagaacataccatgaatccaactgcttgcctgatgtgtttcagttcatcccaggaagagccagcatactgcaattaaagaggacaggtataatgagccaaattgtgctgcgcataaattaatcaattcaaaaatgtagaaagggagattcactaagggaatacttcttctgttgtttcgttgcaccattcctctaacaatgctaaaccagattttacaaattctccgttgctaaatgtgcaacattctcgtcgcaaaagaaggctacataaaaaatgaaccccgttatattaatgccttacatagacatgcctagctgatgatagaccataaatcaactctcacctgttaaataattggacattgatgaaccagaatgtctgaataaatatattttggataagtaccggaggaacctgaaaaaggaaagaactataagaattccagacattaacgagaaagaaaatgtgaatggagaatttcccatacaaaattctcctgtagtgtgcttagaattgcgtttaagccgtcataaatcccattccagtggtctagaggagaattatttctcattgtctttgaagatcgaaacgatcgcaacgatcgtccagttgatgtccgcggtgcctagagaggaccgttcatgtcagaccccacaacataccgagaaagaaaagaagactgatagtattcaaggtaagacgagaacaatgaatttttttcttagctgacctggatgcaaagggaaagcaacgtttgcaactcgtttttcaggttatctcgaatcattccaaatatcttttctacgtatgctgtaagctgctgtttaaaaagtaaagctggatccttggccacaacagggcgaatcactgcagccgctgcagcttctgctgctgcagaagtctcggcagaggaaggcgctgaacggaaaccctg

SEQ ID NO: 185978 - DNA, 308 bp, Arabidopsis thaliana landsberg
atggcacattacagagtaagctcagaggtagagaacataatgaacagagacaggagtcaccgaaaaaacgaagaagaagacgaagaggaagctttgaaattagcggctatggagaagttgcagcgtcttccaacgtatgaccgggcgagaaaggccgtgttaaaagggatcacaggaggtttcaaggagattgacatgaaagaccttggcgtcgcggagagaagagagttattcgatagagttatgacgatggatgatgaagattggcatggagagtatctaaggaggctaaagagtcgttttgatag

SEQ ID NO: 185979 - DNA, 44 bp, Arabidopsis thaliana landsberg
atgggagcttttggctttggaaaagctaagttgaatcaggcaag

SEQ ID NO: 185980 - DNA, 367 bp, Arabidopsis thaliana landsberg
atgacggggcgtgactacatggagattatggccaatgtggctattgacaaatacaaccaagtagaggctagtactactactactactactactctttttagattttttttgtgtcatcattatatcttcccgataagtagaggctatatgaaacttgtttattttattgtagaataagacgttaaagcttgatcatatcgtgagggtgacggtgcaattgagctatggatacaaagcttatattacattcatggctaaggaatctcctcatggagagcttgtggagtatcaagctaaggctgagcgcaaggcatggcaaagaaacattcaccccatcttttgcagaccagctcgctctggtgcttga

SEQ ID NO: 185981 - DNA, 67 bp, Arabidopsis thaliana landsberg
atgccactctggaagtgctacaaagctaaccctgtgtcagggtatgaggaccaagggtcagaatcag

SEQ ID NO: 185982 - DNA, 137 bp, Arabidopsis thaliana landsberg
gacctcgtcgatcacatccggatatagctcggtcatattatctcttaagaccctgcgacttaagcttagagcgatatcggtactccacggcgtactcgcttagctcgatggcccatatcgtgattcgcctggattga

SEQ ID NO: 185983 - DNA, 1970 bp, Arabidopsis thaliana landsberg
atgtcgtggcaatggcggcgacggcagtggccatcccctctcctccttatcctcatcgttcttcatctcgtctcttcctcttccgccattgattttctctacaattccttcagctccgtaactaacagaaccgacgtaatcctcatcgaagattcccgcgtagaatccaccgtaatcagcctcatcaacgactccgatccactctctttcggccgtgttttttacccacaaaaactcacaattatacccgatccaacccgaaacccgacccgactctcatctttctcaacttccttcgtcttctccattctccctgacatatccacaagtcctggcttcggcctctgcttcgtcctctccaattccacctctcctccaaatgctatctccagccaatacttcggtctcttcactaacgccacagtcagattcaacgctcctctcctcgccgtcgaattcgacaccggtagaaactctgagtaaacgatatcgacgataaccacgtcggaattgatcttaacaacattgaatccaccacatccgtaaccgctggctactacgattctgttaatggaagcttcgttcgctttaatatgcgtaacggaaacaacgttcgagcttggatcgatttcgatggccctaactttcagatcaacgtttccgtcgctcccgtcggtgtgcttcgacctcgccggccaactcttactttccgtgatcctgttattgctaattatgtctcggcagatatgtatgctggcttctctgcttccaaaaccaattggaatgaagctcgaaggattctagcttggagcttgagtgatacaggagctcttcgagagatcaacactacgaatttacctgttttcttcctggaaaactcttcttcttctctttccactggagcaatcgctgggatcgttatcggttgtgttgtcttcgtagctctaatcggatttgggggttatttgatttggaagaaactaatgagagaggaagaagaagaagagatcgaggagtgggagttagagttttggcctcaccgtttcagctacgaagaactcgctgcagctacggaggttttctctaacgatcgtctgcttggatctggaggatttggtaaagtttacagaggaattttgtcaaacaacagtgagattgctgttaaatgcgtgaatcacgattcgaagcaaggtttgagagaatttatggcggagatctcgagtatgggtaggttacagcataagaatctagttcaaatgagaggatggtgtcgccggaaaaacgagctgatgcttgtctacgattacatgccaaacggaagtcttaatcagtggatctttgataatcctaaagagccaatgccgtggaggagaaggcgtcaggtgattaacgatgttgcggaagggcttaattatctccaccatggatgggatcaagtggtgattcatagagatatcaaatcaagtaacattcttttggattctgagatgcgtgggaggcttggggacttcggtttagctaagttatatgagcacggtggggctccaaacacgactcgcgtggtgggcacgttagggtatttggctccggagcttgcgtctgcttcggcgcctacggaggcgagtgatgtgtatagttttggtgtggtggtgttggaggttgttagtgggaggagaccgatagagtacgcggaggaggaagatatggtgcttgtggattgggttagggatttgtacggtggaggaagagtggttgatgcagcggacgagagagtaaggagcgagtgtgagacgatggaggaagttgaattgttactcaagttaggtctggcttgttgtcaccctgatccagctaagcggccgaatatgagagagatcgtttcactactgcttggctcaccacaagaggatttgttgactgggctcacgccggccgccgccgcggcagactccacggctgctcacgcatga

SEQ ID NO: 185984 - DNA, 244 bp, Arabidopsis thaliana landsberg
  unsure (1)..(244): unsure at all n locations
atgctaatcgtcagcgactacgactggtagtgcgaccgcttttcatgtgtaccacatacttcgnctgttgctagccattcactgagacgttccgggctgccaatcgtcatggactacgactgccggcgtgaccgcttttcatggcttccaacaaccagttgttccgtcgcgctaaccctccgtggcacagattgtcaagtctatcgcgccgctccagcagttcctcgtcaaggagcagaacctg

SEQ ID NO: 185985 - DNA, 617 bp, Arabidopsis thaliana landsberg
atgcagttctcattgcaggctaaaattgcaccaaccgatgattctaaacactccttaacgttagtccataaatcttttataaatcccattcatgatttccttcttctcttgcatttgactcaaacttgaatcaagacttctaaacatgttctttcatgtcttgtgcaggtcaaagtccgttggttccatgaagggtatgaaggtcaaggcgtctcgcagctcaaattccaattgtcaagtttatggacctaagatttgccctctagactcaaaggtgatgcaggttaactccttctacaagaactagaatccatgaaaggtatttagttaacaaattatagaaaaaaaactcacaaatcttttacttcatgatagacatcaagcaaatgcggtgaagcaatcgatatcaaacatgaaaacaatcttctgagggtaagtcactcatgctgcaggttggtttttgaaactataacaatgtagtgatcaggtcatatctctagatggagatccatttatattccccctactaataccaggtttttagtttattgaaggaatttgaagctccaatgaacacaaattttcgagatgaaccatttattgaatctcttagaaaa

SEQ ID NO: 185986 - DNA, 297 bp, Arabidopsis thaliana landsberg
gttcttgtgagtaaagatcaactcttgcaagaagcggagagaggagaaatattcaaaggttactccgaaggaactttagggtttaaaccaacatacaaatacaatgtaggaagcagcgactatgatacaagccataagatcagggttccagcttggacagataggatcttattcaagatccaagatactgataatattcaagcaactcttcactcttatgattccatagaccaagtatatggttctgatcataagcctgtcaaagcggatctttgcttgaaatgggtcaacagttaa

SEQ ID NO: 185987 - DNA, 143 bp, Arabidopsis thaliana landsberg
atggaccgcgactctcccttgtggaacaaagacatgcagtgcacggggttcaaccccgctgtcaagaaagcgtatcttgaccagtactctatcgacaccgaaattcttttagatgctagagctgaagagctcgtgcccggggg

SEQ ID NO: 185988 - DNA, 1172 bp, Arabidopsis thaliana landsberg
atgaataataacactatggaaccaactagtggcggtttctgcaataacaatcaaaccggttacggcgtcgtttcacctttctccgttccaaaccatacatcaacaacaacaacagcaacgcctcctcttcttcatatgtacggcggctctgatactattcccaccaccgccggttactactccgatggtgctactaatctcgactgtgaatttttccctttaccaacgagaaaacgctcaagagattcttcaagatcaaattatcatcatcttcttcttcagaacccgagatcatcatcatgtgttaacgctgctactacaacaactacaacaactccgttctcgtttcttggccaagacattgatatctcctctcacatgaatcaacaacaacacgaaatagatcgattcgtctcccttcacgtaagttttgcatcaacggcagagttcgttgcaatgtgcatcgtattatcaattgtcactgatttgatgttcatagttatatcagatggagagagtgaaatatgagatagaagagaagaggaaaagacaagcgagaacgataatggaggcgatagagcaaggactggttaaaaggcttcgagtcaaagaagaagaaagagagaggatcggcaaggttaaccacgcgcttgaggagcgagtgaagtcactttctatagagaaccaaatctggagagaccttgctcagacgaacgaagccacggctaaccacctccgaaccaacctcgagcatgttctggcgcaggttaaggacgtatcacgcggcgcaggattagagaataacatgaacgaagaggacgatgcggagtcgtgctgcggaagcagctgtggtggtggtggtgaagaaacggtaaggcgcagggtaggattaggaagggaggcgcaggataaggcggagaggaggaggaggaggatgtgtagaaactgtggggaggaggaatcgtgtgtgttgctgttaccgtgcagacacttgtgcttgtgtggagtatgcgggtccagtgtgcacacgtgtcccatctgtacatctcctaaaaacgctagcgttcatgtcaacatgtcatcttgaccccgtcccgtttatggaatactcctcttcttcttttttttttttttttgttctttagaaaattgtaaggatatattttagttga

SEQ ID NO: 185989 - DNA, 871 bp, Arabidopsis thaliana landsberg
ataattacaagtattatctggtgattgttgatcattatacccggtatacttggctctatcctttacggaaaaaatcgcaggtccgtgaaatgtttatcacattcacagcattggtcgaaaacaaattcaaattcaagattggcacgctgtactccgataatggtggtgagttcatcgctatgcgctcatttcttgcctcccacggtatctcacatatgacgacaccaccacacacaccggagctcaacggtatctctgagcgcaagcatcgacacattgtcgaaactggccttactcttctaagcaccgcctccatgccaaaagaatattggagttatgcgttcgccacggccgtttacctcattaatcggatgctaacacctgttctaggcaatgagtctccatacgtgaagttgtttggtcaacctcccaactaccttaagcttcgaatttttgggtgcttgtgcttcccatggctgcgtccatacactgctcacaagcttgataatcggtcagtgccgtgtgtgctccttggctactctttgtctcaaagtgcctatctatgtctcgatagagctactggccgtgtttacacctccagacatgttcagtttgctgaatcgagcttcccgttttcgaccacatccccttctgtcacacctccatcagatcctcctctctcacaagacacaagacccgtctcagtcccgcttcttgctcgtccactcactacagctccgccttcgtcgccctcgtgctcagctcctcaccggtcaccgtcgcagtccgaaaatctctcgccaccggctccgttacaaccatcactgtcattgtctccaacttcgccgatcacgtctccttcgttgagtga

SEQ ID NO: 185990 - DNA, 115 bp, Arabidopsis thaliana landsberg
atgtgtatttgtgatgtatgacgtccgtctccataacagtggtccgtggagccctgtccgaatctatccacccaacagatatatcacgacttcaccttttccacttggtcaatga

SEQ ID NO: 185991 - DNA, 478 bp, Arabidopsis thaliana landsberg
tcagacggcttggggtcaggccggtaagagtcccgtcgcaccggcgagtgagttcgaacgccaatccgcaaatcaaggcgcagccgcaaaacaatcccaatgcaaaacccggtgtcgtgctgacgacggggacgaagggtccgctaacaccaaaagacattttgggcatcaccgattcgatggctgaagtgaacgtggggctcaacctcatgctggcaccgaaaatgctgaacgcggttccggtcatgaagggcatggcgcagaaacatcgcacctattgtagaatggatattgccgagtgtcgcaaggttccctggttgaaggccgcctgtcgggttagccccacttccggctacgatgatagtctgaatgaaatctacaaatcacttttcgacgccactattatttccgccgaaggggctaaagaaatggcgacggacatcatgaaatgttctcctcgccacagttacggccagac

SEQ ID NO: 185992 - DNA, 518 bp, Arabidopsis thaliana landsberg
atgattatcttgcgacaagaagagctatggatattgttggaattagcgaaaaggaacaggtcagtttctgtaagcaactacacttagtatgttgcaaattcaatttagttcatgcacttctatattgatgatgaacttaattctgcctttatatcaacaggaagcaattttcagggtggttgcagcaattcttcacattggaaacatcgattttactaagggaaaggaagtggattcatcagttcccaaggatgagaagtcgaaatttcatcttaaaacagcagcagaacttctcatgtaaaacacatttgtctctaagaagacctctaaatgtttcatcagttgaaagctaattagaaatctcgtttcaggtgtgatttaaaggcacttgaagatgcattatgtaaacgagttatgatcacacccgaggaagttatcaagagaagtctagatccacagagtgctttaatcagcagagacggtctagctaagactatctattctcggttatttgattg

SEQ ID NO: 185993 - DNA, 436 bp, Arabidopsis thaliana landsberg
atgcattcaagtgtgggaactggttcacttgcctatgttgtgggatctaaagttatggatatgcggaaatcttatagagatgaggcagtaaaggttgctactacagatgaaaacagagaagaagcttttatagataataatgataatgctaatactgaaaatcatcacagtgattggagtaataatggtactgatacatctcatttacacagaaggggaagttctagtgagtcagttgatttagtaagtggaagagaaagtccggagagcgtagtatacaacacttcctcctttgtatctgcctctagtccttatggctatgcttcccctgacggttatttcgactttccctcgctaccggttacagatttgtttgggagaaatagtttagataacattgaggtttcttctccagatgaggatgcttcactgacaa

SEQ ID NO: 185994 - DNA, 1742 bp, Arabidopsis thaliana landsberg
atgattacagtagcccccttcgtgtctcttcgtttccagttccctctttatataataaatcgctccactctctttttccgagaaagaacacagtatctcgtctacaacacctgtcacattttgagaacaacggcgaaaacaatgccggtggttgctgagtacgcgaagtcgaatcggtcgtcgtgtaggtcatgttcgaacaagatagctgtgaaatcgcttaggttagggttgattagcaaaggacgtggcggggttgacatgaccaggtggcaccatttcgattgttttccgactgattctgagtcgattgcttccgttgatgatattcaaggcttatccgctttagaggttagggtttccttacatttctgtattttggactccctaggttttttttcgtctaaagcttttcactttcggttatttgtgttaacgcttgtgcttatggttacagaaagaagatcaagatgctttgacgaaattggtggaacaatgtggtaaagtacctgcaaaaaaagtaagactttggaaagtgatgctctttagtctcatttgctcatatctacttttgcctaactgcttgtatcggtttaaacttaaagcagcctgatgagaagaaggggaaggctaaaaagcatataatggggccgaaggggcttacgaaggcggcaacatcttcaaaagttattgctgataatgcgaaatcgagcagatcatcatgcaacaggtgttctcagacgatcgtttcaaaggatctgagagtggggctggttactgaagcctccaggggatttgatataaccagatggcatcactggggttgttttcccattgattttcatccaattgattctgtggaggacactggtggatattcatcgcttcaggttagtttttgtttacatattaggaatttccagttcagtggatagagcttttggatgattgcatatgacatgtggtaacttcgctaacaatatcttttttatttgattcatttgtcatactcaacagaaaggtgaccagatggaattacagtatttggccgaagtaaacaagaaggataaaactttgatagatgtactatccatatcccttgtcataatattatagtctgtttctgcaaatgtagagaactttaccatttcaggctttttgaaactaacttcttacttcctttgctggcaggatgtccacaagatggatgaaggtgatgatgaagctatagctgataatgagctaacggaggagaccaaaaaaggaaaacattctcctgttgcaaaattggtggaacaacctggcgagcctgcaaaagaagtaagttctggaagcaacaatcttcttttatgcgaggaagaaatgatatgcagacttcagtcttattttctaacctagatgtagatttttgactgaaatacttcttttaactgcttgtatcggataaggatgaggatgaagagagtaaaaagcctgcatcagatgaaataagtgagcagaagactaaggatgtgaaaaattctcctgattcttcaaaagttatttctgagtatgcgaaatcgagcagatcaacatgcaagaagtgctctcagactatcgctgcaaaggaactgaggttggggctagtgaccagaaacttccgtggctttgatatgaaacaatggcatcacttgggttgttttcctgtcgactctgatccaattgtttcggtagaggacattggtggattttcagaactgcag

SEQ ID NO: 185995 - DNA, 114 bp, Arabidopsis thaliana landsberg
acgctgtttgacgaatttgatgtcactgaaacgatgtttgaatcgatgaaccgcaaaagcaagatgattcattgtgtagccgtggataagcgtccatgccgcaaattcgcttga

SEQ ID NO: 185996 - DNA, 4476 bp, Arabidopsis thaliana landsberg
atgattttttatgcgccccggattgaaacgttcgttattcgcaaggtgagtggggttcgttgtgtttcttctagaacgcgatccagttcgggcgcagtgctcgtagctcggtggatccttgagttcatcttggcgatggttctttttagctcggttacttccgcatcgcgagcaccctcgcctgtgtagcccgctggatgttgtggtggacgacgttctggatttcccctagctgactggtgagttgaaagtcggctattatgcagtcgattgagttcgtctagtgaatatgcttgtgctgcggctagagttgcaaagcgagcgtttattcgctcgtcctactggctgagatgattcatgatactctggaacgtttcgcttggttctacgcgaactccagtctcgacgtgttgatctcctggcgccccagcttatggggttacttgatgcggctctttagttgcgggccgccggtcgtcgttcggaggtggcggtgattcgaggagtgctccgagcaacgatccgtggggcgtcggaggtgctgacgctttagcgggtatcgaggttgacatgtgaaacttccctgggatcggtgtcaccgtttgtcctcctgtactagatgtagtggcggttgctcctcgtagtgcgttcattttcgtctggtcgtgggctcgttcttccttttcgacggatatctttgaactataaacatagaagagactctcctttgtgtggagggttgtggtatgtgtttaatgaagaagactcggtacatgtgaattagggattaaaccggattcggttccagatttattgaagaccgttagtgagttaacagagttagctaaaagctctgtatcaaaacaagctctagttaatgtgtttgtatctaattttcaattcaattacaaacaagagtcatgagtgttgatgtagggatcacacaagtacgatgtttctctaggaatagttaaagaatctgtctcggttaataggtcgatgactagacgagaatttcttgactaagggacgtggtattgtgacgggatgatcgaaacaggatgatatcggtgatgtgtagacaaggcgaggtcttggagacgaggtgaggtcttgaagacgaggcgaagtcttgaagacgaggtgaggtcttgaagaggaggtgaggtcttgaagacgaggcgaggtcaatggttgtactgctgtcctttctctgtgtcagcgggaattgcgcatgtcctttcattcttttccattcttgtacttataggacctgtctttttagggtttcctttttgtgcttgtacgtctttacccctttttccactctacaccgtacatctgtcctctttgccctcttcctttggtcgatggaacactccagatcttttctatcacttactgggcttggtttgggcttattatgtttagggccaaaaccgacccctaacagttgccccccaatcccggcccatgtgcaacttgggcccgggatttcgacgatcctcgtacgtcttctctcatggcgcgtgaagttactcctggaacttagccgaatcgtctcttcgttcgactcgaggcgcgtgatacctacgcttggttttattggttgaccgcaccacctttagggtgttggaaacgaagcggctacgctttagatgtaatcattgcacctatttggttagcctaatgttttgtcgagctcactataaatattacgagacttcttctcctttcacatctttctctcctattgaaggtattctctcgctctctatctcttgttttgatttttcgttttgtcctcgtttactttttgttatgtcgatgagttcttgagattcctccttttatctccatcgaggcaattctcctagcggttcgcaaattggtgcgtcggctactgaccgatttttgaacgagtctctcgatgatgagatccacgcagcttatgcgggctcttcaactgctagctcctcgattgttgccgagcttcgacgtcgcgagtcctcatcacaacgggatgatgtcgaggcgatttatgtagccgatccgttccgtcctaggcttttggacgaggatttagctgatataaagccagacgatcccgaagatgtctctttccaggttgaggtcattctcatgcccttcggagttgcgggtcctgcccctcacgtcgtcgattccttaggtccgacccgtgcagatagcgcgtctatagtggatgtgttgcgattttgtgacgcaccgccctctttggagtttcgcgttccgttggcttctgaacggccatagactactctcgaagggttcatttgtgtgtatgagatgtttttactgaatgcggcttatcttttccgattccggggttccttttagaatatgtcgctcggagggaggtcgcttttagaatctatgcggtatgaccgttcattgttcggatttcgaggagttgacgtcgttcaaggaggttgggaagaaaccgggtactttctatgctcagtcttctggaacgccgaagctggttcttgacgctaagagctagacatatgactgggctggaggatattttttgtcaagatctctccggattctgttggagatacctcggtcaagaattatactagatggaggattttccccggtataattcgagcttgttttatcctatgggtctcgttgatgttgtaatctacggatgaatctctgatttttctttgttagatattcagttcgctccccgaagattttggatccgtatcccgatcaacttttcgaagacattaagaatatacgcgttgtttgcccttacatctggccgtcctccgttgattcaaccgttcaaagatcgcgagctatcaacaggaaagtttgtcccttcgttcgaagaaacaaggtatgtctgtctcgatgcgtttatgtttttcctttcgttcttaatctttgaagttactttttcctcgtgaattgttagttaaagaaatgggtaggaagaatttggacgcgctcccggattactctcagcgagtcagagggaagcatcccgccgttgatcccccaaagccgtctgcatctaaagagcgggagctcgagctggccaaaaagcgaagtctctaagaccaaggtggtcgacatgcgtttcaggccggcccgtctcgtcctctcagccccaattctgagaaggagaaaaagagagaggtgacactagctcgtcttggtggttgcgcgtaaggcgatcctcgtcctttggctggttctcaaattgttgcttctcagaccgtcgctccagaagctttggtcgttcaggccagtccctccgatcctccgagtcggaagagatccctccctctcggagaagaacggcctgattcctcgaagattgctcgggtcgatcaccgctggggctttctgtatcttgaaagggatattccctttgtgtctaacactgaagcttgcgcgatgatgtttcccgagatggggaagggacctggtttcttccctcacgttgaatctttgaaggaaagggacgcgtacgagaatgcctgtagatagtcatgcgaggtaagctctcgtattttggttgcattgtttttcatgcttattatattgatttcgttcatctttcaggcttcttcggcatggaaccgcgtcgtccaactttatgacaggcgggtcaagaggatatctgttgggaatccgaactcttgcgattttcgtgctacgttggacgttgaaaaggagaagaccgcagaggtgaatcggaagttcgatgaatcgaagagagaggtgagaagattattggacgaggtgtccaaggtgactcatcatcgtaccgggctacttgcagagcgggatcgtctgaatgatgaagttaacgacctgaagcaaaagttcaatgagctggttgaccatctttgtgctgagaaaaaagggcttcgaggtcgtcgtgacgagtacgacagctactgccagagcagaggtttggcgaaaatggcccgcctcgtccagaagcgtctcattcgtatcaaggcgaatattgatgataccaaagccatcgaaccaaagtacttggaatataatcaggttcgcggtaatatcaagatgctggaggctctggtcgagacgaaggagattgaagttaaatttcctgtcgtttttgagaggctcgaaaaggatctcaaagctttgaacgacgaagtgcgtgctcacgagattaccgatatccaaaccggcgacttcgatgcctacactttgttcgacagtcccgtcgaggttcctcacttctctgcttcgatccctagtcccgaggatggtgatgagcaagctgaagaccaggatggagaagaggtggggccgctcgaacaggtcgaacagaaccgagctttgatcttgggggatgttacagagggagcgacggctgttcagcccgaagtgccagctgtcgagccgactcaggtcgatgatgttaacgcgtaa

SEQ ID NO: 185997 - DNA, 217 bp, Arabidopsis thaliana landsberg
tatggcgcagcaaacggcggtttatgacgatccgggccatatgtacaaggaagcccagaacctttatcagcaagggctttatgcagaagcccagccattgtttaggaagaccatccgcaatatcggctatttccatgccaccgatcagcagttgatccttcaggatgcccattactactataacatctgcgctttgccagtgcagcaacccaatggg

SEQ ID NO: 185998 - DNA, 543 bp, Arabidopsis thaliana landsberg
ggttttaaaggaatgagagaagatgaggtactgcttgtaagattatttactttagtcattaatagtgcatggctataaaccttagtaatctctgccttgaagtaggtgtggaaagcttctggtgttttaaagagtggtgtccactgcttagctctcttcaaagaaaaggatgaggaaaaggaaatgctgaatcttttctcccagattcttgctattatggaacctccagatctaatggacatgttctcgttatgcatgccagagctttttgagagcatgattaacaataaccaactggttcagatatttgccgcactcctgcaagctcccaaagtttacaagccatttgcagatgttttgattaatttactagttagcagcaaacttgatgttctgaagaatccagattcagatgcaactaaactagttttgcatctgtttagatgcatctttggggctgtcaccaaaacaccatctgattttgaaagaatattacagctccacgtgcctgcccctatggaagtttgcatgaagaatgaaacg

SEQ ID NO: 185999 - DNA, 143 bp, Arabidopsis thaliana landsberg
agcctgatggatcgagcattctcttgctttctaaacttgcgagattgagaagttgtacctacgcgtctcctatgtatgtcaacgtaaccatacagaaagttggcgaagaagcagaaacacatctcgcagtttacattgggaag

SEQ ID NO: 186000 - DNA, 55 bp, Arabidopsis thaliana landsberg
cgccacatccacacgtcgggcaacactcgtctactccaactacgacaagcgctaa

SEQ ID NO: 186001 - DNA, 171 bp, Arabidopsis thaliana landsberg
tcatttcctacggaccaatcagtaacggctatagccactcacggacttgctcaagccgtcgcttatgtaaaggctccagacgctgattctcacccgcttcactcagcgcgtgactctcagtcccccaatgctatttttcttggaaaacataattttgaccgcatcggttaa

SEQ ID NO: 186002 - DNA, 70 bp, Arabidopsis thaliana landsberg
atgaagaaggctctgaagcttgtcatcgagtatgcagtcgagtggtgtgatggtgatactcgacttccgg

SEQ ID NO: 186003 - DNA, 74 bp, Arabidopsis thaliana landsberg
atggtccaagaactggattatggatacatgatggacatcacaagtaagatggacattgcaaaagtgatactcgg

SEQ ID NO: 186004 - DNA, 209 bp, Arabidopsis thaliana landsberg
ctaacacagctaaaccggatgcttattacgctacaagagctaaatcggatacttactgcttcgttggatgtgccaaaggaatctgcaaggctttggtgcctggaatgatctccatggcgaccagagcctggatttcttctggcgaatgcctcaacagcacccgtgaatctgtcccgggcctcttgtcccactggcgaaaacacaactaa

SEQ ID NO: 186005 - DNA, 117 bp, Arabidopsis thaliana landsberg
cggatgaacgaggtagtgaaacatgcaacaaagctaaatgaagcaatctctgtgatgaaaggtcttccggtggcaagagctcaaatatcttttggaggatactacgatgcactttga

SEQ ID NO: 186006 - DNA, 708 bp, Arabidopsis thaliana landsberg
atgaagcaggagaacaacaaagtggcagacgagttacaggccgggttagatcacattaccacgcttcaactcgaggttgataagactctaggaaagctgatcgacgagtttgctctttcgggttcaaagaacaaatctgatcttgatctccagcattccgatagccgctcaagagtgcccttaaggtcattcatctttggctccaaacaaaagagagcaaagccatccatattctcctgcatgcatccctcactatatagaaagatgaagacttctacataggtaacatttgcatattatatactacatactatccagagagttaattggttcatatactgtaatttatcagattcatggaggatttgattcattcgtgtctttcttttacctgtattttccctgggaggttaacctctcttttctttcggtttgcgagattgaaacaatagtttttgtgtgttggttatatgctttatgagttttgtagattgttcacagtttgtaactggtgaaacaagaggaatgtcttcaggctttttacattttctttttcttcatcaaaattgtatgttcagaaccattacaagaaatagagtttgtgatttattgtattttcataatggtacaaaaataagcaataattctccactaaccttatgagactatatatactacaggactgtactaagagccattatcagatga

SEQ ID NO: 186007 - DNA, 392 bp, Arabidopsis thaliana landsberg
ccgggacgcaacgcgtccccggatcccaccccatcaagtacatcgcctgggacaccggcggcacccccacctccgacggcgccctccccgtcctcaaaaaagaccccaagacaggcctagcccaaggcccccgcaaccacatcttcgccatcacccagcgctggctcgcccccgacggcgaccccagcaggggggtcgacggcttccgcctcgacgtccccggcgatatcccacaccccttctggatcgcctggcgcaagctcgtcaaacaaaccaagcccgacgccttcatcgccggcgaaatctgggacttcgcccaaccctggctccgcggcgaccagttcgacgccgtcatgaactaccgcttcgccaataccgcccaacaattcttc

SEQ ID NO: 186008 - DNA, 79 bp, Arabidopsis thaliana landsberg
atgcaacatacgcacttatcatctcccccagacttaggctatgcttgccctcaaccaaacaatcaagaacaagctgtag

SEQ ID NO: 186009 - DNA, 516 bp, Arabidopsis thaliana landsberg
actttcaggagaaagtaactcagaaaaggaatttgtctactagaaacaacatcaactcatctgagaagtcttcttcgtatgaagcagtatctgacactgtggttactaaacctgaagagggtacagaggaaatagttttagaagcaacagtttcagagaatggctttgagccgccggagatggaaagcacctgcgatgaaggtatcgtagaattggctcaaaaacttgatgatatagaaggcaagagagaagtaccatcaatgcaagggaagtggaaaggcctttaccctgttgttttcttgagagatcaaacagtgatcaacgggatcaagacatttttcggcattaaagatgaatcgtttccgctgtatggtcatctcgtgactagaaacagcgacataagcagcctcggaaacgtgaaaaggatttactatgtttcgaaagcagttaagaatgttcttgagcttaattttgcagttgggaagccgctcaagatctcctctgtggcctcaagat

SEQ ID NO: 186010 - DNA, 162 bp, Arabidopsis thaliana landsberg
aaacctcccaagattatgcggaatcaatcatttgatctgtgctcccccatcgccaccagcgacggtgccacccctgttgcgtccatgggtgccaggaaagacggtcagctaggcaacctcctcaaggctccgaagcttttggacacttccaccaagtcctga

SEQ ID NO: 186011 - DNA, 74 bp, Arabidopsis thaliana landsberg
atgtagagacttcttccaaggatgaatctgttttgattacgaaagtggagactgaaaccagcaatgaggttaag

SEQ ID NO: 186012 - DNA, 1540 bp, Arabidopsis thaliana landsberg
ggaactttgaagaacctaagagactcacatgcagcactttcgattggatcctcggggacagttgctggagagccatcctctgtaaccagaatcgtatccgactgtgaagctgcattaactgttctcaatcgagatcttggaatcctctcggcttctattgctcgtgagcaaggtgagcgtctttaactgtcttgagttgaccacacttgataaagggttcaactccatgaatgtgatgagttgtattcgttagaaatcattttagggtggatgttttgatctcaagaattgtaactcttttcagcactttttgcttctgtcaattaaccaaatcaaatctaaaggtaaaatttctcatcgaccaaatatttcactaatgctacacatttaggacaaaaacaataaaatgcaaacatattcaactaactgcccgtgtgaatcgcctcaagctcttgatgataatattggcgcatactgcaccgagaagttaaagagcttaaacttgagtttcacctattaaaatgatgttttaagattaacagagacgaaactttgactagtctagctatgatttggctctacagctacaaaagactcccagcagacagagttttcaaagcaagtcctctttggaataagcatcggaacagtgacttgatcacacaagatatagtaaccattccaagtatgaatgattcaaatttgttatcaagatccagatttatgtggctcccccatatcgtgtaattatgctgcgtgcatgtatatataggtcaaattgtattggcaagactccagcaataatatggacttccgatacatgacaagagaactgggaccaatctgtgcgtattaagactgatttgtgcaatggtttcaagattcagtggatttgccaatcataaacgtaaacgtttcatataaacacccattaacccaaaaattgaggtttataataaaagaagccttacatggcttcaaacgcgacagagcagaatactactgatcagaaattcaagagcttagctcagattttggcaaatgtcttcactgagaaagtcttatttgataccatcaaaaaatgcctcgaacaccctctgagctttccccgagtgatgacctgaaaagaatagatagatatatagatgattcatattgactaagcgaactttgcacatcaccagcccttcatattgtcctcagctactgagaactacaatgattgtaaagttccaaaaacaggtagtaaaacctaagagagaaatttatcatttaaaaccttacttgtacatacaatacttgtactcttggctcctaatcaaatctttttcaccttcttcaagctgctcaacaaacaaaacaagccattcataaaaaagaagagacagaaatttacagaaaactcaatcatcataaccatctttttacaaaccctcaccggatcactctcataaatgagttgatagcaaaccggagaaaggcatcgcagcgcacaattctctttcgctattgcagaagatttgcattgccaaccccataa

SEQ ID NO: 186013 - DNA, 405 bp, Arabidopsis thaliana landsberg
  unsure (1)..(405): unsure at all n locations
acatggacgatagcggcggggccgggcttgagcacacgcgcgaggccgctaaagaagaacgacaaatgcaccttagcctcagggcctgccgcatctacgttaccgatatcgctcacgctgtccgcgtacgcatagagcgaaggaaacggcgggctgaaaactgctaagtcgatcgagctttcnnnnnnnnnnnnnnnnnnnnnnnnnnnnnagtcgccatgataaatgtcccactggttatcgctgaatacaggcatgtcctatttccttaaaaagttcctcttgctcgcgagtgtcaactttgacacgctcagccttgcgaagcacgttctccaagaacggcacttcgagttcagtaaccgggatatgtacgtggagcggtcgcgtcgatccgatgcggtttga

SEQ ID NO: 186014 - DNA, 256 bp, Arabidopsis thaliana landsberg
atgaaatccgtggtgtatgtgatcccaaagtatattcagctccatgtaactcatacttgtcagctctgtgccattcattctcctgtaaggattccaagaaacacataagaaccaaagtgacagacactattttgcagagcaacaagtgtgaaatgtcattactccttcaacagccataatctctccaattctctgtgcataggttcagcttttcgtttctcgaattctctctgccttcgcgactgcaacaacataa

SEQ ID NO: 186015 - DNA, 286 bp, Arabidopsis thaliana landsberg
atggggaatgcgtgttgtgttgctgctcgagacaaaatggtggtgcctaattcatcagctggtgagaatttgcagaggagcaatatcaggcattctccgtcttggagtttccggtgggataatagagggcgtgtagctggtgaagaaacttctctcagttggttatctgatggtattagtcggaacgatggctctgagatcaaatttgaatctgctttcgtatcatctgaagggtcccctttggacagttttcggacacagacattgcaaaaatctcctgcctcag

SEQ ID NO: 186016 - DNA, 128 bp, Arabidopsis thaliana landsberg
ggatggtttcgatgatgaggatgcaaagaacgaattgattgtggaaggggaagctgatactcgtagagatcactattatttttgcctcggagtaatggggcccgcgagttcagatccttcacctcaaa

SEQ ID NO: 186017 - DNA, 10 bp, Arabidopsis thaliana landsberg
atgaagtctg

SEQ ID NO: 186018 - DNA, 134 bp, Arabidopsis thaliana landsberg
aggcaatcgagccgccggattggaaacgacggttctgtgaagtgtgggacactggattgaaggatttggttatgtcgaattttgctgatcaagtgactggttatctgccgtggcagaggcaacaacaagaatga

SEQ ID NO: 186019 - DNA, 161 bp, Arabidopsis thaliana landsberg
gagaaatcctcggatacatggtaaccgaaaaaggcatcgaggccaatcataagcagttcctagccgactttgtgatcgagctcccgctagcggacctggatggaactaacaccaataaaaaatggctcctccacgttgacggctcttcaaatcgacaatga

SEQ ID NO: 186020 - DNA, 172 bp, Arabidopsis thaliana landsberg
atgaatcaatccagcatcaaccccagaactagaccggagattcatacaaacagccgatcactcactgctaaatcaaacgctgggtacacctattgtgctatccacgtctttcttcgaaaccatcctcttgccacagattttaaccacatcataagaggaggcttctgcaaat

SEQ ID NO: 186021 - DNA, 129 bp, Arabidopsis thaliana landsberg
aatcaagaggacataaacaaagaaccaaaagaagacaaaaaatactttggcaaaacaaaagaaagaagaagagtcgctagggttggttgcgtaaagcattttcaaattcgaaaccgcgtatcaacatag

SEQ ID NO: 186022 - DNA, 142 bp, Arabidopsis thaliana landsberg
agaatgcttctctctcatttcctcgagtcgcacatgttttggtccatcccctccaactacaaaacgaacctttcaaaaaccaaataaaaagaaagtaaatgcggatactaatgagaaatggcagaatgattctgctactaat

SEQ ID NO: 186023 - DNA, 733 bp, Arabidopsis thaliana landsberg
gccactatcaatcgcgggaaatattgtagatacaaagtggtttacaaccctagagacgccagggaaagcaataacagcaacggtatgtctaaaaatccttgtaaaattggtaacccatgaattacatatagtttttaaagcatcattaagttatttacaaagggattttaaaaagggatacatggtttataaacaatttaaaaagattagaaagtggtaaaaatgatttacaaggtattttaaaaaggatttacatgacttgcaatcgtttttaacggattagaaagtggtaaggattgatttacaagggattttttaaaagctattaaaaagggtttaattgattaacaatcgttttagaagcagaacttagtgacatagaatgatttacaagggattttaaaagcttttaaaagtgtttaacttgatttacaatcgttaaaaagcataagtatgtggcgtataatgatttacaaggtattttaaaaagggtttgcattttttacaatcgtttttaaaggggttttctaatatgataatttttatttttgttgtgtttagcatgttgatgcagctttggagttgatgaaaacgaggaaggaaagcaatccagaattattcaaaaacaaatcagttgtatttgttggatcgtctttcttaaatgtgattgatgagtcatacatggagtttttggataacaaagagggatttcagtttcagtctgaagaaatca

SEQ ID NO: 186024 - DNA, 254 bp, Arabidopsis thaliana landsberg
atgagctcagaggtttcctggttctccgcgttgtgcgacgacgactacgagttcctgggcgtgcccgacccggcgctacagtccagctggcagcactgccgcgatatcgcccttacggccgagtccgcgggctacgacaatctgctgctgccctcgggctacgcgatgggcatcgactccatcgcgttcacgccggccgtcgcgccgctgctgcggcgcatgcgccagctgatctcggcgcgcatgggcgagat

SEQ ID NO: 186025 - DNA, 1073 bp, Arabidopsis thaliana landsberg
atgacgggtatctcacgatctgcgagtattcttgtctttcgatattccaggccacggaaggtcaagggtacaaagtcatgctagtgagacccagacgttcccaactttctcaatggagatgatagcggaggcattgtataagttgattgagcaaattactcctgggaaagtaaccattgttggatattccatgggagcaaggatagccctgtacatggctttgaggcttaacaacaaggtcggttcccttagtctggaaatttaacattgtttaatgaagtttataatggaatttggaagctattctatagatcgaaggagctgtcgcggtatcagggagcccgggactcaaggatccagtttcacggaaatattccaagtgctacagatgaatccaaagcaccaatgacgggtgacaatggactatatatctttatcgagaattggtacaatggaggcttgtggaacaggtgactttctcagtacattacaactttttgttacttttcttttttttcggttccccggacttaaactgattactcacatgagcgatctttgcaataactagcttgagaaatcatccccattttagtaaaattgctgcaagccgcttgctacatggtgatgttcctagtgttgcaaagctcctgtctgatctaagcagtgggagacaaccgtaagttcatggtccttgcaactatttatatatcatgaatttgattcaaatgggataatgtctgatgactataatgatattgtcccctttgaaaaataggtcattgtgggaagagttggaggattgtgatacaaatatctcgctcgtattcggggagaaagatgtcaaatacaagcaaatcgctactagaatgtaccgcgagatgagtaaaagcaagaagagcgtaaacaatatcatcgagatagttgaaattccagaggctggtcacgctgtacatctcgagagccctcttcgcgtgattctcgccctcagaaaattcttaacaagagttcacaacagttctacagagacagagctttctcagaagctcttgttagcactaaaagaaatgtaa

SEQ ID NO: 186026 - DNA, 1107 bp, Arabidopsis thaliana landsberg
atggatgcaacccaagaggtcaatacaaatgatgagaacattatgaagccgggtcctactgtcacggttgacgtgagtgaaagaaatcttggcagtaccaagcaagggaaacggagaagatcagtgctcataaagcaagaagaacgggaaactggcatcattagttggaatgttctgatgaggtactttacctcaccatttttttatggctacaaagagatcaactttgatcgttcaaccaaaatgaaaaatagttgagctaacatagtttaacaaaagaacattgctttatatttatataaaaaacaaaagatgcagatgaacagtgcttaatgtggtttccaattttcaggtataataaagcagtaggcggcttatgggtagttatgattctactggcatgctatttaacaactgaagttctccgagttttaagtagcacatggttaagtatttggactgatcaaagcacgccaaagagttatagtcccggtttctacattgtcgtatatgctcttctcggatttggtcaggtttgtttctgtaaaagacttagatctgtgtttctgacatattacacgaagttgacgtttatatggtcattgattcaggtggctgtcacgtttaccaactatttttggttgatctcgtcaagtttacatgccgctaaaagactccatgacgcaatgctgaattctatcctacgtgctcctatgctcttcttcgaaacatacccaaccggacgtgtaataaacaggttttctaaggatattggtgatatagatagaaacgcggccaacctaatgaacatgttcatgaaccagctatggcaactcctctcgacatttgcacttataggtattgtcagtacaatttcattgtgggcaataatgccactcctaatactgttttatgcaacatatatctactatcaggtaaattctacttcatgtcattgtccgcttctctttaattgttattaatctatgtgatccacttggaatgaatctcacttttgtaatttgtagagcacatcccgtgaagttagacgtttggattccgttactagatcacctatctatgctctatttggagaagctttgaatg

SEQ ID NO: 186027 - DNA, 325 bp, Arabidopsis thaliana landsberg
gtatatgaggtgattgggaaccgtgttgctgtcatattcgaatacggtgatgataaaacatcagagggaagtgagaaaaagccagcagagcagccccagatgttacccatccactggttagatggtataattgcttcataatattccgatcgttaatgtgtgatacttatgaatctagagaattacttgctatgtatgaagacgcttgacatcatatttaaatgtagctaagtaatatctattttattacgcagtgaaagacctgaagtacgatttggatatgcaggcagttgatggctacattgctatggaagctttaaatgag

SEQ ID NO: 186028 - DNA, 132 bp, Arabidopsis thaliana landsberg
atgtttggaccggaccggaccgaaccagaccggtgagatgttaaatgagagacttgcttaccaaattgtaccaaaacggtttatattaaaaggtgtaaaaagtggccttttgttgtctttttcagtacttga

SEQ ID NO: 186029 - DNA, 448 bp, Arabidopsis thaliana landsberg
atgtactcaaagaaatgtgaaggtccaatgaagaatgggattcgtcaaggcatagtcagtggtattggtttcggcttctctttcttcgtcctcttctcttcttacgctgccagtttctacgttggagcacgccttgtcgatgatggcaaaacaaccttcgactctgttttcagggtacggaaacaaaacacacaacatgttgatgataaatgccttcccttgagagtttcttgatcccttgtcatgtttaacaatgcaggttttctttgctttgacaatggcggcaatggcgatatctcaatcgagttcgttatctccagattccagcaaagccgatgtagctgctgcctcgattttcgcaataatggacagggaatcaaagattgacccaagtgtggaatcaggaagagtgttggataatgttaaaggagacattgagcttcgtaat

SEQ ID NO: 186030 - DNA, 320 bp, Arabidopsis thaliana landsberg
ggcacaagcgcggcggcccgcgagtgtcaatggcgacacagccactggcgcaggcgaacccgggaccctgcaccccaaacacacaaacaaccgattctacaccacgctagagacacagcaaaacagattagggtgcccttatcgtgattctcgtcgaggcaatccacgacacccgcacggtgtggaccacagtgccccgcaatcaccatcgaaggccccgagcacccagctcgaacctcgtgctcgttcgagtcctgaacgcctgaagtgcacacgagtggcgaacgatcacccaaagtcgacgccatactccgaccgtg

SEQ ID NO: 186031 - DNA, 534 bp, Arabidopsis thaliana landsberg
atggccaggccacggaagttcgatgagcggcaggtgctgcggacggcgcgcgatacgttctggtagaacggctacgcgggcacgagcatggatgccatctcggcggcgaccggtcttggcaaggggagtctgtacggggcgttcggcggtaaaagtcctttgtttatgaaggtcttcgactcgtactgcgccgacgtctcgcagggagcggagcaggcgctggccgggcccgacgcgggcgcgctggaccgggtcgccgcctacgtccgggccgtcgccgagggcacggccgccgacaccgtcaaccgcggctgcctgctggccaagggcaccgccgaatgctccgagcatgacccggccgtggccgagcggggcaggcaggcgctgcagcgcatcgaggcggcactggcgaccgggctgacggcggcccggcggcacggcgacctggccgcggacgcggatccaaaggcgcacagccgggatgctgctcgcggtgacgcgcggtatcgaggcggttggccgggcgggggctga

SEQ ID NO: 186032 - DNA, 195 bp, Arabidopsis thaliana landsberg
atgttgaagtacaatggaggaaaaccaagagctgaggtgagaggcttgggattttccaccttcaactttgccccgcctatagggattttctgataccgtgtattttttttttccttttttacagacaaaacttaaaactgccgtccaattgcaagatctattggatgccacaagaatgttaattcctcgtgcaag

SEQ ID NO: 186033 - DNA, 25 bp, Arabidopsis thaliana landsberg
atgggcatccctgaaaacaagcaag

SEQ ID NO: 186034 - DNA, 124 bp, Arabidopsis thaliana landsberg
gtataccaaatcccccaatcaaacacacagagaagttgaaaacccagtaaattcccaaacaccgacaaaaactaatcctatctacagaaagaagcgaaatgaatcaagaaagaaagatatctga

SEQ ID NO: 186035 - DNA, 418 bp, Arabidopsis thaliana landsberg
atgttttttgatggggttgaaattgatgttgaggatcctgtagctattaacaaagtgaaggaagaaattcataaacggtcgtttcaatcatattatcaggcatgccagggtttagctccctcagagggttcaggtgcctgtagggagggattccaggcaggttttaagcctagtgctgctagaacttctcttctttctgtttgtgctacagattttgatttaagcttgacggcagttcatggtggtgatgctggtttgatagaagtcctgaagaagcttgatcctatttgtgaagaaaacgacatacccttttctcggttatatggaagcaatgtttacttgaatactggaagcttggtagtccagttaagaaattatacacttcctctcctctctggcacttctggcaaatgtgaag

SEQ ID NO: 186036 - DNA, 603 bp, Arabidopsis thaliana landsberg
gtggttaaagtatatgtatccgtgtttggagatgatagagggaaagacgttgcaattgcggggttgaaatcgaaagctaagtacgttaggagtgagcttgggaagcgaatgaagttgagattgacgcctgaggtcaggtttattgaggatgaagccatggaaagaggaagcagggtaagggattctaatatatctttcacttaaagtaaactagcgtttaatgaaatttagtcttcagttagtaaatgaatgtctcaatgatgcggtcaaaatctctatcttgcattcatagtcatgagtgttgagtcatgaactagttgatcttgttgattgtcttctctgaaaatcacctcttctgtgctatattagaaaccggaacttggtggatgctgatatagtcagtcaagcaattgtaataccatgtacggttatcactatgagcagaaactgaattggagactgtttcaggtaattgcaatactggacaaaataaaagctgagaaaggaagcggtgaagggaaaacagaaccatctgactcaacagaagatgatcaagattgggaagtggatgaccccgacgaagacataatctatgtaaagtaa

SEQ ID NO: 186037 - DNA, 1502 bp, Arabidopsis thaliana landsberg
atgaaaccttcgatggccatgttttggtttgattttggcaagtatggcgtcttaaccggtgatgtgtaggtggttgttggtttgggaacgtaaggttgtcgttgcgcatagcaatcggcagtagccacaaccaccaccatcgctaggaggaggaggttagtggcggctcctgtggatgccattgttagtagttgctcgcctgctgtcgtttgattaaggtctgatcacaagacatggcctcctttatatatatggaacacacagtctactgaagtatgttacgatcatattggacaagtgacaactagatgttggccgcaagagaagagacataattgggtgcacgtttaaatttttatatttgcccaccaaaacctaataatattgatcgagaaatgttttgataattattactcatcacactacaccaagctaggatccgaattgagaaggaaggaattactgttttgtggttaattcttgagtgaagtatttataaatacgtatttacatgcatgattagataaattaactaaaacaaatagaagaatttggtaggaattaatattacgccatgtaatatagtatttgatgtgggagtagaaataattaagaaagcgttatggttcaaatgataactgcaaattctatgattaattaacttactattatttataagttgttaatggtagttgcaaaaggttatagagcacacagtaaataaagtagatgatattaataaaagtttctagaagaacttggtcgtcaagcaaaaactgcaacaactctgacattgtctcactgtataaaacccaaattctctttctcttttaggactcggttcaaaaacgaaaacgcaaatacgtcttgttctagtttggagttggaagcgtaaaaaacaaaaaacaaaaatgtgtgggggagctatcatttctgatttcatctggtcgaaatctgagtgtcaactcggctctgttagcagcaggaagaagcgtaaacccgtctcaggtacaacacttttggtttcgagttttgtttttttattataaaacctaatatatccgtttctgattcgggaatatcttcgaacagtgagtgaagaaagagatgggaaacgagagaggaagaatctgtacagagggataaggcagaggccatggggcaaatgggcagcggagattcgtgacccgagcaaaggtgtacgtgtctggcttggcacattcaaaaccgccgacgaagctgctcgagcctacgacgttgctgccatcaaaatccgtggccggaaagccaaactgaatttcccaaacactcaagtagaagaagaagccgatactaaaccaggggggaatcaaaatgagctgatttcggaaaaccaagtagagagcttatcggaggacctgatggcattggaggattacatgagattctatcagattccggttgccgacgaccaatcggcgaccgatattggaaatttatggagctatcaagactccaattaa

SEQ ID NO: 186038 - DNA, 243 bp, Arabidopsis thaliana landsberg
atgagatacaactgtaaggcattttctcaattagtgatcaagggggaaaggccccttgtgggtgggaccatctctgggctactagtcttggttctataagagagcaggctgagcaagccaggggaagcaagcaagccagtaaagaacatccctccatggcctctgcatcagctcctgctttctgacctgcttgatttccagtcctgacttcctttagggaagaacagcaatgtggaagtataa

SEQ ID NO: 186039 - DNA, 153 bp, Arabidopsis thaliana landsberg
atgaagaatgcacaacttcgcgaagagctaaagaaggcgagtgaagataatcaaagactaaaggaaatgctaagtcaaacaaccaacaacttcaattccttgcagatgcaacttgttgctgtcatgaggcaacaagaagatcatcatcaccta

SEQ ID NO: 186040 - DNA, 508 bp, Arabidopsis thaliana landsberg
atgagtaaagcttataactatccgctggagaaaaacattgaatttgaagacgaagacgctgacgtggatgaagacgctgtcgtttggaactgcctttgccggaagcactccagtgatatcgtaggcggcgcgttggacgacggcgaccatgacgctttaacacccgaatcgttcggtgactctggtcatcatcatcatcacatattcccatttattaattaaatgcacacatatatctagagattatcttaatttgaaagaggatatatatatatatatatatatgataagagaattaagtacgtacttggagtagtcttgccggtgccggtgtcttgggtggcggaggctgattggtgacatttacggcggcggcggttatggtcagcaagtcgcttacggcagctccgtttcccgttgtcgaattccgacagcaaatggaacctgtattgattatttcgatatatatatgtataaatcagatgatgatgatgagatggagaattag

SEQ ID NO: 186041 - DNA, 335 bp, Arabidopsis thaliana landsberg
ggggatcgggtaggtattgttttggtgcatcaaaatttggctatcgtacgatttggagcggctcgtctcaaaggtgggtacataagtggcatgtcttacggcaacattagcaaggtgtttggaattgatgaaatgaggatgctatagaggaggcacgtctatgttgtctcccacacctaaaggattaacttcacatggagctcgttaatcttggtctcgtccgtctagagggttcagttgttcttcaagaaattcatagatggggttgccatcttcatcgtgtaaagactgtcaatgctcgtatagagttggaacttgaggtcgcggatcattga

SEQ ID NO: 186042 - DNA, 60 bp, Arabidopsis thaliana landsberg
atgcgttcgtgtttgatcatccccacacatcctattcttcccaaatattcccctctcgag

SEQ ID NO: 186043 - DNA, 65 bp, Arabidopsis thaliana landsberg
atggaccatcgagctacgattagcaacaccatcctacccaaaatcaccatcgagggtatccctgg

SEQ ID NO: 186044 - DNA, 110 bp, Arabidopsis thaliana landsberg
atcaacaagtgaatttcactaagtttgatcctggaaatttcgatagggtgtacgactacttcacactcggattccgacacccaccacaacaaaaaatcaaactttggtag

SEQ ID NO: 186045 - DNA, 529 bp, Arabidopsis thaliana landsberg
aggatgaaggaaagcaagcttacgcaattcattgggaaccttctcctgaagctgcatacaagtggaaatactccaagccaaaagttccaaagtccttacgcatatacgaatgtcatgttggaatcagtgggtccgagccaaaagtttcaactttcgaagaatttactaagaaggtacctcctaatgtattcattgtattcttacttgcaatcttattatgcacacatctcagtttttctgtggcctatcaaacatcaggtccttcctcatgtgaaaagagctggatacaatgcaatccagttgattggtgtccctgagcacaaggattattttactgttggttatagggtcagcaagctaaacttctagcactttaactttcttttttactacttcttagtctggctatagggtcagcatagctgttattcatagtcttatgttacctccagttcatatgattatatcgtctttggctgtgctgtccgctgtgcatgaaaggttctcaaggtcgttgcccaatgattag

SEQ ID NO: 186046 - DNA, 952 bp, Arabidopsis thaliana landsberg
atgaacagatttcgactcagcgacctcagttctcgagatcgattagcttcaacactgcccacttctcaccaaggtcacagcttttctctctcacgcttttttcttacacaaccgtttctgattggttgaagagaaaccgccgatttgatgcgttttcgtttgttctaacatagaactcgaatttgtcaatttagagcaaattgtgtattttttgttggtcaatcaattttataaatattttagttaaaaggttctgagattttctgagcaaaccaaaacaaaagcaattactgatgtctttttgtttccttgttcgggttgttcgagagtctctcgtagtgagggaggtcatcaataccacaattggttacttcttaaactatagagaaatgtatttttataaaatcttgagctacaaaacaaagaaatgtttatttgtttcttgtggaaaaaaaactatagttttaaagcagtgggtagagagaagaagaagattacagattgctactctcttttttttttcttttcttataataataaagtaaagaaaagcttttttagaaaaaattatcagggcagtgtttgttggggtagtagtactgtcatgatttggtttgtttgttaaaaatttcttttttttcaacagatttaatgatttagatttacatgtaatgagtgtttttgcttaacctcaatgctttattgtgttttttatcttcttcttcctccacttattgtgctacaatttactctttttgtctcccaagtttccattttttttattaaagtttcttccgttgtcgtaaagttgattgctttattatcaattgagaatcctaaaaagtcattcattttttcaggaaagaaacagaagagtcagaaactcaaatctccaaggtcttcttctcctgaatttaactcttgtcattgtgaagctttgagtgaaaacaag

SEQ ID NO: 186047 - DNA, 997 bp, Arabidopsis thaliana landsberg
atgctggcggactgcgaagcctacgcggtgaagtgcgaaccatgtcagagacacggcccgatgaagaacgttcctcccgagatactgcgttcggtcacggcgccgtatccattcatgcgatgggccatggatatcgtaggaccaatgcctccttccggatccaaaagatttatgttagtcctaactgattacttcaccaaatgggtcgaggcacaggcataccacaaagtcaagtcacgcgatgtggttgcattcatctggaagaacattatttgccggcacggtcttccttatgagatcgttacagacaatgggaagcagttcgtctcgctcattactagaaacttcctcgccaaatggaacattcgcatgagcaactcgactccaatccagcacacgctgaatattctttctcaaaagccgggctcagtctcgcacctaacatctagtccaattagacagaaaaaattgcgttacttcgaaaagaactcaaaagccgacctcagaggtcgcggaggaaataagccaatttaataaaattgcattgtattaatcaacgaccgaacgagatcgggggatattacaaagacgtttattccagaataaattagagttgaacaaagtcggcagccattacaagggcgtttatttggaaataaaaagcaaaagaaaaacgatccaaaagccaccaaggatcatcttctatcggccagatagaacatcagatcgccctgtcagaaacagtgcgattatcctggagaaggcgatctcgcggtattccttatgccttgactggacacacgacaagaaaccctcggcttcacgtctttccatcgagctcgcctggaataggagagtccagggaactcgaaggttattgaagaacggcatcccacgttcaatcgcctcagcattcgggaaagtcggaacatttttgccaacaaaggaagacgatccaacactctccatcttgcaaataggaggaaaagtccggtga

SEQ ID NO: 186048 - DNA, 218 bp, Arabidopsis thaliana landsberg
catctcgtttgctaatacaacggaagaacggacgtcccgggttatcttgtgatttcgatgtgaaaactgtgacacttaaaccacacacacacttacacgggacaccacgatctccgacgacaccggatttggcagagcttgaactcatcggaacagagagaaagaatcccgagctaattcgaacagaaagaatcacgagcatgaagaagaaattctag

SEQ ID NO: 186049 - DNA, 81 bp, Arabidopsis thaliana landsberg
atggatagaggaagagagagatacctggagaaaaggaagccatggaagtgtaaacaggagaaagagaaggctgtgaagcag

SEQ ID NO: 186050 - DNA, 487 bp, Arabidopsis thaliana landsberg
atggacaatataacacaggtaacggcgcagaattatccaaatatgcttgtaactgctgggttaaatggtaagctttcttttagtctatatactgttttggtgatagataaataaaactgctgagttaaatggtaagctttctcagacttgtatctgacgtaacgatgtttttgaattgattctgtctgtccaacagatccaagagttatgtactctgaacctggcaagtgggtggcaaaactgagagaaatgaagaccgacaacaacgtacttctgttcaaatgcgagcttggcgcagggcatttctcaaaatctgggaggtatgtgtttcttttattccaacgatgcaatacatgtcattttctgtgattagactgaccaagaaagctcggtttgtttgatggacgtgcagattcgagaagcttcaagaagatgcatttacgtttgcattcatgatgaaagttttggacatgattcctgcttctgg

SEQ ID NO: 186051 - DNA, 427 bp, Arabidopsis thaliana landsberg
atgaacggaaatattctaaatctttggcgatacggtagaaaggacaagacaggaacttttgggttgatggacgacctcacctatacgctcgccggcaacagacttacggcggtgaatgatgccgtgccgaacaacaccgatgaacagggatttaaagaagtaattgaaactacgaacgagtatacctacgatcgtaatggcagtatgctgaccgatcaaaacaaagccatcacagccattcaatacaatcacctgaatttgccctcacaggtttcgaaaggcgctactgactatattgtgtacacctacgatgcaacaggcagaaaactttcgcaacaggtctttggcacaggagcaaaaacgacagactatattggtgagctagtcttggaaaacaaccccattcccatgatcacgcatgaagaag

SEQ ID NO: 186052 - DNA, 230 bp, Arabidopsis thaliana landsberg
atgacgtctcttcctaccaaaattgctcttccacctaaaagtaagttcttttgagaacattgattgatgaaatttgtggttgaatcggataatgtaccttacttggtcttggagatgaatctggaaactaagctctttgttttttcttctcaggggtatatgtgaacaatggttatcttatggtttcctgcaatggaggactcaatcaaatgcgagcagctgtaagatga

SEQ ID NO: 186053 - DNA, 313 bp, Arabidopsis thaliana landsberg
atgcatcaccctttagagtttattaaaccttttgatcgagagattataaagccggaaatcttccgtgagtttaatatactttgcacaggccatgtacatgaaatggcttcgtcctatacctacgacctacttgggaatatatttatttctatttccaattctactattgcagaaatacctgaattgcgcaaatatgtaaatggttttacagtaatcgaatttgaaccgacaaactacattaacgctagatatagaaaatacattgaaacatccaagagatttgttgccaatactgatataggaacagaagacg

SEQ ID NO: 186054 - DNA, 120 bp, Arabidopsis thaliana landsberg
ttaaagaaacgagttaataaagaaggtctaaacttaaaaacagatgaaacgaaaaagaggttaaagggagcaaaatcattaaatcaaactccatctgagtcaaccaacggcagcaactga

SEQ ID NO: 186055 - DNA, 380 bp, Arabidopsis thaliana landsberg
atgagttcttcaatagtgtcacagttacaggctctcaagtcagtgttacaagccgatacagagccttccaagagacctttcacacgcccttcgattctcttcagtcctaaagaagcagctgatttcgatatcgaatcaatttacgagctcgggctcaaaggtatgttctcttctcctattatgcaattctaatgaacaagctcaatgataaattaaattctcatcgttaattatttttgttaattcaggtctagaagtacttggaaacaaagatgagaggtttaaaaattacatgaacgacttgtttagtcataaaagtaaagaaattgatagggaattgctgggtaaagaagaaaatgctcggattgattcatcaatca

SEQ ID NO: 186056 - DNA, 416 bp, Arabidopsis thaliana landsberg
atgatacaaggcacccttcatctacctttctttttaccatatgaagcttacataatagttgctgagctgcaggggctttgtgaatggcgggatcggattgcacgcgcagatgatgagagcaccggttatgtattgccaaataaaactctttttgacataggtagataatttaccatttcatctccaggttcttggatatttgtcggtggttcctaatttggtctaactcgttttattaaataacagccaaggagatgccaattgttgttgcccagttgcgccgtttgttgaagtcaaagcttccttacctcgagcgtaattttgacgcagtgatcagtgtcatcagacgatcaatgcaaaatgcagcggcattcgagccagttgttcaatctttgaaagataggcgtcctgaaaca

SEQ ID NO: 186057 - DNA, 158 bp, Arabidopsis thaliana landsberg
cagcccttggaatttgtattctctgctgctgccggaggatcacccaccgccttatctctggttggataaccgatcggcgacggacttacgtatggccctgacgaagtctctgatggtttttgcactgggcccaaaaagatttattagttacctacttg

SEQ ID NO: 186058 - DNA, 209 bp, Arabidopsis thaliana landsberg
gggaactcagtttcccgcaaaccctcgcaaatttgcgacgtttttgcagggaatcatgacttccacgtagtttactcgcaattgtcttgcaaaaggttatgttccctcggagagatctatttttcggcgaagaagaggtttgtcggagagatctattcgtcggcgaagaagaggtttgtcggagagatctattcgtcggcgaagaagag

SEQ ID NO: 186059 - DNA, 99 bp, Arabidopsis thaliana landsberg
agcgagccagagttggaatcccctatcgtatttgtggtggccattagctttaagtaccgagagctgattacggatgtgtttatcaatccacgagactaa

SEQ ID NO: 186060 - DNA, 468 bp, Arabidopsis thaliana landsberg
tgggtgtgtccgccgagctctatcagaaaaaccaccagttgatggaacaggagcgaaagcttaccctggtaaaccttgacctggccaaggaaatagaagaacgacgcatatctgaagaaaaagtgcacttgctgaaccagcagttgcttgagaacaacgaaaatctgaaagctacggtggaagaactggatcgctttgcttacgtggcatcgcacgacctgcaagagccattgagaaagatccttgtcttcagcgataagctgctaaaagcaaaacaaaattttggcgaagacgtgatgctgtacatgagcaagatcgtgaaagcatcggagcgcatgcagaagttgatcaacgacctgctgatcttctcccgtgagctcgacagctcgcagggctatacaccggtaaacctgaacgaagtgttggaaaatgttaaaagcgacatggaagtgcaagtggaacattccg

SEQ ID NO: 186061 - DNA, 144 bp, Arabidopsis thaliana landsberg
tccgatctcacctcaatttatgccgtctaccatgagttcttactgtttttctgcgacacgcacatcctggccgtaaccctaaggcgcatgtctgctgttatcggatcagccagcttcgtgaccaattttccggcgaactactag

SEQ ID NO: 186062 - DNA, 1223 bp, Arabidopsis thaliana landsberg
atggtcgacttgcgagcaatcttctggtttgtggtcataagctcttgtgctgtcgctgcaccaacctgcattcagagatctgattttttcaaagccaatggtccttacgacaaaaacctccgagccatgctctcgtctcttccttctcgtgtcaaggataatgaaggcttctacaagactccgttcaagcccggtccaaacatagcacatggtctggggatgtgtagccgaggtactacaacacaggattgttcggattgtatcacgagtgtatctcataccttgctacacacatgtcctaatcaggcagaagctatagactggagttctggagactcgctttgtttggtacgctactcaaaccacttgattaatggatcgctcgacgaagacataatatgggcagagtatattgagtacaaatataacatatcgttcggccaaaccaacttgacggagtttaaatctacatggcaggctttgatggatcgtgtgataaacaaagttgatggttcattgtacgccaacagcatacaagagctcgggtcgttcccgttcaggagcatttatgccatcgcgcaatgcaataaagacctaaccaagttgaactgcgagaaatgtttacaacatcttaggatagataataggtcatgctgccgggggatacaagtaggctatattgcaaggaccagctgtttcatgcgatgggatctacagccattcttgggactattcataaatgggatgttaccaactcccccttctgaattagataatggtcactctaacacaaccaagaaaggtatataatataaagatatgaactcttcatttgaactttttctgctgtgttggatctcgatttttgctgatgtgtttgcatttatttttgtttacttgaaaatacaaactcaaaaagaaaacacaacctcctgttatttttgtgtaataatgtttcatattcgtttcacaaaaaaaaattgtttcatattcaaaaaatttaaaagaagtttctaaaaaaattcgcatttaaaatactttatgcccttaaaccaatttggattgtattctgagtgacagctttcgcgcagatggcaaaaatatatctacaggatctattgtggcaattgcggttgtttccgtcgtcgtgagcactgtactgcttgctcttggatacgctgtttctaggaggagaaaagcttaccaatcatttgcaagtgaaa

SEQ ID NO: 186063 - DNA, 552 bp, Arabidopsis thaliana landsberg
atgcggtgagtttttcgatcattttgttcctgtcttttgctaattaaagatgggaccgtggtggtatttgtagttctgcaacttgtttatagtcacagaatgctgcaaaacgttttgatatgcattcaataagagagacttttgagtttctgtaatgttttggatcaatttgttccgggctacaatgttttgaaagttcttatgggattgattatacatggtattagcaagaaactgacatttgtcaatggattatatagtaggatggaccttaaatcgtttccttgcttcttctacttgcagcaacagcggttcttctaacgtttttgaatgtccaaatggctcttttctctgctcttgcgatcagttattcaggtaacttactaagcaattgtcaagtctgatataactttgtatggcctttcatgacctctaatacttctgtgtctatgttgtagttatgatattgcatgctgggttcagaaagctcacgccatccaagaaaccaactcgaggaagataaaccgcatccacacgagttttggattttga

SEQ ID NO: 186064 - DNA, 777 bp, Arabidopsis thaliana landsberg
atgaatcgaagtgaaatgcaaaagttaggtttcgaacacgtgagatactacacagagtcgccgtacaacagaggagagtcctcggcgaacgtggcgacgacaagcaactattacggtgaagatgaaccatacgtggagatcacgctagatatccacgacgattccgtctccgtgtacggcttgaagtcaccgaaccatcgaggggccgggtctaattatgaggatcaatcgcttctcagacaaggtcgttcagggaggagtaactcggtattgaaacgcttggcttcttctgtttccaccggaataacacgagttgcttcttctgtttcttcgtcttccgcgagaaaaccaccgcggccgcagctggctaagctgcgccgttcgaaatctagagcagagctagctctcaaaggtcttaaattcatcaccaagactgatggtgtcactggttggcctgaagttgagaaacggttttatgtgatgacaatgactaataacggattattacaccgatccagattcggtgaatgtataggttagaagaagcgactggtgagagggttcaatattttctgttttgaaatttcaatgattgattacataaattttgctgcagggatgaaatcgacggagtttgcgttggcattgttcgatgctttagcgaggagggaaaacgtaagcggagattcaataaacatgaatgagcttaaagagttctggaagcagatcactgatcaagattttgattcaaggctacgaactttcttcgccctgtaa

SEQ ID NO: 186065 - DNA, 783 bp, Arabidopsis thaliana landsberg
atgctggaaggagatttggccctccaagggatcagtcaccgccaagaaatgctggaagggtaactggcagtccaagggatagatcacctccaagaaatgctggaaggagaatgggccctccaagggatcagtcaccgccaaggagcaccagaagcttcagtagtaattctagggctctgtccccagctagaaatatgggaagctacatgagttcttctcagggtttttcccctcctaggaatcctagaagctacatgggttcttccaggggttctcccccacgtagtaacattgaagattttcatggacgaagcaggatgcttgataatatgagagcatcgccatatcctgttagaggtgtactaaatggtcaagcgccatcaagtggtgctcctttcgccaggccaatgttacctcctccagtcccaaacccacatccattgcctccattgagccagcttcctccacttggaagtattatgcagaacagtcccttctctgtaagatctttattcttcttctcaatttgtggatgaattttctctcttcttactctttctatacattgggtgagtacttcatatttacctcgtgtcattcttagacccataaaacctttgtgatcagatagtcaaaactttatgccttcttcttatacatatgttataatatggcatgtatatctacttggtggaacaacaggtggacgagcctctatcagttgatggctttctaaattcaattggacttggaaaatactcccttgcctttaagagagaggaa

SEQ ID NO: 186066 - DNA, 589 bp, Arabidopsis thaliana landsberg
atgtggtatggtgagcgtattgaaaagacagtcaagaataagaagtccaagtttacatcatgttgtttgcaaggtcaagtgaagttaccttttcttaaaaattcaccagaattactttatgcattgccaaccaatgacgatgaaatcagtagacattttagagaaaatatcagggcttacaatatgatattttattttacatcacttggtggtgatacagaaaatagtgttagagccagtggtggtcctcaaatgttccagattcacggagagaattaccataggatagggagtttgaaaccagacaatgatatacctccaaagttcatgcagttatatattgtagacacagagaatgaagttgataacagatcggaagcactcaggtgagtccattccttatagtgttactaatgtttttgtatatgacattgatgttgttttaatattggttactgttctaaatttgacttatttgattcttaacagtaatggtgttaatgctgacaagtataaaaagaaagagttgagaaaggaaattattgatgttgtgatcaaattgctaaatagtatcaacccttatgtatga

SEQ ID NO: 186067 - DNA, 1234 bp, Arabidopsis thaliana landsberg
atggcagacatcttaaacagctcagcaagacctcctcatggaaaaactccaggaacatctcagcctggaccagcaaacgcctctgagggccagaaagcattctatcagatccaggacccaggaacttacacgcaactggttcttgagacagccgtgatcgagatcctctcgcttcctgtctctgctgctcagattgtctcttcgcttgtccagataattgtcaacatacaatcgactctgattcaatctggaaacgggttccacggcgctgccaacggggtgggacaagggtcggtactgccaacgtctccctctggagggagcacagactccatgagcgctagccggtccacttgtctgattcctggtatcaacacagcgagctttgtctctagaagcggttatacatgtcagcaactgtcgtgtctgttgattcaagcttgtggacttctgttggctcagctccctccagattttcacgtacagctttacttggaggcagcacgtgtgacaagggaaacatggtggcttaaggacgggaagagatcacaaggtgaactagactcagctgttggatacgctttgatggatcctacatgggctgctcaggataacacctcgaccgccataggtatgctatagtttctggatctagaagtgaaatgtttgtttggattttgtttttacatgtgtcttcttccaggaaatattgtcgccttgcttcatgctttcttcagcaatctcccacaagaatggcttgatggcacgaatgctatcatcacgaacctccggcctgtgacatctgtggcaatgctcagagttgtattccgtatcatggggccactgcttccgaggcttgccagtacacatactctctttaacaaggtactcttatggcttgtatccatatgaagtggtcagtcttttcaagtatatgcttgtgagagttaccgtgtgacgttctgctcatgttaaatgttatatcaaaggctggatagaatttgaatattatgtagttgccatcgtctagcatgttaattcctagtctctcgagtaaacaacataaatgaaatgatcttcaatggtttcttgtagttttactttggtgttcattttttgtttctcaacagacgctaatgcttctcttaagcgcactggtcgatgttttcggaaagaccgcacagacaacagcccctgttgaagcatcccagattgcagatcttattgatttcct

SEQ ID NO: 186068 - DNA, 432 bp, Arabidopsis thaliana landsberg
gatctgttgccgggagcaggcgaggctgttgatactaaatgtactgcaggatcagctaataacgacttgaaggatggaatggttactacaccacacgaaaaggctacagattccaagaaaagtggtaccgagtcaaactctcagccaattgtaggagactcaagctatgaaagaagtaaagtaggagatagagaaagagagagtgatagagagaaggaacgaggtagagagagggacaggggtaggtctcacagaggcagagattctgacagagacagtgatagggagagagacaaactcaaagatcgaagtcatcatcggtcaagagacagattgaaggattcaggtggacattcagataaatcaaggcatcattcttctcgggaccgtgactaccgcgactcatcgaaagaccgtcgtaggcaccattaa

SEQ ID NO: 186069 - DNA, 430 bp, Arabidopsis thaliana landsberg
atggttaaaggctacccagtattgaaattgaggattggtcagaggagcctggttcaggagaagaagactactctgctgatcaaaaagaggcttattttgaagaaaaatcgaatgagtattcagccaaccatatgtcaagagaggatgcagagtatgattcaagcagtgaagattcaacaactgaagatgaggacttctatgttaatctcttcaaccttttttctgactaagctttgtaagagtcaagcttagtgacttaaaacaagctcacttcggaggaagtctcatgtctatccatgtgtataactatctattttccttgttatttttgatgtttttgtttaaagtgtttcacgtttatttcattgaccattatgggctcaacggtcgagtaaattcaaaccaagtcaagataactctcaaccgttga

SEQ ID NO: 186070 - DNA, 157 bp, Arabidopsis thaliana landsberg
tccaaaccctaaattcattctcatggattcgattgagccaccatcgttttcgctagggtttgatcttgatgctgcatcggatctccaatcggaaatccatcaaaaccctagctccaccggcgtccaattaatcggggactgctataacgatccatag

SEQ ID NO: 186071 - DNA, 87 bp, Arabidopsis thaliana landsberg
atggagctgctaaaagatctggagatgttgatgaaagagtggccacttcaagttcgtctttcccaagtggggtcgaaaacaataatg

SEQ ID NO: 186072 - DNA, 237 bp, Arabidopsis thaliana landsberg
atgagcgaagtcgtatcactacttggacgcatcatcgatgaagaagcagaaaacgttcctccgccagttgctgatgaaacagaagagataatcaaagctgagctcaatggagagagtgagcctgagctaaagaagcaaggtagtagttatcgtaagaaggttcttgatcttagggataagatgaacttaaacaagtcgctttcgaagctagactggcgaaactggacaccaggactg

SEQ ID NO: 186073 - DNA, 369 bp, Arabidopsis thaliana landsberg
cacgaaccgctacagcttcggcaactatcttcacaggggtaggagttagtgaccttgtcgtctccatgacagcgtctagtacgctagtcattcttctcctcttgggagtcgtggcgggagcttttgcaaccttcagcaattctgcttctaccggtgggctcagaatttctggcagcactattgttttttcaaactctggctttttggccgccccatcttcggcttcgactggctcaactataagcacttcggcactatagtcgcttcctcagcgctccgagcggcaggagcagcttgttccgcttcggcagcggaagatgtctcttcaccaaattttggcactatggccgtttcaatatatcttggccg

SEQ ID NO: 186074 - DNA, 105 bp, Arabidopsis thaliana landsberg
cgttttgccgcagctatctgcggtagtgaaatgaacagcttcatctgcgtctaccgcagccgcaactacttgcggcgacgaaacgaacagactaaatataaataa

SEQ ID NO: 186075 - DNA, 2290 bp, Arabidopsis thaliana landsberg
  unsure (1)..(2290): unsure at all n locations
cctatgaaacagataacaccgacgtcaaatgcgtatacttgtttgcttctgtcgatgcatattcagtgtctattcttctgtgtcctgacgctttgaggtcctttcgtggctatgctcgttcgatgatccagttgggtgatcagcttcggataaacaagttttataagaaagctgcgaccaaagcaaaatggggagtgttagttacgcaacctcaaggaccgtggacatccctattaggctatagtgaaagcttgaagacagaactttatacgttcatagatcttgcaacaaagaagatgcatgcggctgtgactgtttccgatacaggtactatggctaatcggatggtaacgataaagaaagatccttcttttgatctattgaagaccttttgggttaatctggatgacaagaccaaaagagaacttttggtggtagattctagaaagcttatagactatgtagagaataagtatgttaacaaagtgaaagaagattttgggaaatgtgtatccgttgccaataatcttcgatggagatactggaagttccacattttttctcaggtatactactgttttacagattgccggaggcacatcttagataaccatgtgcaaaaatttgtacccgatcccagtgctcgtcctaagtgtgtggataaggtattagctgacatgatatgttgtgggaaatgggagcnnnnnnnnnnnnnnnnnnnnnnnnnnntgatcaaggatagagctaagcacggggaagagtttgtttatgttaatggatggtgtagtgattggcctgaagctaaggatgaagagcggagtaaaatactcaaacagtttgctcaggttcttaaatcttcttgcggtaatgaaaatgatactctttcatgtaccctttgggactcgttgatatattacacagaaaggaatctgcaactacttgaagttcctgggagctatcttgataaatgtagcttctttaagaaccctcagtgcatctgcttcttagatcttaagcaccttgaacacatcctcaactattttagacagctcaccacagatgtccgcgcgagtttagttccaaaagtagtgaataggttctgggaaaattcccgggtcaaggaaacaatcggtattgagcgacttacatctaatctgcttcttgatgggagactgctgtgtgaagaagagcatcattttgatgacacagggagtgtagagacttttaagtccagtggaatttatgagcatgtgatacctgagggggacaagatggtctcctgggttctcgactgcccagaaatcgatgagaaacttgtgtctcaaatgggagagggcgtacacaattttgagatatggttagcagctctgagaatagtaaggggcatggttaggaaaaaggaaagctactatgataagagacatagaatggtaacctatgataagatgttgggtgaggctgaaaccatttgtaacagagaagacaataggaagaatgttaatcagcggagcacatatgcgtcagcgctgcgaatgaagtgtgaggagcttgtagtgatacaagatgatgataccaaatgtttcttgaatgttgtaagagatgttcttgaaagagcaccttctccaaaatatgaagtattaaccgacaaagagtatatggagagtatatctgggctatctactgctgttcaaaatgacattgttataaaaagtctgtggaagctacgaaaatttctgacaaagaaggtatgtattcttcgtcttcgtttctttctactcattataacatgttttgacctgtggctactgataaaaataagaaatcttgggtattttttgcagttccatttgattgattcaaagatattgctgaacgaatttacacaaggagagctacatgaattcccaaagctatcagcaattgagtatcgcatggtggtccttccgtttgtgaaaaagtttttacaggtttatcaacttacggaaattatcaatcacagggaactcacttggtgtttgttacttaattccaacacaacacatttgttcttctcgcagggtaaactgaagaaaatgatcatgaaaactaaagaagatgacttcagttactgaactagaagctaagaagagagctctgtaaaagaggtaaaaatctaatgaatcctatcaacagttgttgttttggtgttgttctttgggttaaatttagttgtgttttttatgcagggctacaatttttgaggatcattcttgcagatgaagaagataaacttcgagtaggagttgtttag

SEQ ID NO: 186076 - DNA, 234 bp, Arabidopsis thaliana landsberg
atgagatatggtttatttagaaatactcgacaactcatcaacctatacccattttggatacgaagtttagatgttggtaataccaagaacttaactcttcttattgacaccagctcatacgacattatcgtcaaccccatactgtacaagagaagacctaattctgtcgatattcactctaactttactaatacttatagcaccacatatgacgatggctctggaactggaact

SEQ ID NO: 186077 - DNA, 171 bp, Arabidopsis thaliana landsberg
taaagagacttcgattgataccacagcgaaaacttagaggcacagattcgctgcggagtttaatgaatatgcaaataggaatgggggcagagtattgcagacaagtttcatcacttgtaaaaactgggatgacttctattaaacaggctacgctttcagcagtttcagaag

SEQ ID NO: 186078 - DNA, 65 bp, Arabidopsis thaliana landsberg
tagagctgatggcatcattgcgggagacactgaaatcagtgaaggacatttcacatctactcaag

SEQ ID NO: 186079 - DNA, 747 bp, Arabidopsis thaliana landsberg
atgcgtgcatttatctcactgcaccaacatgatgacggatcttacgctcatgtggaccgttgtgagataaaatcccctaaacatgattattacaatccgagttccgaatctgtcaacggtttggtgtgtttcggagacttttacaatatcgtagtttggaatccttcaatgagacaacatgttacattacccgaacctaaaccacacagtactgtcaggtactttatacgtagctgtttaggatacgatccggtcgaggataagtataaagtattgtccatctcaggctaccacaatggcaaccacgatcctctcgtttttacattgggacctcaagaatcatggagagtgatccaaaatagccctttagatatccctctaccaaccggaggatcacgagtaggtacatgcatcaacgggcacgtgtactatgaagcgcagatacgttttaaagtagatgatatttttaattttgaaaatatccttatgagcttcgatgtgaggtacgaaaagttcaacacaataaaaaaaccagctgatcctacacttcgaaacttcatgctcaactaccaaggaaaattagcatggttttgctccgattattcttctataaggttttgggttttagatgatggagacaaacaagaatggtcgctcaaaaactatattttgccttttccaatctctcctgaaattccccccacctttgaatgtagagtgatgctgacaggtgaaatcatgatactg

SEQ ID NO: 186080 - DNA, 367 bp, Arabidopsis thaliana landsberg
atggaggaggtctccggttggaaggggagaaaaaagggtgacgggtttggaacagcaataacagaatgctttggcacaacagtgggtcagatcgttaaggtatccaggaaaggagatggcaaagtcggcatagatcatgtttgggcagtggtggattgtgggtggtatgtaaaccctgatatcatcaaagcccaggtagagggggccatcttaatggcctttggggctgctgccaagcacgaaataacctttaaggacggactggttgaacagcggaatttttacaattatataatgccgaggataaatgagatgcccaacgtggatgtttatatcatgaacaacgacgagaacgccggtggcgtag

SEQ ID NO: 186081 - DNA, 276 bp, Arabidopsis thaliana landsberg
aaatcaacccccgaagccaaggattcgttcagggcagataaaaatcttcccgtgataagcccaatagcctttaataggtttcttgacaaatttaaagagactcccaagattgtcgcctccttcaagcagaaactgaagatctcccaacacctgaagtccaaacatggttcagaatctaaatcacacttaactttaatattcttctctgaaggaatcaaaagagactggatccagtcgctgagaaatatcatcagccccgatatcttaaccgcttga

SEQ ID NO: 186082 - DNA, 1095 bp, Arabidopsis thaliana landsberg
atggtctctgaaataatgatccgtctttgtgacaccgagctatagtaagtcatctggcagcaaaacacaaagcacataaaattgttttatactggtctcaagaacttgagatctgattattcttaaacgaatcttgtttgtattttcacctgatcgtgtgagtcggaagtaatgcacagtgagtttgttttattggggtcttgaagctcgtgtgtgtatttcgttgcttcaagctcttttgttgcttcagtctttaaacgttgtttggcatattgtgtgatcaaatacaaagatttcttttattctttaaacatcttaggagttctcaatatcacaagtaagattgcatcattagtgatgcagttgcaactgcaaattgcatcatcagtgacacaaccttttgccattatgtttagttggaaagagacatgagaataagaggtcttcatgaatcattttgtatatccattggctctcatctgttacctagtggcttaataaaaaaattgtgaagacaataatgcagaaactcgaaagaggccttttatcttaaataataataacgagaaagagtatcattcttataaaatcatattctctacattattagttacttctttacatttaaaaacagcaaaataaacatcaccagccgaacaagacaagaacaccaatgtgttcgatcaaatcttcgtaactccccaaatgtcatatgcaaccacccaactgcaaaaattcacaagtacaaaaaaaaaactcagagttcagttactaattgttattgtttgacaacaaaaggatactaactttatttgttagcaagttatataatctctcaccataatagattcgatttctttgtcggagacaggtgtacgtttcggctggagagatgctttccctccatcagcagtgttcttcggagctgccggaacatcagaactcgtcgtcacatttttcttaacgccggaaacagatcccggcgccggtccagaacctgagaaagtcacacacaaaaaaggagacgttaagaacaagaataaagcaagaactaaagaaaataagagtagtgaaagaaaaatgttaaccagatga

SEQ ID NO: 186083 - DNA, 75 bp, Arabidopsis thaliana landsberg
atacaagtaacggcaagtgccccccaacaagtgcccacaacgccacattttgtggctaaaccaatcgaaacctaa

SEQ ID NO: 186084 - DNA, 282 bp, Arabidopsis thaliana landsberg
acaaaatggaaaccccaaacatcatcagccacacaaatcttctatcgaagatagacctggaaaaacaaaaccctgcccccattttcccgacaatcactgagcttaaaagtgaggctaggtctctcttctccttagccttcccgacaatcctcgcggccctcatcctctacgctcgctccgccatctcgatgctcttcctcgggcatatcggtgaactagagctagctggtggctccctggccattgccttcgctaacatcactggctactccgttctagcag

SEQ ID NO: 186085 - DNA, 827 bp, Arabidopsis thaliana landsberg
ctcctggctctcccggaggagtaactaccgcaaaagctgcctccggcgccggcgcttccggtgtctctacgataaggtaccgaggcgtgaggcgtaggccatggggtcgttacgcagctgaaatacgggacccattgtccaaggagagacgatggctcggaacatttgacacggccgaggaagcagcttgcgcatatgactgcgccgctcgagccatgcgtggtcttaaagctcgaaccaacttcgtctacccaatgccttctctcgactcttatcaccaccgtattttctcgtctcctccaatgaatatgttccttctacgagacgtgttaaactctcagtctctttctccgttaaccactttcgcttacccgccttgtaatctttctaacgtaaacgacgttgttcacgggtccttcactaacgtcaacgatgtctgtgaagatctctcgcctaaagctaagaggtcaagtaccattgagaacgagagcctgatatcaaatatctttgaaccagaaccagctagttctggtcttcttcaagaaattgttcaaggcttcttaccaaaacctatctctcaacatgcttctatacctccaaagagcaaccaacagtcggttggtgttttcccgacgatgccagagagcggttttcagacagatgttcgtttacctgacttccatgtcgaaggaaacggattcggtcaggtaaaatatcatggagagttaggttgggctgatcatgagaatgggtttgattcagctaagatgcagcagaacggaaatggtggaatgttttatcagtattgctttcatgatgattattag

SEQ ID NO: 186086 - DNA, 928 bp, Arabidopsis thaliana landsberg
atggccatccacactctcctcttcgtatcacttctcatattctcactcatcgagtcgagtagtggaggaaagaaagatagactcttcaccgatctccaaaactcaattgaggtcaccgctaaacccgttaaagatagcggaggtttgtgaaccgtcttaccttctttataattcaaagattttgtaccttatctattatcttttcaaatccgcgactaaagtgtgtattcataagtagtgaagttgcccactaggctctaactgtaggttaagtataaagatatattacctattttaatacggaaaaaatagttattttcgtttatacatctctagactctttttttggaatatacatgatttatgattcatctccatacttgtattattattatttttataaatctatatactcaaatttgcacatggatgatctttagttttagaggctggaaaagatatggtgacaattacatggaagctaaagtcgtcgtcagccaaggtcgacacggatactgccttcaagacaatccaagtcaagctttgttatgcaccgatcagccaagttgatagaccgtggcgtaagactgataacaagctcttcaaggacagaagttgccctcatgagattgtgtccaaggcatacgacaagaccccccaatcactcgattggacaatcggacttgatatccccactggaacctacttcgtacgtgcctatggaatcgatggagatggccacgaagttgcatacggacagagcacggatgagggaaggacgacaaatctcttcagtgttcatgccataagtggtcatcacgtggggctagacatagcatccacatttttcagcgtcttctccgttgtttctctgtttgtcttctttgtcatggagaagaggaaggccaagttagagcaaagggagtga

SEQ ID NO: 186087 - DNA, 414 bp, Arabidopsis thaliana landsberg
  unsure (1)..(414): unsure at all n locations
cgcagagagtaccgctgcccgcccgcgcggggggaacgggacgggacgaagttcgcaccggattttgggagcaatccgctagaacgaccccgcccggtgaccgacgacgcgctgcgcccgccgggcagaacgtctccgcgccgggtaagaacccgcggcggcacgccggaaagaaagcctctgggaccgacgggtgcgcctgatgtaggnnnnnnnnnnnnnnnnnnnnnnnnnnnnnnnnnnnnnnncaccggcctgccgctgtcgcggctcgcggacgccgcgctcgacgccgcgaagtcacaaggggcccagcacgctgacttccgcgtagagcggatccggggccagcgggtcagcctgagtgacggcaagctgcagggcctcaatgccagtgaccacagcggcctggcg

SEQ ID NO: 186088 - DNA, 790 bp, Arabidopsis thaliana landsberg
gcacattgtgaatcggatcatgaatatgcatgctccaggtttgctaaaccctctcttgttcttctggggttcgttgttgggttttggttttgacattttggtgtattattctctgttttcagaatggtcaggagaagttcgaagtgtcacttactctcctgatggcaacactgttactgtggcttatcgtgtgactctctacggcactgatgctgaggtctttcccttcctcttgtttcagtgttatggtttgatttggttagcctttagctcaagtcgtctcctggtagagttctttgccttcttgcctcagaagctgcaaatatagaaacctagttgttttcttttgggttgtgtccattttgaattgtatgatgaaacccgtcaaggaatacagcttagagagtgtatgtttatcaactctggagaaacaccaactctgggttatagattctgttatcagtacttacaaaccttagagatgatatcacttgtgaatagggaggtttgacctgttttcgttagtaaatatgctagtggtttgcttccttgcatactttcttgagcatattatgttttcattgttttgcttgtaacttgtacgctgaaatcatttgctaataatcatttttttggtgttgtcaagatatttagggaatcaacaggtaccacatctgtagatgacaaaggctatggtgatgctgtgcaaaaggcggaagcaatggcatttcgccgtgcgtgtgcaagatttggattagggcttcatctttatcacgaggatgctttgtaa

SEQ ID NO: 186089 - DNA, 454 bp, Arabidopsis thaliana landsberg
ctgcgcaaatggtcaatggatgagctgcagcagctcgtcaccgtgctgctcggcgatatgtcattagtgggcccccgccccgcgctgcccgccgaagcggagaagtacgcggatcacgtcggcgaaggtctggtcgtcaaacctggcctggccgggctctggcaggtgaacggtcgttccgatctctcctgggaggagtcggtccgcctggacctgcgctatgtggagatctggtcgttcgcgctcgatctgcagattctgtggaaagcggtcacggtgatcatcagggggtcaggtgcgttctagcgcggttgcaacgctagagcaggtcgatgtcgcgggcttggacgtcgcgcggctcgtgcggcgagcgtccattggcgatacgggtgcctgggaacgcctcgtgcacaagttcggccggctcgtctggtcaatcaagcgggacttctag

SEQ ID NO: 186090 - DNA, 703 bp, Arabidopsis thaliana landsberg
tgtacgatgactcataattacttcttctatgagattcttccacgactcagactgaagatactatctactagggaaacttatatgcatcaacactctaatgcttcaacatgtttttttaaacctgaaagtaaaaaagcctcacaattgcctaacaaaaagaccagttttataagtttcacaattctaacaagtcctagtgaaacctacgtaatctacttcaggagggtggacattaacgcacatgatatttgaacaattctacatttgagttactgtagcttgttttaacacgcgcagacacacacacacacaatgtatgtaaatgattgttcacaagagcagacaaaaacctcaaagtcttactgggaagtctggaccgcttgatctaacaccaaggatagaaaagcacaattctatcagctaagctaaagattctgcaaagcaggattaaaaaaaagtatagcattctagaaatcaaacaatagaggctgtgagaatggttaagaagaagagcatacctcagaagccttagagacgagtttctcatttaacttcaggcaatgggtctaaggtttcaagacttggtagacgaaagggagtgtttacgggaccagaagctgaagccgccatagatagaagatggaagaaacgagaacaaagagaccctctgtatagaacaagaaaccagcgacatcaaagttag

SEQ ID NO: 186091 - DNA, 156 bp, Arabidopsis thaliana landsberg
atgagtatccgcccgcgcggcgtggggccgaagccggcgatggcccgcagcagcgtggtcttgcccgagcccgaagggcccaggaaggcgaagaactcgccgggctcgatggaaaggtcgatgcccttcaataccgtggtctcgccgaaggacagc

SEQ ID NO: 186092 - DNA, 117 bp, Arabidopsis thaliana landsberg
atggattcctcgtcaagtctgtttggggggtgtggacacacttgcgcgaattcaggtaacggctacaagggagaaataaaaaggaaactgtacccgaccagggatggacgtaaactc

SEQ ID NO: 186093 - DNA, 896 bp, Arabidopsis thaliana landsberg
atgtatcacacgtgttgttcttgccagacacgtcggtgccgggaaccgaccaaaaagtttgacggaggacgaaggaacggtgagtttttttgttattgttctctcctctctccacatagtacgaattgggcttttaattcagtgctgaaaaggcccattatgttatgatcccggttcatattaattttgggttggtttgcttatccgataaattgaattttgagtgggtccaattttaaaactcatcgggaaagtagaaattgacaaattgtgatgatcggaaaaaattagaatccaaaggatcctaaactctgatgtctgatcagataacataaacaaaaccctaattcgatgtttgaagagagtaatcgatacatcttaggaatgagagagcgagactcggattccactgccgcgaaaaccgccgttcaaggctacgattatgaccggaattgtttggatccacgactgagtaagacgaattcgttggaggaaagatggaggagaaagagaaacaaaattacctgcgaatgcgacggaggttattgtgcggtgcgtcgaggagacgaactcgttagtccgttttgttaattgagctgacgatttttatttttattttgactgaaaagagaagtaattatattgggattatacatttcatttcatttaattataactaaaaattggattagccattttttttttatcatcttcttctctcttctattcccgttattttcgaagtgtaaacctgaaaaagcgggaagtcttcaattaccacaaagttcgtttataattttctcggatcatcacatttttcttttcccttttaccagttttttcccccaagagaattttacaactatgaacgcagcattatacgttattattcttga

SEQ ID NO: 186094 - DNA, 85 bp, Arabidopsis thaliana landsberg
tattttgttgtctttcaccaaatccattttcgaatgcttaattaaattggatgtagaggaccaatccttagttaaagcatgttga

SEQ ID NO: 186095 - DNA, 219 bp, Arabidopsis thaliana landsberg
ataagtctcggatcatcaaacgagtatatctccagagaatcgctacagaaaatctccaaaatcaaaaatcgatttcgaatttctacacacatttcccgatcctccaaaccgatacaaatcatcatccataatcgaaagaaacaccgacgagaaatcgacaatcgaaaagaagtaattaatcgattcttcagagaaatcgaaagcgagcctagaaaataa

SEQ ID NO: 186096 - DNA, 413 bp, Arabidopsis thaliana landsberg
atggaaaaggtttcaaaactcagtattatcttccgtgacgaactacaaaacttcaacaatgactatgtcgaaaatatagatgtcgtcggcaaaaaaacatctaattcatcatcggacaatgaaagcgaccaattcgccagcttgtttggttcttcgtcaccgtcttcgtttcaaatgcctcttcagtacccgaattacacaaaggaacagtacgacattatgtcggaggaagaactcgatcgacttctcaaactctatggtctgcctacagatatcggtaacttgtcctgcaaaaaagaatttgcagtgggtgcattcttgtgggagacggggttaaattcttctctggatgagcatgattcagtaaaccctaattcgtccattgatgatttggaagagagatctttgatagg

SEQ ID NO: 186097 - DNA, 48 bp, Arabidopsis thaliana landsberg
atggcagcagaaatctcattcgtcttcctgccgcagttgttatccact

SEQ ID NO: 186098 - DNA, 889 bp, Arabidopsis thaliana landsberg
attccttcccggcattatttctatactcggcgagtcggcgaaattgcggccacgagaacgaagagcttcacactacctccaatggtgttctctaactctctcctctcttcgaccacttcgcttaccacatggtaaataattcatttgtccttgtgccttctcgcttagagttttctaagccttttagtgaaaagcttagtcttttggtatcaaattacggtaaagtagcttaagtttgatccaaggtgacttgatttagctcaatgtaattctgtaaatattgaatatccaaaaaggtttggcttttgtgtggttgctgaatttgtgattttgggttttcagggcaaatcaatcaagttctcagtcaagtctttccccgagatattcgacatggcagtgtgtttgtttacgtaatcagaaacgcaaacctaagctctacttgattcccgctcgccattttttatcgactccaattgattcagtctcctcctcctcctcaataacggcttcacgttatgctacttctggcgtttctgaagttcaaaggtgagaatttgattgattcttttgatgttttttgtttaatttagaaaaacaagaatttttgatgaattttgtctgtctatgcaggtctacttcgagcaacaatgttactgagatggaagagtttgagatggagttgcaagagttgtttaatgaagtcaaaagtatggtgaagattgggaaggaaagtgacgcaatggaccttcttcgagcgaattatgttgctgtgaaagaagagctggattcgggtttgaaaggtatcgaacaagctgctgttcttgacatcattgctttggggtatatggctgttggagacttgaaacctgtccccgcattgcttgatatg

SEQ ID NO: 186099 - DNA, 134 bp, Arabidopsis thaliana landsberg
atgccagatccgaagagctccatcagcgcaaggttgaatgtcagagaaagcccaaggaccctccgcagtccagccgaacctggacaaggccttcgtagtcagactccggacgagacagccacagtcagcagcag

SEQ ID NO: 186100 - DNA, 196 bp, Arabidopsis thaliana landsberg
atgagttctacaagcaaagcatggacagtggcagtgagcatcggagccgtagaggcattaaaagaccaactaggtttttgtcggtggaactacatactccggtcggttaatcaacatctccggaacaacgttagatctgtttctcaagggaaaaggttctcttcgtcttctgtctccgcagccgttacctcctctg

SEQ ID NO: 186101 - DNA, 120 bp, Arabidopsis thaliana landsberg
atggatttacgcatcagtcaccggtttgcaccgctgaataccggcctctacaatatgtttggtctggatgcggcttctatgcgcatgggcctcgattttggccttgcggataacctgatg

SEQ ID NO: 186102 - DNA, 162 bp, Arabidopsis thaliana landsberg
tcttctaagacagggcaagagacaaatctctcaaaagtggactcaaccctaattcataaaatatatgatggaaatgaagatgcagagtccatcaaccagctgatggcgatcaagatgctgctgggtatcaagaagttgcatcatatcacatcagacgtttga

SEQ ID NO: 186103 - DNA, 2087 bp, Arabidopsis thaliana landsberg
atggtgagtctaattgttttaattggttggtttgagggtttaatagagggtgcaattgtttgttttgtcgaaatgtctaatggctggattaaagatgtaatgtgttattgtcttttctgcagagttagctgcttcagtacctcgcactgacgtagtaggaaagagtgagtatttccgttttggtatgagggattctcttgcgattgaggcgtctttcttgcaggttcttcttcttcttctaagcttttgtggttttacgatgtatttgtatatctcgacaagttcttgcctcttggctgtttggttcaagatttgaatgaaactatcatatctgataatattttgggatatttgtgctatagagagaagatgagttgttgtcactctggtggaaagagtacgcagaatgcagcgaaggtccgaaactgcaagttaattctaaaaagaaatcaattgaaactccttcagaagcttccgtgtcctctagtctatatgaagttgaagaggagcgagtaggtgtacctgttaagggtgggctatatgaggtacattgtgcagatatttaaagaatgttttagaagtttcttgtaaattttacgtgttgagccagtagagtccttgtgtgcaatccatatttctgaccaaggaactggaatgctgcaggtggacttggtgaggaggcattgttttcccgtgtactggaatggagataatcggcgtgtgcttagaggtcactggtttgctcgtaaaggtggcctagactggcttccgattccagaaactgtttctgagcagttggaggttgcatatcgtaacaaggttagatatctttctgtggaatacaatttgaatttgtgatccccatttgcctagaactagaagtaattgatgcatttctgttaaggttcataaatccactaaagctatctcttgttacattttatctctttcttttgtatagttctatgcgtatatattgttgatgatatgacaatagcaccaattactttggacttttcaaccaggtttggcgcagaagaagttttcaaccctctgggctttttgcagctcgtattgatttgcagggttctagtctggtatgtgtttgatttcatgggaaagaactgtaattttttcgccagtataatggttgcatagataacattatctgaagtcgtatatgtagggactccatgctctctttactggggaggatgacacctgggaagcgtggcttaatgttgatccttctgggttctctggcatcgttggatatactgggaatggaattaagttgagacgtggttatgctggctcctactctccaaaacctacgcaggttttagactattctgatttattttcgtaactgtctttgactctatacttaccagtctctaatgaaaaatcgagttaacttccatttctatatttttcttattagctggttagtgttcttgtgattgaacacacatttcttgtgcatttttttaggaagaacttcgccagcaaaaggaggaagagatggatgactattgttctcaagtatgttttagtatacttttgttttccatgaatggcatttgcatatctgatctctgtcgtcttatttttaaaatatctccaaatttgaagctctctgaaactgttcttatgtgttattttttccaggtccctgttcggcatctataaataaatggttcatggtataggccaaaaaggagaaaagtctaatcttgttgacgatgttgttaacttttgtcaaatcacggcagctttagcggaacgtcatctaacctctcatcagctcagcactcaacgagttcttttcatcccatgccaggtggctatacatgtatttttatccccttctgttttcatctctgtatagtatgatcttactttgtagattctgtctttctctattgtttttgtagtggagaaagggtctaaagctaagtggtgaagctgctgttgataaatgtactttagacggtgtacggcgtttccgagagatgctaagcgcaactgttcatgatgtgttatactacatgagccccatttattgtcaggctataattgattcg

SEQ ID NO: 186104 - DNA, 42 bp, Arabidopsis thaliana landsberg
gagaaattgctgagagaagagaaccaggttctggctagccag

SEQ ID NO: 186105 - DNA, 50 bp, Arabidopsis thaliana landsberg
taacgaaagaacgttctaaatcttattgtaataaagtgacggtgttttag

SEQ ID NO: 186106 - DNA, 754 bp, Arabidopsis thaliana landsberg
gattactgctggtgattggtttgattttaaagattttaaagttgttgaacagtatggttcgtgtagggctattaaacatcgatacaaaataattgtattgtattcgactgaaatcgatgattgtttctttaatttcgttgattttaacaagataacggatgaagttgattgcgatgataacttggttggtaagtattttaaaatagggttctatttaattattaataatgtgttataaacttcttgtgatactaacgttgatgtatgaatttcagacgttattgggcaagtcgttcatgttagtgattttccagattcggattgtttgagtggtaataaaaaagccaaatattgtgaggaagatgatactctgccagaatatttttatcttcgaaaattgcttaagatgtgtataaagccttctgaagacattatcatgcatgaacgttacaatagtgatgaagatttgtgtgttgaagacgttaatcatgtagaatatgatcttgattatcagatcgatgataatgaacaagatggtgaattggacaaaggcgacgattgcgttgcgagttctgatgatgatacttctgatgtaagtgaagacgactacgatttattagatggctatgatgaatgcgatgacagtgaatatgcggtggagtccgatgaggatttctgtgaagggaagacgacgattatgaacatggcgatactgatgatgaggacgatggtgataccgaatatagtgagatga

SEQ ID NO: 186107 - DNA, 372 bp, Arabidopsis thaliana landsberg
atgagactaactattcttttcatttgattaataaccgcagagctggagttgctcagtacatgaaaaccgagtggcgacttgttgcgatcttcaatgtggtcctgtttgttgtcttggtaagctctcttcttagcacgagatttgactctgaacaaagttttggccttttaaacggtttagtgcaaatttccaacataacctttaaagattgccaaaccacaacagtaccaaaacagttttttaaaaaaaaaatttgtggatcttgaaatattcttgtgagaactgattcatttgttttcttttcagtcaatggtttactttgttggatgctgtgcgagaagaaatgctgctagttaccgatccatagcttag

SEQ ID NO: 186108 - DNA, 547 bp, Arabidopsis thaliana landsberg
cgtgaagagaattttaaatggacttctaaccgagaaataatattttttgatttgtacgatcaagcaattgccatgggaaattaccgtatcaaagatcctacacctcttggtagagaatttatccttgacaaatttaacaagaagtttaatcttaatataaattatcaattcttcaaagaaaaacttgatcaactaaaaagaaagtacaaaaagtacaaggagcttatgaaaaagtccactggcatttcggttgatactactacatctgtgatatcagcatctaactcatggtggcaaaagcgtgaagtaagtatttaatgtctctcataacccaaatataatttaaaaatgatttataggctaaagtttttattatcttattaacaggtatgtaaaattatcaaatcatttaaacgaaacccgccagagatttgggatgtgatgcaacgatgtttcatattatatgaagtccactcacagcctcaattctctgtgaaccaaagaagaaaacagttgatgaaagatgggtctggacaattgatgaaag

SEQ ID NO: 186109 - DNA, 144 bp, Arabidopsis thaliana landsberg
atgacgatgtatagttttaaacgaaaacagcaacaattaactaagacccatttagcagatcgtgcaatttggatgtggttacagataaaatcacccaacggccatggcaagagagatcgtcgggacatggagtcatacatacag

SEQ ID NO: 186110 - DNA, 397 bp, Arabidopsis thaliana landsberg
atgctccgaaaaggcctctgcaccccggagatcatccgccggacggaagctaggcaggtagcctcccagcggtccgggtacctcccgcgactgtgctggtagactacacagcgatactcgatcgaccaggtgtgccggtcgaaagcccgacacaacaaggtgtcgagtgcgtcgtggaagtgacaaccgcgagcggcgtcatgggtgatgggtcgggcgaccatccctccgcctcctgcggttcagaggactcagagctggggtctgagccgtcgtcgtcgtcgtcggggtctcctccaggacgctcctcagcagctggggtgtccacggtggtgaagggggcgcatcagctgaggaacaggggaacggcgcctcacagactctacctcctgctcag

SEQ ID NO: 186111 - DNA, 226 bp, Arabidopsis thaliana landsberg
agcatatctcacttcgatctctgttttacgagaaccacgatcatactctgaagcagttaaggatgaaaaatggtgtgtagctatgcgcgaagaaatctcagccaaacagaagaatgaaacatggggcttagaaacacttccatcaggcaagaaagccattggctgcaagtgggtgtttactatcaagtacaaagcggatggttcagtagagcgttacaaagcttga

SEQ ID NO: 186112 - DNA, 411 bp, Arabidopsis thaliana landsberg
atgaaacgaaggtgagcctcgcacgttcatgaagcatataatttgatttctatgactggaaaatgatttatatatgtgaagagaacattgatctgcccacaagaacaaacatatcagttgccgtgaagagagatgtttcagaaaacaaacagtttctttcatagaacacttcacagtctcaagtccattattatccgagcaggtaagaaacttcctagaccaaaaactcacttctcctgcacattttgcagatcaaattctctcgatggcgacaatatctacgcaagtttcctcaacatctgggagtctgatctagaaaacagcattgaaggtcccctaaagcccgagcacaaggttcaagagcaagaacaatatcatcaagtgaagaaaacagaagcttgctcttcgtag

SEQ ID NO: 186113 - DNA, 1046 bp, Arabidopsis thaliana landsberg
atgagccaattacaaaagagagcccccttggaaaaacctaagtctgggggaaccgaaagtaagaaagaagtaaagcagaagaaggtgtttaaaagacgaagtgcttggaaactgtggacctcaaccgatccgttctctcttgctgttttgcaacatatcctgcattcgagactatacggtaaccctaaacactttaactccaccacttaaaaccaaaatcccctttcataccaagcgccgtctaccccgaatgacaccttctaatgagaaagtccacgccaaaacatttaaagaatgtaaagagttgattgacatgaattcacagttctgcaggatcaaggcatatggacaaggacgagaaaggcataagactattgagcgtccgttctaacgcaacttttgcttaatgtggtctgtaggatatattcgagacatggtcactgataacaggagagttcccacgattttcaaacctctccaccagatttgttcttttgtttgcttgagggcaagcaaagtctaagtttgggggagttgatatgtctataatttgcatgttttacacatccttttatcaccattttgagtctagtttcatccatctttcatagcattcaccatcatttttgtacattttgcatctttagtcgagtataggactagtcttgcatacattctgcattttggagttgtttcaggtgttttggagcttttggtgctcagaaagagggaaaacagaacagaaagtcacacttccaccaaacatactcgatcaccagtagcagagagggaagcagtcagctcagcagtccattcggccagatatacttgatcgtagaggagaggaggcagtccattctgcaattctactctatcgcagaggcgaccaggtagtccactttgccagtccacaatttatactcgatcgcagaggagaagaaccagtccatcctgacagccgacacacttactcgatcatagaggccaagaagcagcccagaccattctgtcaaccaacctactcgaccaccaccttgaccctctga

SEQ ID NO: 186114 - DNA, 169 bp, Arabidopsis thaliana landsberg
atgtatttcgagtgccaccagcagcagcgcggctgccgaaggcagaataagctgggctacgtattgaatacttatgaaatattgtatgcccggtgacaggcagacgcgccacttcgcccagctcggtattcagccttatcgcgggcgggaaatcaaggcgaaattgacc

SEQ ID NO: 186115 - DNA, 1053 bp, Arabidopsis thaliana landsberg
atgctacattccgtcattaaagtgcagcgttggtggagagaatttctccattcaaagaatatgagaataaaatcagcagtcttaatacagagtcatattcgaggtttatttgccagacgaaaaacttctgtggaaagacataacattgtcatgattcaagtaagatatgaccaaagctacttttatctcttgtcctgcactttcagtaatattctttttaactaacagtttcaagtttcattttacccttatatatctcagtcacactggagaggttatctcacgcgcaaagcatcgaaggctcaagttctggatctgagagtgcgaatgcaaacttctgcagcaaacatagatgacaagaaacggttgataaacaagcttctttctgcgctttcggaactactgagcatgaaaaacatccacaacattcttcacatttgtgaaactttgggtgagtttctcagcttccgttatttacagaaccatgtgaacaacccataacatgtttcctctacagaatcggcaaccaaatactctgacaaatgctgtgaagagcttgtggaagctggagctatagacaagttgctaacattgatccggtctgcaagcagaagcatccctgatcaacaagtttcaaaacatgcactatcaactttgggacatcttgcttgttatccacaaatggcagatgagctaatcaacacgaaaggttccattcagacaatcttctgggaactactcaggtcttcatttagttctcaagtcttctttttaagttgaagtttcatattttctcattcctgcgttgtttttctcgattcaggaacaaagaagaagcatatttcattgcatcagatgttctgaagaaaatatgcagtagccataaaggcgtagaagcagttcgaaagcttcctgcactggtaaaacggttacacgccttagttgaggagctaactcgtaaggcaaacatcgagaaacggttagtttttcgtctttcccgttttcttgtctagaaactttgggtcagatccagataaggaaagtatgaattaa

SEQ ID NO: 186116 - DNA, 1630 bp, Arabidopsis thaliana landsberg
atggtcaacttggttgtcgtgctcaacacagagttggaccacacccttgacgagttgggcaaggttcgggcggaggttgcggaattgcgtgctaagtgcgcagacgccactatctggattgtggttctcccgcccctgtcaggattcagcacccttactgttcaccgccccgtggtcgcttcgactatgataccccaaactacaggatctggatagattttgatccctagatcgacagagtcagagtctgtaataatgctagttcagtgtcttagcctaagtcagttttagttagagttagtttgtttatcttatgttgaatgcttgttatgatggacatgtactgaagttggatctttgtaatgattgtcaccaaggtgtgggtatcccctgcaacttggtgtagttatgttaataaagttagttatatagtgggaaaccttttattccactttcctctttatctgagaagctgtgtggtctgtgttggagatcagtgaagatgctcatctgttcagtgctgttgaagaattccatactcttttctcatgctgcaagatttgccagatccgttctgatgtgtggttcattctgcagatgtcagagaacaggcgcagaggaggaaggcgtcctcagcaggatgcgagccgctcaacaggaggagttgccccagcagcagcacctgccgcccccgcccccgatgtcgatcgagcagatgtttctgatgcagactcaggcagttcaagccatcggtcagactttggccgccattcagcagcagcagcagcaacagcagcaggccccacctcagcctcagatgcctcagatgcccagagacaaacgtgttgaattcatgagaggtcatccaccaacgttcgctcattcttctgaccccatggatgctgaagactgcgtgcgcactgtggagcgggagttgcataccgctcagtgcgatgatagggagaaagtcctgtatggtccccgtctgttgagaggagcagcccagtcatggtgggagtcttacctcgccacccatgcccaccccgacaccatcacctgggaagagttcagaggtagctttcgtcagtaccatgtgcctgcgggtctgatgacagtgaagaaggaggagttcctggccctcaagcaagggccatcgtctgtcagtgagtaccaggacaggtttctgcagttgtctcgctatgctcctgaagatgtcaacaccgacgccaagcgacagtactgtttcctgagaggcttggtgacccccttcattaccagctgatgaatcacactttccccaccttccagcacactatcgacagagcaatcatgactgaaaggaagcgccaggagaaggaggacaggaaacgcaagattgctggatctcaggccgagagtagcaggtgtcgtcgcaactcaggcaacccaccccagcaattcaagcaaggtcactagcaccagcgtcagcatcagcaccagtactagaggcagtttcctcagcagcagcagcagcagtaccgtcagaacgctcaaccgggaggatatcattaccagggtcagaataaccaggcagctcgccttcctgccctagcaaccaaccagaatagccaagcagctccagcgcaagtag

SEQ ID NO: 186117 - DNA, 2707 bp, Arabidopsis thaliana landsberg
gattgcctttgaaagaggcaaggaacgagatttctcatttctagcattatcatccggtgagtctggatggattgtccttgctgatccagataatggaatcgtccgtgtaacggcacctttagccggctgcaaagtacgtaatcaccttcactgtcttcttctttaacgaaaattcccgtgaagatcacacaggaaggcctgaaatattaacatagtacatgatttctatcatcttttgtttgcttttcagccccgaatagatgaaaagcacccgagatggctacacttgagaatccgaccatctacattaccgttgttggatccaacaaagcgaggagtctatgagaagctcaagtccaaaggtctagtagatgggagatggatattagcattcagggacgatgaatcttgccactctgcttactcaatggttgcaggtgagatcgatctacaatgcagcgaggtagaaagaaggttaaggccattgtttgaccttgaaagaaaccagctagaagatcaatgaaacatcatactgccgataccttgccttcatcgatcgactttgtcttcgtcgggtttgagatctcacattcaaaagtttggtaatgatcttccccatcttgaatatactaaactccaagcaatttagatgcactcttaggagcagcttccatgattctttcaacgtacccagtttccaggtaccttgtttcacaagtttcgtgtccattttttgtttgtttgttttcgtttattatttttttatttttttttgtaatagtggtcttaatgtaacatcattgtataaaataccatttgcttcatcgacatatcatctaacgaccatatacctatgtatcaagatattgtaggtttgcaacatatggagattctcatttcattaatgagctccaaaagaaacaaactttattcagctgatatgttcttcctcataaacatgcattattagattgttatatatcacaacattgggcaccaaaccttgaggcatttgacacctagttttgcggaaagaactaatataccgcaagtggatggtgaaatgttgcagaagtaactacggaatcaaaccaatcctcatgcaaatgaagaagaaaagtgtatgattttgtgtcgtactacctaataaccaagttaaatcaaatatttgaaaattttattggtaatacctaataaaaaaaaaattggaccaaaaattaacaaatggattaaaaaaaagggtatatgcagtagattgaccatgtaatcaataataatatagaaacttacgatgagtccatagtgtctgtcggagacgtatttgaaattaccatcacccccctataactgtgttcttggttaggggacatataggtgtataggcgtatgattgcagaaatttgaattttgaaaaccttggtaagagcaatgctgtatgtgaacgcaaacgatatagattttaatttcgagaaatcgatttattatcgaattttttgaaatatcaggagctccaaaaaaaaacctagcgccgcttcatttgctggttttccgagaggaaacgtcttccgttctctacccatagattctgcaaactctccgaatatctatttcaaatctatattgtttctcatacatatcgtttctttagattcaatctcgcagttaggcaatcaattccatcgggctacaggtaatttcacaaatatatgcggtttaagctattcaacgttctcgatcgccatcaacttctttatttctccaatctatattccgattaactgaaatcttaggtacatactgtttctgattataaacttctattttgtgcagaaaagggttcgacttgtagatgatgaacaactctttaccccgtcgattgtttaggtctggatccgagcccaacggtgacagagtgcagtcctacagtgaactgtctttgatagatgacatcgctaacgcgttagatgcggaggacatgaaaattctccgggaatctcagtttggtaaattatttgatttctccgaaagcgccgcgtattctgggaagcttattcactttttgctaacgaggcagcttgttgttaggaagaaacaagaaattttggtaattttctctggatcccctgttcggttttccatttctgagtttcaaaatgttaccggtttgaactgcgacaaaccgcctcgtatgaaagagaggaaagggaaacgaaaattggcgcctggcaagtattggtacagcctatttgaccgcagtgatgtatctgttaagtgggttgttggcaggctgaagaagcgagtggttcaagatcaaggaattcgtttacgttacgctgtgctggccttgattgatggcgttttatgcccaacctcgggtagaagtaaaatctctccggtccatgcggacatggcagaaaatttagacatgtttctaaattttccttgggggactatgtcattcctaatgacgttgaagagtgttactgcaaggggagctgataaacttatgcggaaatctgtcaccgttcaaggtttcccacacgcactccaacttttgctactgcaaagtgttcctcgaatcagagaattgcaattccctgaagccgttgaagatagtgactcagaaatggaggacacagatacggaaattgagcgcttctggagtttgaagttggatcttgttaagaaaatcgatcggcagtctcag

SEQ ID NO: 186118 - DNA, 209 bp, Arabidopsis thaliana landsberg
atgacggtgaggctataatagatagcgcagaagatttgttgattaccaacgcagacaagccaatgaagcgatcacttttgaaatttatgaagatcctacaaagctacacaaaatcactgatcccaaattctttcaaggaagagctatattagcaccaaagaatgatgatgtcaacaccatcaatgagtatttgctagatcagttgcatg

SEQ ID NO: 186119 - DNA, 243 bp, Arabidopsis thaliana landsberg
  unsure (1)..(243): unsure at all n locations
atgcacgggccgnactttacggctgctgctgctgctgcttcttcttcgggcgacgtggcggttaacggcatgaacgtggctctccaccggcaggtctcggggggctccatgaagcataacgcggagctccggcgccaggcgtctctcgagtcccctcgtacagcgcgggccaccagccgcttcctgttcgggcggcagtcatccatggacccgaaccctaagcgcggccagagccagagcccc

SEQ ID NO: 186120 - DNA, 440 bp, Arabidopsis thaliana landsberg
atgagaaaggctcgcccggcggacatgcccgcgggccaggaggggattcccttccagtcgcccgacatgatgcgcagtcaccgcgctcacgaactgcgggacagcgtccagcggatgacggttgcccatgaggtccagccgcgccgtggcgaacccgacgggctcgtggcgacgacgcaggtcggctcgctcggcgccgttttcgtccggtacgggactgaggtgagcgtcgacgcattccccgtgcgcaacaggttcgcgctgacgatcccgctgggcccgatgcgcgtctcgaacacgaacctgcgcagcgcgcagaccacgtcctcgggtttcgtgctttcgtacgatcagcacactctcatgatcccggatccggtcgccggggccctggtcttctccaccagcatggcccggctcgacgagcagttcgccggact

SEQ ID NO: 186121 - DNA, 220 bp, Arabidopsis thaliana landsberg
atgatgctgaacaataccagctatgtactgtctaccgactacaagcactataccaatggcggccagctcatgcgcaagtggaatatcaataccagcgtgggtattaacctcacttaccgcgccggcacttcttcctggcagatcggcccgcaggtacggtaccagcacctttctacctactccaatgcctatcccatcaaggaacacctggatgactatg

SEQ ID NO: 186122 - DNA, 847 bp, Arabidopsis thaliana landsberg
ctttccaccattaagacttgttgacttcctacgctattcgattcgctggcatgtccggtctcatacgaaggaaaggctggatggtcagtcactcatgaattccttctcgaatcactactggaatatagcttatagaaagagcagcttgaagcaagtggcaatgctagaagggcatttctttcccgcctacttgagtagcgcgttggatctatgcttaggcagcttaatcgagacttcatatacgtagattgccatgtctgtatccgaacgaaaagaccttcctgatgttcttgccctatttaaaccccgggcaatttccaaaagaagagaaaacaaccacctcggaacaaatatcatgcatacataggaacccggcttcgctaacctttcttacttagtcgtgaaacaactgttctacaaactgatagtcttaaacctaaaaaatagattaggcaaaaaaaaattgtcgaaatagatttaattatatataaaaatattattgtttgggtacaaaacataacaatctttcagtcaaatattttataatactaaactgcaaatgctcgtgagaacaaaaaaaaacacacactaaaaatgacaaataaaattttatagtgaaaatctgtagacatcgtcattgttaatatagttgggttaatacacataaaagcaatctacagagattcttttctacgaatcaaagcatatttctactacttaaatttaggaacttcattgtcattaaaattatcattatgaattttacaatttagaactaattaaccaaactcttaaacttctaaattgcttaatagatcaagatttatcagcttttcgtgctatttga

SEQ ID NO: 186123 - DNA, 293 bp, Arabidopsis thaliana landsberg
tcacgacgtcgacggcccgctgcccgctttcgacccggtcgatcccgagcagacgaaaacccacggcatcgtcaacagccgggaccagccgctgcgcaccgcggcgggatggcggcggctcgccgccgaccgcggctactccatccggcggctggtcgcgcacctgaacgcgacccgcgagttcaccggcacgccgggcgcggtggcagacgaacttacgcgctacgtgcgcgcccccccgatccccggcctcaacctgacgcccagaaaagttacaaaggcttgcgacgatc

SEQ ID NO: 186124 - DNA, 147 bp, Arabidopsis thaliana landsberg
ataaagaaaaacaacgacaaaataaaccaacaaagtcgaatcatatgccttgagagtttgttgagtaaacttacaatcgagggaggaggaatgaagaacgtaactaaccgacggtcaagtgaatatggccagagatctagctttaag

SEQ ID NO: 186125 - DNA, 2113 bp, Arabidopsis thaliana landsberg
gatccaagatcgatcaattatccaagtctgacttcgaatccgttgccgccaagaaaaagaagccattcaggacgggttttgaatccgccgcaggaactatcgcatgaattgaagcaagaacgaatcaatctattcctagcagtggcttctgatttgccttcacaagaagtcctctcttatctcgagcgcttcaattgggacgtggagagagccggggcccaatactatgaggatcgagatcagcagcgtacttcatatgatcgtacggagattgatcagtcgtatttgcagcggtttcaagagggttatacgccgatgattggggtttcgaatttggaaggattctcacaaaatgaaacatcgactatggatttgatgcagcatagtgctccgcctcttccatcgttacatttaccttcagaatctcagtttcatgattctgttggttatcaattaggggaccactcttcttctttttctgggtaatttccttttacttttcttgcgattttgtctatcgaattcgatttctggtgagttctttgatttagggtttagttgattcctgagaaaatgtttgtgtacagattgatgaacgttgatgtggatgagtttggagatttagacgatatacctataatgtcttcatcgtctcaagttcaggtactaatcttctctttctctgcactatatctttcttctggtttgctctgtttccttaagatagtctttacaaagaagggaactaactctatgttgattgatgcacatagaagctttgtgtttgatgatgaaggaactttagagaaaacgagagttgatttcagactcaatctttctcctatgttttaactgtttgcattttctacattcagattcaggggaagtagcagttctgctcaaaacttggaagaccacccaccgccaaacaatattgatagaatctgcactgaaactggtgtgtctcgaggtgaagcagtctattaccttgaatccttcgatggtgatttggcttcagcgatagaggcttgccgcagcaaaaacttgcctaccctcaaggttagatcttcgccagtggtttcggtgaatgagatatccgcggtaccagagtgggagtcaccaacagagaggccactggtgatgaattcttgtccgatttcgaatgagctgcagattcagccagagcaactaccgctaaacaaagaggaaatcatcaaacaattctgtgagattgttggattgcatccagatgtcgcagtcgcttacctcgagcgttgccaatggagtttacaagttgccatcgactatttcatgaatgaggcatatttcacagaggatgtaacatccaacccgcctcttccattgataggactaccttcacaatcacagtttcaggcttcggggagctctttttctaggtgacttcccgattatacttagtatgagtctctctgccttctttcaagatctctgaacatccttatctgaatctttcttttttccgccattcacctacttgtacagtttgacgaacattgacccgactgatttcaccgtagctaatcttccaatggcatcgtctcaagtggatgtaactttccttctcttcctctgcactatttactatagtcttgctactttctcgaattgtgttagcttgaaagcttagcttaaaacagaacctgtaaaggaaaaatagggatcttagttttacattaggagttagcaacctagatatatctctcttgatggtctttctttggatgtggccttttttgttgttgaggaagatttaagcacggagacatttcttgatcctcaggccatccaaggctggacaagtgtggggcatgaagctgcaccgactacaattacactaactatctacttggacgatggtgggtctgtgacaccggtatatattccttttagatcagaccaaaccgtcagagacatccgcaatgccattgacgagctaacaccagctaacaacagatattacgatttgcgctcagtgggtggagaagatgattgcagggatatgaatgcaactgtaggcaaaatttgtaagagtggttctacaactctccaccaggtcttccacaacacttag

SEQ ID NO: 186126 - DNA, 59 bp, Arabidopsis thaliana landsberg
attacgaatttagctcccgaggcgctggtgatcggctcggttatctggttgaaatctga

SEQ ID NO: 186127 - DNA, 572 bp, Arabidopsis thaliana landsberg
atggtggagtcagacgagatcaaggcttcggctcaactagagacaatcactctctgtgagatgaaacacgaagaattagaggctttcattgaattcatatacagcgacggctctatgctttctgcaaaagagaagcaacacgttaggtcactctatattgcgggggacaaatacgagattccgcatctacgagacctatgcagaatcgagcttatatcatctcttaaatcttcaaatgctcttgacatccttgagctcgcccaaatcccttttgacaaagcccttcatgattccgctttccttttttttttttttttttttttggataacccaggtatcccaagcccaatggacccagactagcccactgcgtgcgtcccgaaggcggcaagagtagttcctggaggccgcatagcccgattttaaattgtctgcggtggtcacttaaggtgtttgcagccgtggggattcgaacccgggattattgggaatttcaccctcagcccgaaatctctcctaccactggcccacctataagtggtttcatgattccgctttcactaatatcataa

SEQ ID NO: 186128 - DNA, 455 bp, Arabidopsis thaliana landsberg
tggttaaggaagttctaagattgcacccaccatcaccggtcttaatacggaagttccaagaaaaatgtgaggtcaaaggattttacataccggagaagacaacactcattgttaatgtttacgctataatgagagattctgattcttgggaagatcctgagaaatttaagccagagaggtttctaacttcttcaagatcaggggaagaggatgataaagagcttaagtttcttccttttggcagcggaaggagaggatgtcctggagcaaaccttggttttatatttgtaggaaccgcaataggagtgatggtgcagtgctttgactggaaaatcaaagaagataaggtcaacatggaagagacttttgaaggaatgaccctgaaaatggttcatccgcttacttgcactccggttcttcgaacccaacctttatcttttgcttttaatctctaa

SEQ ID NO: 186129 - DNA, 391 bp, Arabidopsis thaliana landsberg
gttaagggttgtgcagaagcttcgtgtgattctttattcacggcaccaatacaaggttatttgctgggcatcctctcagctggtttgtccgcgctagctggaatctacacagagtttctgatgaagagaaacaatgacaccttatactggcaaaacttgcagttgtatacgtaggtatctcttctttgcatcaaactttctcatgcctagagtattattgtcacacttcttattcaacttaaaagcctcgtcgttaggcataaggcgatgatatgcagttcaatcatatattttctttctttattcaccaggtttggttcacttttcaacgtagctcgacttatagcagatgatttcagacacgggtttgaaaagggtccttggtggcaac

SEQ ID NO: 186130 - DNA, 206 bp, Arabidopsis thaliana landsberg
agaagttagaagtagaagatttgaatttcattgtggttggtgaggattgtgcacagaagctgtttgatagaatgtctaaaccgttattatacagaaggtcttcgatcttttccgttattttgagaattcataagcttagagaaactgaaagtttcgtgttgtttcctggagaatcatctagtagattgcaatggacgtttgttcag

SEQ ID NO: 186131 - DNA, 204 bp, Arabidopsis thaliana landsberg
atgctctggcagctcttcccaaacccgaccgaccgggtattgcgcgtcgaattcaagaacgcggccacaggtgcaatagcgattttcaatgcaaaaggacaggttctgcaccggaaggccctgaaggcgtccacaagcgaggaaatccatgtagccgactggccaaccggtgcctatttgttgaattttgaaaaccagaacggt

SEQ ID NO: 186132 - DNA, 64 bp, Arabidopsis thaliana landsberg
atgccagtgtttggcctcgcggctgtcccacgttgtggatgtctgtcttgttttacccgggcca

SEQ ID NO: 186133 - DNA, 2636 bp, Arabidopsis thaliana landsberg
atggtcgaagtcagtataaacaaaatcaagagtttggtcgtcgttgtggatttggaggagaggagagtgagcttacagagtatgagaagcgagaagctcaggggaagtgtgactcgtcgtcgtcgtcttcgaagtcactcacgaccatcgagagatctgatgattttggtaaaatatcaaaaaaggacttcaacttttcacttaagtcaaaacaagcccctataaataaattctgttatttaagccttgaggcttgagctgcgtctttgttgttcactaggagagttatttgagcggataatttactaaaactgaatgtccatctcccaaacaaacattttacgttttcatgttatataaaagaatactatatcgttagctagaatattgtagttaaatattaaagtagtgtattttacattttgtctgaactttgtcatctttgtttcatgaatggtcaatggtgaataatggggagagaaggaacgtgaataaagggatccacaagtgtctccaccattttctgagtaaaaacaatcacatcctttcattttcaaacccctaaaccaaattgtaaagtcagaaaaaaagaaaaaaagaaacacacatacaaatcgaaaagcttttcttcatctcccacgttacaataagccctaagaacgaataaggcaactacagagagaaaagatgaattcaactacaacaaaaaacgtttgtggagacaaatggtaccttaacctagacaggccagaagaggcattgaagattcttgtattcattgccattttcgtcgtccgaactctcctccattatctcatgaagcctgtaggccaaccttacctcaccaccgactttgctgtatgtcaaatatctttttgttctttgtctatctcttttgatttctatattaactcaaattttctatgcatcagatagggctaattctaggtaatattccaaggtttcgaggggcattctcggggccttactctataaccctcaacaacataatagaatttggaatgatctgccatatgtttgtcatgggtctagagatgaatccaagcgttcttctcagaccaccaaccaaagatgcattcattgcctacacaagcatgatcacgacctttgttctcgcctttgtcacaactcctttcctccactataccaaaacttctccttacattttctccctcgccctctccctcatggcctcaagcaccggttctcctatcctaacccgcgtcatcgccaatctcaaaatcagaaaatccgatcttggaaaacttgcatcagccgcaggtgtccatacggacatgatctctaccttgctttactgcttcggcttcattttcttccctacggagaaacctctcgctcgtcctctccacagattcttcagagccctcctcatgttttgcctcttcctcgctcaggtcactttcacttccattgtatccccaatctttcttaattgggtcaacaacgagaaccctgaaggtaaaccactcaaggggtcacaccttgttatgtccctggcatttgtcgtcttgatctgcagtttcccaacttggccacctgaatcaatgtacaacccaattctcagtgcattcacggctggtctcttccttccaaacaaaggaagaatgtcgaaatggatcatcaacaaaatcaattacttgctcagcacggtcttctaccctatcttcttcttctgggttggattcataatccacatgagaaactttgacattactgacaaaatggcgtgggtaagattcttttctcttcttggcactgttatagccggaaaagtcaccggaacagtcttgtgtggtttactactcggttatcatgtcccggaaaccgcatccttaggactgcttttgaccactaaaggccattttcatgtctacttggcagctttagccattcgggtaccatcaagctttctctttatgttttgttatttaagctatcatcaaagtaagatctttactctctttctttttcgtttgatgcaaatgcagactaacagggtgaaaagtacgaccggtgcattgatcatatttatcattgtcttcacggtggtctactccccattcgtggtcatggacatcatcaaacgcgctagaaagcgggtgcctgtgcacatcatggcgcttcaatggctcgatccaacaactgaacttcggatcttgattggtctccacggtccccacaacattggttctacgctcaacgttatggagatctgccatggtggccgtgagccgggttccatattctatgcgactgacatggtggagttgactgatgagattgcagccacgctgaagaagggcggaggagccggtcagagtaatgattcagtgacggtaacggataggtcggtgacggaaatgagagagagtataacggcagctgtgaatgggtacggagagctccgcaatggacaaggtgtgacagtgcggcggatgctggcgttgtccacgtttgtgaccatggcccatgacgtctgcggtttggctgatgaacttatggtttccattataattctaccgttccataaacggctgaatcctgatggtactctcgatgctggtcatgctgggttccgtcatgtgaaccgcaag

SEQ ID NO: 186134 - DNA, 746 bp, Arabidopsis thaliana landsberg
  unsure (1)..(746): unsure at all n locations
atgaacgacnnnnnnnnnnnnnnnnnnnnnnnnnnnnnnnnnncaagtaagagtaattccgtcgtaaatttggattccttttctaaacccatcacgaatcgagacgtggttattaatgggtctgcgtatggatcttacgaagatgaggaagattggagattattgccttttaaacctaagcaacctctgtggaaacatatgtctgaagaatcatttctctctgatttagatcctaacattatctcatcttacaaaagagcactgtcctccaaacagctaggcaagaacagtagcaatggccactcaaatcattcggttttagtcagtttaccagaatatgtatcttctagtccattgagttctcagacttcggaaaaagaccaagagaaaccaagattgcttgaaaaagaagataacgagaacaagatagtagtatacttcactagcctcagaggaattcgaaagacgtatgaagattgttgttgcgttagagcgatattgagagggtttcaggttgcggtagaggagcgtgacatctcaatggactccaaatacaggaaagagcttcagaatgcactcggcgaagagaaaccggtttgtttgcctcaggtgtttataagaggcgtccgcattggtggaattgaggagatcaagatactcaacgatggaggtgaactggcagagatgttaaaagattttcctgcttgcgaatccattggagcctgcgatagctgcggaggtgcaag

SEQ ID NO: 186135 - DNA, 306 bp, Arabidopsis thaliana landsberg
atgattgagaaaccccctggcatcacgcctgacgatagatcggtgaaccccccacggttgcacatgcagtggcaggagccctatgcagactggatcaaacacctgatactgagggttacaaaaaccatgcccctgtctatgaaccaaaagatccattttgaacaggttcccgaatagagccctcactaccctcaactggggagcagctacctgccatacggtctatttaactccccgcaggggggaattaagaccatgacgacaacgaacaacaagactgcagaagactcaggagggttctttctt

SEQ ID NO: 186136 - DNA, 86 bp, Arabidopsis thaliana landsberg
acgatcgggtaaatatattgaccaaacgttgtagtaaagatcatatggaagtttcaagagtcagtagctcaaccgtttatatctaa

SEQ ID NO: 186137 - DNA, 643 bp, Arabidopsis thaliana landsberg
gtcaattcttaacgacgtggctcgtcctcacaacgaagatgacgatgtgggatttaaacctaggcagagtattgccgaacgtgagggtgaatataggaataggagactcaatcgggttctttctccggatagagttgatgcctttgctatgggcgacaaaacgccggatgcgagtgttcgtacttacacggaccatatgagggagacggctttgcagagggagaaagaggaaactatgagactcattgccaagaagaagaaagaggaagaagaagctgctgcgaagcatcagaaagattctgctcctcctcctcctgcttcctcttcttcttcctcttccaagaggagacacaggtgggatctccctgaagaagacggtgctgctgcaaagaaggctaaagcagcaagttcagattgggatttacctgatgcagctccagggattggacgatgggatgctcctactccagggagagtttctgatgccacaccatctgctggacgaaggaacaggtgggacgaaactcctacacctggtcgtgtgactgattctgatgcaacacctggtggtggtgttactcccggtgctacttctttaggtgttacttgggacgggcttgccacgcctaccccaaagcgttaa

SEQ ID NO: 186138 - DNA, 737 bp, Arabidopsis thaliana landsberg
agactctgtcagttctggacaaggataacaaaaatgaaatgcctattactagctccttgcctattcttgggagtgaagctggaaaagatggccaggaagaggataatactgctgcttctggtgggattatggcagctgggactcctgttacacaccccaaaggtaagcctgtatgatcttcgtagcagcaagaaacttccctttcttgcagtttcttctgatttccttagaatggatttactagggagatacatattatattaggtgtatcatgtatgaatacagttatattactgataaagtatacactctgagtaatattttagtaaaaaggctctttattaaaaatatacacttattggaaaactcatgactaagtttatcagatctttatcttggaacgacttctctttttctcgatccgtgcaattaatttctcacactcatcgaaatatgtacttgtccttgatgatattgcaggtgatgcaatcgtactaggagactcccgtgcttctacatgttctgagtcttctgtaaagtcttatgtaactgcaatagaagatgctgctactaatttaaagactcctcttgattctttccccactgttaagacttccgaacttcaatttaataacacagagacaaacagtgtcaaaaagccagaagatcagaatatttcgggttttatgtctgctggatctccggtcttgaatagaaatgagacctcccagcagtga

SEQ ID NO: 186139 - DNA, 97 bp, Arabidopsis thaliana landsberg
atgagtgtccgtcgattattgatcgttactatatccagtaatttccatttcaaaagtttttatattgtcaaagattcttccaaggtccctttttatg

SEQ ID NO: 186140 - DNA, 620 bp, Arabidopsis thaliana landsberg
atgcaacagatcggacttgcatataacacgagatggaaaattaccggttccgaagtttcgattgactccagagggaaaaaagcgttgttcaaatgggttacatctgaagtgaagttttcagatggatatgtgtcaaaaaaattaagatgtgtagggcaaggccaaaagttctccggtatgaagagccatgatatgtctataatttgcatgttttacacattcttttatcaccattttgagtctagtttcatccatctttcatagcattcatcattatttttgtacattttgcatctttagtcgagtctaggactagatcaccagtaacagagagggaagcagtcagctcagcagtccatcaagacacttctactcgatcgcagaggagaggaagcagcccattcctgacaattctactcgatcgcagaggcgaataggcaatccactttgctagtccaccagtatactcgatcgcggaagagaagaaccagtccatcctgatagctgacacacatcctcgatcacaaaggccaagaagcagcccataccattctgtctaccaacctactcgaccaccacctcgaccctctgatcaatccgcattcaaccagacaacctga

SEQ ID NO: 186141 - DNA, 373 bp, Arabidopsis thaliana landsberg
tgaggctttgtttgaaacagaatttcccatattagatgatatcattaagaagcatgatgctgatagtgatgaagagcttggacaagcacaatttgcagaactactgcaacaagttctacaagaaatagcagatgtccttcatgagaaaccaataactattgtcctaaacgttgagattttcactggatcaaggattcgtaaggttagtccactctcttttgcttaagatacatgttgttcttgagataaagcatggatctttgaccaactcgatcaataatatttctcagattcttgctgatgagaagacactcaagtgtcttgtagagaaaacgactttggaagagtcgaacggaaaagagagccaaggatg

SEQ ID NO: 186142 - DNA, 92 bp, Arabidopsis thaliana landsberg
atgcagtcgttgatcatgatctacagcgcgcacgtgtcgaggtcccgctccagggtcgctgacatctactggagcccggcgcgcggcttgcg

SEQ ID NO: 186143 - DNA, 6 bp, Arabidopsis thaliana landsberg
atgaag

SEQ ID NO: 186144 - DNA, 290 bp, Arabidopsis thaliana landsberg
gatttgggaacactaacaatgttttcccggtttatattggtgacgatcgaactgacgaagatgcatttaaggtatatctattttttccatcataactagctagtgtttcatacagtagagtatataattaacatactaatcatatttcttaatttacatttttgccatgtatattttagatgctacgagccagaggcgaaggctttggcattcttgtctccaagtttcccaaggatactgatgcttcgtattctttgcaagatccatccgaggcaagtcttaatatataa

SEQ ID NO: 186145 - DNA, 101 bp, Arabidopsis thaliana landsberg
gaaataccggaactaaaaaggatactgatggatataccggaagagcggtatatgagattatacgagggagtgaagaaagtgaagaggcatattttggttaa

SEQ ID NO: 186146 - DNA, 502 bp, Arabidopsis thaliana landsberg
aacacgaggggatacgtcgtcgtttgctgattattttcctccaacatttcaaacaaacaaaacgacatgccgttttcagcatacgaagataatacgttgtcgtttaacggtcctcctctgttccttaaaattaaaaccactgaaactcgaaaaagcctcactctcactgaaccctttacttgcctccagtttttccggccaccggcaacggcgaaactccgttattgtatctaaagtcatgcctttgaatttccctctccgaatacgattcttcgctcactctcttccgggtacacatctctcttataatacctctagctccgtccctttgctcttccggatattctcttctggattgaatcactttgaatttgggtctcgcataaaattctcaacccgtcctaacagagatcaaccagaatttgagcggcggattcgagacggaggagaaattcgcgcgtcaaagagcttgatcgaagacgaggaagagctcagcaattgg

SEQ ID NO: 186147 - DNA, 390 bp, Arabidopsis thaliana landsberg
atgtatggttgtgatgagtcgagacaaaatcaagtactgccacgtggaatatttcgtgacgtacacgtagctctctcataaaccccctcaaaacgaaagaaactctgtcatttcttcattacccaaaatctaagctttcgtcgccggcgaaaccgtaaccgccaccggaggttctgtccaccttttttgctctccgattattttcttcgtctctcgtatgatgtactgtttttgctttaatggaagcatatactgaagcaatttctgcttttttttgtttcttcgttgtctagggatttttgttggtgctcgttatgtctacggaaccagaaggagtcgaatctgactccaacgctgattttgccataaatgcgtcgagttttgactacg

SEQ ID NO: 186148 - DNA, 1144 bp, Arabidopsis thaliana landsberg
atgaggatctctgttaaagaggatatgacgaggacgacgttgcagagagctaaggtagtttagcttcaacccttacttagatatgatttacaatgaaatctatctaaataagcttattggtaatcaaattatagaataactaatggtttactttttattgcgttttggtgattccttaaggatgcacaagaccttggcatctcaatcgagcttctaccactcagtcaacctgataagcaattcaatataactctcttctacaaggttaatctcttaacaatctacttcttgtgttgaccttacaaacctggggctttataggcaatttctcttaattttctatttccatgattttttgtcaacatatttccaggatctaattggattaaacagtgatgaacttacggagttcatgccatcagttggacagaagtatgttctttcattctttattgcctgttggaatcccttatatgtctttgtcattccgttgctaatagtatcatagtactacactcagacaaagccgtgatggttttttgagaagtttccagacttcaaaataccactttgtaaatgttatctttaatttgaatagggatttataggaattcacatttagttctactttttactgaaatgtaactatttcagattagaggacatgaaggaccaactgaagaagcgtgtacttgccaagagaatagcaaaaagaattacgtttgtgatctgtgatggcttgtctattgaactgaatggttatgctttactccgaccggctattcctggcagcataacctggcttgactctacaactaatcttcctgtgaaggtaattttacaggaaagctcctttagttgaattgaaattttgtgcctttactcgtcttttgttcttttgacttccattacaagtgtggacctttgttttcagatcaaatctgtccttttttatatattatgaatcaagaatattccttgacatctatgttttggtgttatataagatctatgtttcctagatgtatgaggttttaagcaccttgtgtgggcttgtctgcaggtggaaagatcatatatctgtacggacactggagctataatgcaagatcctatacaacggattcagccttacaaaaagtaa

SEQ ID NO: 186149 - DNA, 122 bp, Arabidopsis thaliana landsberg
atggccaccgtagcgcgcaccctcgtcgccgcatgcccggcacgctctctcctccgcttccggtctcggcgcctcccgtcctcctcttccatccgtcccgcgcggcaacgtgccggcgtcgg

SEQ ID NO: 186150 - DNA, 635 bp, Arabidopsis thaliana landsberg
ctcaaaaacaaattcacaaagaagcgtacacgacacgcgctacgactgagtgtaaggattctcataaactgctctattttattttgctcagtcgcagacaaatctcaaaacagattcgatcgataagcaagaacttccaatctctaatggcagatcaaacagaatctccaagatcgtatcttatcttcatcacaatcatgagtaaaagacggacatgggtttgtctcttcatcgctgtctacgcaattctcgtatcttcttcatggaacctcctgagatcagttcttaactggtacaagcttcaatacacgtcatcaaattcagattattctccttcaagattaccggcggtatacgcgtcggtggtgctcggtgcgatgtttggagctatgtcgatggtggcttctatgacggtggcggttccggcggtgatggtgatttggatatcgatggtggtgttgcttgccttctttgggaaatcaagaagagttttagtggttgaaggaaggaagattacgagagaagttgtcggatttgtgtttaaggttcttttgaaagaaggcaatgttgttactgctttttgtgctgttttagcttattttctgcttattagaagagattttgactcatattaa

SEQ ID NO: 186151 - DNA, 344 bp, Arabidopsis thaliana landsberg
gagaaaatcccaattgaagaagttttcaagaagttgcgatgcagcagagaaggtttatctggagcagaaggaaaagaaagactcaagatctttggaccaaacaaactcgaaaacaagaagaaggtaaactaaaactttcatatcttttgtggcttattacaataagtaaactcactaactatattatggtggtttcaattaacaaacaggaacacataacactcaggttcttcgctttaatgtttaagcctttatcttgggttatacaagcagctgcaatcatggctatgttgtttgctaacggcgatggaaggccaccgagttggcaactatttctcggtatt

SEQ ID NO: 186152 - DNA, 102 bp, Arabidopsis thaliana landsberg
ctccactactgtggcgtggaagatcgggcatatctctttcagtcatcatcgggattttcggaattatttatttattcttctgtttttattgaattgatgtaa

SEQ ID NO: 186153 - DNA, 399 bp, Arabidopsis thaliana landsberg
  unsure (1)..(399): unsure at all n locations
atgcagggagcggacagggggcggnnnnnnnnnnnnnnnnnngctgcccaccaccatctgccggacgagcgtagtgcggcggtgatcgcgattctgtcggtcgcgggcgcggccggagtgggcgnnnnnnnnnnnnnnnnnggcctgatcgctcaggatctcagcgtccatgcagcatttctgtttggtgcgctgatgagcggcgccgcgctcgacgcctcgctgctggtgattccatccagccaggcattgcggccgatgccattcgacgccggtggcgcccttgttggagcgatcgggctaacggcgctactactggcaatcgggcagggcaccaactggggctggacatcggttgcgaccgtcggcctgatcattgtggcgctgttggtgctgctg

SEQ ID NO: 186154 - DNA, 557 bp, Arabidopsis thaliana landsberg
atgttcaacaaaaaccaaggatccaacggtggttcatcttccaatgtcggcatcggagctgattcaccttaccttcaaaaggcacgttcaggcaaaacagagatcagagaactcgaagcagttttcaagaaattcgacgtgaacggagatggtaagatctcgtcaaaggaacttggtgcaataatgacgagtctaggtcatgaggtaccagaagaagaactagagaaagcgatcactgagatagatcgtaaaggagatggttacataaactttgaagagtttgtggagctgaacacgaaaggtatggatcaaaatgatgttttggagaatctgaaagatgcgttttcggtttacgatatcgatgggaatggttcgatatcggctgaggagttgcatgaggttttgaggagtcttggtgatgaatgttcgatcgcggagtgtaggaagatgattggtggtgttgataaagatggtgatggtacgattgattttgaagagtttaagattatgatgactatgggatctagacgtgataatgtcatgggaggtggtccgag

SEQ ID NO: 186155 - DNA, 371 bp, Arabidopsis thaliana landsberg
cgccgaccggctgctgctgacggccagcaccggcgccgaggcgccgccgctgctgacccaactctggaaggacgggacgctcgaccgcatcgagctcggacccctcggtgcgccggcggtgaccgacctcgcggccgacgccctgcccggcccggacgacccggagctggagcggtggctcgtgaccagcgcggccggcacgccggtcctgctccgggagctactcgacgatgccctcgagcggggctcggacaccttcgaggacgggggctggcaccgccgccggacgagcgcgccaacggccagccgactgcgcgagctccgcggcggccgggacggtgtcctcgacgacgacgagcgccgggccgccg

SEQ ID NO: 186156 - DNA, 136 bp, Arabidopsis thaliana landsberg
atgaattccattaatttgggagctgaacctctctcatgctttggagtattaaatgaggatgggctttatgatttatatgggccttcacaattggatatgatggaattctatggcccaaaatatcctcctccaaccg

SEQ ID NO: 186157 - DNA, 56 bp, Arabidopsis thaliana landsberg
atggtgagcgaagaagaagaagaagaagaagaagaagaagcagagtgggctaatgt

SEQ ID NO: 186158 - DNA, 152 bp, Arabidopsis thaliana landsberg
aggagatgggagtcggcagctgtctggatgatacaggccctaatgcaacagacctaataggattgggcttacgaagcccacaatcatcattttccaaaaattcagatattggagcccacaaagctttagattcgtctgaagcctgcaagtga

SEQ ID NO: 186159 - DNA, 316 bp, Arabidopsis thaliana landsberg
atgcaaacacgtgaccgagggggtgcaccacgtgcttgggctgtaccggctggtgctggcacacgcgtgattgcgcggtgccgcccgctgctcggcaccttcgtcgaaatccgcgcggatacggagctcgatggtgcggacgaggcggtggacaaggccttcgccgtggtctgcgccgtgcaggacttgatgagcttccacgcggccgacagcgagttgtcgcggctcaatcagcgggcccacgagcagccgcaatgcgtccatccgtggacgcggcgcgtgctgcttgcggcgcagcgcctgcacgcggacagtg

SEQ ID NO: 186160 - DNA, 1154 bp, Arabidopsis thaliana landsberg
caaacggacgacgccagcacgctcgcaaaggacttgctgggcgtcaccctcgtacctgagacgacggtgcagtctgcccctgacgcgactttgtcaccacccgtcgaccaagaggtaccgaccgactcccatctcgtgccttttggattcagccccgacccaccaagcgacttcgcttcggtggatgctctcatagaggcgagtccaaaccctctgggtatcgtatgcggtcaccctgggaccgactgactgccgtctcgacctacgggccctcgggttccgaggaagatgatgagctcgactcttgttgggatttctctgggctcggtaaccccagtgccatgtgggacttcatgaccgcatgcgactactgcctctccgattgttccgatggtagccttagcttcggcgacgaggactgcggcccaagtcgtgaatgtttccacgtcgatctagggggtcctggtgaaggcaaccatcttggtatgccggaaaacggcgatccccctaaacctacgcctcgcgttgacatccttcgggagctagctatggtcccagtccctgcgggggtcaggacgcacagctcgagcaaatccacgagatgcaggctaggctcgacgagggagcaggaacacttgagcaattccggcggaacatcgggcaggaatgggcagaccaagctccggccggagaagcgcgtcatcaggcccaggacgtccagcgccgtatcactgacgatgctagggcaaggctgcccccggcttccagcggggtcggccagaatctggctgcagtggcaattctactccgagcaatgccggagccatccaccaccgaggggcgacgtatccagggagaactcaagaatctcctggaggatgccgcggtccgacgggccaagagctctgcctcccgaaggcaagggtgccccccggagcatcgcgcagcaacttcccgatttatgcgggaggcctcggtccacaccgggtgcacgcgagacgtgacgcctgcagccccggatcgcctcggcaacgagcaccaccgtcgcgaccatcgagcccgcctcgatgagaaggtacgccgaggctaccaccccaggcatgggggacgctacgatagtggggaggatcggagcccctcgcccgaaccacctg

SEQ ID NO: 186161 - DNA, 498 bp, Arabidopsis thaliana landsberg
  unsure (1)..(498): unsure at all n locations
atgcacgccggtagtggtttcctcgctcaggcctttgatgccgccgatcagctcggggtatttgtcaaagaccatattggtgaggtcgccgccgtcgtcgaggatcatattcaggggcttgtctgcaccaccgaaaaacagtgtttgttcgatacaccagtccgcttcttcctgggtttgccctttccaggcaaagacgccgatacccgcagcagcaatggcagcagcagcctggtcttgtgtagagaagatattgcaggagctccatttcacctcagcgcccaggtggatcagtgnnnnnnnnnnnnnnnnnnnnnnnnnnnnnnnnnnnaggcagcctgcgatacgtgcgcctttcagtggctggctcgatccgtattcttcgcggatcgccatcagtccgggcatttcggcttcagcaagcctgatctctttgcgcccccatgcggcgaggctcatatccgctaccctgtgggccagcgaaaaatcgatatctga

SEQ ID NO: 186162 - DNA, 410 bp, Arabidopsis thaliana landsberg
atggaagctcgtaacatggtcaaaatacacttcgatagctcggaggaagaactactgtactccttcgtcccccatctgtccgccgcattcgggcgtaaaggcatctctatgttcacagataaacacgatcaatcctacaagtccattgcttctgtattgattttctctgagaactacgtgtcctccgaggaatctttggatgaattcataaaaactatacggagacacgaggaaggccatatcgtgaccgctatcttttatggagtcagtagatcaaatgtgcaagaactgatgggaagtttcagcaaggagttcttggagcactgcgcttcaggtcatgtaacgcaatggcgcaatgctctttcggaaataacaagcttacctggccacgaaataaacaataatcaaag

SEQ ID NO: 186163 - DNA, 118 bp, Arabidopsis thaliana landsberg
gtcggcgccttccttcgtcgtcgtcacctcttcctctgtcgccgccattgaggttctatttcttagcaatttgggttgtttcactgaaggaggtctgcaagtagttacacgattgtga

SEQ ID NO: 186164 - DNA, 254 bp, Arabidopsis thaliana landsberg
cagaagagaagcaaaccgtggagaacgttctaatagaagaccataaggatcaggaggagacgaagattgttgatgtctctgaatcaacagatgaagctgaagtccaacaggtggaaccagttgatgttcaacctgttaaagatgcggagaaagcagaagagaagccaaccgttgagagtgttgttgaagaagaaactaaggatagggaagagacgaagattgttgatgtctctgaatcagctggagacaaacag

SEQ ID NO: 186165 - DNA, 122 bp, Arabidopsis thaliana landsberg
atcgacgaggcatcgctgcggaagagcaaaatgctggaatcgaacgaatcagtgtcggcaatgcagaacaatggcgattagtgtgtgagaaagcactgtcagcgaaagaaaggaagaattag

SEQ ID NO: 186166 - DNA, 131 bp, Arabidopsis thaliana landsberg
caacgagtaagcacagaaactttagctcacaggctcgataaaatcggcggaggtttcggcagagacagtaccttgcgagtagaagaatttggagagttgggaggagacttgggagcatcgtcggggtcttg

SEQ ID NO: 186167 - DNA, 499 bp, Arabidopsis thaliana landsberg
  unsure (1)..(499): unsure at all n locations
ttacaaagtattcagaaccttcttcctttgttcaagctaagaagtctgatgattggattaaggctatgaatgcagagttgcaggctctagaaggcactgctacatgggagatttgttctttgccttcaaataaaaaggccattggttgcaaatgggtttacaaggttaaactcaatgctgatggaaccttagaacgttataaggctcgtttagtagcaaaaggctacacgcaacaagaaggagttgattttgaagataccttctctnnnnnnnnnnnnnnnnnnncagttaagaccttacttgcagttgcagctgctaagaagtggagtctttatcagctggatatatctaatgcgtttcttaatggggatttgtatgaagagatttacatgaacctaccgccaggatatacaccaaaagaaggagaggaaatacctcctaatgcagtttgcaagctaaagaagtctctttatggactaaaacaagcttcgagacaatg

SEQ ID NO: 186168 - DNA, 69 bp, Arabidopsis thaliana landsberg
ctacatgggtcacaaatcggatctatgcaatcaaatggtgttgttgcacaagttgtttggttctcttga

SEQ ID NO: 186169 - DNA, 707 bp, Arabidopsis thaliana landsberg
ggtgttgcaataacccaagaaaactcattactggataatacggcaagaattgaaggttggctagctagatttcctatgtacgactgggtgggtggaagaacatcaataatgtctgcagttggtctgcttccagcagcactacaggtaatttgtacataagcgtaaactttctatgaccattctttgttatttacacgaaagcattgtcatcatataggggattaatgttagggagatgcttactggtgctgctttaatggatgaggctactaggacaacttcggtaagtagtacttattgcagcttgtgttgaagatgagtttacttaccaggttttagtagaatgtcatatcatacggttgggtttcctgactcatacactttagatagtctctaccatgactcactctagcctgtaaatttctttcttctttcagatcaagaataaccctgcagcgctcttagctatgtgttggtactgggcttccaatggcgttggttccaaggtgtttttcctcaacttttttgagagttctaaggctatcaaggagattgagttcttattgaccttattactctattcttgctttcttttacaggatatggttgtccttccttacaaggatagcttattgctatttagtcggtatctgcagcagctggtcatggaatcactaggaaaggagtttgatcttgacggtaacact

SEQ ID NO: 186170 - DNA, 83 bp, Arabidopsis thaliana landsberg
gattaagaacaacccggtgtgtcatgtacaacgcccatagtcaaccaaccgaagtttttgcgaaaccaatttgtttgctatga

SEQ ID NO: 186171 - DNA, 412 bp, Arabidopsis thaliana landsberg
acctgaatctttcgaaactttgtttgagggtgagaagtctctgggaagtgaatggtcagaagagcttgaaggaggcaaggcggtacgcctaacaggaatttttgataaattaagttatggagttaaaaaggctttatctatcgaatcagtgaaggtctccttgactactacatattgctctgttacatctgaaagtcagtgtgttgggaaggtgcattttctgatccatagcattcgaagggaagtatcgatcatacggcctgatgcatcctctgatgtacttgagaaacagaaagcatgtattgcattgcgagagcaaaaggaaatttttcttttgcccactgtgcaggtgtcgaatttcctttcctccgaagcagccattttattgacagacactggtccccgcagaaaa

SEQ ID NO: 186172 - DNA, 411 bp, Arabidopsis thaliana landsberg
  unsure (1)..(411): unsure at all n locations
atgacgnnnnnnnnnnnnnnnnnnnngcgggcggtggcgctcgctcttaacggcgaactctggtgatctctggctcgggcggggctttgggtgcgcaagtgcatacgactacggcctctggggaacttataggcaagggcaaagcgtagaggcatggggcggggcgaccacggcagggcgcgctgccgcggccagtccgcgctcggctggtcaggcaatcgatcgaacacgtggctttttgcttctgcccgagttcaagcgcccataggttgaagatcttcgcgaatttgggcatgatcactacccaagatttgctcccccgaccgagctttgtcgcttttgtgtggaagtcgagcggtttggggcagtgtacagagagttgtcgtgtcacaaaggtggcagtgtaccaag

SEQ ID NO: 186173 - DNA, 82 bp, Arabidopsis thaliana landsberg
atgatcggtatgcactattctaataaagtatgtaaggcatacaaggataataatcttcgatcgttccgcaacaaaaaagaag

SEQ ID NO: 186174 - DNA, 170 bp, Arabidopsis thaliana landsberg
ggtttgccgttttatgctcacaacagaaggcaatgcaccaagtatctggaactgattggaccatatggtctctttgtgtggacttagatttgatctctggagaatcaggtgctgcgtcgaaattcccaatctcctacctggaacagaaagaatataatgttaagcgttga

SEQ ID NO: 186175 - DNA, 240 bp, Arabidopsis thaliana landsberg
  unsure (1)..(240): unsure at all n locations
atggactgctttctgcatcgagtccgcttcggcgccaatcttgttgacgctttccgccgtctgttgcagcagcgtgtgcatgcttgcgtaacgctcgtcgtttgactgttgcgcggtcaccannnnnnnnnnnnnnnnnnnnnnttgtgcctgcagagcgatgatgtccctgttggcggcaaatgcgctgggcgcgccgatcagtccgagggcacaaatcgagacaaggggtattcgtaa

SEQ ID NO: 186176 - DNA, 757 bp, Arabidopsis thaliana landsberg
atgcgccacaccctccggaactgcagagacttcaagcattccgtgggaacgaccgacccttccaacctctacctcctcccccactgcgaggaggaccaggagaaccgcgacaaccccattagcaggaggagggaggaggtggagccttcccgcgcgttgatagagaagtcaacatcatcttcggcggacacgggtcgcaagaaagcaagagacaacaaaagctcaacgatcatcagatactggtggcgactactggtcctcccgccctgtaccggtggtctgagcacccgatcaccttcacccgggcagatcagtggctcaacttcgaccacccaggcaagtacccgctcctcgtcgatctggtgatccgagagagcagggtaaagaaggtattagtggacgggggaaacaacatcaacgtcaccttcccccgaacgctccaaggcttgggagtcccctcaaagagctccacgagtcggacacaccctttttcggcatcgtgccgactgaaggagaatacccgcttggacacatctacatgcctgtaacctttgtatcttcgagaacctatagaaccgagttcttcaggctcaaggtggtgagcttcgactgtggatataatgccatcatcggtaggccgggattggtcaaattcatgtccattccacgctattcgtacatgatattgaagatgccagggccacaagggatcatcaccgtgtgcgctagcttccaaggctccgcggaatgtttctga

SEQ ID NO: 186177 - DNA, 1178 bp, Arabidopsis thaliana landsberg
atattgcgcagacaatccgggtcttttcaagaatgcagatacagcctacgttctagcctatgcagttatcatgttaaatacagatgcgcataatcctatggttttgcctaagatgtcaaaatcagatttcacacgtatgaatgccactaatgatcctgaagattgtgctccaactgaacttctggaagagatctatgattctattgtacaagaagaaattaaactaaaagacgatgacaccatgaagaagctcagtagtcaaaggccaggaggagaagaaagaggtggacttgtcagcattcttaatctgggtttgccaaagagaatatcaacagctgacgctaaatctgagactgaggacattgttaggaaaacacaggaaattttccgaaagcatggagtgaaaagaggagtctttcacacggttgagcaagtggacattataaggcccatggtgcaagctgttgggtggactttgcttgctgctttctccgttacaatgaaagtaggtgataccaacccaaggattcttctctgcatggagggatttaaagctggaatacatattgcttatgttcttggaatggatacaatgcgatatgcatttctaacatcgcttgtcaggtagactcgtaaaacttatttcacactcccttttatgtttagtgttgaatatatatttaggttgcattgtatattggcagtttgtgtagaatattgtgccattgctgcgcaatgcatgttgactatttttctttgaattgtccataggttcactttcttgcatgctccaaaagaaatgcggagcaaaaatgttgaagcattgaggatattactggggttgtgtgactcagaacctgacacccttcaagatacttggaatgcagttttagaatgtgtttctaggctggaattcattatttctactcccggaattgctgcaacagtaatgcatggatcaaaccagatctccagggatggggttgttcaatcattgaaggagttagccgggagacctgctgaacaagtttttgtaaacagtgtcaagctgcccagtgaatctgttgtggagttttttactgcgctatgtggtgtttcagctgaagaattgaagcagtctcctgcccgtgttttcagcttgcagaagctagttgagatcagttattacaatatagcac

SEQ ID NO: 186178 - DNA, 97 bp, Arabidopsis thaliana landsberg
atcaattggaatatgaatctagacattcccgcgctcaaaaggtgttcgatggaatgtcggatctgttaattccatatatactcgcctctaccccaag

SEQ ID NO: 186179 - DNA, 420 bp, Arabidopsis thaliana landsberg
atgactggaatgatccgtctcattagctctatagatctagaaccagagtgggagccaccaatgcagctagtggcactctttacacacacgttttctcttctctactatttggatcgagattcagagctgtatacactcattgctcaaataatttttatcattgattataccgattcagagccggagtcggaatgggggctagatcagcttatgtccttgtcccctcaatggaaagtacaacttgtacaaggaaaatttcatgtcacgggaaaaatcgagcggaagaacaaagaaaaggggaaatgtcatcccgaaaaccggcatagactctacttagcgaaaggaaaggaggcttcccacttcttttgcaaagattgcatcggcgaggaccatgtagtatgtgatgagacaccagttcag

SEQ ID NO: 186180 - DNA, 33 bp, Arabidopsis thaliana landsberg
atggtagagtctctagggcccttcgaggtatat

SEQ ID NO: 186181 - DNA, 70 bp, Arabidopsis thaliana landsberg
atgacaaaagactctggatcggatttgaactacgcattgcctttggtcgagtacgggatgaggcacagcg

SEQ ID NO: 186182 - DNA, 101 bp, Arabidopsis thaliana landsberg
gcagagttatatagagtcaagaaagaattcgacaaagcagagcctttatacctagaagctgttagtatcttggaggagttctacggtcctgacgatgtgcg

SEQ ID NO: 186183 - DNA, 457 bp, Arabidopsis thaliana landsberg
atggagtttggtttcttccgcggtctgcctgagagactctttgtacttgacattgttggtcagatcgcgttcttggtcgatattgttcttcagttctttgttgcctatcgcgatactcagacctaccggactgtctacaaaccaacacgtattgctttccggtcagttatatatatttttctcttacaatcattttaaccatttctacttatatagcctttaatggaggaagtatgtctttcatcaggtacttgaagtcgcattttctcatggatttcatcggttgcttcccttgggatcttatttataaggtacttaactttgcttttgatatttgcttagatcttcaacaaaagtcaaaccaaagaaacactatagcttataaatatttcttggtttataaaaactcaaaccaaataaacactatttgtaatttgtttggttcgtttctaggtga

SEQ ID NO: 186184 - DNA, 1428 bp, Arabidopsis thaliana landsberg
atcaacagaagattgaccttaaaatagaatctatttcggatccacaggtcttaataaacaacatccaggtatacccagtgaagtgtttagcttgtgttttttgaaggtttagtttgaggataggccaaaaatgaagcttaatattgaatatgcagagccttaacatggtgtacttttatattttatgttttccaggtggtacgttcaatagcaccagtgatggaagaaacactgaaacctagactgctcagtcttctgccttgtattttcaaatgtgttcgccattcccatgtggctgttagattggctgcttctagatgtgttatgacaatggctaaatcaatgacaacagatgtcatggcagcagtagtggaaagtgctattccaatgttgggagatttaacatgcattagtggtagacaaggaagcaggaatgcttattggtttgcttgtgcaagggctgggtgttgaactggttccatattctcctctatggttgttccctctcctgagatgcatgagcgatgttgacagttcagtcaggcagagcgtaacacgtagctttgctgcccttgtacctatgcttccattagcacgtggtgttccccctcccgtcgggttgagcaaagatctatctagcaatgcagaggatgcaaaatttttggagcagcttcttgacaactcccatatcgatgattacaagctttgcactgagctaaaagttcaattgagaaggtattttagtctagattaaatgaaagtttcttctctgttctgagtgtctcatggtttctgtgttgtctttctgatttggtcgcttcactggctttcttccttggttttctcatttgcatctaaacaaaattgaggggatggttcgtgagaaatggtaggacattccacgtattgttgggttgagcagggttgaattcacgaaatttggtcttgacttagcctggtccctggttgatagggattagacgcattttataatctatatttttatttctatattgttgaattgaactgagtgggaactttattgcttttgaaatattattgtggaatatttatcagttttctgtttccaggtatcaacaagaaggaatcaattggttaggattcctaaagcgttttaagctccatggaattctctgcgatgatatggggcttggtaagactcttcaagcatctgcaattgtggcatccgatgcagcagagcgtcgtggttcaacagatgaactggatgtttttccatctataattgtttgcccttcaacattagttggtcattgggcatttgaaattgagaagtatatcgacctttctctgctaagcgtgttgcaatatgttggctctgctcaagaccgcgtttctctccgtgaacagttcaacaaccataatgtcattataacatcttatgatgtg

SEQ ID NO: 186185 - DNA, 621 bp, Arabidopsis thaliana landsberg
atgcatagtgaaacaggggaagctctagaggataaagaaatttcaggtgaatctggtgatgatggagaatcaaaatcaacgacgcacgagaatcatgatcacaacgacaaacatgagacttcaaaaatcagtgttaatgtctctctggttcttgtgttaagcataacacaaagacaggttggtagaccaaaatatcttggggattacgttttacttgctgaagaagaatgagagtttatgcttttgtgcttaaactatgaaccaagaaatttctagggacttcagaagtttagagccgggtctagtagaggacgttgtggatggcttcaaaattcatcaaggttcagcatttcttcctttgcggtgtctatggcagaagttggtgacgttgtagtgactttatcttcttggcatgcatggatttttatcttcaaaggccaccaacctctgtataccggtccggtgaagtctccatgcgttgtcattcagagagatctggaatggcaagggatgggatataccatagcgggtcagattactaggttaggatccgattacggtagaaccgtttgtcgaggtgatgagctttcagagcgcaaagtgactttagtcggaaactga

SEQ ID NO: 186186 - DNA, 310 bp, Arabidopsis thaliana landsberg
gaaaaggtgcagccgtcgcgactcgcacgcgcgctggatggtttccacgccggcatgctgcgcgtctacacccgcgcgctgaacttctcgctgcgccacgcgctgctgttctcgctgacgccgctggtgctgatcgtggccaccttcttcctgctcggcgtggtcaagaccggcctgttcccggcgcaggacaccggcctgatctggggccgcgccagctccagcgccaccgtctcgttcgccgaaagcaaacagcggctggaacggctcacggccatgctgatggccgaccccgacgtcgccaccgtcg

SEQ ID NO: 186187 - DNA, 496 bp, Arabidopsis thaliana landsberg
gattggtaatctaaactcgaaaacagctgattcattgatacactcgatgtgcttttcgattggccctctcgaagggcttactagggttaatgaggacactgttgacgttttatttagattgaaagacctgaaggaagcagattctatactggaagagtaagtataactgaagaaaaaccagtcttatatggtttttgattcaaaaatccctaaagcttttcttagttctttgttgaatcacattgttacttgttaactctcgttttttctttccaggctaaacgatacaaccgtagataactctcaatggacggctgagattgtactggaagcggaagaagcttccaaaaatcaaatgggtatgaggatcaccagttgtctcgaagatttggataagcaactgttaatgcaacgcattcttggaaaagacttggaagttctgctccattcagttatgcatctggaaaatcacccaatggctcgaggaagagactaa

SEQ ID NO: 186188 - DNA, 2340 bp, Arabidopsis thaliana landsberg
atatggactgaaagttatgatcgtgtattagagtttgtgaagcgaagtaatgcagttagccctactgttgcgctggaaactgctgctgtgcttcaggtactggtctaatgcttagtggaaattttcctactcttaccctgtttcttacatagttttttttgcttatattgtcatggtgaaaataagacatgtatgatccttcaaggttgatcattcatagattattgtatgtttattttcctgcatacgtaccatagcatttaattttatttgcaccggtaattacagatgaaactagaggaagtgactcgacgggctcaagagcaacttcaaatagtattggaggagcaaagcaggttagaacagtttaactggactttatatatccttttttttttatctttgtccatatgatcagagttggaccatttggtagtgagtgactagagtggaatgtttgttgcatggaacacaatcttctgtccctgtagtctgttggggattagatctaattattttatcattgtttacaagttgcatcaccagctttcctttatactttgcctttggtttcttagatttgctctcgacattgatattgatgctccaaaggtgagaattcctttgagggcttcaggatcgtccaagtgcagtagccatttcctattggattttggtaattttacgttaaccaccatggtaagtttctagactagcccttcgagtttactagtttttcttttctgttttcttatatttcttgtactattgcaggatactcggtctgaggagcagaggcaaaacttatattcccggttctgcatttcgggaagagatattgctgctttgtttacaagactgtggatcagacaaccaaggttgcagtttagtcatggaagatttcactaatcagccaattctgtctcccattctagagcaagcggacaatgtttattcccttattgataggtatggaatggcagttattgttgatcaggtattaccttgcgtgatattttatttttaagagtcaattgcgacaacaaggcatttctacttgacacggatctatttcttgttgaagatcaaagtacctcacccaagttacccatctactagaatatcgatccaagtgccaaatattggtgttcatttctctccaacaagatatatgaggatcatgcaattgttcgacatcttgtatggtgctatgaaaacctacagtcaagctcctgttgatcacatgccagatggaatccaaccttggagtcctacagatcttgctagtgatgctagaatcttagtttggaaggtatgcattataatatacaagtactttttaagtttggttgatctgtattagctttgattttttattttcacggaatctacttttttcagggaattggcaactctgttgctacttggcaatcttgtcgccttgttctatctggtttatatctgtatacatttgaatcagagaagtcacttgattatcaacgttatttatggtttgtgctaattttattaattattttcttttatgtactttctttctctcttttttttttgtcaagttcttttttctactacaaagacttttgcatatgttaagacgtttaaatataaagtttctgtgtgcagcatggctggtaggcaagtattcgaggttccacccgcaaatattggtggttctccatactgtcttgctgtcggtgtaaggggaacagatcttaaaaaggtacgctaagctgctttattttaaataataggagttagattagaaccgaaaaatctgtaagttgactagggaatacaatatacgctcttggtgacttgggtatgcttgctatgcttgctaaatcttggaatggcttcctacctgaacaataagatggtagtgttatgattctctggatcttacttttattgaagttgctttcgatgttatactggagaaaaaagccagctcacacatattcctttacaaccttgctttgtttgtggtattttcatttctgtttatctgatggatcttccgcattcttcaggccctggaatcttctagcacctggatcatagaatttcagggggaggagaaggcagcttggctgagaggactggtccaagccacctatcaagcttctgtatgtgtataaaatctctttcttcttttctctgggcttttactgcaatggtcgtcttcgcttaatgctgaaaatcttttccttttgtaggctcctttgtcgggggatgtacttggtcaaacgagtgatggtgatggtgacttccatgaacctcagaccaggaatatgaaagctgctgatcttgttattactg

SEQ ID NO: 186189 - DNA, 125 bp, Arabidopsis thaliana landsberg
agaaacagcaacgggggtggggaagatgcattgggagagaacgaatgaaaagaggaagaaactggttcgccattagacctgctctcagaggaaaacgacagattttgctctcgatggaaaaataa

SEQ ID NO: 186190 - DNA, 115 bp, Arabidopsis thaliana landsberg
aacgtatggtaggcacaaacgacggtttggtaacaataaggagaataataataatcttcgtttgaattcaaatagaggaagaagaagcgaaagggtaggctttgatcaaccatga

SEQ ID NO: 186191 - DNA, 257 bp, Arabidopsis thaliana landsberg
atggagcactattatacgaacagggagcagctacgatcggatgccattaaatctggaagcctggaaaaggcagccgccaattctggcatcaaggtcagtatcggcattggtagctccagtatgaagagctccagttcgcactcctctgttacccatcagggcagtctggtgaagtcgggcggcgctgtgacgattaaggcaacggaaggcgatcttgctgtgaaaggcagtcgaatttccgccgatcaaaacctaat

SEQ ID NO: 186192 - DNA, 1432 bp, Arabidopsis thaliana landsberg
gttttcaaaactgagaaaaatgaatggcgagggaaaattggagactggtggaactagcgccgccgccacaccaaaagaggagaaggaagaagaagaagtagtttcccagagagtagtgtacatgtggggttacttacccggagcttcaccgcaacggtctcctctgatgtcaccagtcgaagtaaagattcctccggcagtcgaaagttcatggaaagatgtctctggtggtggatgcggtttcgcaatggctactgcaggtgatagaatgttttcaattgaaaagttcttcacatttcgaatcaatttcataaaatgttatctgatttgaaatcatgagtaattttttgaagttgaatgatatggtttttgttaaaacagagtcagggaagctaattacatggggttctacagatgatctaggtcaaagctacgtcacatctgggaaacacggggttagattttcttaacttaagtgtgaaattttgattttcttttctttgtgaaatttgagttttagttagtttcgattttattggtttataggagactccagagccatttcctcttcctccagaggtttgtgtacagaaagctgaagctggatgggctcattgtgtggcagtaacaggtaacattttcatgagcttacagagacatttgtgtccaagttcatagctttaattgtcttattgaatacagagaatcaacaagtttatacatggggatggagggaatgtatacccactgggagagtcttcggacaagtagatggagattcttgtgaaagaaacatatcgttctcgacagagcaaggtcaaattttctttgactctttcttgtaaatctatcttcttttttaacattgaggatgaatgtgaaggatggtgactctttttgcagtgagttctagttctcaagggaaaaaatctagtggtggaacgtcttctcaagttgaaggtagaggtggaggggagccaacaaagaaaaggaggatttcaccgtcaaagcaagctgctgaaaattcatcacagtctgacaacattgacctctcggcattgccttgccttgtatcgttggccccaggagttaggattgttagtgttgctgctggtggtcgtcatactctagcattatcaggtgagatttttagcttttcacacaccatgtcactaatgaggtacattggttatcaattatgaaaaaaatatcagtggcggtatccattaagctaaagagcttttggtgtgctataataatcacttgatgcatcctaattttttttctgaagtccagatattggacaggtgtggggttggggttatggaggagaaggacagcttggattgggctctcgtgtacgtctagtctcctctcctcatcctattccatgcatctcagccttctccttatggaaaagccaccagttaag

SEQ ID NO: 186193 - DNA, 436 bp, Arabidopsis thaliana landsberg
atgattggtggcttggcaatgcacggatgtggaaatgaagctgttgatatgttttataaaatgcaagaggctaatgtaaagcctaatggtgtgaccttcaccaatgtcttctgtgcttgtagccataccggtttggtggatgaagctgagtctttattccaccagatggaatcgaattatggtattgtccctgaggaaaagcattatgcttgcatagttgatgttctcggccgctcgggttatttggaaaaagcagtgaagttcatagaggcgatgccgattcctccaagcacttctgtctggggagcgcttctaggagcttgtaagatccatgccaatctgaatcttgctgaaatggcttgtacccgtttgcttgagctggaacctaggaatgatggcgcgcatgtgctcctgtcaagcatatatgctaaattgg

SEQ ID NO: 186194 - DNA, 1056 bp, Arabidopsis thaliana landsberg
attttcattattgcttcgtgtgtcactttcaaaggtggagaaagcaagacaagaaagccgatctaaagatgaatccataaagaaaatggaggagaacattcagaatctggaaggtaagaacaaaggaagagacaactcatacagaagtctccaggaaaaaaacaaagaccttcaaaaccaacttgattcagtccacaaccaatcagaaaaacaatatgcacagcttcaagagagactaaagagcagagatgagatttgtagcaatcttcaacaaaaggtaccttctcttttctttcatttctgcttaacatttccacgattaccattttatggctaacagaaatcttttttcccattaaaggtcaaggagctagagtgcaagctacgggagagacaccaatcagattctgcagctaacaaccagaaggtatcttgagatcaatatttattgttacacaaatctcactatactttgttgagagttaccaaacttctcaaaatgatgcctgcaggttaaggatcttgagaataatttgaaagaatctgaaggaagctcccttgtgtggcaacagaaggttaaggattacgagaataagttgaaagagtctgaaggaaactctcttgtgtggcaacagaaggttaggagtaggactgattcagtctcaaacttttcatcttaatatcaccattttgatattctattcgatatggtgtcccagattaaagagttggagataaaacacaaagacgagcagagccaagaagcagtgttactacgacaaaaggttagtttcatggattatctcgggattttcgagcttctgaattcctgatatcagcagatgtttaaaagaaattgtattgtttgtttgcagatcaaagaacttgagatgaggctaaaggagcaagagaagcatatacaggaaatggcaacaactagagaattccctgaagttgcaaacgctacgcctaatgaagtgaaaacttgcttcaaagaagataactttggcaatgagaatatagaatccaacaccaacatcctgagaacatcaaacc

SEQ ID NO: 186195 - DNA, 1360 bp, Arabidopsis thaliana landsberg
  unsure (1)..(1360): unsure at all n locations
atggatgaatcggatgagattgaatctagtgaagaatctgaagagacagaatcaatggttgaagcaagagagggcgtgggtaatcagaacagtcaggcgtctgaagctatggaagaagacgaccaaggtctacactttctcaactttgtttctttcatctctatttactttgttacgatgtgattgtgcttttgtggatactgaaagggtctgatgcattccttttgttgtagagagcctcttagatactgaactggaaagacctacttctggagggtcaaaagctgtatatgtacccagtcaattcaatcccattccatctgcagttgttgacagagcgctcagaaagctgagagctagtaaaatcgagctaatgaaagctttagaaaaaggaagaccttcaaatttaaacaatgagacgattacagaacaagaaaacgatgttgctaatccttctgcaacaaacgctgcaccaaggcctagcttgatggagccacgtagcacagcacacacttatgaagtaaatttgcttctttttctaattgtttcatcatatcatttatgtttttttcttcagacttcctgtgtttaaatagctaggtcgatggaatacccacccaatacacacagattaactaagttttctcagcactatcccgattcattctttgatcttttcctattatttcatattgtctgaccagcccgctgcactcggtgggaattagtattgtgtaggactcgctgaattgatttctttgcatgttcggtttcggagttatagctgagttaatataatgtgcttttcatgcaactgtataacataggacttgtttgttcagatgagtttgtttttcacattatttttgtttgtttgattagtggaatgactccattgatgattcagatggagaaannnnnnnnnnnnnnnnnnggattaataaatcaaaacgtaaaagaattgtcgtgtctcctttgaaaagaaaccgatgttcagaaggtgctagaaggccaaaacttccttggagtactgcagaaacgctggccgtactcaaaggctatgaaaagtactgaaacctgaagattctcctagatgttagatgaatatctttcatgcatttctattgatttgatgcattcttttgtgattcaggtatggtgcaaactggaaacggatcaaagatgagaatccagttctagtgcgcagaactaatgtacacagcttcacttatctttctgttctttattcatttctcggagttaattttatcttgtttctaataatagacacattctctcacagggtgatattaaagataaatttcgagttgagatgagacgtgaagagcgccgtcattga

SEQ ID NO: 186196 - DNA, 616 bp, Arabidopsis thaliana landsberg
atggtggtgggtcagctcaacatgctttgttggtgtcttggtgaagtagttgagtgttatgggcacgtgggagctcaaaaacagcttaagtttcgcacgtgggaaatgggccgattgattttgattgtttgtaaaaactagggttttaaagcaaagatcaggtttcgatttcaccaaaaaccgaacactgtcttccgtcctaaagattgtaaagggaaaccgttttcgattttcagagaagatcacacatctttcgtcccttcactgccatacgtgtcgataaagatggcggctatggcggcgaagcttcagttatcggcgaaatctgatcaaagcagtgtgcgattaccgagagtgatcaacctctcccgcgatccaacgactagagtctcgtttccgcgaaatggatcagtttgttccctccacaccaatttctcttctccacatctcgcgaaaccttgcgccggaggtggtggtggtggaagcaccggtaatcacggcggtggaagtggatacggaggaggtgcgggcggtatacgaggatgcgacaggccatgacctgttcactgcgatgacccagcgcctcgagcacatgcacgggcgtagccacatataa

SEQ ID NO: 186197 - DNA, 111 bp, Arabidopsis thaliana landsberg
atgggggcggcaccgtaagaatctgttaaggcgccaatgatattgattcccttttacgtcacacaagtccttttgcgacctttgacgtttcagcagatgtaaaccggaaag

SEQ ID NO: 186198 - DNA, 101 bp, Arabidopsis thaliana landsberg
gaacgaccgttgcgttaaccgtggagatgaagggggtctccggaaaaaaaaagtttgtgctatttgacggtggagaaggtgcagatgaattggcggcataa

SEQ ID NO: 186199 - DNA, 147 bp, Arabidopsis thaliana landsberg
ctctttgatgtttcttcggatgttgaagctaagagacgtttcccggcaaccccgttcccttgccaagctcaacccacgatctatccgtcgcttttgaacctcgaggagccatcctttatcagcgagactccatactcgcaactgtga

SEQ ID NO: 186200 - DNA, 87 bp, Arabidopsis thaliana landsberg
caactggaacacgaatcggatctcactgtcggcttgaagcggcctagcggcttcgacttgtgtggtgttcaagaaaatcacgaatag

SEQ ID NO: 186201 - DNA, 627 bp, Arabidopsis thaliana landsberg
atgatagtaggtatgttcccagtcaattgcagaagcgttatttgatactggagtaacgcattctttcattactgcatcatgggtagaagcacataatcttccaattactaccatgtcaacccccattcaaattgactcagccggtggtagaattcgagcccatagcatttgtttgaatgtaagtgtggaaataagggggatagcatttcccgctaacctcatagtaatgggtactcagggaatagatgtcatcctagagatgaaatggttagataagtattaggcagttatcagttgtgataagaggacaatcaagttgatgtccccactaggagaggaagtggtgaccgagttagtcccgcctgagccaaagaaaggaagttgttatcagatggctattgatagtagtgaagcagatccactcgagattatcaaggttgtgtccgagttcccagatgtgttcccaaaggacttaccaggcatgccacccaagcgaaaagttgagtttgtcatagagcttcttcctggaaccgcccccatctttaagagagcttacagggtatctggaccagagttggttgaactcaagaagcagatcgatgagctgtcagagaaaggttatataag

SEQ ID NO: 186202 - DNA, 966 bp, Arabidopsis thaliana landsberg
  unsure (1)..(966): unsure at all n locations
atggaagagtggttttacgtgaaaaatgatttgaaagcaagagaagatattaaagaaatcattatgcgacccatctggtcccgcttcagccttcggaagccgaaagtagaaactgatgaggcagccgaagcataccgaaggtctttcagcacagtttgttcttttattgggacaagggacttagtccaagaacatgtagcttacaggatatggccactgatagatagatgggaaatgccaaaagagaccatcagcaaccctagcgaaggtggtttagttcgattgaaatacaccttcaggtttggagaccaatttatcgaaccagacgatgtctggttgaagtgtgttgaaaatactagtgatgaactacttggagcctactccaagtctgaagataacacactatctgcagccttcgggagccgaaaaaagaagaggctaaatagagtttttgatgctatcggatttatgtatcccgactaccgctacccgcaaagggggcagaagagaaagagtgcaacttctgggaaggatgttactttagctgctccgagtgagcccgcgctgaagaggagaaaattgaaggttcttactcaccgaccacgctacattgaaccggccacagtgcccgaatttggcggtgagacctctttggctactgaagccaaagaacctgcgcttacgcataagattgaagagccggctgcaatgccgaacgtcncntcagccaaattagctgagccgaacgcgataatattgaagagataggggtcgaaggaacaaagatgttagaagttataagcccttcggcagaagtgacagtgccgacgnanaacaggtcttacaacgacccccaataggaaaaggatggtcaacgtactagatgcgctggagacgataaagacttcaagatctactccaaggaaaactgccgaagcttcaaaaacgcagactgagacaaactaa

SEQ ID NO: 186203 - DNA, 1734 bp, Arabidopsis thaliana landsberg
atggtgtttccgtggaacattgctaaatcagcggaggaagctttttctagatgggcggtgaagagggttgtcaaattcctgttgaagaagaaattgggtaaactcatacttggtgatatcgaccttgatcagctcgatattcagcttcgtgatggcactattcagctctccgatcttgctatcaacgttgactatttgaatgacaaggttcttccttcccttcctgattcttcttcttcttcttctttttatttcaaatgatgctatggaatcctggaattttgggcaagtatgttagtgtttggctctggactagaagtttaggcatgttgaggttttatgttagggatggtgaaactgtgtttaaaattgggtatcagctttatccacggagctctagttcattggtagtggtctagctctagttcatccaagagtactattatgagcagttttgaacgaatatatagagttgaaatctgtataggtttgtgattgatgatttttgaattctcgccaaggtcgttgaatttagaggttcatctatgaagtgaaagctttgaaattatggtttcaaaatcaagtttttcatagttcatagtttgctaaatgctttggtttcgatgtttttaatgtgcccagtttgattttcttatcaatttgttaagaagaagtagaataagcgaattctgacagtcccatctcctatattatttttctactttgaatccagtttgatgctccactcgtcataaaagaaggctcaattggatctttgttagttaaaatgccttggaagaccaatggttgtcaagttgaggttgacgagctggagcttgttcttgcaccacgtttggagagtaataaatcatcttcaaatgaagccagcacctccttctttacacgagaagatttacataatatacgtcttgaaataggaaagcatgagaatgagatgttgatgaatgctgcaaaatctgcgtctatcgatgtccatgaaggtgttaagacggttgccaagatagtgaaatggtttcttactagttttcacgtcaaaattaagaatctgattatagcatttgatcccgattttggcaaaaaacagtctgaagctggtcctcgaccaacattggtacttagaatgacagaaatagagtgtggaatttcagaggagcaagtttcggctaatgaagtttctcctgataatttccttggtattaatcgacttgcaaactgtgtgaagtttcaaggagccgttgtagagcttttaaatatggatgatgatgatgatggcgacaaaacttgtgataaaaagacatcaaatgatgtgactttgatcatgacaggcgtaggaggtggcttttcagggagtttaaattttagtataccctggaagaatggttctttagacattcgcaaggtggatgctgatatttctattgatcctgttgaagtacgatttcaaccgtctacaattagatggttcttacaattgtggaagacgttcacaagttttggatcagactgtttcccctcagtttctcattctgattttttgacggattcacctacaatacctactaatgtaatggtaacgcctccagctacactatccttgtcaggtggccaagaattggagcatgatactacacctaacttacagtttataccggattggtttccgtcttcgttcagcaagaaagaagaagatggagaagtagatattgcggcaag

SEQ ID NO: 186204 - DNA, 362 bp, Arabidopsis thaliana landsberg
atgtcgtggatgccatccagtgcacgaatgccagcatcgatggatcgtatgcggtacagctattgcaacacggtggtgatggtggaaataagaacaatcctgtcagcctcacaaatggtctcacgactttcagctacgttaccggcaactggtacggacagcaggttattgcgcagatcgccgttaacggcatcagctatccggttgtgataaatccttcagtatccagcccgcaaatgcatcaggttacggcgcccgacgggaaaaccattattgccttcaacgggcaaacccaatatgtgagcctcgcgggtggcggcttcacttgggtgctggcgcagatcaaccctgtttttggataa

SEQ ID NO: 186205 - DNA, 1240 bp, Arabidopsis thaliana landsberg
  unsure (1)..(1240): unsure at all n locations
attttgtttgtatagacaaggtcgggctgacccggatattcggatccgtattgacaccgtgaacccaaccaaccaaaaccctaaacccttttttgacttgtctctacttgttagttcaccgccgcgttctcagtctctcaaattcctctgtgctttcgattcttaccagtgaatntttcttattttacttatcttatgctcgtattggaggaactgagcaaaaccctagttgtttaattgggtcaaatttgtagattgagaatccaaatttatcgacctagttattgaatcccgagttgataccttgaaacccttttgcagtcgcagtaaaatgggtaagctggggaagaaagctaggaaatttgccaagaaaaatctccagtctgttgagaaacgaagcagaaagctcaagctttttatcaagaagaaatttgcaaagagtaagttattcttcgctttcacttctcttatcttccctttttagtgttggaatattggatacataatggttgtgctatagttgaaagatttgattttttattgtactttgtatctaattttctcgctgattgtttagagccaatgataactttctgtgggtttaggaaatgagcgtcaccaagcaggagataaacaggagaagaaggtagagcaacaacctaagaagaggtaagagttttgactgtgtagctgtacagtcctgccactcaaacatctgtgtgcagttatccgtttgagtttcttgcatacgctgcttctctgttcttactttatttaagtaaagtttgctccatttgcctttgtgtttcattagttttttaaaagattgatagctcgaatattagttatgcactgtgtgaaatgatttctcgcctatacgttttcagatgtcaagaagaagaatttcaggatatagcaatagatgcagtattcggaaaggatgatgatgaagttctccgcgatggtgattcagatagtgatggatatctggatgaggtatttaacttagtgtttggtgaaaatatgaacacaaattttgttttagctattttctgttgtttcaggttttgttagcatgctcttattgtttatacagcaaagtaacattgaaactatcaatcatcccatgcagttggtaaatgaaactgactcagatattatgaagtgcaaagtactctcaagatcttttttagccacttgctgtgacatggttgataaggagcagtatgttccagcattg

SEQ ID NO: 186206 - DNA, 519 bp, Arabidopsis thaliana landsberg
atggacgaacagcaacctggtcgacctccagaggagatgccagattccagtgggggttactatgatactcccaagaccgctgttgcatcctgagaacgtgccagccggatggtgctgcgcttacgccaatttctttgagaaatatggcttatttttcccgattccgacgtgcatcctcgagatgctcttttgccttggcctcgcctttctttagatgtgcccgaacttcgtccgccatgtactggcattatttaccctggcccggaaataaacagagaattcggctgccatgacctgcttcagcattttcaggtcaagaccaacgctaggagcgaccaagggacgttctacatcagcgctcgtcccggatctctagtcctaggcggtttaaaggcctgtcaggacaccaattggcgatccaagtacttcttctttagagtagatcgtcattcaatcggcaattttgatctcgcgaggatgaggaggactggtctccaacctgggtcagatggagactga

SEQ ID NO: 186207 - DNA, 143 bp, Arabidopsis thaliana landsberg
agaaagcgcgtctacaagctgaagcagaggctgctgaagatgctcgtcgccaagctgaagcagaagccgctgcagaagctgctgctgaggctaagcggaagagagaactcgaaagagaagccgctcgccaagctttattgaag

SEQ ID NO: 186208 - DNA, 398 bp, Arabidopsis thaliana landsberg
atggatcgccgcgtgcagatgcggtgcacgcttggactcgagctgcgcaaggcctacagcaacggcgagttcgagctttattaccagccggtggtcaatctctcgcgcgacgaaagcagggggttggaggcgctactgcgctggcgccatccggaacgcggaatgtggtcgacagcggacttgatgccgctggacgaggagatacgactgactgtgccgatcggggaatgtgtgctgcgtgaggcctgcaccgaagcaataaggtggccgggccacatcacggtcgcggtcaacctgtctacgatacagtttcacatcaaggcgctgattcaggctgtgatgaccgtgctcgtctattcacggctgacggcgcaccggcttgagctcgacagcacgga

SEQ ID NO: 186209 - DNA, 285 bp, Arabidopsis thaliana landsberg
atgggaataaaaaagcctctcttgatgttcagtgaattgccaacggttcttgatgaagagttcttaatgccgttgttggataatggtctaggtttaaagattgttagtgtgttgttgatgaatcaagattatgatgaagaagtatggtgtttagctttagaagctgggtttagtttgatacttcagcttgtgaatttggacaagaagagtttggtttgggatttggtttacgtgattgtgaaatcggtttgggaaatggttcatgtgaagagaagagacactgct

SEQ ID NO: 186210 - DNA, 1158 bp, Arabidopsis thaliana landsberg
aaattgttggattttattgaatgtagaatggcgtccaatcgtcgacggaacacataccctttcagacgaacagattcaactcatcccattgaaattttaactcctcctacagaaacaacaatatgggtaaatttagtattttatatatatatatatatatatattaaaaatttactttaatttgatagaataaataacattgtattcacgaaatttgtagaacaaagacaagtacaaatggacgtacatacatgaaaaaacattaattcaattgttcgacgaagcaattgccatgaataattatactctcaagaatcctactgctatcggtagagagtatatggttgaaaagttcaatatagcattcaacatgaatataacttatagttttttcaaaaacaagcttgataaattcaaaaaaagttacaagaggtggaaagctcttacgcacaaaaacaggcatcacggttgatcctgatacatctttcataaatgcatctgacgcatggtggactgaacaagagtttgtaagtacatcaaatatttgtattaatcaattataattcaaaattttggtatcacgtatctaaattattttaaaattacagggatgcaaattaacaaaaagcatgaaccgaaaaccgtctgtattttgggacgtgatgcaacgatgtctcgtattacatgatgttcaatcacaatctcaacattctgcttgtcaaagaagagaacaattgatccacgagcatggagttgatgaagaaggtgaagattactcagatagtgacagtggtaacatgccacaaaccgaggttcctgaaacgcaagaagaagaagaagtgtatcgtgttaccattgatgatggtgaaatattctaaaattctgctgctagaaggcaacaacgaggtaggccaaattttcagtcaaccgctagacgtggaagtagtgcacaaagatctggaggaacctcacgagtttctattggaagtggttcaggaggaagtcggagacgacaatcctttgaaacaacaatacaagacagcatcactagcttcggagaattccaacaacaaagttttcaacaacttcgtcctggtgcttttgaccaagatgattacgatgaatttaaaaaggcggaagcgatatttatcgccctag

SEQ ID NO: 186211 - DNA, 1146 bp, Arabidopsis thaliana landsberg
atggcaatggccgttcctgttagtgctcgtcctcagtctcccggtatgatacctctatcacctcgttcagattttcactgattcgagtttcatttctctgatttttctctctgaaagcagaaggtttttacgcaatcaacaaccagtttcagacgaatgggccaaaagggttctctgagatcaagattctagcgaacgaagacatgttcttgaggatggatttgcctggagttcctgatgaaggcggcttgagtgtttatcataaccggtcgcaggaaactgtggttgttttcgccaaagcacccaaggttcacacacacgactccaccgaacgtcgttaccaaacgatgactggaattggctgcagctgctgtgcgatctcaagcatcaccacccacatgtccgacggtgtttttagagttatcctctccaagactcgcatcgatccacaccgctctccttgcaccggtcagtactattacccatctaatgtattaccggtcagtgtttatagatcatttttctgatataaaaagtttatgcttttgtcaacagttcttggttgctcaggtttccgtgaaggtatttccatttccatttccagaaactttcaatatctaaaagtttggctttttcctacacaaactttcgaaaattgtttactcatctttaaatgtttgtcttttctctttgtttgtggtcggtagatctccgtggcaccgatccaaatggtatacaactttctggtcctagctagtaattatatttagtattgagagattgggtgtttaaaatgagagtaattgtatttgtggatcagacccggcgttaaccggtccggtattgcagccacatccacttgcgttcccacaaccgactatggcctatgagtcgaagcagctcccaaacggcaaactattcgtgcgtgcagacatgccgggtgttcccaaagaaaacttcactgtctctgtcacgaatgggcgagtcaaggtgactggtgaagctcctgctctgagccatgactcaagtggccgtttctactctggtgacgtcgctatgctctccactcctgttgacattcccagccgtaggatcaagaccatcgccaaggacggtgtcattcgtctccttatccctccattttga

SEQ ID NO: 186212 - DNA, 196 bp, Arabidopsis thaliana landsberg
gtatacgcaagggatttacgaggaaaacgagttcctcgcaaatctcttctcgcaaatggttatatgtcgcaattccctcgcaattgtaccgaggaactgttttcctcgcaaatcacacgcaattgttgcctactacttccctcgcaataactgcgacggatttgcgattcttttttaccgcctagcaaatctctag

SEQ ID NO: 186213 - DNA, 377 bp, Arabidopsis thaliana landsberg
ggacgacaatcactctttcgggttgtgtctacaatcggctgtgaaagaagcttgtggatttatagagtctgtctgatgctaatgccgttggtgagtatgagtagttgcaaaatataacatttgacagtgtccagtcttgttgattcaagtcttgtcttggttagcatctcaacttgctgtcttggaaatggcaaagtatttttgctttggacatgtttaaacaatgcatagtagaatctgcctctcgggtaatgttgtttcggtcacaaggaactagacctaaattctctggagttctcgaggatttggatgatgcaagcttgagtaataaggatagagaaagccctttgagaataaatacttcaggtggccagtaa

SEQ ID NO: 186214 - DNA, 151 bp, Arabidopsis thaliana landsberg
aaaaattaggaaacaaccgtttctcgttgtcataatcgtctctcgaagatgtgattttgatgaggccgagtatctttggcaaggaaagagtgaagcaaaaatggcttgtgatgaagaaccaagagatgataaacagaaagaggagagataa

SEQ ID NO: 186215 - DNA, 104 bp, Arabidopsis thaliana landsberg
aactctcaccaatctcatacctcgctttatcattgagaacgctaggagtggaagagccacagtttatagttacaattcggaccaccaatgtgaccggcccataa

SEQ ID NO: 186216 - DNA, 52 bp, Arabidopsis thaliana landsberg
atgtccacaaccctcgaccataccagagagtttctaaacccctctgtgtgtt

SEQ ID NO: 186217 - DNA, 180 bp, Arabidopsis thaliana landsberg
atggagaaatctccaagatccattcctatcggatctggacctgctagggccaacacacgcaaagatgtcgcagaagttgcagatgggagtaggcgcacaggcattgtcgacacgagcaaaattgattatggcactagtagattacgtccgcgccatcgattatgtaggacacatgatccg

SEQ ID NO: 186218 - DNA, 3305 bp, Arabidopsis thaliana landsberg
  unsure (1)..(3305): unsure at all n locations
atggaacttgatctcgattcgttcctcgtatcggactcagactccgattccgatttggattcttcctccgttcctcaccgtactgnnnnnnnnnnnnnnnnnnnnnccagttcttcatcggcttcgtcttctcctccttcctcaccaccgtcaattaaccggcggaaacaagacgatccgaatcgccgcttatcagaagcccttactaacgttgctgtagtgagacctgaatctgaattacatcgcggatttcctccgacgcggcgaaattcgacttcttcttcttcgttgagacagttgcctttgccttcactattggcaggagtaaggtcgaatgtgaagcctggtgctgcgcttgctgcggctgtggctgcttctagattggttcctacaccacacgctgctattatcaagtcaaggagagctagcagtgcaagtagtgaattgctgctgcaggtttcaaatcaagaggaagatgatcacgaagtactttcttctaatggagattctgttggagttgctgctggatccgtttctgctgatgattttcgttcttttggtggagaatctctgctggaggatgaggataatggagtttctggtgttgcaagtctagaagacgaagctaaagtaatggaagttcaagctagtgatattactgagagcttaaaccctgacttagtcactgtttcctctggttttgattctgaaggaaacgtctctacagagaaagaagcggagaccacaatggaagccggaaatgctgctattgatgacgacacagatgagacaatgttagtcgcttctttggtagagtcttcagaatctcaacatttgactgattctgaggggaagtgcgatgatgctaaggtaagcaatgatgaggaatcaagtgttggagatgttaagagtgataaatcagatataattataccggaatctaaaaaagagggaggtgatgcttttattcctgatgatggaagctcaatgtctggcatttcagagcttgtagaagagaggattgctgagttggaaaatgaaaggatgagtaaaagagagaaattaaaatcgcaatcttttaggaagcagcttgtgctggctgaagagtttgagaagaaacaagcatatactggtttgcattgggaggaaggggctgctgctcagccaatgagacttgagggtgttaagatcggttccacgaatttaggttactttgatgttgatgctgacaatgtcatcagccggaccatttcatcgcaggcatttaagcgagaccatggttctcctcaggttttggctgttcatttgaattacattgcagtgggtacgtccaaaggggtcattgtcgttgtaccaagtaaatattcttctgatcatgcagatcaaatggaatcaaaggttgtcttttacatcattacttttgtccatttctaggttatttgtacacgagtttattataaccttacctgggtagatatatgctcatattattaatatctatgtttacaaatctttagatgatttggcttggtttacaaggagaaaggtcccagtccccggttacctcagtttgcttcaatcagatagggagccttctgctagcaggttatggtgatggacatgttacagtttgggacatgcagagagcgtcgatagcaaaagtgatcactgaacatactgcaccagtagtatatgccttttttctaggccgggattctcagggttctcgccaatttaaagttattacaagtgatactaagggtgttgtttttaaacacagtttttcttatgctcggctgttgaacatgtatacggtggaaacgcaggtaaatttagtattctgtaagatcatatttgcttttgcttgtgattttgtgtatgtgttctactggtttcttgttcagccttactaacattgaggaatgggtttgtacaccttattttaattgcatcagtgtcttctcgatggacaaaaaaatggaacagtcctctcggcatcacctttgcctgatgaaaattttggaagctccttggtgtcttctaaggggggtaactctgcagttccatccagcagtataagtagcatgatgggaggtgttgttggggttggttcgacttggaagctctttaatgaggattcaacttcggtggaagaaggtgttgtcatatttgccacctatcaaactggactagtggtaaatattccagatatttgttcatagtcaatttactggttacgcttctggaaatgatccttttctgtttttgtcaggtaaagctcattccaaatttggaggtgtatgcacaacttcttaggccagaaggggttcgggaaggttccatgccatacactgcctggagacgctcaacaggtaattcttctccctggtataactgtgtactttacatgtactgttttacataggtaaaattttgcagaaaattattcgaaggaggcagaagatagggtttcttttcttgtcattgcctgggatcgtcgagttcaggttgccaagttggtaaaatcagacataaaggaatatgccaaatggtcacttgacagcccagctattggtgttgtttggctagatgaccaggtgtgtatactgatataagttttttctaagcaaatacatattcatgagttttcggcttttctctgcatattcagttgctggtgatcccaactgtgacgggccatttgtatctgttcacaagagatggtgtggtaattcaccagacaaacttttcagtggctggttcttcagggaatgacctgatttcctatcatacgtactttactaatgtctttggaaatcctgagaaagcttatcacaactctatgggtgtcagaggggcttcagtgtacattctcgggactgcacatcttgttatctccagacttttgccgtggaaggagcgggttgatgtgttaaggagaggaggtgactggatgggtgcatttaacatggcaatgtcactcttcaatggtcaagctcatggagttgttgacctccccaaaactgtggatgccataagggaagccatagcacccagtttagcagagttgctactttcctatgtagatgaagtattttcttatatttcaatagcattttccaatcagattgaaaacaatggagtaactcatgagccaagtagtggaatcaataatgtcaatttagagatagaagaacaatacaatcgtgttggtggtgttgccgttgagttctgtgttcatattaacaggatggatttgctctttgatgagatattttccagatttgttgctgtacaacaaagag

SEQ ID NO: 186219 - DNA, 105 bp, Arabidopsis thaliana landsberg
aaggatcttgttatttatgaaatgaatgttcgtgcttttactgctgatgaatccagtgggatggacccagctataggaggcagttacctcggtttcattgagaag

SEQ ID NO: 186220 - DNA, 119 bp, Arabidopsis thaliana landsberg
tctcccccccacgcagcaatgatcgagaagaggagagcaagatggattgaagaggaagataggaccaaagagatgttctattcccatctcttcttgcagattttcttgggaaacccaag

SEQ ID NO: 186221 - DNA, 574 bp, Arabidopsis thaliana landsberg
atgcttgtggcgaattgggatcctctgatgaaagtttctctcaacaggtatgatatacttgcaccatatatgtgcatatacttggtaagttaagtttagctgtatttagtacttgaaattcatccaactgtttactgttttgaaggtcttcccttgctctgcgtcaaactgtggtcatttctaccatcctgaatgcgttgcaagacttctctgtgctgatgatcaaaacaaagcagaagaacttcaagccaagattgctgctagagactgctttgcctgtcctctacacacatgtaaactctgtaacatgagtgaagacaagaatcaatacgcgttgcattttgctgtatgcagacgttgcccaacagcttatcacagaaaatgtttacctaggtaaaccgtttttcattttactttttcctcaaactcctactggccatagatttagctttagatatttgttttcttcgtttgtattcagggagattacttctgaactcaactctgacgatgagacattgcaaagagcttgggaaagtctgcttccttacaaccgcattcttatatattgttt

SEQ ID NO: 186222 - DNA, 351 bp, Arabidopsis thaliana landsberg
ttaaccggacgtgtttttgatattcttgaacagttggacgattgggtattgtgtcgtatatataacaagaaaggtgtcatcgagaagcgacgaagcgatatcgaggacgggttaaagcctgtgactgacacgtgtccaccggaatctgtggcgagattgatctccggctcggagcaagcggtgtcaccggaattcacgtgtagcaacggtcggttgagtaatgcccttgattttccgtttaattacgtagatgccatcgccgataacgagattgtgtcacggctattgggcgggaatcagatgtggtcgacgacgcttgatccacttgtggttaggcagggaactttctga

SEQ ID NO: 186223 - DNA, 649 bp, Arabidopsis thaliana landsberg
atgaatggagaaagattatggaagagaagaggcaagggacgaattgaagttcctgataagagagggaagcgagggagacctaagaagtttgcaaggattaaggagcctggagaatcatcaactaatccaacaaagcttacaagagaaggtaaaactgtgacatgtagcaattgtaagcaaattggtcacaataagggatcctgcaaaaatccaactgtgcaattagctcctccacgcaaaaggggtagaccaagaaagtgtgttgtaagtattcttaaccattacctatcttactatcatttgcaatattatagcattaataattctgggttttgtataggataatgatgatccatggagcatacacaatgcaccaaggaggtggcagcaagctcaaagtcagtccacaccaacttgttctcaaagtcagtccactcaaattctgcaacattcaagtgctccagcagctaatcaaaagggaagatgacgtgctcgaaggcgtcctctaggaaccaaaaatggtgaaggcaaagatccttctaaagctcgtggcaagggtcgtggcaaaggcaaagaggaagcacccaagcagactgttttcatgatgtctccatggactaacaaagtgtttgatgtttttgcagcctga

SEQ ID NO: 186224 - DNA, 299 bp, Arabidopsis thaliana landsberg
ctcgcccaccgacctgtggctgaagcacgcctacctgcagggcgccttcagcaaggcgctagtgctgcgcttcggctcggcgcccttgccgtgggcgggcttcgtgaaccagtggtcgggctatcgctacgtggacaaggagctggtgacgcggttgaagttcggcgcgtcggccgactggggtgtgcacgcgttgggcgcgctcggtgacggcggccggctgcagtacgccgcctcggtgatctccggctccagcttcaagcacccgcgcaccggcgaccggcccgatgtggaagcgc

SEQ ID NO: 186225 - DNA, 660 bp, Arabidopsis thaliana landsberg
  unsure (1)..(660): unsure at all n locations
cgtgatggtggcgaagatggcgatgatggtaatagtaacaatgacagtaccgatggtgatgatgacgacaacagtggccgtgccgatggtaatagtgatgataacagtggcggtgccgatggcgatagtaagacaacagtggcggtgccggtggcgatggtgacgacaacaatagcggtgccgatggtaatagtgatgataacagtggtggtgccgatggcgatagtgacgacaacagtggtggtgcnnnnnnnnnnnnnnnnnnnnacagtggcagtgtcggtggtgatggtgacggcaacaatcgcggtgttagtggcgatggtgacgacaatggcggtgccggtgacgaaaagataattacaaatatatattgatctaagaaaactaaaccctaagatactatacatagaacccaaacaaaaatcattaaacaaaatgaaatcatctcaactttcaattttcaaaaatctaacagcaaaatagaatagtacaatggtgatgatggctccggtgacgatttttcggcgatgtggctccgcatacgaaatacaaagcgacaatggttttaaaggtagtggtggttgtggtggtagtggaagaaaagaagaaagaagagagaagatgttcatgcagaagaaagaagaggagaggatataa

SEQ ID NO: 186226 - DNA, 74 bp, Arabidopsis thaliana landsberg
atgccgcttcctgaacagtacatgaaagtaatcgcctacgatttcggcactcctaaagtggtacactatagcag

SEQ ID NO: 186227 - DNA, 122 bp, Arabidopsis thaliana landsberg
atggtcaaaacacgtaagtcacatttggatgatctattgcttacgcttacgcaggcacatgcccacgccacacgcgtgatcgaaagatctttgtcttctttagttttgtcctcattaactaa

SEQ ID NO: 186228 - DNA, 360 bp, Arabidopsis thaliana landsberg
  unsure (1)..(360): unsure at all n locations
atggacggtttcttattgtacgacggcgtgatcatgatcgccggcacgaaccgttccgacgtgctcgatcccgcattgctgcgcccgggccgtttnnnnnnnnnnnnnnnnnnnnnnnagcccgatctgaaaggccgcgaagagattttgaaagtgcatacgcgcaagactccgctggcgaccgacgtggatctggaaaagctcggccgcggcacgcccggattctcgggcgccgatctcgagaacctggtgaacgaggccgacctgcaggccgcccgtgaaaacaaggcgcgcctcgagatggaagacttcgaaaaggcgaaagacaaagtcatcatgggctccgagcgcaagagcatg

SEQ ID NO: 186229 - DNA, 223 bp, Arabidopsis thaliana landsberg
gacccgacagaaggagaagaaaacgaggaggagacgtgcgagcagcaaaggtgcaatatggaaagtgaatctgatcataaacactgaagagctgttaaagattctgtctgaagatggaagaacaaatgagctaatagagagtgtgagagccgtggccaagggtgaaacatcgagcatcacaagtagttcgtccgagaatttcttgtcggtggtacagacctag

SEQ ID NO: 186230 - DNA, 2310 bp, Arabidopsis thaliana landsberg
gtctacgcacgtggtacctccgtccgggatctgcggagatcgtcctggatattcggcaggtcagttccgagatatcaggtccgcttcgcgaatatctcctcatcagttcctaggttgttattcgcttatctcccttcatcaggtgactgggcttatctggcccaagtgcccattcgcgtatgtgggctcgtcagctgcgtaggtcctctacttgatgggcttggtgggcttttgtgggctaggttggtattttcgcaggtggattcctataggggaatccagctccaacacatatcgaccgtttcaattacataaccggccggttcacttttccaatcttctcttctcttgacgtcttttgttctatttcttctggacgtctttttgtcgaaaacatataattatcgatacttttccaatcttctcttctcttgacgtctttttttctatttcttcttctagacgcttaaattcataaaaatgtccaaagaccagaaaaatactaaaaagtatcgagaactatatgttttcaacaaaaagacgcgataatattatattaagataacttataaaaagttataaaaatgtgacttaacacgtctcatcaagaggttattacagaagaaaagtgaaagtaaagaaaaattaaaacttgttttcttcatagaaaactcgtctaaattttggagaagtaaacttttatgagattatccacaaagctctcaatcatcatcgattgaaagttattaaggtgaatagaaccgaaacatcagatttttgggaattagcaagaagtaacaaatttccgattgaagaacaccgacgagaacgaatttatgtcttggaatctcggacttttatgtacccaaattttaatgaagaattctactcagcgagaagaaattgagagtgaaaacggataggagtatcgagtcttagatttgcatgtcatgaacatcgcctgcaaacaaaagcgaaaggtaaggttgctttaatccttattcccaatcataaaatcatatcatcatgtaatcttatactacacaatcagatctaagcctacatatcatgcgtgaagaagcataacaaaagaaaatgatgatatgtttcgcaaataccaccctcaccttggcctagtgaagaggaaaactcaattctccttctcttttcccttagacaatctttactataaccatgatcataagctctaacttgattctccctcaattaggacctgaatccatgagtcataaaagctcctacaaagcttcagctcaagccgagttcatttgcgtcatcaaacaataaaactcggatatgatttactctatataaatctgtctcgaaaacatacgcagaagtcaaagactaaccgttagaaaccttaatccacggttgaatatgtagccagtagtatcatgaatagactcactaagtttcatctcgatcggacctcacatgaatctcccacgttcttctgaatatgatgcatcataactgatatctaggtttctgcaccttgagatgattctgggcaacctttcaaagtcaaatacggatggagcttaaatctgatggtcaagatgtcagctactctaaattccttgaagcaagatctttccatagacgtcttgatcgtgatctaattccttttggtccatcgggaaaacgcatcgcaaaaccaatagtcacacactgttctggatttatacttagcacagatttggacatcttctacagttacttgcccagaaggaaacactcataacttctttaatataatctcgattctatctctgtcagcggccatggattcttaacattatgattattgtaatgacacctcacgccacacttgattctctctgattcaacgggaatgagtctcccaaaaaccccatcttgaaactgttcttcttccttcttattttccttcttcttctttctttgctttgcctagcttcgatctggatcagtcttcttcacttaatacttctgattagtgttaagaacatgaatcactttcccactgtttctccttcgtggtggtgatgatttatcctccgtcatgtttccgccttcatctccgcttccttctctttttctctttcacgatcttctcaatttttattcttctcctttcttttctttccagatcatgggcagtttggttatagagaaacaaaacacattgatgttggaagaagacatgaacaaagaggtggaacatcaataggttctctcgacgttgataatgcggagattacgacaacgataacaaaggctcacgaactcacgtctcaacaatga

SEQ ID NO: 186231 - DNA, 281 bp, Arabidopsis thaliana landsberg
atgaagttaattgatgaacaagagtcattggcagaagagcaaacccatgagacgctgaataagctaggaagagtacaaacgaaggctgcaaattttacaaacagagctcaagacctgcaaaacgattgcatagaaatcaccgggaccatcaagaagagagcatgtaagatcacttcatacgttcttatacagttagtattgctgtcaacagtagttttgttgctcctgtctcaattgttgccggagccagatactgtacccacatgacttttgatttttga

SEQ ID NO: 186232 - DNA, 435 bp, Arabidopsis thaliana landsberg
gtgatttggagctgtttgcgagcaaattggaagaaacgagccagaaccagaagacatactcgacccccaggtcgagtgactttgggagccattcttcccatccactcgaccaccaggtcgagtaacctcagctcaggccactcgatgacattactcgaccccctggtcgagtatcacttcgccacaccacccgaccacactcgaccattcactctaccacgttactcgaccccctggtcgagctcaccaccatcaccatcactcgaccggacactcgatcacgtcttcacagtctactcaaatccgcactcaaccagacaagctgagcacaaggaagagatgaggagaagacaaagtgtttggaagcggcctggacctccatcggatcacgaagcccatctcggcccattatcactctatgggccgggcgattag

SEQ ID NO: 186233 - DNA, 184 bp, Arabidopsis thaliana landsberg
acgtctagcggatgatttttggtgtttggttgagatgttgaaggctgaaacagaaaagaaaaacaataagcagatgattgaattggccggtttggttcagactacggttaaggacgatgaggagctgaccaattggttggttcggttcaaccgaatgaaaaacattgacgattctgatttctga

SEQ ID NO: 186234 - DNA, 1546 bp, Arabidopsis thaliana landsberg
atggttatgaataatcctgcaaacaacaacccagtagcagcgtcttcagcgtcagccgtagctttacgtccgccgccacatccgccgcagcctcaccgtccttctacttcctgtgatcgtcacccggatgagcgtttcaccggattttgcccttcttgtctctttgaccgtctctctgttctagacatcaccggaaaaaacaacaacgccgtcgcgtcttcttctaagaaaccaccgtcttcttccgccgctcttaaagcaatcttcaaaccctcttcctcctccggttcgttcttcccggaacttcggaggacgaaatcgttttcagcatcaaaggctgaagctttttctctaggtgcgtttgagccacagagaagatcctgtgatgttagggttaggaacactctttggtctctgtttcacgaagacgccgagcataattctcaaaccaaagagggtttatcagtaaattgcagtgagattgatctcgaacgcatcaattcaatagtaaagtctcctgttttcgaggaggaaactgaaattgaaagtgagcaagacaacgagaaagacataaagtttgagactttcaaggaacccagaagtgtaatcgacgaaatcgttgaagaagaagaagaagaggaaacgaagaaagttgaggactttacaatggagtttaatccacagacaacggcgaagaagacgaacagagacttcaaagagattgcagggagtttctggtcagcggcgtcagtattcagcaagaaattgcagaaatggagacaaaagcagaagcttaagaagcatagaaccggaaatctcggagccggatcctctgctttaccggtggagaaggcaatcgggagacaacttagagatactcaatctgaaatcgctgagtatggttacggaaggagatcgtgtgatacagatccaagattctcaattgacgctggaagattctcgcttgatgctggtagggtttcggttgatgaccctcgttactcttttgaggagccacgcgcttcgtgggatggatatttgattggaagagctgctgctccgatgcgaatgccgtcgatgttatctgtagtggaagattctccggttcggaatcatgttcaccggtcagatactcacattccggtggaaaagtcaccacaagtatcagaagctgtgattgatgagattgttcctggtggatctgcacagaccagagagtattacttagactcatcatcttcacgaaggaggaagagccttgaccgttctagctccactaggaagttatcagcctctgtcatggctgaaattgatgaactaaagctgactcaagacagagaggctaaagacttggtttcacattcgaattcactgagagacgattgttgctctgttgagaacaactatgagatgggtgttagagaaaatgtagggactatagaatgcaacaagaagaggacgaagaaatctcgatggagttggaacatattcgggttgcttcatcgaaaaaacgggaacaaatacgaggaagaagaaagaagaagcg

SEQ ID NO: 186235 - DNA, 186 bp, Arabidopsis thaliana landsberg
gccttaacccaatcgtgaagcgcatctggacacccgcctggacgctgttcagcggcggttgcgcgtttttgctcctttctgcattctattttttagtggatgtgaaagatttgaaagcctggttcctcccactgatcgtgatcggcaccaattcgattgctgcttatgtgatcgccgatggattgg

SEQ ID NO: 186236 - DNA, 124 bp, Arabidopsis thaliana landsberg
ggcattgaaacttccacttgttaatggaggatttgatttatcacctactttagtctttcgcgtaatcagagcactaatcagtattctttccaaaattaatctgtatgacaaattgctgacgtga

SEQ ID NO: 186237 - DNA, 1143 bp, Arabidopsis thaliana landsberg
gaggtatcggagcaacccgttgttgagccggagttgagagccttgtgtgagaagattgacggaattggtttgattaagtatttgattaggatatgggatgatgaaactcctctcaatcaggaagtttctgcagcgattcgttactctccggatccggcgtccatggtgcttgacgcgattgaaggttcgaactacacaccgtcatcatcgggaagatcattcgatgtaaggagagttttcgttttgttaatggaagttttgattgagatcaatgcgaatatcactgttgatacgagaaatagagctaagaaactggcttaccattggaaatctaaggttggtgtcaagcctttcgaggcgttagtgtttctgcatttggtcgcagcttttgaattaggatcagaatttgacacagaggagctttctgattacgttttcatgatcgctaagtataagcaagcaactttggtttgtaacaagattggtgtagataggaaaagagttgggaaactcatcaagactctcttggattctggtaaaccaattttagcagtcaaattcatgtattagtgtgggatgactgatgaatttgagccaatccctgttttgaaatcttacattaaggactgtagagaagctgctcttagagtttgcgtggaagataactactctctcaagtcgcagaacgaagcctctgataaagaagtcagtgccttgaaaccattgatcaaaatcatcaaagatcagaaccttgaatcagagtttactcaggagaaagttgaggaacgtgtagaagagctggagaaaaataaggcattgaggaaacgcaacacgactaatcctcccaagcaagagccacagcaaaaggggaaaaagcggactagagactgcaatgggtcacaagttccagttccgagtcagcagctactttctagaccagaagctcttcttatgcctgagcatagtcatcatggcttacagttgaacccttatggtcttatgacctcagcattttctggtgttgttgtgaacccattaactgggctctttggttcaggtgcaactcctcaatctctttactatgctcagcaaactggatatgtgttgccgcctcaataccacccgccttattattctcagtag

SEQ ID NO: 186238 - DNA, 71 bp, Arabidopsis thaliana landsberg
tggaaggaaacccttggtggaaggggaaacgtttatgcacgaattgtgggtacgatttgggccatcagaag

SEQ ID NO: 186239 - DNA, 86 bp, Arabidopsis thaliana landsberg
ggcaagcaccttcttccgttaaccgagcatttgacccatctctttatccaatgtctccggagggagcagttagtgcccgtgcctag

SEQ ID NO: 186240 - DNA, 193 bp, Arabidopsis thaliana landsberg
tatcagtattgaaaaaagctaaacgtacggatcgtttaagaattcgagcaaaactttttggtatgtttaattatcgaccaccatataaccgtttattataaaattcaaaaaccttaatgtcacaacagaagaaaataaaaagctctcatgtgggagcaaattccgacctaccggattcgaaccagtgacctaa

SEQ ID NO: 186241 - DNA, 52 bp, Arabidopsis thaliana landsberg
ccatttcttgatttaacttcaaatttcaaggcgatgttacgagaatcagacg

SEQ ID NO: 186242 - DNA, 221 bp, Arabidopsis thaliana landsberg
atgcctggttctctattgtcaattgcacgttcccttttccaacaggtactgaaatcgtgataaatttgaatagtatattctgtttcgttgtccattgtgcacttttttattcttgattttaacctttgtagataatatatacgcaccaaaagtcatttgagtcagaaacgtttgtggcaattaagtctgtatttcatgcaattgagaaaaagcagaacaag

SEQ ID NO: 186243 - DNA, 373 bp, Arabidopsis thaliana landsberg
ccacgccaaatatgcggaccatcccagccacgccaaatatcccgaccatcccagccacgccaaacaccccggccaccccagccacgccaaacaccccagccacgccaaacaacccgaccacgccaaccaccccggccactccagccaccccagcaacgccaaacaccccgttaacgccaacaaccccattaacgccaacaacaccgaccaccccattaacgccaacgaccccattaacgccaacgaccccattaacaccaacgactccgaccaccccaacgtctccgacaccccccacacctccaggaactggttctttatcctagagatgccctatagaacggtgtttaagctagtggacctaagagactaa

SEQ ID NO: 186244 - DNA, 1105 bp, Arabidopsis thaliana landsberg
atggtggcttttagattcgtttatatccccttacccttcttcttcttcttcttcttcttcttcttcttcttcgtcttcttctccggagtctctcaattacaaggtaaagaatctctcaattacaaggtaaattctttctcctgccacatgcgacagtttttatttcccgcaaagaagtaaaatagtttaatttcaaaatcttcagaccaaactgcgactaagaaatctgttcgaatcctctcgaagatactcattggcgatgacggcagagtctacgcttgctcagacaacgacttcttctccttcgagtctaacggatcaatcgcttggtcggtacacatgaatttcaaatgtaacaccgattttgccccggtttactctggtttcaaccaggtacattcatgaacaatcactctgtttttgttttttcctctgaatttctgcttaaagtgatatttgttttttcagatgcttcttcttgcagaaaatcgtatcctgagagtcatttttccaagaaacggaaccaaatctgaaccggaattgttcttcgatcctggtgaaacgattctcggtttcgcggtaaagggtatcgagttcttccgtgtacatcacggttaagaatcacggtctctacgcttataatatgtttcggcagcaactctggattgcagagcctaaaatcgaacgattcgggtacctactaggttgtcgaaaagattttgataattgtacattcaattctcgaccagtgattgattcttgcgaaggaagcatctatgtaagagatctctgaccctcttgttattctccattcacgtttcttcaatgatttttgctctgttttaatttcttcagatttcaaacaatgaaggagaactctactcgttatctctccgtggcacttactaccaatggattcaagattttagtctagtggatcgattcttcactgttacaccggggaataacggtctagtctacgtcgtttttcctatcaaatcactcgttttcgcgttagattcgttttccggcgacattctatggcaaaaaaccattggtccattggcagaaacttctgcttcagaccctgtcatagactcaaaca

SEQ ID NO: 186245 - DNA, 54 bp, Arabidopsis thaliana landsberg
ttataaagtttgccaatattggttaaatgatcttgaaactgccaagtccatcta

SEQ ID NO: 186246 - DNA, 181 bp, Arabidopsis thaliana landsberg
gtactttacgatgtcacctaaattcaaagagagaaaagaaccgatgaaaagatatccagagaaaaacgacaatcaggtattgatgatggaacttacgactcaccactctcatacattaaagtttcagtattcgggtcgacgagaaatggaaacctgcagattttcattctcagaagtttaa

SEQ ID NO: 186247 - DNA, 538 bp, Arabidopsis thaliana landsberg
cacgacgccagcccagaaacccagcggaccgaacgtcgtcaccagcccggccaagggcaagcaggccccggttaccttcagcgccgacagcgtggaatacgaccagacgcacaatctggtgaccgccacgggtcatgtcgaagcctggcaggacgggcatgtgctgcgcgccgatcgcatcaccttcgaccgcatcaccggggttgccgcggcacacggacatgtcgtgctacaggaacccgatggcgaggtgatgttcgctgactacgccgagctgggcgagaacatgaaggacggcgtgctgcgcgacatgagcgcgctgctggcccataatgggcggctggccgccaatggcgcacgacgcaccgacgacaagctgaacgagctgagccgcgtcgtctattccacctgcaacatctgcgcccagcatcccgatcgtccgccgctatggcagttgcgcgcgctgtcggcggtgcaagacctcgagcacaagaagatcgagtacaccgacgccccgctggaaatgttcggcatcccg

SEQ ID NO: 186248 - DNA, 198 bp, Arabidopsis thaliana landsberg
gtggctccaaagaagaaagggaggatatatggggctggttcattgcagctagaagcctcatcagctcacattggttcttctgttcctcgagaagattcgattgaactctctcaaaagctggctgccgcagaagctctaattgcaaaccaagcggagaagatcactagctttgatgtgtacttcgactaccttgcctag

SEQ ID NO: 186249 - DNA, 200 bp, Arabidopsis thaliana landsberg
atgctccatcttattatcgaatcctgtatctcgagaaagttgatcgatacatctgcttatttatggactggttatgttgtaccatctgggactttaaaagatacatctttgccccaagaatccccttggttaaactttatgaaagggtctcgactttcaggaccccttattgatgctctggtcgcatctcctgcttcaag

SEQ ID NO: 186250 - DNA, 1038 bp, Arabidopsis thaliana landsberg
atgagactgcttggcaatactacgaatagagaaaccagagacaagtattggtaccttccagagaccgtcgttgaggtaatgcatgttgtcaactcctattcctttgttaatgctctttctgtgaacatacacaagaaaagtttagcgatgcgaaagaaattttatgagcaaacaggggaaacacggccaaaattgatcctggtgcaggtatgtgtatctaagggaagaaggaatatcaataaagtgacaaagatagggttacttggagaggcctggagccaagagactgtattttggctaagatacgaaagtatatcaaagcacatgtttgtattttcaaataaattccagcgaaaaattgacttacatgtcctttgctgacattttggtgaagcctattgctaaggcatgttgctttccttctgcatatatggcctaaacaaatacagattcatggtttaagatcagcatatacaaacaaaaatgcaacccagggaaatactgtttttattcataccactggcctttcagcctcgacttcttgatccagaacgcctcccggggatgtaagaccaggacacattatgtttgcaccagacagaacaaactttatggcacctctatcaacttgaaacctcttcattatatttgggtctgcaaaactccaaacattcagctgccaaatttttgacattcgtggctaattgaaaaaactccaagtttctttctatgtatcattcaagtatgtaaaagttagctgaacgtggtgttttcaagaatattttatactcttctggtaacagccaatgccaaaaccttctcactatgataagggtcagctaacccggaaaacataaaacaaaatatactaaacaaaaatcctggctaaccaatcatacgtggaccttttatatagttcactcgcatgaaaaaagccaaaggaacaacaacttacaggaaccaaaccccaggaagttctaaataactcagagaaaagtgtcggacatactattcaggtatatgcagtatttgaaccag

SEQ ID NO: 186251 - DNA, 444 bp, Arabidopsis thaliana landsberg
aaaattcatcattattcacaggaaatgccagaagatgtggccatatctccatcttcagattttgattacgtcgaagctccggatgaagctccattcgaagaagctaattcacccgcaatggaatatgacagggagcttgctcaccattactcggacaaacaactcaagtttcttgaggcttgctctgaaaagccgagttcaaaatgcggaaatgaggttttcaagaacatgttaaatgagacaatgccaattacggaagaatgttgtcgtgatatattgaagatgggcaaagattgccatctaggattggttaaactcatatttgccacatatgagtataaaaatattgcatctaagggcattccaaagagcaaacaagcatggaatgaatgtgttcgtagaataggtagcaagattggtgctccagtctcttttgaacaataa

SEQ ID NO: 186252 - DNA, 1317 bp, Arabidopsis thaliana landsberg
  unsure (1)..(1317): unsure at all n locations
gtcatattccagatggtggaggaaaaacctaaagatgtcggacatgggatggatgatttaagcattgtttatgtggatgaatcacttcctaggctatatgaaaattctcgaatctcgggtgaacagctacctcagcagtctgggaacgtgagacgtgcagttgctcttggacgctatctccagaatccactagcaatggtggcaactttatgcggtccaggtcgggaaattttgtcttggaagcttcatcccttggagaattttcttcagctagatgagaagtatggaatggttgagcaggttatggttgacattacaaaccaggttggaatcgatattaacttggcagctagccatgattggttcttttctcctttacagttcatttctggacttgggcctcggaaagctgcatccttgcagaggtcgcttgtaagagctggttcaatctttgtccgcaaggacctgataatgcatggacttggtaaaaaggtttttgtaaatgctgccggtttcttgcgcatccgcagaagtgggctggctgctagtagcagtcaatttattgacttattggatgacaccagaatccatccagagtnnnnnnnnnnnnnnnnnnnnntggcgaaagatatatatgatgaggatgtcagaggtgattcaaatgatgatgaggatgcgatagaaatggctattgagcatgtgagagatcggcccagcttctttaagaaaagtttgtccttgatgaatatcttgccagcaagaaacgggagaataagaaggaaacttattagcaatatcataagagaattaagttgtggtttccaggattggcggataccatttaaagagccaagtccagatgaagaattttacatgatttcaggtgaaactgaggacaccatagcggagggcagaattgtccaggccagtgttcggagattgcagaatggaagagccatatgtgtattagattctgggttaactgggatgcttatgaaggaagatttctcagatgatgggagagatattgttgacttggcggaccagctgaaagaaggcgatatcctcacatgcaagatcaaatcgattcaaaagcagaggtatcaagtgttccttatttgcaaagaaagtgaaatgagaaacaacagacaccagcataaccagaatgtggatgcatattaccatgaggatagaaacagtctccagcttgtaaaagagaaggctcgaaaggaaaaagagctggtgaggaagcattttaagtctcggatgattgtccatccccgctttcagaatatcacagctgaccaagcaacagag

SEQ ID NO: 186253 - DNA, 1117 bp, Arabidopsis thaliana landsberg
gaattggctatgagttattggtggacgtgctgagatatgtttccccttcccacgttgtgaaaattaacatctctgcttacaacaagaacctaccagctgggttgttctggttagacggtaatgatgatgagacagctcatttgatagagatccaatctgcttaccaagacagatataatcaatcgtaagtcctgtacaatgctagttatcgaataatctcaccaatatgctttgttcgagtagttacaagtttttgtatcctgtttgtacagcattttaatacataaggatgctcgtttgatgagggacatgcgtataatcgcctactttaggcaatgctttaaaggaaaagaagtaaacacgatcaaagaactaacacatgaactcgcttcccatattccttatgaagttccaatatcgagtttaacaatcaaccatctccattgtcaggtaaaaagaaaacagtataaaggtcatatctttctaatccatatgattgatgatgccaataatggggttctcttctttttagatcccaagttctgaagtgtattatagtttgaatgcttccattgttggtttgggcattagcaccgaggtgtttgaggatttgccatcatgcgtaggtcttggtaagtttctatttatccattgcaatcagtgatcgaacatgggtttatgattatgtattgaagttggttttggatgttgaatgtaggaatcgtgaggggtattgacacagagagaggaatattatatgtgatcactccagtaccagaaaacttagttgagaaagttgatcttctattgcaaggctatattcagttacctacttgcctcttagaggtgaaggattacaggtcgccatatttatctgccaacgtcttagcttccacctgatttcttttaagacatttttgctcagttcttcgtttttactatgtgtcagtttatctacaaagtttcatgtttttttatagttcaacttactatgcaaccagggttagatcatcttggagacgcagttagttatgtgtcttgtccacacctactactaatgtcaccatttacaacttataataattttcattttttttcgtaaatagaaatcacatga

SEQ ID NO: 186254 - DNA, 566 bp, Arabidopsis thaliana landsberg
gatgtgaagtggagaggagtccagagccaaaaccaagatggaatccaaagccagagcagattcggatacttgaagcaatctttaactccgggatggtgaatcctccaagagaggagatcaggaggattagggctcagcttcaagaatacggccaagtcggtgatgctaacgtcttctactggttccaaaaccgtaagtcccgtagtaaacacaaactccgcctcctccacaaccactccaaacactctctccctcaaacgcaaccgcagccgcagccgcaaccttcggcttcctcttcctcttcctcctcctcttcctcctccaaatccaccaaaccccgaaaaagcaagaacaagaacaacactaatctctctttgggtggtagtcaaatgatggggatgtttccaccggaaccggcgtttctcttcccggtctccacagtcggagggtttgaaggtatcaccgtctcatcccaattagggtttctctccggtgatatgattgagcaacaaaaaccggctccaacgtgtaccggactcctgctgagtgagatcatgaacggtagt

SEQ ID NO: 186255 - DNA, 134 bp, Arabidopsis thaliana landsberg
tatgcacagccggcaaacgtagacggtcttcagtccaatatgtacgcggcagatttgccggtcctcccaatgtgtttttgaacaccaagaaggtttctttcttcgctatacacataagtgacatagtccaatgg

SEQ ID NO: 186256 - DNA, 307 bp, Arabidopsis thaliana landsberg
tgataatcctactgatcattggatggctaaatcaaagcattacgaagaccggtataaagctacgattggctcattacaagtaactgtagacgaaaatgacaacggctctactgaagcgttcgagaagcaagcctttaagacttccagaatggtgagataatggctaactcaacaagcacgattcagacaagccttactagcttagtagccagtgcaatcggtgtaaatgctgaagcgttacagtctgcggttaatgttgaagctaataaatataatacttctacaaaaggctacgcggttgtccctg

SEQ ID NO: 186257 - DNA, 677 bp, Arabidopsis thaliana landsberg
agcgcatcatggttttggatgggttggagaatgggcaagttccgggtaagccctgactacaagctgattctctctttgtgctgtgtatatatgcagacaactgcattctttgctaaatgttagattatgcaaaataactcaggtcggaggcgaaccagagacctgcaggtcaaaccatactaaggatagatactcttcaccatgcagataaagaaaaaaccgaggcttacatattagacctggtggtgtggctccatcatctcgttacccaagtcagggccactacaggttatggcctaagatctcctgttaagtctccaatcagatcacctaaccagaaaacgatccaactctccagcggttcacacaacccgagtatgggtttgccattgctgactacggaggatcaagagatgcttagagatgtaagcaagcggagaaagacgccaggaataagcaagagccaagagtttgaaacggtggctaaagcacgtctttgtaagcaccataggctaagcaaaagcagtagccactcaccaatgatgggcgagatgatgaagaataagaaggatactttctcaaccagaagaccttctgttcccatcattgattttgacattgatcgcatgaaagctctcgatgtgattgatcgcgtggacaccattcgaagcttgtag

SEQ ID NO: 186258 - DNA, 375 bp, Arabidopsis thaliana landsberg
gcgccggcctcgggcacgaagagcaccgtgctcaagcctcgcgaagcgggcaagggatcggacggttcggtcaccgaaggccagatcaaggtcagcgtgacctggcgcttcgacccctgaggcgccgactcggccgcggccttcctcaggccggtgaccgcagcgcgcggaacccgatcatcgccagtaccacgatggcgatgccaccgaagagatacgccggtccaagcgcgatcacgccggcgaggctcgcttcgccgaaatggttcgggccgaagctcaggccgcgattcggggcgaagttgccgaagagataaaaaatgacgttcgcccagccgtcgcagaaaatcagccaacccagcagcctggcgcgcg

SEQ ID NO: 186259 - DNA, 169 bp, Arabidopsis thaliana landsberg
ggtttcacgaatttcagataaatttgaaaccttttggtgtttttctgacgagcttgatgaagaattcaagcacataacaatgtcagatcttgatctccgagatactgcttcaccgtcagagaaaccaataaaaaccaaattaattaaatcgaaccaaaccataaattaa

SEQ ID NO: 186260 - DNA, 376 bp, Arabidopsis thaliana landsberg
gtgaatcctgatatggttgcaagccttgaacaggctggtctctcttttgctgcaaaagatgaaactggggagcgcatggagattgttgaacttccaagccaccctttcttcatcggtgatcaatttcatcccgagtacaaatcgagacccgggaaagtatctcctctgttcttaggtcagagttcttgtcatgatttcaaataaaacctcaaaactatgatgtaataaagatattcagcaatttaccccaaccccaaatcttgtatatatccaggactaatagcagcatcctgtggtgagctagatgcagtcctgaatccagtttccattcaccaacacaaccaaacaatgttcttgaaaaagaaacaacacatag

SEQ ID NO: 186261 - DNA, 333 bp, Arabidopsis thaliana landsberg
attcgcgccaaattcagacctccgagaagtgatgacgtcgatgtattcttcgtcgtcttctcttgacgagaagttacattttcgacatgatctatagagtttgacgaagttctaagaacgttctcaaggtttctgagatgttctttgttggtttttctcgcagggaaaaccgtgagcggcttcgtcgggatcaaagtcgaggtttgagtattgcaagtgaaacgtctgcgttttgcatggaatatgtcggcgttaggcgtaagtgtctgcatgtgaactattggcgagagagaatgagagatggctcaagttttgataggacaagaacaaaag

SEQ ID NO: 186262 - DNA, 872 bp, Arabidopsis thaliana landsberg
atcaatctacaagaagcaggtctctcgaatcagttctccagccggaaagtgtgcaggatttacctgatttgtcaagtttcaaatgtatactcgatttaaatgaaccttccagtatcgaggaacattcagattatgagcttaatcagttccctactccagcccaaacaaggagtgaaagagcagaacgttcacctggagaagaatgtcaagctggtgagtaatgtttactttatggtacttattattgtttttgtaacattgtcttgatttattgaaagctatcaatgtcttggtgcagagaatggaattgacttgaatatgtctcccctttcacctgaagaagaagtacctatagaatctgagcaaccccgagagtttgtttcagcttcattgcacggaaaacacggatcagaaccgtcaagatcgttagttctagcgctcccatgtttggaaaccatttcactcttccacacacgttgctcacagccaaggaagaaagctaaacgtggagcaaaatatgttaaaaaaaatcctcgcaccaaatcccggaaaggctcaaatcttgactcgaacttcggtgttaatgaagatgcctcatacatccctgaatctgcccataatctggaggaagttagttcaagttcacagcctgagtttaagagaaaatgttgtaaaccacaagtagaaccagacaaggttatgagaaagagttcaagaactaaatcaaagaccagagggagctttcttgttagagaggaagaggaacaagaaaaatctgtagcagcagcagacgctatagttgatatgtcattatcagattcagctagaaagtcaagcatcaaaacctctgattgtatcactcctctgcattg

SEQ ID NO: 186263 - DNA, 94 bp, Arabidopsis thaliana landsberg
ggatgaagaaacttgtgatgactcgggctatgactatggtggagaggaagacgatggcgatcccatgccggatcccagtgagaactcggccgcg

SEQ ID NO: 186264 - DNA, 107 bp, Arabidopsis thaliana landsberg
atgtacgacacgtaaggtgtaatttctcttctaggaggagaaggcatttctacaagaagattggtacaaggcatccacaatctaaaatcatgaaacaagaactttaa

SEQ ID NO: 186265 - DNA, 313 bp, Arabidopsis thaliana landsberg
atgactgctgttctatttctctgcttccttctcatctgtttttccttcaccccttctctacaaaacgttagtgaatcggaaccgctcgtgcggttcaagagctcggtgaatataactaaaggagacttgaattcatggagaacaggaaccgatccttgcaatggcaaatggtttgggatctactgccaaaagggtcaaacagtttcgggcattcacgtcacccggcttggtctctccgggaccatcaacattgaggatttaaaagatctcccaaatctaagaacgatcaggcttgacaacaatcttctctcag

SEQ ID NO: 186266 - DNA, 141 bp, Arabidopsis thaliana landsberg
aaggcaagaattcacaatcaacaagttccagatccagacaaaggaattgatgaccatctcgtttcttggaataggccagaaaatgcctgcacgcaaaaaccatacaatgaaacaatggatgacctcgcaaacctatattga

SEQ ID NO: 186267 - DNA, 279 bp, Arabidopsis thaliana landsberg
atgactgaaaatgagctcaagctcgtgcaatcgattctacttgatctcatgcacccacaaacggtgcatggaaaccaacaatcattggatcaaactgaattgctgagcaacaaggctaaaaagtggattgtggacaatacgcctttttacctgcgtgcccacaaggacttcaaggttgccgcccaaaagatgaaaggttcgctcgaatggcgggaaagggcaatgccagatgatacggtatgtcccaaatgcattgtgaatcctcgagctcatgatatg

SEQ ID NO: 186268 - DNA, 368 bp, Arabidopsis thaliana landsberg
gttcagactatcagacaagggtatctgtctaaacgttcctcaaacttgagaggtgactggaaaagaagattctttatccttgatagccgtgggatgctatactattaccgcaagccatggaattggtcttcagtaagttgcaaaaccaaaaacaattgtgtttttgatccttccttgagaaaacatatatagatcagattggtgatgtactgtatctttactgaatctttgaagctctatgtatcagggaaatggaagtcgctctgttgttcacaggaatatggcttcagaaaacagtcctgggctgctaagtcggtggctgtcttctcattatcatggtggtgtgcacgatgaaaaaccagtggcac

SEQ ID NO: 186269 - DNA, 3638 bp, Arabidopsis thaliana landsberg
atgttaagtttgcctccagtaacaacattcaataaacaaccaaatcctttcgaggtaaaataataattttaaagcgaaatatataaaacttacatctgaaaaattagttccgaccaaaagagttagcacctcttggttttgtacctgcatgctaacatatcaggttgaacaatatgcattaattgaaagtcaatctgaaaaaagaaaagaaatattatataatgggtgtattatcataataactatagaaatagttgtttttttctttttatgttacaacatgtgagatgttacaccttttattaattactaataaaaatacatatattccccatttatgttatacttatatgcagacaaaatggtatttattaccaaaattatgtatcatcagttaacaatatggattattttctatttaagctatgccattgcacccaagccagtgacactgtgacagtgtatcagcataactcacggttaaaaatgggacccacttattctcattaaattcaccaattttaaccattcatggttttttaaccgcggttaaacctgtaaaatcccgtttcaataaattctcacactcttcttcttctttccctggcgctcacttcttttcaagtctctctcttttctctcgagcctcgcgtctgtgtaaagagacaaaacatattctctaaagcggcgacgtttaagaacattcggtcaacgacttacggcggcgttggaatcaaaactccgacaatgacggttttctccggcagacaagtcgttccgatggattacgaagccgaggtatcacaacggcttctagaagccatcctcgacggagatttcaaaacggcatcggattgcgtctccgatccactcgtcgacgttaatttcgtcggcgccgtcagcttaaaaacaaggaggagcgaagtcgtcctccgtgatgagtctcccagcgaagtccgcgtcgagtacgaagaattcaaaaccgatgtaacggcgttattcctcgccgttaatttcggaaacgtagctctcgtgaaggaattactggtaattatttttcttaatccgagtttagccgtttctttaacgttttttgctttaagattttgaaaccgataaacaaaatttgcattgatttaaatctgtgcaattaattatacaattcaacgttatttattaagcaaatcggtttctaataataatgcttttgatttgaacaatatttgtaatttaatttttgtgctttgtttgaaacttttgcgttacgttccattaatggaagacgcaatctatggagaattggtttcctcgtgatttccattttgcgtttgtttttgcgcgtttctgcttagtggtgtgattcgtggtacctttttgtctcttgaattaaagaccccaaatatatgttctgtctgaagcttactttactttttcctctttttcgaaattcaaatttcgaacgaacgctgattattacttctctctgccttttctatgaaagaaattattcctgtaaaattttggtaaatttcaataaaattttcgatctaatgataattaatcagaatgagctaattcagtggcgtttactagcacttgtctatacttagctctagtcattttttgttttttaaaaaacgtggatcggattccgtgagagtttttaaaaattcataatctgttgactaactttaatcttaactggtggagtgttaggatccttccaagctgccaaaaatgttatactaataaattacatcttttagcgagtcaaatttgcatgtcaggcggggattattttccaattttgaagtcagtcacacaactttttcttttgcttgcatcgtcacagatttacttttattgagattctcattagcctttgctagaccatatatgctaatgatggatttgcgattagatttgaaatcaacagcgttagttatattaggctaagatctgggaaaaaaacatgtgcatttggattggtcttcgttgagggatattttgagacacaacagtgccaaaatgtcactattggtttgcagtgataattgaatgatttgatttgattctctcttgttttcctgaaaggaacttatgaatatttagtacgacaagaagtgttgatataacaccatgtaacttgtttgtgaaacagaacctgaggccccgccccattaggtgttgtcacttgtcattggctgcatctatagtagacgaatactatatttgcatacttccatctttccttttaagccatgctcctctgtgtcagggttgttccctaatgttcatgtagatccattttcaattattcactttgcattattgtacaactttactattatacacagtttcttttgtcttcttctgcctctggattttcacctcacgtggtgtccttcgcacttagcagtgtagtagcttaagaaaatattttctaattttataacactgatctgacctttcctgtaatatcatctcacagaacattggagctgatgtgaaccagaagctcttcaggggatttgcaacaactgttgctgtaagggaaggtcatttcgatgtctttgagattctactcaaagctggtgcttctcagcccgcttgtgaagaagctctagtaggggcgagctgtcacggacgctcgaggttcgttgagctgcttatgggaactgatcttattcggcctcaggttgctgtgcatgctctcgccactgcttgttgcaggggttttgtggacgtcgtagggaccttgctcaaagtaagttcttcatttcttgtggttttaaaagtgaccggttagaattgttcaatagccatcttacagtagataattcttcatgtttttgcttcattacagtgtggtgtagatgctaattcaaccgataggcttcttcttcaatcttcgaaaccttctctttacacaaatgtagactgtacagctcttgttgctgccattgtcaataggcaagtctctgctgtccgcgtcctactacaggtaattttggctcatgcaaaattgaaagcttgttccctgcaagtagagagtatgtatctaagacatcaaagcttttctttcaatgatatgcacaggctggcgtcaagacagatatcatggtgaggcttggagcatggtcatgggatactaacactggagaagagtttcgggtgggagctggagtggctgagccctatcctttaacctggtgtgctgtagaatactttgaaactagtggcgacattttgcgtttgttgctcaaactccagtctccaaacgctcttcacaacggtcggactcttctacaccatgctgtcctctgtggcaacaaggcagccgtcagtgtcctccttgactgtggcgccgatccagaagctcctatcaaaacttcacgaggcattgaactcagaccgattcatattgctgcacgtgacggatcagtggagatcatacaacaactcgttggctttggctgcgatataaactcgaagaatgatgtagggaacacagccctgttgatctcaataaaacacaaacatccagagtgcgtcaaggttctcgcccttgatggtgctgatttcggtttagtgaacaagtttggtcattctgctgtttcgatcgctgagtcacacaa

SEQ ID NO: 186270 - DNA, 63 bp, Arabidopsis thaliana landsberg
gtcaacgatctggctttgatcgacttagcagaccttaaggatacacttaccctgatgaagtaa

SEQ ID NO: 186271 - DNA, 717 bp, Arabidopsis thaliana landsberg
atgtcttggaatgagactgaaatagctcttatttcttcatgcaggccccagaagaagaaagctaagacacgcaaggaacagtcaactaataagcaatcaaagatgctttcaccatttccacctaatgttaaaaaggatgatgaggtcatatatggagagattcttaccattttgttttcagcaaccaatctcttttgttaaattctttccatttattttcctcaggttccccaaatatcaaggaggcaggcagaacaagttctcagtaactgtgctagccagattaaaaagtatctgacagaagcagggaaattgtcgagcgtctccttagctaatcccagtgatgtagtggattcaatatgtggaagggcatttgatgctttaaagcaggaagatgttgttgctaatgaaaaagaagtaagctctctcacatatactagtgcactgtatcaaactacctttattgtttgtagataatatacttgcatcatgtgtctcatacagatgaaggtggtttttgagtaccaatggttatgcaagtcgtctagtttcatttgttctcttacggttctaaaaatttgtgtattctgcaggaccgtcaaggcccaagagaagcggcagtaaaggcatgcttctttcttcctgaaaccagcattgaaactctgaaatctgtcatttgtaaaaagaagatgaatgtcatcctcgcttatgttggaa

SEQ ID NO: 186272 - DNA, 142 bp, Arabidopsis thaliana landsberg
gaaaagaaagcaacagtattgttcttattactgttacataatcaccaaaagtaagaaggagtactccaaaattaagttgagatgtcctccttggagaagtggacatcaaagccaagtgatggagttgcaaaacgaccagtaa

SEQ ID NO: 186273 - DNA, 542 bp, Arabidopsis thaliana landsberg
gtcgggacatcttattactatatgggcaatcaggtgccacaaatgtctggtcaccaaacatcaccacctacgtaagcatttctctgtattttcaaacatatccaaaacctgtcttttgcattaaatgtcactcatacttcctattattataactcaggttccagctgggaaagtgcctctcaaggagagaaggtcaatgcacctggtctacaaacatctggtatatgccttcattgacaattacataatgctgaatctttcattatctccatggtttttatgttgaattagttcgaaatgtttcatcagttgagagttttcatctctaaggtgatatatttctgcaggcttatcccgttgccaagaggggttctaaacagacactggtttttaagggtgaggttaacagaaatttagaggccggaacatgctccaaagcaacaacatctgatgagaaccgtaaagaagaacgaagattgactttgtcaggaaagttgtcaccagaagtgaaggtagaggaatcaggaaaacaattgcaatga

SEQ ID NO: 186274 - DNA, 104 bp, Arabidopsis thaliana landsberg
ctgtgtatgttgagaagatgaaggtcgccgaggcgaaattgactatggttgatcaagccagcgaccgctggatgtacttggctcaggctaaagcaaacacctag

SEQ ID NO: 186275 - DNA, 670 bp, Arabidopsis thaliana landsberg
atggcggttttctacatcggtgacgaagctggtttaaacgatccagtcgacgccaagaaaaagaccggcggtggcggtggcggcggaggaggaggagggatgttgcagaagaaagggaagtggaaatcagtgtcgagagctatggtggagaaaggtttctctgtgtcaccacaacaatgtgaagacaagttcaatgatttgaacaagaggtacaagagagttaacgatattcttggtaaaggaatcgcttgtcgtgtcgttgagaatcaaggattgttagagagtatggatcatttgactccgaagttgaaagatgaagtcaagaagttgcttaattctaagcatcttttctttagagagatgtgtgcttatcataatagttgtggtcatcttggtggtcatgaccaacaaccaccgcaacagaatcctatttcgattccgattccgagtcagcagcagaactgttttcacgcggcggaagcagggaaaatggcgagaattgcggagagggtggaggtggaggaggaagtagagtctgatatggcggaggattcggagtcagagatggaggaatcagaggaagaagagacgaggaagaagcggaggatatcgacggcggtgaagaggttgagggaagaagcggcaagtgtagtggaagatgttggaaaga

SEQ ID NO: 186276 - DNA, 347 bp, Arabidopsis thaliana landsberg
ctatcaagtcgaagagcggagcatgcgattccgtcatcggcaatgggcaatcagtgtgcgtctgtgatgagcaggcaggcaggcacgtcaaaatcaaagagtacagcgggcacgcagctacccacggcctagccccaaatgacacccagctggccgcctttttagcagcccaggtgcaatgcatattagagggtatttactggaggagaccaggagagtgagtgcccgatccagttccaactttccagcaccaaccgttgggtctccccgtacgtccccgggaggcggtggcggtggcacgacagcgagtagccacagccgcgcaccggcgacctgggagaccgcag

SEQ ID NO: 186277 - DNA, 381 bp, Arabidopsis thaliana landsberg
gcaaatgttccaaacttctatgtgggaggttctagtaataatgctgcttttgggattgatgatggtagtcatatcaaccctgatatggatctctttagccaaagaagaatgatggacataaatgccttcaactacaaccagaaccagcttcaccctaatcatgcattaccctttggaaacaatgcttatggtattaatgaagggtttgttccagaatacaatgtgaacttcagaccagagtataacccaaaccaaaaccaaatccaaaaccaaaatcaagttcaaatccaaatccaaaaccagagttttaagagagaaaacatctctgaatatgaacatcatcatggttatcctccccagtctagatctgattactattaa

SEQ ID NO: 186278 - DNA, 49 bp, Arabidopsis thaliana landsberg
ttttaatgcaacatcggatggtcgaaaccgtccgcaaaggattacttga

SEQ ID NO: 186279 - DNA, 406 bp, Arabidopsis thaliana landsberg
ccacctcacttccccccttcgcgctcgcccatgcgctcgacccatctgggctggggcacgcggcgacattcactcgtcggcttgggaccccccggtctcgaaacgccgacacccatggacgggtaagagtgcgcgtaagcggcaaggccgaccgagccgagggactcctacgcctccgggatacggatacctcactcatcaccttccgccttcgccataatgaccgcgtcagaaaaggtacgtcgcgtcgttcgatttcgtatccttttcctttttccctctttctccccgtgaaggaaccaggctccgagcctccctactgatcagaggttcgaaggctggcccctcggaagggttcgacagccgcctcagatcacgtgggccctacacccactactggtcagag

SEQ ID NO: 186280 - DNA, 467 bp, Arabidopsis thaliana landsberg
atggactggctgtggatcgccctgctcggcatcttctgcaccggcgtggcacacagcctgttcgtcgccagcctgtcggtgatcaaggcgcgcaccgccgccgtggtgttcggcatggagccggtctatggcatcgccgtggcctgggcggtgttcgccgaaaccccgaccctgcgcatgctgctgggcggcgcactgatcatcttcgccatcgtactgtccagccgcctggccgccgaacaaccgcccaggcagccatcactggccgagggcgcctgattcagcggtcgttgtggcccaggccacgctgcgggtcgatctggtcgcgaacccgctgcttcagtaccttggcctcggggaagccaccatcggccttgcgctcccagacctgcacgccattgcaggtgatgcggaagataccgccggtgccaggctccagtgccacgcggccaaggtcgtcggtaaag

SEQ ID NO: 186281 - DNA, 419 bp, Arabidopsis thaliana landsberg
atgcttgaagagattgacaaaatggtaataataataacatgttttatttaagccactattttttgttggttactcggatgaagaaacctgttgtcttaattctgcaggaagggattgaaatgcaagattcaaatgatattgatgctgaagtagaagagtctgtgatggatatagacagctgtgacaagaacaatcctttatctgtagttgaatacattaatgacatatattgcttctacaagaaaaatgaggtaacttttagtgttctgtttctgtatcattatgatcattctagcttcaagattgaaactttttcaattattttgcagtgtcgtagctgtgtcccgcctaactacatggagaatcaacatgacattaacgagaggatgagaggaatccttattgattggttgattgag

SEQ ID NO: 186282 - DNA, 19 bp, Arabidopsis thaliana landsberg
atgaacgaacaaaacaaag

SEQ ID NO: 186283 - DNA, 406 bp, Arabidopsis thaliana landsberg
attctctctctttgatggaatgatcaacacgacggattttagagcgtctcggcggtcggcatccgggtccggaagctccggtcgtagctctcgtcggctcactgagcaagagcttgagatcgtgaggctgcgtgaggagaaccgtgagcgcgatgagcagttgagggctcaaactgagcagttgagggctcaaagtgagtactatgcctcagtccacgcgcacatacaacagatgattcaagtaagcccattgcattattactgtttattcattgctttacacatccaatgcgtactactaatatgcttggtcaatagttactagctcagcagcagggcattccgtatgtggcccctcgcctccgccgcaatggacgttcgtccctatggccctcctccacttccg

SEQ ID NO: 186284 - DNA, 375 bp, Arabidopsis thaliana landsberg
atgcaattcttggctgctcttggaggtggaagtgggatcgagtatgaaatactaaagactaatcccatcttggaagcatttggaaatgcaaaaacattgagaaacgatcattccagtcgttttgtaagctctccaaactccaaaataccttttgcttactctttttatttttactatgtgtctttctaatcgttctgggtctttatttaactcagaatctgtctccgattttaaatttgacagggtaagttgatagagattcattttagtgaaacagggaatatttcgggtgctcaaattcaaacatgtaagcataaaccttattgctgcttcgcacattcatgttcttctaattttgcagttttactagaaaag

SEQ ID NO: 186285 - DNA, 2216 bp, Arabidopsis thaliana landsberg
ccgcttatagctcgtacgccaccaagaaaacaaggaactcttcaaagaagaaagagcaatgcggcgaaagagattaaaatggttttcgcttctctgtataatcaagggaagaagaagaagaagcttcagaaatcgaagagaaaagagagaatcgaatcttctccgatggtggaagatgtaacggaaccaccgcaataccaatcgttaatcccacctaccgtctccgcctcctcctccaccaccacctccgcctccattgcgatcgtcacaatcagtattctacggattgttcaagaaaggagttaagagcaacaaaaagattcattccgttacgggccgcctccacctccaccgccgagatatacccaatttgatcctcagacaccaccacggagagtgaaatccggaagacctccgcgtccgacgaaaccgaagaatttcaatgaagagaacaacggccaaggatctccgttaatccaaattacgcctccacctccaccaccgcctccgtttagagttccgccgctaaaatatgtcgtgagtggtgatttcgcgaagatacggagtaatcagagctctagatgtagctcccctgaacgggaagtgttcgatatcggttggggtctagaactcacacaatctgatggcggagttgagactaaagctgccgtcagcggcggcggtatgccgggattctgcccaagcccggacgttgatacgaaagccgacaatttcattgccaggcttagagatgagtggaggctcgataagatcaattccgtgaatagaaagaggtaactgggctttttaaggcctattattaggcccattacgaaaacggcgtaggtttcaacctcttatgccctgcaaggctgtgcaatgcacaaggatctcatacgagaaacatcttcaagggaagtcggtaaaaattgttggagatattttatatttgattggcgaaattcgttgtgattttaagcaatgtgcagcaaggactcgagttcaaaagttacgggtaatattggcattattggtatagttattagtggtaaatggtttcaaactggctggttagttttttgggtttaaccggttgagggattttgctttggtgtgttttgattattcggtttgaactttggagtgtcagatgaaaactcaataacttcggtgttgaatgttttatattatggttggtacgcattgatgtatgtacaatgtatggcccattgatatgaaaatatagttgtgggctctgagttttgttgggcctacctcttgtgacctttccctctcccttacaagcaattcttcttcaagttggttgatgattgtcataatgactggttgtcgtatgaagttctaagaataaattcatttgtgtgttgagtgagattcttatagcttactagtaatatgtatatgatatgtcaactgaattcatgttttgcaaggatatcattaccagtaccgaatgatgtgacatatctgatgaggtttgaggtattgaactctcatgattgtcaagtgatggtcttgaagcttataaacgatcctcaaaaaagtgttttgatatttccataattctttagagtagcttgaccttattatataattcaaaactttggccttagataatgagattcaggcagggaggtgacgtgttactcacgcgcgagactgcgcgttcaaatcataaaaagccgacttgctataaaagcaaacttgttgatgatggttcaaaatttcgaaaagcttttcaaatttctcttcatatcgcgcgctcagtcaaaaagcagagccaaagatgaagaaaccgtataaaggaaagttgccgacgggaactccgtctctggcaatgtcaacactcgtcgtcgttgcttcccttctcgccggagcctccgttgtccacaacatctacaaaccagatctcgtaagcttcaccttctctttctgtacatatgttagggttctcaaatgtattaggtttgctcactttcttcgttcttgataatgcccataagcgtgatcggtttaaaaccattcatttcgttctctggctctgtgatctctctttattgtaatgcacataaggtgttcgatgaattgcccatgagagatttgtaatctgattgctttttacttttgtgcagagtttaccaccgttggaaagtagtgaagtggccaagaaggatgattctgtaaacaaagtttga

SEQ ID NO: 186286 - DNA, 162 bp, Arabidopsis thaliana landsberg
tttttctggacaaccttgtttcaccccggcggtatgcgccccctacgagtggtagagcccagatggccagcacatttgagaacttccctgccctgactagcgggctggccttcgagctcatcgagcgcctgagcgtgctgccgggcttgagtgccaagtccg

SEQ ID NO: 186287 - DNA, 277 bp, Arabidopsis thaliana landsberg
attcaccagagacgccggaggaagtgtggtgcaaatgctgacgaggtggaggcggaggcgacggagacggccggtgaggaatgatgtgaccgtcgatacaagaaccacatatactctcagcccatctctccatatcgtaatctccataccctaagatggttttgccggagcaaagccgtccaataacactagcgagaacgcaaagaacggtgacaacgataaagacggcgataaaaggaccaatggtggaatttccagcggaggagacggaggatga

SEQ ID NO: 186288 - DNA, 688 bp, Arabidopsis thaliana landsberg
  unsure (1)..(688): unsure at all n locations
atgtaccccaagactcggcggaagtttgatgaccggcgtgctttgagacggcgtaaggttgacgactgttgttaagtaaatgtaaacaacaaaaatgtgtttgttagaaatgtgagtgattatccatcttggataagtcttgctcaccaagtcacttgctcaccaagtcacttgctcaccaagactcttgctcaccaagacacttgctcaccaagtttctcctctctatatataattgtntgtttcattgtaaaataccaacacaagaagagaagagaagagaagagaagagaatcttacctctcacatatttgctctctctctacgttttctcccacatttgttttttcctaaaaacatataatataataatattactccggatattgtctaaccaaccgatcgtctatttgttcaagcatcttttgaggttatacctcctccttaatcgaatggtaggctatgcctcttcgaaatgccataaatggctcattaattgaatgattatttatctatatagataatcatgtcaaatctagctaagctcgatgtcgttgaccttgatgtatctggcaaaaattatatgacatgggcatctgatgttaagatgcatctaagatcaaatgggcttcttagcaccatagatgcatctgaaacaacatcagatgagagcaaagctaaagccatg

SEQ ID NO: 186289 - DNA, 175 bp, Arabidopsis thaliana landsberg
cccgacggcggagatggcgacagagagagacgactgagaggagagatcaaaggattctcgtttccattgacgacgatgctggaggaagaaaccaatcatcaaagacaaagaagcttctcagattacgaatgaagaagacggagaatttcagacgagtttccaacaacgacgcaag

SEQ ID NO: 186290 - DNA, 73 bp, Arabidopsis thaliana landsberg
aaattgggacttacatccaaatctggaagaacaatcttctaaacactaccaacaaagtcatgagattcgatga

SEQ ID NO: 186291 - DNA, 120 bp, Arabidopsis thaliana landsberg
gtacactttcgaaaagaaaaaattgatgaaaatatgaaagcatgttgtaattactgcaataaaagtttgtacgattacgacttgaatcgcatatcgctaaaactcgctgttcactcttga

SEQ ID NO: 186292 - DNA, 883 bp, Arabidopsis thaliana landsberg
aaacactctagtgctgttgtaccagcccaaaatgacaggagatctgtatttgtaagtaactaagccatcattttttttttgacctttatcttttcttcatttgttacattatctccatcttttcagtatcttcctagtttgtaaatacttgaaacgagtactctactaatgttataaatatatacaggagacaccaacaccttcaaagcacaacatgccaatttcacatagcctgtcagagtcgcgtagatccaaattaaccgcagaaagaaacctggtgcaaattcacttggatttttattgagctatcaattttgtttgactatgatggaagaaccttgttttcctgtagtgatagtaacataatgcgtttttattgttggctaaagtggatatttaattttgacataagctaccattatattgcaggagaactacgaattgctctccaggtgtataaaggaaaatttgggattcaatgatgataagccactggctgcctgtgtaatatacaaatgtcttctgcactggcgtgcctttgaatgtgagagcacagccatatttaacatcattattgagggaatcaatgaagccctgaaggtgatccttttgttgtgacatatagtacccaatctccttttttttaaagggattttgttactactttcttccaaattggattaccttaaataaattgataggaacactttcatgtaataattttcgtctttgctttatatgtttatttcagggcggagatgagaacggtgtattaccatattggctctcaaacgcttcagcacttctatgcctcttgcagagaaatctgcggtcaaatagttttctaaatgcaagtgctcagcgttctgggagggctgcatat

SEQ ID NO: 186293 - DNA, 69 bp, Arabidopsis thaliana landsberg
atgaagaggtttgaggaacttgcagtcaaacgccgagcaaagaaaaagaaagctaaagctgaagcggaa

SEQ ID NO: 186294 - DNA, 72 bp, Arabidopsis thaliana landsberg
gaagagctaaaaagttattctcaaatacaaaaagagcgagtggagaccaacgagctgttggcccagtgttaa

SEQ ID NO: 186295 - DNA, 321 bp, Arabidopsis thaliana landsberg
atggcgtcttcttcacttgcctcgttcccatgcctatcctctttcaaaatgacgattaagcccatagcagctctcaccaattccccaagaacaacgattccatacgaactcaaaaaggggcaaaaccggcttttccacaagctgccctctggtctaaaaatggaggtaatcgagcagagaaaatctaaatccgaaagagagaatccaccattggtgtttgtacatggaagctatcacgcagcttggtgttgggctgaacattggttacctttcttctcttcttctgggtttgattcttatgctgttagtttattaggtcag

SEQ ID NO: 186296 - DNA, 175 bp, Arabidopsis thaliana landsberg
atggagtttgtgattacgttgctcgtacagccttatgagcaaatttctaagtatgagataggttcgtttatcacttctaatggagctttggcgacactttctggtgctaagactaatcgagagataagcatgttgttagagatgagactactgaggatgaactttggtggggaaa

SEQ ID NO: 186297 - DNA, 30 bp, Arabidopsis thaliana landsberg
agtaagcagctgctgtcgaagtgtacatga

SEQ ID NO: 186298 - DNA, 196 bp, Arabidopsis thaliana landsberg
atgaaccgaaccaaatcgaaaatgggttcctgttcggttttggatactactaaatacccgaatgaatttcaatcacactatccactagataaaaataataaccggaccgaaccgaatatctatggatactcgaataatgtttggttgaccttctacaaacctacatctaagtccaatatgttttgtcctaacattt

SEQ ID NO: 186299 - DNA, 136 bp, Arabidopsis thaliana landsberg
cttgtggatcgccgactacaggcacggcatcctgcgcctggactccgcaaccgggtcgatgcaacccatactgggcctccgcgccagcgaatcgttcaagggcgtcaacgacctcaccttcgacgcgcagggctga

SEQ ID NO: 186300 - DNA, 78 bp, Arabidopsis thaliana landsberg
atggttcttcccaatttcatctccgacggaagcaacggcatagaaaaggaggatttgtgcggcgaagataaggatgag

SEQ ID NO: 186301 - DNA, 1433 bp, Arabidopsis thaliana landsberg
tgaaacggttggttagaatccgtgcatccaactttaaagttcttataacctctgcaacacttgacggcgaaaaggtttctgaattcttttcgggctgccctgtgctgaatgtacctggaaaattataccccgtggaaatattatacagcaaagagcgtcctgtcagctatattgagtcatctctgaaagtagctattggtatgttcaagctcgagtgtttctgttgtcaagtcaatttgatttggttaatcttacttgtttcatagttgacagtatgttttctctgttacatgacaaaaaatcttgttgttacttgtagatatacatgttcgtgagccagaaggtgatattttaatcttcatgaccggacaggtctgtatcatctgtttcaattctagccattgaaatctggcagaactatctagattgttgcgtcctgtcttactctattttggttttaacaggatgatattgaaaaattagtatcaaggctagaggaaaaagtacgaagcttagcagaaggatcctgtatggatgctattatttatcctcttcacggttctttgccccctgaaatgcaggtaacaatttctagaatcagactatgagtgtccattccagatttttgcttctgggcaattgagatatctaggtgatgtaaaaggttttggtaatttgcttgactttcaccatttctgcaggttcgtgtctttagtcctcctcctccaaactgccgcagatttattgtttctaccaatattgctgaaacttcccttactgtggacggggttgtgtaagttactcaaaaccttaagtttatagtgttattttttgttttcatgtctggtatctaccgtaagatttactgtacatattgatactttcattacgatagtgttaagtcaggccctgtaaaaaaatgaataaatttatcattcatactaatcatgaagactgcaatcgtgtaattaggtgcagtaatggatttaagcagatatatgataccggcttaatgttgtttgttatattcctcgctcctttaaattcacttcacatttcagtacatgttgttcacaatcacgtctatgagatctacttttggagtttaacttgaaacagacgattgagacatttaattctacatgaataggtcgtactgtctctttgtcaagctatcaaaactgaatgtagtatgggaagattccttattctgtgatgttactgttgccaaaagtcgtctttgtttgtatcatttgttcatgtctgcattttaagcaaagttctgataatgttttgacaatttggagatcgatagcattctcagcctagtctgttttctttgacaggtatgtaattgattccgggtatgtgaagcaaagacaatataacccatcaagtggaatgttttctcttgatgttattcaaattagcaa

SEQ ID NO: 186302 - DNA, 87 bp, Arabidopsis thaliana landsberg
atggttaccgtcgctcgtacggacgatggttcctcggaaatagctaagagccagtctgtccaatgctggcccggccttggtcgagtg

SEQ ID NO: 186303 - DNA, 110 bp, Arabidopsis thaliana landsberg
ctcctgcacagatcaagagaggagctcctcatcgacttccgagatggcctctcgccggacgcgaatggcggcctccacatgttatgggccaacagcacagactgcatcca

SEQ ID NO: 186304 - DNA, 1132 bp, Arabidopsis thaliana landsberg
  unsure (1)..(1132): unsure at all n locations
atgagaggaaggtatttccgggatttgtccgttgtgagggccgacgaaggggagaagacttgtccacaccctgaagagaatgaagtcgtagtgtaccgaagctttttgaaagctggactaagatttcccctgagcagcttcattgtagaggtgctgaaaatattcgaagtctatcttcaccaacttacccctgaggcaatcataaggctgaatatcttcgtgtgggccgtgagaagccaaggtctgaagcctgatgcaaaaagtttctgcaatatacacgaattatcatacgaaacaaaaccttggggtaaggaacagtatcacaataattttggctgctacagtttcgtttctcggtccgggtcaagctgtcccgtgccaacctttcggaagagatggcccggagactggatgacagagtggttttnnnnnnnnnnnnnnnnnnnnatacgagaagatatcaaaggtgtaattatgcgccctatttggcaaagcttcggccttcggaggccgaaggttgaaatgaatgaagctgtcgaagaatgccagagagccttcggcgttatctgttcttttattggaaccagagatttagtacaagagcacattgccttcagggtatggccgctcgcggagaaatgggaaatgcctcaagaaaccataaaggagaccgacgaaggtggacttgtgagactgaaatacaccttcaagtttggagataaatttactgagccagatgacgactggttaaaaagtattgaaaatttaagtgacgaattgcttggtgcttactcgaaggccgaagataccgcgatgtcagcanccttcggaggccgaaaaaagaagaggctgaatagagttttcgatgctattgggtttatgtaccctgattaccgatacccgctgaaagggcaaaagagaaaaagcgcaacttctggaaaaggtgatgctttagctgctctaagtgaggccgcaccaaagaggaaaaaggtgaaggtccttactcaccgaccacgcttcatcaaaccggcctcagtgcccgaatttggtggtgaaacgtctacgactactgaagccaaaggacctgctcttacacagaagaatgaagagccggctatgataccaaaggctg

SEQ ID NO: 186305 - DNA, 114 bp, Arabidopsis thaliana landsberg
gacataatggagaactatgttgcccaaaattatgagaagatatctctagtagatggattatctttggacattgttgctgttgaagacattaacctgaagatgtcagatgagctc

SEQ ID NO: 186306 - DNA, 345 bp, Arabidopsis thaliana landsberg
actcaccggctttttccgccagtgctatgatatgctcaaggatgatggcgccatgtacgttcagctttccggtctccgacaggcgtggcagtacgaagacttcatctggggtttgtatctcaacaagtacattttccgcggcgcggacgcttcgactccactgtggtattacgtcaagtgcttggagcaggccggttttgaggtcaaggggtgagtatcttgtttctcgtcagtggaaaaatactgataggggatagaatcgatactgtgggtgttcactactccggtaccctctggcgctggtaccgtaactgggttggtaacgttgagcgcaatcaaggccaa

SEQ ID NO: 186307 - DNA, 75 bp, Arabidopsis thaliana landsberg
aagatcgtttaccctcgacacgatgaaaatgtatatcggcagaaaagttacaagagatttacacagcttggttag

SEQ ID NO: 186308 - DNA, 51 bp, Arabidopsis thaliana landsberg
catcaagagaatgaaaaaattggagacctgagtgacgtgtcgcgatactga

SEQ ID NO: 186309 - DNA, 74 bp, Arabidopsis thaliana landsberg
atgcgcgatgattggatcctgactgttgtctgtggttgttttggtgttgttgcatgcattaaaaagtacaacag

SEQ ID NO: 186310 - DNA, 816 bp, Arabidopsis thaliana landsberg
aagtctgttcttggaactggatctcctgcagcagtaaagaaaagaaagatagcaagaaatgatgagaaatctcagctggaaacaccaacactaaagagaaaaaagatcaggccaaaggttgtccgtgaaggcaaaacaaaaaaagcatcatctaaagcagggattaaaaaatcctctattgctgctactgctactaaaacttctgaagagagcaattatgttcggccaaaaagattaacgagaagatctatacgattcgactttgaccttcaagaagaagatgaggaattttgtggaatcgatttcacatcagcaggtcacgtagagggttcttcaggtgaagaaaatctaaccgatacaacactgggaatgtttggtcacgtcccaaagggaagaagagggcaaagaagatccaatggctttaaaaaaaccgacaatgattgcctcagctctatgttgtctcttgtcaataccggaccaggaagtttcatggaatcagaagaagatcgtccgagtgattcacaaatttctctgggaagacagagatccatcatggcaaccagaccgcgtaacttccgatcgttaaagaaacttttacaaaggattataccaagcaaacgtgatagaaaaggatgtaagcttcctcgtggacttccgaagcttaccgtcgcatccaagttgcaactaaaagtgtttagaaagaagcggagtcaaagaaaccgtgtagcaagccagttcaatgcaaggatattggacttgcagtggcgacgccaaaatccaacaggtgataaacacacaagcaactttcatctataa

SEQ ID NO: 186311 - DNA, 730 bp, Arabidopsis thaliana landsberg
atgtgcagagctttttgcaatcatggtgatgttgaatcatttactgaggagaagaagcaatcacttttgacaagacggcacaccaaaggttcagattttgtccgtgctgtcaaggagatcacagagagttacgagaagctgaagcagcaggaccaagctagtgggcctaaatctgctgaagaaacaactgctggaagttctgggaacacttcacagctgcctcaggcctgtgaaaatctaattggttcaagacttgacactcaaatagagtcaagttctagtcatggtagagatgagttgactcttctcagcgaagatgcttcagctgctgaacaaatgctagccctgcgtcataacactctagctcataatggtgcctgtgatagtgcagcagctaaagatctatgtgagatagctacatattcctcaaggagaagaaatgaaagggtgcgggctctaaagtatgctccacagagtataatattaccggttgagcactctaaaatctcatcaaggttggaattggatagagttcaaaggtccatgcttcaatgcagtgatggtggtccaagtgtcaatagtataaatggcaaagctataagaaggagaaaaagaatccgtacgtcaggtcaatctgaatcagatgacgtggtttcatcagatctaaatctgcacggatctgatgaggacaacgcatctgaaattgctacagttgaatctaacaataata

SEQ ID NO: 186312 - DNA, 72 bp, Arabidopsis thaliana landsberg
aatattgaggatcggaacctgtttggactttttacgacaattattcgtgcctattcctacttctggctatga

SEQ ID NO: 186313 - DNA, 106 bp, Arabidopsis thaliana landsberg
atgagcgaagcacgggtttattggaggagtatggtaggtgaaagcttgaggaagaaggaagatgaagctgagaccagagaccaagaaccaccactggaagaagaag

SEQ ID NO: 186314 - DNA, 194 bp, Arabidopsis thaliana landsberg
gtgagttttctgtaaaattgcttcgaggtgacaatggttgtcgtttggtcgccaaggcaaccgtagatagagagattgatgaacaaatgttgcaaatgaaccattattcgttgaaaatgatgatcgcatactgtggcgaagcaattcgttcaacaagaatgttttgcaaattgattatgttttggccaaattga

SEQ ID NO: 186315 - DNA, 95 bp, Arabidopsis thaliana landsberg
ctggtcgacctcttttctgggagcccggttcatctgattcagaattgattgcctcttgtaactggagcttgaagctcaaagagccctaccattga

SEQ ID NO: 186316 - DNA, 268 bp, Arabidopsis thaliana landsberg
gcatttccaatgggcagtaccagtcatgtccttgcacgataagattatggacgaatcaaagaaaagagacaaaaagaagaagggttgtggactacttagggagattaatcaaatcgagagaaactcgagaatgttaagtgatttgattgattcggacaatttctcattaacagatgaaaaatgtactttagaggtgaaggagagagttcaagaattgatgaatgtgtgtgaagctataaaggagggtttagatccatttgataggaaa

SEQ ID NO: 186317 - DNA, 348 bp, Arabidopsis thaliana landsberg
atgtatttcaatcctgctgatcccgagttttcaaacgccctcaacatcctgcaatcacccctcactcccgagctcatcgcttcaagcatcgtcggcgcgctcaaatatgtctggcgagattcgtgggggccacgccttgaatatatcctgtttgcagcggtggcctcccttgcccattgccaaaacaccagctttatcggcatcaaccgcttgctcaccgactcacattatcgagattgggtagtgcgccaggtcaaagacccgcttctccagttgttttgggagcgggagtttgggtcgtataactcaaaattcatgatggaaacagtgtctccgatttccaacaag

SEQ ID NO: 186318 - DNA, 164 bp, Arabidopsis thaliana landsberg
ctcggaaatcctcccgttcaacgctagtattcgccgtattgatcatgtccactttcgtgattttgattctttctcgcctttggaattctctcggtgcccagcaacaatgccggctcctccaaagccaatgatctcacttccattgtccgaaaaacacttcagag

SEQ ID NO: 186319 - DNA, 1440 bp, Arabidopsis thaliana landsberg
atgaaagcacatctcagcttagctaggcttaaaggagtgatcgatgatttgacattaacaaaagttgttccgtttactaaaagtgaaggaaagaaggttgaggaaggtgatgatgatggatcagaatcatcacaaacaaaggtagtactagatcttgaaaagatggagaaatcagaacatgctatgaatgtgattatcgttcatgttggtgatgttgttctgagaaagattgatcattgcaagtctgttgcagagatgtgggaaaccttgaacaagctgtatatggaaacatcgttaccaaatcgaatctatgtggagcttaagttttactcatttaagatgaatgacacaatgtcaattaataagaatgtgaatgaattcttgaaaatagttgcaaagctgagcagtcttgagattgtggtaggtgaagaagtttgtgcaatattgttcttgaatgggtttacatcaagatactctcaactaaagcatacactgaagtatgagaataaagctttgtcactacaggatgttatctcctctgctaagacgttggaaagagagctaaatgaatcacttgatcttgaaagaagctcatcaacggccttgtatactactgaaagaggtagaccactagtgataaacaatcaaaacaattagaaaggtggtctaggcagaggtagaagcaggtcaaattctaaaacaagagtaacctgctggttctgcaagaaagaaggtcatgttaagaaagactgttttgctagaaagaagaaaatggaaaatgaaggtcctggagaagcggaaagaacatgtagagaatcaggtagatagaaaggttaagtgttgagaacagataatgggttggacaggtactgcaagacccatggtattgaaagacacaagacatgtgtttacacaccacaacaaaatggtgttgcagagagaatgaacaggacgatcatggagaaagtgagatgtttactaattgagtttggtctggatgagagtttctgggctgaagcagctgcaactgttgcatagatcattaacagatctcctgcctcagccattgatcataacgttcctgaagagttatggctaaacagaaagccaggatacaaacacttgaaaagattttgttcaatcgcatatgttcatcatgaccaaggaaagctaaaaccaagagaattgaaaggagtgttcttaggttaccttgcaggcacaaaaggttataagatttggctacttgatgaaagaaaatgcgtgataattcaaaatgtgatatttcgtgaagacatggtctataaagacttaaacaaagatgtgaatgatgcagtagcaggagactctgaagcatcaacatcaaattttggtgttattacagaattggtcaagaagcgagtcagctctaagcaaggtggagtaactactgatccagtagaa

SEQ ID NO: 186320 - DNA, 2119 bp, Arabidopsis thaliana landsberg
gaaatctatactgcttgcggctgggattgtagctgctggtggaactgctgtttacctgaaatcaagggtcgcttcccggaggcctgattcttcgcgtctttgcaatggtcagagtgatgatgatgaggctttggaaaagctgactgcaactgatcaaaatgcaaagataaccacgaaaaagaagaaaggaggaggattgaagtctcttcaggttctgactgctattcttctctctcagatgggaaaaatgggtgccagggatcttttggcactagtcgccaccgtggtatgcatttcctcttaattaataagtttttacttttgttttatgtttttgcccaagtcagatagattttctgtctggttgtttaagtttgatctcgtgctgttgcaaagtcctgtagatattcatggaaattcacaattgcgaaccgttgctttattgttatggaataccgggtgtctctctttttagctgaaagaaacaccaatctaactttacggccaatagtcgggaaaagtctggttacttttcttacttatgcgggactagtactctttccaatctgttattctataacttgtaggttttcagaacagctttgagcaatagattggcaaaagtgcaaggtttccttttccgtgctgctttcttaaggcgtgcgccactgtttctacggctcatctccgagaatattatgttgtgtttcatgctatcaacattgcactctacttcaaagtacataactggggcattgagtttgcgattcagaaagatattgaccaagattatccattcacactattttgaggtagcaactgccatctcttctgccattcaattgtttactatttctttagatacgagtgtttttgactagtgagagtatcgagtatacttcagactgctggatatctcttcactcagttttaattgttgttttcagaatatggtatattacaaaatatcacacgtggatggtcggattacgcaccctgaacaaagaattgccagcgatgtaccaagattctcctcagagttgagcgatcttatactggatgatttgacggcggttactgatggaattttgtatgcatggcgcctgtgttcatatgctagtccaaaatacatcttctggatactggtgattcatgtttaatcttctatacttcaagattgaccttatgttgggccatttatgctgcttttccttgtatccgttcacagtacaattctttcggtctggtatctataaactaacctatacaattgttgtgtaggcctatgtactgggggctgggacggcgataagaaacttttctccttcttttgggaaattgatgtccaaggaacagcaagttagaaggagagtaccggcaacttcattcacgcttaaggactcattcggaaagcatagcattctatggtggggaaaccagggaagaatctcatatacaacaaaagttcaagaatcttgttagccatatgagtcacgtgcttcatgatcactggtggtttggtatgatccaagattttctgctgaagtatcttggggccacagttgcagttattctgattatcgaaccattcttctctgggcatctaagacctgacgactcaaccttaggaagagctgagatgcttagcaatataagatatcacactagtgtcattatatctctctttcaggcgttgggaacactttctataagttccaggcggctcaaccgactcaggtaatgctttatgttggatctcatgtcagacgcttaaatggtgaatactgtttagctgtttctaattattggaatgttgttgcttccggcagtggttatgctgaccgaatccatgagttgatggctgtctcaagagaactcagtggtgatgataaatcgtctttccagagaaatagaagcagaaattatctaagtgaagctaattatgtagagttttccgatgtcaaggtagttggaatagattcatgttactgtaatcctttccaaaatgtcgtgttcttaatgtttcttaacacactctaggttgttactccaaccggaaatgttttagtggaggatctcacccttcgagttgagcaagggtctaatcttctgattacag

SEQ ID NO: 186321 - DNA, 183 bp, Arabidopsis thaliana landsberg
agccagttaaaaacatagttctagtagggcgtactggaaatggaaaaagcgcaacagggaacaccatcctaggtcagaaaatgttcacttcggaactacaagcaggaggtgttaccatggaatgtgtgatgtatagaactgcaataaaagatggtccgataatcaatgtgattgacactcccg

SEQ ID NO: 186322 - DNA, 145 bp, Arabidopsis thaliana landsberg
atgggtagaggttcaagaagcagagctgtggatggtcaagacgagtattacacgctaatcttaaacttcaaagaagcggttttcggaatggagaaagaaatagagatatcccggctcgagagctgtgggacatgtgaaggttcag

SEQ ID NO: 186323 - DNA, 133 bp, Arabidopsis thaliana landsberg
gctacaagtcaatggtattgcacgcattataagtaacaagaactatacgtctctaaactttcgaccaattactaaaacgaagcttagagaaattcagaatgcatcaacttgttcacatccctctcctttaaac

SEQ ID NO: 186324 - DNA, 531 bp, Arabidopsis thaliana landsberg
atggagaaaattacaaaggaagaaaggagaaacagatgccttccaagttttggaagcatatatcgaagtaagaggacgggtaggaaagaggcagcagcagcaaaaaccaaggtagaggcggctgatctgattattgtaaaaaatgaagataaatctaacgaggaacagaagaagattgaaaaatgttggatgatgagtgaggatggggaaggcggcaagtcaactgtggagtatgatggttcaagcattttaaacacaagtggggtcttgcgtggggatgaagacatcagtgaggaggaacctgaggaagtagcagagatattgatagataaagaggaagatagtgaatttctaataacgatggttttggaccttttggcggaagacaacaagtcgcttcaacacaagtcaaacgctgcgaacaaaaacagtagcttgcttgatgaagaggtaatcacgggggaaggcagcaaggaatgtgatggagttctgtccattgatgaaagcttaaaggtggtggaaaccgagaag

SEQ ID NO: 186325 - DNA, 45 bp, Arabidopsis thaliana landsberg
aactttatcacatccacgagataaaattatcagaaactgagaaaa

SEQ ID NO: 186326 - DNA, 354 bp, Arabidopsis thaliana landsberg
aagattgccttccgctatctcaccgaacgcggcggcaaggtcactcgcgagcatccgttcgaaggcatcctgccgaacctggagcggcgctacaaggaaaccgaatccagtgccgtgcgcgaggagctgtccaagtacatcagcgactcgccctgccccgagtgtgatggccaacgattgaatcgctccgcccgcaacgtgttcgtcgccgaccagacgctgcccagcattacccatcgctccatcgacgatgcgctggcgttcttcggcgagctcacgctcaccggcaggcgcggcgagatcgcggtgaagatcgtcaaggagatccgcgagcggctgaccttcctcaacgac

SEQ ID NO: 186327 - DNA, 1050 bp, Arabidopsis thaliana landsberg
acagatgaacagactccagatttcaggacccaggtgaaaaagaagagacttcttcccttcggcttaagtaatagtcctaacctacagcatatgatccggggaccatgttcacctctttctgggactgaaaataaggatcctgagagcaatgttgtgtctgctaattcaatcccagtgtcttttggagctactccaccaaagagggatgataaccgatgtcgtacaccgtcaagggaaggaacgcctgtatcacgacaagcaaattcagtcgatattaagagaatgaatcgaatgtataagaatgctgccgaagaaaatatacgtaacatcaaatcttatgttactggattgaaagaacgtgtggcgaagcttcaataccagaagcagcttcttgtttgccaggtcagtttacacttgtgacttatgctcattcatttacaaatttgttcatcaggaatcagtaacttaaaagcttgcacatgtataggtgttagaactggaggcaaacgagacaggcgctgcttcggagtacgatgcaaccgatgaatctcggatggactggccattgtgttttgaagagcagagaaagcaaatcataatgttatggcatctgtgccacatttcaatcattcacagaacacaattctacatgttattcaaaggagacccagctgatcaaatctacatggaagttgagctccgcaggctgacatggctcgaacagcacttggctgagcttgggaatgcgagtcctgcattgcttggtgatgaaccagcaagctacgtagcatcaaggtagtacaagagctttccttttcttcaattctatgagttaaaccatttttcacaagcatatatatgtctttggtgtgctgcagtataagagctttgaagcaggaaagagagtatttggcgaaacgggtaaacacaaagctaggagcagaggaaagagagatgctatacctgaaatgggatgtcccgccggtgggaaaacagaggaggcaacagttcatcaacaaactctggacagatcctcacaacatgcaacac

SEQ ID NO: 186328 - DNA, 94 bp, Arabidopsis thaliana landsberg
atggtcaaaaaaatgattcaagattgctgcagtgccagtttattcgggaccaccaacggtattgaacctcatggggatctaagcgctcggcaag

SEQ ID NO: 186329 - DNA, 545 bp, Arabidopsis thaliana landsberg
atctcctccaagcttcgagcttgttgtgaaagttgaaccaaataagctagagaccaataccggtgagactagccgtgacactgaaactgattctaaagagttctctttcgtcaagcctgctccgagtaatgaatcatctcaagaccggtgagactagtcaggattgtgaaggtgtagcctgcgccaagtaaagacttcttttcgagttaagcctgcgccaagtaaagaaccatcgtagtaaagatgtgtcactccagagttttttttttttggtttcatttatctaatgctattgtaaatcaatgccgtggtgataaagtaatgaattgatgaccatattaattaaaataggctgaagaaaatgagggacaaatattaagaatcagttcagtaaaaaggttaaaagactcgtgtaaagctcgaaactatcttccagctggttctcaaatatctgttacaacataaggccactttcttctcctcgtcgattaatagactcgtgtaaagctcgaaatgattaccaccaatgggtaaatctactgtag

SEQ ID NO: 186330 - DNA, 160 bp, Arabidopsis thaliana landsberg
actgcatatgtcaacggattccagtatctgtacaccctactctgggaaacagcctgctcttggtcgtgaattcccctcgggaatatcgacgaacgttcgagaaggaagcaactatgggttgagaatggattatgagtttcctcaaacaatggcgttataa

SEQ ID NO: 186331 - DNA, 494 bp, Arabidopsis thaliana landsberg
  unsure (1)..(494): unsure at all n locations
atgcgagccaggaacggagcttgcgggaagatcttcaagggacgccacccggccgccgaagccgccggaaaccttttcgacccggtcgccaaaggcggccggacctcctcgacccggtcgccacaggcggccggatctcttcattacctccgggtttacccggaaattcaaggcggctagtgtgacccatgtggtcccaaaaggcaagnnnnnnnnnnnnnnnnnnnnnnnnngcaaggccattcgggaagcccgggcggcgccatgaagttggcgcctgctatcgtgacaaagctttaccgggaagcgttggcgtcggcgaccgtcagggcggccatgttgaccagccggcgcaccgtggtgctggccgtcaggatgtggaccggcttggcgcaacccagcagcaccgggccgaccgcgacgtcgccgccggcggccgtcttcagcaggttaaacaagatgttggccgcgtcgatgttgggcagcaccagcag

SEQ ID NO: 186332 - DNA, 801 bp, Arabidopsis thaliana landsberg
tttgtgcttggttacccagatgaatacatcaaatcggtggaagcaacctatcagaagccaaacatttttagcaatacggcaattacgtcacttaagttcttaacatcaaaggggagaacatcattctttgggtataatgtgggtaagaagtttgtgttggagcaaaagggtcataggcttgtcgggttccatggaaaggaagatgcagctattgatgctcttggagcatattttggacctgttcctactcctactcccttgattccatctaagaaactaccagcgataggcggcaacgaaggagttacatgggatgatggtgtctacgacggtgtaaggaagatacttgtaggacaaggtaacgatggtgtatcctttgtcaaatttgagtacagtaagggcaaagaccttgtacccggagatgaccatgggaagaagacattactcggagctgaagaggtcatttaaaaacaacaattttttttttttttccaattcattctagattatttacacttatcctttgttggttttgaatctttgcagtttgtgcttgaagatggtgaatatctcatgaacatagatggctactacgataagatcttcggagttgaggaaccaataattgtatgtcttcagtttaagaccaacaaaagggagtcaatgccgtttggaatggattctggtaagaagttctcgcttggagaggaaggccacaagatcgttggattccatggacaagctagtgatgttgttcacagcatcggagtcactatagtgcccatcaccaccaccgagtga

SEQ ID NO: 186333 - DNA, 89 bp, Arabidopsis thaliana landsberg
aaaatatttgacaacatcctcaatggtaaaatgccctggccagatgttcctggtgaaatgtcttatgaagctcaggatttgattaacag

SEQ ID NO: 186334 - DNA, 169 bp, Arabidopsis thaliana landsberg
atgaatgacaggtcagcggaggcggacttgctagtgtgtttgatggatattcgcactgcgcactcgcccgacccctccgcactcgaactcatcgacgagagcacgatcgtcgtgctcaataaagctgacctcgacaatgataaaaggtcgattcgtttgctgtgttttg

SEQ ID NO: 186335 - DNA, 80 bp, Arabidopsis thaliana landsberg
ggattgacatggttgcttcctgagaagttgcaaatgcaagattcaaagattggacaagaagcaggttttgtgatattaag

SEQ ID NO: 186336 - DNA, 113 bp, Arabidopsis thaliana landsberg
ccctcgccgacgctgccacgtcacgcttcggtgccatagtctatggcgccgagctatgtttcatcgacgccacgacctatgacgtcgagcaaaaagtccaaaacagaaaataa

SEQ ID NO: 186337 - DNA, 168 bp, Arabidopsis thaliana landsberg
atgaatatcaagaacaattttaaagacattcggaccaaaaagattgaattcaacaccaccatactgctaaagatctgcatcaactccaagtccacgaatttattaggtctttttttggccaacaatttattagatcagaagacaatcaaaattattgtaaacttactg

SEQ ID NO: 186338 - DNA, 471 bp, Arabidopsis thaliana landsberg
atgccggtgcagggcaacgaggtgcgcattgaatgccggggcgaccactttcccggccgcgacagcctgttcctgttcggcacggtgctggacgaattcctggccggcacgaccgccatcaacaccttcagcgccctgacgctggtggacatcgtcaacggagagactctggaatggccagcgaagatcggtcgctatcgcctgctgtgacgtccgccggggccgacccgctgctggcgcaagggcatcgctacgcttttttccaggcgttgcggctcttgcgcttgcgcagcgccgacgcgcaggaattctcgcagaacgtgcgcgtgcgccctgccgccacgctgtcgttcccggatcgcgacatcgaagagatccagctcgacgaggccggcaagtaccggatcaccgccaacttcttcggcctgtacggcgttacctcgcccctgccgacgtttataccgaagaccg

SEQ ID NO: 186339 - DNA, 415 bp, Arabidopsis thaliana landsberg
atggtaagttaattacttagttctcttataaaaactgaagtttgtgattgttctcatgctatcagtttaaaattgtaaactatatatgtatgtgtttttacgtagacaatcaagaacggaaaaccaccaagtcgagcagagttatttgttgcgactcgcacaaaatctgatggaagctacgtatctgatgaggctaaaacacgcgcggttagctttattctttttcacattagattttgtcaattaaataacaaacaagaaataataatttttttacttatatccttttgcttcacttttcaggatgcacttacaacgttaatgaaccaacattcgtcaattcaaactacaagtaatgttacagcaagtttagatgatgaatatgcccaggtgtttggtccagaacgtccaggac

SEQ ID NO: 186340 - DNA, 294 bp, Arabidopsis thaliana landsberg
  unsure (1)..(294): unsure at all n locations
atggtggagacacggtcacggcggccaggggtgaaagcgctcctcaagccccgcgatgacggcgacctcgagctgtcgctgctcgacggcaacacgctcaagctgctggcgcagaagcgcagcgacatcgagggcctccacgccgcggcagcagcggcatctgcccagcaggcccgtcgcgccgccgtcctagaccgcgcgcgagcccgcgccagcggncgncaccaccaacaacaaccgcgccagcgcgaccagcagcgggcgcaagaggacgcgcagtacaccttcctcacg

SEQ ID NO: 186341 - DNA, 66 bp, Arabidopsis thaliana landsberg
atggagaaagctgaagaagagattgtgagagctgtatttatggagaagaagtggaacgtgaagcaa

SEQ ID NO: 186342 - DNA, 693 bp, Arabidopsis thaliana landsberg
atgagcgacggtaacatggacgtcgacgaatcaccagtctcttggaaggtaaagtctctggagaaattaatcgatggttcttctttctcttcgactctctcgagactctcatcgtcttctcgcctaattccaacgagtagagattttcacttttactacaatttcgatgagttcaaacgcccaatcgatgagataactggaacctcgcaatcaactcttgcaacgatcggtgattccgagcaagtttgggggaaatcgatgaagtttcctggcgatgttgatgacgtatatgcggaggattggttatgtaacgtgaatgatgaattgattgagagatttgatgtttctgttgatgagtttcagaggattaggaagaaagagaaggaaattggtaggtctgttgttgctgatgatggagatgatgggtttcagatggtttatgggaagaagaagaagcctgttggtaatgtggttactggctcggcagcggttaatggtggtggttctgtgattgatgttaagatggctgagagggataagaattcatctggtaaggctaaagttccttttcatgtaccaactataaagaagcctcaagaggagtataacatattggtgaacaatgcgaatctaccgtttgagcatgtttggttggagaggagcgaggatgatctgcgggctatgcatcctttg

SEQ ID NO: 186343 - DNA, 252 bp, Arabidopsis thaliana landsberg
atggcaaggccagctagcagcaataggcgaatatcaaatcgaagcatgaatggtggatttggaagtggaagtcctataaacagaaagtattcaggaggattcaacaatactaacaataattacacagcacttggtacatctataagaagagaaagcagaaagagtgaggcataaaaaatacctgtctttaggcttaatcgtgatgacacaagttctgttgtgtcactgttttcaggtccattgtctccttga

SEQ ID NO: 186344 - DNA, 61 bp, Arabidopsis thaliana landsberg
atgaatctctctggacagatatattttggcgattctattgacttcgttgacctcgatgtac

SEQ ID NO: 186345 - DNA, 386 bp, Arabidopsis thaliana landsberg
atgaaatggcaaggacttcacaagaaagtcattttcgttacggtcatcactgatctaaacacttgccaccgtacatggtaagatgacattacttctatatatactaagtacttaaaatcagtttaatccacgcgttagcatattaatcctgcatgtttactctcatgacttttcatttaataaaatatagattatatgcaataatgtttaaaattaaccagtgttttcacgcccgacccaaaccgttcggttcgaacggttaatcagcaacccaaaccctttttcggtttaggtttagtactatagccaataattttaaacccagaaaaatccacaaaaaatcgccattaacccgcgacccagtgaaccggttgaactggccgtgt

SEQ ID NO: 186346 - DNA, 139 bp, Arabidopsis thaliana landsberg
atgagaaataaaggtgtaaagtgggaaactttggccaaaccggaccgaaccgaaccaaaccgggctgagtcgggctgcctgttgtcgggacgtcccgtcatcggctcaagggctgtcgggcttgtgggccgtcatgctt

SEQ ID NO: 186347 - DNA, 150 bp, Arabidopsis thaliana landsberg
aaacttcgtgccgaatttttgcccgtgttcaataaccggttcttaaagccagtcccggttaatgtaacgttatacaaatttgatccacatcattcattcggattaaagaggcatggtcgatattggttacgagctttattattattttag

SEQ ID NO: 186348 - DNA, 69 bp, Arabidopsis thaliana landsberg
gctctgagctgtttttagttcatctcattactcactgtgaccccatttcatctgcttacgaccaatttg

SEQ ID NO: 186349 - DNA, 727 bp, Arabidopsis thaliana landsberg
aacgtccatgtttaaattacaatatacttttgttgggagtgaaagggccatcagaagaacgaatggaggcggcttttttcaaacctccactttcaaaacaacgtgttgaatatgcactgaaacatataagagaatcatccgcttctactttggtaagctctatatatcttaatgtcttcctgcttactaggattatgaattcaagactttgttaaaactcatttgtttcagtctctttttgtccttattggtaaatctttgacaagcataagatggcacctctattcttgttacaggttgactttggatgcggatctggaagtttattagactctctacttgactatccaacttcacttcaaaccatcatcggtgttgacatttcgccaaagggtcttgcccgtgctgctaaggtctgcaaaatcacacatcactgttttttattcccgctcgtagacataacttgatgagactaatggatcaaaataattgataaatgtttgatgaagaatgtatttgcaccactcatgattctctgcattttgtgtaattgaaaagaaatggtagatttacttatgcttttgtgtatcttgtgtttcaactttagatgctacatgtaaaactaaacaaggaagcttgcaacgtcaaatctgctacactttatgatggttccatccttgagtttgactccaggctgcatgacgttgacatcggcacttgcttagag

SEQ ID NO: 186350 - DNA, 172 bp, Arabidopsis thaliana landsberg
gtatttgattcgatcagcgaacggtgctgaagatgcgttgcaaagagtagagctttacgtgccgaatgggatggaagaaagtcaagcgatggtggtatttgctaaagcggaaatgttacagagaacttcgaagcatgtacaagttctttgtgcacaactcttgaaaaaatga

SEQ ID NO: 186351 - DNA, 807 bp, Arabidopsis thaliana landsberg
atgtattcttataaaaacggccctagctggttcaccctctgccggaaaccggatcgaacaacaaccagtagtaataaggagcaggaggaggacaggtcaagtggttatgtcttggcaagaatcccaattccccattctcctttgactcagagatatagcctcgcggcggttggttctaatatctataacattggcgaaccagataccaccatttgacctcctctagtgtctgggttctggattgccggtctcacacgtggcgccaggctccaagcttgccggtggagctatttagagtttctgttagcgtccttgatcaaaagatatatgtagcagggttacaccaagaagatggctcggattccttgaagaactcggttacggtgttggacacagaaacacaagtaagtgatcgggtggctatcccatgcagcgtgtcacaaggcaaggagatcttcataagcacaagtgttggcggaaaggtcaacctcgtgactgggagaaaggtggttgattacaatccagtggaaggtagctgggaggaggttggagataccatgtgtgagtttatgttttcaaaatgtttttgcgtggttggtaatgttttgtactcatgtgctattgaccgagtgttcagatggtatgacactgaggtaagaacatggagaaatttggagtgtttgataggaggacgactacccaagttatctccgcgtgcttttgttagtttggctgattatggtggaaagctcgctgttttttggaaccaaggtgtcggcgattggcagatgctttggtgtgcggtga

SEQ ID NO: 186352 - DNA, 206 bp, Arabidopsis thaliana landsberg
agactacagcaaaaggtatcaaggaaaacaatgtagcggagaaaatcaaaagaattaaacctgctctcaaaaagaaagaggaggatcaggttgagattaaaatacctcagggcaatatctcaattactgtttcaggcattgacttggctcctgaagatgctggaaatgtatttcagtttttggagttttgttcagcttttgggaag

SEQ ID NO: 186353 - DNA, 565 bp, Arabidopsis thaliana landsberg
atggagaacgagagacgcagcggcggaggagacagtgttccgatctctgtccgaagcattaacggcgaatcgacgaccgttcaggtttcctctgacgggacaattcgtgacctaaagaaagccctaaaatcctgtttccctcccgcttcctcttcttccaatttccatctgtatatcaaggtaatgcttattattctactacactcgttcgcgattgctttcaagtttcgttttctaaatcagctcttcaaggataaaattagagtttctctctttttgtagggtgagaaattgaaattggacactagagtggctgcgattactattaatgacggtgatatcttgggtttatttccgtttaagaagaaggaacttcgacagactccaaaacctgatttatcaaaaccttcctccttgagttcaagaacctcaactatgaaagatgaaaacgctaaaagagctgaggatcattgtgttggtgagaaacgaaaacgggatgaagaagcgtgtccatatgaattctttaatgatgatttggagtctgagtgtaaagatgcattcaagg

SEQ ID NO: 186354 - DNA, 373 bp, Arabidopsis thaliana landsberg
atgatgatccaatcttcaaataatcatgacaacaacatcggtaagattcaatcttatttatccttcgaactttgacagcaatttgttgattcgattttaatctgtaaagtgaaggaccacctgcaaatttttaagcaatgttagggattttcaacattggtatatatatatgaatgagtccaagagtacttgctttggtaacattgttttaagaacagctacatattgatattaaagcatctaaggtttaacaatttgggtgtgttttgatacagagtttcaaagaaggaagaaaatgaagaagaacaatcctgaaacagaaactgattcttcatcagatctctcttgttttgttgcccaaacaggtgcactg

SEQ ID NO: 186355 - DNA, 135 bp, Arabidopsis thaliana landsberg
gctaaagaatttgatgttgctgaaccaacatgttgtccaggatggcaaaataagtttctacgaattagcaccgatgatgtcaacgggaacggatcggagaaaagcttccaggcagtactcgagggacctgtttaa

SEQ ID NO: 186356 - DNA, 62 bp, Arabidopsis thaliana landsberg
atggccgcatggtccgtcgatcggacggacatcgtcccgtcgatcggcgtgacgaccgattc

SEQ ID NO: 186357 - DNA, 843 bp, Arabidopsis thaliana landsberg
aacagtggaggagattgtgagccgcttggtaaaaaatgtagacttgaggtgggtaacaatgattcaaagccttgtcacaagccattttcgattagctatgatggagatgaaactgtaccaccaccagaagtagggcaaaggaatgaagaaactgatgaaacagcgagcaaagcagggaagcgtatggttctgagaccactttatgaaactgactcatcaggttctcctgttgattttgatggagcaattgacattgttgaaccagcaccagagacaaggcaattatgtgatgatgagcttgatgcgtatggaagctatgcagagaagtcgactaagatcgatgctggcagcaaggaaccaaagtgtttgctccatgaagatgatgccatagctggagaaatgacgaaatcagatagtaagttgtgcagtgaaactgagaaagaaaatgatgatggaaggatcaacgataaggtgctagcttcaaagggagacaaagatgaaacaagcaaaacatataagagtatggttctcagctcatctgataagtcaaacattcacatcactgcaggtggcagaagtcagggacaaaattatttgcttcatgacgatggtttcggaagtgaagaaactaagaaatccagtgagcagttagaggatttagaaaagagaaaccatgattttggtgatggtgaagtcgataatgacaccactgaaaagagatttcaagagctcaaggtgctggaatcatcgatagaggagcgaattcttaaagcagaaagaactgtggcatggctgaaagaaaagagagccatagaacagaaaaaaaagcagcagctcgtttga

SEQ ID NO: 186358 - DNA, 87 bp, Arabidopsis thaliana landsberg
atatgtgaaaaacgacccaaagccaaagttacactcctatgtctaaagaattcgtttgccgaaagtgatccgcttaatatgatctaa

SEQ ID NO: 186359 - DNA, 157 bp, Arabidopsis thaliana landsberg
atgccaggaatcaggatcagcggcgcaaatcgcatcaggaacccctcggcagcaatgactcaggccatcgcctatcaaatgggaatcgggtgccacagttttggagtcctcgacaaggccgtgccgattgagcgttcgcacggtctgaccggggacg

SEQ ID NO: 186360 - DNA, 146 bp, Arabidopsis thaliana landsberg
aattggcccgttactgccccattggcttgtccactggcagcgaccagcaacaggccgaggctttcattcagcgcattcgtgacatgaatgccaagtttggcattccaaccaaacctgtcgacactgaagcaggaagacattcgtga

SEQ ID NO: 186361 - DNA, 216 bp, Arabidopsis thaliana landsberg
atgaaagacgccaaaaacataattaatcagccccaaaaacggcaagagcggttcgctaagtccaccaacgcctactaccggtcccgtataacacggctcacgttagcctccaaccatgatgactacggtggcttggtggcttcatcagccgctttttctctattttatttcacaccgatccaaatatcattattattccacgtgtcgtccacgacg

SEQ ID NO: 186362 - DNA, 1251 bp, Arabidopsis thaliana landsberg
atgaatcctttactgttcaaagaatgcaaggatgcatcacaactgatcatgcaagtttcagtcccggtggtgctagtatcagaattaggttctgatatccttgaaatactacaaagtttggcagcttctggaattgaaggactttgctctggagttaatgcattaatgcctttggaagatattatggggaagacaattcatgaagttgtcgatgccgcaaaatttgagaggttcagatactttccaccatgtttatacgataagcattatatttctactttcgaagtcctaaaaagatattattttcatgttttatttttttgtttcatgacttacagaactggacatgattcttctgacaagagtaaaggtgccgtggttctgaaaccatcaggacagctggatttgtttccttcaaatgaagaatgtgggggctttggatccgatatgtgtcaaggttatgtgcctcttgaagatatcgcttccttagctattgatgttatataccttctctcggtagaaggattaaagattcaatgtagcatgtcataccaagatccaccatcagtcattgcaccaaaaatcatggatcagtctgatgctctagagttgatgagtttttccttaacgttggatgagtggttagggcttgaccatggaatgctagataacaaagatcaaaccagcaagcaaatgaaaaataaaatatcagcgcataatgccaatcaagatcttacattaaggaacaagttgactcttgcttttcaagtgttgcttagagatccattcctaaataatgaacctgttggtgcatctatgcttgctctgattcaagttgaaaggtcgttggattcctcaaattcgtctgtgtgtagtttggctcaagaaggaagaaatacggattcatttggatatgatacacagttgtggagaatcactgaaattggtctagcgggtttgaaaactgagcctggtgtagaccatctgtggtgtacgaaaacacagcaacagtctggatctcgctggttacttgccaatggtactgacaaaaccataaagtgtcaagcttcagagtcaaaggcgatcattgtatcaaatgcgcaagcaactagaaagaggttggacacattgtggagtataatatctgataggcaccatcaagaaggtgatttgagtagctctactgcctctgttccatttacaagaaatttagacgtggtcttttcaaatgaagtaacagaaagatcgtga

SEQ ID NO: 186363 - DNA, 333 bp, Arabidopsis thaliana landsberg
  unsure (1)..(333): unsure at all n locations
atgagactcatcaacggcccacatagccacaatcccgcggcaggtccggtaaacatgacgatctctttcatctgtccccaaatactctgattcgccaaatcatctaccttcacttcttctacttctgcttcnnnnnnnnnnnnnnnnnnnnnnnnnnnnnnnncatctccttggagctccgaaatcgacccatttccggtttctcctttaacaacaagctcctgatttggacttgcacagtttcttaaaaacctgttcagcttcagggacgactttggtccggaaacagaggagctcctgaaactcgggaatggaggattccatgaccgtaaa

SEQ ID NO: 186364 - DNA, 870 bp, Arabidopsis thaliana landsberg
atggcacagcatcagcattctcctcaaaggccaagagatcaggacaacacacggccacatgatcaatacggcatcgttttcagcgtctccggtgatgacgtggcaagaaagcaaggcgatagtttctctcaacctgacccaacggttgcgacgatgggatccgtagacacggttacgattggggaggctttggaggctacagctttgtctcttggagataagcctgtcgaccgtagagacgcagctgcgattcaagccgccgaaactagagccaccggtgagtctaagggtcgacccggtggtcttgcagtagcggctcaggcggctgctactactaatgaacagacggtgtcggaggaagacaaagtgactatagcagatattctcacagtaatgacatttttataattttgctttatttcgataactgcagaaacataaggtagaggagagattattgtgggatattgaaatcaatgtagtgattgtaaatttcatattagcctagatagattagtttaagttccggtccaaaatttcagagtagctagtctaggtacaacagatattgttggaaatgatttgtgactatttctatcgctaacatcgagatggattcaatatgatggagtttttggtttgtttgtttctattagcgtttcattctaaaagtccaataaattggtgcattcggattgttgggttgtgtaggatgcggcggagaggcttcccggagacaaggtggtgacaagtgaagatgcggaggcagtggttggagcggaacttagaagcagttcagagatgaagacaactcctggtggtgtcgcagattccatgtcggcaggggcaaggctcaatcaacaactctag

SEQ ID NO: 186365 - DNA, 435 bp, Arabidopsis thaliana landsberg
gacgtggtcatggggccccgtcccggttcgccgctcttctctccaccaagcacagcgctatgggacaatgccagggcggcaacgccgtcggaagagatggcagcgccggacgagccaaaggaggagggcatcgaactcgagccggccagaaagtcgacctcctcctcgtcatcgtcgtcctcctcctcgtccgcgtcgtcggctgatatcccgtgccacatcgatgtcgtcgagctcgtcaacccgttggcagcggcgctgcccgaggacgaacacggcgcggtggtcaaaacggcccactcggcgacgctggaggacgaacgagccgctcccgccgtacacagcgccgaggccaagccggcggacggcgcgatgacgaaggatgtacaggccgctcccgccgtgcacagcgcggaggccaagccggacgactgg

SEQ ID NO: 186366 - DNA, 101 bp, Arabidopsis thaliana landsberg
gtttatactacataggaagttccgaaaaggccaaaatttgctccttgttgaggtgtgaaccgaacctaaatttatcaactcgaaaaacgaatcgaatttga

SEQ ID NO: 186367 - DNA, 283 bp, Arabidopsis thaliana landsberg
attcttgtgggccaaacaaagctcgtggttgagtttaatagcaagtgcacagatcttaatgggaaaatcaacaatctgcaatctcaaatccctgagccttctcctacctctgcatcaagtcaatgcagtcacactacgcagcggaaagcagctcaacccaattcttcagcgcgaacgttcagctcagacttcatcttttcgagttgtagaaaaagaatcagtgtcgattgatatagctcaaattgccttaagcttactccctcaaataagagatcgtcgttag

SEQ ID NO: 186368 - DNA, 209 bp, Arabidopsis thaliana landsberg
ggcctgttcgtttccttgtcgctggcgacagaaaccggcgacagcgactaaaagctgttcgtttgattgttgctagtcgagcgaccgatcgcagcgactgtcgccagcgaccagcgatcataatttttagtcgctgtttatttcagcgatcggaattgaaaacgcggcgactaaacgatataagtacaataatacccttgtctttttaa

SEQ ID NO: 186369 - DNA, 360 bp, Arabidopsis thaliana landsberg
ttcaccttggtgctcaaccgttggctcaaccactggcgtgcccgctatggatacggctattggtcgctgtcggcgtacctgaagcacaaggtcaagggcgcggtgaacttcatcagcgacttcgaggatgccattgcccacgagtgcacccgccgtggttttcatggcgtggtgtgtgggcatatccatcatgccgagattcgccaggtgggggaggtggagtacctcaattgcggggattgggtggagtcgtgcacggcgctgatcgagcattgggatggcacgatcgagctgtaccggttggccgaggcgcaggcgcgtgaagcgcaggcagcggcggcggtgcgcgacccggcgtag

SEQ ID NO: 186370 - DNA, 43 bp, Arabidopsis thaliana landsberg
atggtgaagaccaaggtggagatcatcaatcttagtatggaac

SEQ ID NO: 186371 - DNA, 159 bp, Arabidopsis thaliana landsberg
ggtcacctagaccgagtgagcttttctcctcaatcaattgggtcacttagaccctacaaggaccaccacaacttggtgtctcttgctttgattacaaaggtgttgagaacaagaaatggggaagaagaaaagcgatccaagcgacaagaactcaaatga

SEQ ID NO: 186372 - DNA, 290 bp, Arabidopsis thaliana landsberg
gtattgccgcggtttagtaaacgtaaagttatacatttcgttcggagtgatacgcgattggcgaacaatggtctttctcttgaccttcaaaggctgagatgccgagtgaatttccaaggactgagattcactccacggattgaggctttgggatcaaagttagttcggattcttcaacaaagagggtcttttgtggctttgcatttgagatatgagatggacatgttggctttctctggttgcactcatggttgtaccgatgaagaagctcaagaactcaaaaagatgag

SEQ ID NO: 186373 - DNA, 1451 bp, Arabidopsis thaliana landsberg
  unsure (1)..(1451): unsure at all n locations
atgggtttttggcctagacgcatacacttgtatgctgtggggtccgggaatattccgtatcgagtggcaatgtttctgtcaggcattttgtcatacgcttaccgtgcttgttccatcgacctactcctcacgtacatcgatatgaggttgttatttgcgtacggatactcggcagcggcgtctacggtgaggaggagagcgtggagctaacgcgccagttttagtgccaaaagttgtacaacggaagaagctacttcgtttcagcttgttcgcagggcggcaattcacattctctctataaagcgaagtttcgaaacgatgcgtttcatttgaactcaccttttaaacgccgtgtttgactttaaagtttaatctaacctgtctctacaaacaatacnnnnnnnnnnnnnnnnnctctcgtcataacaaaaacgctacgttttaataagagtttattgatccccggcgagagtgaactgtcgtcgttgtaaaatggctaccggaaacttggcttctcgtcttcatctcttgatcgatccttgtgttcgccaattccctgtaagtattattcttcagctcttgttctacgtttcgttatgagttattgtaactatgtgtaattgtataaacgcaattggttctcggagtcatgtaggcaagagaagaagtaactttgctgacgaaggaaacggaaaaagatctgcttctttctctatctcaggttcatcattgtcgatgaattgtttgcttcctgtgtgttaatcctcgaagctccggtcctcttaaattggatttttttatttttactttgattaggtgttgagagaaattcaatcttggaggagcgaaatttcatgtgataaggcggtggtgagttcattgctttaagagttcctaatattttaagattgtataagttggttgatgagtattggagctatttgattagctaaaattttcaacaggaatcgggagaggagactgttgttgatcatgatgaaactgctgatgctttatatggtccagactctatagagtatttatgtttagaaagagttgtggctgatcttgtaagtttctcattctgctgttaggtagagttgtctatgatccttagcttgatctggtttctctgtcaggttggtttgttgggtatggagaatgtgcatgttaaacatttggctggcaacattcttgtggatgtatccggttgtcttgttgaatctgtatgttacatctgcctcactcgggattttagaatgttgtattcttccagctctcatactcactcatttgtttttcctagggaagtcaatgggatgagttcattcgtttgctttgtgaatgtttgcggttagcagttatctacagttgcccaattcctgctgtagcttctgaaactggatttggaagtctagatcaatgttttttaggttctgatgttcttaaat

SEQ ID NO: 186374 - DNA, 257 bp, Arabidopsis thaliana landsberg
tgtgttgcaacaatccttagttggttgtcctcctgtggtcattgccggtaagcatagcagcctgagatctgatggaatccacgactgtgccacctctgatttgatcaaaattggagatgatatgacgactatcacaaatgtgatgaccattagtttcacaaatttcatgttttgaagctttgatgatttctttttgcttcaattggttttaaaatttataaatttgagattttggttttctaggttctttacgatga

SEQ ID NO: 186375 - DNA, 167 bp, Arabidopsis thaliana landsberg
atgacgactaaggtaaaaacatgctcatactactacttatacggaaaagaattcgagtttttcgtttcttgaatcattcgattgtgtgcagaaaatcgagatcaaagtggatatcgattgtgagaaatgcaaacatgcaatcatggaagctgtcacagagctagaag

SEQ ID NO: 186376 - DNA, 366 bp, Arabidopsis thaliana landsberg
atgcgcctgccagtcaacaaagaggcctacaaaaacgcgcccgcgggcatacccaatcccttcgaaggccacatcaaggccagcgtccatttcgattcggacctttcccagtcgcgctacaacgttgtcaattccctgtacgacgtcatgatcacctatcgcttcagcgaactgcgcgcagccgtcaaagccatcgacgaggccgaggcggccctgaagggctcgcccaagcccgaggccaagaagctgctcgacgaggccaaggggctggtgtatggcgtgcctatcaccgacaagcaggccagcgacaaagacttcagcgccatcttcaagggcaagcgcaagaaggccacggacaaggtcacg

SEQ ID NO: 186377 - DNA, 331 bp, Arabidopsis thaliana landsberg
atgtcagaaatgtcaccgaagttctcggatgtggaaaaggctgttgaaacgctacaaacaacccatgtatctcttagtcaaaatgttagcactatacaatctcctgtttgttctatgaatacaggaaaccttgttggagtccgacggactatgttcaattcgccaagctcccttgcgcgaaatggagccagcagacaaaaaactcctgatgccgctaacactatagttcatccggaggatggggaaacacaactcgggaacgaagatcaattcgctattcgcagatcagcacgaacaagaaagcctcgactagttcgagaccatgaggaag

SEQ ID NO: 186378 - DNA, 264 bp, Arabidopsis thaliana landsberg
atgaagcaggttacaataagggctagagttgatatgaaaaacaatggtaggagacgtactgatgacaggaaggtccatttcaagaccaatttcaagcaacttaaaaccatccgtgtctggcatctctacatcgcttatgaccagatcaaacatgttgctgttttctctcagcatttccagagctttcctcgactccattgtctttgtcactggcgtaatcaatcaaacatcattgaccatgcaccccaattccgaagcagacag

SEQ ID NO: 186379 - DNA, 136 bp, Arabidopsis thaliana landsberg
gttggccacaaactacctgactttgaaaaatgtatatggaggattcatagcggagcgatttaaaagacaaactcctcaaggaaaactcatcgcggatgtcgggtgtgagccgatacttcacatgaggcacttccaa

SEQ ID NO: 186380 - DNA, 67 bp, Arabidopsis thaliana landsberg
aaagatgagcactcgtccaacggtacaaaattgtccagcaaaaaaaatcaaatccgaaacgggttaa

SEQ ID NO: 186381 - DNA, 85 bp, Arabidopsis thaliana landsberg
atgtgcgttgaaactaatattaacgccaattctggtgaaaaaggaaacagaatcagagcaagacgaattatgatcgaccaaactg

SEQ ID NO: 186382 - DNA, 130 bp, Arabidopsis thaliana landsberg
gcaatcaatttggaaaccaaccactcaggccccaaggtctagtttttgagtcaattacgatatataacgacgattatcttatcccacagcttgttatacagaaatctgtgtatgttaccggagttaaaag

SEQ ID NO: 186383 - DNA, 1329 bp, Arabidopsis thaliana landsberg
gatgcagcagaagcccttcttcatcttatatcttctttgcaagaagagattgtagtttgttatcgccctagccaaagtagtaatctttcggatatacttttctctcgcaacttgagaatgcttgcgcctagtgaaggcctccatggtttgatggagctcaagagatggcataaacatttgcgtggaccatttgatgggattcttggtagtactttaatgtgccgaacttgttcatctcaggtaagggattagatttctcaatctcaccagtaaaaagtggctcttgctatagttaaatactttttccccatgtgatattttttgcttttttccagatttctttggagtttcagttttttcatactctgcctctttctcctttactccatcacggtggttacaacattgtatgttacggaaggttcattctcttgttgctatattgttttgcttttggcaatatgaaacttctccagaaatataagaattctcaatatatttttccttttggaatgctcttagatgtctggatgcactttggagcattgcttgaagaagtttcttaacactgagaaagttgaaaactacttctgctatagatgctggcatggtgctgcactgaaatatttatctgtgataggagcagctgaggtagttaatctctctcagcttttaatgttattgtacttttcctttgtacatgcttcgcgactctatttgacccgtgtgtcctggaaacggtttcaatcagacggaaatcgaaaagctcaggagctgtggcggagaggaccaatgtgactgtaaaacttctcttcatcttcaaagaatgccttggtcaaatagctattcccatatattgaagcagttaatcatcgcccgtttcccaaaggtatttgcttactcattgaaactagacgtgaaagtaaagttgaatccattacaatatcaaaatctcttttcttttgagtcccattttgaccctgtctagctaaattgttacagctcctatgcattcaagtgcaacgcgcttcgtttaacatgtttgaggaattcaaactgtcggtatgagtcttgttatctctctttcctgtctacatttcatgtctcgagttctattccttctaatctcagttcatctgtatagggacatatcgcatttccacttgtcttgaacctctccttgttcacaccatcttcaatagatttacatgttttcaaaaaatttatgttaaaatctattgttacaatgatgagtttgggaaaatcaagtgtgagttatacgttgatgatacgtggagcagcctcagcagctacgagagcaggatctaa

SEQ ID NO: 186384 - DNA, 602 bp, Arabidopsis thaliana landsberg
atggggaagtttcattccaatccaaacatacaaatagaattaaaagacttaacagaactcgaggttggagactcggaagcaaagcaagaggtgatggagttcttggactactggggcttaatcaatttccacccatttccaccaacagatactggttcaacagcctctgatcatgatgatttaggggataaggagtcactgcttaacagtttatatcgatttcaagtagatgaggcttgccctcctcttgttcacaagcctcgtttcacagcacaagctactccatcagggttgtttcctgatccgatggctgctgatgaattgctgaaacaagagggtccagcggtcgaatatcactgcaattcctgttcagctgattgctctcgcaagcgctaccactgcccgaaacaggtgttttatctctaaactgcatttttttgctagtttctctaatcgtttttttgtaacttatatgctaatattcaaattttgacaggcagattttgacttatgcacggaatgctttaacagtggcaagttcagctcagatatgtccccctctccccttatactaatggaacctgctgaggcacctggagaag

SEQ ID NO: 186385 - DNA, 72 bp, Arabidopsis thaliana landsberg
aaagtttgtggggaaacaaaatcaatttccaaacaggtacgtcgaataatcattataaggtttattcgatag

SEQ ID NO: 186386 - DNA, 540 bp, Arabidopsis thaliana landsberg
atgctagttcactggggtaacacaaactctaagcacaaccattcaacaacagcttattttggtgataactgggatgatatatctgatgagaggagaggagatcatccttgctttgacccccgcaaagatctcgtgattccagcctggaaagttcctgacccttactcaatgcgcaaaaattactgggaaaggtatattctctgatagttcttggacattgtttcagtcatgttcgatcgctggaaacaagaagcctgaaagttgttgtcttgttccttattattaggccacgggagaagcggaaaacattgttttacttcaatgggaatctcggacctgcttatgaaaagggaaggcctgaagattcgtaagtcttcaacttaaagactcatgttgatatcatttgggaaagtcgagcttgcttcaaacagcattcctaatggagatgtatataatggtcccataacatctaatgcaggtatagcatgggaatcaggcagaagctagcagaagagtttggttctagccctaacaaaagag

SEQ ID NO: 186387 - DNA, 151 bp, Arabidopsis thaliana landsberg
gggatttcccttatctgactcgcctacaccaactcggaaaaattacaagtcaaatagcatagagagagcgagagagagagagagagagagcatgaaagttacacagaggagactgaatcttggaggaaaacgaggtggcggaaagagatag

SEQ ID NO: 186388 - DNA, 147 bp, Arabidopsis thaliana landsberg
atgaaagccctggctggagcggataaacgcgatattttgcagcacggcttcatgcgttttctgtccgaggcccttaaaggaagccaggcggttttcgttgcaggcatattccagttcgccttcgctttcgatgcccttttctttccg

SEQ ID NO: 186389 - DNA, 49 bp, Arabidopsis thaliana landsberg
gatccgatcaccctgctgtattaccagattggcagggagcgcgtgcaag

SEQ ID NO: 186390 - DNA, 220 bp, Arabidopsis thaliana landsberg
atgagatcatcgaaagacacagaagacaagttggtttacaccaacgttgagagccacttttgtaatgtcttgatatcctccgttgaacaattgcacaccgatcatcgccacgtgagctttccatgcctctctctccaccataccctccattagcggttttcttcttttccggcgattcttattcccggagaaagtaatgaaagccagggtgagagagtgg

SEQ ID NO: 186391 - DNA, 643 bp, Arabidopsis thaliana landsberg
atgaccacaccaccaacttacatttatattacacaatatggtcacatcacaagtttactttctctagcccgttcagaatcctctaaagacttgctttcggatctttcgattcccgatcccagcaagtatcacctttctcatggttgttacttgtcacttattatttctttcttacatttgttttatgtttctatgttgtgtgaaaaaagagttatgcacttgtggtcttatatacgaaaaaccaaggataagggataaggatgtgagaatccaaatatgtcaatttacacattcaatgcctcataaaaagtatatttacggtaaacatatctgacaaaatctaaaaatccccacatactatgtactctttgttaataccatttcagaatttaaaaatgtttgaatggattgttttgacaacttgatgaataaatttaggttatttctttccctctatgtttatcctcaaccttctaacattgtgattggttttcactttcatttcactttcacgtattttctgatacgatatagagaacaatctatgttgcatggaaacggaaacggaaacgcggaaacgaaacatttcggaaatgagaaacgattttttcttaaaattaaggattataaacgttttggaaac

SEQ ID NO: 186392 - DNA, 508 bp, Arabidopsis thaliana landsberg
tagttgctgcttctgcggttaaatgtatccgtagagggaaagagattcatgggcatatcgttcgagctggtttggattcagatgaagtgctttggagttcattgatggatatgtatggaaaatgtggctgtatcgatgaagcaagaaacatatttgataagattgttgagaaagatgttgtctcgtggacatcaatgatagatagatatttcaagtctagtagatggcgggaagggttttctttgttttccgagttggtaggttcttgtgaacggcccaatgaatacacttttgctggagtcttgaatgcttgtgctgatctcacaacagaagagctagggaagcaagttcatggatatatgacaagagttgggtttgatccttactcttttgcatcaagctctcttgtagatatgtacaccaaatgtggaaatattgaaagtgcaaaacacgttgtcgatggatgtcctaaacccgatttagtttcttggacttctttgatcggagg

SEQ ID NO: 186393 - DNA, 819 bp, Arabidopsis thaliana landsberg
gccttcaaccgatttatccacctctctcatctctgagatgagtgatgttgcggttagacggttccttcagtttcctccaacaagatttcacagtcaaatttgggtcaagacctgaaaagtctacttcggcttatcggtcttccatcaaatgaatctcgaatttaccggtgtcaacatgtatttgatgattccaaagcttcatcatcgaagcctcatcaagttggggttgtaagtagatgttttgatttcttaaatctagtaattatcaaaataagtcaagtagttcagagttttttggtggttgtggcatttttcgtcatcaagagcaaaatttagttcttgaaaaagaagtaattgtctttcagatgcttctcaaaagaattatctaaatattaaatattagattttatttgtgtgcctgtaatttgtttatgttattgtacttttggtttgtgttttagcttcagggaattcttgtttccgctggttaaatatctggacacttacatgtgtcctccagatatgtataatacttgtgtttctcttcctagggattgaataaatgttcgattgtgaaaaaaacaaccattgagaaagatttttttaacattttacgatctaaaattaaaggaatttaattttatacataacagtccattaactttacattgtcatattgagtctattgaagacgaaaaatgctctctctttatgtgatcttcttctcgccgtcaggtatttatccggctaaatgtccagcatcttgtgttgttcataacggtgatggtcggctctctttggtttctccaacgacggtga

SEQ ID NO: 186394 - DNA, 387 bp, Arabidopsis thaliana landsberg
atgcccccgtttcccgacccgagctggcgacaccaactgcgcgaccggctggccgagcgctgggcgctgaagctggtcggcatcagcgccgtcaccacggtggtcatgctggtgtacttctggctgctggaccatccgctgcgcacggtgacggtgatgccgcgcacgccgctggacgcgctgatcccgttcacgccgtgggccgtgctgccgtacgccagcctgtggttttacatcggcctggcgccggcgctgctgcacatgcgcggcgagatgcgccgctacacggtggcggcggtgggccttggactggtcgggtttgccctgttcgcgctgtttccgaccgccgtgccgccgaccaacatcgactgggcgcgctggccgctg

SEQ ID NO: 186395 - DNA, 300 bp, Arabidopsis thaliana landsberg
atatctgttcatctgtgggtaaccggtgaagagactatatcgcagcaggcttttctaatcttaaaagacatcagtatggtttttaactcggaatgctttgattcctgcttaatcaacatgtacaaagcctttctacatgactgtgatattccaaaggcaaattcagaacaacgtccgttcctcagagattctcttgttgagctatgctctcaagatgtgcagaagtcttataccaaggcctctgtttctattacacaacttgccaagttattgaagatggctctcgctacaaagaataag

SEQ ID NO: 186396 - DNA, 90 bp, Arabidopsis thaliana landsberg
gagctgaagatggaaattgatagaatggtgaaaaagattgatctccttgaagttcatcaccggttcgcatattactattctttcggttaa

SEQ ID NO: 186397 - DNA, 67 bp, Arabidopsis thaliana landsberg
atgaaaacactcggagccaaagatatgtccaataacgccaatggtttagtgccgaaagcaaagagtc

SEQ ID NO: 186398 - DNA, 800 bp, Arabidopsis thaliana landsberg
atgaaggatgtgaatgacgactatgagactgaagcagacgagtgggtggagcttccagcttctttcaatgaaagagagaaggaccctcgagctaatctcatagcagcaaagcttaggcttaaagaggacgcagaagctgttaacaagttgaattctttacatgtctctgaggtacttttactctcttccactttgtaaaatttgtgatagcatgttgattatcattagagaagtgtttttttataccaaatgtgtttgctaagagaagattgtcttgttgcaggaacttcaggataatctgtccatgtcgacggaaaacgagaaaccttttgtggtgtctgaagataacttgctggggactttcaaggagtcacatgttggctcttcagatgagaatgggctgaaaccgatattgaagaggagagaaaaccaggctgatgattctaagtcgccaaagcgtgttaggtttagttctgatgtcaaagataggaccttgactgaaggtgacaacgattctgtgatggaggcaagttcccctaacgaagataaagtagaggcagtctatccgactgggatttcagattatatgcggaacccatcaaaatacactcgatatacattcgagtcaggtgaggttgatgaagaatccaacaggaaagcatacatggactttctcaacatgattaggagcaaagacgagtcccttgtagaccctctgatggagcttccaagatcagtggctttcgtaccaaagagaaaaccaatggctgagagtaaagtagaaaatatagacaaggatt

SEQ ID NO: 186399 - DNA, 216 bp, Arabidopsis thaliana landsberg
atgaaagaaattgagacgtcaactataatgcgcattttaaaagaaagtaagacaatgattggaacaaatgacttgccaagtaagtgaaagaggacaaagaatgttttgttccaaaacaaatatctgagagacaaacaaacactggagatatcattgagcacaaacacgcattggtttcctttaggtacacgtctaaagtttaacgaaacgtcgtag

SEQ ID NO: 186400 - DNA, 25 bp, Arabidopsis thaliana landsberg
atggcgatgtgtgccatagggcctg

SEQ ID NO: 186401 - DNA, 204 bp, Arabidopsis thaliana landsberg
atgaacgccgccatgggcctggagagggatgtcctgtccttcgtcgacgacggacggccggtcaccttcgccagccacctggaggcctcctccgacaccgaccggatgctcggcgtgggcggtcgtgaggtcgcggtcgacgtgcccgccgccgtcagccgggtgcccatgcgcgccctcgccgcgctggacttccccgacatg

SEQ ID NO: 186402 - DNA, 48 bp, Arabidopsis thaliana landsberg
atgtatccaaaagaaggagactttgtattgggagatgtcatcatctaa

SEQ ID NO: 186403 - DNA, 65 bp, Arabidopsis thaliana landsberg
atggagacgtcggatgatgaagatcgacacaaatcgattccgctttcgccgtcgaagaaaacaaa

SEQ ID NO: 186404 - DNA, 844 bp, Arabidopsis thaliana landsberg
atgaatccaaagatgaagcatctaggcataagtgaagaagaagatgaagaagaccgaggtgtgtctaagcaaatggattgcctccagtaaatgcaacagggccttgtgctgctgaattcctacatccatgtaataagccaaaaagataagctcctccgtagaaacaaaatatcttctcactaaatcattctttgaggataattctcgctatgcgttcaaaaatgtaaccaaaggatcattatcaaacaaacgaacataccactttttggatttttcactcaaaagcatcgcagtaatcatatgcaaataccatcatatcttaaagattacattatcacattttgaaacttacgttgatgcttgccctgccatgtatgctaagccacctgcagcaaaaaaaatcatagaattagataacgtacaaggcctataaggttacaaggataggttcctaatagtcagccagagagagtatcagatatatgtagtgtgcacaaccataaatatttactttctttcatgagaacattttcaactcaaactttgacaagacggaattttttaatagctacactttgaagggggcgaacatcggacttgtgaattgatatttcatgcaacatagtaaggtgataaatttcctgtagggaactaataaaaagaaaggagtatacttcatagcacataattaatatcaccttgtgcgactgctggagcaggtaagtacgagggtacagaatctgcagcgagccacggttgtgatacaccattaaggaaggcttgtggtgtctggatatcgggcagtgccccttgtaacgaactcatgtccaagaactggcattaa

SEQ ID NO: 186405 - DNA, 615 bp, Arabidopsis thaliana landsberg
acattaatgagggctggacaaaatattcgttcgatccgcttcgattcggtattcgatttgatttgattcgaaaaattcgaatatccgtaagattttggaccaaatcaaataggaaaatgtagtattcgtaaaaaccgaagcaaataacaaatagtgtttttaaaataatcgaatatccgcttcgatccgtatctatcgatatatatttaaatatatagttatatctatatatagatatcataaatagttcatgtattgttgctatcttatgtttttatgttaaaatatttatttgatcatttttctctcatgttatatcttgatcaataacattttaaactatcgggttttagtttttggaattagtttgataacattttgttgaccggtgataataacaacggttatgtttggtatttggaacttactttgtaagcatgttagataataactttaaatatattatatggttatatagtttacaaattttcttcaatatttaagtgtatcaaagcggatattcgcaaatatcacaaaaaattccggatattcgaaattccggatatccggaaatttttgaagcaaagcaaatcacaaaatcaagtattcgtttaa

SEQ ID NO: 186406 - DNA, 190 bp, Arabidopsis thaliana landsberg
atgatgttctccggccaaagaattcagggttccgcggccgagtactaccaagcatgtgcgcatgaactgttcagtggaactccgtacttcgaatgcgttaaccacatctgttctatcacgccaaaggataaaataccggtggctgttgatggtactccgctgcacgatcaggatacacaaggagcaagag

SEQ ID NO: 186407 - DNA, 156 bp, Arabidopsis thaliana landsberg
atggttcgatcgggtagttttagcgtcgattcttcggcgactcatcaacggactccgtctcgaacggttacgttgggtcatattcaaccacaggctccgacttatcgtaccgtttattgtaatgatcgagaatctaatcaacccgtccggttcaag

SEQ ID NO: 186408 - DNA, 3055 bp, Arabidopsis thaliana landsberg
gaatctagcgattggaggagtcaacgccatcgtgatcggaactctgatcggaaaaagcgccttattgcacaaaaccgccaacgctagggctccgccggccgatttcgcaagctgtttcgtcttgttatcgctcgtaacggaaccttgctcttccagctttaaatcgaggctagggttagggttttccttgctggagaaccatgggatttggtatttctccaagagcgattcgacatcgacgttgttcttgatcgcgatgtagaatccactaattgagacgccggagaccgagaaatggactccaagcgcgacttttccgtacttcttcacaatctccttgagccgagtcgccatcgaaatcggtgattttcagaatcttccagaagcgaagccgacgcacatgaggaaagaaggtttgttcagcttagggtttatcttcatttaaacccctcttgggcctatttcggtccatttcaaagcccgttagtattcttataaacaataattgtcaacatttgcgcctattaaaaaataaagttgtcacctttttagtagccgaaggattgattcgttatgacgtttatggtcgtgtaaatgttaatttttcttagtagtttggtcttcatatttttcaaagagagttgccaaaattgaccaagtcagtgtcagtggctgctacagttggatagaagcctccatcatcaaatcaattatacaactgacacaaatttaatatttgtcgtgattgtcattttcaggttattaacttgcatgaccacaccatgtcgtttctagcataataatataagagtaattgttggagacctttgtcttctcttgatcttctcagacggcagttcataacaaaactcctaattaagaatttggtagttggatcccaggtacttttttatatgcacatgattctattatacaatggactctggctgatcgaattgtccggtgtacacgcaggtttgcataccgatccggggatggatttcttccattcaagagagaagagacatggcaaaagagcaggtcagttctacttattgttatatgatgatgatgacaaatagaaaacttatttaggttagatggtggctaaactgaactggtgtctacaggattgtttggtcacaaaagtgcgagcaagagcaacccgtcgagccctccttatcttgctgagggtcggtctcagccgacaactcatttcggcatgaaaagatcggaatcagagtacgcgtttcccatctccgatgaacaaaccactcactggaaaccacaacagcaagcctctgaacgcatccccaattcccaccaacggcctccagtctacagatatagcacggtactctcaactccttgtgatgagatttacagtttctttcaattcccatggttttcattctttgttccaaactccagcctgagcgtcctagagagcctgatgaggatgtgactccaaggagcaacggttctgggagcccttttcgatctgccagaacccgcacggtaccaaatcacttctgttctttttttacaatctgctgatttggaaccagtaacaaagttttgtctgtgagtggagtgcagcctgatcgtcgtaagaggtctagcgagataaccaaagagctgtacgagagaatgtatgaggcagatgccaatgtgagcccatttcacccctccagaagcggctctccagctccctacaacaccgtactaatcctactcaatgttgttttacatacttgtcatttagtctctgtcctcgactaaaaaccaaatcttttgaaattgcagcatgaacgtggaagagactacagtagagaaagatatgaagctgagggcaatgtaacttcgcggaacagcgctccttcgagcccatttcatccatcccgaagccgctctccacacgcaagggttagtggattcaatcattcattctctgatgatttaacgcctttgttaatcactcactctctgatatattgactctacttagttgcagactcagagctacaacaacgcaaaagatcatttcgaggggatgtacgaggcagatgccgatatcacaccgcgtaacagccctccaatgagtcctgttcatcaacacacaagctactctccaccaccgccattctactcatccagtgacgacgaagacgacaacaattccacctacctctttccagaaattgccactggacgtcgttccaggggagtctcaggaagcagcacggttcgtttttttctctcgcgggtctctatttaccaaagtgtgaaggaaatgcttaaattcaaattgctttggtttgtgcagccggttcactacaagtatcagatcacatcggtagagacttacgagcaagacaggcaattcgagccgccggagctgccggacgagtcacagaacttcacgatgcaggagatcgccagaatgcgcggacttcaaagctacggaaaggaagagatacaattagcgatatccgagacttacgtctccgtcgccaattacaaggtacggatgagcatcgccgccacgctcgaagcgatcattgacaaacacggtgacatcgccgcctcgtcaaagttacaatctacctcaacgaggtcgttttatctcgaatccctagccgcagcagtaatggaactgaaatcaacggcgttgagagatctgacgaagacgcgggtggcggagatcgcggcggtcgtgaaggacatggattcggtgaaaatcgatgtatcgtggctcaaaacagcggtgacggagctagcggaggcggtggagtactacgggaagtacgacacggcgaagattgtgagggaggagtgcgatagggaaatgacggcggggaaaaaagagatggaggagatgagggaggagctgcggcggagagagaaggaaacgaaggaatgtagagagagagtgacggagttggcgggacggctggggcagctggagatgaaagatgtgagagtgaagaagaatctggagctctttgagagcaaggtccttaaattcgacggcctttctgttctcgttgactga

SEQ ID NO: 186409 - DNA, 469 bp, Arabidopsis thaliana landsberg
atgacgaaggaagaagtagaggaggagcctctaagcccgatggctcggttgttccagtcaccggggatagaaaattgcattatcacgatgattggtttcaaagccaagattaatcctgacatcattctagatgacttgaagcataacgtttccaagcatcctcgtttctgtagtaaattggtaattgccacacatacaaattgtacctagttttatttaggatttaacattttttttgtatgcattgtgtaaaattttgaagtcagatgatggtgagagatggatgaagaccaaagtcaatgtaggagaccatgtatttgtaccagacatagacctacaagagattaacaaagatggagatggcttcgtcgatgactatgtctcgcgtctaacattgagtcctctcgataaatcgaaaccattgtgggatattcatatcctcaatgtcaaaacatctgatgcagaagcg

SEQ ID NO: 186410 - DNA, 303 bp, Arabidopsis thaliana landsberg
atgaacttacctcccacagttctcagaaccaatcttggtaaaggtatgacttccactgcgatcaattgtcagctcttgttatggcctttataacattttagtattaacccaggtcctatgtggaattgctttcttttctagatttgtgcggtcagctagctctgagtgagttggaatcagaaattaaaagtttcagaggggatctagatgatgttcttgtgaagttcaaatcactttctagagaattgcagagtcatcgcgatgctgatgctaaagttagagtagtcctcaaacgaataagag

SEQ ID NO: 186411 - DNA, 686 bp, Arabidopsis thaliana landsberg
atggcagggctccaacttcaaggtccaataccaacctccctcttcagtcttcctgaattgcagactgtgtgagtaaaacaataaatgaaactttgattaagaagtcactcaaagatgtgaaactttgacatgtatactaattgtgatattttttcttgactacttgcagtatcctaaagcgtaactggctaaacgaaacactagacttcggtaccaacaagagccaaaaactagattttgtggatttacaatataatgacataacagagtatattaaacaaccagctaataaaggaagcagcaggatagtaatgtatgtatggtcacatatcaaaatgacttacttcttttctatcagttacttataagagtgttgatatttctacagcttggcaaataatccagtgtgccccgaggtagggaacccaccaaatgaatactgcatagaagtcgaacacaattcctcatattcttcccctaagaacacatgtggtcgttgtagtggtgaggacagggaacccattcccaccacgtgccgttgtgtgtatccaatcacaggaacactcacttttaggtcaccttccttctcagggtattccaacaacgatacattcgagaacctcaggctaaacctaactggcttctttgagaatagaaattatacagtggattctgtggccatatga

SEQ ID NO: 186412 - DNA, 205 bp, Arabidopsis thaliana landsberg
ggctgtccgtgttgcaccattttccaataggttagctcatgcagttcctgcacacattcaagggctcagatgcttagcaaactttgaagcattgagatttgcagaacccatacggcttcttgcagagaaaatggtcgataggatggttacaaagagtgttgagagtgtaggacaatatgtttctgttcatctccgctttgaaatg

SEQ ID NO: 186413 - DNA, 278 bp, Arabidopsis thaliana landsberg
atgaatccaccggttgatttgccttatattccggatgacttacttttgaactgcttagcccgagtcacgagattgtactacccgattctctccttggtttccaagagattccgttctctcgtggcatcgcttgagctttatgagatcagaaagctcttaggacacacggagaagtgtctttatctgaatctacgtttcagttctgaatctgagccgcgttggttcactttatgccgaagaccaactcgaagccctaaccctaatttcaactcaggatg

SEQ ID NO: 186414 - DNA, 443 bp, Arabidopsis thaliana landsberg
atgaccccttccctcttggtgactcagagaccatccattgagcttatggtctttgacttattggtggtacaaaacaagttgaataaaaaaactgagaattgggttttgaatctaatttcatcctaattgagttttggtttggtcctataaatgtccttaaggcttgatggtttcaagagaaggtgtgacataagaagatgagggagatgatcggagacatgattgtgtatttttacgagaagggaaacaaagacaagaaaagaagacaacactcatgactcttttaagaacttgtcctctctttgggactagacaagcttctctttcacccatttctctctctcagcccggtttatgtcggtttggttttagtactagagatgatgatgtgtctctgcaagctggaactgccgacgtgagagtttatagtgaagaagagttgg

SEQ ID NO: 186415 - DNA, 430 bp, Arabidopsis thaliana landsberg
atgagcattagtgatcataagagcaagaaagaagaagaacagtacccaatgatcacaaagcccttgagattgattctcttacaaaagggaagttatgtcttaagctcactcttctttgtattcggtttctcggttggtctcttcctttgtctgcaactaaaagccgtacacatgtctacgacggcgacacaacgacaacccttatggtctaccttattattcaaccacacggtccacaccacagagatggatatcaaacaagagttgcaactacaagtacttcaacacaacatgagtgatcaagaactcttcaccaaggcctcgtcattatcatcaccaacatcatccttatcgtcatcatcatggttagggaggagacataataatgatgggaagatggctgtgaaggtgcctttcatgttcatgacag

SEQ ID NO: 186416 - DNA, 398 bp, Arabidopsis thaliana landsberg
acgacacatacaataaactggatctagctgaatcaacaacaggagcttctccctcgaaagaaggaaaaagatcttcttcttacgagataacaattgggaaacacaagtttgtgtatggagaaagcggaaatgatattcttctgacagatggtgtttgtgaagctcttctaactattgtggataagcgagagagtttatatggatcattgagctcattggaagatgacattgttagggtgaagacttgttgtcttccgagagacaggagactatatcattcgcttgtgttgcgtgtgagtgagaggaagattctaaagaagcttaggagctacatccatacccagaccaatgagtcttccagcggaaagcgccggaagaagatggttccaaaatcctag

SEQ ID NO: 186417 - DNA, 116 bp, Arabidopsis thaliana landsberg
atgcctctaaccgccacgatcaagccgaagaaccaaaaaggttctgagacttgcctccaaaagagactctcgccggtttcaaacacactaccaccgcagctggaggaaaaactaag

SEQ ID NO: 186418 - DNA, 109 bp, Arabidopsis thaliana landsberg
atggaaggcgtcgatgatagcagatggaggcttcaaacgcgcattaatcgactagaggataatgacgcgaaagaagatgtggctttggaggacgtgataagaagacaag

SEQ ID NO: 186419 - DNA, 135 bp, Arabidopsis thaliana landsberg
ctcgacggcaaccgcgaattcggcacgaatgcgcaggagcaactgattggcttcgggttccggagtcggaccgtcctcgatgcgcagatccagcggcgcgtgaatatacccgcgagtcgagtaaaggagcggtga

SEQ ID NO: 186420 - DNA, 432 bp, Arabidopsis thaliana landsberg
atggaagaaccattggatttgggaaatcgagctgggtcgccaaggcaaacaccttgttcaccagtaacacctattgctcaggtctagattgcgagtaataaattacatacacaatctgagatacaaatattttacctagcttgtatgttttgatcccaggttatacccgactcttctattgttgctgtttcacctgcttattttgtgaaagagagaaccaatatacgccagccagtgccgggtaagcgtgttccaatacgttcttgcttcctcgacacaactaagtatagcgtagatcctaggatcagtgctctttttaagagcagaaccaaggaacctgcatacacacctctcccaaagttggatgatggagagttccagacatttaaaaagctgcttgaagatgatccacagaggtttgatccttgttaa

SEQ ID NO: 186421 - DNA, 882 bp, Arabidopsis thaliana landsberg
tgttaagaaacttaaggaagagtttctgcgcaactttaaaagatttgactccgttgaggatttctcagatcatcactatgtttctaaggggaaagcgtcaaagcaggtgatgattaatttatcctcttcgataggggttgttgtttccttaatcgcttttttcatattcaaccgctgtaactttacccgccatctctctttttactcttcagcactcgaagaattgggtgaaaaaggttcaagacgagtggaaaattcttaaccagaatttgccaggtcggtgtatagtctgcagcaacaattttccacattatttgttctttcgtttctctcacattttgttagacagagacaatatatgtcagagcctgcgaatcaagaatggatcttttgagagctgtaattattggagccgaggaactccttaccatgacggtcttttctttttcgatattcagttcccagatacctatccttcagtgccaccagtatgtcctcccagaaacatcctcaaaatgtgttctgtttttaaaccttaatgactctggaagttcatttttctgttggcagaatgtttattaccattccggtgggcttagaatcaacccgaatctatacaactgtggtaaggtatgcttgagtcttctcagtacctggcatggtaacgcgaggcagagctggctcccaaaggagtccacaatgttacaggttcttgtctcaatacaagcacttgtcttgaatgaacaaccatactttaacgaacctggctacggcctgatcaaggggacttggttaggcgagtccaagtctaaagtttacagtgagaacgtatttctattgtcgttaaagactatggtttacagcatgagaaaaccaccccag

SEQ ID NO: 186422 - DNA, 322 bp, Arabidopsis thaliana landsberg
gtgcgcaaacctcgattgtacagagcttgacatactttgagcatctgtcagagcctatggccgaattccttcacattctcgcggagcagtatgattacccgcaactttcagatgagattttaaagtatgtttacttggtttgatttctgtaaggtgaaaatctgactaacatacgactagggagcttggaaacaaggaattcaattcaaatgatacccgtgggcgtaaatctgtttctgcttttatcatcaagttgtccgagcttgcgccgagattgatcatcaagcaaatgactcttctcgccaaacagcttgatagtgag

SEQ ID NO: 186423 - DNA, 1580 bp, Arabidopsis thaliana landsberg
gtactgaaatatgttgaaggtttgtgctgggtttgccggtactactaccaaggtgtatgctcttggcaatggtaagtctgactttacaaaaacttaatgtcatgttattcccatgagagccatgcattctaacaaaaacttggtctcttctcgggaaagaccttgatgttgatgtcacttactgagaaatactaagctgcaaattttaaatgtaattttgtgttttcttacactttcttctaattgtttcaggttttacccataccattatgctccatttgcttcagatcttaagaatctacctgatttagaaatcacattttttattggagagccctttaaaccttttgaccagttaatgggaaccctgccggctgcaaggttcttccctttttttggaaccttaattattaatattgtgggcctctatggtgatgtaaattgtgtttcttggttgttgcagctcaaatgcgctgcctggagaataccggaagttgatgactgatccctcatccccgatacttaaattttaccctgctggtaattgttgatactgaatttgtattgttgttttcctatatattcatgctggatagttgacactcataagctatcattctatttatagattttgagcttgacatgaatggaaagcgcttcgcctggcaggttcatggttgtttgtattctttggatatagtattgatgttatcatgctgagactgtgtattttgttcttcagctgttgatgttgtgtgttttgcgcttgttgttatctagggtattgcaaaacttcctttcattgaggagaaattattgttagctgctacaaggaagcttgaagaaactctaacggtttgaactgaaccttgactcgaaatgcataatgtttgatcaaaactttattctctccaaaggaaactataattctttctgaaagatgattcttggacctgcaggatggtttatttgctagttataaagtagttttatagcttagattgctctagccatcagttttcatggcagtttatgattaactacaatatggatccatctttcaggtggaagaacaacaacgcaacagtgtgatgcttgatttgttatacgtacaccccgctcatccactgggccagcggattctgcagtactatcatttctaccagcacatgccaccacatgaatgtcttccatggatgattgacccgaattctaggtttgtttttattggctaaattgataactaacaagctgtgtgtactctggatatcgagcttgttcttaatcatcaattcgtttgtgtttgttgcagccaaggaatgaacggttttctttggtttagtgaaaggaatggtttccaaactagagtggattcccctgtcaatggtttgccatgcattgagcagaaccgagccttgtgcgtttcttgtacttcacaagttagtgttcatgaaattgatgaagtcttgatttactcacttatattttcctctacattttccagaaatgttacatacctgtgtcctgccaaacactctcatatctcagaaccacccagaggagcgatcattccggacaag

SEQ ID NO: 186424 - DNA, 1541 bp, Arabidopsis thaliana landsberg
ctactaaacaaccattttccggcgtcgagagccacaaaccaaaaacatcaccagctacaaagcaaaagttttccggcgtcgagagtcacaaaccaaaaacgccgccgggaaaacaacgattttccggcgccgagagtcgcaaaccaaaaacaccaccagctactaagcaaaagttttccagcttagagagatcagctctctacgccagaagagaagcagctaatatactccgtaccgttctccgtggtgacgccgagcgacgagccgttgcttccatcaaatcactcgtcttaagtccttccgttcgcaacaaacgcggcactttcgctcttgtctgcgagactctcaaatgtaactaaacttcttcttcttcttcttcgttcctaattttgagcttaaggaactaatttgttgtgtattcagatcttactgtgattaaagatgttcttgatatagctaatgtattgaatagtaaatggaaggtatgtatttgttcatatgaatttgctaaaattgctctgtttcacttatctttaatgcttagtttacttttgtttgtagaggcaagagccattggtcttcatcgtttgctacgatatcctctttggcaaggtagaggttgcgactggttctgttgtttgtttaacagtgtaatagcttgattcaattttctgtgatgaaattaagatgttttggtttactataaggggaatttgcgattgtaggatactccatcaattggtgatgcagagaagtttcttatgcggcataaagatgcgttattgtcaggtttagctacgcttttagtgaggaagaaagtcgaaagtgttgatcagttgttgggttctaagcttactggtattttgttaccctcctttatataatgtgtttcacttacttttggcttttgagtatgtttctgtagcttgatttttaaatttggatgcaggtcatttgaaaccacggtatgttcgtgtaaatacgcttaaaatggatgtggattctgcagtgcaggagctggagaagcattacacggtactttccaagttttatatataaaccttgaagaatacttgtgtgctagatatgttgtttagttctcacaggatgagtgttagaattagttattgtggaagggaggtctagtttaagtcattcaccgggggagttttctccgaatcctcgtatagttagtgatgttaaaatcttggatgtgtacaatatatgtgaactgtgctttctatgatgtcacagtcttctctttgttatgagatttcattttaactcctattttttcactataaaaaacaggtgcagaaggacgagacagttcctgacttgttggtgttgccccctggcagcgatttgcatgctcatcgtttggttgcgaatgggcgtatatttttgcaggtaaattgtgaatgatctttgtgagttctgtttgatattttgttaatttgactgatatgtattctttcaaatgataggggaaagcaagttcaatggtagcagcagcactgcagccacaagcaggatgggag

SEQ ID NO: 186425 - DNA, 631 bp, Arabidopsis thaliana landsberg
gaaaaaatggccttcaatagctctccctgcacgaatcagtccgattctcaccttcgtttactcggtcatgattcgactttgatggtgggacaatcagtgtccctcacattgggtggcgactcacttcttattgtcggtatgtgaacgtacggtagtcgcggtcgtctgctggactaatcaaggcgctttgtagatgagcgcgtcatgcgcaaatcggaccgcacatgttgtggaatggtccccaaacctagtacgtgttgctcgcgactttttgccatttacgaggcgtacacaaaagcgcgtttaagctgactatttccagcgaacaaggtcacacactccatctctctgtataacgtgctcgataccagcgtatcgtcagctggcctgaccattacctacgccgagcccgcaggcaaagatgacatcgccgttaccgctctgcaataccccatcgccgctgaagagaaatcgagggtcgagcaatggatgtcaaaactactagctcttgcatacggcaatgcgcagcgttataagcgacttaaagtcctgatcaacccgtttggcggcaagggacatgcccctaaaatgtatcgaacatacgcggaaactgaaattgcggctgcacact

SEQ ID NO: 186426 - DNA, 1121 bp, Arabidopsis thaliana landsberg
attatttgtcccgtaaaattcttcatggtctttctccacttggtgaacgttttaaaaagctcaaggtggagttcaaagaatttccttatctgtttggaacttcgaattttcattacttaccttttatatattagtaggtgtgactaaaggtctgcattttctcttatgtttgctctacaggaggcagaggctgagttgttcaaaggcataaatggtgacaaagaacagttgtctcagcatgagtatatgagaggaattagtgcttggaactttgatcttgaagcattgagaaggcaggcatcacttgtaattgtaagtaaggtcatatcttagagtaaacgtaaaactagttttttttcgtaccttctcaatgcttcagtgttctgttatcagattccaaatgaagaaatctataattcagagatacaggaactgaacagaaatggagatgtaccaaaaggaaaaccagtgatacaaaggtcacagactatgcctttggaatatttctcagaaaaggcaagtgtttttttttgtcatatgaaggcatatctctgcgtgcctgtcttgacatatcatggtccaacaacttacaggatatggtgagtgagagtagcagtcaattaaccggttcattacttccttcgtttcatcgcaaattcctcccggctcttgggtactcttataacatttctctctctatacaaacctatatctcattagtttgcttacacaagcttgaaataaacatattgaaccagatatcaagttggtatcatttctaatgaaagcaatgcatgtaactcgagcgatagagcagcagagaagctcgcttttgaagagccacgtcaagtactacacccattagcggatacaaagaaaattagaaaagcaggaagtgatcagcaggtagtattggattgctgtgaatataataatgtcatgcggttcttagaatgtgattccttaccgtaatggtactactcacattttcaaacaatgttccttatcaggagaaaccaaaaaatggttacgcagatagtcctgtgaaccgtgaatcttccacattatcaaaggaaccattagcggatacaaagcaagttagaaaaccaggaaatgagcag

SEQ ID NO: 186427 - DNA, 374 bp, Arabidopsis thaliana landsberg
gcgttattgcatcctgagcaagatcgagtgctaaccataagagaatctgcacggcttcaaggtttccctgattacttccagttctgtggaaccattaaagaaaggtacttgcttttgttcatttggaaaaaattataagaaccaggacaatagtttcagactactaagcaaatgcgaatatcatttcacttcttctcactatctacaggtattgtcagattggaaatgcagtggcagtctcggtttctcgtgctttaggttattcgcttggtatggcttttcgtggtctagcccgcgacgagcattttataaaacttccccaaaacttttcgcattcaacttaccctcagcttcaagaaaccattcctcattga

SEQ ID NO: 186428 - DNA, 976 bp, Arabidopsis thaliana landsberg
  unsure (1)..(976): unsure at all n locations
atggattataagatgctaatcgaagatcatagaagaagcagagcggatataaccattgttggactaagctctgttacagaccatgactttggtttcggtttcatggaagttgattccacaaatgctgtcactagattcactatcaagggtcaacaagatttaatctctgtgagttagatatttctagaatgttatgtatgattcagaatcatctgccgactaatgttataatgcaggtggcgaacagaacagcgacaagaagtgatggaacgtcttcttgctctgtcccaagcgcagggatttacgtgatcggtcgagaacagatggtgaagcttctgagagaatgtttaataaaatcgaaagacnnnnnnnnnnnnnnnnnnnnnnnngcgatctctgaaggaatgaaggtaaaggttaagagatagagagacaagaagcagttcataggctatagatttgtctgaaactctgtttttcaggtgaaagctcatatgtttgatggatattgggaagatgtgaggagcattggagcttactatagagctaacatggagagtattaagaggtgtagattggatctcaagtaatgtaaactcttgtgagagataaatggttcgaaataaaataacttgtgattcaagttaacgtttcttttcttgtagttacagattctacgacagacaatgtcctctgtacacaatgcctcggtgtttgcctccaagctccatgagtgtagctgtaataaccaacagtattatcggagacgggtgcattctagatgtaatttgcaaaactctctttcaaatccttgaaaccctagcagccgttgttaatcaaaagcttgaagaatttcgtcatcttcttgtatgtgcagaaatgtgtcatcagaggatcggtggttggaatgagaacaagaatcgctgatgaagtgattgtagaggattcgatcattgtcggttctgatatttatgag

SEQ ID NO: 186429 - DNA, 56 bp, Arabidopsis thaliana landsberg
atgtcaaggtctcaatccaagactaatcatgtggatcttatcctaatccgctgcat

SEQ ID NO: 186430 - DNA, 464 bp, Arabidopsis thaliana landsberg
tagcgtttacactactccacccgggtgctgcatcccatgcatgccctgatgctgtattctgtgcccgccctggtgctgcatcccatgcatgccctgatgctgcatttcgtgcccgcctggtgctgcattccgtgcctgccctggtgctgcatcccatgcatgtcctggtgctgcattccgtgcccgccctggtgctccattccgtgccccccctggtgctgcatcccatgcatgccctggtgctgcattccgtgcccgccctggtgctgcattccgtgccccccctggtgctgcatcccgtgcatgccctggtgctgcatcccgtgcccgccctggtgctgcatcccgtgtatgtcgtggtgctggatcccatgtccgccctggtgcttcatcccatgtatctcgtgtccctgctgcaatccattacctatctttcccatttttccctgaaaaatgatcattag

SEQ ID NO: 186431 - DNA, 933 bp, Arabidopsis thaliana landsberg
atgacttgtagtcgtaggtcaacggcaccggacgtaacgaacagatgtacggcgttcgttggaggtacaaacggccatgatggagagacaaatgacaacaattatgacaagatgtgttagtaaactcgaaccttcatcgtcaccaccaccacaagcagacatacacatcccacccattcttcttcttgtgatccttaagacccgatgataagttttaagggagatgtgagatgattatgaagagaaaattaaatgttagctgagacggatctgtctttaatgagtttttgattggtacttttgctttttaaaatggtttttgttggacttgaatcagcaaaacttcgtgtttttaataattgaaattgatgattttaattgttgttattttggagtgttgttcgaaaatgttaacttgagagacatattctctcgtcaatatataattaatagacgtcgacgtgcatgttgttatataagtaataagttgttgcctaccaaaattacttgatgatggttgaagtgttgtctaactttacaaaaatacaaagaaatcgcttagtatctatgtctatgaatctatgatgacccttaggcacggtcatgagtgtcttttaactattttggacgtgaatgtgcagacgtgtggagcacacaatacacatacgattttaatatatttgggcttctgtttaaatattttaaaacccatttcatcaaatcggtaattcatcactaatcaagaaccaaaacatacatgtgtaaagagaatccgaagaaatcttttatagaaatatgatctgatttatagagatgacttataccagtaggtcaacggcaccggacgacacgaacggctgtacggcgttcgttggaggtgcaaacggccatgatggagagacagattacaataattatgacaagatgtgttag

SEQ ID NO: 186432 - DNA, 925 bp, Arabidopsis thaliana landsberg
atgaaaatgatggatcctttatcaaatcgattgcaggttactcaacttcacaactggctgttccactggcatgatcaatttggaggtactggaagtaaaggaaaggggaagaaattgaatgatgctggttccaagaaagctgtacttttgagtggaacacctggtattggaaaaacaacatcagcaaagttggttagtcagatgcttggtttccaggcagttgaggttagctcatgtttctttaaatttcattggttagtgatacaatttcttgcacatgcttgaaaacaaatgcaatctgctttctatttaggttaatgctagtgacagtcgtggaaaggcgaactcgaatattgccaaaggaattggtggcagcaatgcaaattctgtaaaagaacttgtcaataacgaagccatggctgccaacttcgataggtatgttggtgtttgactgtttgttttattccccctaatgttgataactggttctagatgcttgtagttttttcctgacttggtggaagattcgatcttcaggtcaaagcacccgaagactgttctaatcatggatgaagtagatggaatgtctgcaggcgacaggggaggtgttgcagatcttattgctagcattaaaatatcaaagattcctatcatctgcatttgtaatgaccgatatagtcaaaaactgaagagtttagtaaactactgtcttcccctcaattaccggaagcccacaaaacagcaggttggatttagatgattgtttgtcctttctgcgtttttttaaggattatgcacaggattttcattctatgtaccattattagtccttgagctcttcattatcttttcgatttgtcttttattgcagatggcaaaaaggctgatgcatattgctaaggcagaaggccttgaaattaatgaa

SEQ ID NO: 186433 - DNA, 149 bp, Arabidopsis thaliana landsberg
aacctcccaagttatcgggcccacatgcacctgtccttgtctcaaagacctcagacagctatgcgtgtgcaccaaacaacttaacagaatctgtccgagtgccccaaggaccccggataaacgacttaccaccaagatcgcaggattaa

SEQ ID NO: 186434 - DNA, 69 bp, Arabidopsis thaliana landsberg
atgctgactcattcagagaccaacttacagtttcataaagcctttgctgaaatatggattgtccctgca

SEQ ID NO: 186435 - DNA, 164 bp, Arabidopsis thaliana landsberg
agaccacacctatgcatcatcggggggagggcgatgtacaacacaaggtttcagctttccctaaacaaatgataatgctgatggaaatgcttgacccatatcttgacatcaagataaccactgtacagatacccatcactgacattgatattcttgatgaataa

SEQ ID NO: 186436 - DNA, 1278 bp, Arabidopsis thaliana landsberg
tttgcatttaaagcccttgctggcaagggttatcagacacttcaaagcttattgttggatttcttccaatggaaacctacccaaaggctattagacgcattacttgatatgcttgttgatggaaaatttgatgataaaggcagtgcccttatcaaggtgatgtagttttcataactttttcgttaatgatttgtattttaatacctagttcactggggctaactctattgtcctgtttccatgtttaaattgtttttcttactcagaatgaagatgttatcatactttacttaaatgtacttcagaaggttggtgcacattacttggatttgccttttcccatattttggtttggaatatatccttactgtggacttatatgatttggcagagcagcgaatctttgcagtgttatgggctaaatttgtttcagcaactccttagggattccatatcgaatcgtgcttcatgtgttcgggcaggaatgcttcaccttcttcttgattggttttctctggaaaatgatgatagtgttatcttgaaaataacacagctaactcagacaattggtggtcacagtatttctgggaaggatatacgtaagatctttgctcttcttcggagtgaaagagtgggcaatcaacagagataccgctcactgttattggcttgtttgttgtcaatgctgaatgagaaaggaccaacaggcttttttgacatgaatggggttgaatctgtaagtctttgtcccacttgagaaaattttcatgcttacaatagttctatcttactgctacagcgttgagataaattgtttcatcagttgtttaaagcttcttttggatgacgtcagtttccagtgattaatttacgctgccataactgtattgaacatgccacaaaattaaatggtaaatgtttagacatcgtggggtttttgtagaggtggaaagctcttgaatatttgttttaataaatgatggtactctataggagattattgatgctaaagtgttacacttttcttggtgagtagacaaactctgactatttcttgattcttacttcttaccttttttttgtaaatcatattttcatttgcaggggattgtaatcagaacacctgttcagtggcctgcaaacaaggggttttccttttgctgttggcttagggtagaaagctttcctggagatggcaaaatgggtatcttcagttttatgtcaaaaaatggaaagggttgctttgctgctcttgggaaggatggactatcttatgtg

SEQ ID NO: 186437 - DNA, 423 bp, Arabidopsis thaliana landsberg
gtacgtccgccgccgctcaccgaagaccatcattcgttttacgaccgccgtcgagcccgtgccccatccattgcagcgtgagttccgcctcaccgtcagctactcgggacaccctttggtttgcccttcccctctctggttttcctggtccacgcacaccggagcatttcttgcgtagccggagcccgccgccgtcgacccaaggctccaccacacccccgccgttccccaagcatcccgaagttcgcagtcgaggtgagcaaccttctcatgcctttatttcgctaagtatcgtcccagtgcccgcgcaattccttgccggagttgatccgcgccgccgtagcccacctcgtcgtgttctacaccctctggtgccctcgtgccagttttgcgcccatggtcgagttcgccagatcgccctga

SEQ ID NO: 186438 - DNA, 1036 bp, Arabidopsis thaliana landsberg
gggggcgattataaaagcattggcagagttgcattcgcttggtgccttggcagatgatggtaaactagagaatcccgttggctaccaaatgtcacggctcccactggaacctgtatactccaaagctctaattttggccaatcaattcaactgtctagaagaaatgctgatcactgttgccgtgctcagtgtggagtccatattttatgatccgcgtgagaagagagaagaggtgagtataccaaaggaccatgatatattcacattttcctttatatcaacagttgattaaaccagccacctttattctttgttttgccaggcaagaacctcaaaaaaccactttgctagcgttgaaggggatcacctaacttatcttagtgtttatcgggagtcagatgagttcttggaaaagagaaaagcagccggcagtggaaacaatattgataaaattatgaaaaaatggtgtaaggagaactatgtgaatagccgttccttgaagcatgctcgtgacatatataggttggccatgccttcttcgtagataattacagttgactgttatgccttatgatgaattatgataatcacacaaaggattgttgcaggcaaattcgtgaacatgttgaacagataggctttaatgtgtcttcatgcggaaatgacatgcttgcgtttcgtagatgtcttgctgcatcatttttccttaaagcagcacagagacaattggccggtacatacaggttggttccgttcttggttcacttattgtcttaacatgtaaatacgcctaatatactctactcttttgctcacaacaaaaacttccattgtcatctaattacttgacagggctttggaaagtggtgaggttgtccacatccacccaacttctgttttattccgtgcgaaaccagaatgtgttatcttcaacgagctcatgcaaaccagcaagaagtacatcaagaacctcacaataattgattccttatggttgtctgagttggctcctcaccatttccaaacggcagagtga

SEQ ID NO: 186439 - DNA, 874 bp, Arabidopsis thaliana landsberg
ggatgacgtggaagtatcagggtataacttgaatcaacagaagcgttattttccaaggtaaaaactgctctataggagatgtattttgtctattaagatgttgtcttctgttttacttcaggagtacatgtaccaaagtacatcattacttgtactttatggctctttgagaggtgacatttcatattgagttgctagttttatgttgtcttttcagctttgatgaaccttttgaggatgttgtctatccaaagggtgacccagatgctgtttccatttgcaaaagagatgttgagctcttgcagccagagacatttgtaaatgacacaatcattgacttctatattaagtgagttcttaaagttaatttcttgcaatgcgtatactctggcatgtgctgctgtgaactatttttgggtttgctgttttgatgtgcactacctctcacaattttactagtgcaatgacaagcagatcatactataaacttaatgtaccttatttaaccttttttggtgtatttttttgttatttacagttatttgaagaatcagattcaaacggaggaaaaacatagattccatttctttaacagctttttcttccggaaactcgctgatcttgacaaagatccatcaagtatagctgatggaaaggctgcttttctacgtgtccgaaagtggacaaggaaagtggacatgtttggaaaggactacatttttgtgcctgtgaactacaagtacgaaaaactgtggcagttctctttttgttataattatatgagttcgaaatctgacattgctaaattcttataacagccttcactggagtttaatagtcatatgccaccctggtgaagtggctaatcgtacag

SEQ ID NO: 186440 - DNA, 996 bp, Arabidopsis thaliana landsberg
atggcaattagttctaattacttacacgcaactttgatggcaacacttcggaggagtcctttcaaattcgctaatacaaaggttcctcatgctgacctaggcgacagtgtctctcctacaaaaaagaatcctgaagaagaagttccaagtgatcccgtcaatatccagcttcgcggtaagaattcttataccattctcaaataataagcaagttacaaaggatagatcaaagtctcagtttcgaagataatcactaggtggatatagcacgggatactgatttattcgcatagcgtgatcttgttgttgatgtaggaaagaatacgaacgtatattatgagtatatacaattaagtcaaggaataagccaaggtcgtgtagaagtcgtgaaggacttcttgaacgatcatccggacgcagtggacgaatggataaacctttacgagacgccattgttaaaggcttgtgcttgtgggaaacccgagattgttaaagagcttctgtggcgtatgacacctgaacaaatgcttcccaagatgagccaaaacgtttcgtaccacacggctcttactgtcgtagcggttagtggaaatatggagattgctgaagccttagtcgccaagaaccctaagctgctagagattcctggaatcaatggacagattccggttgtggttgcggttgagaacacgcagatggaaatggctcgctatctttacaccagaactccggttcaggtcttacttgctgaagacggatatcatggtactttgctctttctgaatgccatcttctatagaatgctcggtaagggatttcttggaattcaagcaacccatatctttggcggttttgatcttgatctgtttttctttatacaattagacatcgcattggatctgttcaacatgagcagacgcttagccgtcacaaaacacttgcaaataaaatcgattccaatcattgtcttggattcaaagccagatctttttcctg

SEQ ID NO: 186441 - DNA, 116 bp, Arabidopsis thaliana landsberg
aaaacaacatctaccactaccctcaagattgtttggagcttgtcgtgaagcagatcaacggctatcactacgccatgtcatcgaatgttataatggattcacaatactcaatgtaa

SEQ ID NO: 186442 - DNA, 507 bp, Arabidopsis thaliana landsberg
atggtcctggaaagtatctttggctttgatctttcgcttcctttgaattacctactcaaagggtttgaggaaaaaactctagtaatacaggtatcaaaatttcaaacattgtttgcatcctcattctaacttctattaggagattacacaggatcaatattcatcggtttcattcatgtattagggaatggaagatcccatatcggatccgcagaagaaagtagccttactgaaggagctttgtccagcgatggtgataaagaaagttaaagcaggtaaaacataaaactaactgctaaagctctatacacctccgatccactagtctatataccattcttcttgactctggtctcatttgcaagtaaaggtcactgtccccacgatgaaatcccagaagaggtaaatccgattatctgcgaatggatagtgaaggtcactaatgatgatcgagaactaaaagcctcatcatcccagcagctttaccgcagtaataaacaacactaa

SEQ ID NO: 186443 - DNA, 104 bp, Arabidopsis thaliana landsberg
atgccgagcgacagaatacaagcctggcgttatagaggcaacgccgagtgtttaaaggtcgacatcgacattttagaagtaatgccgagcgatttggacacgag

SEQ ID NO: 186444 - DNA, 466 bp, Arabidopsis thaliana landsberg
attcttacagaggatctttgaagatggaagtgctttagatgctatgatcattttcaatgaagtgattcctcatgttgttgagcttatgatggatccttttggtaattacttgatgcagaaactattagatgtttgtaatgaagaacaaaggacacagatcatactcatggtcacttcagaacctggtcagcttattcgaatatctctcaacgcttatgggtaagagatttctctttgtaatcaatttgatgtcaagctaatataattagggttgttttttgttttgttttgtgtgtggttaagtactcgagttgttcagagattagtggaatcaatcaagacaaggaagcagatttctctggtgaaatcagctttgagacctggatttcttaatcttattagggatttgaatgggaatcatgtgactcaacgttgcttgcagtgccttactacagaacataacgag

SEQ ID NO: 186445 - DNA, 708 bp, Arabidopsis thaliana landsberg
atgccaattgtacgcaagtggatcaaaggacccatgtggttacattttcttgttggggtaagttatctacaaagatacagacttctattcttatgttctcttcttttcgtattccacgccttgttacatacataaaccctccgcggaaaagaccagtaaaattgttaagtcaaattctactattgatgtttctccatttctgtatcgatgcaggcaccacctgttatagttctttcatcagcatgtgctggactagcaggtttgagatcttcttctcctcctcattcactacttataatcaatttcatattaatcttggttttgtgtcaataagctctgaatcttgaatgttgcatcttgcttttgggggaatgtttgtaggtggcactgtaccggcactggcacagctcgcttcatcttcataccgagctgcagtccattcgtctcagccaccacaagcacaaaaggataacaaaatgcagaagtctacgacttctcctttgtaaactacacacacagcacagctctctcttttgttcttatttatttctcttcattttgtatgtcaaatcttttctttgaaagagagagcttcttggtgtaaattcttcttatcttatacaactatctggtgctaaagaaagcttaacccgtgtcacgggctttatgtacatggatgcctctggtgattcactcattctcatatag

SEQ ID NO: 186446 - DNA, 268 bp, Arabidopsis thaliana landsberg
atgtcgaccggtggcaagtggtaggtatcactatgtaacaacacaaacgtcaaaacatgtgagaaagcgtttttgcttcgcttttctttttcaattttccccacttcacttcacttcacacagtcacactcttatcctcagtatctccacttcttttttcaatgaaatgttgtggataaataatacgataattggcatccactatcttaaaccagctttgtatgactatgcccgtgacagcttaccagaatctctgtgttttgattaa

SEQ ID NO: 186447 - DNA, 748 bp, Arabidopsis thaliana landsberg
  unsure (1)..(748): unsure at all n locations
atggactcaaaatctctagctaaatcgaagagagctcatactctacaccacagcaagaaatcgcattctgttcataaaccgaaagttcctggagtctcagagaagaatccggagaagctacaaggaaaccaaaccaagagtccggttcaatctcgacgagtctctgcacttccgtcgaattgggatcggtatgatgatgaacttgatgcagctgaggattcatcgataagcctacattctgatgttattgtgccaaaaagcaaaggagcagattatctgcatttgatatctgaagctcaagctgagtctaattcaaagattgagaaccatttagattgtttatcgtcgttagacgatcttttgcacggtatgaatcgattttgtttgtctgtctttgttcntgttgttcgggcaaggtattcaaatttatgagttgttgcagatgagtttagtcgcgtagttggatctatgatctcggctagaggggaaggtatactttcatggatggaagatgataacttcgtttggaagaagatggatcaggttcatatcaagaggtaatactactcttgtttttggttaaaatggaggttttaacttgctaatcgtcttacgattttgctaactttcttaagtgaagcctggattcctctccttaaatttgaatgttttggcaaagacgctagagaatgtggacttgcatgagcgactctacattgatcctgatcttttgccgctgcccgagctg

SEQ ID NO: 186448 - DNA, 111 bp, Arabidopsis thaliana landsberg
gacatgctcttgcttcgcctctgtgtccagtcggatgaaatccctctacagcgtatggtctctctcacgggctctgatggctccacacggatgctttatagctctcctgag

SEQ ID NO: 186449 - DNA, 110 bp, Arabidopsis thaliana landsberg
gttattccgcacttttaatatccgcaagcttcagagcgtccttctcaactagcataaaacgtcatgacgttttcagtcttcagcaagtaaagaaacgccagagtttgtaa

SEQ ID NO: 186450 - DNA, 153 bp, Arabidopsis thaliana landsberg
atgagcgtggacttacacatgagactgagagcgtacgtacgtagatgcatcagaattcatgaacgatatcaagagggcctctttcgatgacttcttatttgtctctgtttacaggaggacccctctactgcttttaccagtcaagactcttaa

SEQ ID NO: 186451 - DNA, 251 bp, Arabidopsis thaliana landsberg
atgcatccccacatccggaacacgtgtccctttagtcctcgactgcgctggcaatacaattcgctctgccacatcctcgcgctggtgcgtgtcccaagtgccagtcaccgtggctggtcacccagcttctccagtccctcaatcaagacctagtgctcgtccctcgttgctcccggcccatcgacacgaacccgcatgatcttcaccttcgcccacaccagaagctgagagatatgattgcacatacataa

SEQ ID NO: 186452 - DNA, 859 bp, Arabidopsis thaliana landsberg
gctgggctaggaggagctcgagacgctacaaatgtcattgaaagttcaaattttgctgcatcggtcataacaacgggaggtgatgaggacatggcagcacttgggggttccttggaaagtatagcagaggctaaatctggaattattaaacacggtcgcccagttaggtggtttttatgtgtttgcttgtcttataacctttgaattataagcacattgatagatagagttttacgtgttgttatgaaacttgtaggtggttttaggtggaccgtttcttcctcatatcgagggcattctccgttctaaagcagcttcagtgtcgtcatcggttattttggcatctaatattggatctagttcttcaatcaaaggcatcattaacaaaaatgggatcgggctttgccagtcctgtgacatcgtgatacagaatgagaaagatgatcaaccagtaagtttcaaaaaccttttattttttattcaagaaatgggtctgtgattcttaatatatcaacaaattgtacatataaatgcagattgttgagcttagtgatgtaaacctacgtatgcttggacatcaccagctccaaaatgctgttactgccacatgtgtgtctctttgtcttcgcgatcaaggtataatgcacttttgagtctctatatatagcaacaaaagaattgaacaagcttacaaattttgttacttttattatggaataatcaggatgtgggagagtgacagatgaagcaattaggattggtttagagaacactcgtttacttgggagaagtcagtttctgacaccaaaagaagtagagactttactattacccggagcaacagtgcttcttgatggag

SEQ ID NO: 186453 - DNA, 1606 bp, Arabidopsis thaliana landsberg
atggaaaggaaggtgttctcgggtcaaaacctgatatgggttatgctactgttggtacagctacgtggatacaaatgctgtattgaaaaagaaaggaaagctttgttggagctcaagaaatacatgatctcaaaaactgaagattcgggccttgactctgttctccctacttggactaatgatacaaagagcaattgttgtcgctgggagggccttaagtgcaatcaaacaagtgggcggattatcgagctttccattggtaagacggactttaaagagagttctcttttaaatctttctttgctgcatccgtttgaagaggttcgaagtttgaacttatccggggaaggatacaaccaattcaatggcttgtttgatgatgttgaaggtataccaggcttttcacagtgtttactttacccttttggtcttcatttggaaacagtcttcatgcaatgaaagtttagaattctagatgatctcatttctttgttctaattcttgtaaagtaacgctcttttgatttattgtacttagattttctcctgcctccagaggttataatagtactttattctgtatttactcaaatgttgatgtctatgccatgcaatatctttcttaccatgaagtatctttctgtattaactaatctgctgattttcgtttgcaggttatgaaagcttaaggagattaagaaacctggagattttggatctctcttcaaatagtttcaacaacagcagcatctttccctttcttaatgctgctacatcacttacaactctttttattcagagtaactacatcggtggccctttgcctatcaaaggtgtgttttttcatttgcatttaggtgcctatctagcattatttatgatctatattttgtagttttaatcattcttacttacttctggactcggtttcagaacttaaaaaccttacaaagttggaactgctggacctcagtggaagtggatataacggcattatgccaggtaacatctacgtcatttgtcacagtcttttttcttcggagtagaacgtttacaagatttaactccatacataactgttgaattggcttttgccatcgcaaattaataatatgttccatgctttgtgtctctttgtcgtatggtagagtttactcacctggaaaagctgaaagctctggatctaagtgccaattatttttccagcttagtggaattgcaaggcaagctttttctatataggaatggagatgaatatagcttatacatttgaaataatcatttttcaaggtaccatatgttggctttcactcaatttcagaactaaaggttttgacgaacttggaagtcctgggtcttgcttggaataatcttgacggaccaataccagaagaaggtgttctctttatgcttgacctccaagattatctatgtgaacaacataacattttactaatgagttacgagagttatctcatgaatctcgagaaaagaacaactactcttgttattctcatcatcttgttgttttctaaactatttttttgcagttgtttgtgaactgaagaatttgcgtcagcttgatctccatggaaatcatttcaaag

SEQ ID NO: 186454 - DNA, 512 bp, Arabidopsis thaliana landsberg
  unsure (1)..(512): unsure at all n locations
gaaaagacaggaggagagatcattcatagagttggaggtgtggtgtaccttttcaggggtaggaattacaattaccgtacacgtccgcagtacccannnnnnnnnnnnnnnnnnnnnnnnnnnntttatccaaagcttattcaagaagttcctgaaggattgacgaaagaggaagctcatgagttcagggtgaagggaaagtctcttaggcctatatgcaagttgtgtaagtgtatcttatctttggcttagttctactttttcctgttttgtgttaggttcggcattcactgaagtaaattggaacatagtgtgctagaagaggtgagacacttggctgttatttattattattgtcttggttttgcattgcagctaaaaatggagtttacgtgtcgctagtcaaagatgtgagggatgcctttgaactgagttcattggtgaaagtcgactgcccagggcttgaaccaagtgattataagaaaattggcgctaagctcaaggtctattaa

SEQ ID NO: 186455 - DNA, 75 bp, Arabidopsis thaliana landsberg
atgcacgcaaaggagaagactttaggaatcaaggaggagaaaactgagagagtgagagaaaaaagcagagaaagg

SEQ ID NO: 186456 - DNA, 909 bp, Arabidopsis thaliana landsberg
atgatgagcgaatccgtaggggattattttaacagtgaagatgggtaaggtagttgcaatgtgtgacgtgcccttggttttgacaggcaaagtgctgaggaagccatcgggaacttgaacgggacagtcattgggaagaacactgtccgcctttcatggggaagaagccccaacaaacaggtacaagaaaattttagttggatttgtgtttaaaatatgcatttctattggtatggtcctatggtccaggtcaaacttagctttagagttcttttgggtctttatatttctgtcttcatggggtggataaagttatagaaatccttaaagccaaagtcagtggttgacaatggatagtagtaggtgtattgcgggccataaagacctagtggaatttaccaccttcccacggttttcgttgactatatctattggcaaatctaatgcatatcaccttggcccacttatcatctccctgaattatccaatctctgaaataatagtaatggttctgtgtttcttaggattgagaaaatttacagctattaagattcatgagctagttgaagcatgtactgatgttatcgtttatctttagaggttgtcgaagtttcaatatttcatgtttgtcttaattctctattagtagttgtaatcagtggacaagctaacttaatctctacaagaataaccaacttggtagtttttatccgtgatgttctattgaatgttttaatccatttactaatcttgttcaacttttaaatctaaaaatgacagtggagaagtgactctggcaaccaatggaatggaggatattcaagaggtcaaggatacaacaatggatatgccaatcaggactcaaacatgtacgctactgcagcggctgcagtcccgggagcttcttga

SEQ ID NO: 186457 - DNA, 367 bp, Arabidopsis thaliana landsberg
atggatttgaagcatctatatcaggtaaaaaagcttcaacaaaatctcacacagattttacgaaaaacacattagccaaatatagaaggaaaaagattcctctttgaactttgtgttatattttctttggacaggtagctgcggtggcggtgttgtgtgtacagccggagccaagttacagaccacttataaccgatgtcttgcactcactcatccctcttctaccagtagaactcggtggatcattgcggattttataaaaaaacatttcccctttttttttttttttttcttgtaacagatcaatgcgtttatgaatttgtctcttatgttggttcttccggagaatttattgttgtatgtttaa

SEQ ID NO: 186458 - DNA, 746 bp, Arabidopsis thaliana landsberg
atgccagtacccgacacggaaatgctgactccttcaccaaatgatatagagggtggaaaactggctccattttatgtgcgtcgaccgcctgagcgaccaaggaaacaaagattattttcaaaaagagaattcaaggtaaaatatggacctaatgtgagataaaaactaataaaatatttatatggtaagactataaggatgtaaccttcgcttccatttgtagagagcctccagaaaaagatgctcacgatgcaagtcattggatcataacagggcaacctgcaatggaccaatactattaagtcaaacattatcagttaatatgtatattatgggatatttaaattatccattttgaatgcagggaccgtagaaaaaaggttcaaggacgttttttgacgaagaaagtgatggatgctgccaggataaacaaggaataccatggcgatgtgaataaataagaaaccttaagcgatcataaattttaaatgtatatacgtaaaattatcggaatccatccacctttcaagtaggaatgttaaaatataatgtcatatttattaatcgttgtcgtcccagttaaagattccaagaacgaatgtttattgaacattctaagtagtaatgttaattgacaaacaaaaggatgcgagtgacggaaataaatgttaagtctataaaacatttatcagataaggaaaataataacagcggtgaagaaacgtaaggccgaacaccaagcatga

SEQ ID NO: 186459 - DNA, 277 bp, Arabidopsis thaliana landsberg
agagacacatgtagagatcttcgccggtcgatgattatagaacatcaaacttctttagtgattacccgtatattgagtacaaaaattgtgagtaaatgattggtaatggtttggcagggatgatgataaatggtgggtattaccaacaatcctcttgttactcaagtcaatacaagctcggttccttgattggcacgtcgcaaatctagaagtaccagacttttctcttctttgtccagatccagataccttctgggcatatgaatctggagcttga

SEQ ID NO: 186460 - DNA, 111 bp, Arabidopsis thaliana landsberg
tatacgaatggaaaacccccaatttctagaatattcttggccaaaataattcttccgaacaaaaatcctgcagcaacaaaagcgaaagctgatgattctccattcattcag

SEQ ID NO: 186461 - DNA, 124 bp, Arabidopsis thaliana landsberg
taaatatgtttgcattggtgataccacatgtttaagtattttcgagaaaagggaagagattcagaaggaattgaaacagaagaaaattgatcggcaaaatcgccccgaaagagaatatttttga

SEQ ID NO: 186462 - DNA, 64 bp, Arabidopsis thaliana landsberg
atggtgaagaagacgaagagaaaaaaggtgaaggctctttttgggtttgcgttaaatcataaat

SEQ ID NO: 186463 - DNA, 759 bp, Arabidopsis thaliana landsberg
tttggaccaatgaaacccacaattcacagtttgagaccaacacaagacaaaggaaaagggaaactaataagtttagcaaccttggagacaaaaagtatatcaatactgaccttttccaagaatcgtgggaagactgggaagtggatgatcaacatatgaagagacaagttaggtctggaaagcagggcagactatcaaactcaggaaagttaaaatctaccagtcagagaaagggtggtctagacgcgtcttacgattggtttgcagaaggatttacatcagcaggcataaactcaggtttgtttctcttatttatatttctaaaacatcttcaaaggcttgtctatcatcctgtcccaagccacggtgcagagatcttatatctagaaccatagaatatatttggatatggtttcagacctaaaacataatcattatcttggcgttctctctcacatgtaaactcctgttttaacttctgtcacagagattacaagtgagaggaataagccatatcctttcctaaaccctgagcgtggttcctctcactggcgttcatctcgtgcccctgattctattccggaaacatggattcccaagttttcagtaggaggcaccggagatgatgatgatggtgaccacgatgaagaggactatgtaaactgtttatcagcaaaccataaatctaaactagcaggagacacatgcggttttgagaatgacacgttatcagagaacgataatgagcaaagcagagaa

SEQ ID NO: 186464 - DNA, 398 bp, Arabidopsis thaliana landsberg
atggatttgccaacgttctctatggctggcttggaagattctcgagctcgtataattatacattgggatttcgagaatgtgtgcattcctagaggttggaaagccttaagactctacaatgtggtggtcgaacggttgagagaatttggttatcagggtgagatcgagttccgagcattctggggcattaaagggcccaagcttagtaagcatacaaaggcgttggaggctaaaggtgtcacgtttccatcaagcaactgaagctgaatccgacgcagccgatcatttgatgatctatcatattgatcaaaatgtggaagccttcgtgaaggatcttatggcgcaatatgtggagttggatgaggtggcggacaaacatgttcatgttcttatagcag

SEQ ID NO: 186465 - DNA, 145 bp, Arabidopsis thaliana landsberg
atggagtcaggaatctgctgtaaaaaattgagctcaaacggagcaccgagcgaaaagttatgtccgttttatgaaaggtacctcaagttatggttttcaaaggcacaaatcggcaggaaccgaagcggcggctatgaagcacagg

SEQ ID NO: 186466 - DNA, 111 bp, Arabidopsis thaliana landsberg
atgtcgaaaaagaccgcatcgacggtcttcggcattcgaccacatcgaagtcacctgcgagggcagcgaacctccctcgcgtgcgacactccgtgcaaaagtcgcataagg

SEQ ID NO: 186467 - DNA, 382 bp, Arabidopsis thaliana landsberg
tacataccgtcacgaccttaaaatttacagctctgacgagggacgtgttcaggtacaactttctgccgatttcgtattgacgatgaccattgagcattcaaatgttcactatatcttctggatattcctcatcggttgcactgagatatgatatgaatgtatgcagatgtctgcagctgcttttgccaaaggcctgcttgacctagaaggacagctgaccccaatcctggtttgccattttcttttaccaagctagtatagtgcctggcaatgtcataatcattaaatgtcttatctttttctctaggtttctctggtaagtaaggactcttccatgttggatggccttgataatgccagcagtgaaatggaagcagctaag

SEQ ID NO: 186468 - DNA, 2176 bp, Arabidopsis thaliana landsberg
gtcggtccgctacgtctgggagcggattgaccttaacctaagtccttcacccaagtccgaaagagaggaggaaactcttaagcctctaggagctcgagaaggaagtcccaacaaagtgtatcaaatgctttccttataccccctttcaacagagagctcttgggacaacatgcagaattatagcccctaacaagttcagatgctagtaagaccttttttacctagggaacgccctttaagaacgcaacttgattgcgagagatacaaccctgaaaaataggctttaggctgtttggaatgatcttgattacgagagatacaaccccgaagaataggcttcagacggtttgtgatgcgtgttttattttgcctctggcttttacctgaaagaccacacaactactgcaagtgcacagtatatcggaatagtattttaggatcgaatccccaaagagagaagtagttcagagaaatccttaagaagagagtgaggcaaggaccaaaataaaagagagggggttgttgtaagcaatgagtaaccaaaacaaaaggcaagtaactaaactaaacgacaagcaataagagagaagcgtttggtattcaggggtttctccaaatgtcatggttcaataaataagttgtagatctcaatctaggtcataacatggctaggtttgtttacttccaaattctcggacatacgaaactctatcaaaactagctaaccttaacggttagttgatgaaaaccggctattatcaatagtattatgtgtactcagttgccctgtcggctagtaggtgctaacatggtttcaaaatacaagatcaggcattaagttcaagtttgattctagttcataagtctctatcactttgcgggtgtgcaacggttatagttctttattcagttgagcattcaaacaagattttgccaaggaatgaaatacctaaggtcaaatactaggtggcattccggacatacaagcattaagatttaactcaactagaaagaatagtggaaacgatcaaacaaaaccatagaaacagccaacctaaatcagatctaaagtccccatgaataccctttgaaacccccctaaaacctaactagagatctactcacacatactcacaaaacacgacatcatatgaataagaaattgcataaaagagagtatgaatatagaaaagggtttagagatcttctcaggaaatccaaagcttgataaatcttcttccttttacaagaagagaatagagaattgaagagaaaaagagagatttaaagaagaacaagaggaggacgactttttggggcggtgagaggcgcaggaggtagcctatttcgtgggtgtcttctagggtttcccttagacttgtatttataggtcttcattaggtcaaatggtagaaacgtatttccgtttattagtaagtgatgggtcaagcttctgggcttttagggttgctggaagtcgacggcaagaggaagggaaggagtggttgtgcgtcctagtggttggtgaaagactcgaggggacgcccgggttcaagtcaccttggccggcggttttaaattgaacattttcaaaaccccgattttaggacatgtctttactctttgcgccataacttctgaacggattcatggattgcttcgattcgacttcgacattaatcttgacttttcgagattttcaatgacaccaagataccttcatgccaaggtcggtaagacctttgccagatgtgaaacatctgaggcaccgaaactgttctgaaccggattttgggtgacttctactcgtttttgcatgaaaactcataattcttctttgaagctcaaatactcgaaatatggggggaagcgcgggggaacttttgatatctccatggaaaacctaataaaaacatagtaaaagtgggctaaaatacgatgttatcacgctaccagatgaaaaacttgagcgaactctgaatgctgcaaagatggagcaaagattgtgaagtttcttgctggcttgaatgaatcatactcaacgactcacagtgaaatgatgatgaagaaaacaattccagaccttgttgagatatataatcgtcttgaggaagatcacatccaacgccacattattacagtttcaagtaacgctaaaacggtgttccttggatga

SEQ ID NO: 186469 - DNA, 1017 bp, Arabidopsis thaliana landsberg
tagaagctaatatcgtgtacatgcttatgcaggctatcaattacaatggtcacaataagctgatggagaatggcaaatcagtggatgaaagagacgagtttaaggaaacttttgatgtgacaatggatttgattggtggaattgacaagcgtcctgatagtatttataaagacaagagtcgagatgagtgtgttggccctgagcttggactttctctgaaaagatcttgctctgtaagttttgagaaccaagatgaaagcaagcatcaaaagcttagcctctctgatgcgtcggccttctcaaggtatgcatgtttccttgcttgaataaagaatgcctcaaatcttgtaattagtgtttttaatcaataactctacttaacttgcagatttgaggaaagcaagtcagcagaaaaagccgtcgttgctttagaggagagtacttcaggtgagccaaagacaccaaccaaatcacatgaaaagttgagaaaagtaacatctgatcaaggaagcgccacaacgagcagcaaccaggagaatatcggatcatcaagcgtaagcttccgtaaccaagttcttcagtccacagtaacgaatcagaagcaagattcacccatacctgtagaatcaaatcgcgagaaagcagctagcaaggaagtagaagctggttctcaaagcaccaatgaggcggattgctggacaaagcagtagcacagagaaaccaaaggaagaagaaagtgcgaaacaacgttggagtagaagccagagagaagctgcattgatgaagttccggttgaagaggaaagatcgatgctttgacaaaaaggtaagagacacacaagcttcatcataaaaacagcatctgaaacaaatacaagatcaaactgattcaatggagatgtataaaaatggattacaggttcggtaccagagcaggaagaagctagcagaacaacgtcctcgagtgaaaggccagttcgtgcgaaccgtgaattcagacgcgtctacaaaatcatga

SEQ ID NO: 186470 - DNA, 425 bp, Arabidopsis thaliana landsberg
gtttaggtaatcacaaaagagttcgcagagagattagcgggaaattagcgtgtaaaaggaagtacactgaagactataatccattctctgactcattaaaagctaagaagattgttaaaaaaccatcaagctttgaagtctctcaggaggagaagatcttacattgtgttgagttaaaacaagacttcggtgaactgcttgctcactcgggtttcgacaagtctattagttgcagcaaatcgatcaaagtgaaaaaagtagcgcgtaaaaatgagaaaactgaagatagtacttcactgtttggcgtgattgactcagaagctagcaagtttgcttcactaccatcaagcattgaaatctatcatgagaagaccttccattgtgttgagtcaaaacaagacttcagtgaactgttttctcgctag

SEQ ID NO: 186471 - DNA, 51 bp, Arabidopsis thaliana landsberg
atgagacagaaacaacacataccacatgaaggaggtggcagacgaggcaaa

SEQ ID NO: 186472 - DNA, 156 bp, Arabidopsis thaliana landsberg
agccggggagacgtaagagttgagcagcggcgaacacacaaggatggagaagacaagaggctactggatccggcaacgagacggcgaaagctggaaacgaacgccattatagcaagtgggacaaaaggatttgagatcggaaatggcaatctttag

SEQ ID NO: 186473 - DNA, 111 bp, Arabidopsis thaliana landsberg
aatgtaatagttgatgattcgggggatcttaccttactccaccatcgaaagattggatcaaagcttgtactcttaaagaaaccacaccgggaaacactcgttgatctctaa

SEQ ID NO: 186474 - DNA, 423 bp, Arabidopsis thaliana landsberg
  unsure (1)..(423): unsure at all n locations
atgcaggttttggaaagattgaaaaagtgcagatcagctctaagtcgttggaagcaggagaataacagcaacgctttaactcgtaattctcaagctagggcaggtttagatgtggaggaatctggaaggtagatcaggtcatacccggtttgtactctgaaaaatgatctnnnnnnnnnnnnnnnnnnnnnngacaggttccggagtcagaccagcagagtcaacggatgcatggggggcgaaaaaacaattctgtctgccatgcttcagttaaagataagagaggtagacagcacatttgccagttatgtgcacaaagatgaagtgtcaaaaggggctatagctgtatcctactttaaggatctcttcaagtcttcagagggaagtaattttgctgacttgtttgccggttttcagccaagg

SEQ ID NO: 186475 - DNA, 433 bp, Arabidopsis thaliana landsberg
atgggcgcgttagcagccgccatgtttgacctcagatcgcggcgagagaatccggggccagaatcagatccacggaaaggacgggaccgtcaacggccgagcgatgcgagagaaactaaggaagatttgaaatcgcagccagatctgaggcaagtgaaggagaaaggtgatgatggtggagagagattcgtttttttcttttaggaaagtgagaaatgacgaaatagcgatccaatcggagtcactcgtcgaatataaggagagaaaccaaaggagagacgacgtgctacaagtgcctgagctgtacgatgtgcttttgccaaagttacgggttcggatagtattcgggtcgagtttcaaaccgcgtaaatcaacgggtcgggttttgtcacgacacacactactttttgggaattttatgcgtatgttttga

SEQ ID NO: 186476 - DNA, 426 bp, Arabidopsis thaliana landsberg
attaagcctcttatgggtccaaccaaagaaattatgagtgttcctatgccaggctactggttgcccgagtttttccctcatggtaatggttaatagcatgtggatattttcttattacatagtgaagcctttattcaataatctggtttttccttttgttttgttttttcagttaagaacaatagaggtgttgtgatcacactctggtcacctgttatccttgtgagttagaatagattcttcatttccatatggtcatttctcacactctccccaatctacgctaactttcatatgcaggtttatttcatggacactcaaatatggtatgctatagtatcaactctggttggaggtttatatggagcttttcgacacatcggagaggttcatactttctttaccataaatattaaaagaatttag

SEQ ID NO: 186477 - DNA, 189 bp, Arabidopsis thaliana landsberg
atgaaacaaattgaaatcaccctggtcagctcagaagagttacaaagcaagaccatttacagatacagcgaatttaggaggtacattctggttgctagagccctgccaggtcaagcaagagaaaaggttaagaaaaaccagtatcatctccaatgcagcatctacaccgaaaagtttcaaatgaattga

SEQ ID NO: 186478 - DNA, 1292 bp, Arabidopsis thaliana landsberg
gtgacaatctagtggctaacttaggtgagattgcagagggtgaggacaagagagaagatgagttcctagccaaggtagcagatgcagaaacccctttatatcctgattgtttaaaccacagcaagctatcagcaattgtgtctctctttaggcttaagaccaagaatggatggtctgacaagagctttgatgagcttcttgagacgctgcccaaaatgtttcccaaggacaatgtgcttcacacatcattgtatgatgtgaagaagtttttgaagagctttgatatgggatatcaaaagattcatgtgtgtgtaaatgactgctgtctttttagaaagaagtacaagaagctggaaaattgtcccaaatgcaatgcttcaaggtggaagattaatatgcagacgggtgaagtcaagaaaggtgtgccacagaaagtattacggtacttcccaataatcccgcggctgaagacaatgtttagaacagaggaaatggcaaaagacttaagatggcatttcagtaacaagtctagtgatggcaaacttcgtcatcctgtagattctgttacatgggaaaagatgaatgacaagtaccctttatttgcttcaccagaaaggaacatgcggcttggactgtcaacagatgacttcaatccattcaacatgaagaatactaagtacagttgctggcatgttcttatagtaaactacaacttgcctcctcacctatgtatgaagaaggagaacataatgctaagcttgcttattcctggtccacaacaacctggtaatagcattgatgtctatttagaaccccttattgaggatttaaatcatttgtggaagaatggagaggtaacttatgatgcttatagtaaatctacttttactctaaaggcaatgcttctctggacaattagtgattttcccgcttatggtaatcttgctggctgcaaagttaaagggaaaatgggttgtcctgtatgtggaaaaaatacagattctatgtggttgaagtatagccggaagcatgtgtatatgtgccatagaaagggattggcaccaacacatagatatagagataagaaaacatggtttgatgggaagactgaacatgggagaaaggggagaattttaactggtcatgaagtctatcaaaacctgaaaaactacagaaacgattttggaaatgttaaaggttctgggagaaagagaaaaaagactgcctatattgatccagtttttgagagttcagattcgtctagtgaatccgaggaagatgaagaatcataa

SEQ ID NO: 186479 - DNA, 619 bp, Arabidopsis thaliana landsberg
atgcaggaaggtttccggtatcaccatgctgagccaacttacctgatgctagtttattggattccggaagccgagagtactattcctttgaatgcttcccatcgtgttcgtgtaggtgctgttgtcttgaaccataacaaagaggtacttaggagataggacaccattatattgtttatttttgtatttccaagtcataatattctaatcatcctagaatggtaaggaaaatgtactccatattccagcatttgcatcttaaaattacaactagaggcagattcttgtggtgcaggaaaaatacggttcattatgcggatcaggtatctggaagatcccaacaggagttgttgacgaggtatgtgttatctgcatgtagcaacaagttttcaatcccactttatatgtttgctgaagatttcatctttaatattttattttcttgcgtctagggtgaggagattttcgccgcagccattagagaagtaaaagaagaaacaggcgtaagaagatccatatatcttaatgtaaatcagtcaaccatcaatatatataacctaacgttttcatacatttatcttcagatcgacactgagtttttggagattctagctttctg

SEQ ID NO: 186480 - DNA, 248 bp, Arabidopsis thaliana landsberg
atggtcaaaaattttgaaaaggggaagagaaagactcgaaagaaggaggagaaaaacttgttatggtaggtgatcggaggtggaagagccaaggaggaacataggatttcgagtaatgaagctatagagaagtcagagttgctcttaaatagagaaatcaactatgcaaaaccattaatccctaaagtgacacctcctaatttactaggttcctaaaatcacaaccacaagatcatcggaatctttaa

SEQ ID NO: 186481 - DNA, 941 bp, Arabidopsis thaliana landsberg
atgctaaatattctaattgggatagtgcttccttcgcgtgaaactgtgggcatatcagctgatataccgataaccattgaattatcccttagtacagaggctgttatgcaaggtatgaaaaaaaaggatcattgtgtggattcagattcaagtaatgtgtctgttaaggattgcaacatcgagagagaaagtggtggttctgtaaaagaaaaagagcctgtgttttctgaagaacacccccaagagaggcggagtactcgtcttgaacggcttcggaaccagaaacctgagaaggaagggttagaatttgataacagtaaggatcctagcagtgacatccttcaatatcttgagaaatttgtccttaaaaggggttttgacagagagtctgctggttctttctgcaatgaagaatctgatccaatttctgaacacgccgtcgtttctaattttgtgaaggaaaatttagaaaattatggtgcgtatcatatgggtcacttgcttctagaatatattgctaataaatctgaacatgtattgagtcgtgagactgccttgaaaattttggagttagaaaagcttacaagacattggggccgagatcggaaacctgaatgcagtctttttctcgccgagctgtaccatgactttgactctaaacgatcagatatccctgatgccccatcatgcatggtagaagtaacataccatctctctaagataattgaatctgtttcccttgattatgctatcgactctacacctagttctcgagggaaaatgttttctgactcctcatttaagagttttcaaggtgatgaggctgctaaggaggtgttagattatgatacaagatctttctgggctcgatatttctggctgagtgcacggttatcaattttggaggataataaagctaaagcacttgaagaatatctcag

SEQ ID NO: 186482 - DNA, 472 bp, Arabidopsis thaliana landsberg
acgatctagcgctgcgcattgggcggagcgcatcgaggcacaccggacaggaatcgtccggtgtgcctcttaacgtcggcttgcaccgaacacttcgaaaggacacttcgtgaacctcgtttccgtccgtatcatcaccgccgacatcaaccgactggtcggcttctacgagcaggtcaccggcagcagcgccaactgggcgacccccgatttcgccgaaatcgccactgcatcaggcacgttggcgataggcagcacgcggacacttgccatcttcggcgaggacatcgctcggccagccgacaaccacacggcgatcatcgaattcctcgtctccgacgtggacgccgacttccagagactgaaggacgtcatcgacgaggtggtgagcgggccgacgaccatgccgtggggcaaccggtccttgctgctgcgcgatccggacggcaatctcatcaacctcttcacgccg

SEQ ID NO: 186483 - DNA, 762 bp, Arabidopsis thaliana landsberg
gattgcattggagccattgatggaacacacatttttgcaatggtaccaacatgtgatgcagctagttttcgtaatcagaaagggttcatatcacaaaatgttctagctgcttgcaactttgatctacaatttatatacgtccttagtggatgggaaggttcagcacatgattcaaaagtacttaatgatgctttaacaaggaacactaataggctacaagttctagaaggtatttattttctatgtatccataagttcttctatattttatttaagaagaataatttatcttgtatttttttttatttataggaaaattttatctagttgattgtggatatgcaaatcgccgcaagttcttagctccatttcggcgtactcgttatcatcttcaagattttagaggtcaaggccgctatccaaaaatccagaatgagctgttcaatctacgtcatgcttctttgaggaatgtcatcgaaagaatctttggtattttcaaatctcgttttctgatttttaaatcagcacctccatatccatatccttttaaggttattcactaattttcttcgtcaagaatgtcgatcagatgagtttccttctgaaacaagtattaatgaagagaatagcgatgacaatgaagaaaacaactatgacgaaaatggagatgttggaattctggaatcccaacaaagagaatatgctaacaattgtagagacacaatatctcataatatgtggatggatgctacaggagcttga

SEQ ID NO: 186484 - DNA, 1018 bp, Arabidopsis thaliana landsberg
atgtcattggaaacaaagaacactaagcgtgatctattgtacgggattgacgctccaactaggacaacaattccaatcaaagatttggctaatgctaagccaactaagacacaagagaaagatctctccgaagaacatcctctcaacaaaatgggaagggataaaggtgaacatcttctcaacaacttgggaagggataacgatgaaggagggctctcacttcgagtaggaggaatgtacatctccttgtcttggtaggatggaaaaggagactgaggaagcacgatgtcttgatgcaggagatgaggtgaaagaagcgacaaagagaaattagaaaaattagggcaaaccaaataaaaactcacagaggcctaattgtcaattgagcccataaagaaaattaggctagaactgccccaacagaaaaggttgttgttgggccaagccaaaaccaagaacaacctttgcatcctgtaacccagaatttgacctagctcatacacacgagcaacttcacggcggctggcggaggagagaggagcagaggagtccgaaaacgctaacagcaaactctgaaacatcggaaattcggatgaaacgaggatggagagagaaaaggcgggaggatctggtaaatatttgaggataggggcggaagagatgtgaatagatcttcagtgaagaaccggaacaaacttcaaaccaaccacgaccagagagacagcaagagaagacgtcattggaatcagctcttcggaaccacccaaaggcgagacttacgacatcaaactctgtcaaaagaggatccgtgaggaggccggaaaagcgcaaagcgacggtaaccggtagcagaaaacataagagaaaggtaaggaagcaaatagcagaaccaaaagtccgacgccggcgagccacaactttatcggcgtcggaaaagaaatgcgaaatacaagtctcgattatcacgtctgaaagagaaagctttacacgttttggagtgacttacactgcttattaa

SEQ ID NO: 186485 - DNA, 82 bp, Arabidopsis thaliana landsberg
gaaaatccagccattagcgacaattatgtcgttccctccgttaacttctttcgaaaacttgatccgagaagtaattttttga

SEQ ID NO: 186486 - DNA, 400 bp, Arabidopsis thaliana landsberg
caagttcactagaagtcacagcgcgtgtgacctactctcactacaagaagataggctatttccgacggacgaaatcgtcggaataacatttgaaacaaacgtattcgacgaattttcgacgatattgattggtcgattctatctcgtcggaaatctgaatgtcgtcgcaaacgtgttacaaattatcgacgggtttccgacgaggtatttttcgataatttctctacgcttttctgacgataaaatttgcttcgaaaccggttggaaactagtcgaaaatgatcgtcggatcctcgtcggaaatagtttccgactattttctaacgaatatggttgtcaggcgttgcatcaaaacgttgttgaaaatcggtcggtatcttcttcgacggtttcccgatga

SEQ ID NO: 186487 - DNA, 684 bp, Arabidopsis thaliana landsberg
atggaaccttctgaaactctctatcataccggagatatcgaagatacaggcactaatttaacagtgtttgatagaatttgggaagagttaatgctccgtacaataactgcagcttcattgagtagtagtaatggatcatcatttggacaaaagtactttgcagctgaggttgcttcattgactactttccaaactatgtatgcgatgatgcaatgtacgccggatgtttcttcgaaagattgtgagttttgtttgaagacaggtgttggtgattatgagtcatgttgccgtggtaaacaaggtggtgcggtgatattaccaagttgctttgtccggtgggatttgtatccttatgctggagcttttgaaaatgttacatttccaccgcctccaccgcagtctttacctcagccaccggtttctttgactcctccagttagcgatagggcaaatacaaccatcaaaggtaatttccttcatatgatatgtaacagaaatatgttgaaaccttatataattgaataactcatttgcaatgatttgcggcttgtgtagatggaaaatcattttcaacagggattattgtggctattgttgtccctataattgttatcttggtttcacttgttgcactatctcgggttcgtagaagaaagaaatcatatgaaacaactgaggttcaag

SEQ ID NO: 186488 - DNA, 603 bp, Arabidopsis thaliana landsberg
acctgttaagaaaacgacgtcgttttcatttcgtttaactcatcaaaaagagaaagaaaacgacgtcgttttcattcttcttcttctgcaaaatcgatttagtcgattagggttcttcattcgacaattttataagaaaatgagcaccaacagctactactcatccgcttccagttcaggatttcgtgtctgtcctcctggtgtcccctcgaaatgttggtgtggagaagagatcattacattcacatcgaaaacaaaggagaatccataccggagattctaccgttgtgcgatagcaatgaaggtacacctttcgattttgtgatatatttgattgattgaaggagtaaatgattggaaattctgttttatagagagaaaatgaagagcacttgttcaaatgggttgatgaagctctcttggacgaaattaagatggtaaatgagaagtgtaagagagttgcagagaatattagtgacctcagaatgaacgtgatggttaatatggagctccttaataaaaacgctaagcagatggaggaagagctgattaagaagatggagggtgaactcttgaccatgaaggagaatgtggaagagctag

SEQ ID NO: 186489 - DNA, 235 bp, Arabidopsis thaliana landsberg
gagtaatttgttgaatgtgttagaatttctgaagaaaccaaatgctaaagaacttgtctccgggacaactgacagagagaatttgcatgacaaattcaagaaagccattgaagaagcttacccggggactatccaagagttagaaaagaaagcagaagaagcaaaaagagccgaagaacaaagagtttctttctgggactctgccaaaactgatactttcaagttttctttctaa

SEQ ID NO: 186490 - DNA, 1878 bp, Arabidopsis thaliana landsberg
atgtcagagaccaccgtgtcaatcaattcggaccgatctaagtcggaggaagaagaccaagaagagtattctccaccggtgcaatcatctccgtcagcgaatttcgagaaagatcgacacttgatgtatttggagatgatgtacgagttgcttccgtaccattaccaatctcaggagatcaatcgtcttacactcgctcatttcataatcgcgggtcttcattttctcggcgcaagagaccgtgataagactctttctcctctctctcaaagaatcgatctttgtttttcccctgaatctgatttagtgaatttcatctataatttctgaaggttgataaagatgttgttgcaaagtgggttttgtccttccaggcctttcctactaacagagtttcactgaaagatggtatttttcttgaatttagttagaagtatgtttatgagcaaattgttaattagttagtgatcaatgaatgagatgttcttgttcttctctgcaggagaattctatggtttctttggttcaaggagttctcagtttcccattgatgagaatggggtaattataagtctatattccttatgctttatatgttacaagatttatctttgttttgcatctgtgtgggcttgacagtttagtttgttgcgtaggatttaaagcacaacggtagtcacttggcaagcacttactgtgctttggctattctgaaggtcattggacatgatctctcgaccatcgactcaaaatcattgctaatttccatgataaaccttcaacaggatgatggaaggtattagttcttagagcttaaaaaagtaaaatgcattttataatgccataagtttattacttattttctttgttctaagtcgtttaggctagcaatattctcatttacatggtgcaacaagtttggcttgtcagcatataatgattaaataagcaatggggtctgaattgtgtttgatactttttcattttgctacagcttcatgcctatccatattggaggtgaaacggatcttcgatttgtatattgtgcaggtaaggaatagctacctaacaggatttacataccatgtctttatactttaagtagagtatcaatctagttttttttttttttttgtggttcagctgcaatctgttacatgctggatagttggagtggaatggataaggagagtgctaagaactacatattaaactgtcaggtttactactgatcttgtagttgcttttgtctttttttcttccattgatatttgtcaatttctgtgttgagaagacattcttgtgcaacattctttgtgcagtcatatgatggtggttttggattgatccctggttctgaatctcatggtgagttgaaaacaatttttctactatctcacagttgattttttccatgtgcagtccaactaagtggcgcatatgttattactgaattgatcattgaggacactttagataatttagttccttcatctaggtttctacttcaatggcaacccataaagaaaagaagtttactatgttcttacgttatgagggaaatatgtttatttgactccactcgtgtatgatgcttacctacgttctgcaacttagttatgcaggtggtgccacttactgtgctattgcatcccttcggttgatgggatacattggagttgatctgctgtcaaatgattcatccagttcaataatagacccttcattacttctcaactggtgcctacaggtactgcttcataaaatctgttaactttcacctcataaatattacctttagattcgtaatggcctgagtgatctgaaattttttcttaccttgcctgtagagacaagcaaatgatggtgggtttcaag

SEQ ID NO: 186491 - DNA, 391 bp, Arabidopsis thaliana landsberg
atgggtgaagatgagagagctatcgaggtctttcagagagctatagacttgaaacctggccatgttgatgctctgtataatcttggtgggctttacatggatttaggtaggtttcagagagcttcagagatgtacactagagttttaacggtatggcctaaccattggcgtgctcagctcaacaaggcggtttctttgttaggtgctggagagaccgaagaagctaaacgagcgcttaaggaagcgctcaaactgacaaaccgggttgaattgcatgatgcaatatctcatttgaaacatttgcagaagaaaaagggtaaaaacaatggaaatggtaatggtggagaaggtccgttcatcgtcgtggaaccttccaagttcaagactgtgg

SEQ ID NO: 186492 - DNA, 103 bp, Arabidopsis thaliana landsberg
tgacagtcctgctcgctcatctgtactagtgtcgcattacccctacgttgctggtcgagtaacaggcgagctacatggacctgttcgagtcactgacgaactg

SEQ ID NO: 186493 - DNA, 1470 bp, Arabidopsis thaliana landsberg
atgaagagtttggataaacctcgatcgttgtctggatcggcgaatatgtactccttctccaatcgtaagcctccggattccgtttcctccggaagtttctcgaatttgaaactcactgcaggtttttctcttgtgcatttcgttccgcttctctaaattcgactgttatgatgatttcgacaatttcacggttgtttaacagagaaactggtgaaggatcaggctgcgatgagaacagatctcgaattggcggtattttggaagctatcttgttttcttcatacattgtttgtgtttacgaacttaaattcgatggatgtgcatgtgaggtatattgctagggttgcgtttatgaaagtagttttgatctggaggtttgagatcttgttttgttcttccgaatagttagcagattcatatttcacctcaatttgaaagaaattttgcttttccatggtgtagaattgtaagctgaaaaagtcaatggaacatgtctatgccttagaggagaaactgcagaacgcttttaatgagaatgctaagctcagagttaggaaaaaggaagatgagaagctttggagaggattggagtctaagttctcttcaacaaagactctgtgtgatcaacttacagagactctgcagcatttggcttcccaagttcaggatggtaagagtaaatgatcatacagtcatcttattttgtgaaatatcttatctatgctgtgttgctttatatgtttcctaacttgcattctgcagctgagaaggataaaggtttttttgagaccaaattcagtactagttcagaagcaatagactctttaaaccagcaaatgcgagacatgtctttaagattagatgctgctaaagaagaaatcacaagcagtaagtcgttgcattattctatttatgacctgtaacgcaattggtatccaagtttgtaacatctttgagataaaaatgcaggagataaggaattggaggagctcaaactcgagaaacaacagaaggaaatgttctatcaaactgaacggtgtggaactgccagtctcattgagaagaaaggtacatttctctgtccttttgaattcacaatgccgttggtcgcatgccttagaaaaacgattgttgaattagttttgttctagactgcgatttgaagagcttgaatatgtggccacacatttctctgtgacgttcatgatttaaagcatttttgtcttcttactgagtgcttcgtctgtggcagatgctgtgataacaaaattggaagcatctgcagctgaaagaaaactcaacattgaaaacttgaattcccaactagagaaggttcatcttgagttaacaacaaaagaagacgaggtcaaagatcttgttagtatccaggagaagttggagaaagaaaagacgagtgttcagctgagtgcagataattgttttgaaaaactagtcagctcagagcaggag

SEQ ID NO: 186494 - DNA, 88 bp, Arabidopsis thaliana landsberg
aaaatgcagagatcgccaatgtcttcagtgtaacccttttgtcaatgcaccaggtaaagaggacgaacttcttcggaagaagtcatag

SEQ ID NO: 186495 - DNA, 1490 bp, Arabidopsis thaliana landsberg
atgggtcttcaaactgtttggattgtgcaagaagcttctagtctagctttgaaacctgagttaatggaaaaatctgcctgtaattttactccgtttagaagatactcaccccaaaataattcagaagtaacagaagataaggagaagactgtattgacaagagatgctaacattggtaacagaggagctagtaatattaacaatggttctaataatgctgagaagaataaaacacagtccagaagcaaactaacccttatgcgagaccatccatcgacaagtgtttccgctgtcaaggacaagatcacagatcgagtgtttgtcctagtaggagaactgtagcttttctagaggaagaagaagaacttgaagaagaggatgagtatgcagaggttgaatttgctgaagaagagtcgaatgagatgataaatcttgtacttcaaaggatcttattatcatctaaggaagaaggacagcgaaggaatttgtttagaacacgatgttctattaacgacaaagtgtgtaacttgattgtggatattggtagcagtgaaaacttagtttctcagaaactggttgaatacttgaagttaccaacaacgttacatcaaaagccatattccttaggatgggtaagcaaaggctctcaattttgtgtatcactgtcttgtagggttccaatctccattggtaagcattacaaagaagaggttctttgtgatgttctcaacatggatgtttgtcacatcatacttggtcgttcttggcaatacgataatgatattacgtatcgaggaaaggacaacgtgttaatgtttacatggaattgacataagatcgttatggctcctgtttcacactttgatcagaatctagtgaagaaaaattctaatttcttggttgtgacacaaagtgaaaaagagcttgatgaagcaattaaagaaattgaatgtatatgtcctgtagtgattaaagggttgatgagtgctgaaaaaaagacaaatcgattcagacaaaagtactagaacttttaaaagatttcaaggaagtgattgcagatgagctaccacaggaattgcctcctatgcgcattattcaacatcagattgatcttctcccaggatcaagcttactgaatcttccccattaccgtatgagtcctaaggaaaatgagatattgagggaaaagattgaagatctgctgaggaaagggttcattcgtgagagtatgtccttgcgtagtaccagtccttcttgttcctaagaaaggtaaccaatggcggatgtgtgtcgatagtagagccataaacaagataactatcaagtaccggttcccaattcctcaactggacgacatgcttgacgagttaagtggttctaaggtcttttccaagatagatcttcacagtggataccatcagatacgaattagacctggggatgaatggaagacagatttcaagagcaaagatggactgtacgagtggcag

SEQ ID NO: 186496 - DNA, 981 bp, Arabidopsis thaliana landsberg
atgatggtgaaaaacgaagtcccacgtcttgaaggtaagctaagctatccattttcgatggtgcagttttctcgtgcgagaaaaagatatttgggtttattggcaaagtagacactttttcaaaagttatttgagaagtaggtagtttttttagatattagagaaataggtatttttttttcttttgtgggatagaaaatatgtgagatagaaggtacataactaaaaaaacaaaataaatgttaaatacaattgtacccttttgttttgtaagaaagaacttttggtgtaggcccaaatcttttagagataatggatcaaatactattttcatagcctaattaatttgacttatgttatttggcccaaaaaaaatttcaatcgttttcgtttttcaatctatttcttcagacggttaaacttaacattatatcatttttgtcgattaaaacgaaatttaggaaaatcctatggtgtacacaatttttaaatgaatacggaatggtgtaccattaaaatcatgatattggtgacgggatggtgtacacaatttttaaatgatttaatataattaaatttaatggtgtacatgttggtgtacaatattatgatatacgagaatagtgacagaatgatgtacacaattttaaatgatagcttgtgagattgatagacataacgtacaacatttgcggtatactaataggaaatatataaaccattattttaatttactggtgtacatcatttcgtacactgaatttgtacactatctcataaaccttcaaatacaccaaataattctctattttatagatatggtgtataatatttttgaatatataacctattacttcaatatactaaagtacatcattttgtacactgatgtctgaacactatctcataaactttcaagtacaccaaataattctctatctcatagattcggtgtacaatatttttgaaggtgtacgatag

SEQ ID NO: 186497 - DNA, 288 bp, Arabidopsis thaliana landsberg
atggggaataggctaggtaactctaatggagtgggaatttcgaagaaatccaggtctttagatcttaagacgctctataagtctagcatttccaaggattcagtgaataagagctttaaaagaaaacataggtctgggattgatggtgatcagttgaagcaggacaagaagagcaggaaagttgtttctctaagtagttttaagaaagtaggtagccagaacgagagtattctggataaggcatgcaatggcaccactatattgcacaatttggaggactccaaggag

SEQ ID NO: 186498 - DNA, 1293 bp, Arabidopsis thaliana landsberg
atgaaagtgttttcttgttatgagaaagttagagggaggtctgttaatattctcgaaggacttgaattgcataccggtgtttttagcgcggtggagcagaaaaagattgttgattttgtctatgaactacaagagaaaggccgtagaggagaattacgaggtttgcttctggttttctttcattgctttttgcataatgtgaatttgaaaactctaaacggtacttatctaatcttgaatttttggttctttttcgatatctagagcgtacttttaccgctccgcataagtggatgagaggcaaaggacgagttactattcaattcggatgttgttataactatgcaccggtaagtgactctttcctcatctttaaaaatgaaaacattttatcaactatagtgaatatggaaagagttttttgttttttggataggacaaagcgggaaacccacctggaatccttcaacgtggagatgttgatccaatgccatctattttcaaagtaataatcaaaaggttggttgggtggcatgtacttcctccaacttgtgtaccggatagttgtatcgtcaatatctatgaggaagacgattgcatacctcctcacatcgataaccatgacttcctccgccctttctgcacagtatcattcctcagtgaatgcaatatactctttggttcaaatctcaaagtcttaggacctggtgaattctccggttcttactctataccgcttcctgtcgggtaaatcactaaagtttgcgtaccctctctgagtttattctactgaagcttctgttgcttaactttttgacgagtttttcacttttttttgcttcagatcagttctagtgctcaagggtaatggagctgatgtcgctaagcattgtgtacctgccgttcccacaaagaggtaatttgttagcaccttgattgtttgtcaacgtttatttatatgtttggtaatgaaaccattactctctctttttacaaaaggatttggtgttttgcaatttatcggtgttatctcgttttgttttgttcatactgtttttgctatcgtcggttctgctttcaggatatcgatcacgtttaggaaaatggacgagtcgaaaagaccagtcggattcaccccggaacctgatttggaggagattaagccgttgccatacgaacacaccacgccgagtactcctgctgatgcagtcattagctcttcaagatccagcattgatcaaaatggtagtaatcacaacaatcgaactgcacatggaggaggaagcaagtatc

SEQ ID NO: 186499 - DNA, 441 bp, Arabidopsis thaliana landsberg
atttggaccagttcacttcagagaacacacctaacagcacgttccattgtcggattccccaaggttggtgtttacctactgtcggaatgtcttctgactcttgaggtgtataatattttgttgcgaggaaatcgatttctcatattttcatcttaggtgcaatggcgtgccctggacgagatcaatgctggagtttgtgatgggatgacatatgaagaggtaaagaagaacatgccagaagaatacgagtaagtgacttgatcaaatccgtatatgtaatgtaaaaaagtgttactagcagctataccctcgtagaacagaaaataaactctcagacttctctacctcatcttgtggtgcatatgactgcagatctcgaaaaaaggacaaattacgataccgataccctcgtgcagagtcctaccttgatgtaatccaacg

SEQ ID NO: 186500 - DNA, 475 bp, Arabidopsis thaliana landsberg
atggaagagcctgaagatcggagagagatgtttaaagaagtgaaattcgccgggattgttccggttccggtgacggcgatctcagatggttcagcttgttgaagaagccactctattgtctcaccgtcggatttatgacctagctctcgcgttagctgaaaaaccctagctgcacataacgccggcatccttattctcctccctcttccgtctactttcgtgtgtcggtctttcgtcgacgctcgtttcaacggtggctttttagctgccaccaccgcagattcctcttgcgtttgtaataactctttttgcgttgtctgcggttgtgacttttgcgattgcgattgaggttgcgattgagataattgttggtgttgatggagagaaaatagagaggaggaggaggaaggggaaggttgttgttgatggttgtcgtcggggtcgtgttttccgagtagttgaaaagggaaagtag

SEQ ID NO: 186501 - DNA, 2407 bp, Arabidopsis thaliana landsberg
atggagggccctgtttgctggattggtggctgggccatctatgcttctcacagggccaaatacgcaacatacgagtttggctgtttatatattgatgcgtgctgcggttctcgcatcgcggtgcggtattaaaagtaaacgctttggtaccatttgcaagcctcttacttggaaacatggagatttattcctcatgtgtctctcttcctcacagattttgtatgctttctctttctctctataaagatattaacttttgtggttcagctagttgttactaggttcttggttgttattagattcttagattagcgattttttttttttttcaggtctgcttacattttgaaacaagaaagccttccttcatcgtacaagtctttccttaacaaacaaggtgggaaggatctttcaatcttacaaggcgtaaaagatatcgcaaccgcgcaaccgttcactaatttaagagcgattgagaaatattacaagtctgttggagttgatatcaaactggatcctaccatgaaagtcccctgtacggtaagttttctatgatactatcttttttgggttgttaagacgaacaaagcatttgtcgatagttgatgtatcgtcaatgagtctgcatgcatggttttacgcaatacttatgttgttacttgcagataatacatggaaatgagtcatgtgttaagcatggtgttacatttttccttcaagcttacaagagggcgttacctgtctatgtccctgtgtatttgattccagcgctaatagtccatcgtcaagacctgctaaaaaagtaataggtttatgtctaaactgctcattgaatggtatatatcctctgattttattcatcacctcataatatgtttcatcacaggcaatactctatacttggcaagggtcttctgggcacagcgagatcaagtttgtttctcgctacttactgctcttctgcctggttagaatcaattcttggaaggctcttatcgatttttgttttgttctcacttgaagttggaacttagaccatctctataatgatgtaaaatagggcttggacttgtctactattccgcacttttgagacatgcaacataccgcttgtggccatagcaacggtacaaacgaaagccattctcatcatatatcattgttaatataatacctaacgttaggcttctcctgcagttcccaacaggtctggctttagctattgagaagaaaagcagaaggatagagatatcactatactgcttagcgagggcgatagagagcttctttacttgcatgacagaggcaggatacattcgaccgcccaagagtttaagaagagcggatgtggttgtgttcagcgtttcgacagccattataatgcattgttacgcacaagaaagagacgtatttcgatcaaaatacttgaacgtactagattgggtcttcggtgttcctcctcctacccctcctgctccttcttgcgaaacaacctagagacattcacttttaacctaaagatctttctgatgtgggacagaatttggtggtagaatgctcatttagaggctctaggagatgtgctttgggtcacttttatataccacaatccatttgacaattctggtccatgttatgtggacacaccaatatataatctggtagtcttacatgttctacaaagccaaaataaaacgaagctaagtattttcgtaatcaacaacactaaaccataaaaatgatggaccaagtaaatacaatatggctttaataatttgatacgaacatccaccacctgtacactgcatatccatagaccgtgccgtataaaaccatcctcatagggtacactctaaacctgcattacttggtccaaagatgtatccattatccattaattaggccagtaaaccaaaccaaaatttggatctaacaatttaaatcaatagaaaatattcacgaaaataagcaaattcaatcataacttgtacacctaattcgtagatatacaataatagatacattgcaaatggaacctaacattgtatgtatggtttgagattcgctcttttgaatccaaattaatatcggttgacaaaaaaaaattgtatgtatgatttatgtttatccaataggttttaaggcaataaagctaaaccaaaatttagatctaataattcaaagattaatatataatgatatgataaaacaactagtttgatattgagataagataaacaagtaaccttgaaggatgagatttgcgggcgagagcggctgatctttcctcggcggtgacaggatagccccaccgagagaaactccgatcaaagaagtcccaatccggcaaaagtatgccgccaataagagaaataccgacggcgtaagtaacaaccgtcttctttaa

SEQ ID NO: 186502 - DNA, 30 bp, Arabidopsis thaliana landsberg
aactcacagacaaaggtgttaactttgaag

SEQ ID NO: 186503 - DNA, 114 bp, Arabidopsis thaliana landsberg
atggttagggttccaccttttaaaccctccaaagaaggtgatccagagttggaaactttcaaggagcctaatcttgattccacagtcaggtttgggtttggcgaagaacttaga

SEQ ID NO: 186504 - DNA, 2540 bp, Arabidopsis thaliana landsberg
  unsure (1)..(2540): unsure at all n locations
atggatgggaatatcgacccagctgttctggcttctctccctccatccatgcaacttgatctccttgctcaggtaattaactatatttacaccatatctttgcagcatgttaaatttcatggacgtttcagattatttaataatgtctttacttgtagatgagagaaaaattgatggcagaaaaccggcaaaagtaccaaaaggtcaagaaggtgagttacataaatcactggctcattcttggtccagttatgtatttgaatctctatgtataaggagacgcggaacactgactatggaagtaattatgtataggcccctgaaaagttttctgaattgcaaatagaagcatatcttaaaactgtagccttccgtcgcgaaataaatgaagttcagagatctgctggtggaagggctgttggtggagttcaaacttctaggatagcttcggaagcaaacagagagtttatattctcgtcttctttcgctggtgataaagagtgagtttcagtttgaagtcttattaaagaataaggttctttctaaagtgaaaataactgatatatttaatttgttctagagtactggcatctgccagagaaggaagaaatgatgaaaatcaaaagaaaacgtcacaacagtctttgccagtctccgtcaagaatgcttccccgctgaaaaaatcagatgctaccattgagttggatagagatgaacctaaaaatcctgatgaaaatattgaagtatatatagatgaaaggggacgttttagaataaggaacagacacatgggaatccaaatgacacgtatatccagaggaacttacatttgatgaaagaaaaggagagaacagcttctggttctatggctaagaatgatgaaacattcagcgcctgggagaactttcctactgaggaccaatttcttgaaaaatcacctgttgagaaagatgttgtggacctggagatccagaatgatgattccatgctgcatcctccatcttccatagagatatcatttgaccatgatggtggtggaaaagatctcaatgatgaagatgatatgtttcttcaattggcagcgggaggaccagtgacaattagttctacagaaaatgatcctaaagaagacacttcaccgtgggcttctgacagtgattgggaagaagtgnnnnnnnnnnnnnnnnnnnnnnnnnnnnnnnnnnnnnngaatttaagcaatcagcatatccccaaggacattagtatcgctgagggtgtagcatgggaagaatatagtttgaaaaatgccaataactccgtggagaatgatacagtaacaaagatcacaaaaggatatctggaagaagaagctgatctgcaggaggctatcaagaaaagtcttcttgaattacacgataaggaatccggggatgtccttgaagaaaatcaatcagtaagggtaaatcttgttgttgacaagccaagcgaagatagtctttgttctagggaaacggttggtgaagctgaggaagagagatttctggacgaaataacaatcttgaaaaccagtggtgctataagtgagcagtccaacacttctgtagcgggcaatgcagatggtcagaaagggataaccaaacaatttggtacacacccttcttccggttctaataacgttagccatgctgtgagcaataaattgtcaaaggtaaaatcagttatctcacccgagaaagcatcaaatgttgctagtcaaaaccgcatgctataaaccatggaaaaacagcacaatgaagaaggttctgaaagttttggtggagaatctgttaaaggggctggtgtgcccatagctgatgaggaaataactggctttcttgatgaaaaagataatgctgatggtgaatcatctatcatgatggacgataagagagattatagtagacgtaaaatccagagtcttgtcactgaatcaagggacccttctcgtaatgtcgtcagatcgcgaatagggatactacatgacacagattcacaaaatgaaagaagggaggaaaataactctaacgagcacactttcaatattgacagttcaacagattttgaagagaaaggcgtgcctgttgaattttcagaggcaaatatagaggaggaaattcgagttctcgaccaagaattcgtaagtttaggtgatgaacagagaaaacttgagcggaatgctgaatctgtgagcagtgagatgtttgcagaatgccaggtttgccccttgtctttatacatatgagtcattgtcctctttatacagcccttttgcaaactttccgaagtttctgttcgtgtttgatttgacaacaaacttataatgctttgtcgatcttggttttccgtaggagctactccaaatttttggcataccgtacatcatagctcccatggaagcagaggcacagtgtgcatttatggaacaatcaaaccttgttgatggcattgtcactgacgattctgatgtattcttgtttggagcaaggagcgtgtacaaaaatatatttgatggatcgtaa

SEQ ID NO: 186505 - DNA, 394 bp, Arabidopsis thaliana landsberg
atgtttgctgtgaaattcaacaagtctgatattcctggtaggaatagagcatttggttcctatgttgttccagaacctcggtcaagcggtaagaagaaacaactaggagttatttgttggatttgcagtgagagtttcagatttatatgcttactgtgagaatgccttcgtttcacagagtttgtggaggacatagatctcttgatcagaaaggctgaacggtgtttagaagccggggcagacactattatgatagatgcggatgatgtctgcaaatacgcggattcccttcgagcagacataattgctaaagtcataggacgtttgggaatagagaagactatgtttgaagcatctgatgcgaagttggttgagtggttcatcaaacgttatg

SEQ ID NO: 186506 - DNA, 1220 bp, Arabidopsis thaliana landsberg
atggcgatcctctacacaaggatcgtattacttatctccatcttccttgcatcttcttctgcatttgcctctttctcttctgtcgacgagtacctcgtaaactgctgctccaacctttactccaccgtctataaccgccccttcatgcgcgacgcatctgcatcaaacgaccaattcttctcctctgaacgatcaatagctcttaaaggagaaaatctacctcataacgttccacaaatttacagatccgctaggatattcgcacaacaagcgaaatacaagttcaatgtccacgagaaagggactcatatggtacgtctccatttcaatcgtctctattcctctagaatcgatctcaatgacgctctatttcacgttaccgttaacggtcacgtcgtccttagaaattttagcggcgactcgtcatctgattttgaatctagggttagagaattcttgatttgggttgatgttggagaggttgttattaggtttgttcctagtaaagattcgaactttgcattcgttaatgctattgaagttatctctgcgcctaaggatttgattggtgacgttgcaacctctgtatctcatgatgggactgagaaattcaatggtttagctaaacaagcaatggaggttgtgtatagagtcaatgttggtggtagaaaagttactccttttaatgacacattgtggaggacttgggttactgatgaaggattcttgaaaaccggtgatgggtcgtctgagaaaagttacttcaccgggaggattaagtataggcgtggaggggcgagtcgtgaagttggtcctgataatgtttacaacactgctcgtgttggtaaaagaagcaatggattggttgatatgagttggggtttcaaggtgaatgtgggttacaagtatctcatccggatgcatttctgtgacatagctagcaaatctctcggcaggctttatttcaatgtctacattaacgggaacttggcgtatgaagatttcgatatctcatacgctgcggataatgtccttgcttctccgtattacattgatttcgtggtggatgctactgctgatgacaacaacccttcaggatcgtcgataaccgttagtgttggaccatcaaacaagactagtgttgatggaaatggagtggatgcgatattgaacggtgttgagatcatgaagatgaataactcgatgggtagtcttgatgg

SEQ ID NO: 186507 - DNA, 1071 bp, Arabidopsis thaliana landsberg
caacaattggcatcattgattgaaggtcttaatactactgagcctcactatattcgttgcgtgaagcccaataatctcctgaagccttctatctttgagaaccaaaatgttttgcatcagttacgatgtggggtgggatttccatattttagttttctaataaatgtgcttgtcatagttacatgcaagttttaaattctagatatgcatatctttcagggcgtgatggaggcaatcaggattagctgtgctggatttccgacaagaaaaaagtttgaagaattcctcgagagatttagtgtcctggctcctgaagttttggataagaggttccctctcttcaacttaaagttatgaaacttacctagatattgaaaacgttctaacttttggttggcctctttctagtactgatggttggcctctttctagtactgatgatgtcgcctgcaagaaacttcttgaaaaagttgcactccaaggataccaagtacgtttttgaagcgccatgtgttgaatactttgcattgtggccgagctttaaaactcttatgttaagcgtctgattgatcctccttttatgacgcgcctttgtttttccagattggtaaaacgaaggttttcctcagggctggacagatggctgacttagatgctcggaggaatgaggtcttaggcagagcagccagcaggatccagaggaaattccgttcctacttgtcccgcaaaacttttcttatgcttcgcaaggttgcaactaatatgcaggctgtgtgcagaggtactttaaagtcaatagtttctactcaggcaacttgaaatgttactaattattcatcccctgctttgttgtacgtgatttgtaggtcactttctcggcttactttgagggcatgcgcagagatgcagctgttttgaagattcagagagacatacgaatgcatcagtgcgcggaagtcttacaaggaattatattatgccgctgtttccattcaattaggaatacgtggtatggcttcccgtggcaggctccggttccaaagtcaggccaaggcggcccctatgattcag

SEQ ID NO: 186508 - DNA, 167 bp, Arabidopsis thaliana landsberg
atggcagatgcagaccaggtgcagtcgtccaccgaagaggcggccgaggtagaggtagagactaccaccgaagcgggaaccaaagaggcagaagcctccaaggagaccacagaggaaaccagcgaggacactgagacctccgacgaagcggacaaacaccgcaaagc

SEQ ID NO: 186509 - DNA, 1074 bp, Arabidopsis thaliana landsberg
ttagtggtgacctctgtacaaaaatatcttggtaaggtatctgaagaagctaacagaaagagaaacccaggtcattttcatggtcttgtacccaatctacatgccaaactgggaacttctgctgagaaacttctcaggcataaatgggtcgatgaaagtactgataataagggcttaaagaacaaagtatgtccatttgtgtcaaatttgcggatagtacaatttacagtagtgctcaatcttctgaatgtgtatagctttgggtctgtgcagggtgaaatggttcagaccatattgcgaatatacctggaagccagtggatccacatctgatttgcttgatgagcttgcttgtaccattttacctcaggtacatggaaaaatatttctctgggttctactttcatagattttgatatcttatgataacacaaaacgtccacttgggttatggttcatggaaactaaacccatcttctcatgttgcgttgattaagtgttacatcctgaaatggaaaatctgcaaatagttaaatacctataacttatttcatatggagaagtatattatataatttaactcatttcacgtctctgaaatttgtttgcattaggcctctctatccaagtcaacaggagaagatgatgatgcccgtgatcatgaattcccaaccctatgcgcagctacttttagaggatggtacaagacattggtaaggcaaattcttagctatctcatatttatttcagtgagtaattgcgtcagagactaatagcctaattttcgctggtgctacatgcagcttgaagagaatcttgcaattctcaacaaactggtaagtaatccatcttagtttgtccgattctcttcgcttattattacaatcttctttgctatacaattacagttctcacctttgtgttctatcatctgtatcctaatcaggtgaagacggttagctcagagaaacgacaaaactgtcaaccgaaaactactgaggcacacttgaaaaacattcagaaaactgtaaatgtggtagtatctttagtcaacttgtgccgatctcatgaaaag

SEQ ID NO: 186510 - DNA, 418 bp, Arabidopsis thaliana landsberg
aaagagcaatcaatcttgtctacattgagctctcctcacatagtcaaatacataggcactggtttaacgcgcgagagcaacggattggtgtacaatatactgatggaatacgtttctggtggaaatcttcacgatttaatcaaaaattccggcggtaagttgccggagccggagataagatcatacactcgtcagattcttaacggtttggtgtatcttcacgagagagggattgttcactgcgacttgaagagccataacgttctggttgaggaaaatggcgttttgaaaatcgccgacatgggttgtgctaaatcggttgacaagtcggaattttccggtacaccggcgtttatggccccagaagttgctcgtggtgaagaacagaggtttccggctgatgtgtgggctttgggat

SEQ ID NO: 186511 - DNA, 411 bp, Arabidopsis thaliana landsberg
gtttaacgattttgtacagactagcaggaattcgcaattgttcgccgtctctgatgaagacggccatgtgagcttgtttaattcttccagtaagaagtttgcgtcttctgcaactcaccaagagaatacaggtattgtctcgtccctgttagaaccctgattttctctggagtttaagagattactgatttgtgtttgtttcaaatgtgtagagaaagctagatttcgtgactggattgctcattataatgctatctttgacatttcttggatcaaggtgtgttatattatgtctgcgaatgaaacaagaatttttttgtggatttaagaagaaactcatttgatgtttacttattgcaaattttgttgcagggagatagttgtcttctgactgcttctggtgatcaaact

SEQ ID NO: 186512 - DNA, 169 bp, Arabidopsis thaliana landsberg
atggcgaaggatattacaaaagcagtgaagaagggcattgatccagttgctgttaatagtgggcttggaggggcctattactttaagaacagccgtggagagagtgttgcaattgttaaaccaactgatgaggagccttatgctcctaataacccaaaaggttttgttg

SEQ ID NO: 186513 - DNA, 170 bp, Arabidopsis thaliana landsberg
atggaagagagtcatattaaacaagatcatggtcagcatcaagtccggtttgttgtgtgcggtagtctgcaagtatcaacgcccatcgacatctctcgtgatttggagtccacccaatataacgtgccctcggatttctccgctcgatcctacccgacaaagtcagatgt

SEQ ID NO: 186514 - DNA, 6 bp, Arabidopsis thaliana landsberg
atggcg

SEQ ID NO: 186515 - DNA, 178 bp, Arabidopsis thaliana landsberg
atgtctagcattgggtgtggatggtactatgcttcaaaatacagagccaaattgaggcatcaatacgctttgcccgaggcgccttgtgccgatggcgccattcactgcttctgctgtccatgtgctcttactcaagaacaccgcgaactcaaacatcgaggtcttgatccctctctag

SEQ ID NO: 186516 - DNA, 537 bp, Arabidopsis thaliana landsberg
atggaaaacacacttctcgtcccaaaaggacaacaggaaggaagctgcgtctctcttcttcgtgctgctgtgagtttataatctattctgaatctctctattcattaaactccaaaaagatctctgttcttggttactgattagatcgatttgcaggggaatgatcaaaatgagagtagtatgctcatcttgcaagagacatggaatgacgtttctggtgcactggtggtttacgcgcctgtcgatattccatctatgaatactgtactgagcggtggagattcagcttatgtggcgcttcttccatcggggttctcgatattgcctgacggatcatcatcatcgtctgatcagttcgataccgatggcggtttggtgaatcaagaaagcaaaggatgtctcctgactgtaggatttcagatcttagtgaacagcctaccgactgcaaaactcaacgtggaatctgttgaaactgttaacaacctcatcgcttgcaccattcacaagatcagagccgctcttcgtatacctgcttag

SEQ ID NO: 186517 - DNA, 303 bp, Arabidopsis thaliana landsberg
atgcttcctccgcatactggtgatgctttagctagtaagatccatgaatgtttgaaagagtggggaatagaaaagaaggtgtttacccttactttggataatactacagcaaataatagtatgcaagaagtattgatagatcgtcttaatttggataataatttgatgtgcaaaggggaattctttcatgtgcgttgctgtgcacatgttttaaaccgtattgtccaaaacggtttagatgtgattagcggtttagatgtgattagcgatgcattgtctaagataagagagactgttaagtat

SEQ ID NO: 186518 - DNA, 1018 bp, Arabidopsis thaliana landsberg
atggtaagcattccaacacttgtggaccttctttatcattaatttcagttatttggtctgtcaagtatatatgtacactcatttattcttggcagttttcgaaagccgaaggcaaacacatagaggagaacaaactcagggtcacgctcgtaccgccctctgactcacctgaactatctccaatcaatacaccgaagcagggagcagtatttgaagattccatcctcaaggatcgtttatatagccagtcagagaccctagctccgccacaatatgtaagaagagtatttaccccttttcgcaacaacttttatgatttgttagtaagatgaagagtaatttgccaagcagtgagtgtagttatgttccagcaagttcattttagcttagcttataatcacagttattgggtgcaatagggattttcttgtagttatttgtttattctcaaaatttatctttctaggagggtgagattgtaaaagagcctaggatggttggacatgatgagttaaaggcagccgacaatgcaaaggagttaaagacaccaaaaatggccacagtggattttgtggaagatcgatatactgctaatgacttgaaggcaactaaagatagctacgattcatcgaggatggcaaaagaaactggattcgatccaattaggtctcataaggatgcggatgatggaagggcgattaaggcaacaactaatttggacgctcccatgaagaaggccatggatctacctagggatcaagggtttactaatggaatagctgttgacagtgaaccaaagatatctaaggagagagatgttgtccagctgcagaaaacagatggccagaatgtcagaggattggatgaacttaagttggttaaagacattgaggagatgaagctgaaagtggatgctcttgaatccaagttaaaacaggtctgcttatcaaattttaaaatccataacttccgtgctatatgtaactgtgctaaagagtttaaatctggtgcaggctga

SEQ ID NO: 186519 - DNA, 336 bp, Arabidopsis thaliana landsberg
atggagactgaatacgaccaagttcttcgatccgttgctcaggtgaacatcgccgaccaaatcggagaatccgacgacgtagaaagagacggaaacggcgtaaaagtttcgtgcttcactgaagttttcgatgatgttactatccagttccagatcatccgtctcgcgaaacaggttcccgccaataaacttagcttggtccttttaacctaattctcaagtctttgagcttcgtcggaactaaaattggacttaatcgaactacagatttacgtatgggtcggttgcaattccgccaaatttgggagtttgtacgcagccgcttcaacacgaccg

SEQ ID NO: 186520 - DNA, 728 bp, Arabidopsis thaliana landsberg
atgatcctttgccactccggcgcggtggatccctcgagaccgcttacaaacttgagtcaggtcaccaacaagatcttcacggtgatcaccgagctcccaacgccaccaagccgtctaggtgatgccgatcaccaagagtaacaagacgtagactttcgcttgaccaagagaagcctaatgcaagtggtgtgtgctctaggtggctctcactagcgctaatgaggaacaaatgcgggattatgattctttaatctcctcactaggcttttggtgcttgcaatgctctagcaatacgctggaataaatgtggagtgcaagacattgaatatggtgggtggagggggtataaatagccctcacccaccaactagccgttacaggcatttcactgcgcaatggccgaccggacagtccggtgcgccaccgttgcgccaacggtgcgccaccggtgcgccaacggtcacttccaacggctagttctgacacagagccgttggactcactgtccggtgcacaccggacagtgaacagtccactgtccggtgcacaccggacagtccggtgcgatgtccggtgcgccactataattcatttctgaaggcagtcgctctcgggttttgctgcacggggagaccttcccctaggctggcctggtcccacctggcagatggtgcaccggacagtctggtccccagggccagtaaccctacctcttgtttttcagctaa

SEQ ID NO: 186521 - DNA, 121 bp, Arabidopsis thaliana landsberg
cttatccacggcggcgtacaccagtgttacccacttacctaagaacaacgtggaccgcgtgccgcacgaatcacggcggcaatcggtcgccggcggtgaagttcgcgcgctggcggcctga

SEQ ID NO: 186522 - DNA, 739 bp, Arabidopsis thaliana landsberg
atgaagccccgccacatcttcaaactaccttctgggcgtgatgttgaaattgctcgcaatgatggtaacagtcggcagttttgcttttcatgtactaatcgttgtgcacagccttatgtattgaagatggcagatggagatgaacatttttgtactcttacatgtatagtacgttctgtttaagatatgagataagtctgaatgagcaactgaaaaggcttttgttttattgttgagaatttgatctaagtctattggttttatcttttatcttttttactataatgttcaagtttgtttttgtctgaaatccttacacaaaaactccaatctctccacttacatgatcaatctcatgtgatttggtatgcggttttgtcatttgcaattaggatcgatcgccattcctattctgaaactgtagcagtgatgctgactacataagggtattgtagaataacaatcctgtgtagtgtttctggtttctgacctatgtccattggaggtgcaaaagaaatgtgtagatgccgttcagacagttatacaaaaggtcctatctgatcccagtgagcagtggttgtgcaaaaaacaaaaaaacgggcaacttgcaaaaacaacaacccaagtctttaccaaacgcacgaaacggttccgagaagaagtcaaaatcgtaaccaaccaaagaaaaaaagccatcgcccaattcaacgcagccttgagagagagagaatcttggtaa

SEQ ID NO: 186523 - DNA, 375 bp, Arabidopsis thaliana landsberg
gttcatgccctactcgatgggtgtgatcttgccggctacattgatggttcttgtgttgcaccaccacctactgtcaccaccaatggttccatcacgacgaatcggaggtacactcagtggaaaagacaagacaaaatgatatattgtgctttaatcggcgctatctcagttaatgttcaacctattctctccacaaaagccacttcggccgagatttgggaaacatcatcaccatctaacggtgtcatcagaaggatgaatttttcgccttcaagaaaaaatagacagtcccaactctaccaaatattgactccagatcgaaacccaaagaacatctccaaagacgttgactgcatccacagagtgaatcattga

SEQ ID NO: 186524 - DNA, 424 bp, Arabidopsis thaliana landsberg
gaaaaatctcaaacccaagagaccttaaagggattcttgagacgggctcaaaatgagttcggcttaaggatcaagaaaataagaagcgacaacgggacggagttcaagaactctcaaatcgaaggcttccttgaggaggagggcatcaagcatgagttctcctctccctacacgccacaacaaaatggtgtagtcgagaggaagaatcgaactctattggacatggcaagaaccatgcttgatgagtacaagacaccggaccggttttgggccgaagcggtcaacaccgcctgctacgccatcaaccggttatatcttcaccgaatcctcaagaagacatcctatgaactcctaatcggtaaaaagcccaacatttcatactttagagtttttggtagcaaatgctttattcttgttaaaagag

SEQ ID NO: 186525 - DNA, 1096 bp, Arabidopsis thaliana landsberg
gaccttctcggggatcggctttaacatggcacatgcggatgaagtttgctcttgatacagcaaggttctacactcaagtgcccacatttaacaatcctctctaccggttgattaatttcggtttaggtaaaccgttttcttatgttggtttggaaatagagctgttgagtatctccacgagcgttgtcgtcctccggttatccacagagatcttaaatcgtcaaatattctccttgattcttccttcaacgccaaggtaaacaacttgaatcattaatgatgattctgttctgagctaaccgaacaagatttgtttcgttgattcaagaatcatttcattcatttgtctttagttccatctctaacgatagatcaacattcagatttcggattttggtcttgcggtaatggtgggggctcacggcaaaaacaacattaaactatcaggaacacttggttatgttgctccagaatatctcctagatggtaaaatattaacatttccctctatattgatcgactttgactcgttgtcatatcactagagttatagcacatagtttgatagtcataatcatgtgaccccataacattaagtttctttcattacgtctaaaattgttgttctaaatcaaatcattttgtttgttgatgtattatttcaactaatcacacataaaaatcattatttgattagagatggtagttgttgggtcgctaaaccggtttattgagtttgtctcattgcaacatctttatgtccctcaggaaaattgacggataagagtgatgtttatgcgtttggtgtggttttacttgaactcttgttaggaagacggccggttgagaaattgagttcggttcagtgtcaatctcttgtcacttgggtaagtccggtttgtgttgacgttattgccatcaatacatgaatcagatagcattggttaatgagtgtaccgtttcgaaaaatttgcaggcaatgccccaacttacggatagatcaaagcttccgaaaatcgtggatccggttatcaaagatacaatggatcataagcacttataccaggtttgcgtcatcttttgtctttgtgtttag

SEQ ID NO: 186526 - DNA, 205 bp, Arabidopsis thaliana landsberg
atgcaggtatgcaacaaatatcaaaagacctcttctcatattcgctacagttcttcataaacaaaactgaagaaatacccagaaaacaaaattcagctaatcgtagagaaagttcaaaaaggctaaacctttacattgacattagcgctctaaatttgcagacttttgaaagaaaacctgggaagctaggcccaaatcgaaaagg

SEQ ID NO: 186527 - DNA, 377 bp, Arabidopsis thaliana landsberg
  unsure (1)..(377): unsure at all n locations
atctacgtcgagaagctcgtctaccagaaccggaactcgatcgacgctatcaccggaccgtggagcgtgtatctcggtgacaccgtcacttacgtgctcgacggggcaaccgcgaccggcggttacgannnnnnnnnnnnnnnnnnnnnnnnnnnnnnnnnnnnnnnnnnnnnnnngtccggcgccgcgacctacacatcgacatcaggcggcacgaacgacaaggtctgggcgnnnnnnnnnnnnnnnnnnnnnnnnncgacgtcagtgaactaccgcacgtgcgtcggtccgaacgtctacgccggcggcaaagccggcgggacagtgaagctcacctacaccgtcaaggtgatcggcaccggctcgtcgacgat

SEQ ID NO: 186528 - DNA, 169 bp, Arabidopsis thaliana landsberg
ctctttctgtttccgacttgattcgaataaaaacgacaaatgttatctctacccgtatccgattatgtttaatatattatgcattgatatttcacgctacgatctggaccgacgtttagtgtggaccctgtcacgagttttatctatgacggaccaaaagaaaaactaa

SEQ ID NO: 186529 - DNA, 1211 bp, Arabidopsis thaliana landsberg
gtggaaattcaggtggctctggcgggttaggtggttcaggcggtggtggtaatggtggttccggcggcggtggtggtgatggaagcgacggaaaaggaaagaagcggtcacttctctcatggtaatttttcatacttgctcctgtcactactactgttcttgtgtaaagatgtttctttgaaaagcaattcattgaagcagatgttggaaatttttcttggatgtgttaataatttactcacggaacactttttttctagtatgattctttgcttttgacttgagcataaacacgcttgtgtgcctttttctatggttgcttcaggtaccaggctcttctctcaaactctcctgttttgaccaaagctgtgaccgcagcacttttgaacctcgttggagatttgatctgtcaggtaactctcttattttggtgctatctttgaagtttggattcttcagctttccaggatatatcgagataaaacagtattcatgagctgctgcattatgtatttctgaacagacagactttaacttgaattgtgctatctcttttttaaagttagaatggaagctaatagacccaaaataccggatattgtagtaaagccccattttctttataatgcttgatcgtattctgctagctatgtgagcaacatggcttattcgtatcacttttggttgcagcttacaatcaacaagacctcatcgctggacaagaagaggacactcacttttaccttcttgggcttagggctagtcggtccaacattgcatttctggtatttccgtggacctttcactcttatgacaccgcaaaagctatattacatctctgctacgttcttcagttgaagagagttatgcatccattggtatactacttatgcttattgtctattctgtgaaatctctcaactccatccgttaggtatttgtatttgagcaaagttgtgacagcttctggattatcaggcgcagttatacgacttctactggatcaggtagcaaattttcctgttccaagtctaacaattctgttcccatcttgcttcctctgtgttgacacttaacaccattatttgtttttgcagtttgtttttgctcctatttttgttggagttttcttatcagcagttgtgacacttgaaggaaaaccatcaaatgtcataccgaagctacaacaggttggattaaaacctaactaa

SEQ ID NO: 186530 - DNA, 462 bp, Arabidopsis thaliana landsberg
gaagcgaagatcctggtgttgtaatctcatgggaagtgtcaaacggctccgtggaattcacacaaacgatcaaatttaatcaagcgttcaacgagacggtcaacgcaaaaaaacacttgacgattcttcgagcaggtttaccacttcccggaccacaactcataagttctgctttcccacaagaggcttactttgaaataacaatcctcgaaatcacccaacaccacagtggtgaggctggtgacgtaggttgtgacttagtggaaggtgaaaaaactaagttgttcaagaaccaaggactaaaacttgtcaaaagaagtgaatgggatggaaaaaacgaagaagccgttttgtctctaggactagcgactggtggttccttcggcgcgggcgagacacgactaccaggaaaattcccggcttctattgggttccaatcggacggtgccatctatctcgatg

SEQ ID NO: 186531 - DNA, 490 bp, Arabidopsis thaliana landsberg
atgctttccttttctgaaatatcttcagaatctgataataatgatggtttaacatcaatttcgattgcaaatgcagaaattaagattaagcagcaatggagatttagagtaccttgcaacgaaaccaagcaccacgaaaacccaattcaaaagatttcaattctacagtttgaccaacttcaaatggtagattcatttcactcatttttttgtcaaaactgtgaactgcagcatgtattcggttcaaagcaaaacagaattgtaatctcagcttcatataatgtcaatatctcatcgattacactagtctaaacccagaaacttgtcgagaatgacctcaaatcagcatatcgagaactcgaagaaatatatcaaatcagctcaaattagcttgtggagaactcgaagaactcttccaaaggttcgtcgtgtggtcgagatgaagattggatttagggtctcgacatcgagagagtctctcgtgttgtga

SEQ ID NO: 186532 - DNA, 113 bp, Arabidopsis thaliana landsberg
ctaattactcagaaccacaactatcttcgataatctacagcgaggcacaagacaatcctgagttcagaagtaacaaaggcttcaactttggaagcatcgacaatcttcgatag

SEQ ID NO: 186533 - DNA, 377 bp, Arabidopsis thaliana landsberg
atgcagcaagggctggagactcatattgatgctcgctttgatggcctgatgtcacatgtggatcaccgccttgatgacatgcagtctcgctttgacagtaactgggatgcactcaactctgaattttctgagtttcgtgatcaaattcacactaatgtcactgatcccatcatgtcaaggctgaataatatgcaacagagttttcaagataacatgggtgctctctccagtcagtttgacaatctttctacaactgacaacatgcatgatataagtcagaggcagcagcagcttcaacaggattttggccagttctcctccctgtttgacaccttcagcactcattattacaacatgcatcctccgccgagtgatca

SEQ ID NO: 186534 - DNA, 144 bp, Arabidopsis thaliana landsberg
aacgagtgctgtcgggtttctggtcatcgaccaccatgccggaatgatcaggatggtgatcgtggagaattggcagatgttcagggcttggctcgctttgatctccggggcttcgaatttgtttgtatgagctatgagatttga

SEQ ID NO: 186535 - DNA, 409 bp, Arabidopsis thaliana landsberg
gtgcatcaactaagaaagtaaataagatttacatacgaaaggatcgtcgaaatgtttgtgattggagtggtgatggtgctattggcggttcttccagccgttctgccgccgcttccgccgccgccgatgatattgatgggaattccggtggtgctgatgctaatgcttatttacttagccatttattatccacctcatcaagctcattttctcttcatcatcttcctttgacactacttctaggcatgtaatgtgatggtagtgagacaatgagtcgatgatccagatgactcaactcacatatgtgaatgcgtcgtcgtttgatgataattgtgaatccatgcagtttctatatgattaaaatttagaccctttttatgttttttcttttcttgtcgttttagggtga

SEQ ID NO: 186536 - DNA, 411 bp, Arabidopsis thaliana landsberg
tgtttatcagtctgcagagttggctaaagcatcgaaaccggttgcattcacaatcggtgcctcacttgtggttcctgatatttcctacagatggcatttacctgagcctagtgcagtcgatatgtctggttcttcgagttgtgtgtctgaaaagaatagaactgttgtggttttgcttggatggcttggatcaaagcagaagcatctgaagaaatatgctgattggtacacttcaaagggttaccatgtcattacatttactcttccgatgaatgagattatgagttatcaagttggagggaaagcagagaagaacatcgagtcgctggttaatcacttggctgattggttggatgaagagcaaaagaaaaatctcgtctttcacaccttcagcaacaccgggtggttaac

SEQ ID NO: 186537 - DNA, 58 bp, Arabidopsis thaliana landsberg
atgcatggtcgatatttcgaaatgattgaaatgaccacatggtcagagtttggtggat

SEQ ID NO: 186538 - DNA, 1354 bp, Arabidopsis thaliana landsberg
atgggcctaagcccattatacctaacttcaaattttaaaagaattaaaaggagaagcacgtgtcaagttacaagggtgagtagctgagctggataaaattctatacgtgtcatcttattacaggttaagaacccgcccaccaaaagtttttgatcggaataaaaaaaacgtaataagcttctctcattcgtggaattgtctttcagaaagaaaaaaaccagagaggaggaagaaaaaaaaaactcttgcttcttcaggtaggtcttcttcttcttcttccttagctcaatctaattcttgttgtttttctgcaattttgattgttaattatctgtgtttaacgtttcttagcaattttattttggttttatcggttgacttgtgtttgagtttgtgaaaatgatcaaaaattcctgttacagatccgtatgtttatcttactatattctgtaatttcatcaacaagctgacttttttttgcagtatctgctgctggtttgatcttgagaccatttcttttgcagcttgttgttgtatttctagagactatgccaatgccatttttgaaaatgaagagcaagataagcaaggactcgttaagagagaaaagagttcttggtgtttgtaagaaacctcataaggatgttaaaaattcatgctttgatcccaaaatatcggagagaatggaacttttggtcactgctactcagaattgcaacaacaacgaggaacagaatataggtaaggcttgtttcttgaattctacaaataggtcggtcatctttttgttttaaatttgttctgatgatgcttttgattactataggtttggattcttctactagggatgttgtaacaaatgaaccccaagacctgctagttgaagacagttccaaaaatgcgtcgaatatggatacaatattttcacctgttcttgatgatgaactgtattctgaaactgaccgaggtatattctcttactctttcatttttttatttaagctgtctttttgattgagaatcgagtaatctaagaatggttttccttagtatttgtggaagggaacaatgtgcaatgggaaatgcctaggtggggagctgatgactgcagcaacaatcagttttgcaacgattctgattactttctatctaatgtgctgattgcaagcttgccattctatgagagtggaaatgttgattttttcactgagataagtcccttgcctcattgtatctttccagagccaagtgtgttactagatgcagctgagcagtacatgttattaccttacttagaagatagatcagccagcagtgatgatgttaagtctgatgaggataacaggattaatcg

SEQ ID NO: 186539 - DNA, 1567 bp, Arabidopsis thaliana landsberg
gataaagctcccacaaatctggtgcttgatgcagagccagaggaaaggcgtatgtcttacatgtcagattggtgttctagtgtcacttctgctgcagaaacccatgtatgttaagaatatgtgaaatttgctgaaacaatctttgtggtggatcttgttgcaaatgaatactcacttggtttaaatatttattgcagtttgatagtctttcactcgaccaagacatgctttccctcagaaaggagtgtcaagagaaagatgcaacaataaaggacttaacttcatttcttcagctgaccaacaaagctggttcaaaagtaattgtggattcctagactttttcaaacgccattaaacttttttccatatgacttacacaaacatatgtttcttctttctttaacagcgagaagcagagctcgaagagattattagcaggaaaaaaacaataattaagaagctcaagagagacgtattggtgttagaagacaaggtgataaacttaaccgacctttacaagttccagagccttactttcgatttttcttggtaacaacttcagtactaaaaatcgttgtatgtgataccgtccattcgttgtcaaatgtgcaggtcacacagctcactaggctccggaggtcctcctattcacctgcagtctcaaatacccatgagttcccaatgagaatggataatcttctttatgatatggatgttcttacagcttcttcatcctctgattcagaagctactgtaaacacaccccagcgagctgtgctggaggctccagttgattccgtaaaggaggaacccgcaactttgggacaaaccaataaatcagcgccagctaaatcctcgacgtcacttgtgaaatctgtaaagccgccttcagtagttagtccatcgactactcggaagcctgtttcagtttcttcttcttcaagggtgagacggggttcctctacaggtgattcaaagaaacctagaaggccaattcagaccatcccaagagattcctctggttcacataagagatgggtttaataagtattggtctgctgataagttcaagctctgagaaaaaaacaaaaattaccattgaattgtacttaaaagtttagacaagagatccattgttagtttgttaagttcaaatttaaaattgtttgagtaagttatgactggacctgtttaatatatgtctgaagtgcagaaccagctgccagatgtgaagtaggtgaatctcgagtcatatattgtagctaaagagtataatataataaaaaaagttatttgtgttgacttcatcatatcaatagctctcactaaactgagtgtttcttttatgctaatgtaataactaaataataatgtttccaaggtaattaaaagccgacagaagaaaggaccacaaggcaaacacaaacctgtctttcaatatctcaatatggttgacactctcaatgcaagagttcatgtaatgcttaaaagatttgttcctgatttaagtaaactaaaagcgcttaaacatgacatcatgagtataagaaaacttaagtcaatttag

SEQ ID NO: 186540 - DNA, 637 bp, Arabidopsis thaliana landsberg
atggacccttcaaggaaatacgtggaattacttgataggattcttgatttggataagagggttgaggactcatcaacacgcactggagggaatgaacttatggagaggaaagaagaagactctagccctcatgtgctttgtgacgcggtcacaacctaccatgaacctcacgaccttgaagaaggagaaatcgacaaaagggatgaggaacctccggggagaacaagcgtttacaaccggctcacccttctagaggaccggtggcatccacgtatgataagcttgagaagacttggagattttaaccgagtcgttgctaagctactaccatgtacacccgtttttatagcttgttcggcttttcatattgaccgtttctttcttgagagttgtgaaacaagaagagaaatgaaggaattatatgaggaagccctacaccacttgaaaccgttcaacactctttgaaagataaagagttcgggaagatttcttgtgacttgttctatacgaggtgttgaattcatagatgccctatgcgattccggatcattgatgcgtgttttatttcacctcaggcttttacctgaaagaccacacgactactacaagtgcacaatatatcggagtagtattttag

SEQ ID NO: 186541 - DNA, 400 bp, Arabidopsis thaliana landsberg
atggaggcccaataccggaaccacgacggagacacctctttctctagcctccgtgtctacctcaactctctctccgacactccctcccgtttttcccgccgagccgtttccgtttccacctcttacgacgagatgagccgcgtccgcgccgtctccggcgagcagatgcgtcgtactctccgttggtacgatctcatcggactcggaatcggtggaatgatcggagccggagtcttcgtcaccaccggccgtgctagtcgtctctacgctggtccttcaatcgtcgtctcttacgccatcgccgggctctgcgctctcctctccgctttctgttacaccgaattcgccgtccatctcccggtcgccggcggtgccttcagctacatccgtatcacattcg

SEQ ID NO: 186542 - DNA, 1101 bp, Arabidopsis thaliana landsberg
gaaagtcaaaagtggaagttgtggaggattctgatgacgatgaggaggaggatagtgtttattctgaaagcagtgaagaaacagagacagacactgattctgaattcaaggtggccaagccaacaataccaaaaagccagaagaaaggttttaaactcatcgttagctcattgcataacttgaattgtttctttatgtgattgttttatatattgacaatcatgtcttctttgttgagatgttttcaggaaagaagaaagaacaagttgtggagtcctctgatgacgaggaagacgaagaggaggacagtgacagtgattacattgaaacgtttggtcaattggatattgaagagaattccatcagtgaggaggacagttcttatgctcctgataaagaagacacagccactgcctcttttgtcaaaccaaaggttgcaaataaggttgctaatctgaagaggaaaggtaaaatacatttactttcatcacttttaacttcatttcttccatgcttatcttaatgcaacattgctttgtctatggaaccagaggcggcaaagaagaggaagaaaggtaatcacattgttgtcttaattagttccatcacttcattatgtaattgatttttgagatgctaatgcttttgtctcttgagattcttacagtcgatcccatgatcaagaatcctgagagatacctcgatgatcctaagaatatccatttcgagacaaacgtgaagaataggttatacgagctggtaagaactgcaacttcttgtcctcatatactactactctttttaacttaaagattgttttcattaacgttcttgtctgctttgtgtacgtatcttttttacagttggttcatgcacaactggtgaaagactattgcttgaggtttggagactatgttaactacatcgacaggttcgggaaactaagtgctaaaacagccaaatggaaggatcagcgtgtttgtatcaaaagatggatgcgcatatgcaagaggaacaagttgaagaaagaagaccgcattttgtgtgagctcttgcgcaagggaactttcgtttacgcaatcaaactccatgtcatccgcg

SEQ ID NO: 186543 - DNA, 117 bp, Arabidopsis thaliana landsberg
aacgtttacatccaggcagctacctggaacggcaaaaaggtggatcactgctggatgttccgagatgaattcatgaaaggcgggcacctcaaatttatcatgggcaataaaccgaac

SEQ ID NO: 186544 - DNA, 84 bp, Arabidopsis thaliana landsberg
gatcaatatcatgctccaccagacttcaaacggttgttgtctaccaagctaaagtacttgacatcttgcgggaaacttgtgaag

SEQ ID NO: 186545 - DNA, 639 bp, Arabidopsis thaliana landsberg
atggtagatggtgagaaaagagacgaaattgttgcaattgcaattgatcgagacaaaggaagtcaggctgcgttaaaatgggctgttgattatcttttgacaccaggagagactctaactcttattcatgttaaagtcaagcaaacccttgctaataatggtatccccttaaagctcattgttacatattctagtcaacttcgtttcaatttaccttgaattaaacatcataatgttgatgtagggactcaaccaaataagtctggagatgacgttaaggaactgtttcttccattccgatgtttctgcactaggaaagacgtgagttttgcgtctaacttcatcaatttgttaaaaatattatcgcgatttttacattaaaacattgcctatcgaaactatcacctaaccacacacatttttcttcatatcattaggtcaatttattcgttaattagtaattagaaaggaggtgttttggtcaaaaatgttaaagattgagagtattgttgacagataaattgtgaagaggtagtattggagaacgttgatgctgcaggaggaatcatagagtatgtacaagagaatgcaatcgatattctagtactcggtgcatctaagatgactcttttaaagtaa

SEQ ID NO: 186546 - DNA, 892 bp, Arabidopsis thaliana landsberg
gtaagtctacctctgttgtattgttcaggttgatccaatggagcacgactggtagggaggctccgatccgtagaacatttatgggagcgtcaaggtgaatggagccaacacaattgttaaaaataatctacgactgacagtaatctaaacggattactgtttttgagttattctttgtttcaatcagctttttgttccctaaataatctgtgatgatgtaatgatttttttctaaaaacatcgtgacatattgttgtcacttgttctcaaatgttgtgaatcaagaacaagccaacacaattgttaaaaattaagaatcttcgtccttcgaaacattatttcctttcggatataacgatcttcggacaaaagtcatgaaggacacaccttcatcatcacagcatgtgttaatgaaagaagaagcatatgaaatataagagacttcatgaataattatatgacattattaatatatcttctttatattaacatggataaacagaaacaatattgaattacatttgtacttcggcttgacagaacgtaaaagtccaagcgtgatgcacaaatgaataccaatcagcgtgaacagtacggggggtactgttcatctatttataggcacagggcgcagcctgtgtgaaattacatttataccctttgcaaccgattacaatcaagacacaaattatcatgggtcgatctgtcttttcatctttaagtcggtgcaacccttcgtctcaagacatgttgttatgccgaagttccctggaagatagcttcggcgttatttctatgctgatcttctgaaggtgtttcttcttataggacttcggcgacgatgcagacccccaacagtagccccttcacggtgctagatcgtttttcataa

SEQ ID NO: 186547 - DNA, 1144 bp, Arabidopsis thaliana landsberg
tgctaaattttctttgttcaggagaaatataatggacctcaagtattcagcatctcattgcaacttatcctcagacatgaagctcaggcgttttcatcagcatcgaggaaaaggaagagaagaagagtatgatgcttcttctctcagcttgaacaatctgtcaaaacttattcttcctccacttggtgttgctagctataaccagaatcacatcaggtctagtggatggatcatctcacctatggactcaagatacaggtaccatccatattgatgaaacagagtacctgaaaaatacattctttatatctcagtgacataaaagaatgcttgaattagtgataacgtaaagaagttaaatggttgattcaggtgctgggaattttatatggtgcttttagtggcatactctgcgtgggtttacccttttgaagttgcatttctgaattcatcaccaaagagaaacctttgtatcgcggacaacatcgtagacttgttcttcgcggttgacattgtcttgacgtttttcgttgcttacatagacgaaagaacacagcttcttgtccgtgaacctaaacagattgcagtgaggtcagtgattgttattcatgatcttagtttcaccttttttatttgatctgatatctttagctaagtggaagaagacaaggtttaggtgactgttgagcccacaccatgtgattcttttattttcataatcagttagatagatttctgtttttggaataaacagaaagattctacttatatatattaggtgaaaagaaagctttttaaataaatgtgttagttcttgcttaatgctattttaatatctcattaaaggtacctatcaacatggttcttgatggatgttgcatcaactataccatttgacgctattggatacttaatcactggcacatccacgttaaatatcacttgtaatctcttgggattacttagattttggcgacttcgaagagttaaacacctcttcactaggtacactaattccctatgactctatgtcatgtctctgatcaagaaggtaacaaaatgattctatttttggtgttgttttaggctcgagaaggacataagatatagctatttctggattcgctgctttcgacttctatca

SEQ ID NO: 186548 - DNA, 116 bp, Arabidopsis thaliana landsberg
gtcctcgacgacagcgcgctcgcccgccggccaccccttgctgggactcgcttgaaacggcgatgaccgtcgaacccaagcatcagatcatcatccccggtccaagacgatcctaa

SEQ ID NO: 186549 - DNA, 555 bp, Arabidopsis thaliana landsberg
acccaccagatccgactccgactcgtaatgctcttgttgtgaatgttactcaccaatctccaattctagatctagatccatcctcgggtcacgaaattcctcctgcgagtgaagatgacggccatgtatcaactcctcttattccgacaactggttctgcaacctctgctatccagaaccaactaaatggcctatcttcctccattgctcttcctatgattgatgattctcaacttatttgggctgctagatttagtgccaatcttcgaaacctgaaaaaagcttctcaaccaaccttcaccgaagatggaactccaaaggttagagctccagaatctgttattcttaaagcaactgatacttggaaagatcatatcgttgctcattttcatggtaatcctccacctgcgggcaaaatatttgtggacctaaatccaatttgggggaaagatgggcgcattaacattcgttgtcttctgagtgggacggtgcttatttatatcccttctgaggccactcgcaattgggtccttgaggttgggtgttggcaggcag

SEQ ID NO: 186550 - DNA, 204 bp, Arabidopsis thaliana landsberg
atgttggtgcaatattgggaaggtttatatcaatgtgaggaggaggtgctggcggctacgggtgacgtgccttcggatgcttccaggggtagggagcggatccaagggcgaggtcgtcgatggggttacactggcccggacgacggcgacgagctcctaggcggcgaggtggagcatcaatcgtgccttgtctccccgacgcac

SEQ ID NO: 186551 - DNA, 421 bp, Arabidopsis thaliana landsberg
atggatgagggtgaaaatagtttggtagttaatacgacgattcaaagtgtaaaggtacatatatttcgctttcgagcttcactttgtttggagaaatagcacattgtttataagtataagaaaactaaactctaaggatgatagggaacacaaataacaagttgtatgaatatatgagatgaaacttgtaaatagaatagtcattgaaagtctcaatctcatattgttttgctgcacgtactggaaattgatgtaactccaaaaaaatctgaactcttgcctctgtaaattgaaacccccaattcattttaatcacaaaccctagacgtcatttccgaaaattaacagcattgcttccgtcgccaatacacctccgctgattgttggcgaaatcagaagcttcagaaaaggtggactgtaa

SEQ ID NO: 186552 - DNA, 1012 bp, Arabidopsis thaliana landsberg
atgacttcaagcgactctggtaataaaatctcagcgactcatcaacaacctccacaggcacatgcaagtccagtaggtaatgaaaaacattctcttttagcttaagtatcactcagtttctcttccctgctattgatataacatcaagaaactgatgtatttttttactttgtttatggatattatgtacctgtggaagctgtgccaatggatacatcttcaagcgataatcagcagccaccctctgattcggaatctgcaatctaaaactgctttttatcagagaggttttggtgtaagctttagcttaaccattgacagagagatatggattttttttttgggttgttttttctttcttgggtcaaaagtcattttggttggacttctctttgatcctgatttgactcatcactctttgtgcattatcttctctcattgtttgagtcatttgctactttgaaccttttttgttgttaccaaaaattggatatatgctttggagacagtttatggatatggatgctatttccaagctgtaattaggggagtgctctgtttttttttttaccgtgtgacagtttttgaaataaattttctcaattttgtgccatgtgaatctcatttttttattagatactaatagtgtgtttgttttgaaaaaaaaaaaaagattctcaatgtttaagaaaacaatacatggttaacaaaatgccacgttggatattccatagatctcggcgataaacaaattttgctaaagcttctttttataaataaacgtgaagttaattcccaatatttaaataagagaatttgaaaaattcgatttcgtatattaaaaagaaaaatcaatattcaagaatcaagattggggattggggagtgttaataaaaattcgtcttggctcttcaagaacacaagaccaaaaaaaaaactgattcttcgatttcaagaaaaaagatcgaaaatttggttacagtcgatgccattgaagaaccttttgattga

SEQ ID NO: 186553 - DNA, 195 bp, Arabidopsis thaliana landsberg
atgatttcagaaatttacttgataaacactacgagaatagaaaacgaaggagccttcaccgtctgtccactcgtccccattagcccattgtttctgtccggtgacggtttcgaaccagccagtgtcctctttccccgcgctgcttttcacttccctccaaaagataaaaaggaggcgtacgacttcatggataag

SEQ ID NO: 186554 - DNA, 972 bp, Arabidopsis thaliana landsberg
atgtggaggacagattgcctctatagctttttgcaaaagagaaacaacaaagaaacgaacgtacgtgtgaaagacgattgggacatgagtgtcaattaatgccagattccatctatgtctaataatcagagaagtattattattagttaccgatcaaccttttcccactaattaatcccttctttcacttctaaactgctttctttttctctggcacttacatagacggatagaccaaacttatcttaaagccatattctatgatgttttccttctgtcgcagatttatagagatatttcgtaattatgtacaaaccctacgtgcagctgtacccggtgtatacatagttacataattaacagaaaattcactttatacacatagttttgggtaacaggaacttgactacttgagtagtaaacttttcaattaaattcgagatatgttactatcactttaacttttgtagagaaaatgtcgtctgcaatggtaactggtttgaaggttcaactttcagcgaataatactgcgataccattttaaaataaagaaggaagatcatagagaatgacatttgtgtaactatctatcgcaagtgtaacactttttttggaaggtttgtataagtacaattgaacagaaaaacaaacaacctgatagaatactatattggtacaagtaactttttaaatacaaactgaatgaaaagtatgtttagtgatgtattaatttcgtataatagaacattttattctataatgtcatcataatcaagcaaaacgccaaaatagtgtaatgattctaacttccaaaaaagggacgaaactgtcctccccacactctcatttataagcgctcgtgtgacaaatcacccacgctctctgctcgcgcgtcagacatacgtgaacacaaaacggcgttgtttctacatcgagccaccattgcgacgtggtctacacgcgctcatggag

SEQ ID NO: 186555 - DNA, 33 bp, Arabidopsis thaliana landsberg
atgctgctggtttatggtacagcatacggcaag

SEQ ID NO: 186556 - DNA, 1933 bp, Arabidopsis thaliana landsberg
atggttgtaggtgaaggatcggagctgtatgaggaagacagctatggcggtgtgggtgttgagaacgatctatcgtttttgaagggtggatacaaacgtatgaatgaaatgcagctggctcaaggtgagaagctggaatcgatggacatattgttgaaaacggtggctgcaacgttggaaaggatggagatccgtgctggaaaacaaactgatcgaccagatccttctcaaaattccccacagagtgtgattaactcagcgtttcaacaacgcggatctggtgagaataattttgtgttggataatcgtgctagcttgctgcgcaaaatagagatgcctgtgtttgatggatctcagccgtatgagtggttttctaaggtggagcgtttctttcgtgtgggtcgttacgccgatcatgagaagcttgatttggtggcgttgagtttggagggtgatgttttgaaatggtttaattgggaggttgatcggtgtgagttttgttcttgggttgagttccgtcaacgtttgttcttgtgttttggtaaatctaatgaagatgatccgggaaatcgggtatttgcgattacacaacatggcacagtggctgagtatgtgacttaacttgaggatttatcacctcaagtacctagttttcatgactttcatttggagagaatcttttataatgggttgaagcaggagatgaaagaggtgcttaagatgaaggagtcgcgggtttacctcatcagaaggcagcaatgttgaggatggaagccagctctttctttcaacttatcagtgagatttttttttacaggttggtcctgtgaagtcctttgcaccaaggcaagctactgtgtttccgcagaacaaacctctgttgctaaccagtggatctactccgggaggttcacaaccagtgggattgcgatcgctgttaccaacatgacagcgagatacatctgaggagttggatgttatgcgtgctaagggtatctgtttcaagtgtaaagggaagtacactagaggctatgtgtgtcctcttaaagaattgcagattcttacaattgtggatggtttggaattggaagttttggacgatgagatgctggttgttgacactgaacttatggaagttcaagaaccaccagcttgtcaatccttatctttgaactcctttttgggattacactcaccacgcacaacaaaacttgttggcgtatttggcaagagcagagtagtgatattgttggattcaggagcttctcacaattttatcactcctactgtggctgccaaacttaagttgcaattgtacaaggctagagggttagatggcatgcttggaaatggtgtttcagtgcatggctctagcatttgtaaagcggtacagtttcaactgagtggtgtggattttcaaagtgatttcattgctctggatttaggaggtgtggatattattttgggtatgcaatggttagtcacattgggtaagtgtgaagtggattggaaattacaagagtggtggtttacttataacgggaaggctgtgcatttggttggagatcagcttttacacactcctcctctatcgttaagagttgtgaaagcaccattgcctgttgtggagtctttttcaccggatgatgtggttactcctttggtgaataacacggtgattactcatcacacacaagcgatagcattggttttgcagaagtttgcattagtgtttaagcttccggttggtttacctcctgtccaaggacatgagcacactattactcttcaaccaggagtacatgccattactgtcaagacttatcgttgccctcatgcaactaaagttatcatggagaagatggttgaggacatgttagctgcgggtatcatcaggccaagtaacaaccctttttccagtcctgttcttttg

SEQ ID NO: 186557 - DNA, 141 bp, Arabidopsis thaliana landsberg
gcgataacggtttatgttagtttgaacactaaaaatggtgtgcacgaacatcatagtgtttcctcttgttcacaagcaatgaatcagctgtgttttgttgttcttgagcaattccgtgaccaatccataacacttatctga

SEQ ID NO: 186558 - DNA, 87 bp, Arabidopsis thaliana landsberg
ctatgtaataatcattgaaatagcttctcgaaacctgaatggagagattgaaagtcacatccggaaaatgaatccttgttcccccat

SEQ ID NO: 186559 - DNA, 787 bp, Arabidopsis thaliana landsberg
atgttcacacatatatattatcggatgccaacatggctccatgatttgatgcaggaccggcccaataaatatgcctccgttgacgtcgccgggtcatgtctccagacccgcaaccttagatcacgatggaaagttagatgatatctatttgaaactccgagaaatcggatcccaagtccatagagccagcagtttggccccagaaatcgatcgaatgatcgaagaaacccagaagactcctttcacggatcgggttacacgtacgagaatccctcaagtgaagcttagtaatccaacagtcgccaaagctcacttttcggacgaactccgagatatcggctgctggcagctcttcatcgagggcctcttcggaaatgctttaacctggttttccagattagaggcaaactcaattgacaacttcacccagttgtcaactgccttcttgaaacaatagagggtatttattcaaccaggtgcctctagttccgacctttggagcatgactcaagaaaatggcgaaacactgaacgactatcttggtcgtttcaaagaaatactgtctagagttaccatcacggatgaagccgaggtggctgcttttaggaagggactgctccaaggatccccgctgagaaaagaccgcaataagagaaccgcgaaaaaacgacgcattggtcgtcgaactggtaatggaggatttcgacctagaacgagtcctaatcgataccggcagctcgctcaacctgatgttcttgaagacccttttaaaaatgggaatctctga

SEQ ID NO: 186560 - DNA, 62 bp, Arabidopsis thaliana landsberg
atggagaaaatcaccggaggagaagacattgaagacggcgaaggagatgataatgacgtggg

SEQ ID NO: 186561 - DNA, 148 bp, Arabidopsis thaliana landsberg
ggatggaagttccaagtttgcaccttcacagcgctggggtaatttctacagcatcggtgccggctgggtcatcagcgatgaagcatttgcagagaagagcctgaacaaagtgttcaacttcctgaagctgcgtgctgcctggggacag

SEQ ID NO: 186562 - DNA, 166 bp, Arabidopsis thaliana landsberg
atggccaacgagttggtggatgcaattctcagttctactgaaacgaggtttaaaagagagaagtcacgaatcattttcaggactcagaatatttatggtcatgtcagtttctttactttcaggcctcttgtggtggaactctcgcgttgttcatttacaagatcag

SEQ ID NO: 186563 - DNA, 73 bp, Arabidopsis thaliana landsberg
atgaaggagtttaatgcgttgcgtgacgttttgaagaaaggagtggagaagaagaaagcttcagatgctcaag

SEQ ID NO: 186564 - DNA, 259 bp, Arabidopsis thaliana landsberg
gttggatatatgtgttggagatggctctgaagatctatacatatggatttgagaattattggagagagggtgctaaccgatttgattttctagtcacatgggtcataggtaacctattgaagcagcattttcatcttgttttgctgattgagtgattgatggctatgctataagtgataatctttgtatctgcagttattggggaaacagctaccttcataactccagacgagaatactttcttctcaaatggagaatg

SEQ ID NO: 186565 - DNA, 41 bp, Arabidopsis thaliana landsberg
gaagcggcggacgtagctacaactgtacgagagaaactaag

SEQ ID NO: 186566 - DNA, 331 bp, Arabidopsis thaliana landsberg
atgaatagcgctcttcagtgtttggcccacacacctccaattgttgaatacttcttgcaagattacagtgacgacataaatagagataatcctttgggaatgtgtgtaagtgcttgatacttacatgttctatttcctcgtgatggtactcacatgcattctgaatataattctaactcttaattttcagggtgagcttgctatcgcgtttggtgatttgttgaagaaattatggtcatcaggaaggaatgcagttgcaccacgcgcttttaagacgaaattggctagatttgctccacagtttagtggttacaatcagcatgattctcaa

SEQ ID NO: 186567 - DNA, 275 bp, Arabidopsis thaliana landsberg
atgagcatgtccgttgatcgaaacctccaccagctcagcctccatcctcaccgttcctccggtccctcagtctcaggtacggaccactcatgctccttcattttggccgtgtccctatactcgtagtctcctccggtgaagcagctcaagaggtattgaatacacatgatcataaatttgcgaaccgcccgagatcaaaagccgttcatgggcttatgaatggtggacgtgatgttgtgtttgctccctatggagaatactggagacagatgaag

SEQ ID NO: 186568 - DNA, 152 bp, Arabidopsis thaliana landsberg
atataaccaaacaagttggttgactgagaagagtgatgtctacagctttggaattgtgttactggaaattatcacaacccaatctgtgattgatcaaaaccgtgaaaagccacacattgcagaatgggttggtactatgcttaccaaaggag

SEQ ID NO: 186569 - DNA, 137 bp, Arabidopsis thaliana landsberg
atgtctcctgggaaccctcttcttactcataatcggcgcctcaccgctccccggaaattcccacttcacaagatctccgtcccacgaagagcttataagcgttgggtaatatgggtgccaattacagtctcttacag

SEQ ID NO: 186570 - DNA, 94 bp, Arabidopsis thaliana landsberg
aaaacaaaaaaaaagcagcaaacaaaatcagatgaaaggaagaagaaaagggtaaaactggaattaaatctacaggtccatccatatacgttgg

SEQ ID NO: 186571 - DNA, 396 bp, Arabidopsis thaliana landsberg
gctaatgctgcacggattcaacgagagagacaggagagggagatgaagacaaaagagattttgcggaacaagtttgattccttgagagttagttttggactcttcaagtatgagattgaggtaacgataaaggaaatcaaggagtgtatggaaattgttcagtggagaggggatgatggtgttccacttgcgatcttagatgaggaagattttgaggagatccgttgttctcatctgaggcaaattcgtcttgattcactgaaacaatcagaaaaggttgaagaaactggtgaaaacagaattgtatttgatgtgttgagggaacagtgcaagctaatagtgacaaagcatctgatctcggctcaagatgggatctctcttctcattagggttgac

SEQ ID NO: 186572 - DNA, 167 bp, Arabidopsis thaliana landsberg
tcatcgaacaccgacttcacaagcttgtcgtgcgttatttccgtatctatttgcacaactctacatcatttatcgacggtgttaaatacaaattttttacccaatcgtatcgagagaaggatgaaagaagaatgaggaagacggtgatgaattggaaattccgatga

SEQ ID NO: 186573 - DNA, 144 bp, Arabidopsis thaliana landsberg
cagaagccgatcaagttgacttgcagtactgctgcactgacgactgaaattgtctctgatatcatcagcactcttccaaatggagtcaaacgtggctgccaacatcagcaagcaggcgaagtgataggcttccagcagaaatgg

SEQ ID NO: 186574 - DNA, 180 bp, Arabidopsis thaliana landsberg
atggcgaacatctctcgacggcgattcctcgggctggccggcgcaggcgccgcggcggccatggtgctccctccgcagatcgcgctggcggcaacatccgacggaggcggcacgagcgccttgctcgcgaacatcaccggccacccggccgggaccgccgagacgaacgcggcaccgaca

SEQ ID NO: 186575 - DNA, 438 bp, Arabidopsis thaliana landsberg
atggctacagaagcagtagacctaccaattcatgagcaccctctttttccttcggctcgatgtattgatgatgaatgtgatggctgccatgtaaatggtttcatgtacgccggctacttttgcaatgaaccttactgttatgtttggttccataaggactgtgctgaggccccaggggagatcagccatagttcccaccctgaacatcctctcctgctcaccaatgactcgaaagatggtccatgtgatttgtgtggacaaaagctattgactccctgttatagttgtcccacatgtgagttcaaggtggatttgacttgtggtatgaaaccgtcaccgcctgctatcgaacatccgctgtgtcatgatcatgctgtcgtcttcttgaagatacgagaggagaaggttccttgtgaattatgcaaggagtctatggag

SEQ ID NO: 186576 - DNA, 160 bp, Arabidopsis thaliana landsberg
ctgtcgtaccaggggaaaaggggaaaaggcgaatgaaatagaatgggatagcattcggacgagcaaagcgactggcggaaattgctatctttggtttgcagtagcaaagcgtactgaacacaaacaaaaacggcaaaaagggcttgcaacaatgagctaa

SEQ ID NO: 186577 - DNA, 473 bp, Arabidopsis thaliana landsberg
atgtttacgtgtattgatgatttgtcatccatgaagccaataccacaatattctctgacggcaactaatgatattaaagatttgtctaccattatcttagtgattctcgaatgtttcataagtaagagaaaagaattctgtaattctcgcaatctatattaataataatattagtataattgttgtcattatccaatcttaatatataaaagatattaaaaatataaaacttttcttgactccctatgcttacgaatctctcatcgctacattacaaattcttttctaaatcggtttaaattgattcgctggctcgtgagttgactcgtgagctgtttctataattgcttataatttttttcaccgtaggtcgttggagtccggcagtggtgttgatttcacgagatgagaaagagatgacgttggttgtcgcagatgtcgatgtcgtcgaggaagtgtgttgttctcaaaag

SEQ ID NO: 186578 - DNA, 271 bp, Arabidopsis thaliana landsberg
atgtctggagaggatgctaccaacgtttcgatagccgaaaccctcaaggccatgcaacaagctatgacagatatgacgcaaaagttttcaagcgtggaaaaaaccgtcgaaacattgcaaacagaccatgtatcactcagtcaaaatgttagtaccattcaatctcgtgtccgttctttaaatgcaggaaattctagagttcggcgaaccatcttcggacccccaaattcacttccgcgaaatgcaacaagcgaccaaacgaccccggatg

SEQ ID NO: 186579 - DNA, 1272 bp, Arabidopsis thaliana landsberg
gcaattggaaatgccgaagtaggacttcctgctactgcaatgctggtagctcaaagtgacactgtggccgttggccatgaaatgcctgtatccccatcatttcctgaggtgagaatcatgagccagaaataaatcactttttaattaattcatttagaattatcgcttgcaaaaatctgattcttggttacgttatcagggtgaccttttatctttttatgagctctgcagcgcttacaaatggactattgaagatgaaaaggtccaattctgtgttcacccttacagtataaatagtaatctattttttcgacttctatgtttatgactgaaagctctattttttcttgttaaggtgttaattttcattgcatcatccatcaatgtggaagagaatgctggctttgttaatgtcgtccaaggaaggtaacttaaggttatcgcatgtgctcttgcatttgtactcttaaaatttaataagatgcaaaccattgtccaattatggttattaaatatttccaggtcggctagttaaaagttatccttatagagaagttagatttcactagtctaaaatatccttacaaggcatcatcatgctcagcatcatttagcttttcaaagtaggctcagctagtgattagcttgacgttaaacattgctgggacagttttactcaagcttaggaaaaaatgacacagtttattagtaataacttgagcttagtattcttgtattctgttcaggtaaggtttatgtagattagtaaactttgacgacacacaaacatattcacttaagctaagacaacttaggaaattctaacgagcagcttatcttttctcttacagatcagctggcaaaaccagagttacaattgccttctcatgtgatttcgtgtctcctggcttgtactctgaatctagaacatatgaagcgtcaatgattttatctgttgtgcctgatctccctctttcgctcggggctcctatgacttgggttcttccgcctttttatacatcatctggtctattaccttcatcttcagagccacagaagcatagagatggacaaagtcacagaggcaatatagtctactccatattgaaagactgcagctctcgggctgattttgaacgagataccatatcaattaatggcgggagtgtcaaaacaactgatagcaacaatgttgcatgtattcaagccaaagaccgcacaagtggaaggattgagattgctgcttgcgtgagagttgcagaggtattttga

SEQ ID NO: 186580 - DNA, 499 bp, Arabidopsis thaliana landsberg
atgccaatggaaggaccagaagagtttgaggaattgattgttccctcagaagaagcagtatcaggatgcaccatgagcctaatcgttgaaaaaacgaactttactgagatgctcgaccatggaggagagaatataacttcagatgactggtcaaaactcaaagctccaaaggttgaccttaagcctcttccaaaaggtctgaggtacgcgtttctcggtccaaatgatacttatcccgttattattaataatggactaagtgataaacaagtgaaccagttgctaaatgagcttaggaaatataggagggcaattgggtattcattagctgatattaaaagaatttcacctagtttatgtactcataggaaccatcttgaaaatgaatcatatactagtgatgaaccacagaggagattaaatccaaatttgaaagatgtggttaaaaaggagattcttaaattacttaatgatgatatcatctacccaatttctgata

SEQ ID NO: 186581 - DNA, 710 bp, Arabidopsis thaliana landsberg
atggaagaagcaaaacctctagatgatgaatatcggttgcaaaggaggaggtgcgatacatgccgtcgaaactgtaaaactgaaacaagtggtggtagctggggattttggagccagcaaaaagagacttggcaatggcaccaggataaaggagggtcttgacaagagaagaaggaatcaaatcagtagcaatcaactcagaggatatgacctctaatggagtttcacaactcttgttcctgcacgccactctgcaacatataaacaaacaaagcgcactcaattcaaatatagattgttctctaacaaggaatggtctaagacatacatttcgtcaatccctaatagaatgctatctgtctgtctttatacgagaatctaaaatccaataacgcccctgcattgttgaacagagtaaccctaatttggtgaattttgccatcaatttcaactagttagtgcattggtttctgcgttcatcagatgacaaaattgcgatgaatggtttggaaatgatgatacctgaacagaggaatctggaagacgatgaggagcgaaaacagagaagaagcgatgacggagattatcgaagcccatttcttcttcgaaagatccattttggtttcgatttcgatgacacaaatttcaaaggtttcgtagcagagggaaaaaaatttcagaaatatgtggaacatccccattaccattaa

SEQ ID NO: 186582 - DNA, 403 bp, Arabidopsis thaliana landsberg
atggaacaggtgtccaatgaatttggttccgggctggccgacccttccgcgctgcgggattgtgtgaagatgtattacgacaaggcgcgcaataataatacccgcaagccttcctggttgctgttgttcggcacggcctcttatcaatatcgttctgccacaggcggcaaccgcccgctcgtgcccggttatgaaagcagtcaatctatagacccgctcaacacctatacctccgatgatttttttgctttgctcgatgatggagatgatatcaaccgcaatgatccggccatgcaactggatatcggcgtaggcaggatccccgcccgcaacatggccgaagcgaccctgatggtgcctaagatcatccgttaccacgataaggaaagcctaagcgactggc

SEQ ID NO: 186583 - DNA, 281 bp, Arabidopsis thaliana landsberg
cgcgggagaccgtgtccggaactaccgctccgtccgccgccgcccggggggatcgggggtggcagcgtggtcatcgacctgctctccggggcgacggtccagccgctgcccgttccggcggcgggagcacccgccggggtggcggccacccaaccggttggcgcggacaacgatccgaccagggcggcacggcccaccccggccgataccggggagccggcacggtcggctgtctcaagcccgccggtggtcgtcgaggccagtgttatgccgtgcgctga

SEQ ID NO: 186584 - DNA, 241 bp, Arabidopsis thaliana landsberg
gcgggggcaagggacgaggatcccgcggctccctgctatatccggaacggccatggatgtggcggcggttgtcgcagggaagccattgacgtcaaaatccgctcgcccaccgcgagcctgactccaaatgtggcgagcgggtccacttctgggccgctactgtcatcctctctgtcgatggcacactcatcttcagccgcagccacctacgtcctccttccatcattgagcgacacctcaa

SEQ ID NO: 186585 - DNA, 139 bp, Arabidopsis thaliana landsberg
atgatatgtttcgaggtccccaagccctggggtcacttgcgctacgtgaaggattgaccatcgatgctttcgtgcgcgtgttactgcagtacccagcgtctattcccggtcgttactcccttgatcaggcgcgcctagg

SEQ ID NO: 186586 - DNA, 214 bp, Arabidopsis thaliana landsberg
atgggttttgctggagtacgaattgcccgatgtgggtacgtgggtactgacatttctccatattctcgcttacaatgattagccgtccctcatgtcgagcaaagcctatccgggaatatgtgcacgagccaacgccaaggactcagtatgcaacgcgctcatgtttcgtacagaggagtgccgtcttacctcgacatatgtttcaccgaaataa

SEQ ID NO: 186587 - DNA, 479 bp, Arabidopsis thaliana landsberg
atggcgaaggagcgcgtcggcttcctcgagggcgccatcaaccagaacgtggatgagaaggtcgcgaacgagatcttcgacaccatggagaagttcgcggagtacggcttcaacaagtcgcactccgccgcgtacggcctcgtcaccgtccagaccgcgtggctgaaggcgcactacccgtcggagttcatggccgcgctgctctcctccgagcgcgacaacaccgacaaggtcgtgatgcacatcgccgaagcgaaggagatgggcatcgaggtgttgcagccggacatcaacgagtccgagctcgacttcaacgtgccgctcggcacgaaggcggagccgggcggtcgcggcaagaagaagaaggagcggcccatccgcttcggcctcggcgccatcaagggcgtgggcgagaacgcggtcgagacgatccactcggcgcgcatggagaacgggaagcacaagccgtacaccggcct

SEQ ID NO: 186588 - DNA, 231 bp, Arabidopsis thaliana landsberg
atggcagtattgatcatcttcatcctcttatgtctcttgtcattcctgtgttactctctcttcttcataaaacctaaagattcacgagatggccgtgaccttcctccgagccctccttcgcttccaatcatcggtcatcttcacctaattcttctgtctactttaacccacaagtcttttcagagactctcatcaaagtatggacctcttctccatctccgcatcttccac

SEQ ID NO: 186589 - DNA, 291 bp, Arabidopsis thaliana landsberg
attcctgcagcattagctaaaatgaaacggaagcacccagaagttgacgacgagccctctatctcgacgccgaagcggcagcggatttcgaaaactaacggccacgtcaatggcgaaggatcgcctgagccacctccgtcgaagcgagtgaaagtcacaccccaaaagccagccgctgagacagcagcaacattgaaagcgtccggactcagaacgccatctaatcggtcaaaagcacaggccctattctcaacatccacaagtgagaaaggaacatcgactccaacgaaa

SEQ ID NO: 186590 - DNA, 464 bp, Arabidopsis thaliana landsberg
attaaagtttcaagtgggaagccgttcacggttgttgcttcaagaacaggtttttatccacctgggaaacagcaacttctgtgccactccttggttgagctgctgcaacagataagccggccatttgatgcggtcagtttggtgataaaaagtctacctttttacatttttggttctattttttgttcggtggtgatatttgattgtggctgcaggcttatgacgctcttatgaaagctttcattgagcacaataaggtctgcaagtataccttatatcggtgtctatagttgattataggaatcttcaatatgtaataattcttggttctttttcagtttggcaaccttccttatggtttccgggcaaacacttgggtagttcctccggttgttgcagatagtccatctacttttccgtcacttccagtggaggatgagacatggggaggggatggtggtggg

SEQ ID NO: 186591 - DNA, 155 bp, Arabidopsis thaliana landsberg
atgcctggggtcaccggtccgatgtggactgcctcttactgggagaactggcggcgacttcgctgcgggtctcatcgccatcctcaatcccggctgatcgcattgacactgcccgatgatactactggatcttgtgtcatcgacatcccttcacg

SEQ ID NO: 186592 - DNA, 1528 bp, Arabidopsis thaliana landsberg
ccactgagatttttgttatctgtattctcagaacagccacctagtcgtctcaaaggattatgcgaggtcgtttggattgtggaagctgatctggcagccaatgaacatctctacgttactggagatccttctacattaggtagctgggagccagactgcgcaatctcaatgtatcctacggaaaatgataatgaatgggaagctaaagtcaaggtaatctattcttttgtttcacttaagccgtagcgaacataagtagagatgtatcttaatttacataaaacgtttgaacgtttagtcgtagtaacaaaaggaaccaacctcaattcttgaaagtgagttcagatgtcgtgtttgcttttaacttaatatgcttggcagattgcttctggtgtaaatttcaggtataattatctgttaaaagctggatatggatcttcatcggatgtcatctggagaccagggccacaattttcgttatcagttccttcctctgtcaatcaagacagaaaaataattataagggattcatggatgagtatgagtatttcctcaaaatcacaagaatcctacggatgggggtcttggattgatgatgcttacctttttccaaactgtgttaccccagctcaaagcgaaggtaaaatctcggtggttcctccttgttcagtctcttttcatcctttgcaaaatgttttaaaacttaaatgcttccagtggtttggcagatgaatgcacttccgccgatagtgctatagaagtcccgagaacacatctgaatgataagcaagtaggagctgaatctttcttatgtgatgagcttgcagccttttcgtcagagaactcaaacttaagtgcgttattttctgacaactatcagcctatcgaggaaccgtggttgattcaagaatctattaccttacaacatgaaaggaatatgcagactgatagcgaacaagatgttgaaagctgtgatgacaatgaaaataacttaaataccgatgaacaaaatcaccagctgactgagactctcttaccagatggtggatttttccaatcagaatccattgctactacgatactgatcaattcttctatatgtacggtgcaaaggattgctgtattggaaggtggaaagctggtcgagttattgttggaaccagttaagaccaatgtgcagtgtgatagtgtttacctgggcgtaatcactaagtttgtgccccatatgggtggtgcatttgtgaatatcggaagtgctagacattctttcatggacattaagtcaaacagggaaccattcatattccctccattttgtgatggatcgaagaagcaagcagctgatggttctccgatcctctctatgaatgacattccagctccccatgaaatcgaacatgcttcctatgactttgaagccagtagtttattagacattgattcaaatgaccctggggaatcttttcatgatgatgacgatgagcatgaaaatgatgaatatcatgtctcagatcatctagctggacta

SEQ ID NO: 186593 - DNA, 421 bp, Arabidopsis thaliana landsberg
atgaaaaaagaagggaaaaatatttgtgtagagagaaaagagagaggaggagaagagaagaaacggagggcgctctgcgttaaacagtgaggaggatgaagaagaagaagaaggaaggcggaagggaaggagaaagatagtgggtgcgttattgtgtcaaaacttcttttattctttttatttttccaatccagtccttttattttctgtagactttcaattcgcaacccactttgttttcttctcttcacgtaatagttcgtttcgagatcggcccattatcaggcccactagatcctctttcgccggaacttgtgtgattcaaaacgtctccgtaccaattttgacagtagaccgaattctgatcgcgacggttttcaatcacgccgaagaaatacacaatttgaatttgaacttataa

SEQ ID NO: 186594 - DNA, 238 bp, Arabidopsis thaliana landsberg
gtttccaaacttggatgagaaatctcgattaaacttcttaagaaaatggctcgaatgtcaccttgaagatgcacaaaacattcttaaaaaacctctaatcctaggagaattcgggaaaccaacgaacacaccaggctacactcaggctcagagagacgcagtgttcaacgcaacgtttgacaccatttacgagtctgctgaaaaaggcggtccagctttaggagcattgttttggcac

SEQ ID NO: 186595 - DNA, 395 bp, Arabidopsis thaliana landsberg
  unsure (1)..(395): unsure at all n locations
aactcagtttccagtaaccaatctcactccggtgtgtttatcggcgatctcacggcgacgattgcacgcactcacatcggcaacgccgcgccggccaagggttgtgacaagtggtatcagagtcgatcatcttcggccttgcttcttcgactcgtgcgcttctccacgcctacgatcttcacctatagagttgttggaagccaccgcacacaagctattcaacgcattgcagtagatgccgtcgccacnnnnnnnnnnnnnnnnnnncgtgtcttcaaggtgtggcctatcttcgacgaggaatgcatcttcgatggagagcctattttcgacgaggatcccaacggcctcatcactgagagcgtcgacgtgtttggctcttcgggtgcccagac

SEQ ID NO: 186596 - DNA, 91 bp, Arabidopsis thaliana landsberg
atttaaaacggataatagccatcggatgtacatgtacacgtgaagagttgggatatgaaagaaatccaaaggctgagaaaaagaaagagag

SEQ ID NO: 186597 - DNA, 435 bp, Arabidopsis thaliana landsberg
atggatcagatgcggcttgggggtattatcataaagtacatcaaagacaatgatttggatatggtttttgtcgacaaggcagagggtaacggcgctgtagatcgagttaaagaacttggttttggtgacaggattatggcgattgattttggaagcggacctactgatgaccagtacctaaataaacgtgcagagatgtggattgaagcttcgaattggatggacggagatgttgaaatacctgatagcgatagcttgcacagggatcttgtcatggttccggattacctactgacctcatcagggaagaaaaagcttttaagtaaagatgaaattagagcgaagtttaagcgttctccaaacgaaggcgatgctgtggctttgacgtttgcccatccagttaagacacgcgcacttgacgttgcaggccatggg

SEQ ID NO: 186598 - DNA, 170 bp, Arabidopsis thaliana landsberg
atgaagatacttgataactatttgtaagtttctactttagcattttgcttagacttacaaacttttgcatattagggcttgactggtttaaacggcagcggttacggttgcggttgcgggagtttgcgaaagcggaccattccggtttcaagcgttatttagcattttga

SEQ ID NO: 186599 - DNA, 291 bp, Arabidopsis thaliana landsberg
caagcccgctaccacaagaaaaagaactttattgcaaaatttcaggttgaggaacgtattgtcacatcacaagaagaaaaacagcaagcaaccttggatttttatgataacctgctaggtacagctgaacatagggactacgccctggacctgcgcagcctgggcattcaacaacatgatttgggggatcttgagcttgttttttctatggaggaggtttggtcagttgtaaaagatctgcctttggacaaggctcctgggccagatggtttcacatgtcgtttttataag

SEQ ID NO: 186600 - DNA, 186 bp, Arabidopsis thaliana landsberg
atgactagatactggccgctactgccacagccctttctcttgttacggttgtgccattgccgccgccccaatgactgccatggccaagttgccacgatcagaaccgtcgctagtgttgtggctgccatcgccctggccgtgtacgcccaggctagtggaggccatgaggcaccatgccgcaagagg

SEQ ID NO: 186601 - DNA, 251 bp, Arabidopsis thaliana landsberg
acttggagcacaagcaaaccagcagcaacgacgctgacgaggaggacaacggcacgccgtctgagacacctgcgcctgacgaccacgttgatgacatcgcagagacgcctcctccgccagagtcgatgagtgctaaagccgcggacgtctccgtggatggcgcggctgtagcagagcaaggcaagctgccgcagcaggagccgaccgtgggcaaggacgtgctgccgttggccgaccaagctgcgtctgcg

SEQ ID NO: 186602 - DNA, 61 bp, Arabidopsis thaliana landsberg
atgcagctgaaccaacaagctgaagctctcttattgcaacgacaccgcttggcaagaaaat

SEQ ID NO: 186603 - DNA, 94 bp, Arabidopsis thaliana landsberg
ggttaagtttataattgaggagattgaaagagatgaagcagctctacgagaggacctgtactcggctgacaggaagtttgctgaatattacaat

SEQ ID NO: 186604 - DNA, 236 bp, Arabidopsis thaliana landsberg
actctcaacaacggagagagccggagagattgaagaagaaaggagaaatatttgcgaacccccaagaatcgtttttgttgattgattctctcatggaaaatctctctcattctcggaatccaaacaggtcttcttcattacctaagaaaccttacaatggcaataacaccaccggaggttttagctacaactccggcaaaacggctaatacaaccaccactactacatacgacgac

SEQ ID NO: 186605 - DNA, 686 bp, Arabidopsis thaliana landsberg
atgcagagtgttgttgttgatcaagtgctgggtccaggaattagagtcacggtagccatgggaactgaccacgatttaggtactgataatctctattttctttcaagttaccatatgcatatctgttttctttctttaaatttctatttagatcatttatatacgtttctctaagctacctacatctacttgttgagttaatatattttgaatttggttcatgtagatttggtacgccagattgttccaccctctaagccaagggaagaagcaggaatgtattggggatacaaagtacgatatgcatcacaattaagttcagtattcaaggaatgccctttcgaggtaataataatgatactcgtctccacatccttctacaacttagatcatatttcctgcataaccttatttcctaataccaaaagcagggtggttacgattatttgattggtacctcggagcacggcctggtaattagttcatctgagctgaaaataccaacatttaggtgattctcatttccccttaacatggtataagtttgtgtctaaacacattattagccgtttaaatttgggggactgactccaatggttatggcttgaaatcataggcacctattgattgcatttggtggacttgctgggcttgaagaaagtattgaagatgataatcagtataag

SEQ ID NO: 186606 - DNA, 230 bp, Arabidopsis thaliana landsberg
atggtcgggcttgacccgactatccatgccccgggtgttgcgtggatcctcggggcgagcccgaggatgacggagtgcgtgaggcgagggtgccggccaaggaaaaaccccggccgtttccagccggggttccgtaaagcgctaaacccgcgaaaggactacttcgtggcggcttcgtagcgttcgaggacatagtcccagttgatcaggctgtcgacgaaggcttcgag

SEQ ID NO: 186607 - DNA, 143 bp, Arabidopsis thaliana landsberg
tttgtggcggatgactcaaagacagagaaaattgtcggagacgcggtgaccaaggaaaacaacgaagtattcttggagattgttagtgaagatcaaaccgaaaacgaaacagatcgaatcttcttagaagaattctatcacag

SEQ ID NO: 186608 - DNA, 105 bp, Arabidopsis thaliana landsberg
atggcatcgaaatgcataggtgattgtgtaaacatcaaaaacaatgccatttgtgtccggcctggtagaactcacgccaaaattcacaagtggccgatggccgag

SEQ ID NO: 186609 - DNA, 249 bp, Arabidopsis thaliana landsberg
tcctcagtcatctcaagataaccagcagcgcaacggagagagaccacgttaaaggcagtgatatcgaaattaatgccgtagcaaaatttcatggtgagttcaaacgtcgaaggtccaccagggaaatctctaagctcaatcatagaagaagagtccttgagatctctcaccatcttcctcatctttccactcctagctactaacggaaactgcaatgtttattattattctctgatgcgtttgatctaa

SEQ ID NO: 186610 - DNA, 123 bp, Arabidopsis thaliana landsberg
ggacagaccgaacctgatcgagacccgttagaaacgtcaagagatgttaagaagaaagagaagcaagagagagaggttggactcgagaacaagacagtacagtaccaaccacgagtcgcttga

SEQ ID NO: 186611 - DNA, 386 bp, Arabidopsis thaliana landsberg
ggcgcggcgcttcgggaaacccgcaatccaacagtacgacgtcaatcaacggtcatgtcaaaaacccccgcggaaccatttcgagcgagggcagcgtctccgccatctagcgacgtcttcggcaccaggtgacttagtcgaattggtccctcggagggcaaatgttggggcgaagcgaagacccacccttcgctcgaggccttcgccgtactcgctgcaccaacggtgacaagacaacgggcagacttacccttcgtctcatacgccgccggacgaagacctgtgacgacgtcgtctcatcctgcgacctcgtccagaatggagcccgcgtgcgattcggccattgtaaaggcctgcgtagcgttgcgcgttacgggctaatttga

SEQ ID NO: 186612 - DNA, 272 bp, Arabidopsis thaliana landsberg
gttcagggtgcaagttacagttcttgaccatactggggaagcatcatttcttcttttcgatcaggatgtcatcaagctcattcacaaatccgcatatgaattgctcgagcaacaagttcaggtcaatcttctaaactccactatttgaaaataacttttaaatttatactaatgtttatttatttgtcaattgatgcagtttaatcgttccgacaaaattcctcaagagctgcttgatttagaagggcgtcaatttgttttcacgatacaag

SEQ ID NO: 186613 - DNA, 324 bp, Arabidopsis thaliana landsberg
atggccacccacgaccccgtgttcgccctggcggccggagcgcgtgaggtgcagctcgtcgaggacagcgacgacggcgacgagtacgagggcggcgaggtcgaggacgacggcggggacaggcgggccgacgagccgcccgcgacgcggcggccgcggtgaccgccgggccgctgactaccgtcggcgaggccgagcgcggcgagaaaccggccagcgtcagtgcgatccggacattcgtccccggccgccgccgcaggccctggttcgacctttaagccatcgagattcggcatcgtgatggccgggatctacctgtcggac

SEQ ID NO: 186614 - DNA, 400 bp, Arabidopsis thaliana landsberg
atcgcgctgttcgagatcggtgagcaccgccgacacggtctgcggcgcaagatcggtgacgcgcgcgagctcggcattggagatgcccggctgcagcgaaatcacactcaagattgcccgctgattggtctgacgcacatgcgacggctgtatgccgcgccctacgacgacaacgtcgcgcgggcggttggtaatgtcagacaatgattatcccccaagagcgcagtcggcctcaatgcgcttgccgatcgcatcatcgactatccacagcttagagctaaaatcaatactttggttggtgtcgggacatcgaccgcccaaactctgttcaccgacgatcgcgcaaagttgtcgcgcggtcgaagacagcacgcgcggtgtcttgccacttcggcgccac

SEQ ID NO: 186615 - DNA, 399 bp, Arabidopsis thaliana landsberg
ctccatgcggcggatgcgctgatctgcgacgttccgccggacacgcgcgagctctttcgtcgctttcagcgtcaacggctgcaaacatggcgccagcgcctgtggacgccgctcgccatccgaattccgctcttcgaccccgattctttccttgagcgcacggcttttcttgtccgcccgttgtttggtcgattgggagccttgatctggctttcagtggttgcagcaggtttggtgctggcaggacttaactggtcggccttgtccgagaacgtgatcgatcgcgtcttggcaccgcagaaccttctcttgctgtggtttgtctaccccatcgtcaaagccattcacgaactcggtcacgcttatgcgaccaagatttatggcggcgaggtgcacgag

SEQ ID NO: 186616 - DNA, 384 bp, Arabidopsis thaliana landsberg
atgatgaaaagatttatggtccaactccagaaattgcttcagtctcgtttggatgtgaacgtgattttgtgttgaagaaaaagaaagatgaagaatcttcccaaggtaatgggacatttgagtcatgctaaagtgttttcctgcatagccaggaacaagccaacttttgtttggtgtgaacctgcagggaaaacaggagacagtggaccagctaagaagaggttaaagagaagcagcagagaggatcaacaaagtttgacattgaaacatggatcgttgctggtgatgagaggatacactcaaagagactggattcattctgtgccaaagcgtgcaaaggcagagggcactcgtatcaacctcacattcaggcttgttttgtaa

SEQ ID NO: 186617 - DNA, 98 bp, Arabidopsis thaliana landsberg
atggccctcgtttctctgttggtcggtgtccgtcgctggcccgtgtgtctccgtggggctgttgtccttggtgtggtgccctggtccccgtttctcgg

SEQ ID NO: 186618 - DNA, 196 bp, Arabidopsis thaliana landsberg
gacgaagccggaatttttatcgacgaaatcagaaacaaccgattcgttctcggcctccatcaaactgcaagttgcataaatcaggcggcttcctggccgcaccagccgcgctgcactccccagtatctcccgttgctgccgcgccagttcaacaaaatcgaaagccctcagtcgcaattccggattgcgccgccac

SEQ ID NO: 186619 - DNA, 367 bp, Arabidopsis thaliana landsberg
atgcagatgacggatgatgaacggatcagtgagattgacaaaatctattactttgtacaggataaatacagcttttcaaaaaaatttagcgataaaatcaagatgcttattgagcaaaggaagcagattgaaaccgaggcgcagcaattgaaaagactatatgatggccagtaagataatatgaatttgaagatagtggtcattatcagtacgacagaaattttaagtgcaaagggaattgaacagcctgtttacctgcactaatcctgcaagccgttggctgatgttgattttgacattaatcaggatgaaaattggggtgaatgtaccggcaattgccgtatataaaaataagatcggacgatga

SEQ ID NO: 186620 - DNA, 100 bp, Arabidopsis thaliana landsberg
atgaatatagagttaaaagcaaagtatggggatgatgatttaacagatcgacgacgtgacaagacaaatgatgtttatcaagaacgaatgatacacgtac

SEQ ID NO: 186621 - DNA, 153 bp, Arabidopsis thaliana landsberg
aaagaagattaatagatcaaattcgacttaaagcaaacatctaccacataataaatgcaatgcaaaatcaacgaactgaatccaatcgacaatcaaatgcctatctctgcatctaccacatgatacgtactcaaaatcagatttttatggaag

SEQ ID NO: 186622 - DNA, 179 bp, Arabidopsis thaliana landsberg
ccacgtcacccaaaattctaaacacactttcttcttcttccttcttctcttctgattggggtatttactcggcaatgtcaatgcgtaataagcaagggatgggaatgggattttcattgccagcgacgaaacgggcttacacgtacacaagatgttgtggagaaattgtgtggcggtga

SEQ ID NO: 186623 - DNA, 111 bp, Arabidopsis thaliana landsberg
gtccagaaaatttctgacccggtgcaatcatcgcgaggactcgacgttgacatcgacgattccacggattcgattgacagcgctgctctatggagtgattgatgaagaaag

SEQ ID NO: 186624 - DNA, 241 bp, Arabidopsis thaliana landsberg
aatcattaagcaagtccaagctgtcatctttgcaatcacatccggggcatagccaaccctcatcatccggaggaactacaaaaattaaaaccaacaaaaaagacagctgtagataccagcaagaactgcttaaaacactaccaagtacgtaggcagagaatattactatcttctttccgcagaggtggttcaagacagtattggtgaaagcctcgatcgcaaaacccatcgcatagtatga

SEQ ID NO: 186625 - DNA, 100 bp, Arabidopsis thaliana landsberg
tgcggctgttataactagacctggaccaaaaaaccggatacggaaaaaaaaacctgattccaaccgacccaaaaaacccggtcgatttggtttcggatag

SEQ ID NO: 186626 - DNA, 162 bp, Arabidopsis thaliana landsberg
aggaaattgagaaattattccctaatttatttggacaaccatcagctttattggttcctaaccaatctaatgaagtttcatcggatcaaaagcttaagattggtgttgtgttgtctggtggtcaagcacctggaggacacaatgttatatgtggaatctttg

SEQ ID NO: 186627 - DNA, 82 bp, Arabidopsis thaliana landsberg
atggcagaacaacgacacgaagacaaagcaaaagtgaattatatcctcatgcgcatcgtgaacgtaactcatcgacgaagag

SEQ ID NO: 186628 - DNA, 893 bp, Arabidopsis thaliana landsberg
atgccgaagcatgggtacgccaccttttttatttagatatatagcactaagttagatattatttctaactatctcgttggttttcgttgcagtcggcgtcacatggtggcaggccttgctccacctactcggcctatgctatggcccataagggtaaggcgacgtccgacgtcacctacaacccggatgacgggcccgaggcagcaccaaccccgccgtctacagccgcctccatgactacaccgccatggcgcaggaggtccatggcccagactatgatccgagcaccgagcctatcgaccccgatgtgctcatgagggtcggaggaggcaagagacatgggcggtactggattgctgacggggcaatcgactcgtcctccactcccactctgtctcaggtgagagcaaggagcactggctcgagcccagccattcgacctcggcacgacagctcacagcatcgcatttcacaactcgaggttagtgcttctgtaactcgtccttcctttagttatatacctagtctttgagttactataacgttggcttgtaatattacagacccaactattagagatggaggcgaggataatggcggagcgggcggcggctgatcagaggatggcggagatgttccagtacatgcagagccttggcgccgcacagggcatccgccgccacctccattgttccccccagttgaccctactctcttccacactcctgtgagtatcaaaattgtagttagatgtttgtaatgcatctggtataacacatgctatctcttctctgtacagggccaatctggggcggcatccaacaaccctccggaagggttcggcccaacgcaaccccggcaaaaccgcccacctccatgagtcattgttttag

SEQ ID NO: 186629 - DNA, 428 bp, Arabidopsis thaliana landsberg
atgatgtttttctctggtgagaggggtggtcgaaagagcgtagatcactgactttggaacgagtggtgtcctgaagggaccaaatttgaaaagaagtgtctgtagtgtagacaaatgtgattggagagaatgtgcctgtgacactttcagacaaatttcttctaccttttatacgctggcccccatgtgcatcactaatactctatctaagatactctctctctataaatgcctgtgttttctgatcgggtttttttatcaacggtttactgtgcactgaatccatagccgatcatacccttttcattatataaacaaatttctttttaaagtactcttagatactcgttttgggatttacaacttttctaaagattctatttacgacgcacagaactataaggataacgacttagtcaccgtgagaa

SEQ ID NO: 186630 - DNA, 204 bp, Arabidopsis thaliana landsberg
atgattttaaattcgaggggctcacacaccttggtgatgaaacattaccgaggctacattgaatatggtttggggaagacttattctcagcaccttgatgcactgtatgttaaagatcgtatatttaacgatcggtcgtacgcagaaacaatgcacttggcttgattccaccaagcttacaatacaacgatgtctatgatgctg

SEQ ID NO: 186631 - DNA, 418 bp, Arabidopsis thaliana landsberg
gtcgaacaactggcgcagcaggtcccggccaccagtagcgtgccggactacgaccccgggtatgactacgatgccatggtcagctacacccccgactacggggacatgccgcagccggactacgcgccgatgcaacaggagcaacagtggtaacccaaacagggtagcggcaagaagccctggagcgacaagccctgggacaagggccgcaagggcggcaagccttggcagcaacgtgacgaagccccgccacgggtgccggtccccgtggagccgccgaccctggccgcgctgcgcaccctgctgcaccacccgctgctggccggcaaggtcgaggatgccagtcatttcgccgacgaagaacacctgtacagtcagttgctggtggcgctgatcgaggccgcacagaataatcctg

SEQ ID NO: 186632 - DNA, 389 bp, Arabidopsis thaliana landsberg
atgaccaatgccgattgggaacatcaagtatcttggctcatgctgttggattggcaccgttcaaaggtgagcagtgttgtgccccaaagtgaggcattccccctatgtgtgatgacctagattcttggtggtcaacccaaactcagccagataatccatatggtttaattgaacattgccctcgatcacaagccattggtattattccacaattcattcgtttgggaattgatttctcgtgtccgtcctccctcctccaatagttgctactctcactacaggtccagtaacccctgctgataagattggatatgctgatgcaaaattaattatgaatacatgtatggccgatggtcgattattacaaccaagtaaacctgctacatcaa

SEQ ID NO: 186633 - DNA, 271 bp, Arabidopsis thaliana landsberg
atgaatgagtccctagtcggggacggtccgacttctgagggcggacggtccggacttttacaagacagttcagcttttaagatcggacatccaccgcagtataaaactaatgtcgcggacgatccgacccctgaggccggagggtctgctgtcacacaaagatcatctaattcctttgcgggagacataatagaggaattcagagatctcgacaaattaggacaggggtttacatcggccgatcctttggaggagattgatatagtagatg

SEQ ID NO: 186634 - DNA, 299 bp, Arabidopsis thaliana landsberg
atgatcgtaggtcggtgctacgttaacagcggcggaggaagagttttcaggcggagcaaccgggacggaagcggtgttctgaacaggtccggaatcaagacagcattcgaaatcgaagctaagtccatcagcatcctccattgctaaggatttttctagggtttggaagaaacgaacagagagatcaaatcggaggattcgagcttctgatgttagaaacaaggtttaacgactcaagctcggttcatcgtataactatcagattgaaccggtatttgaacggtttattaaaccggtaa

SEQ ID NO: 186635 - DNA, 281 bp, Arabidopsis thaliana landsberg
atgttgccaacagctgctgaaggcctagcggcggggataccattggatgcaccgttagtggtaggcgtgggaggcgcgtctagctctattctccccccaactccggggtctccggaggttatccttaggcgaccgctctagtctggcgtcgaacctgaagcaatgctgactcccctcccataggtgttgtcccgcactcactaggctcttcgggaaaccaaggtggctatccggcgggagtgggaggcgctcgagaccgagcatcagcaccttggcgactg

SEQ ID NO: 186636 - DNA, 94 bp, Arabidopsis thaliana landsberg
atgctacctgttgatgcatccaagtggcaataccgcttcatcctggacgaacacgggcttgtgccatcatgcacggatccactcttggaaacag

SEQ ID NO: 186637 - DNA, 176 bp, Arabidopsis thaliana landsberg
aaaatagggaacaaacgaatgaaatcttacaaagagatgacatggaggaacgaaggattcataggatttacagtggattttggattatttatcatggaaagtacaaaaaattagatctttccatcaataaacgagtgaagaggcaagaagaagacgaaaggttatttgtggaataa

SEQ ID NO: 186638 - DNA, 63 bp, Arabidopsis thaliana landsberg
gtcatcgtgatagtcaccgttactcgtaaagaatgctcactgaagtctccgcaattgagatga

SEQ ID NO: 186639 - DNA, 297 bp, Arabidopsis thaliana landsberg
tgcgccagtgcctgatgcgcggccttggcgccggccgcatcaccggcgagccggcacatgtgggccacggtctgccagttgcgcgcgcacaggccgccggtcttcggacccagcgcgtacgaacgccgcgccagttgttctgtctgcgcgtactggccaagacggatcgccagctcagcgcggtcctgcaacagtgccggcgagtccggcgtcactttcaacgcgtcgtcgaccgtcgccgcggcccgggcgaatgtgcccagcgattcctgataatgcgcacgcttgcacaaccgg

SEQ ID NO: 186640 - DNA, 51 bp, Arabidopsis thaliana landsberg
atggaagaggtattgcgcaacgaccatgagtcagcagattgctgtcgcgtg

SEQ ID NO: 186641 - DNA, 457 bp, Arabidopsis thaliana landsberg
atgtcaagcagttcacttttgtcgtccagtctggagacggctgaagcgatcaagggtgaaaacggaattgactctgataggccacgatatacggttctaaacgaagtcgatgtcacaaccggaaagaacgagattctggcgagcacttctttggtctctttccaggaactggacaaggtatgacaagattatctttaatttaatctatgacaacgtgcttgtttgagccaacattgcttggacgcgccagctatatataaaatcatctgagccaatccactttagaaatcattggatagctcgccaccctcttccggagtatcggggtcaagttctcaattcgtatcgatgacagcgacgagtctgacgtcgacgaagacgattacgaccagttctcatgcagaagtacacagtttggaaggcggttcatttcaactgggagcgagcataatggaaa

SEQ ID NO: 186642 - DNA, 435 bp, Arabidopsis thaliana landsberg
atgacagagtatgtggtcactcgttggtaccgagcacctgagcttcttctctgttgtgataactacggaacctccattgatgtttggtcggtaggatgcatattcgcagagattcttggaagaaaaccgatattcccgggaacagaatgtctcaaccaactaaagctaatcataaatgttgttggtagccaacaagactgggatctccagttcatagataaccagaaagctaggagatttataaagtatcttcctttctcaaagggtactcacttttctcatatttacccgcacgcaaatccgctggcgatagatttgttacagaggatgcttgtgtttgatccaaccaagagaatatcggtcagcgatgcgcttttacacccctacatggagggactgttggaaccggaatgtaacccgtcggaaaatgttccg

SEQ ID NO: 186643 - DNA, 189 bp, Arabidopsis thaliana landsberg
atgcggcgcgcgatagatgcttataaaaaagcatcggatgatgggcgcatcaagaaaagtactgatgccagtggctaccccctgaatttgcaagtgttggtgaatggcgtgcaagatgccaagcatgcaaagcatgccagattgcgttttttacgccgaatcccgcaggatccaatgttgagtatgcag

SEQ ID NO: 186644 - DNA, 88 bp, Arabidopsis thaliana landsberg
atgacggtcggagtagacaaatccgtcaacagtttaatccgctttatctttagggtagacaacagaccattgcggagcaactctattt

SEQ ID NO: 186645 - DNA, 181 bp, Arabidopsis thaliana landsberg
atgcacgaataccgtcttgagaccgatgaaaatggaccgcctcatgaggaaggatgggtggtttgtcgcgctttcaagaagaagctaaccacgatgaactacaacaatccaagaacaatgatgggatcatcatcaggccaagaatctaactggttcacgcagcaaatggatgtggggaatg

SEQ ID NO: 186646 - DNA, 96 bp, Arabidopsis thaliana landsberg
atggctcacaacatagccattccaactcagttgattcagcgcgtaaaccgataccaactcaggcttgaggcttcagggcttcatggaattcataag

SEQ ID NO: 186647 - DNA, 89 bp, Arabidopsis thaliana landsberg
atggacaagcaacgatcatctgcagactccatgcgttctgcgactcgagacgtcagtgcgacgtacgtcatggatactgaatgccgaac

SEQ ID NO: 186648 - DNA, 171 bp, Arabidopsis thaliana landsberg
cggaccaggcgttcgggccggatcatcaacgttgggagtaccaattggtgcacctcagtttcgtttgccaattcatctatcagaacgatcaccgagaacatgttcaatttgctgttggagcgcaagaatatattctcagcggcaaaaaagaccggaactgcatcgtaacag

SEQ ID NO: 186649 - DNA, 65 bp, Arabidopsis thaliana landsberg
gtaccaaggagcagccacaggccatcatcagctgcgtcctcgagacacgacggcaaatcccctaa

SEQ ID NO: 186650 - DNA, 325 bp, Arabidopsis thaliana landsberg
gcattaccctccatgacaagaaaggggaagtaaaaaccaatgcaagacagggatggttccgctactgggagcctatggacgattcctggctgggaaccgctctcctggcagacccttctgggatcagtgattttaaggatcacaggacagaagcccgtgatcagagtcatctgtatattatgctcagacccgcagagcagaaggcggtcttttatgccggctatgcctggcagaagagcggccatttcagatctgctgcagagtgggacgagtatctgccccagttctcaaaaagacttggttcaccgctagttgtacagatcag

SEQ ID NO: 186651 - DNA, 268 bp, Arabidopsis thaliana landsberg
atggtggtgcactcggagaggtttaaaagaattgatttgaacacctatgtcattaaattgcacttatcttttcggtcaaacgtctcaaaatgggtgaccttccgaaaagtgattgtcggaaccatgtgagtgaggataaaacatggaaaaatatcatgtggtgatttgtagggttagtaacaagtctttaaaaccttccagatatggcgtaccgaccatcagacatgggtggacccataagcccgagagaggacgtggagtagcctaa

SEQ ID NO: 186652 - DNA, 71 bp, Arabidopsis thaliana landsberg
  unsure (1)..(71): unsure at all n locations
atgttgcggcacgccggccagtcgctggaaggntataccgtcgcggtctcgggctcgggcaatgtggcgca

SEQ ID NO: 186653 - DNA, 301 bp, Arabidopsis thaliana landsberg
atggcgaaatcagagtctgctttgtatgcaaagctagttagtgatgaccgcctgagcaggactgctgaagatgctgttaatgtacaggaggtatcggcgaacgttctgcgcaaagactcgatcctggcggctgcttcttcaggcccgcataaatatgctgctctatcttcaaatctgctgtcacaattgggccggaggatacgatctgcaagagataatgagctcgaagctctcgaagaaaactgctcaaacgagcttgctcgcttaaatgtcctgaaagtgtctgttatggagaaagaaa

SEQ ID NO: 186654 - DNA, 105 bp, Arabidopsis thaliana landsberg
atggtggaaacacaaagtaaaagaaaattgaaaaagctgagaaccgataatggattggagttctgtaatcagaagtttgatggtttctgcatgaaagaagaaata

SEQ ID NO: 186655 - DNA, 140 bp, Arabidopsis thaliana landsberg
tacagtctacgaaggagaacttcaggttgacatcaccgatgcctcggtgacgggaccctttgcatttgactatacttatgactggacttccgccacctcaacgcccattgttgatcctgttactttgcaggatggagatg

SEQ ID NO: 186656 - DNA, 472 bp, Arabidopsis thaliana landsberg
atgaacgagataaaactcatctcgaaattacaacacagaaacttgcttcggcttttgggatgctgcatcgatggagaagagaagctattggtctatgaatatatggtgaacaaaagccttgatatctttatatttggtaagtcccttcctgcttttctccttccatgacgatagagagttctttatgctgatcgatttctgccatactctgtgtgttgtacttttggccagcagatttgaagaaaaagcttgagattgattgggctacgagattcaatatcattcaaggaatcgctcgtggacttctctatctccatcgtgactcattcctcagagttgtacaccgcgatctgaaggtcagcaatattctcttggatgagaaaatgaacccaaaaatatcggattttggattggctcggctgtttcatggaaatcaacatcaagacagcactggtagtgttgtaggcactct

SEQ ID NO: 186657 - DNA, 164 bp, Arabidopsis thaliana landsberg
acttgctattgccgcccatgcaagtcatcgtggagagcacatacggcgtgtcacgtcatccccctcgtgaggatcgggagcggcggttcctgcaaaagatacacgacaccgtgacagcggcagggagggtgctgctgccggtggtggcgctgggacgggcgcag

SEQ ID NO: 186658 - DNA, 1594 bp, Arabidopsis thaliana landsberg
  unsure (1)..(1594): unsure at all n locations
aaatttcttccaccgctaaaatctccaccgattcatcatcaccaagctccgccaccgcttgcacctccacgagccgcaatatcaatatctataccagacaccggtttaggacgtaccggtaccatcctcgacgagtccacgtcttcagctttccgtgattaccaatctttattcgtgtcacaacgttccgagactatcgaaccggtcgtaattaaaccaatcgaaggttcaataccggttaacttcccttccggtacatactacttagccggtccaggactatttactgacgaccatggctcaacggttcatcctttagacggtcacggttatctccgtgcgtttcacatcgacggtaacaaacggaaagnnnnnnnnnnnnnnnnnnacgttaaaacggaagctaaaaaagaagagcacgatcctgtaactgacacgtggcggttcactcatagaggtcctttctcggtgttgaaaggagggaagagatttggaaacacgaaagtgatgaaaaacgtggctaatactagcgttttgaaatgggctgggcgattgctttgtttatgggaaggtggtgaaccgtacgagattgaatctggatcgttggataccgtcggaagatttaacgtcgagaacaacggttgtgaatcttgtgatgatgatgattcttccgacagagatttatctggtcatgatatatgggacacagccgcagatttgttgaaacccatacttcaaggtaatgtttatgttaaagtagtaaagtttaaataacttaaagtatgtagtcctttattcagacagcggcgtaaaattaattaatgcaacaaaactatatagtaaaactttttattcaaatatgtaggtgtatttaagatgccaccgaaacggttcttgtcacattacaaagtcgacggtcgaagaaaaagacttttaacggtcacttgcaacgctgaagatatgcttttacctcgaagcaacttcacattttgtggtaaataatcttttaattctttaaaaacattatgaaaatagtattttattattattgtagttgtaatggcaattaactatttacagagtatgattcggaattcaagttgatacaaacgaaagaattcaagatcgatgatcatatgatgattcatgattgggcattcacggatactcactacatactctttgccaaccgagtcaagcttaatccaataggtaaagttatcttgatagtaataagttctgtttcaagtcatttacgtacacgaagaataatacttgcgttacaagaaatctgatgatgtaaaatatacacacgcaggttccatagcggctatgtgcggaatgtcaccaatggtatcagcgttatcgttaaacccaagcaacgagagttctccgatttatattctccctaggttttctgataaatattctaggggaggtcgagactggagagttcctgtcgaagtgtcttctcaattatggctaatacactccggaaacgcttatgagactagagaggataacggcgatttaaagattcagatacaagcttccgcttgttcttaccgatggttcgatttccagaaaatgtttg

SEQ ID NO: 186659 - DNA, 49 bp, Arabidopsis thaliana landsberg
atgattatgcaaattaagattaacgacgatgagcggttggtctatgtcg

SEQ ID NO: 186660 - DNA, 178 bp, Arabidopsis thaliana landsberg
atgctcatcctcgaagatctccacggacatcaccttgctacttcttctcttcttcgtcaaggaacaactcaacttggagcaactcctctttttaaaagaacacacattgggtctctccaaaacacatacgtcaagaccttatcaagtaagatccaaaaattcacattcgtcaggaaag

SEQ ID NO: 186661 - DNA, 469 bp, Arabidopsis thaliana landsberg
atgaagccaatcttcgatatcaacgaaacttttgagaagcagctgaaggatttaacttcaaatgtgaagcctatacaagacaacttgttagaggagatcatcacacccaacaccaaaacagagtacctccaacgttttctcatcgataggttcgacaaagagctcttcaagaaaaacgtaccgatcgtgtcatatgaagatattaagccttatctcgaccgtgtcgttaatggagagtcatccgatgttatatcggcccgaactatcactggattcttgctaaggtacataagaagctatctctatatagttttattagggttcttgtcaaaaactatatgcttacttgtagtgttttttttggtagttctggaacttctggaggagcacaaaagatgatgccatggaacaacaagtacttggacaatttgacattcatctacgatcttcgtatgcaagttataaccaa

SEQ ID NO: 186662 - DNA, 648 bp, Arabidopsis thaliana landsberg
  unsure (1)..(648): unsure at all n locations
gggtcggttatcgaggatcgtgtcgtcacaggaaccagaaaagcgggtggtgtgttccgcgatagccgtgctaacttggtcacgtcggaaaaggcagacttggtttggtaagcccaagtcctttcggtaacgaaagctctggtctttggcttcgtgcttgagatccccacgacgaatatcggacgccgctggcgtcctttcattcgtccgtgaggttctcgaacccgagaaacgctccggtcgaacattcatcgacattggagccattcatgcacagccattccgccccctatgacgttgtcattgccggtgccggtcccgtcggtctgtttctcgcgtgtgagctcaggctcttcggcctgtcggtcgtggtgctggagcaagccgaggatccacgttcaccgttgaagcgactcccattcggcatgcgtggtctttcagcgcccaccctggaagctttctatcgtcgtggattgttggacgacgtgaccgaagcacaacaggcaaatgccacctcgggtgccaccaaggcggcagctcactggatgcaacaggcccggcgntccgtgggtcacttcgcgggcattccgttcttccaggaccatgtcgatactgagcgatggtcctatcgccggccgagccctgcgg

SEQ ID NO: 186663 - DNA, 193 bp, Arabidopsis thaliana landsberg
cttgtaaaagttcttgtcgtaaaacgacacgaactttgccggagacatgtctcggtacgtttctgtgaatccagggtcgttgataagatctctccatgtcttgcagacgcatctgaatcgagcaagatccttcatcgatagcctcactagtatctcaatggctaattcttccgggagaaatttcgacatttga

SEQ ID NO: 186664 - DNA, 501 bp, Arabidopsis thaliana landsberg
atgaagtactactcgaacgcgaacaatatgaagctcgacgtccaggaaggcaccatcgacgtggcgtggcgttcgctgtcggccaccgacatcgaagacctcggcaagaacgacgacctcaaggtccacaagggccccggcggcgagatccgctatatcgtgtacaacctcgacacgatgcccttcggtgcgaagaccgacgacgccgatgagaagaaggcgctcgccgtgcgtcaggccatggccgattctgtcgaccgtcaggccatcgccagccaggtctacaaggacaccttcaccccgctgtactcgcacgttcccgacggcctgcccggcgcggacgaaccgctgaagtccgaatatggcgacggcgacggcggacccgatgtggacaaggcgaagaaggcgctcaaggacgccggagtcaagacccccgtcgagctccccctgcagtacaaccccgaccactacggtcaatcctccggtgacgagtacgccctg

SEQ ID NO: 186665 - DNA, 1052 bp, Arabidopsis thaliana landsberg
atggggaaggcgatgggattgctgattagcgggacgcttgtgtattaccattgtgcatatcgtaacgcgactcttctctctctcttctccgatgttttcattgttctcttatgctctctcgccattctcggtctcctttttcgccaactcaatgtctcgtaagttccctcacatttttcgcctaaatctctctggttacggtattggattttgttctttggtctctgatttagtcatttgctgtttggtgaccgagtagatacgaaatttgttggctcctttgatttgtgacaagtttgaatacttgctcgatatgattgtttaattgggttgtactttgtaatgtggttgtgcaatcagttatgttaacttgattatgaaattgatttcatgtattctctgaaggcatgaactgaaactagttctcattgtatttctgggtgaatcaatgatgcatcgatcttatttgattactatcatcttccgttctctgtgatcaatgcatagtcataatcctagaatgttcaatgatatcattatcttctgctcattgtgtgtataactcttcaagacccttgctttatcataccacatgatttacaatcctataacttttctaaagggtaccagtggatccactagagtggcaaatatcacaggacacagcaagtaacatcgttgcacgcttagctaataccgttggagcagcagagggtgttctgagggttgcagcaactggacatgacaagagactttttgtcaaggtaagtgtgtcctttgttaccaacttactatgtacaagataccgttactattcttggatcatgagtgtatcaaaatgcattagcatcaatatatcaccacagagattctcttagaaccctagtgtctttacccagttaccatataaatgcattgctaattgttaactcagtaattgtgctctatactgaatatgtttgttttttgctttttcctttaggtcgtaatttgcctttacttcttatcagcgcttgggcgactcatatcaggtgtaaccgttgcttatgcag

SEQ ID NO: 186666 - DNA, 203 bp, Arabidopsis thaliana landsberg
atgctgtggtcgaaattggttttgaactgctggctttatcctttgacgttggacataggccgatctacatttgatgtgacattgtaagatctctttaattaatggatttaaatctcttcattggacccaacacatgtgggttttaattgtcatcgcaaaatttattcacttttctcttttgttttttttccctcagaacataa

SEQ ID NO: 186667 - DNA, 450 bp, Arabidopsis thaliana landsberg
atggagttggtggaaggcgagcttggacggttcgcgatgataaggggcgaggagcgacacaaacatacaactggctcaagacccttatcaacaagataaggagctacgggagcacgcgatggacggaccacgacgtcgtccgcctaatgctaaggtcatttaccgttcttgatcctcatttggtgaacaatattcgtgaaaatcccaggtacaccaagatgtcgcccgaagaagttcttgggaaattcgttagcgggcgaatgatgatcaaggaggcgaggtacgtggacgacgccttgaatggtccgatcaacgagccgcaaccccttgctctcaaggcaacacgaagcaaggaggcgctacctagcaaggtggcacagattgaggcggccggacttaatgatgaagagatggctctcatcatcaaaagattcaagacggtgcttaaag

SEQ ID NO: 186668 - DNA, 83 bp, Arabidopsis thaliana landsberg
atgcgtgtggctgcgtacgaggtggagggagcactacccctctggctcttatgctggtgcctcctgtcgaaccacacgaatag

SEQ ID NO: 186669 - DNA, 444 bp, Arabidopsis thaliana landsberg
  unsure (1)..(444): unsure at all n locations
atgtaccttgccagcatcgncgaggagcgcggatcgatgctggagccgcaggcggatttcctgttcgcgctgtctgaccgtctggatgaccgttaccgcgtggcggaccgctccggctatatgaaggattgccagccgtccctgttgctggtcgaccagctgcnnnnnnnnnnnnnnnnnnnnnnnnnnnnnnnnnnnnnnnnnnnnnnnnnnnnnnnnnnnnnnnnnnnnnnnnccacccagacgctggacggcaatatcgtcgatcctgtcggcgtctatccggcctttgacaagctgctggtcgacgggcgcgaaaagggcgggctgcccgtgacatacgatgccgcgcttaatgaccgtgtggagggtttcgcgcgcctgatcgccagagtgccgcaagacagcaacatgaagaccggcgacgcgctgcagatgatcaag

SEQ ID NO: 186670 - DNA, 396 bp, Arabidopsis thaliana landsberg
atgaagaaagtgaagaaaagtgtgtggaggaagaagaaggtatgtggggttggagaaaggtgtgtggagatggaaaaaggtgtgtggaggtgaagaaaggtgtgagcctttgagaagaaaaggttcaagctggtctgagaaaaaaaaaaatgcttttcatgctatatttaattgaaaatagatgtgtttgcatggtgatttagaaccacagtcatccctgctacagtgatatttttgagcggcgtcacatcacgtcactacggcggatgtctttataggtgctaccctttcgccctcaacaatattaggcgcagcaaagccggggggaccttatttggaagcatgaggatcataccattcggtttggatgcgcacggtcaacggtatcaaccataa

SEQ ID NO: 186671 - DNA, 140 bp, Arabidopsis thaliana landsberg
aaattgaagccgaatcaggtgaaattcttttactcgaatctcgtgaatctaagagacaattatgattcatctgatctcgcaatgtttgattgttttgcgatcgaagattctacagatgtaatgaatatcggatgcatagg

SEQ ID NO: 186672 - DNA, 329 bp, Arabidopsis thaliana landsberg
acgggtccgtgaagccggacgccgacttcgccatgacctgggaggttgatctgaaatcctccaagcgcctcaatgacatcgccgatgccataaagacgtccgcccgcgtcatcctggccaccgacccggatcgcgagggggaagccatctcgtggcacgtgctgcaagtgctcaacaagaaaaaaggcctgatgaaggacaagcaggtccagcgggtcaccttcaacgccatcacccagtccgccgtccagaccgccatggccgccccgcgcgatatcgacatggaactggttgatgcctatctggcccgccgcgccctcgattacctc

SEQ ID NO: 186673 - DNA, 218 bp, Arabidopsis thaliana landsberg
atgggagaacttcctttccctaatgcttctaatgatgatcaccatattcacacatgtcattggtatgaagaatgtcgtcgaaggctactcatcgatggagatgcgaaactccgaactcaaatagctatcgccctaaccaaactaatcgataaacaaaaaatctttcttcatgatatttcttcaggaaaactcagacaagaacgagcagaagctgttag

SEQ ID NO: 186674 - DNA, 252 bp, Arabidopsis thaliana landsberg
atgcacgctgcatttttggtgctgcctgcgctgtggcgcgcgctgctgctggcagggccgcaggctgagccggcctggcactgcacagccgatggcagcctagtcacgtcgcaactggggtttgcggctgcccgggtgtatgcggtgcttgcggatggccggctgcggcaggtgtccggctggactgcggttcagcatgcgcagcggcagtggctgccttgccacgtggtcgatgatgcgtgccctcagccg

SEQ ID NO: 186675 - DNA, 76 bp, Arabidopsis thaliana landsberg
atctggtgcatgttggaaaagagtccgttacacgggatatgataaccggaaaagatccggacggcaacaaacttaa

SEQ ID NO: 186676 - DNA, 406 bp, Arabidopsis thaliana landsberg
atggggaggattttagtctcagtaaagatcgagttgacaaacaagtcgagcagccgctcgaccagacactcgagcaaccgctcgagcagccgcttgagaagtcactcgaccacgttactcgacctactacttgaccgaccttcccagcaacatcagcagctgctgcaaaaccagttactgtcaagaacaaagaaaaggtctttgttcctcctccttacaaacaacagcttccatttcctggccgtcacaagaaagcattggcagataagtatagagctatgtttgccaagaacatcaaggaagttgagttgcggatacctcttgttgacgctctagcactaatcccggattctcacaagtttctgaaagacttgatcgagggagaattcaaaaaatgcaagggatg

SEQ ID NO: 186677 - DNA, 480 bp, Arabidopsis thaliana landsberg
tgtgatcacatcgtggtgcacggcgacacggtctctgccgtggcggcggcagttggcgcaccgctggcggacgtcgaggcggtcaaccccggcatcatagccggtgaccgtccggacaactattcgctgatctttgcgggtggccacatccacatgcctgccggatactgcgcgacgggggcgtgatgacgtacacagctccaccgttcccgaccgggttgaagcccgacgcgaacaagccgtcggccaagaacctccaagcggccctgaaagccggggggttcatggcagcctcggtagtacctgacgacaactacggccccaagacgcaggccgccgtcagggcgttctatgcacttgcatggaacgcggccatcagagatgcgcactcggaggtcatgggagcgcaaggctgggcgaggctgtttgcctatgccctcgccgagccttcgatggacatggccaagacgactcacagcg

SEQ ID NO: 186678 - DNA, 375 bp, Arabidopsis thaliana landsberg
gaaacagagatgtcaaacgtttggtatgaagttttatctgttttgcatctaatggcaatgctacaaatgtctcaagccaatttactgcttcttcctagaggttctagtgatggtcacaatcatccgaaagtatccgaaggttaggcttctctgagaaactttctcatccatcttctcatacagtctcttgaccattttttatgcactgattttttttcttaaaaaaagggtaaggtttctcagacttaacattatggttgtttggtttttcattatagaaaacagacgaacttcgattgatatcttcttaaaagcagctggatatcttgattgtgccgttaagcatgttctcccccagttttctgctgagcaaag

SEQ ID NO: 186679 - DNA, 277 bp, Arabidopsis thaliana landsberg
atgaaaatacccttatttaagtgccaatgggtacaacatcccgtgagggtgatagtggataactacggcctcacactggtagacttaaagaaagtaggatataaagatgacccgtgggttctcgccgaatgtgttgcacaagtgttctatgtactcgatccagcagatgagaagatgcatgtagttatttctggaaagcaaaaaattgttggagttgagaatgtgggagaccaagatgaggaatacaataagtatgaagagatgttcgtctttaacg

SEQ ID NO: 186680 - DNA, 370 bp, Arabidopsis thaliana landsberg
gaggagattcagaagaaaacaggatatattgtcatgagagatgagggcatatatgatgttgatgctaatacatcaattgaccagctatctgaagaactgaatatgaaaatgccagaggtaatgttattttcagcagtctcttttattcctctttattgcgtcctcaagagcattcctcagggttatcttttaactttgtaaatgtgaacatgttctttaaaagttgaaacccacaatgtttgttcatttgggaaacagggcattcagtacgagacagtctcaggctttgtgtgtgaggcctttgggtatatcccaaaaactggagaaagtgagaaggatgttcttgaaaaggaaagctgggaagaggatg

SEQ ID NO: 186681 - DNA, 356 bp, Arabidopsis thaliana landsberg
tggaccacataacgatggacttcgtcattggactgccaacgggatcaagtccaaacacaatgcggtatgggttatggtagaccgattgactaagtctgcgcacttcatggcgatctcggataaggatggagcagaaatcattgccgagaagtttatagacaagatcttgcggttacatgggattccggttagtatagtgtcagaccgagacacaaggccttaggaactcgagtgaacctaagtactgcctaccacccacagacgtacggacagtccgaacgaacgattcaaaccctcgaggacatgttgagggcatgcgtcttggattggggagaaaactcggaaaaatatctaag

SEQ ID NO: 186682 - DNA, 269 bp, Arabidopsis thaliana landsberg
caagtcttcaaaccgaaagcctgcgattgaactggacccctttcgaagacaaggcacattcaatggccaccgatgaacacgccagccacagcggcggtggcatgcgcaaaagtagccggcccgcctttgtactgcctgacaacaccctgatacagtacatcaacccgcacaatggttctgtgattgggcagatggcattgtcggatcaatttgcacaatggagcaagcggctgcattcacgcctgctggccggaaagaccttgcgctgg

SEQ ID NO: 186683 - DNA, 108 bp, Arabidopsis thaliana landsberg
aatctggtcaaagatcacagcaaccaacacacaattgaaaacccttttgcttgcaataaatcaacctctaacgactcagaagaaatcaatgagcggtttaaagaataa

SEQ ID NO: 186684 - DNA, 137 bp, Arabidopsis thaliana landsberg
atgcacgttcgactgcccacgtctgacactctcgcggaccggccggctgctcgctcccacaccacactaccacagtgcagtgaacaggagtcaagaggtcgtcattactggagcgcactcatcattattaccatcgg

SEQ ID NO: 186685 - DNA, 51 bp, Arabidopsis thaliana landsberg
ggtttgggttggcttcagcgacgtcttcttctgctgtaccggtggaagata

SEQ ID NO: 186686 - DNA, 470 bp, Arabidopsis thaliana landsberg
aagatagtgcatatttggatagtgaaacttctacatatagtaagctcctagatgagactaaacatgtgatgcaacttataattgaagaagatctttcatctgtgactccaacaccgactacttattctgattgggattcaacaaaggctcctaaaatcgatttgaaaccacttccagcagggctaaggtacgcttttcttggtgaaaattctacttatcctgttattgtgaatgcttctcttaatcccaaaaaactcaccttcttgctaagcaagctacgcaatcatcgcaaagctcttggctattctcttgatgacattgcatatatctctcctgatgtttgcatgcataggattcaccttgaggatgagtctaagtcttcaattgaacttcagagaagattgaattcgaatctgaaagaagtggttaagaaagagattatgaagctgtcggaagcagcgattaactaa

SEQ ID NO: 186687 - DNA, 414 bp, Arabidopsis thaliana landsberg
  unsure (1)..(414): unsure at all n locations
atgcctaaatccagatggcagattctgcttttgctggcctggctgccatgccagacggcgagcgcggatgaattcatacacacgctgctacccatggccgacgtcgatgtgctggcgtcgacagccactcactttccagtggccatgccggacatgaattgcgccaatatcgaaatggaacaaaaaagctacggcgcccgtggcagtactgtttccatgaatgatctggccgattcctatcgtaatgtgtcgggcggcaacctggcggcactcgacgtcgccaagatggcggcaaaaatgattcccggtgctttaggcgccagcaaaatgagccgatgcagcgatctcaccggagaacaagctgcggctatcctggccatcancgaaatccacataccaaagaagaacttccag

SEQ ID NO: 186688 - DNA, 229 bp, Arabidopsis thaliana landsberg
gtacaaggacaagaagctggtcaagaagtttctcagaagtctgcctgataagtttcaatctcacaagtcagcaatcgatgtgtcacttgattctgatactctaaagtttgatcaagttgtgggaatgatgcaagcatatgaactgcaaatgaagaagaaggaacgttcatcaggaaagagccaggctcaaaaggctgctgaagttccaccaactgtgagtgaggatcag

SEQ ID NO: 186689 - DNA, 439 bp, Arabidopsis thaliana landsberg
atgctgcaagatgacaacgcccctgtgcctgcgtctcgcgttgacattccacgggagctagctgtggtcccagtccctgcggggggtcaggacacacagctcgagcaattccgcgagatgcaggccaagctcgacgaagaagcggggcggcttgtgcagctccgacaaaacatcgagcaggattgggcaggccgagcacttgccggaggagcgcctcatcgggcccaagacgtccagcgccgaatcgttgacgatgccagggcaaggctgcccccggccttcagcggggtcggccagaatctagcagcagcagcaatgctactccgagcgatgccggagccatccaccaccgagggcggcgtatccagggcaaactcaacggtctcctggaaaacgcagcggtccgacgagccgagagctctgcctcccgaaggcaagg

SEQ ID NO: 186690 - DNA, 272 bp, Arabidopsis thaliana landsberg
gtcaaaatgagaaaatgagttaccgtaggatgcaagaaactggacaagaatgtgttcatgtggagccgccaagagattctgcaaatcttgattcaaccattcagctgagaagagcttcgttcttgtttaactcatccagatccacgctcacttttaaacccgagcttagcaatgtattaaccattgaaggaatcacagattttaatgaagcaggcagagcctgttcatcattacaatggaggattatgtatggttttaagatggagggctga

SEQ ID NO: 186691 - DNA, 237 bp, Arabidopsis thaliana landsberg
tgatctcatcgttgcgtttgcgcttcagagggttttgtttcatggtggcgagagagaagacagaggacacgtatgtggacatgtggaagttgtctaattgtttacttcagtacttgttttatttttcttcttctaaagcttggaactgaacatgtgtatttatagcggtatgaagatgttgatgaccaatgtcgaatcctattaggaaacgcgttaaaagttaaaacaataaagtga

SEQ ID NO: 186692 - DNA, 130 bp, Arabidopsis thaliana landsberg
aaaaattattgacgcaatcaatacagccaaacatcgttccatgaagaagaaaaaacaacaacaacaaggtcagccatgggggaaagaagagaaaaagtcgatagatgggtttagaatccaaagtagttga

SEQ ID NO: 186693 - DNA, 985 bp, Arabidopsis thaliana landsberg
atggtacaagaagttgaaaagtttggtgggtgcaaaacacaagaaaccaaaatctcacaacggccgagttcaggcaccaaacgatctattgctttaaataaaaaggtaaattaatacacatagttagcaaataacactgctgagtcttgttttctgttctcgttactggattttatattagccgcagcatagccattcgtcatgcttaacttttctattcaagaattgtaagtgtaattctattaaccagaattcaagaattagataaaatctagtattaaataagttagcagtcttccatatcatatgtttgcttaggccttgaatcttatgataatgtataaactgttgctgcttttctcatactagcaggagggaatgcaagtgagtcaggcacggccagcagacaaatggcttcttagagcatcaaaagttcttgacgctgcgttttctagtgttgaatatgccacccttttgaaggaatcagaacagtttctttgggctggatcagaaatggaccgtgtgagtttttgagtatccgttggaatgcttttgtatatgtctttgggtagattctggaaaaaatattttctgtatatgtcactcaggtacgagatgttacaaaaagtttgaacaaagcaaagatatgggctgaagctgttagtgactgtctttcaaaagtcgaaagtgaagtcaacgatgattcaatgaaagttcacttggaatttattgatgagttgctgagagttaatcctgttccttgctttaattctggttatctgaaactaaaggttagccatatacctgcaacgtcccagttttccctttagattgttactgctgtttgttattacattgtttacatgtttccacttctgtgtaggactatgctgaagaagctagaaaattgtccgagaaaatcgattcagctctctcgagtagcccaactgtatgccactacaaactccattacttccccacatag

SEQ ID NO: 186694 - DNA, 89 bp, Arabidopsis thaliana landsberg
ccatccttgccgctaagccaaatcctttccacaaacttggtcacatcctgaaattaacgaacaatgagaatgtcgtggtttacacttag

SEQ ID NO: 186695 - DNA, 155 bp, Arabidopsis thaliana landsberg
atgctcgatcggattatgtacacgctccctcctgaattacaggaagggacgtatacgtggaatctcgcgaagcgggcgcaagagtttggctataaggtagaaattgtccgtgatcgtttctacgtagcgaagctcacgctcctgatcaactaccg

SEQ ID NO: 186696 - DNA, 375 bp, Arabidopsis thaliana landsberg
gatggattgcacgccaaaaacgcggctaacggcatttttcgccgaggcgggcccgcgaccattgactcctcgcgaaccggcccattagattggacaaaacgttgttccgcactcgcgaacaacgacggggcgggaaacggaaggccgtcgcaccaggcacggccggctcgaggtaaaatacgcatggcgacagatacagctcctgataccgatctcgaaaaacgcgtcgatgctcttctcgtcggcgccatcgacccgcatgttcacagcggcccgtccatcgccaagcgcgcgctggatcacgtcgaactggcgcggcagtactccaaagccggcttcgccgcggtggtcaccaaggaccacgactacagcggc

SEQ ID NO: 186697 - DNA, 129 bp, Arabidopsis thaliana landsberg
atcgactcgcccaacagcaatcagggaagttacgagatagcctttcggatcttccaaactgttgtatggtttttaagttaagctttcgagaatctctgattctcaagctagcaatttgcgggataaaag

SEQ ID NO: 186698 - DNA, 7 bp, Arabidopsis thaliana landsberg
atggatg

SEQ ID NO: 186699 - DNA, 53 bp, Arabidopsis thaliana landsberg
aaagaagacgacgaatgaagatagaagaagagggagagaggacgtatatataa

SEQ ID NO: 186700 - DNA, 526 bp, Arabidopsis thaliana landsberg
atggcggattcagctttcaggaaaattcagatccaaagagatgacactgtaagagcttctcttttttgtctctccctgagttttttttctacttagtgccatttttatggttgtgtttggtgtatcataagcttcgactgtatccgtagtgcctgattttgaagtaaaaaaaattttggttatcctttccgttgaatgaaaatcatcatttcttttgatatcccccaaatctcggaatctgttgtgtatgatgtatggattatatttgatttatcatttcaatggcgtttctgcttcaggattgtgtagtgttgttctgtggtagagaaactgggaatgagagtaagagatgttattattgcttagctacttctgaagatctccgtataatcatagtccttatcaggtttggttatagaactggttgatttaagaaggaagattgtgagtttaggtttcagttcacaaatgatcagtatagtgataaacagtttaggtattgttttgggcaaagttttcggcgatg

SEQ ID NO: 186701 - DNA, 459 bp, Arabidopsis thaliana landsberg
taggaggaggaggaagaacaaaagagcagcagacttctgagtctggtggttatgatgatgatgctgactttctcaccatcaataagatgaacgatacgacgacgtatttgtcacatcatttccccaaggtataaataaatttctcttttgtcaaccggtttggaaatttaatgttgcaaaacaaaatcaagtccggttatgagttctaaccggtctgattgagactggtcaaatccaaagggattgagtccggtttaagtactacttgtcattgaatctaattagtttcatataaatggcatttaaccggttttagtccggtttggtaactaattttgtcttttggttcattagggaacagaggagtggcgggaacaagaacacgaagaagaagaagaagatttgtcgttgtctctgtcgttaaatcatcatcattggagaagcaatggatcatcggtg

SEQ ID NO: 186702 - DNA, 228 bp, Arabidopsis thaliana landsberg
atggcgtttcagggccatcatggagcaatacctggttacattgatgatggcgccgcctgcgagttcgtatttggtggctatatcgggcaggtctaccttgtcttccagtactgttttatcagaaaaggactgtttccacagcttcaggcgatgttcggcgccgggtatggccccatagatcatggactgaaacctccggaaaaaggaaacatccaggttggctctgag

SEQ ID NO: 186703 - DNA, 344 bp, Arabidopsis thaliana landsberg
gtctccgcatttttcgaacgaccgctcgaccgaaatatgcgcaatcgctcatcgtgtctttctgctgcaccaaggagcgcaccactgacgttccgaccactccggtgggtctgccggtcgccatccctgcatttcgcgagatggtcatcgcctcgttcgtccgcttgtgggccgaattccgcgtgacatcgcactaccgttgtatcttcaatacgccttttacgcaggttttggcctgtgaccctcagcagcggcgattgtcgcgcgggttttcggggcgctcggcaaaccgccgcatgaacacggcatcgctctgtgccgcagtccgcgctcagcccgactga

SEQ ID NO: 186704 - DNA, 145 bp, Arabidopsis thaliana landsberg
atggagaacatttccagcatttccaacactctccgtcacttgaatttgagccacaatgcgttaaatggcaagtttttcagtgaggagtccattggttcgttcaagaatctcgagattgttgacttagagaataaccagatcaatg

SEQ ID NO: 186705 - DNA, 369 bp, Arabidopsis thaliana landsberg
atgagctattggatacgagatccctttgacgcgcaagaggaacaaagtggagtatcgaagactggaaccaaacagcagcaacaacatgcccaacaaggtcaaactacgattcatcctccctctgaacatagcgatagtgaacgggaaatcaccgaacaactggatgagttctttagctttgcaagttgtgtgcgaaatagaaaggaccacaccaggactttcactcccgatcaagaaacagcaattcgggtggttatagatcggtacttcaacaagtcaagcggaatatggaacgagtcgcaatacctttgtgtgaatgatgatgctagatggggcgccattcgagcactggacgcgcgaaaattcaac

SEQ ID NO: 186706 - DNA, 140 bp, Arabidopsis thaliana landsberg
agatcataggaacattcgttggaagaagaagaaggagaagaagaagaagatggatctcgcagtcgcagatcaataaacgctcaataaacggagcatcaaaattggaattgcccgaccggtttatgttgatcggattttaa

SEQ ID NO: 186707 - DNA, 349 bp, Arabidopsis thaliana landsberg
atgatactgcgagcagagcctgcgtactccctgcaggtagccatcatccggaaccactacaccggcttcgccctgtatgggttctaccataaaagcagccacatggttattttgcagcgctttctccagtgcggtaaggtcattgtaaggcactatatcaaaaccgggcataaagggcccgaaaccgctgtagctggaggggtcggtggaagaggagatggcagccagcgtgcgcccccagaaattgccttccgcaaaaacgatccgggcctggttttcaggaacgcctttcctggtataggcccagcgcctggccagtttgatggcggtttcgccaccttccacgccg

SEQ ID NO: 186708 - DNA, 417 bp, Arabidopsis thaliana landsberg
atggccaagagggtgcgcatgttgtcagtgggaatccttgaattatgattgccgttctttctttcacccagtgcccgtaggctgactttattctgcctgccgaaacagccgatatgcaattccaccgacggtaccgaggataagtcgcaggtggaacgcgacatccaagcatccggttcatcttttcacaccgcgaaaatacggccattttggcccatcgaaagcatcggctacctggcatccgagaggcgaccccgcctccctcctctgccggagcagcctgacacggagacgaccatgcttaagatcacgcccatcggcgccacgctcggcgcccgcatcgaagacatcgacctttcgaagccaatgtcccgcagcgacaaggcccagatcctgaaggctttcggggattatgcc

SEQ ID NO: 186709 - DNA, 71 bp, Arabidopsis thaliana landsberg
atggccgtggtgaccccgcgcggcgcccccgtcctgtccccgcggcctggagctcggacggcgtgcctccg

SEQ ID NO: 186710 - DNA, 260 bp, Arabidopsis thaliana landsberg
gttggatgctcgggatcctcatcggatgttgctttcggatcacacaggtgcaattccttcaaaagttcagcttccgttttggaggaaaacgcattcgcattaaaatccgtactgattgtgttatccaccttttcattatccgccgaggtgtgccttttttcaatggtaatttcaccatccgcttcatcgtcacaggcaaaagccaggaatactacaggaagaagaaacacgaatttaaatctcatggcgatgtttactaa

SEQ ID NO: 186711 - DNA, 116 bp, Arabidopsis thaliana landsberg
ttgttatgttatccaatcggtgtccgaatccgcttctagatagtcggtctacgtccaaatacttaatccgaatccgcattctcccgcaggatctctttgtgtcgacctctaattaa

SEQ ID NO: 186712 - DNA, 249 bp, Arabidopsis thaliana landsberg
ccaacagctaacgcgcacggcccgttttgcacccacccggcagcccaggcggtcagcgcccccctagcgaggactaagctcaggtattgccgaggcgaggcacccagtaatgcgcccgtggagattgtgagcagcccgaagatgtcgctgttaatcacgagggcgacattgattcggaacgggcacgagccggaggattgtctgttggagaggatcagcccgtcgacaagagtcgtgagggtcgagacg

SEQ ID NO: 186713 - DNA, 167 bp, Arabidopsis thaliana landsberg
taagcatggctacagctctggtggtgaagaacaatggtcgcaaaccagttacccttaaacccggggattatgagttacttgaggttcaagaaacggagtggggcaggaattcaaggactaaagggatgctcttattgtcccaacccgcctttgtcatcgccttttga

SEQ ID NO: 186714 - DNA, 276 bp, Arabidopsis thaliana landsberg
atgccgctggcgggccagctggtggcgcggcgcggcacgcgcttcgtggtgctgttcggcgccgccatcatcgccgtggcgtgcgcggtcacggtgtccgcgcgcacgccgttcgccttcgggctgtggttcggcatcgtgctctcggtggggctcgccttctgcagccccgtggccttcacgccgatcatcagccactggttcacgcgccagcgcggcatggcgctgttcttgctgtacaccgggtcgatggcgggcatggcgatcctcacgccg

SEQ ID NO: 186715 - DNA, 216 bp, Arabidopsis thaliana landsberg
attatatgcgtcctccaatgcggctggcagccatcatgaaaataaaaccgatttatgtttttactcatgacagtattggactgggagaggatgggacaacacatcaacctgtggaacaactcattgggcttagatccgtccctaatctggtcgtgatccggccggcagatgccaacgaagcagtccaggcctggaaggtggcaatgacgcataaag

SEQ ID NO: 186716 - DNA, 115 bp, Arabidopsis thaliana landsberg
cctcaagatgggagttcgacggcttatgtgtacgaccctttcagtggagaacttaggtatgtattggaaacggataatctgtacacgcgctatgattatgacggcatcggcaggc

SEQ ID NO: 186717 - DNA, 329 bp, Arabidopsis thaliana landsberg
atgatttataccgacggcaagacgggcatcagcctggcaaagcgttacaatgtgaccggggttacgcgagacaaggagtacgacctgaccaaagggaacgaccggtccaaggtacaatacttcacggccaaccccaacggtgaggcggaaatagtgacggtagttttaagcccctcaagtaaagcccgcatcaaaaccttcgaattcaacttcgctgatctggctattaagggccgcggtgcggcgggcaaccaggtgacccgctatcccgtccgccaggttaaactaaaagaacagggcgtaaccaccttgggagctataaagatatg

SEQ ID NO: 186718 - DNA, 25 bp, Arabidopsis thaliana landsberg
atgggctctatgaaggcttacgctg

SEQ ID NO: 186719 - DNA, 165 bp, Arabidopsis thaliana landsberg
atgtcgcaaaaggcatacgatgcaacagagcggaactatctggagctgccggtttttgtcaatcccaataatgtcaccactaatcagcaatacaatcagctttccagcctcccacctacgatatacatcaagaggaacaacttgactggaactataccagtaaag

SEQ ID NO: 186720 - DNA, 34 bp, Arabidopsis thaliana landsberg
atggggggctttaggttagaggccaaaagcaaag

SEQ ID NO: 186721 - DNA, 16 bp, Arabidopsis thaliana landsberg
atgaatgggcagaaag

SEQ ID NO: 186722 - DNA, 250 bp, Arabidopsis thaliana landsberg
atgcccgaaagctgcctgggcaatatcgttcgtcagtccgtggacattggcccggtgatcgattctgaagccaagcctgagcatcgagaagcacatacagtgcatgcgcgaacaagatcgctcggtataccaggtagccatagcatatgctgctgaggtcaagctcggcaccttcgtcacggccgaccctgataaaactgtagaattgagcgagctcaagcgagagatcttcggacctgtcctcccagtg

SEQ ID NO: 186723 - DNA, 70 bp, Arabidopsis thaliana landsberg
atggcggtggggttgttggattcttctgtggtgtttgcgggggaggtggcggcgtgtgatgaggcgttgg

SEQ ID NO: 186724 - DNA, 308 bp, Arabidopsis thaliana landsberg
gtgagacaagcgataaggcaagggaagaaagatgcttacaagttgatgttgcaaacaaagaagaactatggcatcatcgatatggtcatctcagctacaaaggtcttctcactctacgtaataaagagatggtcaccggattaccagacattggacgagtgcagatcacatgtgaagcatgtgtcaaagggaaacatcaccgagttcctttcccaaaaacagagcaaatggagatcaaccgaaaaactggaactcatccactctgatctgtgcggtccaatttctccaccatcaaacagccaaaagag

SEQ ID NO: 186725 - DNA, 53 bp, Arabidopsis thaliana landsberg
atgggcaaatgtttccgctcaaccggggccgggttgagtagtcgggcgccacg

SEQ ID NO: 186726 - DNA, 904 bp, Arabidopsis thaliana landsberg
atgcctctgaagatcctcggtcagaacaactaatgaagcttccaatggtacagtgcactgaaatatcctagggttcagtccccctcgccgtcagcgatccgcgcgcccggattcgcgccggtcgccgtgattcgtgcctggcacaccatggatattcgcagggaggtaactttggacgtgtcgcgacctcgtggacctagcctgatcctagtcggagataattcaccggcggtcgccgtggctcggtcatttccgccgtcgtgtcatccatgcctcgctcctcgctcaatgtgtccctttttacgtggtaaccatgcacgaatggtgtaatccgcggccgtggatcattagccggaccaccgcgcctttaaattgccccaccacccacgacgaggtattcacatcttcagcagtgaactcggttgaagcacaaatttccgaaatcctctccacctctcccaaaattggttgtgcacggtgaatcagtagccctttgccgtatagccccaacatgacctcctcattccaccagagcccgtcgcgacatcgttttccccttctcagtcacaggcgagtgagaattctccgcgcaccgtggccagccgttcccaggtctgctcctgctctccttgatcatgttttagcacccatgcatactcgtgatactcatcagatcaaccctttatgcttgaccacactcaatcatccggaacgcttgaatttgttttcggtattcaccgtcgccgtggtcgggctaagccatggccataataacccaattaaatcttgttctaggttcatctcgggtcagtgatgcttgcccattagttaatttgggcagccaccgccggtcatggccggtccgagcaacagggtggtcgacggcatgcgcgttgtggccaag

SEQ ID NO: 186727 - DNA, 94 bp, Arabidopsis thaliana landsberg
atgggtggctctgtcgttgctccgtgttgggtcttcccgggggctgcgtgtcgggcccttgcgtgccgcttcccagttcccgctggggtggtcg

SEQ ID NO: 186728 - DNA, 613 bp, Arabidopsis thaliana landsberg
atgacagttgagctgacgaagaaccttgatttctcctgtaaatatccctgggaaaggacatcatttctgcttactttggagcgtatcgcaagtttcaaaggagagaccgacgttaaaaaactccggagtggttgcaagcaacattcttatgtactccatggcttcccacttagactccaactccttgcattcgaaactatcccgtctattgctagtctcctaccttctgaaggagataccgccgtctttacagagaggactattaaaaacctttccaaactgcgtccaatcaagacatccaccatattggcgtgcgagtctgctgaacaggtttgtgcagttgttgttgtaagtacattggtataaaaagatgaagtacatacactctgaaattaacaatgattatctatgtaggtggatatcacatatattgtggacccagcagacagtgattgcccaaaatctttggtatggaggaaagaaaaagaggacccaagagttgataatattttaaggatgttgaaatctgggcaggagtgggatgagaaaatgtgggttggaggcgataatgagcctaagaagcaagtccggccctcaataacaggagagagag

SEQ ID NO: 186729 - DNA, 863 bp, Arabidopsis thaliana landsberg
atgcagtgcccgaagaaattggcgcacgagcaggccaaccccaatgctccagcaaggcaaggtgtactgcagccggcagcaggcaatcgtaaccaagcgtacaaccgcggaaaggtgaaccacttggaggccgaagcgatccaggatgcaccagatgtggcagtaggtatgttctcagtcgaatctcatcccgcgaaagtgctatttgatactggtgcaactcattcttttgtcactgcaacatgggtagaattgcataacatctcagtagaggcaatgatgccacccatgaggattaattcggttggtggcagggtgcaaacagataaaatatgttcaaacataatggtggacataagggggataggatccccagtgacctaatagtaatagacacccctgggatagatgtcatcctagggatgaattggttaatgaagtatgaagcgaatgttagctgtgacaagaggaccgtaacattgaagtccccgtccggagaggaggtagtggcggacgtaaggatgcctaaatcagcggagggagattgtcaccagatttcagttgatagtaaggaggccaacccgctcgaggctatcaaggttgtgtcggactttccggatgtgtttcccgaggagctaacgggcatgccacccgagagaaaagtcgaatttgccatagagcttatccctggtaccgcccccatttccaaaagagcctatcgagtgtttggaccagaattggtggaactcaagaagcagatagatgagatgttagagaagggttacatcagaccaagtacctcgccttgggccgctccagtattgtttatagagaagaaagatggtccaaaaggatgtgcatag

SEQ ID NO: 186730 - DNA, 143 bp, Arabidopsis thaliana landsberg
atgagtacctggttgatgcaggcacataatttcaccattaccatgtggaccctcttgcatctttatcaagtacgaacctttgtcatagctccaatagttgaaacgaaatcagggaaattaaggattggggtaactaatgtggg

SEQ ID NO: 186731 - DNA, 78 bp, Arabidopsis thaliana landsberg
atggagcaacgaacaaggaaaatcttagaaaattcttacatcggagacggattcgtcaaggatgtgcttgaaaaagtg

SEQ ID NO: 186732 - DNA, 147 bp, Arabidopsis thaliana landsberg
aaacctgttttgatgacccagtcaacagcacgcgattttccggtgataaaacgaccatctacggcggccaaacctcccgacgagagtaagagaagagcacttcgacttcagcagttcccggtggtgagaattcatcatcggcgatag

SEQ ID NO: 186733 - DNA, 62 bp, Arabidopsis thaliana landsberg
atggatcacgtgaacgatttcaaggaaaatgatcggaaagagggaaataattgcaaatttgg

SEQ ID NO: 186734 - DNA, 158 bp, Arabidopsis thaliana landsberg
gcttttacctaaaagaccacacgactactgcaagtgcacagtatatcggagtagtatttgaggatctaatccacagggagtgtagctacaaggaagaattcaagttaggtaacctggatcaagacaaacgaaagagtggaggttgttgtatgcagtga

SEQ ID NO: 186735 - DNA, 684 bp, Arabidopsis thaliana landsberg
atgagggcaaaaggtgacgatgtagttagccttggaacatgtggcgatactggttgggtcgtcgtaagcataagagtaagcttttgggcaagcgactttgaagattttggagtaagccgttggtttgcaagactgtgggttaccgaacaagccggtgcaacagtactgtggtgaattgaaggcagagcaagcacgttttacaggctactacacgtttcccgttacgtgaccggacttgtaaaccaaccggacacatctggtttagatcgctaacacaaccggcgtagctacattgacctgaacctttaaccggcataatcgacatggccaggttataactgtcattacaacaaacaaacaaaaagaacaaaattagtgaaaaaagtaagttaagtttgtgtaaaaaagaaagcagatttgatgtaagatttacagacccgtcgacgaggctgacgtcatagaagtctagctcagggccgagagtgatttcggcgagagtggccggaggttcaccgccggcaccgttgcaggagagagaaccgccgcaatctccggtggcgcagtgaccacggccagatctgtcgaaggtgcagccgtggcgaccccagaaacggccggaccagagtggtgggagttgaagagagtgggctttgttagctggaagcttaaaaccaccgccggcga

SEQ ID NO: 186736 - DNA, 314 bp, Arabidopsis thaliana landsberg
ccgagcgccctattcccctggccgtgctgtagttccactcgacgctccctgctccatccatggacgcagcttcccctatctctccatcgcgttgctctctaggccgttgctccctatgctgcactgtctgatcgcggactggaggttccccgtgctaatccgaccaccggcactgctcccttccctagcaccggccatggaggcgccggacttgctccatgccggccctagctcccatctcctccctgcgcacgtggaggaggcaaggttgaagaaggcgcgttgtctcagtgacgtgtgggcccaaggcaggg

SEQ ID NO: 186737 - DNA, 955 bp, Arabidopsis thaliana landsberg
atggagctggttggtaaagtcgttaggaaggagatccaagggattgggttttgctccgggacggttcgatctcgcgattcgtctggatttttcgagatcgtttatgagaacggtgttacggagatttcggaattggatgaggttgttgctctcgtgatgggagatggtaaatctcaggagaattcggttccagtgaagaataagagagttggtaggaagccgaagaaacggtctcgtgttgcgagggtggttgagatcaagcgagagagctctgggttgaatgaggtaaatgtcgatttaaatgatggagttgcggagaattcgggagttagtgaggagaatttgagagggaatgttgatttgaattgtggtcctgtggaaaccctaggtaggacatgggactcctctgtcacggatttgaataggacggtgtccgaatcggaaactggatttgatttgactactgggttggattggaattcgaatgaaaatctaggtttggttaatgtaaatatcgattatgaagaaaattgtagtgacaaacggaagtgggatattgatctgaacatggatgcgagctgtgatttggacaatgctgctatctgtgatttcagtgggcagaagagggaggtaggatttgatttgaacgtggaggttgatgtagagaacagcaaggatgaggagtacagtcaaatgaatggaaatgacattgttcaagaaatcaacatgcaggacggaaatggtgtccaggataatattgagactggggaatataaagaagttcatgttgctgaagtgtccagcgctgagcttttggaggagatacagaagcagaacattgtttcaccgcaagatctcaataatcttaattctaatggggttgagaaggatcctgatctacctcatcatgatgctaagactgttgatgagactctctctgataggggacattcag

SEQ ID NO: 186738 - DNA, 590 bp, Arabidopsis thaliana landsberg
aaaatccaccagagatagagtctatagagaatgtgatcaaagggataaaatcatcagaaagactcatctttgaacggagaggaacatcgaactctatactcgaagaagctaccaagagagacgatcatgaagaagaagaggacggtttaatgctcttgtccttggagtcaaacgatccttacactgatttcaagaactcaatggaaaagatggttgaagtacacgtgcttcatcatgactggataagcctggagaaacttctcttttggttcttgaaagtcaacgtcaaggcaagccatagatacatcttcgccgcctttgtcgatttggtcttaaacttagcagtagggccttctaaagatgttgctggagaacctaattccgacgtcgtcgtggaggattctctttcatcttcgtggccggtctcgttgtactcgtcctccgatgagaattcgtcgacgtccgtacgattcttgccggagacttcgataggcgagaagggtagagacgtttgttgtttatcgtcgttgtttgagttagaagaaaagattaaagacaatattgatccaaatgattatgtatcttcttaa

SEQ ID NO: 186739 - DNA, 199 bp, Arabidopsis thaliana landsberg
atgtcgtcgagaggattcaacattaaagctagaggattatgtaataacaacaacggagaaagaggaacgggggcgaagtgtggacggtggaattcaacggtggagcaagtgaaccttctgacagatctgttcaaggcgggactgcgtacaccgagcacggatcagagtcaaaagatctctatggagctgagtttctact

SEQ ID NO: 186740 - DNA, 737 bp, Arabidopsis thaliana landsberg
atggctcaaatgcattctcgaatgcacttagcagtgagcgatgctcccgacatagatcgcgtgattaaagaaaccaggcgcaccccgttcacggataggatcgcttgctttcgcctccgagacgtcgggagacttcgtttctcggagtacgacggaatgaacgacccaaaggctcatctgagatccttccgttttgctataacacgagcgtacctgttagacgaagaaaacgaagcaggtcactgccgtttcttcgcagaaacctcgtaggtcacgccctcgaatggtttgctagcctcgaagggaactttattgataccttcgaccagctcgccgccgctttcttaaaacagtattcggtacttatcgaacacaggacgtctgaagccgacctctgaagtcttactcaacttcagaacgaatccctgcgatcttacgtcgaaacattcaaagcagtctaataaaaaattgcaaacctaaacgaagaggtagccatagcagcccttcgtaacagtctgtggttctcctctaggttccgtgaggaactcactgtcaggaaaccggtctctttagacgatgtccttcacaaagctctccacttcgccaaagccgaagaggagctcgctgtgctggccttacgattcaaagaatctaaaacgcaaaacgctccccttgcaattaaaaaacccttcaaaaaggaaaaccaaacgcagagcagcatatcttattcgcaatag

SEQ ID NO: 186741 - DNA, 161 bp, Arabidopsis thaliana landsberg
ggatgattggtcgatcatcggatcggatctctgatttacgaatctcagccgaagctatggagatggagatcaagagaagcataaggatcgatgagaagcgtgaagagagatccatgggaactagggtttcgttcttcgacttcacagagagattaatctga

SEQ ID NO: 186742 - DNA, 676 bp, Arabidopsis thaliana landsberg
gagacaacaaagctgaaggccaacggggtaggaacaatgaccggaagattgtttctcggaacagcggagaaaattcctccagaagagcttgtagacaccactggtgctggcgatgcattcataggagctgttctatatggtaaacaatttgcaaaaattcttgtacacgctctgagaaatcagaacccaaaacccaaaactgacctgtctctacttgttttccttgatctgtagccatatgcgccggcatgcccccagagaaaatgttaccatttgctgctcaagtggtaactcttctaaactgaacctctttgttttgttttcaccaatgtatatgaatcttcaacataacctatagattatgtgaatcttgtaactgtgttcgcataaccgagctttgtaatcttaagccaaaaccagactaatcgtttagttttgacctcccacttgccactagtttgagactcatataagtggccattgatcccaatgtttttctagcttcaccaaaccgtcaccttcagtccaaaaatcattcatttccaaatggaacatacataaatcacttccatcctgatctttgtatttgcaggctggttgcagctgccgggctttgggagctcgcacgggtcttcctcaccgtacagatcctagacttgtaccctttctggtttga

SEQ ID NO: 186743 - DNA, 607 bp, Arabidopsis thaliana landsberg
actaattatcaagagttttatccgagttacttgtatcacaaatttttctatcgtgtgtgttggtaacttggtatgtagatataaaactgagctaatcaaagacaggtttctttcaacagaacctcgataagaatattcattttagttaagtactagttagtaaacgaagaataaaagcatgtcaatcttaaaaacaaaaagaggctaattattgtcttataaaaaatcaacatttcattgttaggtgtaagataaacaagcttactgattattttaacagatcggaaggtcttatcttttttactatgcaagtactcggaaaaaaggctgattttttcacaaatacaagaataattaataagggaaagagggtaacgtttccgttggttattgggtacaaaaagctttgatttgtctttggtatataaactgtaaataaactgtggacagtttacttgtgtatatgcaagttgttgttactggtgtaccctcttcttgattttagccatcttggtatcggtacttagctagtttgggtttccgactttccgggaacgtctacatcagatttcatgtcctcatcacttcagtgcggatgtcaaagtaa

SEQ ID NO: 186744 - DNA, 429 bp, Arabidopsis thaliana landsberg
gttgtgataaagaagttattactaggaaagcttttggtgaaataaattctaaccgaggagatgtcacggggatgtctgcgccttgcgtgttcttgccagagcgtactcagtccaacaactttaccggaggaggaggagattttgatagattcggaaaagtaaagtttctttgtagctttggtggtagaattatgccaagatccactgatgaaaaactgaaatacgttggaggagagacgcatattatttcgatacgcaagaatctttcgtgggaagaactcaagaagaagacctcagctatatgccaacagttgcattcaattaagtatcagcttccaggagatgagcttgactccttgatatcagtatcttcggatgaggatcttcagaatatgattgaagagtacaatggacttgaaaggcttgaag

SEQ ID NO: 186745 - DNA, 364 bp, Arabidopsis thaliana landsberg
atggaaacgattggtaaaatcaaacatcgaaatttggtacctcttcttggatattgcaagattggtgaagagagacttcttgtctatgagtacatgaaatacggaagcttagagacagttctgcacgaaaagaccaagaagggtggaatctttcttgattggtcagcgagaaagaagattgcaataggagctgcgcgtgggctagcttttctgcaccatagctgcattcctcatattatccacagggatatgaaatcaagcaacgttcttctagaccaagattttgttgcccgtgtctcagattttggtatggcaaggctggtgagcgctctggacacacacttgagcgtgagcacgctcgcag

SEQ ID NO: 186746 - DNA, 343 bp, Arabidopsis thaliana landsberg
aattttcttcttcttcttgatgatccatttcgtgtggttcatatcctgcattttacttgcaagaccagtaacaaatggacaccttttgatatccttgtcgggatactcttcgaaaagctgcaagataatttgtccatgtaagctttatcgttttaacccacaaatttttttctttatgacattagcatatgaaaacttagcaaccctacgttccctcttaagcatattcaaaatgcttaacgacactcttgctatttttataacaggtccaaaccaaggagcatattgttttgacggtctgccaagtcggtacctgcatatacatgataagtcaacaacatag

SEQ ID NO: 186747 - DNA, 998 bp, Arabidopsis thaliana landsberg
atgttccaacctcaaatctacggtcgagatttcaagagaagctcatcatcaatggttggtcttaaacgaagcattcgtgctccaagaatgagatggacttctactcttcatgctcacttcgtccatgctgttcaacttcttggcggccatgaaagtatgtattgtcctcttacattttcctatactaatcaaaaaaattttaaaaagaaagacataaccaatcgagattggtatgttagtgtaacgttttgaaaccaaagtattaagatttgtcatgtattggtttgtctcaggagcaacgcctaaatcagtgttggagctcatgaatgtgaaggatctaaccctagctcatgtcaagagtcacttgcaggttcattattttttctttattttttatatataaattaatggaatctcatacgaattcaaacacattaaatgtagatagatatataggtatatggtaaaatgtatgaaatgtatattattgggccactatctacacatgattgcatagttggaaatgaacttagccaaacatttctttaatttttttcgtccttcaatttgtttttgatttttcaagaatgtgtgattgttaatgcagatgtatagaacagtgaaatgcactgataaaggatcaccaggtatgcattcaaactagttcactgatttttacattcttataagatataaatgtaaataaaatttcattatttattaatttttaaaagaaaatttgtatttttgttcttgggaataaacaggagaaggaaaggtagagaaagaggcagagcagaggataggggacaataataagaatgaagaagctgatgaaggaactgacacaaattcgccaaactcatcatctgtgcaaaagacccaaaggttactttttatttatatatttatttttgtaaaattttgcatttaatctctttttgccttagttctgtgtgaaatttgatgaatatgaccctctcctagggcttatgtga

SEQ ID NO: 186748 - DNA, 811 bp, Arabidopsis thaliana landsberg
atgaggaaagaggttgtgagcaagaatatcgtaaaggtttcatgtggggaaaatagcatgacatggtttgtggcatcagagaaattaaaggctaccaatcttcgtgatgatgttcagacaacagaaatttccataggattcactcttgacatgctggaagatggaacttacagatcatgtatgattcaagaacctgtttttgcttttcttcctctaagaacttatggtttgaaatttattatacaaggggatttcattcttacatcatcaagggaggatgttgatgaggatagtccttggaaccagtggctgttgtcagaatttccgggtttgtttgtggatgcgttaaggtccttttgcagtcttccttctttcacccagaatctgggtaaaggtgtctcctcatacatgcagcttgtacctctcgtcggggaagtgcatgggttcttttcttctctccctcgttctattatatctagattgagaacaaccaattgcttgctgcttgagggagacggtgaagaatgggttcctccttgcaaggttttaagaaactggaatgaaaagattagggttcttcttaaggatggattgcttcaggagcatcttgctttgggctttttggacaaagatatagttttgtcagattccctgtcaagggcactcggcattgaagactatggaccgaagactttggtgcaaattctttcttcattgagtcacaagaatggttgtctacaatcaatgggctttacatggttatcgtctattcttactgaactttacctactattccgttcttctgggcatg

SEQ ID NO: 186749 - DNA, 297 bp, Arabidopsis thaliana landsberg
aatcttcataagctcaaagtcttggacatgtcttgttgcataaaactgaagagtctgccagacaacatcaacttgaaatccctcagtgtccttaatatgagaggatgctcgaagctgaataactttcctttgatttcaacgcagattcagttcatgtctctaggcgaaactgcgatagagaaagtgccttcagtaatcaagttatgttctcggcttgtctcattggagatggcgggatgtaagaaccttaaaacattaccatatttgcctgcaagtatagagatcgtggacatataa

SEQ ID NO: 186750 - DNA, 148 bp, Arabidopsis thaliana landsberg
attaagtaaagcaatgggaggagcagagaaagtggagatagagcatgggaatcattctctctccaatagagttcatgaagctgttcaagccatcattggttttgtcaaaagagaaggacccagtggttgggatgatccttggagctaa

SEQ ID NO: 186751 - DNA, 345 bp, Arabidopsis thaliana landsberg
  unsure (1)..(345): unsure at all n locations
gtgaagctcccgcaccccaacccgaggcctaatcgccggggaatcgaccggtcgacgacggcggcccgaatttcttctcttgcggtgcgcggcggcgttctggtggtggcgagaggttggggataaagatgggagagggggaaaggagcgcgtgccgtacctacttgtatcccgttcgggaggccggggagtgggcgcgacgggtcaagcctccggganagtcgcggcggtagttgcgcgtggattcggtggagctagagctgacaaacgagccccacacgtcagagggcgtgcgcggaagcaagcgactgatgcgtgggccatcgtggcagggaaccacgcggg

SEQ ID NO: 186752 - DNA, 163 bp, Arabidopsis thaliana landsberg
atggcgtccgcaaatattcctcgattcgaatctccggcgatcataaatcttgcagtgaatactatggaagagaagctaccaagatcgctcaagaatctcgacttgaatacgaaccttgtaccaaagattaagattcttctttcagcatatctatcttcctcac

SEQ ID NO: 186753 - DNA, 469 bp, Arabidopsis thaliana landsberg
atgatggaaaacggcgtcgttacaggaggaggccatactgttatggtgggcgtaaagttcgatgagtcgagcaatgagctacttgattgggctttggttaaggttgctgaaccgggtgatactgtaatcgctcttcatgtactcggcaatggtaacacttttttgtttctctgtattaaagctacgatttttggaaatgggtttccatgtttactctctcttattggatttgtgtagagatcgttgtccgagcagacaactcttgtctcgtgtgcattgttaaaaactttgattctgttcttgaagtttatgaaggtttctgcaaattgaaacaggtatgcttattaaagtggaaaactttcatgctctatcctctctgctctagctgatgatggttgaattgcatttaatacatggaattgaagctaaaattatcccggggatcttctactcgaaagattctagttaa

SEQ ID NO: 186754 - DNA, 27 bp, Arabidopsis thaliana landsberg
tttaaatttgacgacggtgatgactga

SEQ ID NO: 186755 - DNA, 273 bp, Arabidopsis thaliana landsberg
atgacagaaaagaagactgaggtgagtttatgtaacatggtcttggcatggctgggaattactatcttttcttttccagaggctatttgtgtttaggatctcttgataccaaatttacatggtcttgccatgatggctttattgcattttgttatgattgatatggtcatttttttgtttttaggaagcttatcttgtgaaagtcgagcagcttgctaaactcaaacaaaagcaggaggaggataaagcagctgtgacactgcactgcttcag

SEQ ID NO: 186756 - DNA, 370 bp, Arabidopsis thaliana landsberg
atgtcatcgccagctttaacctccacctttggaagaataatgagtcgtgaatcacggctttcaggggtagctgttttcttccgtccagagaagttggaagtccggtctagaggtgacgaaaatgactttgatcttatactgctagaaacagaaggtgatgatcccgcagagggagaagaaactttagaaactgtcctcccacttgtgagagtagagtgtagtcttccactactagtcctgctgccactactgtcaactgataaagatggagctcttttcgaagacacagaaacactcatggctggtctagcagaagactcaggcttacttaaactaaacccagtaaacattgtcaaactccgactacctg

SEQ ID NO: 186757 - DNA, 1218 bp, Arabidopsis thaliana landsberg
atggagcgaatagacatcctagcgatctcggaaatggcagcctcaaccacatcaggtacatcactggtaagctcctcgtaagcagcctcgaaggcctcttgccaaaacctaggtaatctgatacgacggccattgttatacacatcccacatgtgcttcaccactttctccctctcctccatttcctaaaaaataccacaaattccaaaacctcaaaaaccagactacaatcaaattacacaccaaatcaaccgaaatagaaacagagagagtaaacaaccagaacgtcgagattatcgtagttcggaatccctagatcttccgataaccggttcagattcccggtagataaccggagagtgacggtgccagtaaacatcgaccaaaaagccaaaagcaaaatcgcagcaaacgcccagaacttatatcgacctcttccaaacaagaccgtgtcagagctttccttcttcgaattcgccatagctgttcccgtcgccgtaccagtcgtcgtcgtcgtcggcaatgcatcgtcctccttcatctcgatctcaaatacaaattacactcaacaatcttgcttagtgagtgatgctaacaccaaatctgagctctcgtgaatcgatttcagtagattcagtgcaattgggaaagtgtcggctcgattttgttaaatctgagagagaacttaaaaaaaaaatcagttcactctcttcacagttcacactactgggccattattagctagtaattggcgatgtattagccgttgatcttaaattgttaatgaaaaaaatactaaagcgtgcgtcaatcttgaccgttgatttataatttgataaaagccacacaaaagtacaactaaacgacgtcgtgtaatgagtgagaaaccccaaacgctgtcgtttcatttaatgataaacgttatattcatcatgctaagctgcaccgttttcgccgcgtactttatcaccgtctctttgaaaaagcgcttcgatttcttcaagtgattttcctttcgtctccggcaagaggaaaaagaagaaattccacgccactgccgcaactccggcgaacataaagaaagccccaccggtggttatcgcactagtcaacgacaaaaacgacatcgacacggtggcgttcattactctgttcaccgcaacgccgagactcgctccttgtgccctaagcttcaacgggaaaacctcaccactgtag

SEQ ID NO: 186758 - DNA, 84 bp, Arabidopsis thaliana landsberg
atgctcgatgttatcataagctttaatactttattgaagaaagcattttatgttgaaccgcttaactatactcaacaagaaaag

SEQ ID NO: 186759 - DNA, 451 bp, Arabidopsis thaliana landsberg
aactttccatgtggaattttttctcactaatcttgaagattttcgacttgtaagttctataacacaaaagcatttagcagggacttttagattcctatttgatagtaacttgtaagttgtaatgaaagagacctaatcataattacaatattgaatcagtacctgatatgtactaacaaaataacgaactcaaaaccaaaaagccaagcccaaatattaaatctagactggagagggggaataaattgcaaaaccacagttccataagtctacgctttatacgatttgggctgtatgctaggcccgttacaaagcgaatccatagacccacaaatgcagtacaatacaagaacacgaatatgagaaaagagaacatgagttccgcatattggttaacggggaagaaggagacatttcatctttagctttcgtcaaaagtggtgacacgtga

SEQ ID NO: 186760 - DNA, 146 bp, Arabidopsis thaliana landsberg
gctattggagtaatcttccaactgaagtaaggcccatcgaacttcctcctaaatatgtgtctccggtggatcttgagcaggcagttcttgaagatgaggaatctgatattgacgagcagaaggctattgttgctttcgacgaataa

SEQ ID NO: 186761 - DNA, 402 bp, Arabidopsis thaliana landsberg
atggttttaagactctggcatccaacaggaggaagaggaggaaaattgggttgggtcataaccggattatctatatcggtgttgccaaatactctcattcttggaatcccaatcttgagtgccatctatggagatgaagctgcgagcatcttggagcagattgttgtcttgcaaagcttgatttggtacaccatcttgctctttttgttcgagcttaacgccgcaagggcgttaccatcttctggagcttccctagaacatacaggtaactaaaaatcattccgttttttcgataaaaaatgatttaccctaattaaatcttggtttcttgtaaaacaaggcaatgaccaggaagaggctaatatagaggacgagccaaaagaagaagaggacgaagaagaa

SEQ ID NO: 186762 - DNA, 1012 bp, Arabidopsis thaliana landsberg
  unsure (1)..(1012): unsure at all n locations
cgtttcccgtcttggcccgaatactcgctgagattaagcttctaaccactgatatcggaaagattgctttgtcggctgctgcggtcaatgacgtggctgcttggattctccttgctctcgcggtggctctttctggtgaggggagctctccgcttacttctctttgggtgtttctctcgggttgcggatttgtcttgttctgtatctttgctgtgcaaccagggattaagttgattgctaaacgttgccctgaaggagaaccagtaaatgaactttacgtgtgttgcacgttaggtattgttcttgcagctagcttcgtcacggacttgattgggattcatgcgctgtttggcgcttttgtgatcggggttattttccctaaagaaggtaatttcgcgaatgctttggttgagaaagttgaggatctcgtgtcaggtcttttcttgccgctctacttcgtctcaagtggtttaaagaccaatgttgcgacgatccaaggagctcagtcttgaggactcttggttttggttatatttaatgcttgtttcggtaaaatcatcggtacagtcctagtttccctttactgcaaagttccgcttgaccagtctttagcgcttggtttcttgatgaacacgaaaggtcttgttgagctcatcgtcctcaacattggtaaagacagaggggtaagtccattaaattccaaactaaaactcattttgtacaaaaaatatttgcatatttacttaattttttgatgtgttgtcacaggttctaaacgatcaaattttcgctataatggttctaatggcgatattcaccacattcatgacgactcctctagttctagcggtgtannnnnnnnnnnnnnnnnnnnnnaaagctgattataagaaccgaacggtggaggagacgaaccgttcaaacaaaccgctatgcctcatgttctgtttccagagcataatgaacatccccacgatcgtcaacctcatagaagcatcccgaggcataaacc

SEQ ID NO: 186763 - DNA, 102 bp, Arabidopsis thaliana landsberg
atggctacctctggcttcctcatatttttgggtgagttaattgttattatttctcttcaatttgtttgtctttctcaaggatccattgatgtgaacgagtga

SEQ ID NO: 186764 - DNA, 795 bp, Arabidopsis thaliana landsberg
gtgggataaccgttcaaaggagattcttgataatataacgagttttgaagctgatttcatctgtctacaggtttctttttctttgtctctcgtatcacacataatgggggacttgtaagcctaaagtcatgataaacatttacaggaagtagacgagtgcattagtttttttcgatagaaacattgaggcttatggatacactggaatttgttttccaagaggagaaggatataaaagagacggctgtgcaatctttttcaagcccaaattgtataaatagagacttttacacgtaaagtgtgatcttagggtttaagtctaattaatgagcctaacactttttttctttaaacagtgcagagttgattacatacaatagtgtagactacaacaatcttgctgaaagccgttgcgtggcgagtaccatatggtgatgcagttcaaaaactaaaatgtaattgcctcggaatattggcagctttcaagattttaaaaccgtttaatcatgtcgttattgttgcaaccactcatttaaaatccgggtaaaataattaatattcattagctagaaatttctgagtatttagtttaaccttttggtttattaatatacattttcataatttttcaaacgcaggaaacctgatgaatggaatgatgtaaagctggctcaagccaagtctctaatgtttagattagccatgttcaagaggacgatatcggctgttgaaaattgcagtccatcggtgatccttgctggtgacttcaattcgaacccctcgagtgatgtataa

SEQ ID NO: 186765 - DNA, 327 bp, Arabidopsis thaliana landsberg
atggaaaagttggaaaccaagatagcagagcataatcaaaagctcgacaagagttttgctcaattgattgacacaattcgactcatctccgttaaggtgaataacgcttcatcgagtggtcatctacaacagcaacgatcaagagaaacggtgtatccgtcgtcggaagtgtttcatgttcgcagaactggtacaaattcgaattactcagctgttactcgttcatccaaactggattttcatagatttagtggagatcgggtaagggattggttgtttaagctggaacagttcttctctcttgatttcactccggaggagttgaag

SEQ ID NO: 186766 - DNA, 125 bp, Arabidopsis thaliana landsberg
atgaagctagtcgtgtacgctctctatatgaggatgcctaatgggcagcagcagctaccatctcgatcgatgttgatgatgccgaagtgcgtcagcgtggagtcgttctcagcggtggtaacgtc

SEQ ID NO: 186767 - DNA, 130 bp, Arabidopsis thaliana landsberg
atgcttgtgagcagagagagagagagagagcgagcgaggaggctagagaatcgagaatctttcttcgccgaaccaccttgtcgtctcttagctcatcgaatctctccgtcgccgtcgattcttcccgccg

SEQ ID NO: 186768 - DNA, 1235 bp, Arabidopsis thaliana landsberg
atgatgtggtaagctgttgctcaccatcatagtctggtcacaagtgttggtggttgcggccgctgctgcagctgcagcctgtactgtcgcttctccgacaggaccttgaccgccggttttgaaccaatagaagacatttgcatctcccaccgcgccaaatttctcgagcatctttcttatccttaccgtctcttctttgggaggttaaccataccactgtggaagatcgactcaagtatgagtatttgttccggtttaggtgaccatcgcgaccgaaccggttctgctgaggtggaaccggaggcggaggatgggggtgagcgactatggcgggttgggctatgtggtgtttgttcttggtccattgctttgaagaatattgatattatctggtggttatggagacaatataaaaagaaggcacaaattgttttttgagtttgtgagaggtggtgagttgagggtaatgaatttataggagaatgattacttaaataatatatttttccttgtttattaagttacatgtagtttatctttatcttttagtgggttcattataatatacttgaatgatataagcatatattatattttgtataggagtgtgttgagtcttaaatcggagatacacaaacgagtggaagttgcttggcatttgaagatatagcaactaagcaaattctctttgaccattgcaaaatttgcaacaaggatagtccaaaaagttaacagtatcccttatccgctttgatatgcatgggtaatcaacatatatatatatatatatgtatgtgccaagcttaaaacaaaaatatgcggtaacgggtacaacacaaaaattagctacacacaatctttttaatccgtaacatatatgctttaaataagcctttaatctcttccaaaagaaaaagagagacagatatgctttaaattgaatctcattttcattgtattcaaatctccaacgttgtgccaacaaaacattctaaaaccaaaactacacttgcaattgcaaacaatatgttcaagccttcaagctagttatttcaatgcatttgagtgtgagacgcgttagtttgctcaatcggagtccggtccaatattactcgttgaaggccagtcttaagcagtgtactagtttagtgtttgctaagtccgtcccaaaaatcaatagtcatgaacacataagcattggaaatataattcagaaaccacataaggtgaagaag

SEQ ID NO: 186769 - DNA, 334 bp, Arabidopsis thaliana landsberg
atgtcggagaacgatagtagcgagagtgatattgaaatggaccctgaagaagaaaaagtgtatagacggcaagttgaagagtccgatgtaataactctctctctctctttctaagttgctttcgtcataattagattgatcggtgcttttctcaaaatttgggattagtctgatgatacattcttggaattgtgaacgtggacagggttttgatgttgattactttagatatgctgggataaagccctgtccattgaaagatgagaatgcttatacttatgatattgaactttttggaagattgggacttcactgttacaatcttcttcacgag

SEQ ID NO: 186770 - DNA, 111 bp, Arabidopsis thaliana landsberg
ttctatcatttcaccaatgtttttaaacccgacccagacagtgaaccggactaccttctgggtcactggatcatcgggtcaaccaggttggaccatggatcaattaattaa

SEQ ID NO: 186771 - DNA, 102 bp, Arabidopsis thaliana landsberg
ataacatacctggattctgttgttagatcctacgtagtactgatcaacagttttcaaccagccgacatcgtcatgcgaatgcggaacaagatgaacatttag

SEQ ID NO: 186772 - DNA, 357 bp, Arabidopsis thaliana landsberg
agagtatttggtgccattctagagccaagaggaggagaaacacatattctaggtgccaagaaggttttaagagttttggagcaaaaagtatcaaaaggcgatcaattccagtacttcagaagtttagcatccggaaacgagacatttcggtatttatgcaaagctagaagagtcaagattaacgttgaagtcgaattgaagcaatccataaagccgtgtcgaagatatgacctgaagagtgaagatatgtcaagaattgggcgtttggaaataataaatccaaaaagcatccgaccaaggagacttgaacccgggaagctccgagaagctttccaccgaccattaggtcatgcataa

SEQ ID NO: 186773 - DNA, 341 bp, Arabidopsis thaliana landsberg
atgcgccctatctggcaatgcttccgccttcgcaagccgaaggttgaaatgagtgaagctgccgaagaatgccagagggccttcggcgttgtctgctcttttattggaacgagagatttagtacaagagcatattgccttccgggtatggccgctcgcggagaaatgggaaatgccacaagaaaccataaaagaggccgacgaaggtggacttgtgagactgaagtacaccttcaagttcggagataaatttgctgagccagatgatgactggttaaaaagcattgaaaatttaagtgatgagctgcttggtgcttattcgaaggccgaagatactgcgat

SEQ ID NO: 186774 - DNA, 433 bp, Arabidopsis thaliana landsberg
acgctaaattccttcgcttggaagtatgccggcgtttagtgtttacattaggcgcgtgtatttacgcttgccgtcgaaacgaattttatgttatcgccgacgaatgcgcaggttagaagcagacatgcgcaagatagaaaatataaaattataaggaaaagaaattataaattggagagaatttagaagagaataaaaaaatggatctacctggttcgcacatcagcgtgctaggtagtggagacatgacaattgaattttttaaaaacgaataactaaatattcataatcaaattattatcttaaaaaaaatattaagattcgattggtatcagtggatcatacatattaagtcgctgctaatcaaatttccttttcactaatttatttcctgcttttttccttagcaccatcaaacaaaaagtttatgtga

SEQ ID NO: 186775 - DNA, 2270 bp, Arabidopsis thaliana landsberg
accgatcagacccatctgaagcttttctgtctagagtagagaaggagatgggcaaacccaaaggagatgctgcaagaagcaaaacacgttcatctagcagcaggtcatatttgttcctttaatctcttcttaacgtttaatttcttccgactttatcttttgttttttgagtctatgcttcgttggttcggtactgaattgagcttcttctgaacagcttggcagcttctctgttgccgtctggctctgcagccgccgtaggttttgggggctatgtcggtagctctagattccaaacttctctgtcaaacgaagactctgcttccttcttggtatgtttctcccgtctgcttacttgtgtgtttgccaatctctcatcttttttaatggattgtaggatttggatagtgaggttgcccaacacttgcaaaggctttcaaggaaggatcctacaacaaaggtaatggcttctctgattatccaatcgactacaagagctgttcttgattgtgatttgtttgtttcaacccttttacagattaaagctcttgcttccctatcagaactggttaagcagaagcaagggaaggaacttttgccaataatcccacaatgggtaatgtttagacagaagaaaaactgtagcttcagaagctgtattagattagatgttgaagataggctaatcagcattgggaatatgactctcactgatagaattacctctaattagatgtttagacagaagaaaaactgtagcttcagaagttgtattagattagatgttgaagataggctaatcagcattgggaatatgactctcactgatagaattacctttaattaatctttgtcttgcagaatgttgatcactatatttcctacgttttcagtgcatttggttgctcattttccacatatggttgactatatttttcattttcttacttgtccagacatgggagtacatgaggctgatactggactacagtcgagatgttcggcgagctactcatgacgtcatgactaatgttgtcactggtgccgggtttgactctcaattttctaatgcatgccctttttcttgccgtgatgcagtgcctcatttacttcttcttcttttagtatcattcacctggatatatgtagttttcttgtgtcatgagtgatatgatttagctttgaggttatcctaacatcaatatcaaaattatcatcaatattttgttggaatgattcgtttgctaagtgctgtagaagcttgtctatattgagcgtgtcatgtaggaactatgtcttgatgatattgtcttagcatgtatgccatacttctattctatgttttctcccactattatctgattctgtattaattctttgtttctttgtgttactcaggagagatatagctcctcatctaaagtctataatggggccctggtggttttcgcaatttgatttggcatctgaagtttctcaagcagcaaagtcgtctttccaggttggctcctcgtttggtaattcagttttcttggtggaggttattttactttatgtttgaatgccccgctttctattataaactctattgtcgttttattagaccagtaaccttttagttctgctcagggggcactttgttatagcatcaatattcagaatttcaattagctgtctattgtttaaacaggcagcattccctgcccaggaaaagagattgcacgccttgaatttatgttcagctgagatttttgcttatctggaggaaaatctcaaacttacacctcaaaatttatctgataaatcacttgcttcagatgaattagaagaaatgtaccagcaggtacttcatctcggtgattcttcttgctatggtgaagtttttccttctttgggttttcgtttaccatgtcttatttccattgttttcagatgatatcgtcatctctggtggggttggctacacttctagatattttgctccgcgaacccgataatactggctctgcaaacattaattctgaatcaaaacttgcctcaaaggctagggcagtagcaacctcctcagctgagaagatgttctcttcccataaatgctttctgaactttctaaaatctgaaagccctagtattcggtcagcgacttattctttgttaagcagcttcattaaaaatgttcctgaagtctttggcgaaggcgacgtccgaagtcttgcaccagctctgcttggtgtttttcgagaaaataatccaacctgccactcatcaat

SEQ ID NO: 186776 - DNA, 24 bp, Arabidopsis thaliana landsberg
atgggcgagagtgggtatgaaatg

SEQ ID NO: 186777 - DNA, 453 bp, Arabidopsis thaliana landsberg
actgctccactggacttagagactgaatccttctatctaaccaggaaggaaacaatagaatctcagctcgaaaaagtcgcaaatggaatggctgaagaaatactaatcatatcatatgaaacacaacgtggaacagcgtgcagaggagtggcttgggagcggttttcgttagaggaactgagagcagcagtggcttgtgttggaggtatgtgtatagcatcgctgtgccggcatttagctcaagactataggagctggtgcagtggaatgcctgatctactggtatggcggttcaaggagaatggttatgaaggtgaagctaagcttgtggaagtgaaatcagagaaagataggttatcagaacagcaaagagcttggcttctacttctaatggattcaggctttaatgttgagatttgcaaagtaagacctgcttctttaattaaaacttaa

SEQ ID NO: 186778 - DNA, 146 bp, Arabidopsis thaliana landsberg
aagatatttccacgggactggatttacaatatcaattggagttgtgtagtttcttaagatatttcctacgaaattgtcatttggtaattggtaatatatataagattgtatcgcatgatgatctttacgggcctgatgttatctaa

SEQ ID NO: 186779 - DNA, 198 bp, Arabidopsis thaliana landsberg
gagaagcgtttcaaatccgtcatctcttacatcaggagcaacataagggagacggcggaagcacacttgcttgatatcaaactgcatgagaaggaagcggaacttaaggtcttaagggacggatttaacgtgaaggaggagatcgagaaagtgctggcgcaggttggcaaggcctacagagcgcagcgtgaacgcccg

SEQ ID NO: 186780 - DNA, 1629 bp, Arabidopsis thaliana landsberg
  unsure (1)..(1629): unsure at all n locations
cttaggaaaatgctcgatcttctggtacatgcatcacaatgtcgttcggcacattgtcaatatccgaattgccggaaagtgaaagggctattccgacatggtatcaactgcaaagtacgtgcttcgggaggttgtgttctatgcaaaaaaatgtggtatctcctgcaactccatgctcgggcctgcaaggaatcagagtgccatgtacctcgttgcaggtaaacaaacctcatgaaattacatcaaccttacatttaagacgtgaaacatatttggtccatttgattttgtgttgatgatcattgtgaacatctctgtctctctgttcagggacctaaaggagcatctgagaagattacagcagcaatcagattcacggcgcagagcagctgtaatggaaatgatgagacaaagagctgcagaagtcgctgggggctcaggttaaaaagaacttgtatatttagaaagatcaattcaaagttgcaaaaactttcatccttctctcgaaggtaacaccttttggaagaagaagaagaagagccagttaaagagagacagattgtgaaattagattagattggtatttaacagtcacgggtcagggattaacatgcgagctttaaaccaaggatgccactttccagaagaagaagaaagagagcaatgccagccttcttcacagatgacaagagtgttgagagattcaggtttgatggngtttggttggctgatcttctgattctatctatacatacacacacgcgcacacacacacttgcccacttctatttttggtaatttattgtatttttgtaaaattgacatttctgattcgggaatggcaagagtgtaacatatacagtacgttaacgtgttttttttttttttttttttttttttttgggtaagcaaagtaagataagagagaatagagagtctttagattctctaccactctttttttttggtaatttgtattgatgaaatttgtattcacactttgaatcaataataatttagttctttgattagatttgtaaacgtgcatgttttatttgcagttagtgtgttactgtgattgagaagaaggtttagagagacgaatcttaatgccacgtaagcaggagattctgataagtatctaactgggcgtttggtggagtttgagaagtatctaaattccaagccaccagaaacggacacgtgtctaaacaaggatagagtgtagaacgagaaccacttagcttaagcaagacagagagtctgatgagaaaactgcacaagaaaatcagcaagagtaatgataatacactgtccttcgtcatctctctatcgcgcgaaattgttatacaacagaggtagtagtaaatctcatcagtgtcagtgtcagagtcgcttggtgactcgatctgcggctgttcgtatatccacggcgacgatcggngctatagccgcggcggttatgatggctgctgtgtccgtagcttcagcagagcttccaccgccgccgccaagatcgagaaacgttatctaacgtaccgcaaacgctgtcaggggaagactgtaagaaacagaggatccaacgagcaaaatccaaaaacgcagagaaatgtacagtcaaatgcgtaa

SEQ ID NO: 186781 - DNA, 1114 bp, Arabidopsis thaliana landsberg
gtttcttctcgttcatgtgtttttccctattgggataatggttttcagctctaaagattctatagccgaaagtaaaaataagacttgtgtaatatttgctgcagctttatttgcgaaatcacgtctaaatccttgtaggtagaggaaaggccaagaatcccaggcagaagcaaccatggtgatggtgtctaattctacccatcaaaataaggaaatacatgtcagaaggagaatctctcaccatgtattcttcgttctgatctttttctctcgttgcatatcatgctggcctgtgcaaatggtgtgatatttaaaccccttgatcaatctactgcgtattgatcagtatagactcttagcatgtatagcgctaaatttcacatctgatcatttttatagaaaatactttgttcactgcatacacttaatgaagcaattctcccatctatggacccagtgagatgctccattgtttcctagcataccttagcataaaatggagatctttagtcacagtttctaacagatgagatatagatttatattaaggtatcaattttttcattctgtagaagcagagtattttcagcctcttgagtatcatgtttttttttctttctttctggtgatgcagatacaatagacgggaagaggagtttccatcacttaaagactacaatgactacttggaagaagtggagtgcatgggttagtttcacttgtgctccttattttctctattcatgcaagacaagaccaatgtatatattaccttctattccaccagtattcgacttgatagatggaatcaatgtcgaggcgattgagcagaagattaagagatattctaaggagaatgctgaacagataatgattaatagagctcgtaaggtagggcctacgttagccttactttttcttatcttggttagatgaatgagtagaggaaaagaaagaaagattaaaagcatgtttggttatatgatatcactgtgcaaattgctcttggtgtatttacaatttgctccaacaggcagaagaattgactgcagccttggcagcttgcaaggccaaacccccacagacagatgctgacacggaaaattgggtttaa

SEQ ID NO: 186782 - DNA, 468 bp, Arabidopsis thaliana landsberg
ttaaatcagaagttaatcattctttcagtgctttgattcttacatcacgacatgcaacaatgcaggttcactttttgcgttacttgaataaacttcacagtgatgactactttgctgctttggataatctcctccgttactttgattacaggtaatctgtactttttgctaattttctctgtttcctaaaaatttatgttaagaataatattactgccgaaatcgtttattgtttgcatgtgactcctgtaaatatccagttgtgtttgcctgttagatatttggcactaggaacgttgtttcaaacatgagctgatccatgatccattgccttaaagtgcagggactgagggatttgaccttgttcctccttcaactggctgcagcatgtatggaaggtacgagattggtttgctatgtctgggaatgatgcatttccgatttgggcatcctaatctggctctagag

SEQ ID NO: 186783 - DNA, 54 bp, Arabidopsis thaliana landsberg
gagaagaaatacaaagctgaagaagaagaatctgcggatttgggaaaaaagtaa

SEQ ID NO: 186784 - DNA, 312 bp, Arabidopsis thaliana landsberg
agggatctcgggaccgacgacaagactgcaagctcggaagaacacactcaagggagtccgcccacaagcacaaggaggaatcctctttctccatcaagtcccatcggatgggtgacaagaagaagatgagaaaagtggtctactacgagaccgactcttcgtcaccctccaccgccggctcggaatcggcctccactacttcaaagcgccatgagcgcaagaagtataataagatgccccttcgctatcctcgcatttctagacgtactccattactctccgttccattaggcaaaccacctatgtttgaag

SEQ ID NO: 186785 - DNA, 75 bp, Arabidopsis thaliana landsberg
gatcttaaacatgttgttgaaccagattttcagaaaaagaagacaatattcaaaaaccatagaaatcgtttttaa

SEQ ID NO: 186786 - DNA, 213 bp, Arabidopsis thaliana landsberg
atgattaacaagtcaaatcataatcccaaattcgttgaaatcatcaactacacaaacacaaatccttcaatcacacgtttcctagacctagaaagcgaaatttcaccgaacctggtggaaggagaggcgttcacggtgttcagcggcgagtttcttcacacgttgaagagacacggcggaggaattatcgagattatcaacaactacgacgga

SEQ ID NO: 186787 - DNA, 169 bp, Arabidopsis thaliana landsberg
aggttacccaaacaaacaacgacggttcaattcggagaatcgaaaacgtaaaaaaggtgaaatgaatccgagagggatcgaatcaatcggaaaaaaaaaacttacaggggaatttaagctcagtaggatggatattaacgagatctccggtcgtcatgcttctttgtag

SEQ ID NO: 186788 - DNA, 3624 bp, Arabidopsis thaliana landsberg
atgaggaaaagggtagagttaggacatctatgggacatggatcattttctgagctatcatactatatatcattgggtagatgggagtatattcttgtatgtgtccattgggttttacctttagcattctgctaaagctcaatcttttctctgagagtcccctgttactcgaccaaattattagagggaccatttttgtctcttagcctaagcccgaaaccaagtgagttcataaccatagcattgcttgatccactgttcgtgcttaatgaatgttaaagggaattggttgatgtgaatgcttgaatatattaaggcaggttgttaggttacattgtgacgagtatggctaacgtttttgagcaatgtctatcatcttgcaacctagaattcgctacctggacattgagcttacccattttataggcatgcttcggttttgaatccccaccttcaaacctctccttcaacataagattttttgtttgcttgacggcaagcaagagataagtttgggggagttgataacactgtattttactcattttaggtgtatgtttattaccatttagctttgcattgcaccattttagcttgttttgcatacttaggcatctaggatcatcttgcattcgcattgcatgttttggtgtgttttcaggtgcaaaaggagcttaaaaggactctacttgatccattcactcgatccaggcagctacagaagaggcatcattctactcgacctcttcactcgatctaggcagctacaaaagaggcatcattctactcgacccctttactcgatccaggatgctacaaaggaagctacagtttactcgaccctcctcctcgatcaaggcaacctcagatgaagcagcagtccaaaagacgatcatagacgtccagcgtccaaaagacgttcaaatggatgcctgatctatgaattccagaaatttgtaggctatagaccaagagattggctagtatgtttattggctttggtagtttgttgcttaaaccatgttttgctatgtttcatcaacgagagttgagattaggaagtggtagagttatgggggtctctgtcacgagagtgggagtggattgactcggttcttgaatctatcgtctagggtatctacctttgacctgttagccacctgttgaaccctaaagttgcccttatcaatgaatccatccttaggacttctattcttcttagatttatttgtattcacccattgattgcacttttatttacctgttatttgtgtcacctgttgattgcatttttaatttttaaatttgttgcctgttggttctactcgacccaatgatcgagtagggcttttaagtttttatttctgttgttcgaatcctgacctacgattgttactagaaaccaaccatcattatgatctggcttgacttagttgcttctgtacacatcttgattcctagcaataacagtggactgaattgacaccccctatagctgtattgacttgttagtgtttaaggggaattgaactgaacctcactccagaaaaataagtaggcctaaaaaacctatttatcattaagaccgaaagttatgatgagaatgttctaattggtacgtattttctaaattctctatcattagtttaactcaaaccagggagtgttatggattttaatattaacaaagtattctttacaatggcagacatattaggtcaagtggtgaatgtgagaaaagtggatgacattatggctcaaaacaaaccaaacaaaaaactagagtttcaaataagagatgctaggcaagtagaatattgttttcatataatttttgattcataataactatatctttaaccaagtagtattgaaattgtttgttactataatcaagcaatgagcgtttgtcttgtactttgtggggtgtgtttgctgagaaagtatttagtggtttaaaaagtataaagcatgatgagaagacagtggttctgatacgctatgctaaaatcaataattttaaaggtaatcagtcattgctgttctgttaaaatgtctaaagtataaataatggatgtatatgtgcatgtcttagttaacatatattgtctaattctgttaactaggtgaaattagtattacaagtgcttttgatgtttcggaagtcataatcaatccagttcatgttcctgaggttgaactgttcgtgaaatcgtaagtgcaaaatatattttgaccttctttgttttgtttaaattcacaaacatgttaaccagacaaatgcttatttgcagactcccaagtgatggtcttgctctcactattcaagataattatgtgaatcgtgacttaattaaggtgaaataagataatttttttgattatcctgccaaaacgattgttgatttacttcatgtgagagacgtaagtatatttccactaattcctaaattactgtgtttagtttaagtacctataattgtgattgtattgtaaatcaggttgggcaatggagaatacttggttccatttatgccattgataccgattggggatggttctattttggatgtcctaaatgtaacagaaaaactgagctggttaaagaatcaaccagtactggtaagatggtcaagacacctatgaaacctaagttctggtgtgacaaatgtcaagagagcatcactaatgtggaggcaaggtaataatgttgtctgatactcttttatcttgaacaatataacaaaattgtttctattggtatacagaaaatataaaggtttataagtgtatattaattatatatgtacaatacattttactccaggtacaagcttgaggttcgtgtaatggaccagacaactgaaattaaactcatggtgtttgaaaataatgcaaccaaacttattgggaaaacttttgaagagttagtggatggacaatatgaagaggtattaaatatatactgtcattcaagtattagctatatgtctaagatagaatgaagagtactaacgtaagacatgtgtatagattgaggatcctacgatcatacctgatgtcatcacaaatttgtgtggaaagacattccattttctggtcagtgttgagaaagccaatatttatggtggtaaagatatttacaaagtaacaaaagtacattttggaacagacatagcctaagaagaatcaggtttgcttaaagacactcaatatgatccatcaacaattgggtctgaggaacctgtatgatcatattcaccttaatacaattcaaactgcttatgaagtgttttgtattgatataacaaattatatttctcaatttttattgtatagggtcaattgatgtgaactaatagcagcaagaactgttctgatgataaaaacactgaactatttactccttcatctaagcgttgttcagctgagttgtctgatatggctgatcaatcgagtaccactaagaagttatgctctagggttaagtcagaaaatggagatgatgagattggaaccaatgtgatactaaaaaatgctgataaggttaaagttatttcagatgatgttggatgtctactgatagaaggagttgttaaagaccttgagtcacagacctgtaaag

SEQ ID NO: 186789 - DNA, 103 bp, Arabidopsis thaliana landsberg
gtataatattgtttgtgaaattaattcaaacgtgatcaagacgaacactgcccccacttatattaatctgattaatatgtttggcccacgtttagatcggtag

SEQ ID NO: 186790 - DNA, 458 bp, Arabidopsis thaliana landsberg
tcagcagaattgcaaggaacaagcgccaaacgtttgatggtgcaagggctgtcattcttgcggatgtgtgggaggttcagacaagctgtgggtttggtgtgccgcgaattaagaagggtatctacgcgccagaggagagcaacaaggttcctttcgaagacgtcttcaaaggggatattgacagcaaacttaatgaactagtcgtctttgaggaacggcccactatggacatctcgctggagaagcgtgttaacgcgaataagttgcaacaatatcacaacgaaacaaacgtggaaagtatagatggcctcccaggactgaaggcggcgagaagaaacatagggcagacattgtggttggtcgatttacaggcatatgcgaagagaatgttggcacaaaaggaaggcattattcttggtttcatgcttgccattttcgcatacatcctgataaattaa

SEQ ID NO: 186791 - DNA, 137 bp, Arabidopsis thaliana landsberg
atgcggcctggaatgcatcttctggctcttgcggtatggaatggatatttaaagctcaagatcaaagggttattcatcggggttcaacaactcgcctccatactccctcggctttggcaacagaagccctaaaataa

SEQ ID NO: 186792 - DNA, 60 bp, Arabidopsis thaliana landsberg
atatctcaagatggacagagcgacttcccttactacgtgcgcattggtgctgtgccctag

SEQ ID NO: 186793 - DNA, 238 bp, Arabidopsis thaliana landsberg
agtatgcctagcgtacgcgacaaagctcgcgtatgttttttattctgttaaaatcaatgtaacagctgtcccatacatgtggttaacgaaatgacaaaactattttattgtcttgcagttgcaggttgtagtgccatatgtgaagaacttgttgaagttggagaacagctcaatcatcggaaaagttgttggcaaggatattcttatgatggtgatggggaggttccgagatctcgat

SEQ ID NO: 186794 - DNA, 436 bp, Arabidopsis thaliana landsberg
gttcttttgatgggattgcttagcacgaaaaaagctgctcgttcgactccattgcttttcatacttcctgtgttaaccattggattccacaaattctgtcaaggacgttaccaacctatatttgtcacataccctttacaggttttctactcttaccaagaaatgagtcttcttgtgtttttggtcttcttagtgagtttcttcttctttccaggatgcaatggttaaagatacgttggaacgcatgagagaaccgaatctaaacttgaaaacgtttcttcaaaatgcgtatgcacatccggtgtttaaggctgcggataatctagctaatgagatggtcgtggaggagccacagcccgataagacgccggatttagtggcgactaaacgtggctcaaggaggtttaatagcggctctgctgaaacctttacttag

SEQ ID NO: 186795 - DNA, 15 bp, Arabidopsis thaliana landsberg
atggcgaccagacag

SEQ ID NO: 186796 - DNA, 515 bp, Arabidopsis thaliana landsberg
atgatcaacagcgaggaatacaaaggaaacactaaaaatcgaagtgatctaaacccaagggaaagagataaggcaaaaaaaaacctggctgaacttgagagcgtgttgttcaccagcgagctgaagattgccggagacaaagacgagcataccaccggcgggaccagaaggctgacaatcgacggtggtgatgttgtgcttacactgctggaaagggaggccggtgagcttagcgacgatgttctgagagccctggatcttctggccttcgaaggtcaacatggatccttcttggtatagagaaaccaaacctggacgatttgcatcgaaggtggagtagtagtgctcaacgaaagcctttgcaactgcgtctggatccatctcttctttcgtcttccctttttgatcctttgctcttgcgtcgtgctttttcaacaggcgagagaggatcgagagggttagataatttactgaaaaattatacgaatggaccaagactagagatactgaaatga

SEQ ID NO: 186797 - DNA, 451 bp, Arabidopsis thaliana landsberg
atgacgagaagaaaatccaccgtcgtcctgccgcagcctattcgtcgatcagcgaggcttatctctctgcagaatcgagatagtcaagtgaaacccaggaaagatctgggctttggctcggaacccacgaagaaaactcgtcgggaagtcttaagaggtctatcgaagagattagtatactcatcggatagtccaatcgaagattcgaggtcgaagaaattgaacatttcgaaagatgggtttccgtcgctaaggagatctcttaggctttcgagtagggaatgtcctgaagttaacaaagagaagcctaagactgcatctacttcatcttctcgaacgaaatcgtcgaccactgtttcgtcttcttgtgctctgagacgttctcctaggttttcaagtggaggaggagaatctgtggatcaatcttcttcttccattgggaagaaatcag

SEQ ID NO: 186798 - DNA, 227 bp, Arabidopsis thaliana landsberg
atggccaggttcctccctttcattaacatcctgccgacgacgacctcggaggagctccgtcgcgagagcccgttcttgtggctcgctatagtgtgcgttgcgtgcagttccgcgcggcaacagacagtgctggcggactcgataaaacagattgttgctaggaagatggtggtcgagagcgagaagagcctcgacaccctgctcggtatcttggtgttcatgggttg

SEQ ID NO: 186799 - DNA, 1083 bp, Arabidopsis thaliana landsberg
gaatacttcgcaagctctagacgatatcgacgatgatatctggggcgatgatgatctcccagagactcgcagaccttggactcctaatgtttcgcctggttttggaagcgatgatgatgatgacaatgatgatgacaactctaaaaatgaacctcgcaaatccttgttctatggtttccggcaagaacctgagcctgttactggtgtggtatgttctgatttcgtttccaagttttggttttttaattttgggttttgatctctgattacgaatttgataatttttgtagggagctgggctttggaatttaggcaacagttgtttccttaattcggtgtttcaatgcttcactcatactgtgccacttatcgagagccttctttctttcagatatgaagttccatgtcactgtaagacttttaatgtagtgtagctttttgttcttatgttacgttgtaatgatcttatcttatatattatgtttggctttgtaggtgggaatgagttcttctgtgttataagggctattcgctatcacattgaggctgcattgaggcctgagagatgtccaattgctccgtattttttttttgacaatcttaactgtatccttcatcgatttttatttcataaattttctgaatatatttgattttgggattctctgattttttttatgagatgcattttgatttatccttaagctgtcacagatttttcacctgacttccagcgttatcaacaagaagacgctcatgagtttctgcaagcatttttggagaagttggagatatgtggttcggatcgaacaagttttcgtggcgatatcacttctcaagatgtcttttctggtcgtctcatcagtggggtaagtagtttaaacttttatacacttggtcaagtgtcaaagctatttcggtatgagtttcagttgttttttttgtaaacatgtacgcatttctgttttcagctacgttgctgcaactgtgactccgtctccgagacatatgaaaagtcagttgggttgagtttggaaattgaggatgtggatacccttggaagtgcactagaatcctttaccc

SEQ ID NO: 186800 - DNA, 228 bp, Arabidopsis thaliana landsberg
cagttagcttgtgacatcagcacggacacatcccgtaagctaggttggatgactgatgtggttacagccataaacccatcagatcagatgatagcggtccatgctcgcccaatctttgaacaagtttatcagattttgcaccatcaccgtaacgcaccaggcagcgacgtctctgccgtcagactgataatgcacgtcatcaactcgttacttatgagctgcaaatga

SEQ ID NO: 186801 - DNA, 205 bp, Arabidopsis thaliana landsberg
tgtttgcatcgaatggtcgtttatgtcaatgaaagacgtcccgtcgctgccattgaacgtacgtaataagcattaaatcttaacagtgtgatgcaaaatttctcttatagctcatcatcctcttttttttttttcttaagaatttgttgcatgtgaagatatttggtcactagagtatcgtttctatagatgttcaagacagtag

SEQ ID NO: 186802 - DNA, 1183 bp, Arabidopsis thaliana landsberg
atgccagatccagtcccgaacagtcggtatcggaagagaactagaggggagatgaaaggaaaagctgattgccttcctgaaatcaaggtcgtccaccttcgcttggtccacaaaggatatgattgggatcgctccaaaggtaacctgtcacaaattcaatacggatccgacttttaaaccagttcgccaaaagcgcaggcggttgggatctgatcatgccaaggctgtccaaaacaaggtcgaaagactactgaaggcgggtctgatcaaggaagtcaaatatcccgaatggcgagccaacccggtcgtagacaagaagaaaaacgggaagtggagagtttgtgtcgattataccgatctgaatagggcgtgcccaaaagacagttatcctctcccacacatagaccgcctcgtagaggcgactgtcgggaatcagcttttgtccttcatggacgctttcttggggtaatatcagatcttgatgcataaagatgactgtgagaagaccgcttttatcacagatcgcgggatctattgttatatagtcatgccttttggcttgaagaatgctggggtgacttaccaacgattggtcatgaaatgtttgccgaactgctgggagtcacaattgaagtttacctcgatgatatgctggtgaaatctttgcaggcggaagatcacatcaaacatcttaccgcgtattttgatatcctcgacaagtacgagatgaagctgaatcctactaagtgcacgttcggagtgacatctggcgaattcttaagatacatagtcaccgaacgaggaatcaaagccaatccaaagcagatcagtgtaataatcaaactaccgtcccccccagaacaaaagagaagtaccgaggctgacaggtcgcatcgcagctttgaatcgctttatcgcccgatcaacagacaagtgccttcctgtctacaaacttctacgtggcaataaggatttccattgggatgagaaatgcgaaaccgccttccaggagctcaaatcctaccttatgagcgggacgatcttggccaaacccgaggatggttagactctatatatatatatgtctcggtgtcaggttcggcggtgactggagtgttagtaagagacgatcatggtaatgaaaaaccgcagacgctagcattggcagttataaaggctgaaa

SEQ ID NO: 186803 - DNA, 289 bp, Arabidopsis thaliana landsberg
ctgctttgcctcaaaatgagatcaatcctgaagaagatgatgaatccgactcagatgaggtagattttgcttttaagtatttactgattagcaatgaatcagtataaaaaagctaatcttgttgtttttttctgtatgtttggttagatgggtttggacgaggatgatgactcttcagatgaagaagatgtagaggctgaagtacctttaaaggtggctcctccgagcaagaagatgccaaatggtgcatttgagatagctaaaggtggaaagaagaacaagtcatcag

SEQ ID NO: 186804 - DNA, 360 bp, Arabidopsis thaliana landsberg
atgaagagggaaattgccaagtacgtatctgagtgtgacactttccagaggataaaagctagtcacttgaagatagcaggtcctttgcaaccccttcccataccatcttggaaatgggaggacatttgcatggactttatagtgggattgcccaatacatccaggcaccatgattctatttgggttattgtggacagattaactaagactgctcatttcttgccagtacacaccacccacaggatagagaagtatgcagaaatctacattgaccagatagttcgtctgcatgggataccaaggactatagtctcggacagaggagcaccattcgtggcacgattttgggaacaattgtag

SEQ ID NO: 186805 - DNA, 602 bp, Arabidopsis thaliana landsberg
atgagggaatatccgtcggaatttgtcttggcactttcccacaatgtctgcgtttcaatctcttgtgcatttgttagtttattcgtggaggagaacaatcctagcgcatggattatgagatcgaaaattatgttgatatgcatcgtcgcaacggtatggaaatgtttctatatatagttttaatcaatgatcttattttgttaaatttgtgtaaatgatacattagggggtggtgaattcgacgagctatgttgttgaatcatggacagtgcgatataagggggctgtgttcctagcaatgttcaggccattatctatcgtaaccgctgtcgtactaggggcaatatttctaggcgattctctctatctcggaaggtgaaagaagaatgtttaatatatcaaaagatggatcaccaaattagtattaattactcatcttggattttcactttcagtttttactatctatatttggcagtgtgattggtggaacgttgatatcaagcggtttcagtgtccataattcattatttcatatagccaatggctttagcgctttagccaaatccagtgttctaaggcatattggcatgttagtatag

SEQ ID NO: 186806 - DNA, 122 bp, Arabidopsis thaliana landsberg
atatgccttcaaatcgatgtaatgtgatagccgctcgaacccgatttcgggataggactaagcatgaaaaactgaaagctgatttgttgaatatatatggcaaacaaaacaatcttccttaa

SEQ ID NO: 186807 - DNA, 1295 bp, Arabidopsis thaliana landsberg
aaatttaaaactgaattacaacacaggtcgaagcggcaactccgggttgaggaaatggcttgatgaggctaaacttccgccaaagaaagcagtgttagggttcccatactgtggatgggcttggactctcgaagacgccgagaataacggctatgatgcacccaccgatggagcagcgatatcacccgacggttctataacctatgccaagataaggaactatattgtcgataacggagcagccacattccatgatccggcggtgatcggatactattgctacgtgggcaacacgtggattggttacgatgataatcagagtattgtgtacaaagtgaaatacgctaagcatactggtctgcttggttacttctcgtggcatgttggagctgactataattgcggtctctctcgtgcaggttcgttttcattttaacttctaatcaaacttttttttttttactatatcgttgaatttgcatgatcacatttgaaattaataactttgctgcaattttatatctttctcttacatgaattcgaaagaaatagtatctgatcttattaatagtaaagagttttaaatgacttttgggtttttacagcatcaatagcatgggatactacggagtaaaacacaggacatgaacttctcgccgaagaataaaactcggagacgaccaaaagtgaaagaagaacaaagcaaagtgtagaataaacacggttgctttcttttctttttctatttgtttgctaaagacgtttgctgttcctttcctttgatttgttgctgaagaggtctgtttattgcttatatattatcgtaagaaaaacataaagacgtttgcttatattattgtaaaacaaaataaagacgtttgcttatattactgtttttttttaatgaatgttaagttttatactatttttgattggagacagatttttacagtgataaacaagtggcagaaaaaaaaccaaaaattacaaacgaaataacaaacaaaagcctacaatttcacaacggaaagcataagccaaacaaacagtaaaggcccgagaaaaaacaccatttccaaaccgtgaagtttatttctgagataaattcaaactgaaatagaaactcaattcgcgaaagttttcaaaagtataaaatatgagaactaaatatttaaaatgttacaaattttaatataaaaattttccaattaacgcgtgttaaaatagttgacatgtgttgtgattaaacactaatatgataaaatttatgtttttcagaattatatacgagataa

SEQ ID NO: 186808 - DNA, 679 bp, Arabidopsis thaliana landsberg
atgctgacgcaagaaatgagtggcggtggtggtccaaaggcggaagagggtcagctgtttgtggcggtggccgtgaagggtttgatcggagacaaattaggcggtgcaggaagtcgtcgtgccgtacggtgggctgtcgataatcttttaccgaaggctgataaatttgtgatgatccacgtcatccctaccattacttctattcctactcccagtaagtctctctcaatcattcacatttttcttgttattgttattaaaaaactaatgtagatgatataaagataaaatgaagtaaaccaaaagacagaaaggaaataataattacgagttttttttttttttttttcacaccaaatatatagaacatgaaggaagaaaatgtgaaaagtaagtttcacaaatcttacaaattatgttcgtatgataatcaaatgattaagtaattactttttcgtagtttgattttaatgaggtgaaaatgttacgttttttgtatgttaaaaagtaaattagctaattcgacttatcaaaatttttgtttgacatcttttaaatacttaatttatcattgtaatttaaagatattttgatattaatgtttacgagaatgtgggttgttacagccggagatagattgccggtggaagaagtggaggagagtgtggtggaaatgtat

SEQ ID NO: 186809 - DNA, 440 bp, Arabidopsis thaliana landsberg
atgaggcttggtgctgatgcaattgtcttctcacgttctcgaggaatcaatggaaataagtgagtcatttcacaatatctttatgttatctactcttggtttacgcgttttcgatcttaactgtgtttcttatcactgtttcagtccgacacagagcattggtatgctatcatatacgtttctttacgagacaagaaaatgtgaagcaattgtccccacggtagagtcgtagagataaaattacttcttatgcaaattgctcttcttctcaaaacattaagtctaaaactctttttcttttctctgcttaggttgattatgagttggtagataacaaatggaaggagatagtttataactccacaaatgagtggcttgataatttagagactatattgaggtggtcgccttatctatcccaacaagatttattggaccag

SEQ ID NO: 186810 - DNA, 338 bp, Arabidopsis thaliana landsberg
atccgaggccaaatttatcaagaaggttctgaaggcggttgaggaagttttaaccactattcaatctgatgaagcaaaagaaggcaactgtgtggaggatgttgaaacatttaacgttccactgactctgccttggtcatggtttagctcggcggttgagctaattggtgcaattctcggcttactcgctgagactgttcacgctgatgaaggaagaagagaagctgattttgtgaagaaagcgaaaacacttaatgttccactggctttgccatggttatggtttggctcggcggttgaaccaattggtgcagtgggcggcttactcattaaggctg

SEQ ID NO: 186811 - DNA, 217 bp, Arabidopsis thaliana landsberg
atccgtaactgagttttccggcgatattcttgccgtagaaaacgagttgatcggagaacttgacgtagcaactggaaatcaggtcaacggtgaaatcgccgtcgtcggagatagtgtacgatttgacgttgttgggaagaagacctttcgggaatccgtagcgtgggagaagatcgtggatgtcatcggcggcgagagatggacggtcgagatttag

SEQ ID NO: 186812 - DNA, 72 bp, Arabidopsis thaliana landsberg
gtggaagacggctgcttctctccttggaccgtttctgcaatgctggtgctttacgagctgtggaggatccag

SEQ ID NO: 186813 - DNA, 154 bp, Arabidopsis thaliana landsberg
atggaagaaaatcttcctccggggttcagatttcatcctacagacgaggagctcataacgcattatctatgtcggaaagtctccgatataggattcaccggtaaagctgtcgtcgacgttgatctcaacaagtgtgaaccttgggatttgccag

SEQ ID NO: 186814 - DNA, 245 bp, Arabidopsis thaliana landsberg
accgggccgcggaccggcgcgccgccgcccttcgcgacatcgtgctggtgctggccgcgatcaccgccaccctgttggcggtgtggctggtggcgcgctcattggtgcgcccactgcggaccctgcgcgacagcgccttgcaggtcgctcacgtcgacctcgaacaggagatcgcccggttgcgtgccggtgtgcccggttcagaccgcgatcctgacccgctgccggtgtacaccaccgaggag

SEQ ID NO: 186815 - DNA, 432 bp, Arabidopsis thaliana landsberg
atgaacgtgcacttgactttatatgggatggtaagtagttatcaagtatactgaaatattttatagaaaatataaatctgaattttatggaatttttgttttcaggcatctggacacaactatgtttggggattatccacagacaatgaaagacattgttggacatagattacctaaatttactactgagcagataggaaaattgaaaaactcagccgatttcgtagggatcaattactatacttccacattttcaaaacattgggaaaagccaaatcatgcagaaccaaaatttaaacaagattctcttgttgaatggaaaagtaagtttttctttttaacataattacctgaaaattgtctttggtactaattaaatactatatggtctttacagataaaaatgtaaacgatatcactattggtagcaag

SEQ ID NO: 186816 - DNA, 1645 bp, Arabidopsis thaliana landsberg
atgactgagagagatgttatatcttggaattctattattaatgggtatgtatcaaacggattagctgagaaagggctatctgttttcgtgcagatgttggtttcagggatagagattgatttggctactatagttagtgtttttgctggttgtgctgattctcgtttgatatcgttaggtagagctgttcatagtattggagtgaaagcttgttttagtagagaagatcggttttgtaatacattgcttgatatgtattcgaagtgtggtgatcttgattctgctaaagctgtgtttagggagatgagtgatcgaagtgttgtgtcgtatacttccatgattgctggttatgctagggaaggtttggctggtgaagctgtaaagttgtttgaagaaatggaggaagaaggtattagtcctgatgtttataccgtcactgctgttttaaattgttgtgctcgttatcggttgttagatgaaggcaagcgtgtgcatgagtggataaaggaaaacgatttgggatttgatatctttgtatcaaatgctctgatggatatgtatgcaaaatgtggaagcatgcgagaggcggagctagtgttctctgagatgcgtgtgaaagatatcatctcgtggaacaccattattggtgggtactcaaagaactgttacgccaatgaagctctaagcctgtttaatttgctgttggaagaaaagaggtttagtcctgatgagagaacagtggcgtgtgttcttccggcttgtgcaagtctttctgctttcgataaaggcagagaaatccacggttacatcatgagaaacgggtatttctcagatcggcatgttgctaattcgcttgtagacatgtacgcgaaatgtggtgcgttgttactcgctcatatgctctttgatgatattgcttccaaggatcttgtttcttggacagtgatgatagctggatatgggatgcacgggtttggaaaagaggcgattgctcttttcaatcaaatgagacaagcgggtattgaggctgatgaaatatcctttgtatctttgttgtatgcttgtagccattcaggactagttgatgaaggatggagattctttaacatcatgagacatgaatgcaagatcgagccaacggtggaacattatgcttgtatagttgacatgcttgcaagaactggagatttaatcaaagcttataggttcatcgagaacatgccaattccgccagatgctacaatctggggagctttgctgtgtggatgcaggatacatcatgatgttaagttagctgagaaagctgcacagaaagtctttgagcttgaaccagacaacacaggatattatgtactcatggcaaatatctacgcagaagctgagaaatgggaacaagtgaaaaggctaagaaagaggatagggcagcgcggattgaggaagaatccgggatgtagctggatagagataaagggtagagttaacatctttgtagctggagatagttcaaacccggaaactgaaaacattgaagcttttttgagaaaggtaagagctagaatgatagaagaaggatattcaccactgacgaaatacgctttgatcgatgcggaagagatggaaaaggaagaagctttatgtggtcata

SEQ ID NO: 186817 - DNA, 135 bp, Arabidopsis thaliana landsberg
tgttttattctgaattttgttcaaccactaaatttcattgacggtgaaaaagacttttacgttcagcaaataaaaacttcactagaggtggattcgactaattttacatcttcgaggaccaacttacgattttga

SEQ ID NO: 186818 - DNA, 103 bp, Arabidopsis thaliana landsberg
atgccagcaatacgagctcttcttgggccaggagcgcacgcaagcccactctatggcctgtgagacgagccagctgtgtgcaatcgttggatttacacgtacg

SEQ ID NO: 186819 - DNA, 471 bp, Arabidopsis thaliana landsberg
ggtcatctcaaggcatcaactgatctgtcaaagtatagatcaggcggtggttggattcagtttggatggatcaatggcttaactcttaccggaggtggaacatttgacggtcaaggcgctttagcttggccgtttaataactgtacttctgattctaactgcaaactccttccaactgtgagattaactctacaaacattgaatttgatcttaaggttttctccttttttaaagtatattaattgatttcagagcttgaagtttgtggggatgaacagaacagttgtgagaaggataagctcagtgaatagcaagttctttcatatagcattagtagaatgcagagacttcaaagggacaagactcaacatcactgctccttctgatagtccaaatacagatggtatacatatcgaacgcagttcgaatgtgtctttctcgcgttcacatatcgcaactggaaatgattga

SEQ ID NO: 186820 - DNA, 179 bp, Arabidopsis thaliana landsberg
tgagatcaaaagaaatcgacaaatcttccaagagcaaatcaaaggaagaacaattcgtcattgtcaagagacgaagtggcgttggtgtaagggtcaaagacgtgaaactcgccgacacgaggagaactacacgaagtagtgctttgacaaaggttccagcaatggtgatggtgttctga

SEQ ID NO: 186821 - DNA, 431 bp, Arabidopsis thaliana landsberg
gacaataatggctctgtggaaagcaaaatctttgactccagagcagaaagtgcaagctgttgaagaggaatcagagcagaaactccaaagtgaagagagtggtctgttcttgggtgttgatgatgtgcgattctctgaggttttctctttgactctccctgtcccggtgagttcttatctttcatttgtaaagcaactgtgttgtggaaatgtgtatgagttttgaaattgtcttacgcatcattatgataactctctaggtaagtttctttatggagttgtttggtggaggtgaagtggatcgtaaggctatggagagagcgggttgccagagctattcatgcagtccatgggagtcaaagaaggatgatgtgtatgagaggcagacatactacagagataagcggatatcacgttcagaggagaagtaa

SEQ ID NO: 186822 - DNA, 133 bp, Arabidopsis thaliana landsberg
agagatcgaaaggagggggagatttaagccaaatcgatttctgccgttggtggaaggaacacccaaagaagaagagaagaagaaaactgttggaggagacgaattggggaatcttggaatccagagaaattag

SEQ ID NO: 186823 - DNA, 239 bp, Arabidopsis thaliana landsberg
gtgtgttcctcggcttatcttccaatgcgcgttaccaaatcatcaacggcctcgaacgcgtcgtgaaaggttctacagcggccaaacgtatccctgtggtcgctatggcattcacggtgggagtccggtttgctaacaatgtgttggcggtatgcaatttgtacattaggataagttgtccggcgttcagtaatcaaccggttcggttttgttacaatccggatagtaaactagcctag

SEQ ID NO: 186824 - DNA, 338 bp, Arabidopsis thaliana landsberg
actggtacgaggagcaacaagactttaggatgtttttgagtgagtgcctgataattctcgtttctcaaggcaaactggaaaaggtatatttttcttaattgctcagctatttattgatgcatcatcatctatctataacaagatcatttgtaattcttatgattgattaaaatcagaaaatctcccaaattgcaggtattggatcgctacaagatatcagaattagaaaacaaagtgttggaagtagcaccagaagttgtagcaatgaaactagcagagtcagataacaaaaggttgatagcagcagaggcagtcgaagaagaagaacgaatgcacaa

SEQ ID NO: 186825 - DNA, 124 bp, Arabidopsis thaliana landsberg
ctgtatgcaaagagctaagtatgacattggagaagaggcagttaatcggtttgcgttatcagcagaggacaaagctactcttgaattagctgaatgggttgataatgcgttcaaaggaacactg

SEQ ID NO: 186826 - DNA, 728 bp, Arabidopsis thaliana landsberg
  unsure (1)..(728): unsure at all n locations
atgaattttcaagaagttaaaccaattagaagtgagttggttatggtccggtacaaagatcacaaccggagaacgataagtgatggtcagagttggttggttctgttgaaacaggaagaaaggtagagcttttttgacaatttgacgaaaatggcgaagctttccttttcaaacgacgccgtaatgagtcggaaacaacgaggacctctcgttttagaagaaaagagagcaaaaaaaacttatcttttgactttcggtgttgtgtgtgatgttgttgtcggccatggcgaagacagagcaacgatctctctctttttcctgtcttatgtgtctatcttcgaacagagtcttcagaaacgaagcagccactctttaaaactccatcggaaaagctttgtcctgttttgatatccatggctttaccttggtgcttaaagactggagttttaacgtctccggccgccggatttaatcttccatcggacagtggctttgccgttccgacgaagttactgagtattcgaaaaggtgatcgggaaagattnnnnnnnnnnnnnnnnntcagctttcctccaagaaacggtggagccgagaagcggaaacagctcaaacatgaacttgtcgaagccattgagccttttgaacgtggtgccactgcctcgcctgatgatcagcttcggattgatcaggttcttgatttctcttcctgtgggaacccttcagaatag

SEQ ID NO: 186827 - DNA, 195 bp, Arabidopsis thaliana landsberg
ctacaagtacactagacgaccatggctctgaggaaaaggtaagtgcgaaaacaactttaagctatggattaatcttgcacccaccccctccctgattaaccatgtctttgtttgattttttctcagatgaaacccaatcctattcgtaaaaggccaggtattagatcacaaggattagcgaaggcgacaaagcat

SEQ ID NO: 186828 - DNA, 155 bp, Arabidopsis thaliana landsberg
atgaatctattttcacggttaacagttacggttattaaccgttttatacgttgtggatgtcagattcggcacacttcagcccaatccgcattcaatgggcttcaagatgagttaggcccgattcatagcccagtatgggccaggccgcttaacag

SEQ ID NO: 186829 - DNA, 1508 bp, Arabidopsis thaliana landsberg
atgaatcctggtgaagatgaatactttctccttcacctcccaaacctctctaacacccccttacaaccttcaaaatccttgccttctgatgatttgcgcaactttcgtcttctcctcaagtggtgcgctttggatcactcctcctcttgtggtaaagctgtgtcatatatgatgtttgtagtcttcaccttagtagtccctctcataagttgtctgtttatcaaaactcctagaaaccggccttcaacagttatggatgcaaactctttcaatgtgctcgtccagtttccagagtctggacttgccgtcattggtttcttgactctaatatgtttcttcagaatatatagtctcacaaagcttctgtttcttgatgattctaccttggtgaggcttggatattcgagagaacttgacaaggccttacgttacctagcctacatacttgtaccgtcttttcttgtggaacttgtgcataagagcatatttttctactccgccgaagtatcatttcctttcataaagtcatcttgtgctgcattgaactttgtgatgttcttcctcgtcttattttcatgggtttaccggacaggagtgttcttgattgtttgtatcttgttccggttgacctgtgagctgcagatactgaggtttcgagggcttcacaagctgttcgatagatgtggatcagacaccatagaagatgtatgcaaggaacatgtgaggattaagaaacaattgtcggctacaagtcacagatacaggttcttcatcatcaccgcctttgttgtgataagtaccagtcagtttgtggccttattgttggttcttgcctcaaagtctgaaaagagtttcctcagctctggtgatttggtggtaattctataaagctttgttgtaataatttttctagtttccccgttctgcatttaatgcagcattcattttcttttctatctcaaggtatgttctgcagtacagctaagtggattcttcttgtgcttgttgggtgctgcaagaatcacacacagagctcaaggagtagtgtgtattgcaacaaggtggcacatggctttgacatgcgcttctgaagccgtatcacccgaaagtgacactgactcatccgacaacatatacatcaatgtatcaccgtcactggatctatcttccttcttccaggctaggcaagctctaggtgcgttacaattatgatagcatgctcttcttttttcaaattacttgcgagcaattgataagagttacattgcagtggaatacctacgacataacaacaaggggattacactctatggttatgcactcgataggggactgcttcatacgctctttgcatttgagttctctctggtgatgtggatcctgagcaaagtcgtggttctatcttagaactcattaaggtatttatgagacaaccaaagacgctgcaaaagcttcaattaaagcttctcttgaagcctgacttttcgaaagatggatgctttgattga

SEQ ID NO: 186830 - DNA, 1287 bp, Arabidopsis thaliana landsberg
atgaagcgtgtaatgaaaggtagtctcgtaaatatgtgtggacaacattacacgtcttttatattgctctattacaacagaagcgagtttgaaagagtcagaactcacgagtttattaagttttgcaaacacatacgatttgatcaaaggcaccgatcgatgatggggcaaaatcaaagcggtggagagatcgtttttccggggccgtcacctttcgatgtcttgccggaggattgcatctccaacataatctctttcacaagtccacgagatgcgtgcgttgctgcatcggtttccaaaacctttgaatcagctgttagttccgattgcgtatgggacaagtttcttccaccggagtatgaatctttggtttctcgatctcgagtttttgcatcgaagaaggaactttatttcgctctctgccacaatcctgttctaatcgaagatggcaaaaaggtatttatatgattctatctattctttggtttatacgttggagaacaatgatcaaattgaaaatcatgtgttaaatcaacgagttttcgcatagatttgttaaaaacctaatttaagaaaattgattcttgctacgatagaacatttttggtgtagttgtaattctgattattttgatgttttattttattttccgaaaaatcaaagagcttttggttagaaaaaagcgagtggaaaaaggcgtatcatgttatcttcaaaggaactttggatcacatggggaagtagtcctgaatattggcaatggatttcaattcctgaatctaggtaactcttttttccccctctttaaatccttggaattggcaataatatgatgatgatttgcacacattgttgttatatagatttaacaaaatagcagagcttcttgatgtgtgttggcttgagattcgtggcaagacaagcgctcgtgtgctatctcctggaactcgttactcggcttacattgcgttcaagacgaaagatcgatgtcctggattagggcatttgccgccagaagttggacttggtttggtgggacaagaatcttctaaaagattcatatatttcatagggcctagggatcgaaggggaaggagggaaacgagagatgtaacaaaaccagatcaaagagaagatgaatggatggaagctgagcttggtgagttcttcaatgaaacaagttgtggtgatgttgaagtaagtgttattgatgagaattcttattggaaaagtggtttggtcattcaaggaatcgaattccgccctacgaaaaagcatgtaaactga

SEQ ID NO: 186831 - DNA, 1219 bp, Arabidopsis thaliana landsberg
atctgaatagacttaccagtgagtccagcggtgagcttggtgatgagaacgccggtaacggcgaatccggtgagaaacggccaacaacgtttccattctctcttgaagaacactggccatggatcgaacaacctcatctttctctttttctctttttgttctctttggtcttctctctaaactttggtatctggatgagtcggagactgcttcgcgtagagacagatcaaagtgacaacaaaagactgatggataggtaatagttactggatccgaattctttctggatataatgggctatctttaaacccaataaggcccaataagtcttccagttaatttgtaaaaggccattaatgaccgttgttaaaacgcgaatttcccgcgactgcgtttcaagcactctggaattgttttttttctctcatgttaatccacttctctttgtaacgttttgccacggtgctgtgctctttgaattagcttcaagattgatctgtctattgttggttcgaagctattattgtgaattggaaattgtcaaaagcttgtttcattagagaaaccatggaaaaatggaccaattcaattcactgaccactacaaattcaaactccgtgtgtatctctctctctttctctctgaacattcttaatgtattagctatagagtgataaactatataacagctgagatcaattgaaatggtctttcaaaaaccaagttgccttattgtctgaccaagaaatttacatatgtttctttggataatgtagatattcaagttcttgattgtgatgtccggagattattttcctagtcttcttgtgttttttcaatagaaaatacaattcttgacggtcttttttttctttctgttagcaggtttcatcagtttggattgcgggctacccgcaaatgagacgtctccttatacagagactcaaactggactttgttctattcggacgaaaatttcatacagagcggaaaaactggtcgaatcagagaaaatcctgagggatacggggagctatacgagacagtgagatattttccagagggaatacggaactgctacaatctgattgtggagaaaggacgtaaatatttgatcaaggcttcctttgtatatggaaattatgatggtcgtaacattgcaccggtgtttgatctttaccttggacctaatctatggcaggaaatagacttacgacag

SEQ ID NO: 186832 - DNA, 87 bp, Arabidopsis thaliana landsberg
agttttagtatacccgtggatatccgattggttcggaaattacccgttacccaaaaagggtattcaaaaacccaaacattaatttaa

SEQ ID NO: 186833 - DNA, 228 bp, Arabidopsis thaliana landsberg
caatcaaaaacatcaaccgttggacgaaattacggagacacaaaggtcaacaaattcacaaaacacaaacccgtaataacgaaacacgaacaagtgatggaaaatatcgcaggaactaacacagaatcggagaacagtggaatcgtcgtgagagagaagaagaagaagaagagagattcttaccagggaggaaaaggattggatttgaaaatccagatgaataattga

SEQ ID NO: 186834 - DNA, 561 bp, Arabidopsis thaliana landsberg
tgactgctatgaaagcattgaaggattcactacgtgttcctgatagaatgggttggaatggtgatccttgtgctcctactagctgggacgcttgggagggagtctcatgccggccaaattcccaaggatctgcccttgtgatatttcaaatgtgagtctcacggttgcatacagtaaaccgacctggcttgtcttattcactttcacattgtgtatgcaagctgaaaattagtaaagttgattagacaaatattatcagaaagagcaaagaacttgatttggaaactcatatgggagcgggtggtttataaacatgcatctttcttcctttactgtggattaagggttgcaaacatgtatctcggcattatctcgaataatgttaactatagatagtaactacatagataatattactctatatggtgcttattatttcttatgcatgcattgtggtttcctactattaatgttttattatgtaatgcttaagataggagtttgttattgtctttttcctgtttcagagaccttggaagacaaggcttaaaggatttatca

SEQ ID NO: 186835 - DNA, 16 bp, Arabidopsis thaliana landsberg
atggccccgatagctg

SEQ ID NO: 186836 - DNA, 236 bp, Arabidopsis thaliana landsberg
  unsure (1)..(236): unsure at all n locations
atgaannnnnnnnnnnnnnnnnnnnnnnnnncgctgtccccgcttggcagatcggcgcccctcgacacggtcagacagtccgagcttttgcctagacagttcgacccttatgcagaccgtctggctttccctgccggacagtccgggaccgcaccagggctagttgggatgtacccggacagaccggatacacatacgcagaacctactgtcgcacactacgcataagaagatgag

SEQ ID NO: 186837 - DNA, 276 bp, Arabidopsis thaliana landsberg
atggttgaatacgttaatgatgagattgtcattggtaatagagatgatgtctggtcctggaaacttcccgttaatcaatataccctacttgaaagaagaagggtaagcaaacttaaattgaattaacaaaaccaaacatttggcgaagttcaggttaaagacttaaagatatataaagcgtacctgttgcgcaacaccaagaggagatatgttgccataggttacgtgccattcgaagaatctgtatggatcttcagcgaaggcgaggctgattag

SEQ ID NO: 186838 - DNA, 68 bp, Arabidopsis thaliana landsberg
gtcacatgcagttcattcacactgtatcggacctgacttctttactagcaaaagacaaatctagctga

SEQ ID NO: 186839 - DNA, 197 bp, Arabidopsis thaliana landsberg
gttttacgaaatccgtagaaatcaatcacacaaaaaaaactgaagcaagaaaccagatctgtagctcaacgaaccttagtcgattcgaccaagttttgaacgccaacgtggtttcttgcaaacacaagcggtgggcaagtgagaacgcgcgacatattttctctgatccaatcgaaggatttaggtctcgattctaa

SEQ ID NO: 186840 - DNA, 173 bp, Arabidopsis thaliana landsberg
tgaaagcaacacgcattcgcctacgaggcgatttagtgaataatgaccatggaaatgttgaaaccgtgtctgtatcggttttagccggtagagacggtccttccataccggaaccggttgtccatcctttaaccgaagctgcactcaacaccaatcccattgcttcatcctaa

SEQ ID NO: 186841 - DNA, 1432 bp, Arabidopsis thaliana landsberg
attctccgccactggaagaaatggaaacgtcgccgcaattcagacttatcttcgccgtaatcatttcttctctcatcgctttccgatcgtacaagcggaagtcgctcgatctctccggtggaattgctggattcctcgttatgaccattcacttcaccgccggtttcaggtttcttctcctgtttttgagattttatctgttatttttttcgttgagaaattgttttcaatcgtttcccgacgggtttgatcggattaatctgctgaatctgaaaggtacggagctctgctgcttgtattctttcttacttcctcgaaacttaccaaagttggcgaagataaaaaaagacgcgttgatgttgagttcaaagaaggtggacaaaggaactggtacatttcctttctttctttcttcgtttttttgtaggctccgatttttgaaattgtgaattgtctttgagagtctttgatcaaggagagggaatgaactctagatctttgagagtctatagtgaatagcatttagtcttactttcaacatcgtgttggtcggtaacatgaaattaattttccatgggcatattagcaaatgatttcactttcagaagttgttatttatgaccaacaaaaggttgtttttacagacgattcctcaaatatattgcttcagggttcaagtgctatgcaatagtggaattgcttcagttctagttgtaattgcttgtactttaacgggttggaaggacaagtgtttggactcgaagcagtcagaaattgtaacagctcttattggtgggatcattggtcattacgcctgctgtaatggagacacttggtcctcagagcttggggttcttagtgatgcccagcctcgactaatcacaacgtttaaggtttgtcctgttcctttttttgcaagtcgctaatgaactttgtctgtttcgcttaacgtttggtctcactcacagccggtgaagaagggcacaaatggtggagttacaaaggcaggactcttagctgccttggcagcaggcaccactgttggattaacattccttatcttcggactctttaccgcgagttgtgcaagtgatgtagctctaaagcaactcttagccataccactctctgcactagctggactatgtgggagtcttattgattctatactaggagcaaccattcaattcagtggtttctgctctgtccggaacaaggtaaagtctaaaagaacatacatgtaaatacatatgtaggatcgagggaaaagagtagttgactgaatttatgcatggtgcaggttgtagggaaaccgggtccaaccgtaaagaagatttcaggtgtggacattcttgacaacaatggtgtgaactttgtctccatactcttgacatcttttctgacttccattgcttctgtgtacattttctga

SEQ ID NO: 186842 - DNA, 258 bp, Arabidopsis thaliana landsberg
atgtgggccgctgcgcacgagcacaggcgcttcgctgcggcgttcgcagacgccgctgagcaggcggaacggcacctcaagacgttcaagaacgagctggagaacaacgacctcctgcgcaaggactacccggacctgtgcactcccgcccggcgtaggcagggcagcacggacgcggacacccgcaacatgtacatcgccaagagccggttcgtgttcggcgccaaggggatagacgctgcggtgctcggtatgaag

SEQ ID NO: 186843 - DNA, 123 bp, Arabidopsis thaliana landsberg
acatccaaatacaaaacctggatcgacaatgctctgttcgctatgcatgacatcattgcactatcaggagatgcctattacattcacttatgcggctacggacccaattactaccacatataa

SEQ ID NO: 186844 - DNA, 404 bp, Arabidopsis thaliana landsberg
gcaggcaattcgatttcccaaccccggaccaaataaaggtgagtccttcccctctacaaaatcacacaaaaaatcttataataatttctctatatttttaacacaatgttgaatgatctaaacaggtttgtttcacgcggtggaaggaagcgaaagatgaagaagagaagaaaaaattgttcatagagttcatgtcaaagagcgtgaagccaagtaaactcgatgatgtcactatgatcaccggaatagtatctcaaccgaaggcgatggcggctaaaagagcaggagagaatgttcctcagttaaaattaatcaaacttatacctgatgttatattcgtccctacggtcaccattttagccattgtctctgccaaactctctagacgaatgtatttgaaataa

SEQ ID NO: 186845 - DNA, 385 bp, Arabidopsis thaliana landsberg
atgcgcgatatagcagagatcgatatcgcattccgccataagcccttcaatgaaacatctgcggggcatagcaaattcctgtatagttattgccgtaaaacaaaggaactgtctgaaagatatcccttcctggatctttctgaagagctgaagtatttcggaagagaaaatgatggtggaagatcattcctataatctcagcaatgcatagtccgggtgatccgggtgaacgataagttcctgcctctgcggatggatgatcacgtccatttcttccatgggtatggcgccgagaaggggctcggaatcaccgggcagcacgatggccctgcaggtacattcccggttggcaaagcgaaggtctaccgggccacacacatcacag

SEQ ID NO: 186846 - DNA, 519 bp, Arabidopsis thaliana landsberg
  unsure (1)..(519): unsure at all n locations
atggcggcgaaaaagtgtatgattttttcttgcaaacgcagtcgatttggtgtgctcaggcttggtgtgctttgggacgctttagcatgcgtatgttaacttctcagatagaatcgacggtagagctgtttgtggaaacacaaaagcnnnnnnnnnnnnnnnnnnnnnnnnnnnnnnnnnnnnnnnnnnnnnnnnnngctgctgaacggttaaatgtcccctttgctattattacctgtgatttagatgcaagcaactatatcaatggtttgcataagcctgcatataagaagttcttctttgggctttcatttcatgataaaaaaatagaagacactattcgcgatgcagaaattccgcaagagcaggtacgctatgtgggcttccccgttcgtacgcaattcttgcataagcaacatacctgttgcttgaaacaggagtttgctatacccgcagataagccggtagtcatggttaatatgggaacagccggttctaacgcaaccttgcgctatgcac

SEQ ID NO: 186847 - DNA, 889 bp, Arabidopsis thaliana landsberg
gtcaagacctcaacccagcaatacgagaggatctcataacctttctcaaggaaaacaaagacagcttcgcctggtcgagtgcgaacctccgaggattaagcctccaggtaacctcacatgaactcaacgtcgatccgacctaccgacctataaagcagaaacgtcgcaagctaggtcccgaaagggccaaagttgtgcataatgaggtcgaccggttgctcaagatcggatcgataagggaagtaaaataccctgactggcttgccaacccggtcgtcgtgaaaaagaaaaatgggaagtggagagtaagcatcgactttacggacctgaataaggcatgtcctaaagatagtttcccactcccacatatcgaccgaccggtcgaagccactgcaggacacgaactattgtccttcatggacgcattctccgggtacaaccaaatacttatgcgcctagatgaccaagaaaaaacagcttttattaccgaccgaggcacctactgttataaagtaatgccctttggtttaaaaaatgctggagctacctactaacgattggtgaacagaatgttcgtcgaccagctaggtaaaacgatggaggtctacatcgacgacatgctggtcaagtcagctcatgaaaaagaccacgtcccgcagctaagagaaatcttcaaaatcctaaacaaaatcgaaatgaagctaaacctcgagaaatgctctttcggagttccatcaggagaattcctcggatacctagtaaccgaaagaggcatcgaggccaatcctaagcagagtgcagcctttattcaaatgccatcaccaaaaacggcacgggaggtccaacgactgactgaccgtatcgccgccctcaacaggttcatatccag

SEQ ID NO: 186848 - DNA, 115 bp, Arabidopsis thaliana landsberg
ctcatatttggtgttgctgattcaggtactagaagtccagcttggtggtaagaaagccatcaacgcagctgctttttggaatggcttgagaggtcaaaagctgaagaagatatga

SEQ ID NO: 186849 - DNA, 231 bp, Arabidopsis thaliana landsberg
cttcaagctaaacgaaccgagcttacccgctgcatcagtaacaaggggaaagagaaggttgatctaatctttggtcagaagatggtagcgaactcaatccctaaagtggttcaagaagctcaagcagctaacttgaagaaacctgaatgggaaatgaagaaagacaatgctcttaaacgtgaatcagagatcctcaataaatttgcccctctcaaaggattttatctctaa

SEQ ID NO: 186850 - DNA, 107 bp, Arabidopsis thaliana landsberg
gtaagaaaaccttaatttatacggcggactttaccaacggaatatctgtagacctttgtgttgtcattcgccttcagccacgtcagtgttcgttcacaacagttacg

SEQ ID NO: 186851 - DNA, 147 bp, Arabidopsis thaliana landsberg
ataaaatccgtggaattgattccattaggaacaaagggtacgaaacaaaatcagacctttcgctagttagcaatccggaatttcgaaatctagggtttcgtaaacccaacagattggaagaaattcccccgaaaaggcgaaaggaag

SEQ ID NO: 186852 - DNA, 194 bp, Arabidopsis thaliana landsberg
agtcaattcgaactttttcgcttcaatggcggatactgtcactgatcatcgctttacttgtgtactttccgattctgtcgggaagttactttaaaccgttcaatgtgagctacgatcaccgggctttaatcatcgccggcaagaggcgcatgctcgtctcagctggaattcactaccctcgagccactcctgag

SEQ ID NO: 186853 - DNA, 245 bp, Arabidopsis thaliana landsberg
  unsure (1)..(245): unsure at all n locations
atgcctctggtttctgtaagtaccgtagaaccaaagaaaccaagctgtgtaaaagtaactgttagacgctatgtttgtgacagacacagttctgtgtttttatttgttacaaatatttggctatagtnnnnnnnnnnnnnnnnnnnnnccaaattgtacactatctcgtatatatttgaggtccagccctatgttatatgtgtttcctatagaaaaatcaattttgtgaaattgaggaggaatga

SEQ ID NO: 186854 - DNA, 310 bp, Arabidopsis thaliana landsberg
atgaagatagagaagatggaacgagacatgcagacaaaagaggacttgaaaaccgtggcgttgggcacctctaagatcaactacatggatcctaggatcacggtcgcatggtgcaaacgtcatgaagcacccattgaaaaggtagttaattatatacaaaacttgaatattgatctaccatgaaacaaagagagtcctctaataaagttttttttttgtaatggctggttcgttaatgtagatattcaacaagtcacttctggagaaatttgcgtgggcaatggacgtagaacctcacttcacattctaa

SEQ ID NO: 186855 - DNA, 3804 bp, Arabidopsis thaliana landsberg
atggtcaacaatcaaatctccggtaacacagttgatgcagagggaaacccaatccctccaaaccagacagacgttcctgaagccgctgctcccgcgaccctaacagaactaagaagtatgatggctcaacttcagaagaaagtgaacgattaagaacaggcaaaccgatccttggcacaacaactcgaagcagctacctcccaaggacagatcaagactacccgtttcggcgcaaggcatctttaggatcgacgaacagcagcagatctcaacctaacacgactcgtgttccacacgcctggcaatactacaagtcccgtccaccgaaccgcaccggaaattggaagagatcgaaccgagccggcaatcttgggaaatcgggaaacgaatctagcggaaggaaatgatccgcaactccttcctccccgagcagaaattgcccaggtcgattagatcggggtcttggacgatgaagattcagaagagaacgttcggtgggctgaggagtacgccagagaacaggaaataagcgctatcaagctctccctagccaaggcagaaaacggatgaagctcgtaagatcccaaatgcataacgcagtctccttggcctcgaacattgacggcattctggaagagtcccacaacacatctttcacacacaggatctccaacgcaataatctcagatcccggaaagctaaggatcgaatacttcaacggatcttccgacccgaaaggacacttgaagtcaatcatcatctccgtggcctaagccaaattcagacccaaagaaagagacgccggtctctgtcacctgttcgtcgagcacttgaaagggccagctctggattggttctcgagactcgaaggaaattctgtggacagttttcaggagctatcgacactctttctgaagcaatattcggtgttaatcgatcccggcacatcagacgctgacctgtggtcactatctcaacaacctaatgagccacttcgagacttcctcgcaaaatatcgatctaccctagccaaagtcgaaggaatcaacgacgtagcggctctctcttctttgaagaaagcactgtggtaaaaatccaaatttcgaaaagaattaaacttgtctaaaccacagacaatccgagataccttgcaccgagcctcggattacgtatcccatgaagaagaaatggaactactatccaaaagacacgaaccgtccaagcaaacgcctcgcatcgataaatcccaaaccagtgctccaaaccacaaaaagggcgctcaaggcgggacattcgttcaccatgaaggacgaggccgcggtcgaggcgaggcgaggccgcccgaggccaaggacgagaccacggtcgtagacgcggtcgagaatcctacacttggacgaaggatcaactcgcaggaaacgagcagaaatattgtgagttgcataagagttacggccatcatacttccagatgtcgtagcctcggagcaaagttggctgcaaaattcctagcaggagagatcggtggagctttaaccatcgaagacttggaagcggaaaagggtaaaaccgagcaggtcaatgctgtggccaatcccgagcaggcggcccccgcagcaaacttcgaaggacccaaaagaggtcgaggtaatcgcgaagcagacgacgatgagccagaagctgctcgggggaggatcttcacaattttaggagatttggctttctgtcaagacacggcggcatcaatcaaagcttatcaaaggaaagccgacgcgaatcataactggacgcggccatttaatgggccaaatgacgaagtaacttttcacgaaagcgataccaacagtttagaccgtccgcacaacgatcctttagtcattacactgacaatcgctgatttcaacatcgaacgagtcctagtcgacacgtgaaggacattggacatcatttttcttacaactctgcgagaaatgaagatcgacatgacgcaaattgtacaactccacgacctgtgctcggattccctggggaaactactatgactctcgggaccatcaagttaccagtccgagccaaaggaatatcaataatcgtcgatttctctgttaccgacgagccgaccgtgtacgacgcgattatcggcaccccatgggtaaatcagttctgagctgtcgcctcgacgtatcatctatgcctaaaatttcccacaagcgacggcgtgaaaacaatctggggaaaccagaaaaatgctcgcatctgcttcatggcatcacacaagctcaggaaccccgtcactgagtcgacggccgacgcgaatcataagaaggccaagcttggccgagctgaagaaaggtcaatctccgagcagttatagcagctaaagatcgaagaagctcgggaatctacgacaccaactcccgatccggtcatctcaatttgccttgacgacgcaaagcctgagcgatgcgtagaaatcggcggagatctgggagaagaactaacagctgaactcactaccttcctcaaagaaaacgtcaatactttcgcctggtcccctgaagatttgcccggagtaagtgttaacgtcgtatcacacgagctcaacatcgatccaactttcaaacccatcaagcaaaagaggagaaaattgggtcgggagcgagctgaagccgtaaaagccgaggtagaaaaattattgagaattggttccatcactgaggcgaaatatcccaattggatcgcaaaacccagtcgtagtaaaaaagaaaagcggcaaatggagagtctgcgtagatttcacagaccttaacaaagcttgcctaaaagacagcttcccattaccacacatcgatcgcctcagaacaagcgagaagtgcagcgcctaaccggaagagttgcggcccttaaccgtttcatctctcgatcaacatacaaatgcttagccttttacgatgtgcttcggggaaacaaaaagttcaaatggacgacccgatgcgaagaagcttttcaggaactcaggaagtacctagcaactccacccatcctcgccaaacccgtaatcggagagccactatatttgtatattgccgtatcagatactgcagtcagcggagtgttagtcctagaagacagaggcgagcagaagccgattttttacgtctcacagactttcaccggcgcggaatctcgctatccgcaaatggagaaacttgctttagcagtcgtaatgtccgcagtaatgggatccatgccactccgcgccatcttacacagtccaagccaatcaggacgtctggctaagtgggcaatcgagctcagcgagtacgacatcgagtatcggaacaaaacatgtgcaaaatcgcaggtcctagccgattttattgtcgaattacccaccaagaaggctcgggaaaatccactcgacacaacttggcttctacacgtagacggctcgtcatcaaagcaaggctcaggtgttggcatccgccttaccttgccaacgggagaaatactcgagcaatcattcaggttaaacttcgaggctaccaacaatgtggtcgaatacgaagcgctcgtagccggacttaatcttgctcaggggctaaagatagagaaaatccgagctttttgcgactcccaactcgtcgcaaatcagttcaacggagaatacacagctcgggacgaaagaatggaagcctatctgactcatgtacaaaatctagcgaggaatttcaacgagttcgagttaacaaggatccctcgaggagaaaatccatcggctgacgccctagctgctctagcctaa

SEQ ID NO: 186856 - DNA, 253 bp, Arabidopsis thaliana landsberg
atgagaaacaccaccaaactagtcgtgcacgtggttgatgctcaatatcttatgcccagagatggccaaggatcagcaagtccttttgtagaagttgatttccttaaccagttaagcaaaacaagaaccgtacctaaaagccttaaccctgtttggaaccaaaaactctactttgattatgaccagagtgtgataaaccagcacaaccaacacattgaagtcttggtttaccacgaaagaagaccgattcccg

SEQ ID NO: 186857 - DNA, 260 bp, Arabidopsis thaliana landsberg
acagtcggctcgactccatgcttgcgcagattcttgcggaccaaacaaagttcgtggatgattttaatagcaagtacacagatcttaatgggaaaatcaacaatctgcaatctcgtatccctgagccttcttctacatcggcatctatcaatgcagtcacactacgtagcggaaagcagctcaacccaatacttcagaacgaacgttcagctgaaccttcatcttttctaaatgtagaaaaaagagcgagtgtcgattaa

SEQ ID NO: 186858 - DNA, 153 bp, Arabidopsis thaliana landsberg
ataaacaataagatacgagtcatgaccgatcattgtttctatgtcggcgttttattttatagtaaaaagaaatctgcaacaaaaggaaagggcacaacaagtagatcaagtagtagtaatctggcattactcaataggtccaaaaggaattaa

SEQ ID NO: 186859 - DNA, 107 bp, Arabidopsis thaliana landsberg
ttctacgcaacatattcgttaaaagtattgaaccgaaccggaaatcgaaccaaaccggaacccacgtcaataagctaaaatatactgaaagtccagaacaaaaataa

SEQ ID NO: 186860 - DNA, 112 bp, Arabidopsis thaliana landsberg
catgctcgaaagggatatcaataagccggagaagaatagagcctctcgagattggaagaaacaaaaacaccatacacaacaatccaatcatcccaaaacgcagacccgttaa

SEQ ID NO: 186861 - DNA, 66 bp, Arabidopsis thaliana landsberg
atggataatgatgagtgtgataattatcgacatgatcaaaggccggccacaacgattgtaaaagtt

SEQ ID NO: 186862 - DNA, 78 bp, Arabidopsis thaliana landsberg
atgccaagcatcccatcctctacgttcaataatgttggacatgctggtttcatagaagacaactctagagtagcctcg

SEQ ID NO: 186863 - DNA, 188 bp, Arabidopsis thaliana landsberg
atgcgagataaccacacttttagaatcggaaaaggcaacgaagcattacaggggctaacagacgaagaaattgaggtgcgtatccaagatctgaagaaggattttgaagcaagatacgccacctacataggacacgcaatgcttcaatttcaagacagggaatccatagtggccccgtacaactttaa

SEQ ID NO: 186864 - DNA, 506 bp, Arabidopsis thaliana landsberg
atggaaggtccaattccaccttcaatatcaaacttgacgaacttgactgaattgtaagtatgaaaacagtgtaacataccattttctgcatgctcgtccaaattcttgaccaagctctattttaccaggaggataaccgatttgcgtggacaagcggcctcttcttttccggacctgcgaaatctaatgaaaatgaaacgattgtaagttttaacattgaatcaagttatatactatgtttcatcaaacaatatttaacagtctgctaacttcactagggtactaagaaattgtttgataaggggacctatcccggaatacattggttccatgagtgagctgaagacactgtaagtcaaactctgctgcttaaaggctaatggtttgattaagatctcacattagagtatttgtgtgtgtgtgtgtgtgtgcagagatttaagctcaaacatgctaaccggtgtaattcctgacacatttcggaatctcgatgcatttaactttat

SEQ ID NO: 186865 - DNA, 305 bp, Arabidopsis thaliana landsberg
atgaccaatggaggaggtgacggctccgacgatggtggctccaacgatggtggtgagttcggcaacagtgtgaatctagtgagggcatgcggtggatccggcgagtggttctcgcgaggatggtggcttggaggacggcggtggtggtgaggacactggtagctccggcgagggcagtggttccaatgaggatggtggcttggagttggaggactgcggtagtggtgatgaagatgacggcggtagtggtggttccgccgatagcgaaactgtggtggtgatggttgttgtggtggtggttaatg

SEQ ID NO: 186866 - DNA, 148 bp, Arabidopsis thaliana landsberg
gtctgtgtcgaaagttcactaggttatgggcgcgatgcataggtcctagctcaggactctttatgttcagttcatcctacaggctcatgcgttatcactcgataagcatcctgcatttcatgcgaatgggcggcaatgctcgccaaag

SEQ ID NO: 186867 - DNA, 258 bp, Arabidopsis thaliana landsberg
atggagttcccggatcgaatcagtttccggagaatcgattttagtgaagcagctcctactggtgtcgttcttccttctacttccagtgagttaactcgttccaattccagtgagaataagattcccaacgaagatatttccgtttcaacttcttctcgctatttggtttttgataaaattctagctcttatgaagaaatcaccgggacgaagaggagataagactagtccggcgcggcggttagaccgtagtgatgcg

SEQ ID NO: 186868 - DNA, 784 bp, Arabidopsis thaliana landsberg
agagagccaaaccaatcgaagcgacaaaccctaattcccaattttttgagcaaaagacaccgtcagcaagagatgatgcgtgcttccgtgtatgccaaggtacgcgaatatgaacagaacctgcagctgaattctctttgtttgatccgctggtttcattgattatatatgattccaaatgcatttcagtattgtgtatccctgatctcgcaatttttcaaccagagtaggggtaagcaagaataatgtgtatttttttttctcttggatatgaatacaaatttcatggaaccctaagatataagaggttcaaatttggattgagagaatcagaacaaagtttaagattaagcgaaaggagtttggagaagacttataaaaggctagtggaaaaggaacaacaactttgtgaccgggtaaatcaggtaattaataatcataaccaataacgggcatttttattttggatatgatcataccaattttatttgatcaaaacaaatttagagatcgaagaaagtaaaacaacgtttgaaagaaaccgagttgagtttggatgagatttctacaaagcttgatgaaagacatcgacgactctttgataggcttgaggtaactaagaacgagttttttttgtgtctttcttttataaacactaattatattgaccctatgttatgtttggtagaaatcagtacaaaaattggaactaagtgaaacgaatttggaagagtgcttgaaaagctacgactatgccattacaaagttgaggaagtgtggatga

SEQ ID NO: 186869 - DNA, 133 bp, Arabidopsis thaliana landsberg
atggatcgaataggtggccagtgtatttattcagattatcgccggctagcgcgcgcccgaattatgttgttcatacgtaatgagagtacgcttatgaacgatgggtggtctatgatgatcaagaggggtcgag

SEQ ID NO: 186870 - DNA, 126 bp, Arabidopsis thaliana landsberg
atgggaaggggcaagatcgcgattaagaggatcaataactctacgagccgtcaggttacgttctcgaagcgaaggaatggattgttgaagaaagctaaggagcttgcgattctctgcgatgctgag

SEQ ID NO: 186871 - DNA, 448 bp, Arabidopsis thaliana landsberg
gacggcggtgatggtcgcaaggagtccgttcggcgtgacggtcacacccgggctaccctgcgtaccatccgttgcacggtgtccgtcgccagcccggtcagatgatcggtcatgaagtcgcgcacgcggtccacggtggacggtccgttatccgcatgctcctcgttctactcagcgtccgcgcggtgggcgaaacgggagcggtggcgcatcccgtcgcggaggtgatcgatctcttgctcctgctcccgcgcgatcttcaggagccggcgggcgcgcccctcccagatctacgactgatcgtcctcatgatgatggtgacggtgaccgtgcttcgtctcctcctactcatcgtcctcattcccaccgacggtgatgaggccgatgagcagacctgccccgaacgccgagcccaggatctggaccggtcgttcgcgaacggctctca

SEQ ID NO: 186872 - DNA, 321 bp, Arabidopsis thaliana landsberg
atggtaaaaacatacaggtttatcgccctcctcggcgatggtcgcgagcgatatagcgacaaagaattgaatgcagagtggcccactgagccgattgtgatcgatgcgttcggattttcggacgtttaccggtattcgggagtggtttttctgaacgaagaatggttcgggaaatacagcaaaaactggcgcaacgatactacggagatcgataagctactggtgaatttggtcaaatattcagcgaaggaagcgcattccgagaacctggccaagattaaaagcaacctggcttccccgccggagacggtcgaggaagcc

SEQ ID NO: 186873 - DNA, 520 bp, Arabidopsis thaliana landsberg
acggggaccatacagaactttctccctatcatcacactgagtggtgtgcaactcccgctccactatgcgcagcagtcttcagcatccatggtgtcagaagagtgagcaaacactgggggatgacctctcatgaactcaacacgcttgttcctgggcatcggaggcatctgaggctgaggtggtggctgctgctgctgaatggcggccagagtctggcgatggcgtaaactgcctgagtctgcatgaggaacatctgctcgatggtcgttgggggcgagggtggcagctgctgttgctggggtgcctcatcctgcggggctgcatgctcctgctaagcacgccttcctcctctgcgcctgttttctacatctacagaatgcaaccacacatcagaactgatcttgcaacttgcagcataagaaaagagtatagaatccttaacaacactgaacagatgaacatcttcactgatctccacatagactacacagcttctcagataaagaggaaagtggagtaa

SEQ ID NO: 186874 - DNA, 761 bp, Arabidopsis thaliana landsberg
cgatgtaggaagcggcgcgattgttgttgcaaatgtaggtggacgaaaaagctcgaggaagaaaactccggcggtgaagaaaaagcataatcgccgtcacactgaaggaggaggtaacggacttttctcgtgttttagtaatttgtgcggcgtggaatgcacattcgtgtgtggaggcgggtcggatcaagacgggtcgaaaaagaaaggtgggtctgggcgtttgccccgcttgggctctgctgatgatttgagttatttatgattatttttaatttttaggctgaccaatattcttttattttctatatatttggtttgtgaatgagaaaatatttgtgaatatttttaaacatttctcttttaaaatgtcattgagaaatattgcatgctattttcttattacaattgatgtacagtacactaatacacatgaaactataaggtaagttcagatagtttgtaaaatgtaaaaatttgcataaaatatactcttgatattttgctatcaagctatatgattttatatttaaatttttggcaaatgtgatcacgtggaccgacgaaataaaagatcactttatgatggattcggttcagaattttaaatcaattaattgtcgcttatagcttagtttgacacaataattaaacttagcgagattaaaaatagagaaaaaggaaataaagaggcgcgaaaaaggggatttgtgtcttgcactaaacgggtaaacatccgggtggtccgcaaagaccattga

SEQ ID NO: 186875 - DNA, 11 bp, Arabidopsis thaliana landsberg
atgcccggctg

SEQ ID NO: 186876 - DNA, 99 bp, Arabidopsis thaliana landsberg
atgtgtcgtatcgttgaggcgatgtcgcttaccgatttgggatgtaagaccgccaaagggatcaactggtatcgatttccaaaatctttggaggcgtga

SEQ ID NO: 186877 - DNA, 635 bp, Arabidopsis thaliana landsberg
atggaggtgaagcagggactcactctgtttgctaggaaccaggacatgaaggttcttgacgctgaaagcggacacgactttttgtggatctacttttcattttccttgctatccctttggagtctgtatgggaaatcactggaagcaatatcgacctagtatgcattggcaacttttgtagaagcttgaaggacttgagctctaggggaggcacagatgcatctactaacacatgtatgcttccttggcaatatagtttgcagaaaccgttgcttggggtcagttatttaaacagtgacggtagttctcagtcgacacctcatggtagcaatgggttagttaagagaggggcaacatacattgtctcagatgatcttactatttgcggaaagaagaagtttgatgtgaacttggacgatatttttgagcatgaaatcaacattggcaaaacacatgtatatctatattactattctttcctgatatttttttttgaatctgacactaatccaggccataggtttactaagagcctcattcgtgacatccactgccttgactacggctttcgggagctttctttcagagaaacgactctaaagcatcaatcacatgccctctgtggagcagattga

SEQ ID NO: 186878 - DNA, 434 bp, Arabidopsis thaliana landsberg
atgcccaatgacgccttcagcaaaagtactctatcgcagcctcggagccctgccagggcaaatcactctatcgcaaccccggagaagcaagcagctcagtttcactcaatcgcgaagccggaggaatcaccccatcggaaccactcgatcaccagaaagcctatctgctcattctgcactcaaccagacaaggtgagaacaaagaagagaattgaagccaaagtaaccactcgatcaccacctcatcacatccacccgatcgcactcgatcacagggtcgcaggaccattcaatctcgtcttcactgcataccactcgatcgcaaggcggagtccctgaagcccagtttgatcaatgacatactcgatcacagggaagctcatttcagcccatcagatgccaatgacacattcgatcgcaggatcatgacgtga

SEQ ID NO: 186879 - DNA, 223 bp, Arabidopsis thaliana landsberg
  unsure (1)..(223): unsure at all n locations
atgagtaataagagcgggtctaataagcccaaatatcgtgcacaacgaactggtcaaagattgggccacaaaagattgaggggtgaggcaagttggccactggccacaaatctaatctactacgggccccaactagatctcctcaagacaccccctttacagatttcataccgtttattaaactcntgttttttccttttntgtaggtcaagaagaagaataa

SEQ ID NO: 186880 - DNA, 272 bp, Arabidopsis thaliana landsberg
gtgatgaagaagactgtggattacttgtagaagaagttacctcgttattttcattccgagacacaaacctagccaaaatcaaaccagttgctgataatacaatagcaacacaaactctcaaaatcacaggcttcatagctcctccatctcttggaccagctgacccatccattaatctcttatgttgctttcaactccaaaaatctttctttctgactaaaaaagtttcctttcggttatgtgaccgaaacagagactcgagaattgattga

SEQ ID NO: 186881 - DNA, 55 bp, Arabidopsis thaliana landsberg
gaaaagataagggttgtcttctatgttcaaaaggcagcttttcagtttattgatg

SEQ ID NO: 186882 - DNA, 3551 bp, Arabidopsis thaliana landsberg
atgattctttctgtcttcttctatatgtttttgctgcatatttgtcgattagattgttttgttgcagttcaagactccaaaacattgttcaaaggttcaacattgatcaatgacagccatggagagactcttgtttcagctggtcagagatttgagcttggcttcttcactcctaatggaagctccgacgaaagaaggtacttagggatttggttttacaatttacatccactgactgttgtctgggttgcaaatcgtgaatctccggttcttgaccgttcctgcattttcaccatctctaaagatgggaatcttgaagttattgattcaaagggaagagtgtattgggacaccggtgttaaaccttcctcagtatctgcggagagaatggtaaagctgatggataatggtaatcttgtgttgattagtgatggaaatgaagcaaatgtggtttggcagagttttcagaatcctactgatacatttctcccagggatgaggatggatgagaatatgactttatcatcatggagaagcttcaacgatccatcacatggaaatttcacctttcagatggatcaagaagaagacaaacagttcatcatttggaaaagatcaatgagatactggaaatccggaatttcgggtaaattcataggatccgacgagatgccttatgcgatttcttactttctttccaatttcacagagactgttactgttcacaatgcctctgtgcctcctctcttcacatctttgtataccaatacaaggttcaccatgagctcctctggtcaagctcagtacttcaggttagatggagaaagattctgggcacagatttgggctgaacctagagatgaatgtagtgtatacaatgcttgtggaaattttggtagctgcaacagcaagaatgaggaaatgtgtaagtgtttgccaggttttaggcctaatttcctggagaaatgggtcaagggagatttttctggtggatgttccagggagtcaaggatctgtggtaaagacggtgttgtggtgggagacatgttcttgaatctgagtgtggttgaagtaggaagtccagattcacagtttgatgcacataatgaaaaagaatgcagagcagagtgcttgaataattgccaatgccaagcttactcatatgaagaagttgatatacttcaaagcaataccaagtgctggatttggttggaggatctcaataatctcaaggaaggctatttaggtagccgcaacgttttcattcgcgtagcagttccagatataggtaaacaatctcttaccgactttaaaacatatgaaatgcttttaaaatgcattaagatatataactgttgatggttaaattgctgttatcttgcagagtcgaccagtagagattgtgtgacctgcggtacgaatattattccttatcctttgagcacggctcctggatgtggcgacagtaactaccttagtttcaactgcaatatgtcgactggtcaagtcattttcaaaggatctaacagctcatacaatattacaagtatcaatccggatactcgcagattcttgatcaaaataaaagatgtggtagtaaactgcacaactgtaaatcagatcagcagactttcagagttaaagctatcttcgccttttcatctcacggggaagtgcaacgcagacacggttactggtggaactgaagtggagattcgttgggatcctcctcttgagccaacttgctctttatctgcagactgtaaagactggcctaattcatcttgcagtaaatctggagaagggaagaagcagtgcttctgcaatcatgattttaagtggaatggattcaatctaaactgcactcaaggtaaagctctgagtcaaaactcatttcaaactcttaatgctaagatttaccagtttttctaatgaaggttctcatgtagaacgaggtcgaggaagatacggggaagctaaaaccccggtggttttgatcattgtggtgacgtttacaagtgcagctattctggtcgttctgtcaagcactgcttcctatgtatttttgcaaagaagaaaagtaaacaaggaactaggaagtttaccaagaggagttcatttatgtgacagtgagagacatatcaaagaattgattgaatcgggaaggtttaaacaagatgatagtcagggcatagatgttccatcttttgagctcgagaccatcctatatgcaacatccaacttctcaaatgcaaacaagctaggccaaggagggtttggaccggtttataaggtttgattgtgatctttggatctgattttgattttagactctttgtttatattgaatggagaattaaatattttgtggcttgtgtgacgcagggaatgtttcctggagatcaagagattgctgtgaagaggctatctcgctgctcgggtcaaggactggaggaattcaagaatgaagttgttttgattgccaagctccaacaccggaatcttgttcgacttcttggctattgtgttgctggagaagagaaactgttattgtatgaatacatgccacacaaaagcttagacttcttcatcttcggtaagtagagctccttgtctcttctctaattagtctttcttctgttctgctcttaatgcaatgatctggttcttgcaaagaccggaagctttgccagcgattagattggaagatgcgttgtaatatcattctaggaatcgctcgtggacttctctatctgcatcaagactctagactgagaatcatccacagagatctaaaaacaagcaacattctgttagatgaagagatgaatcccaagatctctgactttggcttggctagaatatttggaggcagtgaaacatcagccaatactaatagagttgttggaacctagtaagttttgaacacttctatttgccttagcatcccattccttagcatttatggtaaaattaaacattttggtgtcctttcattgcagtggatacatgtctccagagtatgctttagaaggtcttttctcattcaaatcagatgtctttagtttcggcgtggttgtgattgaaactatcagcgggaagcgtaacaccgggtttcatgaacctgagaaatctttaagccttctaggccatgtgaggtttctaagactttaaacttgtttatgcagattacttgtctaaaaacttgaccgagaaacatatatatcaatgtgcaggcgtgggatctctggaaagcggaaagggggattgagttattggatcaggctttacaagaatcatgcgaaaccgagggattcttgaagtgcttgaacgtaggacttctctgtgtacaagaagatcctaatgatcgtcctacaatgtcaaatgttgttttcatgctcggaagcagcgaagctgctactcttcctactccaaaacaaccggcttttgttcttagacgttgcccttcatcaagcaaagcttcctcatccaccaagccagaaacttgctctgaaaatgagcttaccataactcttgaagatggaagataa

SEQ ID NO: 186883 - DNA, 765 bp, Arabidopsis thaliana landsberg
atgagacaggttgattctaagaggtggcgggtagttgaagttacacttgatcataaccatttactcggttgtaagttatataaatcggttaaaaggaagaggaagtgtgtatctagtccagtctcagacgctaagacgattaagctgtaccgagcttgtgtggtggataatgggagcaatgtgaacccaaactcgactcttaacaagaagtttcagaattctactgggtcacctgatttgctgaaccttaagagaggagattctgcagccatttacaactacttttgccgtatgcaattgacaaatccaaactttttttacttgatggatgtgaatgatgaaggtcaactacggaatgtattctgggcagatgctttctctaaagtttcctgcagttactttggcgatgtcatcttcatcgacagttcttatatatcaggaaaattcgagattccactggtgacatttaccggagtgaatcaccatgggaaaactacattgcttagttgtggtcttcttgctggagagacaatggagtcttaccattggttgcttaaagtatggctcagtgtcatgaagcgttctcctcaaactattgtcacagacagatgcaagcctttagaggctgccatctctcaagtgttcccaagatctcatcacagattcagtctgacacatataatgaggaaaattccagagaaattaggggggctgcataattatgatgccgtgaggaaggcatttacgaaagcagtttacgaaacg

SEQ ID NO: 186884 - DNA, 30 bp, Arabidopsis thaliana landsberg
atggacaatggagaagaacttgttgatcct

SEQ ID NO: 186885 - DNA, 619 bp, Arabidopsis thaliana landsberg
atgagactcaattacatctacaacttcagctttttctctaacaccacagactcatacttcacgtactctatctataaccagttgaacgtgtcacgcttcgtcatggacgtgtctggacagatcaaacagttcacttggttagaaggaaacaaggcatggaacttgttctggtctcaacctcgacaacaatgtcaggtctataggtattgtggctcctttggaatttgcagtgacaagtctgagcctttttgccgttgcccacaagggtttaggcctatgtcgcagaaagactgggacttgaaggattactctgcaggctgcgttagaaagactgaacttcaatgctctcgtggagacattaaccagttttttcctcttccgaacatgaaactagcttataattcagaggtattgacaagaactagtcttagtatttgtgcctctgcttgccaaggagattgttcttgtaaggcttatgcatatgatgaaggctcgagcaaatgcttggtttggtctaaagatgtcttgaatctacagcaacttgaagatgaaaacagtgaggggaacatattttatcttagactcgctgcttctgatgttcctaatgttggtgcttcgg

SEQ ID NO: 186886 - DNA, 151 bp, Arabidopsis thaliana landsberg
atggtacatgagggtgtactatgcaaggtatatgatgatgggatacgatgcatggaacatgactgtctacttctcatgtcacacgacaattttatctttcgaccttggtttcgttggtttacaccccatggtacaaaagagtgtgttccag

SEQ ID NO: 186887 - DNA, 518 bp, Arabidopsis thaliana landsberg
atgacaagaccaacattcttggggtcaaaagaaggagtaaacgagatacgatggggatggcgagatatccttatgacacgtggtaagctgaaacacttttgatggatgacaaagtcacaagggggacatgtgtagaaaggacagcttgaatgtgtcaaggcacagacgctgcaaggaaacggagtctgtgttggaaacagagcaagagtatgttcatgccacttgggatggtgcatagacaagtctggtggtttctgcacacaagcaaaattaacagcaaaatcgcaagcggagcaataataaaatatcttcttgagagatttttcgcagcaatagcatttcctccggctactaaacagtttcaaggagacgaggagaagagaatgtttaggatgaaaagggtgtttgatctcaactggagccttgatataacctttatggttctcgccattgcaaccttggcagagaaaatgggaagcgagttctcctcctgtgaaccggaatttcacccagtttga

SEQ ID NO: 186888 - DNA, 606 bp, Arabidopsis thaliana landsberg
atgcataaacttgacaaggtactaaattcttattgatatcataatgaaccatccaatgggcctgactagtatatcactttaattgatgtagtatatatcatttatatttgattatgaagaaagaaagatataaatattaattttgtttgaaaatccctaccaaaaaaaaagaaatttgtttcaaaatagttgaagacagcaatgttttagctacaagcctataactgaaaaatgaatgtgcattagtgtctcactctcatcaaccgtggcccagaaagctgtatcttttctttggatggtaaaaagtgagaacgagaaagaggataagggcaatggaatgttgaagttgattccttgtcgtcctgggcaatagaatgtatgatctcgatagatattacgagttgctcatttgcttccgactgtgccgatcttatatctctttttgaaagaccttagaagtggccaaattttttagctgagatggcgacatttggttcccttctttgtttttttctttcttttagtattacttttctttcagccgttttaatgtgcggaccgatagtcttgcaaaaaaggcacaagctcataatagtcttttttcat

SEQ ID NO: 186889 - DNA, 599 bp, Arabidopsis thaliana landsberg
atgttactacagcttggtcttgatgttcgagttactggagatgctggtactggcggtggcgctcatcgtaatacaggcggtgaagccctaaaacccgcagttcgatatgcaacaagtgacagtggtgtacatggggatctcccccccaagcgctgttctggatccaaccacagcctccctctccctcaccatcaggatgctattcaccgccgtcaacccaaacaaggtcggaatcaggtacggtgagtccagcttcacggtcatgtacaaaggcatgccactggggagggcgacggtgcctggattctaccaggatgcgcacagtacgaagaacgttgaggccaccatctccgtcgacagagtcaatcttatgcaagcccacgccgccgatctcgtcagagatgcttccttaaacgaccgagtggagctcacagtccgcggagacgtgggggctaagatccgagtcatgaatttcgattcaccgggtgttcaggttcttctcccttcttttctccccgcattttgctcgctcagcgatctggcctaaccagcgcagtgtgaacacttttgacaaagaaattaccacactttttgagtaa

SEQ ID NO: 186890 - DNA, 1387 bp, Arabidopsis thaliana landsberg
  unsure (1)..(1387): unsure at all n locations
atacccactatatttgacaagcaaggagctcaactgcttgctgttgcttgccttgtcgtctcaagaacgctgatctctgaccgaatagcctctttgaatggtaaacatactccatattgttacttgatcagttttattgatagggttccttttctaacaagcaaccatgatttttgcagggaccactgtgaagtatgtcttggagcaagataaggcagcctttgttcgtttgattggtttgagtgttctccaaagtggtgcatcttctataattgctccttcactaaggtaatctttcctttttatgcatttttagtgtttcgaagtcccacccgctatgatcaccttgtcacgacttactaaattgctcaatgaattatgttgttttcatttcttgcatgttgataaaaaagcaagttattgaactaatttaaagtagcttattagttatatttattaaacacctcgctaatatggtttcacataactctttttgttacactcttcaggcatttaacgcaaaggctagcgttagggtggaggattcgtttgactcaacatctgctaaggaactatttgagaaataatgcgttttacaaggtcaattcacgattatgcttttttcatgcattgtgaatgatgattatgaagcatgaacttgtgttattcagtgcaacttgacctaaaagaaagcatgatgcgttatttgcacttataagaaatatgcagagattctgaaagatccataccaatttaaatttacattgatttgngattgttctatgcttctgactgtttatatgtttcttgtaagttgatgtcgcatggctagagacactaaagatctcattgggttcatatctattcaggttttccacatgtcaggcaatagtattgatgcggaccagagactcactcgtgacctggaaaagttaaccgctgacttgtctgggcttcttactggaatggtaaagccatcggttgacattctctggtacgtacgctatgttggattgatttctaatatttgtttcatggttcttggtttgaattatcataatgcaaaaaaaaaacaaattgaaggttcacctggaggatgaagttactgactggtcagaggggagttgccatactttacacatatatgttacttggtcttggttttctgagacgtgttgctcccgatttcggtgatctagccggtgaagaacagcagcttgaagggaagtttcggtaagttttttacgcttcttccagtttgcatatgatttgtgttatagcgactatcagaccaacttttttctgcttatgtaagtttatgcacgagaggctgaacactcatgctgaatctattgcattctttggaggtggagctcgagaaaaggct

SEQ ID NO: 186891 - DNA, 300 bp, Arabidopsis thaliana landsberg
cgatacaacactggcccgactgagtgcgggagacctatcggttgaaggcaaccgtatcttccgagcaggcggcaccgacgttcccgtcgcggatggcgggaccggagcaagcgatgcgtctggcgctcgcacgaatcttggcctggtcatcggtacggacgtgcaggcctatgacgcggacacgctgaaagccgacgttgcggacacgctgaccgtcgggttcgatgcttctgactacgatgccggtacaaaatcgtccgggacgttcgcaccgtctgccgccaacggcaacttccaaaa

SEQ ID NO: 186892 - DNA, 347 bp, Arabidopsis thaliana landsberg
atgaaccactgtgagccggcgctatctcgcccggcgtcggctcatgcccacaccgacctgcacgaaccccggtccatcgagaccgctcgccggttcggccggccccgtgaagcccggccctccccaacccgactgcgtcggatcgccgccctggacgacgaagttcgggacgacgcggtgaaactcgatgttgttgtagaagccgcgctgcgtgagcgaagcaatggtggcgacggcccacggtgcgacatccggccgaagctcgatgtcgatgtccccgcgcgacgtcacgaggtgccagacgacgtgcttgccgatcacggtcgtcacgtcgaccggcggcggcg

SEQ ID NO: 186893 - DNA, 123 bp, Arabidopsis thaliana landsberg
aaattttttaaagctatgatgatctctcaatccggtagattcgatgcttttttgggttggattcgagatcggacagaaggcaggcggatacacatcgatccaggactgattagcggcggctaa

SEQ ID NO: 186894 - DNA, 460 bp, Arabidopsis thaliana landsberg
aataaagggaatattcttcgaaaggccttctctgatgtttccttggagagaaaacgaaatataagccaaaacgacgagcaagaacaagaaggagaggtagaagtgaaccaagtgaaatgtgattgttgtggtatagaagaagaatgtactatgcaatacatagccaaagtcagaaacttgtattcaggcaattgggtttgtggtcatttgtggcgaagtagtaactgagagacttcggaaagatcctccaatagccgctgggatacaagaagcctttgactggcacaaaggaatttgtgatgccttcaattctactacaagggtgaaccctaaactcgacttcacaggatcgatgagagagatcgctaaacgaagcagtcagaacaggatgatgtcagacttttcgataggatccaaaattgctcgaacaatcagttgtgatccaaggctcgagacttga

SEQ ID NO: 186895 - DNA, 150 bp, Arabidopsis thaliana landsberg
gggggggacaatgttttatctgattcagtgcatgatgatgacgaaacagtatcagaaaaaaattctgaaaagattgttgatgatcagttatggcgtgagatatccatggagacctgcaaggattcagtttgttccccacaaaagcatctg

SEQ ID NO: 186896 - DNA, 341 bp, Arabidopsis thaliana landsberg
atgctcttttacctgaacgcgtatttgatgattttgtatggatcagataatcgaggaagagcaagttcagctgaggaagtaagtaatgtatctaaatctgggattatatttgatcgctttgttcaatttttaaaggaatgtagtgtacattttacgatcttagcttctctccagctagcttaatcataagtctcagctagtgtttacttgctttacgagtgctttttcttcctgtttcttagacgtggataaattttatggaggaaacacttaaagttactgaagaactggtccttagttattacccaatcatttggaacgctgttgctctaagaatgtga

SEQ ID NO: 186897 - DNA, 288 bp, Arabidopsis thaliana landsberg
atgtttcgtgatagttttttgtttgcccgtaccatcggttgctttggatgctttggcagttctggtagtagaaaccaacaatcgcctaagccctacgatgatgatacacattcctgtgatagtgatgtaactagcactgcaagaggagaagaagaagaagatgaagaagaagtagagcagaagagccgctctaaacgatctgaggaaattttgaaatatagattagataatggattaatctgcagacacattccagtgagagaaactaatgaactaaaacgtggagag

SEQ ID NO: 186898 - DNA, 58 bp, Arabidopsis thaliana landsberg
atgtcgatgaaagaggtagatattggtatatgtcattatcacaaggaagataataaag

SEQ ID NO: 186899 - DNA, 414 bp, Arabidopsis thaliana landsberg
ggacgcaggaacaatgctcgtttcttctcatcattgcctccgtccccatgcttggtgctgaccactaagaagttgcgagggtctccagaggagggcctaatcgtgcatcacaagttattcgaaccggctacggaaaaaaaagtgtacggcaatgagaagaagtatcccaaagagcttcatggagctccgcttctgggagcatcgaaaggttgggtcgcttttttcaaggagaaagacattagtgtgcatctcacggatctgtacaagccttgtgtctcatctccaagagtcatatcattaccatcactcaagctcgactataaacccgcaactcatgccacggaagtgtgtctctcttcgtctgatcctgtccaagacgactattacgtggctgcaaagttcaatgactatcac

SEQ ID NO: 186900 - DNA, 94 bp, Arabidopsis thaliana landsberg
gaattggctgcgaggctttccaaaagagggagaagaagaggaagtagaagaagagaaagaagaagagaaagaagaagagaaagaagaagcttaa

SEQ ID NO: 186901 - DNA, 455 bp, Arabidopsis thaliana landsberg
ccaaagccgcaactctagacgaaatctcaccggtggtagctgtagctgtagcggcggcagtagcagtggcaaaaactcgattggcatcagatctaacaccagtgatccctaacttagcagttgattccgtcgagaccggaggctgggagaagctattaacggcacataattcgcgggaccaaggaatcagtctagggtttggtaacgaagaagaaacagagattcttgaagagaaacgagaaacaacagatcttcgccacatcgttaagccgtcagaattttctacgcgttggaggagaacgagagaaacttcttcatcatatgaacagattggtttcagattacgacgagtcacggtgactccttcacttttacaggaaatgataattaaaattaatatatgggtcaatcaaatatatttcagagaattcaggggtacttgtataattaaataa

SEQ ID NO: 186902 - DNA, 1468 bp, Arabidopsis thaliana landsberg
actctttgtgggaccaggagagctagttttgctgctatatctgtttatatctctgaggatgaatcatttcaagaaaagagaattgatttcgtggagaatcgtggaattcgacctaatcatcaaactttgaaatggcttcttgaaggatgtttgaagacaaatgggtctttagatgaaggaagaaagctacattcccagattttgaagttgggtttggatagcaatggttgcctctctgaaaagctttttgatttttatttttttaaaggagatttatatggtgctttcaaggtgttttacgaaccgttttagagaacgatttttacttgggtaagattaggggggagttagcttctaggaatttgattggagaagtgtttggtctttttgtgagaatggttagtgagaatgttactccgaatgaaggaactttcagtggtgttttggaagcatgtcgtggtggtagtgttgcttttgatgtagttgagcagattcatgcaaggattttatatcagggcttgagggatagtacggttgtgtgtaatcctttgattgacttgtactctaggaatgggtttgtggatttagctagaagggtttttgatgggttacgtctgaaggatcatagttcttgggttgcaatgatatccgggctttcgaaaaatgaatgtgaagcagaagccattagattgttctgcgatatgtatgttttaggtatcatgccaacgccttatgcgttttcaagtgttttaagtgcgtgtaagaagatagaatctcttgagattggtgagcagcttcatgggctcgtattgaagttagggttttcctccgacacttatgtttgcaatgcacttgtgtctttgtactttcatttgggaaatttgatatcagcagaacacatcttcagtaacatgtcacagagagatgcagttacttataacactcttatcaacgggctttctcagtgtggttatggtgagaaagctatggaattgttcaaaagaatgcaccttgatggacttgaaccagacagtaatactcttgcgagccttgtggttgcatgttcagctgatggaactctgtttaggggacaacagctacatgcatacacaactaaacttggttttgcgtcaaacaacaagattgaaggtgcgctccttaatctgtatgcaaaatgcgctgatattgaaaccgcccttgattattttcttgagactgaggttgaaaatgtagttctctggaatgtgatgctagtagcttatgggctattagacgatttaagaaattcttttaggattttcagacagatgcagatagaggaaattgttccaaatcaatatacctacccgagtattttgaaaacttgcatacgacttggggatctggagcttggagaacaaatccatagtcaaataataaaaactaactttcagctcaatgcctatgtttgtagtgtgctcatcgatat

SEQ ID NO: 186903 - DNA, 535 bp, Arabidopsis thaliana landsberg
actctctcggtgaagtatgagatactttgcaaaacttttgattccgaagctaaatctgtgttggaggtttgccctttcgctgcaccactcacatttatgacaaaactgctgatctaatataatatgtgagtgcttcttttgctttttatcttggtattgtattattaagactgctatgattgctttattttgcaagaagaatgatgaagaacctaccaaagattgagtatcaagcatggaatagcacatatagattcactgtaagtttccactttggtctactggagatatcagcaatcgtttattgtttagttttctgaaaaatctgttgcttgaatctgacagaccacagaggggtgtgataagatgcatttagaaaacagacgaatccgatgaagacttggttcctccaatgacttggttcacaccagaggcagatacagaactccaacaatgcctagcaactgccaaattgaccattttgaaacctgagtcctcgcaacaaaccagtcgtttgcaaccatcggatgcctga

SEQ ID NO: 186904 - DNA, 177 bp, Arabidopsis thaliana landsberg
ctatatgttgtggaggaggatgacaagtgggatcacacagagagatttgagaccactggagagagagaagcagataaggcacgcgccagcctctgcttccacatagccacatacttttcagattttggatttcttgatgatgtgattcttaatgggcttaaaaacgggccaatataa

SEQ ID NO: 186905 - DNA, 705 bp, Arabidopsis thaliana landsberg
gttgttgattcaattaaacaaggtcatcaagcaatgatatttgttcattcccgaaaagacacttcaaaaacagctgagaaactggtacatgatattttacctttttatattcagcttctactttttacctgatgtcttccaaaacgcatgcatttgtggttttcctgaaatcttaattattgcatatgagaatgatctcgccgccgaaaacatggtttctcaaacgattttggaatccagatctagaagtacatgacttttatattttcactttggcaggttgatcttgcccggcaatatgaaactctggatttgttcacgaatgagactcatcctcaatttcaactgatgaaggtaaaaaatggaatatatattatcttttttaacatcattgttggtgttaatttctcaagattgtttctgatgtatctcagaaagacgttatgaagtccagaaataaggatcttgtcaaattctttgaagctggcttcggaattcatcatgctgggatgttgagatctgatagaacacttacggagaggctgttttctgatggtctcttgaaggtacaaaacattttgtctgcttgctctttactatttaaatacttatttcccgcaacttgttttggttatacaggtgcttgtttgcactgcaactcttgcgtggggtgtaaatctgcctgcacacacagtcgtaattaag

SEQ ID NO: 186906 - DNA, 324 bp, Arabidopsis thaliana landsberg
atcctaatttgaccaaagcattattaggcgaatctttagacgaatctcagttctttaagcatctcatagaggatgcaggtggtttacaaaggtaatatataaactcaatgttatccaaactgctgtcttagtgggacccagagatgtttgaaagaaataataattataattgctgtaacaagtacgcgttctttttcaacagcgaatgctgtcgaaaaggatggtgtggtatgcttctctcaagggacatactataggttgagggataaatcgcagttccaggtcagagttcagagttcagcctaccgcaaaaatcattttgcg

SEQ ID NO: 186907 - DNA, 737 bp, Arabidopsis thaliana landsberg
atgcctaaggtaccttgattgtatatgataattagtttgcgttatttttggttgtactgcttagtttattgtgtgaaagtcacttctaggaaaacaaattatgaactgttacacagaagttgctttcttggtaaccatttagcgatcaaatgttattaggaaaactgaagctcttttggattagaagctttaaaagtctttcatcttgttgataggccttcttgcattgttaactcttacaaaatatgtcttgaactttcttaatttatcgttgttgcactgtttgctttacagatggtaagaatgttagatatcctggcagaatacctgtctcttagaggtttccagttccagagactggatggtagtactaaggcagaactgcgtcacgaagcaatggatcattttaacgcacctgctagtgacgacttttgctttcttctttcgacccgagctggtggactgggtatcaatctggctactgctgatacagtcgttatatttgactctgattggaatccacaaaatgacctgcaggttttgcctccaataaaatttttctacctttggattattactctttaatactaaatgttgataatggaatcccaaccctattatatcaggccatgagtcgagcgcatagaattgggcaacaagaggtcgtgaacatttatagatttgtcactagcaaaagtgttgaagaagaaatcctggagcgcgccaaaagaaaaatg

SEQ ID NO: 186908 - DNA, 222 bp, Arabidopsis thaliana landsberg
atgagtccattggactttgcaagggaatggtctgaaaattccaaacttgccaaaattatgaacgaggggatgtcttatcacatagttgtggcagatatgaagtcaaaatcaatgttttatatctcgtaagggtctgcaaaggattcacatgtccatatggaagaagtagactttggtgtgcatacccttacttcttccggactcgatatccaattttccgag

SEQ ID NO: 186909 - DNA, 81 bp, Arabidopsis thaliana landsberg
tcttcatcttatccaaaaactttacgttccctgctctcattgcgctaaagatctcaggattcatcggcacatattctccgg

SEQ ID NO: 186910 - DNA, 559 bp, Arabidopsis thaliana landsberg
aaaagtacggtgactgtgaatttaaaagttgaagaagttccgataatttctctattctcaagagaaaacagctcgaagaactcatcttcgtcttcttcttcatcttcttcttcgtcttcctcattaaagaagcaaaacggcaacgaatctgtcgtttcagatgagaaacgattcgtgatgatgcaaaagtacttaaagaaggtaaaaccactttacatcagagtttcacgtcgttacggcgagaaattacgacactccggtcaactaacagctccgtcgtcggcgagatccacggcggagaaagcagattcaccggtggctacgaagactaataataaaccggggaacaacatcaacattccagctggtcttaaagtagtgaggaaacatctcgggaaaagcagatcgtcatcttcaacagcgactacaacgtcgtctactgcggcgactgttacgactcagtctgagtcaagaagacgcgatgactcgcttcttcaacaacaagatagtattcaaagtgccattttacactgcaaaagatctttcaattcctctagag

SEQ ID NO: 186911 - DNA, 172 bp, Arabidopsis thaliana landsberg
caccaacagagtatttatggtggggtggacaacaccctggtgtatggtgggtcatcatgtgaccatggcattccggccacacattcccacggcgtcgctacggatccaaaccccgacatcaccccgccccacttctacaaactagaattccccacctacgatagcactacag

SEQ ID NO: 186912 - DNA, 647 bp, Arabidopsis thaliana landsberg
ttaatttggaatacttagttgatgcacaaatcaagctactaagcatccgaaagaatcatgtttttcccaatcttggtaacgtgcgtaagcttatgcataccgtcaccaatgttaagaagctttacttatctcctcggactcttggaatagtatgctgttctgttctctcttataaaaccaaacattgaagttacatttgcagctggttaatgatttttttgggtctttttgttgttcaggtgcttggtctatgttctcatgcaatgccagtgttcaacaacctcacatacttagccattgagactagcgtggatacagcgtggcaagcaatgccggttctccttaaaacttgttcacatctagaaaccctagtcattaaggtataaaacataaactatcaaatgacttgaataacacgtttgtagagattcagttcagggaaatccttaatgtctcttctctgcttttagggtggtctcttacactgtgtcacatttgactgtggggacgcttgtaactgcatttctcgagaggagaaatgtcgttcactcgcattttttcctgtgaagaggttagagattcttgagtttcaaggacagtttgaagaaagaaacatgaccaagcctttttttgtactatttgccccg

SEQ ID NO: 186913 - DNA, 651 bp, Arabidopsis thaliana landsberg
atggagctagataaaatatctgtttcaagtatcagagcaactcatgtcccgctatatgacgggagccaaacaatgaagctgcaactcttccttggggacagaccccttcagctccattgtcctcgtctgaaagtacggtttggaatcaatgggaaatttatggataaagctggaagacggaggttgaactttgtaattgatctgtatccaagtctctgcaacgtacttcaagaatgcgacagtgctgcacagacaatatctgttgattcaggcagtggttctgactggaaccctctagtcattccaatgaaaggatttctgaactgtcccactgcaaggatacagtatgttttcctatatatctcctttacttatttcatttgctttttttcctgattatttctttgtatgtgcagtatacccacagagttaaatggagatatagatcggtacgcagctgagatacaccagaaagagttctctggagctactgctactcagaaactcatttctagcaaccccaaggctgaagagattgagtctttgttgaatccgagaactgttcttgacgctttcttgtctctggagccatatgattatcagcagagagccggaatccgtctagttgctagaaagcttgttatacattag

SEQ ID NO: 186914 - DNA, 201 bp, Arabidopsis thaliana landsberg
acacgtcaacaaacccatgacatcttcgaggaacaccacgacaggatcgaggtaaatccccttttttgtcttccgatcgggtattggccacggtttcccgagatgcagtcgcaggtcttcttgccgacgatgccaagtggagcgttcattgctaagtgcaacttgaacaatgaacgcaacggctgtgcagcactcggagcg

SEQ ID NO: 186915 - DNA, 145 bp, Arabidopsis thaliana landsberg
agatctcccacattttgaagggaaaaaaggttgcagacccattttacgtgtttatggtcaggaccctaaagcccgaaccaacaggagttccatacttctcttctccacactaaagacaaagaaacacactcgtctctaccaacag

SEQ ID NO: 186916 - DNA, 427 bp, Arabidopsis thaliana landsberg
tgtatcccctagagaaggcgagacttgggcgcttttcaagaactgggatattaagtggtcttcagagccagattctcaccgcaaatatgagtacgaatttgtcgagattctgtcagattacgatgatgaagctggtgtatatgttgcatacttacataaagcaaaaggatttgctagtgtgttcctctgaatgggaactggttatgaaggtatatttcgtattttacctcgcagtttgtatcggttctcccatagggtcccttccttcaaactgacaggagtgaaaggaaaagatatgccaaaagatgcttatgagctagaccaagctgccttaccagaaacaattgaagagatcattgtgccttcaaactctgagagcaatataaagtctaaacgccaagccatctacattgctagcaagggatag

SEQ ID NO: 186917 - DNA, 1321 bp, Arabidopsis thaliana landsberg
ttctatgattcacacatcctactgttcttcgatgccatcatgactctaatggtttacaacaacaacattatcctctgtaggaaaaacaaccacacttcattttctaaatctctcggattccaaaacttcagacgctttttatggtgatttagtcacaattttctcgaaaattgacagtttttccaaattttaccttattttatttattttcataaaagggcacattatccaattagataactcatatgcctgattacaatagcttaattccacaattttacaagcccaagtccatttattaaaactcatttcacatgcccagtaatcaaaacctagaaacctaggtaaagatatttataccatcttttcacacatttcagtctattttttcgccgcggccgtaactcaggcaacatacatcaacaatgatctcttctccccaaaaaatcaccacactatatgttcaagaaatcctagattccaaaaatccagacgcttgtcatgatggtttagtcatatcttccacctttacattttcaaaggttcggtaatgcttctaccacatttatgacaggtaattctacaatggtatctacaatcatatttagaggtcttaatgggaattggatttagattgagttgattgatttaataagtcgatagatttgtaaaaatttcaaaagtcttgttaaatttgtagggagtatcaccacatccgtcttcaagaactcctagatctaaaaatccagacgcttgtcatgatggtttaatcatatcttccacctgtacgcttttcgaaggttggtaatgcttctaccacatttatgacaggtaattctataatgatatccataatcatatttagaagagatgttaatgggaattggatttagattgagtttattgatttaataagtcgatagatttgtaaaaatttcaaaagtattgttaaatttgcagggagtatcgccacatccgtcttcaagaactcctagatccaaaaatccagacgcttgttatgatggtttaatcatatcttccacctttacacttttcgaagaatggtaatgcttctactacatttatgacatgtaattctacaatgatatccacaatcatatttagaagggatgttaatgggaattggatttagattgagttgattgatttaaaaagtcgatagatttgtaaaaatttcaaaattgttgttaaatttgcaggaagtatcaccacatccgtcttcaagaacttctagatccaaaaattccagacgcttgtcatgatggtttaatcatatcttccacctttacactttttgaag

SEQ ID NO: 186918 - DNA, 118 bp, Arabidopsis thaliana landsberg
atgaacagagaatccaccattaatggaggcaacaattcctctgtatcttgtcataaatgtggtgaacagttcaataagcttgaagctgctgaagctcatcatctctctaaacatgccg

SEQ ID NO: 186919 - DNA, 237 bp, Arabidopsis thaliana landsberg
atgcgccggcaccgggaaaccgccgaggcgacattggcggagctggggctgcccaacgaatgggccacggacagcggcttcaacgagtacgatcacaaaagcctgatgtccgcctactggccggaatcccagaaccgcgcggcgctgaatcagtggctgagcgagcagccgcagccgcgccgggcgtttcaggcccgtttcgaggaagcgctgcggcgctggcaacgcaatcaggat

SEQ ID NO: 186920 - DNA, 318 bp, Arabidopsis thaliana landsberg
  unsure (1)..(318): unsure at all n locations
atggcgacggacgcgggcttcaaaatcaagggcggaaagatcggcatcctgctgctgcaccgcctctgcggaacgccggtcgaaatgcgcttcgtcgcgagcggcctcgccaannnnnnnnnnnnnnnnnnnnnnnnnnnnnnnnnnnnnnnnnnnnnnnnnnnnnnnnnnnnnnnnnnnncgtcctggaccgactggtatcgcagcgccgaccaggcgctcgacgatctgaagaaggagtgcgacgtcgtcatcgccggaggcctatcggcaggcgccgtgcttgccgtcctgctcgccgcgaagaacccgacgaaa

SEQ ID NO: 186921 - DNA, 118 bp, Arabidopsis thaliana landsberg
gtcaaacatagtagcagataaaaagttacagcctcatcgacctgatggtcgagtgactggtcgatttgacgagaacacactctcggacataaccgtgatccaccatgtggtcgattag

SEQ ID NO: 186922 - DNA, 165 bp, Arabidopsis thaliana landsberg
ggttttcaacttcatgaaacaatccgaaacagttcagctaaacaacaaactatttctcgatctcctctcttcctcatcatcggccaaacccaaaattttgcacgacgtgttcatcaaccacagaggatccgacacaaagagaaacatcgcaacattgctttatga

SEQ ID NO: 186923 - DNA, 567 bp, Arabidopsis thaliana landsberg
  unsure (1)..(567): unsure at all n locations
atgcttgtgggagtagctgaggagatgctgaagcaaaagaatgcagagtctgttctgtttggtggtaaganaatcagtgaagaaagcaattatgagaagctggattggttagccggtgaactagtgctagaacaccagaggaggagttgtagaatcgctcccactgtagcgttcaagcaatccggcgacagaagagtcgatcaacagaccattttcaaggatattgattgtatgttttgaatatttttaaattgtatagatttgtgtttaagtccagaagaaagcaacattatattcgaattaggctttttattaaatcttaaagatatgtgtaatttttgttttactgaattgttattttctattgactctaaaagagcttcgtcaacaaaattttggaatgcagagagcgtcaaggctaatcaacaaaacaagtttagcctaattaccttgactcacaaagattaacacatttcttaaacaagaagatagttgccaacttacctttaaggacccttttagtctctgtttgttacagagtcattgattctgcaaaacatcatatga

SEQ ID NO: 186924 - DNA, 2258 bp, Arabidopsis thaliana landsberg
tcaagaaattcttccatccacgaatgccgaaacagtggtcatcgagggtgacaatggtttggattctgggatccctactgaacagcatgtcaccgatgtaaaatgtgagactgagacggctgctgtagtgacccgcgtaacgacatcggccctgggcaagtgtccaaattttcgaaagttgccgaatgcatggccaattgaccttaggtgcccaaaacaccatagaataccaaagggcaagtaagggcaagaatgggcacgaatgggcaagtttgggcaagaatgggcaagaacggacgtgccatgggcaaaagtttgccccgccgggcgttgaccgaccgttgaccgcgccaaggacgcgtggctcggctaacttgggcctaagcaaagttgcttggagccgaattttagttgcttggagccaaagtttgggtggccacgtgtcattcatctacttgagtagagagcgtgtcatcgcgggtagatgacacgtggattggtgactctcccatactcatgacacgtggacatgctgactcgccattcccttgcctataaaaacccaactcgaccccaattgatttgtgaagagaaattgagcgggagtgagagtctgccgagtttaaactgtccgttcgattcaagttaggatcccatagccgagaactctgcccgaatcgttaaaagctttccattggttactgagtgagttctggataatggtttaagtttcataatcatattctcatgcattcttgattgatttcatgagttatatcaattgtgtgaatggttatattagattgcatatgtgatctttagattcttatgctattgcttatggttgagaggttgtgatgagatattgatgatactatgtgttgatttaactgtatgtttcataatatcttaaactctggggtcttggtacgtggtgcttgtggtaggaggcaacgaccataagcgtgccaagatcgtgatatgtctggccttcgtagtgaaccgtgctatcgtggggtcttgtaacgttgttacttgatcgtcatgtagtgcgaagaactcggagtgacagggctagctaccctggccgagtgtctacacgacggtatagcgtttggtactgatgctccagttgcatacctttgtggttgtaacacgggagatcacgggagtgtgtgtgtttggtgttgggattgaaggcagcatatcggcccctttaaaacttaataaaaattggattcttaatgcatgtgcatatttttttgtagttgcttcaacaagctaccttacattgccactctctattgcgtgtttcatgttggatatttgggttggggtaaattaatatctgttgaagggaatcccaagctcactgagtaatcttagattactcatgattctacttatcgtacatgtaaccatagtgggatgaccatagcgggaagacaaacactagaaaatgccagaaataggatgttttacgttgcttctgcaaaattacttgttttatgtaaatttgaacaaggatccgatataaagatatatttttcgggtaactctttgccaagtatatgctatatactatgcataaagcgttttcttaaaggcagccgagtgtttaatgatataagacctagtccgggtcgctcatcaccagaatatcacgagggttggcaagcctaagtggtgttcctagtgggaggagggtcgattataatttggtttaggaaccggattcatctggaacctctactaagttgtgatcgatcatcttcactgtagcgtaaatgggtcgcccgtggcttgtccggccataggacgattcgggggcgttacaatttttggtattcttgtggacacttgggttttcaatgattttatcgagtaaatttgagtcacagaatgcaacattagattccggttgttcgtcttttagatgactaagtggaggataggtttacctcgttttgcaaatgttttctagcaaaggaagcaacactttcagttcgttgcacggtcttaatgtgcccaaccccgaaaacttcgctccgtcgagcagtgcagacgatgacagtttgtcccgggccaggaatgatcagataatggccgaagaaagtgaatctactttgtccaatatgtcaattgaatccgatccgtccgaatgtccggagaatgctgatgatcatgatgacccattatctagtgaagatgcgatccatgttgagtggatgatcctcgaagatggcgagttattccag

SEQ ID NO: 186925 - DNA, 162 bp, Arabidopsis thaliana landsberg
ccaactgctggtgttggtcacttgactttagctcctgattggataccggaacacaaggcaacacaagtgagaagatttgaagcttctcctctttgttcaaccttcactcaacaattgacacgaagaggagaaaatgattgcaagaaacatcattacaattag

SEQ ID NO: 186926 - DNA, 240 bp, Arabidopsis thaliana landsberg
  unsure (1)..(240): unsure at all n locations
tctgagtctgaaccctaaaacatcccgcttcgctgctcaggaccaagaatctcaggtaccttgttaactactcgctgtaactattatcgatatccatatttcttcacaaaattcgattctctttcgttcagattcaactgannnnnnnnnnnnnnnnnnngtttatgtcgggaatttggacccacgcgtcaccgaaagagaactcgaagacgaattcaaggccttcggtgttcttcgcaa

SEQ ID NO: 186927 - DNA, 990 bp, Arabidopsis thaliana landsberg
atgcaaattcagacaaggcatgtcgtggtggtagtggtgctggttttaattttggttatgagctctttaactgtggagggaggagggagagggatatacacaaaagatcagaggcttcaccatgttcagaaggacagatccgccattccatcaacaagaggagtagacaaccaccataacattccaagacaaaactttgacaattggggtgcaaacggaggaggaggtggtggtggtggagaagatggaacaggttagaatcagcaacacgagaaaaaagatatgacttgggacaaaggagctcctaagacgtgtatatgtgtgtatatcagtatatgtaaagactgtgatgtgatgaagcggatattaagcctatgttttctgcttttgtgatgtaatcctaagtatatatatgtttttgataagacttgaggtgtgcacatgtgatgaatgaatggtatttaacactcataagagtgagttcataaacagaaagtatggaaattaggtgtagttcaaaattagtactttacagttagttttcgccatgctttggattagcagtaaagcttcttccttaaagtactacaatagctacttcaagattagttgtatgtatcccctgaactaaccaagcaagtaaaagaaagatacattctttcaccaaattcccactaactactatagatcattgcatcaaaaagctaaagcaagtaaccaaatctccaagaaatatcaggcaacaatttattatgcaaatgcagcaataaggactttttcattaccgggactagcttgaaggagcctcatcgttgaatcaatgtcaagccaaccgattcttccaattcgaatcgcttctccaccgaaggagaagacggcggaggaatccagtgttgtcacatcctgaagattctgtgtttcgttcgatggcggagaattgaaagacggcgagagaatggattcgagattggtgaatctgaccgaaattaa

SEQ ID NO: 186928 - DNA, 393 bp, Arabidopsis thaliana landsberg
atgccgaaggtcggcgtgaagccggtgctgacgacttggttcttcggcgtcgcactcgggctgggcctgaccagcaccatcggggtccacacctcgtacgccggtcacgtgctgcccgggatgatcgtgctcggcctgtcctcgggcatcagcttcccgggcttcggcaacgcgtccctgcacgaggtcaccggtcaggactcgtcgctcgcggccggcgtgcagaacgcgctccagcagatcggtggcgcgctcggtctggcgacgctggtgaccctcgcgacccgccacgctgcgcaccaggtggcacacggcgtcgaccagctgaccgcacgcgtggacggcacccagctggccttccacgtcggggtggtcggctgcatcatcggcggc

SEQ ID NO: 186929 - DNA, 622 bp, Arabidopsis thaliana landsberg
  unsure (1)..(622): unsure at all n locations
aaaatgtcgtcgatcggaacaaatttgaaaatagaatgatttgtgtggataaacttttaaatcattgtgtgggaacgcacggattctacaaaatcatgctggccaagttaagcttcatagccttaatgcattcacagctatggacagtcgagttgtacgttaatatgtcttctatggacaggagcgggtaagatggccaatgaggtcattatgttgagatgtacgtagacaaatttcaatgttgttctttctgagtattaaaagagtgtgatcactgattttgaagtcagaaaaaacaaaagaacnnnnnnnnnnnnnnnnnnnnnnnnnnnngtctcggttctcagattgtgtatttggtagctgcggtggtggctaaattgcggtctcttttgttgacatcacttgtatttcttgactagttatttgtgctacctggttttgaatgtgtcttgctagtgcggttctttataattgaagttagtgctgcaatgagttatcacctcttgttgcgtttgttttgtgttctagaagagttagtaagatcgatggtgttcgatgtggttatgaatcgcataaatcatgctctgctctatccgactttggggaaagaaattggtag

SEQ ID NO: 186930 - DNA, 6149 bp, Arabidopsis thaliana landsberg
  unsure (1)..(6149): unsure at all n locations
atggccgagttgcgttgtatcttgtgggtggttaaaagcttacgagatcttcgtttgcanaacgtgataatctcttcggattgtcaagctgcaattgctgccttgtataatcctcgggattggcctcgatatgcaatgtggctcgatactattttcatagcttgtcaatcatttccttttatcacctttgagctggtgtcttgtcctgctaattccattgcacgggacattgcggagagtgttacaagggatggtcgttttaacccgttcctttctgaaggtggaccggtgtggcttcttaatcggttacgtagtgaggcgcaacgtggactggcgttgcttcgtaatcggttacgtgctgatgaggacgaaggtggaccggactgggttcaagatctgttaagtagtgagccacaaggtggaccggcccggtttcataatgggttacgcaatgacgtcgcaaggtggactggcctggctttataatcggttccataatgagctccaaggtggaccggcctggctttattatcggttctgtagggaggctcaagctggaccggcgtggtttttttcttattgataatttgtttctcttctactatgggtttgcaattttatatttcatgcaacaagaaaaaaaaaaaaaaaaactagtaattgtttaaggaagttatgtttatgtataatcatcaagacgaagaagatatatttttaaatttacagtttttatgaattgttatttgtttttccattttccagtttaattatttttattaaaaaaaatgtaagaagcctagtgtgacacgtggcacatgtgctagttcgttccaagaaattttatttttgtttccatggcgattccgggaagagaagaggaggccacgtcgtcacatggctcacattccgattctcagattaataccacgtaaccgttccctatgacgttgtctccgttcttcgtctcttcaaccttcaattttgcaaaccctaaacgtttcgttcgttagtcgcgcgtactcagatttcaatgttgatcgtcgattatgtggttgattgctacgtcgttacccagatgttccattggtgcgtgccttttctatcatgatacacatttacacatagaaaatatgtataaattaatccaacggttgagagcactctactacatgatcatgtagatgattgaaatttcattatttcgacgttgttattgcatatgagcctgaatgtttcattttttttcttttctttatacgggttggaaatttctgcaactatagtttgaaatttttctgcttatatatgttcaatgaaatgtgaagagtctattgagcaagacctaataaaaagcatccgtccgtacaaataaagaaaagaggccgagtgttttgtgtaagctacaaggtgttgggccgaacacattgagaagcctatagggagcttctagaatgagtgaaggcacacaaatatctcttgtagccgttgaagagaactcacgagtggtcttagcttcatggtcaaccaaggacctgtcactctcaccattaagaccaaggaatctcttctctcatgtctctttcattcgcatgttatgtgtaaacggctatgttccctttgtgtgtccttaaaatacaatgtaaacacacaaaggtaactaaccaattctagtaatatgttttggtcattctcactcataacaatgctctcttgttcctcatgattctcttacccttactcttactctttccaaactacaattccgcatattctttcatggtatcagagcataagatcatgtctctatgctaatgaactcatctcctttctttctaatcttcacgtcttcgaaaaatctcaatttttatctcttttaaccaacgggtaatagctttgtccatcagtccgtgtgtgttcaaaccatggagacttctcaaaaggtgattactacggtgatacttcaaggagggaactacttaacttggtcaagaacaacaaaaacggtgttgtgtggtcgtgggctttggagccatgtaatttcatctcgagctccaaaggaagccaaagaagaaggagatgaagaaggaacggaagttctatctcccgaggaagagaaatggttccaagaagatcaagcggtccttgctcttcttcaaaactctcttgaaacctctattctagaaggatactcgtattgtgaaacggcaaaagagttgtgggatacactcaagaatgtgtatggaaacgaatctaacttgacccgggtgtttgaagtgaaaaaggcgatcaatgagctaagtcaagaagatctagaattcaccaaacactttgctaagtttagatcgttgtggtctgaacttgaaagcttgagaccgggaactcttgacccgagggttctccacgaaaggcgtgagcaagataaagtgttcggacttcttctcaccttaaatccgggttacaatgacctaatcaagcacttacttagatcggagaagttaccaagtcttgatgaggtatgctctaaaatccaaaaggaacaaggttcaaccggattgtttggtggaaaaagtgaactcatcacggctaacaaaggagaagtggtggctaacaaaggagtgtacaagaatgaagatagaaagatgctgacatgtgatcattgtaagaagaagggtcacaccaaagataagtgttggctgctacatcccacatctcaagcccgccaagttcaaagactcaagagctcatctctctcaagaaactcatgaagagcaaagtcaagccgggtcatcgaaaggagagacatccacatcattcggagactatgtgaggaagtcggacttggaagcactcatcaagtccattgtttcactcaaagaatccggtatcactttctcatcacaaacatctagtagttcaattgtgatagactcgggtgcttctcatcatatgattagtaactctaatcttcttgataacatagaaccggctctaggacatgttattattgctaatggtgacaaagttccaattgaagggataggaaacttgaaattgtttaacaaagattcaaaagctttctttatgcctaagttcacatctaacttattatccgtgaaaaggaccactagagacttaaattgttatgcgatttttggccctaatgatgtgtattttcaggatattgagacgggaaaagttattggagaaggtggttcaaaaggagaactctatgttcttgaagacttgtcaccaaactcttctagctgtttttcctctaagtcacatttaggcatctcttttaatactttgtggcatgctaggctaggacatcctcatactagagctcttaaactcatgttaccaaatatttcttttgatcatacaagttgtgaggcttgtattcttggtaaacattgcaaatcggtttttcctaaatctcttactatctatgagaaatgttttgatctagttcattcggatgtttggacctcaccatgtgtttctagagacaacaacaagtattttgtcacatttattgatgagaaatcaaagtacacttggataacactattaccctcaaaagatagagtgtttgaagctttcactaactttgaaacctatgtcactaatcaatttaatgcaaagattaaagtgtttaggaccgataatggaggagaatacacaagccaaaagtttcgagatcatctagccaaacgtggaataatataccaaacaagttgcccgtacacaccacaacaaaatggagtggcggagagaaagaaccgacatctcatggaggtggcgcggtcaatgatgtttcatacaagtgttccaaagagattttggggtgatgcggtcttaaccgcgtgctaccttatcaatcgaacaccaactaaagtcttaagtgacttatctcccttcgaggtacttaacaatactaaaccgttcattgatcacttacgagtgtttggttgtgtatgttttgttttgatacccggagaacaaagaagcaagctagatgcgaagagcactaagtgtatgtttcttggctactcaactactcaaaaaggatataaatgctttgatccaaccaagaaccgcacatttatatcccgagatgtcaagtttcttgaagatcaagagtatgataacaagaaggattgggaggacttaaaagatctagctcattcaacctcggatcgcgttgcaactctaaggtttctattggatcatttgggtaatgaaacaacaccaacgaccgagaatacgcaagaaacacattcaccaaatcaagaagacttgcatcaagggagtgatagtaatgaggaagagtatttacaacatcaagaagaccttctcaatatacaagaagatcatgaatccgtccaagagactcaacatgactcaagtgactcaagtgatgatgaaaaacaagaacaagtcctagttcttccaactccatcacttagaagaagcacaagaatccgtcgcaaaaaggaattctttaatgctcttgcggtagctcatccattccaagcaacatgttctcttgcccttgtacctaaagatcatcaagccttcctctccaagatttctgaacatcgaattcctcaaacgtatgaggaggcaatggagatacaagaatggcgggatgcggtggccgaggaggtgaatgcaatgaagcgaaatcacacttgggatgaagatgagttaccaacgggaaagaaaacggtgagctctcgatggatattcacaatcaaatacaagagtaatggagatatagagagatacaaagctcgcttagtagctcgggggtttacacaaacctatggatccgactacaaagaaacctttgctccggtggccaagcttcatactgtccgggtagtcctcgccttagccacgaatttatcatggggattatggcaaatggatgtcaagaatgcatttcttcaaggcgaactcgaagatgatgtgtacatgactcccccacccggcctagaagacacaattcaatgtggaaaagtgttgcggcttcgcaaagccatatatggtctcaaacaatctccacgggcgtggtaccacaaactaagtcggacactcaaagatcatagcttcaagaaatccgaatccgatcacactttgttcacactacaaagtccccaaggtattgtggttgttctcatttatgtggatgatctggcatcacgggggacaacaaagacggtatacaaaccacaaagacctttcttaaatcatgttttgatattaaagatctaggtgaactaaaatattttctcgggatagaagtgtgccgctcgaatgcgggtctttttttatcacaaagaaaatatactcttgacttgttgaatgagacaggttttatgaattctaaaccggcgagcactccacttgaagatggctacaaggtcaatcgaaagggggagaaagaagnnnnnnnnnnnnnnnnnnnnnnnnnnnnnnnnnngcttgtaggtaagttgatttacttaacaaatacaagacctgatatttgttttgctgtgaatcaggttagccaacatatgcaaatcccgatggtgtaccattggaacatggtggaaagaattctaaggtatctcaaaggcagctccggacaaggcatatggatgggaaagaactcaagtaccgagatagtaggatattgtgatgcggactatgcgggtgatagaggagatagaagatccacaaccggttattgcactttcatcggaggcaacctcgcaacttggaagacaaagaaacaaaaagtggtctcatgttcaagtgctgaatcggagtatagggcaatgagaaagcttaccaacgaactcacttggctcaaagcgcttctcaaagatcttggcattgaacaacacacacccattaccatgcattgtgacaacaaggccgcaatatacatagcctcaaactcggtgtttcatgagagaaccaagcatattgaagtcgattgtcataaagtccgagagaagattgtcgaaggggttacgctaccgtgttatacaagaagtgaagatcaattggcggatatcttcaccaaggccgcaagtctcaaagtttgcaacttcatacatggcaaactaggacttgtggatctatctcactcttga

SEQ ID NO: 186931 - DNA, 571 bp, Arabidopsis thaliana landsberg
atggaggaggagctgctcaagaagatgcttgagctagagcaaagtcaggagcttctaaagcaggagatgtctaggctcaagctctccacggagcttaggcagccgtcgcatccggtgttgccgcgtcggccgttgagacgtatccagggatcgatgaattcgaatccatcgcccgggaagttcactgataaacagtatttgaatattttgcagtcgttggctcagtctgttcatgtcttagatctcaatacgcgaattatcttttggttagtacttctttttttgttttggaattgtatagtcaatcgttatgattctggtgacatgattgttctcaggaatgccatgtcggaaaagctttatgggtactctgctgcagaagtagttgggcggaacccagtacatgttattgtagatgatcagaatgctgcctttgccttgaatgttgctcgacgttgtgccaatggagaaagctggacaggggagtttcctgtcaagaccaaatcaggaaagatcttttcagctgtcactacgtgttctcccttttatgatgataacggcactgttgttg

SEQ ID NO: 186932 - DNA, 227 bp, Arabidopsis thaliana landsberg
atgcaggcacatctagtccgggcttcggaagtgaaaaaagcaattgaatggattctctgcaatatcgatggacattatgccgctgattcagttgcagctgcaattgctgttggcgctgtagcagccgaaacagctcaagaaataggtttccaaggcgggtcattagtgtcttctccattgggtaaggctacctcaaagtcccctcctttgcagggaaaatcgagtga

SEQ ID NO: 186933 - DNA, 333 bp, Arabidopsis thaliana landsberg
cacttcgagcggctgatgcggcacctgaagggcgggccgccggcctgacgccgggcgcggggcggacggctcatcggaccagcgcggtgccgcgcccggaggcaccggcggcaccggcggcaccggcggtgccggtgggaccgctgccgctgtcgctgtcgcccggccgcccgctgccccggccgtccgccgtcccggtcccggcggtgtcccggcggaaggcccagtccatccgcggctccacgacgcaccggaagacgccgcgcaccggtcgggtgcacagcagcgtgaccccgcccgccgcgaccacggtgaccacgagcgcgccgagcg

SEQ ID NO: 186934 - DNA, 378 bp, Arabidopsis thaliana landsberg
atggatggttgccctcagcttgaagaattatacatacatcacaattacattgaagatagagatgaagaattcaacattcatacagcacctcattatatagcccacaacataaagaaactcacagtttgctacaataacgatgttcaggctcctcgcgttttgtcaatctacacaccaaatcttgtttacctagactactctgattatctaacttgtttatataattcggagaatcacttcaatgatcttttagaagcccgccttgatcttgctttcgcaagggctgggagatggggtgatgaacacgacacctgtttaaaaatcatgaattctatcaccaatgttcaaatccttcacctctcttgttttactgttgag

SEQ ID NO: 186935 - DNA, 87 bp, Arabidopsis thaliana landsberg
cgacaagcaaacgaacaacttttgatcgctgtcgctggtttcagtcgccagcgacaggcaaaagaacaggaccttaaacatcagtga

SEQ ID NO: 186936 - DNA, 172 bp, Arabidopsis thaliana landsberg
ttttttaccgaagttacagcgaaatacaaattacataaaagatcaaaaactaagtaaaacaacaaaactacatcacaacacaaacaccagggagtacaagcaaaaactcaacgagttgagtctccggaaaaaaacattagtgattctgaaccgctcggacatcttgtcctga

SEQ ID NO: 186937 - DNA, 579 bp, Arabidopsis thaliana landsberg
attactcaactcagtgagcatatatcggaattaaatttgcatgcagaggctcaggctagtgaatacatgcataaggtaaagatagtttttaattgattgactacccttaaaagtttatcaaaagacttactaagagtgatccattgcaaacagttcaaggagttggaagcaatggctgagcaagtaaagccagaaatccatgtttctcaagctatagattcttcgttgagtaaaggttcagggaaacctcggggttctggctctcctttcagatgcatagggttgggaattacacaacaaatgagatctgagaaggacgaggagcttgctgctgcaaggctacgaattgaggagcttgaaactgtagtttcaacccggcagaaagaggtaactaatcgaaaatgttatctatatgctatattgaaacgtttggcatccatttggtattttcttttctaacctcgtatttctgctccccagatatttttattgaattcaaaactcgccaaggtggatagcatgacacatgatattaatcgagttttgctgggagtcaaacagaatgtgacaaattgtgcg

SEQ ID NO: 186938 - DNA, 900 bp, Arabidopsis thaliana landsberg
agttgacatcacgacaggaacctatcatgcaatccccaaaacacccttggtctaaccacgtttatatccataatgccattggcccctctagccctcgtcgttcgtggtcactgattgatccaagacagtctctcgtcacactcatttgtcgacaataccggaccggagccgtgacgggttttatatttgtgttccctcaaccactggtgctagtttgggagtttaaacgaaccgactctgacaagtcatgggacattgttgtttgtatcataagtcttatgttttttaacttgagccatatatatctttggctctatcaaaagacaaacaatttatatatatttattctttgttcaccttcatttcaactcatatttctcctcatttggtaataaaaacaaatatcagctttcgtctttcttctacatctttctctttgtaacttcgtttttggataattgaggaatttcgggccgatacatcttttcatcggacgaattccttctcaagaaagttttgaaccatagtttatggaagataagcttttttcggaagaaaacaactaccaatagagctacatacgcttgatcattgtaagtttttttcaaaaaaatccttaacattcaaacaaaatgatttttattggatttttttggttcatgatgatatttatcgactgaagcattgcacccaaattggaatgcttttgatcttaaatcatccaataaatgttgtgttggggaagcttaattaagaaaagtgatagttagatatctttctttaaacccaagacttgtactacgattgagacatatattattactctgtttattttcttttcaatatagacttgtgataaaattggaaacctcgatgacatgaatcaaaggaaacggaaag

SEQ ID NO: 186939 - DNA, 176 bp, Arabidopsis thaliana landsberg
atgcacgtgctctcttcccttgatacgcgttcgttcattctcatcggatcctataagagcttttttcatccaaccgtccttatttgtccacgtgcatgctgtgcactcaacccggttcatcatttggaaaatgaccaccagtttaattacccattcgtgccaaaaaaaaaaaaacg

SEQ ID NO: 186940 - DNA, 2555 bp, Arabidopsis thaliana landsberg
aggtattgaagcatgtgtgggaattatctgatcaggataatgatactatgctttctctgagggagttctgcatttcattgtatttgatggagcggtatagagaaggccgtcctctcccgaccgcacttcctagcagcatcatgtttgatgaaacactgctatctatctcaggcgcacccagtcatggctatgcaaatgctggatggggatctggtcaaggtattgcccagatttgatgcattttagtgatgatcttttccctttccctggtacttcactttaagtcaaatttccgtattggaaggttttgtacagcaaccagggatgggtgcgcggccaatcactccaacgactggtatgagaccaccagttcctgcaccaggccctcaacctggcagtggtataccacctaatcagccaaggaatcaagcgccagttttggatgctccttttgctaatcacctaggtaatggatattctgcaagctcaaatcttccagaagcagcagctgatgaggaaaaggtgatcaggatatttaagcttagatgagttgcatttccatatgcgtttccttggaggcttgtgaaacaaaaatttctaatctgtgtaggttgatgaaaagcagaatgcctatatggactccagggagaaacttgattactaccggacgaaaatgcaggatattgtgagtattactcttgttatttgagaagtgagaaattactttgatctgtctcagtttgctatatttaaaaataattaacttttgttgatgtaaactttgatatatttgtattcattaataccttaacgaaattgttagctcttttgaaagagggaatcttgatttttctctgaaacgtttgaaagattgtgtgtaagattaagaccaatctactggaatctgaccatctagattaagctgcagaacttgaatgttatctaggtaatggtcttataagtttgagattgttggtctcctgaagttctgatcttttcctataggaacgtatttcctgtttgaggctttgctatttagatctagttcttcagcttgatctattatcttatttagattatatttacaatctgtgtgtcagagagtaaggttcttgtgctgagatccaattctcaccatcccactttttcattcatctttctctcaggtcttgtacaaaagcaggtgtgacaatagattaaatgagatctccgaaagggcttctgctgacaagcgtgaggtgcttttcacatagaaaatcacttttctcatttccttagaagcaattctgtcttatccagaacaatttctgctgcaggctgaaacattggcaaagaagtatgaggagaagtataagcaagttgcagaaatagggtcaaaattaactattgaagaggccaggttccgtgagattgaggtatgactaattcaagtggcaacacctatgtacactccagccgtatatttttttttctccagttcttctatgtgcattttcccttactaggcttatctaaacttcatcattgtttttttctttttctttttctctggatcatgttgtgcgtcttgtcctctcctcttattctatggcccaatgctcccttctttcacctttgctggtgaaggggctttgaataattttgtaacacatcttacggaaatttgttacttattgaacttttgctttgctaacccatccaggggcggaagatggagttgagtcaagcaattgtgaacatggagcaaggtggtagtgctgatggtctccttcaggtacatgctattctatatgcttacgagatgccttaactgtcgagtatctgctgtacatgcctgatttgatgctgtactgggcccatttaggtccgggctgacagaatacaatcagatcttgaggaattgatgaaggctttaactgaacgatgcaagaaacacgggttggaggttaactcgaaggcccttgtagaccttccagctggtatatgattccgttgccttgtgacttcttgctttcgttgtagatgattgcaaataacatgtattttgtaaacaaacaacttatgtggaatttgctatgttgtgacttacaggctggcaacctggaattcaagaaggtgcagctctttgggatgaggaatgggataagtttgaagatgaaggtacaatgttttttcctatctttctcttactaatacacttagatatatatagttaagcacataacaaggacattgactgataatgttcccactgttaggttttggcaatgagatcacttttgacaaatcaaaagagcaaaactcgtctggtgagaaggaaaatggtacggtggatgatggtagtgggccacctgattcgccgacccatgtagaggacaactatggccctttttcagaaacctcagaccgccaccatgagagtgaatatgggacaactcacagtgaagatagaagtcctagagacagtcctgtctctaggaatgctactgaggtcccatctccagattattctcagggaaagaattctgaattctttgatgactcgaattgggcaa

SEQ ID NO: 186941 - DNA, 94 bp, Arabidopsis thaliana landsberg
atgacaaattcagaacaaggaagaacgtttccagatgtagacaaagtcaaacaaacagttactaccatcaaccgatcacaatcacatgatggaa

SEQ ID NO: 186942 - DNA, 787 bp, Arabidopsis thaliana landsberg
atgcacacttggataatatcagctcttgttttaatggttgcatggaaatttgattatgggtacaccaacgaagggttacttttcgctccactctatctcttgacaactataggagaaatgacaactaaaatcgtcagtccatccgacaagaagctagggtgcatagtcgcaagtcttagccatctttggggaggttgcaccatttttatgctaagcttcaattctggaaggttatttcttataattggttttccatgctggataattgtcttgagactcttttcatatgtttttgagtttcatgttagagattgttaaaccaatccttggactgtttggtttgtatttcttgtagattttaatgtaaaactaaaccaaaagttatttaactgaaccatgtttttaagttttttttccagaaatttccataaatagtatcattttaattttttggaacaaaaatatcactcaaaagtttttttagacaaaaatagcattgaaataattattttatttttaatcattaaaattaacaattaaatgtagccaataaaatttccctcaatatatagtcgttttctgtggggttatcagcattgcgagtcgtgagagcaaacggagaaatctcagcttaagcgagcaagaagaaccaggaagaagctacagaacaacgccgggaaccatcgcagaattacgatggtggttttcaaaacttgcacaaatcgttgagacaatatataatgttaatgtatcattgccgaaaaatctcattattgtaaaaaactag

SEQ ID NO: 186943 - DNA, 389 bp, Arabidopsis thaliana landsberg
actcaactcctctaggagtcaaattcggtgacgtcaaagctgatgtacctccaaagtcaacgttcaggagaggtcaacaagttaacgcaacgttttggtcaggatgtcctcgaaatgatttgatgactgaaggatcattcgctgtggtggagacgctgcgtgagggagggaaatgggctccggtgtatgatgacgatgacttcagtttgaagttcaagtggtcgagaccggcaaagctgagttcggagagccaagccacgattgagtggagggtaccggaatctgcggtagccggagtttatagaataagacattatggagcttctaagtcgttgtttggatccattagtagcttctctggttcttctagtgcctttgtagttgtatga

SEQ ID NO: 186944 - DNA, 98 bp, Arabidopsis thaliana landsberg
ctgaatcgattcgaatcccatgtggcgaggactcgaacaatgttcttcagcccaaatcgaatcaaaataagacaaaacgaaagaaggaagtagaagta

SEQ ID NO: 186945 - DNA, 790 bp, Arabidopsis thaliana landsberg
atgaaactcaatgtggttcatttgtgtagctccgtgaatgccaaaaccattgatttagctctcttgaaagccacgtctcatacctcacacaacccgccttcagacaaatacgtcacttttctccaatcaactattgacacgtgttacggtcctgatactgttgatgcgatcttgcataggctgcgtgtgacgacggacgtatgtgtggctgctaaatgtctcattcttctccataaaatggttaaatcagaaagtgggtataatggagaagatagtcttcggaacaatattaatcatcttactttgatttatactcaaggagggagtaatcttaaattgaatgatcttaatgtaaattcatctcgttttactagagagttgactccatgggttcaatggtaagatttctatatactgttggattgattaggatatagatgagcacaatcgataagtcgattattctttattatatatttttgtttttgatttaacgttaaatcacaatttaatcgaaatttttatgattcatcaaaatttggttttgaataggtacaaacaatatctagattgttacttatctattgcggaggttttaggtattactccaaacataaaagaaaaaaacgaagataagcgtttggagactcagcgagtctcgtcttacacaatggattgcattctcaaacaaattgatttcctagtagaactatgcgaacatataagtgataggccaaaagctccacagacgaagctgaacaaaatcgttattgaaatgacagaactaatg

SEQ ID NO: 186946 - DNA, 149 bp, Arabidopsis thaliana landsberg
aagaagaaaagagtgaagcctctgatgaatcagacgacgaggagacttcaaaacgacatgtgagaagtgtccttgaagatgacgagtttgatgattacgcagaggatgtgtatggttacagcgagagcgatgaggagtttgagtcttag

SEQ ID NO: 186947 - DNA, 579 bp, Arabidopsis thaliana landsberg
aatctgccccatgatgcctacaaactacttgcagtaccatctgcgatcggaggtgttcttgtgttgtgtgcaaatacaatccattatcatagtcaggtagttttatattacttagcttttggttgtttcttgtttaaaattcaacaattccagccactccacctcaaagttctacagttactcacacatctggataccatatatatttgtagtcagcctcctgtgctctggcactgaacaattatgcctcctcagctgatagcaggtacagttttctcgcacctccccactcttcaaaacctgcttcatgcttatggatataatcttgttacctcagtcttagtttagaatcctaaagcttagaatcaactttcaacatttgtaaaactctgtttatactgttaaccacatttctatctctgtgtgcgtctgatttctttcagtcaagaactgcctgcatcaaatttcagtgtggagcttgatgctgcccatggaacctgcatatcgaacgatgtggccctattgtcaacaaaatctggggaattgctgctgctgactcttatatatgatgggcggtag

SEQ ID NO: 186948 - DNA, 662 bp, Arabidopsis thaliana landsberg
atggaaaagcttgtttctatgggtttagtccgcagcattggaatcaggttcaacttctctcactatcattacaagttctcttgtttagtcgccaatatatgaattttttgaccattaggttttttgcagtaactatgatgtctttctaacgagagattgcttggcttactccaagatcaaacctgctgtgaatcagatcgagacacatccttacttccaacgtgattctcttgtcaaattctgccagaaacatggtatctgtgtcactgctcatactcctctcggaggtgccacagccaatgccgagtggtttggcaccgtgtcatgcctggatgatccagttctcaaagtaagccccatcctctaaaccttaaaagtttggattgaacctttgacaattaaaaaaggactgcgtttatctgaattcttaggatgtggccgagaagtacaaaaagacagtggcacaagttgtcctgaggtggggaatccagagaaaaacggtggtgataccaaagacatcaaagcctgcgagattggaagagaactttcaggttttcgacttcgaactatcgaaagaggacatggaagtgatcaaaagcatggagaggaaataccgcacgaaccaaccagccaagttttggaacattgatctctacgcttga

SEQ ID NO: 186949 - DNA, 178 bp, Arabidopsis thaliana landsberg
atgagcaatccaagcagttccggcttgggttcaagttcaggtttgactcatttcgggatcggtttggctaatactgttcagtcggaagttactccttacttgccgctaccgtcgttacctatattctgcggtgcggccgaacctggagagttcaagttgttcgatgaggttggccaag

SEQ ID NO: 186950 - DNA, 573 bp, Arabidopsis thaliana landsberg
attattgttcataatgggtcaagacagcaatggaattgagtttcatcagaagagacatggtctcttgaaggatcaagtccaattggttaagagaagagactctattcggtatgaaattgtttctattcaagatcggttgtcatttgagaagggcttctttgcggttatccgtgcttgccaattgctttctcagaagaatgatgggatcatattggttggtgttgctggaccttctggtgctggaaagactgtattcactgagaagatactcaattttctgccaagtgttgctgtcatttcaatggacaattataatgattctagtcggattgttgatgggaactttgatggtaagaattttcatcttgataggtcccatgaggaatgaagtcctatgacacattgttttgaaacttgaagtatcttgctgctgacaaaccttatgttttgaaacttagatccacggttaacggactatgacacattgctcaagacccttgaagacttaaaggaaggaaagcaggtaaaggttactatttatgattttaagtccagctctcgtgttggacacag

SEQ ID NO: 186951 - DNA, 51 bp, Arabidopsis thaliana landsberg
atggtatcaatcgacactaagctagtgtcgatcgacaccgttaattccgag

SEQ ID NO: 186952 - DNA, 435 bp, Arabidopsis thaliana landsberg
  unsure (1)..(435): unsure at all n locations
gctcagattctgaagtggttttggtcagtattgatggacatatactaacagcccctgtgtcagttgctgagcaggaggctgagaatttacggttaaatactcctcagtttcatttggcccctggtgatgggactgagttttgtgaaggtaatactgagtttgcttcatcagannnnnnnnnnnnnnnnnnnnnnnnnnnnnnngtggaggagtcatctgatactgctaatattgcatctgataaagtagatgccattaatgatgagcgtaatgatttggattcccattctcgtgataatgccgaaaaagattctcatgatgctgaaagagatcttcttgggagctgtctggagcagtcagagctgaccaaaactagtgagaatgtgaagtctgaggaaccaggtcctacttttgaggatcggaatctaaaagaag

SEQ ID NO: 186953 - DNA, 358 bp, Arabidopsis thaliana landsberg
atgaaacaagaatttgatgaaggaacacatgtctcttttggcaagtatgtgtagcagtgacagagtgtcctcaatgctcaattgatattgcacttagaacgacggatcctcatgctgttgctggactgttgaaaatgttctttcgagagatgcctgatgctgttgtcccacagactgtgcatgaacagttggctggcgtattaggtatgagctgaagggtgcactgactatgctctgagtttgatatgcttgaaaacagcgcaattgaacgatcctggaatgttatctgccatttcagaggacttgctgaagagcagtgtttgcaccgaatttcaatccttgttgctgtcattggcag

SEQ ID NO: 186954 - DNA, 339 bp, Arabidopsis thaliana landsberg
atggtgaacatttgctttgggcaggacaatgcgaaggaaaggaaaaagctgtttgatcacctcttggagaaagtacctgccattactactttactgtatactatcaacccaaaaaagaacgataccatatacgacctggagcctgttgcctattacggcaaaggttatataattgaacaactggaacatttcaggtataaaattggccccaagtcattctttcaaaccaacagccgccagggagagaaactataccaggttacacgggattttgcagagcttacgggggacgaaaccgtatacgatctttactgcggcaccggcaacattggtatattt

SEQ ID NO: 186955 - DNA, 258 bp, Arabidopsis thaliana landsberg
atgacccgtcaaaagacgagtctagtaagtttgcttctagtgtatggactttcctggaatccattcctgcaaagccagcatatgcatcagagaatccatttgtgaagctgaaccttgttagaatgtcaaccagtggtggtcgtttcaggtttacttctaaaagcacaggtaataatgttgttgttatggatagtgactcagcagtgaagaggaacaagtctggaggaaacaacgataagaagaagaagaagaacaaag

SEQ ID NO: 186956 - DNA, 798 bp, Arabidopsis thaliana landsberg
atggtgagatcgtgtatttgacagaaattttgattttgagagagaatgagagatcgatgatgaaagatgtgagaaatttgtgtttgcttctgtttactaaaattggtttaaacattttattcagttatatttggtttacacatttggttattttgtcaatttggttatgggtaatccactaatctatttcaaccaattattccaacccaaatcattacactcattaatccattgattcattaattatcaaatttccaacaactcattagatccatgagttggattggtttgggttgagttgaaaaattaacttcaattcattttgacatacctataatatggtatatcatacgaaccacctaaaatatgtgatgcatgcacttattaaattgcattttacaccatgtttatgtttaagtacgtcaacattgaattagcacaatgtatacgtacaaaaaagactactttcatggtaatttaatattctaactcaacaagatatcatagaatgcaataagaagttgtcattgcaatgaggtactatcaaaattctaaaagtctcaattgtgtaattttccctaagaaatagggaaaataccatttaaatatcaaacatttacaaaatgctaaacaatgttcaaattttctttctatacttcttaagttttaaatacgaaatttctttcacagtaccaaattaaaactttgttaatatcatcggatatttctaaaaaaggaaataatttacatgatcctcaatccccgaaaaaaagtatggaagataacagttctgcatag

SEQ ID NO: 186957 - DNA, 33 bp, Arabidopsis thaliana landsberg
atgcatgttcgcagtgaatcccaggaccgaaat

SEQ ID NO: 186958 - DNA, 497 bp, Arabidopsis thaliana landsberg
ctaacagtggagagtaaattattacctgctctgaataaacgtcttggctgcaacaagaatcacaagaactatctgagcagattgaagtttttgaaaaacttataccaaagttgcttggatttaaaacgttttacttctggatttgggtgggatcctgaaacaaaaaagtttatagctcctgatgaggtgtggagagattatttaaaggtatgcattatttggttttcataaaattttgattaataatttattttctaatcatcacaatgttaacagtttttttaataaatatttacctgcaggcacatccaaatcataaacatatgcaaactgaatcgattgatcattttgaagatctccaaattatatttggagatgttgtagcaactggtagttttgctgttgggatgagtgatagtacatgtcctcgtatctacacagttggtgaaaggagtcaatccaccccgacggtgaatcaagatgagaacaaagagaag

SEQ ID NO: 186959 - DNA, 338 bp, Arabidopsis thaliana landsberg
atgctgccttcaaacaaccccacaccaaaaacacaaaatccctggatctcccgctttacaaccacaaaggcatgtaaccggagcatccctaccaaaatgctacaccgtcgtgtagacaactcggccagggtaactagccccgtctctccgagcccttcgcactacatggcgatcaagtaacaacgttaacaagaccccataatagcacggttcactacgaaggtcagacataccacgatcttgatacgcttatggtctcttcctcctaccacgagcaccacgcattaagacccaacatttcaagatattatgagacatatggttactcaaacacatag

SEQ ID NO: 186960 - DNA, 119 bp, Arabidopsis thaliana landsberg
gccaaactgcaaaatacagcgatgaaatgaaacaaatttcttggaatctatcaaaacttgcaggccatgttatagtgttgaagcaaatcctgcaaatatcgaatgcaaacttagattag

SEQ ID NO: 186961 - DNA, 94 bp, Arabidopsis thaliana landsberg
agtctccgttattgaccagatacgtcgtcgatgtgacgaaaaccacatgaacatggacacacttatcaaccccaaaacgaaccctaagttataa

SEQ ID NO: 186962 - DNA, 206 bp, Arabidopsis thaliana landsberg
aaaaaactcgcctgccaagcatcgagagttccttggaagttctgaagccagcgatcagcgtgcacacgcactgtatcatccgggtgatgatacagtgcgtttagggcttctttgaccgcgttctgatgctccatagctatgaatctttacgcgttattcgctcgtacggtcaccaaatcacgaccagagagaaagacccagattga

SEQ ID NO: 186963 - DNA, 31 bp, Arabidopsis thaliana landsberg
ccactcgcgaatcaaccgtcgcgagaactag

SEQ ID NO: 186964 - DNA, 310 bp, Arabidopsis thaliana landsberg
atgaatcattcaaatgcgagaaagttaactactctccatggatttatattaaagagaaatctatcatcttttcacgcctcactgaagcggttttcagataaaaagttcttcaatccgaaccatgaggacggtggtgttgtggtggagcgattatgtagagctaatagatttggtgaagccattgatgtattatgtggacagaagctcttaagagaagctgttcaacttctgggtcgggctaagaagccacctgcttctacttattgcaatctcattcaagtttgtagccaaacacgtgctcttgaagaag

SEQ ID NO: 186965 - DNA, 440 bp, Arabidopsis thaliana landsberg
gcggcgagtttgagagttgcagagcaatacattacagccttcggtaacattgccaaggaggtaaaaacaaatcaattactgtaatctcttccagtctcttggcatagctcgggcttatgtaatgttcatgttttttgtttttttttggggtttagggtacgataatgttgcttccaagtggtgcttcaaatcctgctagcatgattgctcaagctttaacaatgtacaaaagccttgtcatcaatggtccaagcaaagatcaccaagaaacacaagcacttgatgaaacagatttggaagagttggaagacatgggtgagaaacatatatcagaaggctctaataaccgatcaggctcaatatcatttgacacagagaaaccaggtcacaccggtgaaccacgattttctcttcagaaccgcaacaaggatccgcagtag

SEQ ID NO: 186966 - DNA, 506 bp, Arabidopsis thaliana landsberg
atgagagcacatctcggacacggggagtccctcatggccttcgacggtaccctcagcaacgtaaaaccaaaattcattccagttgccccacttgttgcgggcgcatggaaccaactccaccacttgcattgtggtcttgccggtcttcggcgtgaatgtgcacgacccgaactgcgcaactccgccttcaaccaccctgttctgccaatgcaagcaataattcttcgcgaaaacttcaaccgacggctgcccgccgtacgaagtcgtcgcccagacatacttcgccagcgccactatggcgttcggtgtaagctgatgtatttgaacgctgaatctgcgcaggacttcgccgacataccggtgtgcaggcaagcggattccggcggcgaagaacgcctcgaatacaacctactcgcctccggttcggggacttcctccgtccccggagtgcgatcgaccccgccgccaaagtagcccaaccgctgcatatcttcaatacggcctga

SEQ ID NO: 186967 - DNA, 588 bp, Arabidopsis thaliana landsberg
atggaagacgacaagaagaagaagagaaacaagaaaaagaagaataagcagaataataaacgtgttgacgacgctttagcttctggtgcaacgacctccgtcgatgaaaatcatatcggagatggtgacgttcctcaaattagcggaggtccagatgccgatgagtcgcaatcatctcatcagatcgatgtcgtcgcaactgtgagttcattatatctctaagattgattggaacattgctacattagattgattctcttggttgatgataggacattggggtcaatttgattcatttcttcttattttataatgtcaatgcagttgcatttttgttgacatagttatgctacattgtatgatttgattgaatgaaatttcgattcatatactggaacggatccttttactacgtgtgtgtttactttgttgtaactgatgtgtagagagttcattaggtttgtgtagagatggttgacaaaaattatgtgatagtgtatgagccgtcgttgtctgatactcttaaaatcttcttgtttaaaacaggaagatgattctggtgttgagaacaagtctcagggaagtgag

SEQ ID NO: 186968 - DNA, 290 bp, Arabidopsis thaliana landsberg
cggaggtggctgtgcctgagtgcgtcaccatcggaaccgccgaactgtggctcggggactgccgcgaggtgctgccgcagctcgaatccgtggacgcagtggtcacggacccgccctacggcatcctgaacctgtcgggcgaagtggccggcggcgtggtgcgcaagtcgccacgccagcagggctctggcaccctcaagaatcgactcctgaacgtcagcaacgtgcagtgggacgtggcccccgagccatcggtgtttgagaggctccgggccatgtccaagtggcag

SEQ ID NO: 186969 - DNA, 65 bp, Arabidopsis thaliana landsberg
cttcaaacatgaaaaacctcgcaagtattggagcagcttggtatgataaagatgaagcaacttag

SEQ ID NO: 186970 - DNA, 221 bp, Arabidopsis thaliana landsberg
atggtcatcgtcatcatcatgagactgattcgtcatggctttttgggggaaatgaagcgacggaaaggaataagacaaagtaaggaaaaaaatggaggttagtgtttttctattatgcgtggtggtcactgtgatggttggtacactcttaacatttagagaagcgagaaaaagaacggaaaaatcggagagaaaatactgagaaaatgatgagaaaatga

SEQ ID NO: 186971 - DNA, 439 bp, Arabidopsis thaliana landsberg
gtattcgagctactaggattaagactgcgcctgttcacgcttcagcagagtggtatttggaaaatgtcttacctattatccagaggtttgtgctttctaaacctggtgatctatcagatgaataactgcattttaaagtcctggaaaatacgatactacatatgatctggaatgctttatagacaatactaagggagtgttcaatgtagatgtttttctgtcaagtcacgttttttttttgtgtctatctgaggaactatatatgtctgtagttcaatgcattgttactcatatgaattatccacttcgttatgcagttatggcattgctgctgttgctccattctctcaccgtttggcatttgacaatttgcctgaaagtatacagcggttacgctgtaaagtaaattttgaagcattaaactttgttcctcatattc

SEQ ID NO: 186972 - DNA, 572 bp, Arabidopsis thaliana landsberg
agtttgcacgcagcagctcgagcagttggaggatgtgccatttatgtcaagtaatcataaggttcactaacattttacaaacaaattatcatagtaaaatgagctgcaagttaataactctagatccattcaaacttgttaaacagcgacaaaccgggacaacatgacttcaaccttttaagaaagctagtacttcgagacggttccatactcagagcaaagcttcccggaagaccaaccagtgattgcttcttcagtgatccagtcagagacaataaaaggtatctcgttttcctttacttggaagagaagaaagcttaaatcttaactaactgttgtattatactttgcaagtcttctgaaaatatggaacctgaacgaattcactggcgttattggagttttcaactgccaaggcgctggatggtgtaagaacgagaagagatacctaatccatgaccaagaacctgggaccatttctggttgtgtccgaaccaatgatgttcattatcttcataaagtagcagcctttgaatggacaggagattccattgtctattctcatctcagag

SEQ ID NO: 186973 - DNA, 850 bp, Arabidopsis thaliana landsberg
atgtctacctcctcagagaaagttgccaactctgacgcaaccacgcttctcaacatcaacatgaacaacgtgactaaactcacaccaacgaacttcttgatgtggaggcgccaagtccatgccttgtttgatggctacgacttagctgggtaccttgacggatcgatcactgctccggacacccagctcaccaccgacggcatcaccactgcaaatcctgcctacaaacactggaagagacaagacaaactcaactacgctgcgcttctcggtgcaatcacgatggccgtgcaacctattctctctaaggcaatgacatcggctgagatttggactacactcaacgagacgtatgcaaatccaagtcggggtcacatcctgcagattcgtgatcagctcaaacattggaagaaaggcaccaaaactatcgatgagtttttccaagggttcattactcgatttgatgagttagctcttcttgaaagtgctctactccatgaggatcaaatcgcacatattctggctggacttcctgcagattacaaagatgtcatcactcaaattgaaggccgtgagatcccaccaaagctctctgaaattcatgaaaaactcattaatcatgaattgaagctgaagaacatgcttgatgatgcctctgtagctccggtgactgcaaatgctgccacctacaaggcatctaatgcaaatcacaacggcaacaacaacaacaatcgcaacaacaaccagaatcgctctcgtgggaatcaaccatggaatcaaaacaactctgcacctcgttttgactcccgtggctcacaaggcaagggatatcaaggaaaatgccagattt

SEQ ID NO: 186974 - DNA, 436 bp, Arabidopsis thaliana landsberg
atgaccactggtaacaaaaactttcggttattgagttggtttaaaataactaaaccaatggtcatcagatttttttatttcggtctcgcacagattatcactaaaccaatgaacctttgtttttttgtagcttcgatgaccaacgaggacaatgaaccaatccaagactatgatggttcacccgcaaacccatttgcacttgggtcaagacattttagaccaacgaaagctgcatctcccggtttagtctacgatgcatcataccaatcttaccttctctactgttgttcagttggtttaaccaatcttgacccgacattcaaatgtccaagtagaatccctcccggttataacctaaattacccgtcaatttcaattccatatctcagtgggacagtgaccgttacaaggacggttacatgtgttggacgaacag

SEQ ID NO: 186975 - DNA, 1993 bp, Arabidopsis thaliana landsberg
atgcccaccaaatgtctgcccttgtggatctttatcaatttttatggatggaaagaggtgatctcagtttactcggatgatgagctcggaagaaatggagtttctgctctagatgatgaactgtacaagaaaagatccagaatttcctataaagtgccgatctcagttcattctgatgaaaaattccttactaatgctttgaacaaatccaagtccatcggtcctgaagtttatattctttattttggtccggacccattgctcaaaatttttgatatagcgcaaaagctgcagatgatgacccatgaaatacgtatggctcgccacagactggctctctgttaccttagattctttgagtgacaaaggtactctaaaacgccttgaaggagtagtggggcttcgtcaacatatcccagaatccgtaaagatggaacatttcacgcataaactgcagagcaacagatcaatgaatgcctacgcattacatgcctatgatacagtgtggatgattgcgcatggcatcgaggaattgctgaatgaaggaatcaacataacgttttcttactccgaaaagttacttcatgcacggggaaccaaactgcacttggagaaaatcaaatttttcaacagtggggagttactacttgagaaacttctgaaagtaaactttactggtatagccggtcaagttcagtttggttctggccgaaacattatcggctgtgactacgaaattatcaatgtaaacaaaactgatgttcatactgtcggtttctggtcgaaaaatggaggtttttcggttgtagccccaaaaacccgtcattcacagaagaagactagctttgtttctgatgaaaaacttggagatataacctggcctggtggtggccgtgaaaagccacgtggttgggtcattgcagattctgcagatccattgaagattgttgtcccgagaagagtgagttttgtcgagtttgtgactgaagaaaagaacagtagccatcggatccaaggattttgcatcgatgtcttcattgaagcattaaagttcgtcccttacagtgttccttacatatttgagcctttcgggaatggtcattcaagtcctaattacaaccaccttattcaaatggtcacggatggtgtaagtatccactccaaaacgttcaaaactgattcggaaagcctctgaagtcatgaacattcccagactaactttcactgtgataatgggtggcttttccttgtttttcccctttatttcaggtatatgatgctgctgttggggatattgcaatagtcccaagccggtccaagttagtggatttctcgcagccatatgcttccacaggccttgtagtggtgattcctgctaatgatgacaatgcgacttggatctttctgagaccctttaccagccggttatggtgtgttgttctagtttcattcctggttattgccgtagtcatctggatcctcgaacatcgcatcaatgaagatttcagagggccaccccgaagacaactcagcacaatgctcttgtaagttcagctcgtaatattcactgcacttgatagttcattcttggtgattttctgatacatctactttgatttgtccctgcaggttcagcttctcaactcttttcaagagaaaccgtgagtagccttaatttcatccatccatctttctttaaaaaccatcaagcaagagaaaaaaacaagtttagagttacatttaagaatctgtccgatacatattcaactctgtattgattttttgccaactcagatcagtgatatttctgttttatcctgttatgtcaacagaggaagatacaataagtaatctagcaagactagtgatgattgtatggctcttcctattgatggttctaaccgcgagctacacagcgaacctcacctcaatcctcacagttcaacagcttccctctgctattaccggtattgatagcttgcgggcaagtgag

SEQ ID NO: 186976 - DNA, 177 bp, Arabidopsis thaliana landsberg
atgactagcaagcatgtagaggaagagattgaaagcagctccagcccaagctgtctcagtgagtatgcctgaagttcttgtcacttccttgtagagcggatagattcttataaacctcggtatatattggaagaaaacaatgaatttcaacatattcttcgtgttcaaagacgatga

SEQ ID NO: 186977 - DNA, 56 bp, Arabidopsis thaliana landsberg
ctggaaaccaatatcaagaacaaagacgcgtgatggaagttcgtaaattgcattga

SEQ ID NO: 186978 - DNA, 1932 bp, Arabidopsis thaliana landsberg
atggatacgaggtttccgttctctccggccgaggtctctaaagtccgggtggtccagtttggcatactcagccccgatgagatcgtaatgctcctttctctttctctttctctttcaggtccattgctccgccgtctgtttagctggcggggatattggcatgaatagtagattggtttagttagggagcatgttcttttctatctattgatcttaattggaagcttcaagtaagaaattgagtttcactggttgctaatggcttttttttcagaggcaaatgtctgttatacatgttgagcatagtgagacgaccgagaagggtaaacctaaggtgggaggattgagtgatacccgtcttggtacgattgatcggaaggtgaagtgtgagacatgtatggctaatatggctgagtgtccgggacattttggctatcttgagctcgctaagccaatgtatcatgtcggttttatgaagacagtgttaagtatcatgagatgtgtctgtttcaattgctccaagattttagctgatgaggtatgtaggagcttatttcgtgtcagcattgcttgttttgcttatgtctttgtttgacgtagctgttcttcaattgattatttttatgaaggaggagcataagtttaagcaggctatgaagatcaagaatcctaagaataggcttaagaagattctggatgcctgcaaaaacaagaccaaatgtgatggtggtgatgatattgacgatgtccaaagccacagcacggatgaaccagtaaaaaagagccgaggtggatgtggtgcacaacaaccaaaactgactattgagggtatgaagatgattgcagaatacaaaattcaaaggaagaaaaatgatgagccagatcagcttcccgagcctgcagaaaggaaacagacacttggtgctgatagggttcgtcttttctttcgaatgaattttacctcttgttcttgtttggcgtaatctgatggcatgtgatattcttgcaggttttgagtgttttgaaaaggattagtgacgcggattgtcaactcctaggtttcaaccctaagtttgctcgtcctgactggatgattcttgaagtccttcctattcctccaccccctgtcagaccatctgtaatgatggacgccacttccaggagtgaggtaagtcgactacggttttctgaataaaacttttcttagaccaacatagtgtgcccctgagtttatgcttattgttgatgcaggatgacttgacccatcagctagctatgattattcgacacaatgaaaacttgaaaaggcaggaaaaaaatggagcgccagctcatattatatcagagtttacacaactcttgcagtttcatatagctacgtattttgataacgagttgcctggacagccaacggtaatgcttttgtatcctttcagatatctggtatgatacatacggatattgctttatctggattggcttttattttcttcaggctactcagaaatcagggaggcctattaaatcaatatgtagtaggctgaaggcaaaggaaggcagaatcaggggtaacttgatgggaaaacgtgttgatttctcggcacgtactgttattactccagatccaacaataaatattgatgaacttggtgttccgtggagtattgctctgaatctcacatacccagaaacagttactccctataacattgaaaggttagtacgtctggtgtttatttcattttctgagagtaatttttccgtgttttactaacaatttagtttggcagattaaaggagcttgttgattatggaccacatcctccacctgggaagactggagcgaaatatatcataagagatgatggccaaagactagatcttcggtatcttaagaagagcagtgatcaacatttggaacttggatacaag

SEQ ID NO: 186979 - DNA, 438 bp, Arabidopsis thaliana landsberg
  unsure (1)..(438): unsure at all n locations
accgcgccggagaacgacgcgcaacgcacgcagtacgaaatgctggaaaccgacgacggtgtgcgcaaggccatcgcgcgcatcgagaagaacggcgaacgtgcgcgcatcgtgcgacgcacgctgcggatgtcggacctgggcatggtgatctggaacatgtgccagnnnnnnnnnnnnnnnnnnnnnnnnnnnnnnnnnttcagtcaatagcagggggagttgaagatgctcaacatgcacgaagtcgtcatcgacgttcgcgagaactggatgctgtatgcgtcgatgccgttcgtcgccgccatcatcggctacgcgaccaagatcgtcgcgatccgcatgatgttccagccgatcgaattcgtcggcctgaaagccaagcccatgggcgcccgagagttcccctggcaaggcatcgtgccgcgcaaggagacg

SEQ ID NO: 186980 - DNA, 328 bp, Arabidopsis thaliana landsberg
  unsure (1)..(328): unsure at all n locations
atggggaattcacggtgtatcgcttcctggaagagtaacattttcaccaggaaacattggttttgcaacatttggagctcctcgtccatggaggtatgtagtagaaacaaaccactcatagatcataacaagattaaactttnttcttctcttatataatactctngtgctatgtttgatgcagacacaaatcatcagcgatgacacatggaaactagtggatgagatttgggataaaaaggttgaagaaatcaaagcagaagctgttattcaaattgaagaagaaaagaagaaacctcagattttgatggcaacccatttcttttaa

SEQ ID NO: 186981 - DNA, 338 bp, Arabidopsis thaliana landsberg
gaccggaaacgtacgcattgaatacgtgagctccgcctgcaagagtagcagaaggtaaagcaatgacctcgctttggtattggtttaatgaacccgtccatgcataagtttgactaaaatccccgtcataaccataatgaacggttgcacttgtcagcgcagtactgccattgtttaccaatgtaaacgacggagaaaccgaagctgaacagatcgttcccgaagctcctgaaatagtagataatgcagcatctaatgcaacccccggaccagccggatcaacaccgtcaatggttaagctgcctgtatttgacgggtccagccaaaatttaagttga

SEQ ID NO: 186982 - DNA, 70 bp, Arabidopsis thaliana landsberg
atgtgtggaatagcagctttacttaacttccgagttgtttgggatctttgggagaatccaattgtaattg

SEQ ID NO: 186983 - DNA, 407 bp, Arabidopsis thaliana landsberg
tgagggtccgggtctgggacggtcgctcgacggggtcgcgaccgtattgccgcattatccggttgcaccgacgcgcctgcatctgcgcgacggccgttgggtggcgtgacgtgaccgcatcctccgcctccggcaatgcctccatcctgctggttgccacccgacgcgtggatcgccgggcgctgttcgacgtgctggacgggcagggattctccccgttgtacacggcgcgcgatgtcgtccaggcacgcaccttgttgtcgcaatctccgccattggacctggtgctgctggaattttccggccaggcacgtgaatcggcggctttttgcgcacagttgcgcggcatgggtgaataccgccatacgccagtcatcggattgctggcgcccgacgtgcaacagagg

SEQ ID NO: 186984 - DNA, 481 bp, Arabidopsis thaliana landsberg
atctccaactgggacgacctggtcaaagactcctgggatctccgaagctgccaccagcagccaggagaatccctgcaggactatatccgacgattttcgaagcagcgcaccgagctgcccaacatcaccgactcagatgtcatcggcgcgttcctcgccggcaccacttgccgcgacctggtgagcaagctgggtcacaagactcccaccagggcgagcgagctgatggacatcgccaccaagttcgcctctggtcaggaggcggtcgaggccatcttccagaaggacaagcagccatagggacgccagcaggaagacgtccccgaggcgtctgctcagcgcgacacgaagaagaagggcaagaagaagtcgcaagcgaaacgcgacgccgccgacgcagatcttgtcgccgccgcacccttgaggagtgctgcatgctttggcaagatgctcaaggagtgcgtcatcccctatcatcagg

SEQ ID NO: 186985 - DNA, 943 bp, Arabidopsis thaliana landsberg
  unsure (1)..(943): unsure at all n locations
atgctgccgaaattccgatcgtccgttcgttcgatcattcgttcgttcatagttcctattcatcgttcatcgttcgttcatacgaactattcaccatcactattttaccgttactatttaccgtcactattttactgttactatttaccgttactatttaccgttactatctaccgttactatttaccgttactttttaccgttactatttaccgttactatttaccgttactttttaccgttactatttaccgttactatttaccgttactttttaccgttactttttaccgttactatttaccgttactatttactgttactttttaccgttactatttaccgtcactattttaccgttactatttagcgttactattcatcgatcatccgatcaccccaagtttcaactactcatccatcatgctgtccagtccacctaagacctgccagaccaatattccagttatacgaactccgatgactgtgattttccttccagtgggaacttcccatctggtcacccatcccagatttcnnnnnnnnnnnnnnnnnnnnnnnngagattccttcgaactaggcttccaaactaagattccaataattcttgtttctaaattcctatcaaattattccctatccaaccatgtcatcccttgaacatggttcatattccagaaaactcccaaaatacccttgtcccatattctgcctataactctcctgttcaaactaagtcagaagattcattcgtcactattctcaccaacagtgaacttcactgtgctacaccacatacacccagctataaatacacccagctaccctctccctctccacacacactcaacaccctcagccaaggcaaacaccccacccactcagttactccgctctaccggctacacgcacagtgtcgcttcgcctccagtccaccctcctg

SEQ ID NO: 186986 - DNA, 124 bp, Arabidopsis thaliana landsberg
ctcctctctctctccggcgctaacgggatgtcctcaccataacgccgttaagtctggaaaaagtttgaacggaattatcaaaacgggaaggaatattccgtttgaatggctctgtaacaattag

SEQ ID NO: 186987 - DNA, 249 bp, Arabidopsis thaliana landsberg
cttattgttcactcggtaccttccccaacaagtggaaacctttcctatccactgataccatataagcatcctactcgccaaaaaaaaataacaccggtcaatgaccaaactaacatagagaatccgaaatccataactcatcatataagcttttattttacccttgcgtttatatcaagaaaatataaacagaaaagaatcaaagctcgtcttcttgcctcgttcctattgattccatccacaagttaa

SEQ ID NO: 186988 - DNA, 257 bp, Arabidopsis thaliana landsberg
atgaagagaagcaacaccgcagatgtggaaagtaacaaaagtacagaagcagaaggcatcctcaatgtaggcatagatggtaattgcagatgtggttgaatgaaaggcggtggagaagtcgaaaggacagaaagagcaataataatacagaggaacaaccaagcaaaaacatcgaggtaccactttggaaaactcggtctgtctttctcgttactgacatctatgctcggttcctcaccaatgataccgagatcttc

SEQ ID NO: 186989 - DNA, 1746 bp, Arabidopsis thaliana landsberg
atgagtggagatgatgaggatgtctgctcagaagacttggagaaaccaatgcatggaaaccataaagatgttgactttgtagataatgatccaagccagctcgacaatgttgaattcgatacaacgggtagtggcatttcaatcagatcacagcttcctagttgcgttctagaagagccaattttctcagaatctccaaagtttaagaatgttcagaagagtgtagctgcatcgacaaagttttcagcaaatcctaggaatgtgtctgaaagctccaacattggagacatgaaagtcaatcacattagcccgtgtatgtcaaagaaggtttcaggtcctacagattctctagctgctagtcttcagagagggctgcacattatagactatcaccaagggagctcactatcaaaaagttcatctgtttccttctcttttggccatatggttttgaaaccttgcgcagaaggtgagaatcttaggtgcttcggtccaatcttttagaaaagataaagcttcagaaggtggattgtcgtcgattctcctatgtctttcatgtagaaagaaagttgaccaagaagctgaagtatgtccacaaaacctgagatatttgcctactttctctatagctttaattttggtaattctgtttcgttacttatcttataatctcttctatatcaggtaacagaagaagctggttcaaacgaaaaacatctcaagaacatgtgtatggagcaagcagctaaaattgaggagctaactctcctggtaaaaaccttgtaaactttaaagaatattagtgttataaaaccttgaatcagattttcaaaaattagttttgataattcttaacttagaccaatatacaacatagctgtggaagagcctgtgaagttaccagttgagtttcattgacgatatttgacaagaatggcaatctaaattgaataaactgtgttgtggccttgtttgcagcttaggaaatcagatgatggagaagatggaacagagttcatcaaagaaacatatgagacgaaacaaattagtgaagagtttggaaaaacaaactttgaggtaagtgaaaaggaagctcttctcaaggagattgcagacctaaagagcaagctgcagcctactaagtccacagacaatctgagatcctcgttactactacgatccattcaaatgcgcaaaagcattgatgttagcaggaatggtgagaacagtgatgatctagcgaaagaaagggagatgtggacagaaatggagagtgagtggatatccttaacagatgatctcagaatggatatcgataaccatcgcagtcgagctgagaatctagagtttgagctcaagcaagagaagctagccactgaagagttgaatgacgcgctcactagagctgtgcttggccacagtagattcatagagcagtacacagagctgcaggagacgtacaatgaacttggggagaagcacagtgtgatgatggctggaataacagatgtaaagaaagcagcatccaaggccgctatgaacggccgccatggaaagcgttttgccaaagccttttcagatgagctttctgccatcagagctgagaaagagaaagaaagagagctcttgaagaaggagaacaagaacctaagaactcagctgcgagatacagctgaagcagtccaagctgctggtgaactacttgtcagacttagagaatctgaacaggccttacaagtctctgag

SEQ ID NO: 186990 - DNA, 114 bp, Arabidopsis thaliana landsberg
atggcttcaccagaggaagctgatcaaacagagagaggaggtggtgatgatttggaatcagagaagtgtgcaactcgaaacgagtattacaagctgctgaagcgcaatggaggg

SEQ ID NO: 186991 - DNA, 289 bp, Arabidopsis thaliana landsberg
atgccttcgcggttgccggcggttgaagacctcacggctcaaatccgtcgagccgtcgatcttgctcgctcctgcttgcgtgccgctcaggaacgccaagctcactttgctaacaaacatcgtcgcgaagttgagtatgatgtaggagacatggtcctcctcaacatcaagaacatccgcctccggactcccggcgccaagaagcttggtcccgtttggagtggccctttcaagatcatcgagcgcattggggccgtcgcctatcgcttggatcttccggcctctatgg

SEQ ID NO: 186992 - DNA, 757 bp, Arabidopsis thaliana landsberg
gattgttcagttagggttcaatgctttctccgatatcgtacggcctgagacgacggcgaactgtcgtaccggtttacaggtcttggatctccaggaaaatcgaatctccggtcgttttccgttgtggttgactaatattttgtcactaaagaatcttgatgtttctggaaacttgttttccggtgagattccgccggatattggtaacttgaagagattagaggaactgaaattggctaataactctcttactggtgagattcctgttgagattaagcaatgtggttcgttagatgttttagatttcgaaggaaatagtttaaaaggtcagattccagagtttcttggctacatgaaggctttaaaggttttatctttaggcagaaacagcttctcaggttatgttccttcgtctatggtgaatctgcagcagcttgagaggctaaacttaggtgaaaacaacttaaatgggagttttccggtggaattgatggcgttgacaagtctgtctgagctggatctgagtggaaatcggttttccggggcagttccggttagtatcagcaacttaagtaaccttagttttttgaatttgagtgggaatggattttctggtgagataccagctagtgtaggcaatctgtttaagttaacagctcttgatttgagcaagcagaatatgtctggtaaggttccggttgagctctctggtttgcccaacgtgcaagtgattgcattgcagggaaacaacttctaa

SEQ ID NO: 186993 - DNA, 269 bp, Arabidopsis thaliana landsberg
tacacactacagtgtggcaaaagattgcctgaacaattagacgtgctctcatcttatccaaaagatttccaaagaaacaacaaggtttgtttctaataataaaaaacttcacttatagaaaatctaatcttctatgcattgaaattgtaagtcaatttaatcttattttacaggtgaattgtctacgacaccccaaccattatccagacaagcatgaaaggaacttaaaagttattcaccacaccaaaatcctaaatttatttaaataa

SEQ ID NO: 186994 - DNA, 95 bp, Arabidopsis thaliana landsberg
tgaaatttgacgcggatcgtcgacaaccaaatgccacaatccggtgggtagaaatacccgatgaacaaatttacatattcaacaacataaattaa

SEQ ID NO: 186995 - DNA, 464 bp, Arabidopsis thaliana landsberg
gcggagccgtcgtcggtgacttccgtgatgagatcgatgaatcagatgacggtgaccgaacttcgaaactgaatccatcagatggtctccgaacagaagacggtgacgacgccggggatttcgatgaagcgattctctgacgcgcaccacgtgtccgacggaatgaggaagaggaatcagatgaaaaagcggttgcggtggctgagattaaccggcgcgaagcttgccaggagctgttgatgtcgatcagaactagccgcgaattcaacgccctcatcacgattaattaattattttttttaattatgtactttcaaataaaaaatgaattaaataaaagattctgtcttttcgttttagctactggtgtgtatatctgtctggaaagcagaaatgaagaagctaaaaaggaaaagctgaggaggagaagagctatgaagcacaacgaaacgacaacgttttga

SEQ ID NO: 186996 - DNA, 264 bp, Arabidopsis thaliana landsberg
atggcacccaagagagctagttcgaaggcagccccatccgtcgatgaggcagcgaaggcaacatcgctagccgagaaaaagggcaaggccctcgcagataacaccccccaagaagcctgcgaagatgaagctctcagcaagagacaatgcaacaaacaacccactcccgaaggcaccctatgcacttgcagcttcagaggaaaaccacaagcacccccaggcttcgctccacgagagggcgaggacacaacagaggacgacgaa

SEQ ID NO: 186997 - DNA, 192 bp, Arabidopsis thaliana landsberg
atgcgctggccgaaggggtatccttggatctcggccgcccaattacggacagacgccagattagatcacaccctcaccgcagggaccgccatcggatcaagatccgacgaccaggatttaatgagatctaaaccgttctccaccccccccactcgatcgatgatctacggcacgtattcgacgaacgaaaga

SEQ ID NO: 186998 - DNA, 1834 bp, Arabidopsis thaliana landsberg
  unsure (1)..(1834): unsure at all n locations
aattagacacatgcacatggacttattttctcatgaacatccctcaaggtggttctggtggacatatccatttcagattattatcagattccacaatacagtatgaagtatatcttagatttggtggattgcccactattgacgaccgggattactattatgtaaatcgaacaagtgccagccgctcaatgttcttctcattgtataattctagcaaagaaatggttgatttctacatcttgtatgctcgagaaggaacctggtcatttgggttaaggcagctcattgactctaatactcctgctgcttccagaggttcacctactttagtatctctttctctcgaaagatgcccgagagggtgttcgtcttatgggcaatgccgatatgcttttgacgctaatggattgacatcttacaggttttttatctatctcgagtctgccaaaatatgtaaacatgatggaaagtaaattatcttgagatcaaattcttgtgttgtgtttcagcttttgttcttgtgacagaacccacggaggctttgactgcagcattgaaattgtgtcacaccaaggtatcttaatctatcagtgtttgaaactttgacaacttttctgtatactcatgtgcgtaaaacctgatgcagaacatattgttcagtctattgctctcatcgcatcaaatgcagcggctcttttgccagcttactgggctcttcggcagcgggtaattttcttggtttaacactttaatccggggctcttgttttttttcttttttccatctaaatgctgctgattcatgtcgtaaacaggagtatccagagtgggttctgtttacatccagcggaatctcgagcgctctgtatcatgcatgtgatgtaggcacctggtgtgttttaagttacaatgttttacaggtacgggtagttgagagctgcatcattgtcatcttctatgtgacattatacttaattacgagatggtaatttttttgcttcagttcatggatttctggctctctttcatggccgtggttggtacatttgtgtacttatccacggctggtgaagcagttaaaaggacaatacacacagttgttgccattctcacagctttattggccttgactcaagcaacaaggtatctgagatgtttgactcaatggttgtgataaatagcaccttgatactatttctaaacatttacattggcttgctatctttttgcagggcgtcaaatattatcattgtgttagcaatcggttcactcggtctcctcatcggatttttggtagaatttgttaccaagtatcgatcatactgcgggtcggctggattttcattgaacatgctcgacaggtaaaataaggaagccattctgtttcctgacttacgccgattacctactgtgacaaaatcattatttatctgaggtctgtcatattcttgtcataggccacgggcagtcaaagaatggtttagtaatttgatcaagacgctcaagaaacggtttcgttggggctttgtggcggctggtcttgtagccttcaccatggcagccataagtttcaaagtagaaacnnnnnnnnnnnnnnnnntgtggcacaggtgtgtgtgtatgtaaagtttatcaaatatgaataatatcgattgtatcacttttctgaaggttggcttatgaaaattgtgtgcagtatttggcatttcacaatctacacatcttctttcttcttcctctgttcgaagattgcaattgtaaatcacgagaacctagcccacaacggagctgacaactacgagttaacaaggcaagactcgctatcaagaaactaa

SEQ ID NO: 186999 - DNA, 2826 bp, Arabidopsis thaliana landsberg
atgccagcatttatccttgtgggaggtgagtctctaatgatgaatcagaacgcctacgtaaaggataaacataataaaacgcaattgcgaaaatcgaatgacatattattctctggatgacatgttaaatcaaatcatatagcataataaaatagaagaattttcctctatctcacatcaatgtacatgaagctttcgtttctgtatatacacgtaaataaaacatcggaaaaagatggaaagaacaccaactttgcttctccaatacatgaaactttaacaaaaacaaaaaagaacaccaactttccttaaaatgcttttataaaagtaaaatattcatgcataatttacttgaaacttttcgacactttcatttatttattgaagttaaagaagttggtcacgcgtatgaaatctttggaaaagcaataactgtacggacgtcactctcagatgttaagttcaataagcaaaagaatagcgggacccttcggttttccactttattacgattgtgccatctgactcgtcatttactcctagccgtccgatgaaaaaggcagaatctggagagtgtacagtaactcgaaaacacaggaacatatattcgcatttatacagtacgagtcaaataaaagtcaatgaatctgacggttgagattttcagttggacgaagagtggtccccatgagttaataaaacggcttagtttggtatccacgcgcctccgttggtttatccatttgtagcaaacccgttcaccgtttgaaccgacctctttctctctctctacactctactctaaatactgcagagtgttttgttcgtcgctttcactgccagcctttttttttctctctctcactaaattctctcgccgaccttcttcaaaccctagaaaaacgcttaatttctggaagatccatcgacgaagctcacaacggtatggttagaactttgggtgttcttgtgattgtgcttcttagtgagaattgctttggagattttggaaatgtgggtgaaaaggctgatttttttttacagaatgaattttgaggcttatcgtagtgagtgaccaccatggatgatgatgatgatctctggggtccgccacgaggtaaatctggttggatcaattatggtatctactgttttttttttttttggtcttgatgatgcaaagtttgtgttcttttagtttttgtagttgtgcaagacgatacctttcgtaaacagaccgtacgtcgttgtgaattttggttcgatttcagaacaggtatacactggattttggtttaattgttgttatgattctcttttgagaacaatcgtttgttgctttttttagatgtgctcgaagaaaatttccagaacgaaaagtattgtgagctagtttggaggatattgacagagaagaagaggcaagttactgaaattgctgagcttgagagggtttcagtttcagtatcggctcaaaatgatacggcttcctctgggagtggtggtgacttgcatgagatagactcttctgattctgtaagagactttaagaaatatttgattttgattttgtattcactacagattttgactaggagtaacttgttatgtcttctacaggataagactctcagtactactcttccagattctgatactagttctgctaaactggctcttgatgacgacgaaaacacttctagtatcagcgatgctcagactgctcaaactgttcagatcagagattctagtaacgacgacactgaagatatagagcctgaaacaagattgatgcctcatgagacagcagctaatgatccactaacagttgaggtctgtcgagttttcttaatcctttgtcatgcatccatgggaatcttgtatcatggaactttgtgttttttttatgataggttgcagaagatgcagatacctcttctagcccctgtgttggaaagcaagattgacgaagttgaagaacattcttgttcatccttggttactgaccaagtctttgatcctataaagcaagccctcgagaacaaatcttcatctgctataagccgtgagagtattggaggttccacactgagaccattgcatttagagacccgggagaaggcaaatactacagacgaagatggagatatattgaaggatcaccagcaaaacgatagcttgcaagacattgtaactgtttcggaaccttttaccacagagtctctcttagaaatgtgtgatgaaccggacaaaggcagagatatcccatgtggtgagagaagcaaaaaatcacatcctgaagctgtggtgaagactgtagttaaagacgagctgatcataagcttgcttaccgaggcaagaaaaaaggcagagagcaagaatcctgggtcagtccttataaagaagagacagagacagtctaatagcagtgacaataaaggcgcgaacacaagttttatcagaaacatcaagcagaaagtacaaggtggagctggtgagattaatattgatccagttaaaaactcaacccagtcgacaccaaagatcatcaggggttcgagtgttcccacacagcatgcagattcgttgttggattcttccatggacggaaaaatccagagaggtggaaaaaatgtaagtggctcattgatatcattatccataagtgagttgaagaagaagacaggcaaggaattaagaagcatagcgaaggatctgaaagtacaacattactataagctcaagaaagaagatctgcttcaacggataaccaatcaactaaacccccagttagccgattgtacaaagcagagaatggagtcataa

SEQ ID NO: 187000 - DNA, 254 bp, Arabidopsis thaliana landsberg
atgcaggtagaagaggaggacggcgacaaatacctggtgggcgagctgtgcaaggcccacgactgcgcggccaaccgcctctacgtggccttcagctggaacaagaaggatgcctacgcgctctacgtgcaggtgccggaaaacctgccgccggacaagtcgcccagccgccacgccagcttccgctggctgggcgagccggacgccggcatgcagcagctgctcgacgagcagctcaaggccgatccgaactg

SEQ ID NO: 187001 - DNA, 319 bp, Arabidopsis thaliana landsberg
atggaggataatagctgtatcgggtttgagggatcgaaaagatttggtgagactagtaaacgtatcattggtttgattgactcagtgactgagtcaacgactgattcaagtcttagcagctcaagttctggtgttggatcgagctccgggaggtcttctgtagctgagagatctgtttcatcacctccgacgaaatcgcagattcttggatggccgttaggacaaggttcatggaggaagagttctggtaaaatgaagaagaaaactccgacaaagatcgatgattttgggtttaagagagttggaacagagacttcag

SEQ ID NO: 187002 - DNA, 233 bp, Arabidopsis thaliana landsberg
aaggggaaaatttagggttaagaaccgaaacaaaaggagggtgccgaagcaagattggtatgagccagaaattgaagaagcttacctttggacaggacgagggaagttggagaaggagagatcgcggcgcaggacaaaggaagaagaaccaacgtattggaagaagcctctttagggttgtgttcggaaatcggtataacgagtggtttatcttgggccgctcttacgaataa

SEQ ID NO: 187003 - DNA, 62 bp, Arabidopsis thaliana landsberg
atctatttattgtgtttgaagaaagccaagtctctcgaggctcatataacagccatatgtaa

SEQ ID NO: 187004 - DNA, 515 bp, Arabidopsis thaliana landsberg
atgaaatgcatttggtgtgtcgtgtacaaaataagtacacttgtcaaatctggagctcaaggtgttgctaaccatttgcaacatgaggagaagatgttggtttcaccagatgtggtgagcaaaggaggagagtgtgaagttctgggtcatcgtttcattgccgagaccacaaaatttcattacatacgtaatttctacggtaagataaaacactcttacaagaacttctctgatcttaaaaaagaattttaaaatttggaggtgggatcccctagcagtcgctcacccaaactgaagtgatcgtcaatttgacttgtctacaaaagggagagagaatacaaggggcaacaagactcaagaaggagaaaaagaagtgggaaagaaagaataagagaaatcaatcgaaatcgccggtgaaggaggaagtggcggagccagtgaaggaggagaaggagaaggaggagcaggggactgaaaatgaggaggaagaggaggaggcgacagagacgaagtag

SEQ ID NO: 187005 - DNA, 1858 bp, Arabidopsis thaliana landsberg
atggcttcggtttcacctttggcaaagtttaaactggtgttcttaggagaccaatctgtcggaaaaaccagcatcatcactcgtttcatgtatgacaaattcgacaccacgtaccaggtatttacacagattcctttcacttgttttgtttattcatttaaattcttctctgcgacaacaagtttcttttgttttcgtttttttattgtttgatctgattcattatttcctatattacgattgttcagacgatttcatctcatattggtcctagattacgtcgctgatatcactctggtttttcttcaatgcatttgtttgatcactctgctctctgtttttttggttgatttatcaatctcttcttcttattatgatcaagatcgatgatgctaagcactgttgcttctttgctttcttagttagtcattaagcctttatttgtgttctctctgactctctgcagcctaccattggaatcgattttctatcgaaaacaatgtacctcgaagatcgaacagttcgtttgcagctatggtgagaacaatgttacttttgctctttacctaaaaactaacatgttaatttcaaaagcaataacaaaacaagttttgattgaaagggatactgctggacaagaaagattcaggagtctaatcccaagttacatcagagattcttctgttgccattgttgtatacgatgtatccagtaagtccacctttgtttctctctttgattcaccttcttttttgtgttcttatgtgttcaatcaatactttgtgttgcagataggcaaacgtttctgaatacctcgaaatggattgaggatgttcacagagaaagaggtcaaagcaatgttatcatcgttcttgttggaaacaaaactgatcttgttgaaaaacggtaaatacaaacattaagcaaagaattggatgggatggactatataattctctcttgtcttatatatgtcaatcttgatataatgaaaaacaggcaagtatcaatcagtgaaggagaagacaagggtaaagagtatggagtgatgttcattgagaccagtgccaaagaaaacttcaacattaaggtatgacaaaacttcaacaaagagtatggagtgatgttcatttgagtgtttcttgttgtctgatttctaaacacaccaaatctcttcaatttgcaggctttgttccggaagattgctgcagctttacccggggtagactcatattcattggcaacaaaatcagatgacatggttgatgtgaatctaaagaccacttcaaattcatcacaaggtgagcaacaaggaggagcaggtggtggtggaggctgttcttgttgattcaaaaatacataattccaaaacttgtgaagcaaacaaaagggatcacgttagttttgtggttttcatcttattaactgacacagaatataaaacatcaaagagaaaaggattactatttttacacaagtgaatcttttgccttgttctgtatttgatctgttttagacattgacggtagcagaatacaaaaccttattctgatcaccaccaaatgaaccaaagggagaaggatcaactgtggtgacagcttccttccactcaattgtaccccaaatctcacctttcgaacgaaatctcggcacaccaaacatccaatctctcatcatcatcattacgctcaagccagaagagaacaatgttcacaccaaaactgttcacttgactgatattcttagagcctccaaacctttaactatcttccattctgattcctcagactcttgccaatacactcaccggaagctcatatcggtaccgtataacaacaattcctcaactacacaataa

SEQ ID NO: 187006 - DNA, 149 bp, Arabidopsis thaliana landsberg
aaaggtttttagaaatgttgcagacccggttaaggaaaaccggtctggtcatcgatagtgttggatcgatcgatcccgagctggcggacattttacttcggcggatgagtggtggatcgatcgatccccacctagaaaaacgtacataa

SEQ ID NO: 187007 - DNA, 102 bp, Arabidopsis thaliana landsberg
ttctatgcaaatgattttccattcggaaacacaagacaaccgggaattgtcaacgatgtaaaagaagacaaactcttcgtttcttttgagagggaatgttaa

SEQ ID NO: 187008 - DNA, 1266 bp, Arabidopsis thaliana landsberg
  unsure (1)..(1266): unsure at all n locations
atggctgggatattctcattaggaggtaacaacaacaacaacggagacgaagaagaagaaaatcaacaacaacaaaagacaaattgggtttggtatagatcaaacgcaaacaccaataatatcaacccaagctcgagccaacaagtatggcagattccaccagagcagatgctcatgcatcatcattcacatccacaacaacaaagcttagatctttatccaggtcatcagatcgacgtctctgatttagccacttcatcaagatccatcaccattagctgtcgggactgtgggaaccaagccaagaaagactgcactcatatgcgttgcaggacttgctgtaaaagccgtggattcgattgttccactcacgtcaggagcacgtggatccccgttgcgaggcgccgcgagagacaacagcagcttcatatgtccacatctggaggtggcggcggaacgggtagtggcggtgctggaggaggcggttcgagtatccaaaacgccatagggacctactcttccaggaacatcctcctcttctcgcttgccatgccactcagcaggttttttttttttatgtctttataaacaatttgatatccagacaacttcatatatattcgaaccatatgtttttgttagaagaaacacgaatttttcaacacaaaaatatatgtgagtttaattttcctttcactacttgcacaaattttgtttactttaaaaatacaacattctatatttatttttaatcaaatttcagtgtgaaaaaatgtttgataaaaaacatttaaatgttgtgttctgttttgaagtgaaacataacattaaaacataaacgtaatcttgtgtttatggacgttgattaatgtgtataattgtgtatatatgtttttagggttagaaatgggggaggcaagttttccgggggaagtgagctcagatgcgctttttcggtgtgttaaaatgagtggcgtagatgatggaggagatggtcagtacgcttatcaaacgacggtcaatannnnnnnnnnnnnnnnnnnnnnnnnnnngtatgaccaaggccctgaaagcagctacatgagtggcggtagtggcggaagcgatcatcagagctcatccgcagaggcggaggaggaggacatccgtttaatcctccagttgtgaccgacggtggcggaggagtatcatcggccatgtttgtagatccaaattctggtggttactattcaagtaacatgacgactagtgtgttcatgccaccag

SEQ ID NO: 187009 - DNA, 1074 bp, Arabidopsis thaliana landsberg
aaatctttgtaatcagtttcaccagtgtcagactcgtcaaacatatcgcaattgaggcctgttatgttctcaaactcgtagagcgaaaatcttattggcctgcgatcaatcaaacaccacatctcatgcatgttgtcgactcgcaactgattcgtgaggaagaaatgaactgtctgggcagcccatataaatccactttcagtaaactttataaaaagaccaagtcagacctgattgagagaaactgtgtttacctataacgaatgtaaacacagtttctctagtgaatgtaaatccacttttacatcaatcaaaatctaaatgtgtttacctataacgaatgttgagaagagaaactgccaccacgagaggagagaaaccgtcagacctgattgagagaaacacaattcgccgccgtttgtgttgccggagaagaagaacatgtagatctacaacaacccaaaaccaattttcattagtcagagtcgatttcacaatcttaaatctgaaaagaggatgaatctaaagctgatttcacatctgattgactctgaatttacctatatcgaatccaattaaaaaaagaacccaacagttttcggcagtgaatgggaagaactctaaaccatcggacacgaacgcccaccgctgttcaccgccgcaggtcaaaccggagaagaggcgaactcctcaatgccgtttgtgcagccgaaacccacaacgcagtcaccaccggagaagaagtatccctcgtttgagagagaagaagcagcaacgccaccgccggagaagagatatcttctagacgagcagcgaccaccggagaaaggagccgaagaaccctaaaccatcggacacgaacgcccaccgctgttcaccgccgcaggtcaaaccggacaagaggcgaactcctcaatgccgtttgtgcagccgaaacccacagcgcagtcaccaccggagaagaagtatccctcgtttgagagagaagaagcagcaacgccaccgccggagaagagatatcttctagacgagcagcgaccaccggagaaaggagccaccaccggagaagagtag

SEQ ID NO: 187010 - DNA, 334 bp, Arabidopsis thaliana landsberg
atggacatcgacattatgtttaacttgtcttccgaacagaagtttgacccaaatgatctaccaaagagaaatatgatccgtaattttctcctcgggatctctggtgtcaaagaaatggaaatctcttcgcataccctcgaggtaacatctgctggattctcttatgttcatgcttaagtttttcatgtgagaacttgtattacctctcaaatgcgtttattacctatgctctgtttctgtttttcttgcaggtcatctataattactcaagatgtgaacgattacccgtattccgtaacttatcttccttgcatgctgacttcgacgactacag

SEQ ID NO: 187011 - DNA, 379 bp, Arabidopsis thaliana landsberg
atggcgtcgtggacttcatctgaattcctctatgaagaagtaaaaccaccaggtattcatttcctagaacgtttcaggcgttcaggaaaactctctttcaagcaatatcaagcaatggtctttgtcttgaccttcattgcttatattgccttccacgcaacacgaaagcctaacagcatcgtcaaaggaacactctctgaacaaccaaccggacatttcaagggtgcagataaaggtggatgggctcctttcgatggtccagatggaacagctctgcttggacaaatcgatttggctttcctctctgtttacgcggttggaatgtttgtggctggtcatttgggtgatcgtttggacctcaggacgtttctaacaatag

SEQ ID NO: 187012 - DNA, 620 bp, Arabidopsis thaliana landsberg
atggttctgtccattgttgttgttgatgatcctcaggagaagacaatggattcgttgtggaagaaaccgcacggctctgacctagctcggtctggttctcgggttggagtaacagaagcttatcttgtaatacccgtagaccactttctagcgaatccttcatctctaagactttctccgacaatttattgtcgtcgaggatctttttacgtagaaacagagaaaggtttgttcttttcttgcgtcgctctctctcgtgtagtttgctaaacctctcagccatgtctcgaaccttggattgatcttccggccatgtcttgatgagttctccgtcacgaccataatatatgacacagacttcgatgttgcacagagttgaaagctccaaggctttcttgaacatggtctcttctctcatagacaaattcgtggtcttttttgcagtagaagaagaagacagggacgatttcttgaaacaagtttggtttctcacagacaatttggttttcttcttcgtcgacattgaagaatccattgttgttgtttacccacagaaaaagaagaagaagatacctagtttcttatcagagagaaacctagaaaataaactcttagaataa

SEQ ID NO: 187013 - DNA, 119 bp, Arabidopsis thaliana landsberg
aaagtactgaagcggaaacaactgagcgcagaatccgttgtttcttctttaaacgagcaatacatgagcaggaacagacaactgaagcttgatatagttgatttagatatacaaaacac

SEQ ID NO: 187014 - DNA, 153 bp, Arabidopsis thaliana landsberg
gaaggcactcggctaaaggcagactatgaactaacatgggacaagattggattcttcagaaactcgagaaagccgttggataacagagatggcggatacagaaacgagtcttttggatgcaatcaggatgatttacgccgaaaaagattcagg

SEQ ID NO: 187015 - DNA, 1391 bp, Arabidopsis thaliana landsberg
atgctgctgagagataggtttgctattgactctacgggtgaggagaggagtcgtgttataagttatggtccgtgtcaggtaatgtgaaaccagtatcgataagtttcagagcgatctgtcccattttacatatcagagccagttaatgcagctagtttgatatttctctgcttcaactgaagtttcctacacttggctttattgtcgagcgatactgagaagatccaggcacatgaaccagaagagttttggacaatcaactgttctcaccaatcagaagaaggccttgccacctttaattggatgtacgattttcaactgccttccttattgttgttcccaatcttcttgaaagttacattgatataatttctattgcaggcgtggtcatctcttcgattatgcttcagctgtcatattatatgagatgtgcgttgaggaacctactgccactgtgagtaaaaaagaaacatcttatcagacggaattatatcatctgacactccatctctagttaacattgtgtatttactttataatctccatccaggtaatgaatgtcccacatccaagggaacgattcaagtatcctccttatcctttgaacacgattgaacttgaaaaacgtgcttcaagatatttccgtctgagttcagagcacaccatgaaggtctgaatgagtatttagattggttaagatactttctatgattctttggcctattaggattgcatgttcaacataatctaaattctgttctctcttggtagagttttatgctgtcgtataggctgatatgtctttgaattacaattacatctctcttttgttaaatgacatcaaaaatgtctggacaggtggcagaagaattatatcaggctggtttcatcagctatcctcgtacggagaccgattctttttcgagcaggacagatttacgtgtaagtaacttttttctcatgagccagtaaggttagtttggactttatcatttcctttgatagtctcttaggatctctagttgtgtgtaggctatggtggaggaacaaacaagacatcctgcatggggatcatatgcacaaagattattagaacctgaggggggcctctggagaaaccctgctaatggtggtcatgatgacaaggctcacccacccattcacccaacaaagttttctagcggagagtctaactggagcagagatcaccttgtaagtatggctgtcagtttggtttaacatacccgagcataggtatatgtttctacgttggagccaacattcttttccactatttcagaatgtatatgagctagttgtccgccattacctagcatgtgtttcccagccagcagttgctgctgaaactacagtcgagattgatatcgctg

SEQ ID NO: 187016 - DNA, 278 bp, Arabidopsis thaliana landsberg
atgatcttaaaccaatgttacaggcgtcctactacactgcaagatagaacaagggatagtgacgaagaagacagggactacgatgttgcagctttggcgaacaatttgaaccaagcatttaattacagaatctatggaaatgaggataatgaagaggtattttactgcttatagttgttcttgaaattatgaaacggcttattcgacaccagtttaatccttgtcttatctggcttcaggatcagaatgctctcaatgctctcgatagagacgatagt

SEQ ID NO: 187017 - DNA, 301 bp, Arabidopsis thaliana landsberg
atagcaacacttgagccaatgatctctggattgcaagaagcattgcccaagtccattggattgctttcttttgatggtggtgttacaggttaatgcccggttgcagtagtcttgttgtgtttcgattttctgtgatgttatatttactgatatgtttggtgtttcatttaaaggttgtatgaagcttatacgagagcaactaaactggggcactaagtcagaactcaaatcagaagttctacgaggaataaaggaaattggaagtgtgatatatacaatgggacttctcgatatcgtattg

SEQ ID NO: 187018 - DNA, 873 bp, Arabidopsis thaliana landsberg
atgactaagcacccgcgaccttacaagctacggtggctcaacgacgaagtcgagctgaagattgctgaccaagtcactgttccatttagtgtgggaaagtatagtgatcaagttatatgtgacgtggtgcccatgaaagcaagtcaccttctcctaggaaggccatggcaatttgataaagaaacaatgcacaacggacgcaccaactactactcgttcacccacgacaaacgcaagtataatcttgctctccttaccccactacaagtccaagaaatgcaaattaagtttgcaaatgattctaaggtaagtagaactaacttatcaccatgactcggtgctactaatggtctttaaggaagggttactttcaggtacaaatgagctagagctaccacatgagataacatctttgttagacagatttacggacgtctttcccgacgacattccacctggcttacccccaaaccgaggcattgagcaccaaatcgatcttgttcccggctcagcactccctaaccggccagcctatcgaatgaacccgaccgagactaaagagcttgaaaagcaagttcgggagctgatgtcaaaaggttacatacgagaaagtctaagtccttgcgcagtccccgtccttttggtaccaaagaaagacggaacatagagaatgtgtgtcgattgtcgagccatcaacaacatcaccatcaaataccgtcatcccatcccacagctagacgacatgctagacgaactaagcggtgctaccattttttcaaaagtagatctaaagagtggatatcaccaagtgcgaatgaaagaaggagatgaatggaaagccgcctttaaaaccaaacaccgcctctatgaatg

SEQ ID NO: 187019 - DNA, 1156 bp, Arabidopsis thaliana landsberg
atggcgagacacacggcggcgctgaagatcgggctagctttactggggctgagcatggctggttacattcttggtccgcctctctactggcatctcactgaggctttggccgccgtttccgcctcctcttgtccttcttgcccctgtgaatgctctacctattccgctgtcaccattcccaaaggtaaacagaagttagcttgatctgtgcccatgatttcaacagatctgtggttaaagtttactcctttttgtagagtgatgtaggaatttagcaactttatatcaaattttggtgttgtagctgttggtggaagtaaggattagtagtatcagttggattttcaagtttggctttttttaatctggttccgaggttactgaatttgtaagctttgagcttgattcgtgcttgagtttgagtctgagaatgattagtgtagtaagtaagtgtagatctacttgaattatgtttcattcgtttaggtgttctccatcttaaaaagattatctcagttatttgtccacagtgttgatgctcctattgtttgagttgcattaatggttcaagttatgatttgttaacttctcggattgtggaagttgaagtttactggcgactgttctgataatagccaatcaacaaacaatgcagtttgtttggattgtatgcattgtgattgcttttagaccgatttgattgatagaatttgtttagtgaacccaaagaagactgtagtatgaactcaacatcattatttgtaatgcttgttgtaacagatttcttaagttactatatgtttctcgctaagctgaatttatattcttcttcagatgttaccaattccaaaagattgatccttttttacttgtttcctttcttcttgcagagctcagtaatgcttcttttgctggtgagttaattgtgaatggtatttcgttaactgtatcagtttaaaagtcttttagcaatcgagtctttgtactaaacttctctagttttgaatgtgtagattgtgcaaagcacgatccagaggtgaacgaagacactgagaagaactatgctgaacttcttaccgaggaactgaagctgcgtgaagcagaatctttagagaaacacaaacgagcagacatggggctattggaggccaagaag

SEQ ID NO: 187020 - DNA, 398 bp, Arabidopsis thaliana landsberg
ctgtaatggtgatcaagatgataatgctgatttgcacaaggcaatggcacttgttcctgcaaaatttccagaagatttgaccccattcattacaatgctggtaaaagaactgcctgaatttagaccaggttggcctttgctttgtcgtgtagcttcttcagatgtattagcttctgctccgagaagttcttcgttccgaaagataccagttgtgcagtgggtgctgaagctgcccgctaggaccaattctgttgttggaagctcagacacaaagcagattggttttgattcttctgaatctgaagaaaatgataagttgtctagctcaaacgttgaaaggcaagcaattgttcctgatgaatctatgatcgtgaaatgttctcttgatcatagctcag

SEQ ID NO: 187021 - DNA, 42 bp, Arabidopsis thaliana landsberg
atgaagaagaatgaggaagacgatgacgaattagaagttccg

SEQ ID NO: 187022 - DNA, 73 bp, Arabidopsis thaliana landsberg
aaacgtcgggtcctgtaaagcttcaaccgggtcgataatccgacccacgagcctctgccgcaaatcatcctga

SEQ ID NO: 187023 - DNA, 134 bp, Arabidopsis thaliana landsberg
cactgggctcgctctcgtgtgccatctccgcctcgcccgagctcggccaaggttacctgctccccacgaatcctgcaggtgacactccgccgaatgtggcaacgtcagggaaagacttcagcttcccgagcaag

SEQ ID NO: 187024 - DNA, 304 bp, Arabidopsis thaliana landsberg
atgctcgttgaacaggcgtcacagattcgtgcgtacctcgtacggcgtgaatacccacaggtaggcacccgcggccaggaacgtgttctagagataccgtactcgtgtgaactcggacaagacgcctgtgacctcgggcaaggcctacggcggtcaagacgaggacaggcccagcccggccacggatggtccgggcctgggagaccgtgctggtctggtccggggcggtgctggcccggtcggcgccggtcctggaccggccggtggcggacccgacgccgtccagcccgatcttgttcggcgg

SEQ ID NO: 187025 - DNA, 701 bp, Arabidopsis thaliana landsberg
atgatgatccgtgacgttcgctttcacttcacacttgtacgtgatctaaaacaaaaccacacgctccaacaactcagatctcaacgtcaatggtgatgatggcttgggatcaagttgatttgatgttcttaggttaataacgagttgctggagatgatgacgtgagaaggctgcgcgaagatgacgatataagcatatatacatacacatgtaacaaaatccttagtatttcgtaatttgcttcttttgggcttcaatgggctttatgagattttcttttaaccaaaacaaatagggtgggttcaagttattaggtttggggtgttacactaaaccaaaagaagggaatcaaatggtgaaaagaaaggaatactatgaccgttttccaaagacgaccatttctgaattctttgggtgttttgaggaaatattctaaataataatgctaaatttctcacatcctactaaataatattattatgtttatttctttggtataatgtatagattggtcagtgcaacataatttgtaccataatgaatgtcgacaccgactactcttgatgtttctttagctgcctcaaatgttacaagacaacatataagataccaaaagtggaatatgagattgtcaagaaaagtaagaaacaatttttttggtgtccaacatgtaaggaagacactcctaaagtcatgccaag

SEQ ID NO: 187026 - DNA, 221 bp, Arabidopsis thaliana landsberg
atgactccacttttcaaagccctaaagcacctactgccccaacacgagagcttgttccgaaaggtactgacgtatctctcgagcatttgaaaatttgaacactaattggtgatggccgcccaaattttacctcatatatgttcatatggtctcatactttatcacatgcccactttaggaacttatatttatctttaggattggcaatctcccgaaggccc

SEQ ID NO: 187027 - DNA, 456 bp, Arabidopsis thaliana landsberg
atgggaagggatgatagtgattatcctgaagtagggagaatagagtctcacaaaacaacaggtactactcttttaattagctctaagaattattgtccatgttcaacacctttcttgtttcccaaaaatttgaggacactattttttgcttacgtgaagttgaatagaatctcaatgttttccatttctttatgatgcttccaatcttttgaaacatttttaagctgtgaattatgtgaatcatgtaataggtgcccttctagatgctgatattgggaaaaccagtgccacttatggtaccatatcatcagatgtgacccatggggaaatggttgtggatgttactattgaagatagctattccacagagagtgcctgggttcgatgtgatgattgctttaaatggcgacgaatacctgcttctgttgtaggatcaattgacgagagctctagatg

SEQ ID NO: 187028 - DNA, 1570 bp, Arabidopsis thaliana landsberg
atggctaaaataaaagtgagaagcagatttcatgaacctggtaatcgtcgtcttcgtcgatttggcggatggcaacggagacaagtagaaaggcaataaatattcagataaacgccgtcgtttagaccgatgtattttcattccgctctgctaggctcatttggttttggaccaatcgtcaaattggataacgatattcccgcttatttcgtcgccggctattgtctacttggtcaccggtcaacagtaacgtcttttatcttttctcaaatttttgttttccccctttctttgcattccgtgtacagaaagccagaaactatagcgaacgtatgtaacagttaggtctagctagcgtaatgaaatcattgcatctcctctctttctttctttttttctttggtatgctctgttctgagcagagatctttgggttattcatcgggtctagtagaattgagcctggatttgtttaaatggatgctaatacttggcttatgtagtgttgatcttgtttcttttttttggtgtatctggtaaaaggatcgatagctatgcatagaaaaaacaagattcttggttttctaactaacttttcttaatccgcaggagaaacaagcaaaaatgtcgtcaatcatgaaacctaaagtaagtagatgccaaagactatagaatgcacatgtataaaactgagataactctctattgattgtagtcgaaacatgtttccttgtttgaaacaggaactgttacccgtaactcgagcaaatgtgaaagttcttgctcatattttagagatcataccagttggtacattctctcaaatcatggcaacaactcctaattctggcatcaaggttgaggaggtgcacgaagcagtatatgcacgctggcgtgtatcacgggtaatgccatgtaccatgcatttgttatcaagtatattatgtatatagttatgtaaaaggaaacgcgttctcttcacaatttcagcatgtccatggtgaaagactaacatctatggctgtataaaggaaacagtggattctcttctcttctatgataagaaaacaaaatattgtcttttgtagtttaaaactagacctaggtatcttgttcaaccaaacagttttattggtttaaaagtttttgtagctgttttgttgactgttaatgacaacaaagaagaaagaactaagagaaacgatattatggaaagaccagaagaatgaattgaactaaaatcacgaatagacatgagaatgagatctacactaagccactaaaagcaactggctatttttacaggaaaacctaattttgcctttactctcacggctaatgtaagtagacacatcttcaatgtatattattataaagtgaccaaccaaagtgaactttcttctcactgttttaaggatattttgtgcccacaatgttcacaacacttgtataagcctttttctgtgaaagaatctaggattgactgcaacatggcggattctgcaggaacactgtacatctcttggttcagttcctgcaaaatgcaaaatgtacaaatgtttctgcgatag

SEQ ID NO: 187029 - DNA, 224 bp, Arabidopsis thaliana landsberg
gtattttatgcattgggacaacaatggaaatgaggagacattttggagcaaaagctaaggaaaaggaagttaaggatgattttggattcaagaatcagcgagtagtgtcgatcgacacagtcttggtgtcgatcgaacaccagtttcggcccaacaaagtcctagatgctttcgagtttacagaagaggaaatttgctccagaagacttccctatttgcattaa

SEQ ID NO: 187030 - DNA, 115 bp, Arabidopsis thaliana landsberg
gttccatgttgcatttgttgttctagacggtagtgatatagcaacacttatcgtatcaaactatgtcatcatgcatctaatatgcccactttcatatgagaagttacacaataag

SEQ ID NO: 187031 - DNA, 382 bp, Arabidopsis thaliana landsberg
atgtacaggtattgtgaggagtcatcggtgaccaactgtgatgaagatccagaaacatcttttgtctctggtatgatcaatggtattgcaacagccagaccatgttctagctcgaagtatgaaagctctagcctagaaacaggtctgagatctctgaagtctcctgatcaattcttaaaacggcatgtatctaatgcaaatttcagaagatctcctcttggagctgaatcgtctgtaactcctgagagatattccattggtgatatgcgtaatatgactctagaagcagagtcacctttgaacatgagtggtaattcacatgttttgaagagaagaaagtttactacatcctccatcatcattgaccttgaagaagaaaaca

SEQ ID NO: 187032 - DNA, 827 bp, Arabidopsis thaliana landsberg
gaaacaaagaaggaagccgaaacagaaattgttgtccagacgccgtcagagacgtctcaggcgacgacacgaagcgagtttccgtataacagtttgtctcaaaccacggcaccagcgagcgggttcgcgtgggcagggacaaagaagaggaaagaaaatgacgtagcttcaacgctgacttataaccagccaggatctgcgagccacgtgagtggtatgagcatggcttttgctaagaacactttcgggttaacgataaacgaagacaaaccgtttcttaggccgcacgtttctctggacccctctgatgtgttgttgttctctggcgtgaatcacaagaaaacagaagaagatatggtaagtcaaattgaacccggtaccatctaaaccggcagttggaattcaattttaatttttgataaaatcatgcaggatttgacgaatcttggggcgaatccgaagatttttcaaacaaatgggatgaatgaaatattacggaggactgaaagtgatgttagagttggtgttcgaagaccaccacgaatagagagaggttaaaatttggggaaaaagcgaattaaattaccagaatttttagccaaagatatatatatacattttttacctaccatcatgatttgtagtccatatttgtttaatttttcatttaaaaaaaaaagcccaagtcagtgtgaaattattcaatttcaggtttacgaaaagataattgtgtcttttttttattattattacaaatttccttgtatttttgtgagagtttatctcacacttgatgtgttttttttttttttgcaggagaagattaa

SEQ ID NO: 187033 - DNA, 328 bp, Arabidopsis thaliana landsberg
ttatcctatgcagccgtgctgggcatactgctgttcatgaaacccctgtaccggcttatctactgccacaacaaacttctgaatggtatctggcaactgaatgccattacattatctgcacaggtatttaccctgccgctgatactctattattttcaccagttccccaacctgttcctgttcaccaattttattgcagtgcctttatcaggtatcattctttacggggaactgttattaccgatagcacagtgccttcctgccgcgggagcatataccggcaaagccgtttccttttgcattcaactgatgaacgggctgatcgagc

SEQ ID NO: 187034 - DNA, 110 bp, Arabidopsis thaliana landsberg
cgtcggagattcgtttcttcacatctgagaaaccaaacatttgcaatgaatcaatcaataaaaatgaattcaaaaaccttaacaaagaacacacaattaccagattgtga

SEQ ID NO: 187035 - DNA, 480 bp, Arabidopsis thaliana landsberg
atgaacctgtacctgtatgacacgcatacaggcaagcagctgcacccgatcaccaccggcgccggcgacgtcatccaggtgctgcacgtggacaagcaaacgcacacgctgtggtacgtgggcgtgggccgcacaccgggcatcaacccgtattaccggcaattgttcaaggtgaacatcgacaccggcaagaccacgctgctcacgcccgggaaccatgacaacaacgtcaccctgtcgcccgacggcaagtacttcgtcgatgccgcgtccaccgcgaccacgccgccggtgaccacactgcgcagcgcttccgacggccacgtcatcgccaccgtcgccaaggccgacatctcgcacctggtcgcttccggctgggtgccgccggtgccgttcacggtcaaggcgcgcgacggcaagaccgacctgtacggctttctctacaagccgtccaactttgatccgcacaaaaagtatccg

SEQ ID NO: 187036 - DNA, 990 bp, Arabidopsis thaliana landsberg
atgtctgctgcagatgacgatgatgaatatgaggacaacagcaggggttttaaccttggattcatctttggaaatgttgataactctggggacttggacgctgattaccttgatgaggtaatctgttttacgctttcagtatgatgaccttgttgaacacattattttcattatcggtctcagtttttctgtctattctctctggacttaggatatatgtattttattaactatgagttgcaaattctccaccaagcatacctgtgccaatgctaacatttaaacttttcaggacgccaaagaacatctttctgcattggcagataagctgggttcatctctaccagatataaatgtaacgttctacacactctttaatattttatcttctaaagtttatagacgagtgaactgcgagtcttttatgtggtttttaatcctctttttcttgtactgggatgccaataatggtgtttctaaactcaacagttattggcaaaatcagaacgtacagcaagtgatccagctgagcaaggtgatgttgtctgccagggtcgtctatcttatgcagtttttattgttcatttaacttctagttttcattctaccgtttctttaaaccatactggagtagcttctaggaaacctgctagaaagtttttctcccagtgaatgtttccatcacaatggtcttgcactcttcttactttcgttgtagtcataatccaattattattggattgtttaagaaagtgtcttgcgtaatttatatgcataaacattttaactactcacgtttacaatctttaaatatgcaacattcctgcccgtagcatttacatactgacactatttacactaccaaatcctggtcatcagcgtcattgactgtggtgatatgttgtgtagattatgatagaaaagctgaggatgctgttgattatgaggatattgatgaagagtacgatgggcccgaagttcaagtagtca

SEQ ID NO: 187037 - DNA, 925 bp, Arabidopsis thaliana landsberg
  unsure (1)..(925): unsure at all n locations
atgtaaatcttaccagaaagccaaaaagaaattgatgatattggaaggacccaatattcttactgtcgtgctgaaacgttttcaggtgagagtcttcatcctcgttagtttgaaggtgtctactattgttgggttaactcagaagaatgatttatttttccatgcagtctgataactttgggaagctgagcaaacccatccattttcccgagcttctcgatattagcccgtatatgagtgacccaaatcatggggatcatccggtttatagtctctacgcagtggtggtccatttggatgctatgagcactttattttcaggtcattatgtttgctacataaaaaccctcgatggagattggttcaaaattgatgacagcaatgtaggtctcaatatatcatgtatactatntagataccaattatgctattgcctatttctcgaatcttgattttgattctgaattcgcaggttttcccggttcagttagagactgtgttactagaaggagcatacatgcttctttatgcaaggtgaatgaatacaaagagtggacacatatcataaaacccaactcttgttcattttactaatatagctgaggaaatcctcttctttgacagggattctccgagaccggtgagcaagaacggtggtcggaaatcaaagcaaagaagaaatttggccgcaattccgtcaagaaagggcaacaagaaacagagagacggtgataataacagtttgttgccgcgtgtggactggtcgagtggaagcctgtcgtcaatgtttagctcatcggacacaacaagctcatgtagcgcaaaagactcatcaggtattgagaatttatcagattacctgtttggtggagttgaaccggtttggaaatgggatcgtcataataaatctcaaacgtttgattga

SEQ ID NO: 187038 - DNA, 136 bp, Arabidopsis thaliana landsberg
atgacggaatatgccagaagaaatgcagccctcctcacggaatccctgctggaccaaggaaaaatgggagacatcactcaggccctcatgaacaaacagctggacctgtttggtggctgccacgctaccacgacta

SEQ ID NO: 187039 - DNA, 363 bp, Arabidopsis thaliana landsberg
aagaagaggccgagtagaataacggagctagagttgctagtctcgcagcttcaggaggagctaaaaaagccgaaagatcaaatctcagtgtctgaaacatcaaagaagcaagcagaccaagaagcagaggagtccaggaaacagctccaagaagtttcttctaagcttgaggagagccagaatcagtttgtggaaacttcagccttgcaagaagaaaccgataaagccggttctcttgtttttcaaagtgtatctcaggagtgtgattgggagtttagtgctactgctggtgaaagagcaggattagctgctgttgatcatgccatccccccactcaagcttcagattgagatggaggcttaa

SEQ ID NO: 187040 - DNA, 2434 bp, Arabidopsis thaliana landsberg
atggctagagtaaaagactcaactggggaatatgaatcaactagggttgaagcgaccggcgaaattcctccatcagtcgaagaggccgccgccgagattccccaaagagatgaagaaggcgcagagcttcttacaacagaagaggaagccgaagaaattcagcctacaaccggcgattgtgacgtcgccgatttgggtaattcaaacgccgtcgcaggggattcaattgacgatctttcagacccaaatgtcgattttcttgcagaagaagaagaggcaacgaatgcagttgttcaacatgatgatggagcaaataaggtatgagagaagaccgttattttttggattaggctcgttttaggatattatgcattggtaaatgattggatttgtgaatggtgcttcagataaaacaagtagtacaactaggtcgtaaatttgtgaatggtcattcagaaacaagtagtacaactaggtagttaatgtggaattgaaagtattttgaattgaatatgcaggatgatggtgatgatgataacctgtcgcagaatatgcaggatggtgatgatgataacctgccgcagaatatgcaggatgatgatgatgatgataatcaaccattgccgccagaagttatgtactttgatccaactacctacacgaaggtgtgtaagataggaacgaggtgtcagttggtacaaacagtggaatttatagagactttggatgcagaactcaagtggtttaggaatcatgaccaatttaagcacatattccacatgcctaaggagcccaatcacatgattcaaggcatgtggatgcttatggttcgcacggctaagacagaattggcgagagagtgttggtttgttgtcaatggagtacctataaggtactcaattagagagcatgcattgttgactggtttgaactgccgtgagtacccaaaaaactataagactttaggcagtttgaagtttgttgagaagttgtttaagaggactgaggacatcaagattaaagacgtggaagagaagctggaagagtttaagagtgagaagtctactgctaggttgaagttggcaattctgttattcttagctaaggttatgaaagctgattctaaaggggattcgaagatagaggagttgctgcttaggattgtggataatgtcagagcttgtgagacattcccgtggggacgtttttcctatgagcagtgtatggaaggggtgcagagagtaatgaagaacatgaaaggtgtggtgaaacccaaggcacagactgctttttatggatttattactccacttgaggtaagtagtcgagtaaattatatgagtggctagattttgttattgtgaacttgcatttacttttatgtttttgtgtctagattctggcatttgagtgcattccgcagcttgggaagagatttagagaagttgtacatgcagacaaggaatgtccaagaatgtgcaagcacaagttcagtgaaagttgcatgaagggatttactttggaagaaataaatgaagcgcttggagatataacggttagctttgttctcttgaaatctatgtttataatctttgtagtgtttgaaatatatgtttacttgacaggatatttcaagcatcttggaacctgatatggatgagagaaaaatgttgtcacgcgttgtagagaagcatgttgatgatggtattggatatatcgatccaattgttgatagctggagagagaggcttatcgttttcgcacggctaaaattttttggcgtagtctctaccaagcagacattgatggtagacgtattgaaactgttgatgatgttccagctgtacctgaacctaaaatccctgggacatcgattctctcgttcaaggaagctatggagagaggatttgacaagctcacggacaagcttgctgtgatggatagcgaaatcaagcggatttgtgtgagagtacaaggaatagaggaatatgtggcagatcagcttgagaaagaggcagaaaaagacaaatatgaagatatgcgtcctggttcagctgctgattttgtgccaccgtcttatcagcgaagggatactcagagcaaggccatggttattcacagtggaatccgtgacccagcacctccaactattgagtctctaagtgagtttttgttgaacttttgtgtagtgatgctttcacaatagttcttacatgtttggttacatatttttgtaggtgatggcagcgatgagtccgatgaagaggataagaagaagaagaagaagaagaagaagcagatatcgaagaagaagagaaagcatgttggtcctactatggaatctgggaaaaaacgtggaaggaaaccttccaagtataagggggaagagtttacagctgaggggaagcaaacgaggaagagacagaagaattag

SEQ ID NO: 187041 - DNA, 158 bp, Arabidopsis thaliana landsberg
caaccaccaagaatgaagaagataaagatgaagaggatgatgaagaaggcgaagaggatgaagaagagagatctggagatcagagcccatctagcaatagctatgaggaagagagtgggagtcaccaccatgatcagaacaagaagaatggaggatcc

SEQ ID NO: 187042 - DNA, 1059 bp, Arabidopsis thaliana landsberg
atgaagcagaaacgaagaaaacttccgtctatactagatatattagaccaaaaagtggatagttctatggcttttgattccccggaatacacttcttcctctaaaccaagtaagcagcggcttaagactgattcgactcctgaaaggaactcctctaagaggaaaggaaatgatggggtaacttcattttatctttctggtgttcttaaaagtttgtctccttattttattatatggtgttgtttaattaatcatttttctttccttacagaattattttgaatgtgtgatctgtgaccttggtggtgatttattgtgttgtgatagttgtcctcggacctatcataccgcatgcctcaatccacctcttaaggtaaatgattttttttttttccatgtgtcgtttgtagtcgtagattcgcaacacctaaatttgggaaacttgtcttactccttatctcgtctcctccagcggattccaaatggtaagtggatctgcccaaaatgttccccaaacagtgaagcactcaagcctgtcaatcgtttagatgccattgctaagcgagcaagaacaaaaaccaagaaaagaaattcaaaagccggaccaaagtgcgaaagagcttctcagatttattgcagttctataatttctggagaacaatcttcagagaaagggaaatctatatcggccgaagagagcaaatccacaggaaaggaagtttattcttccccgatggatggctgttcaactgctgagcttggtcatgcatctgcggatgaccgacctgattcatcgtctcatggagaagatgatttggggaaacccgtcatacccactgcagatttaccatctgatgcaggattaacgttgctgtcctgtgaagatctctccgaatctaaactatcagatacggagaaaactcatgaagcacccgtggagaagttggaacatgcttccagtgagatcgtggagaacaagacagttgctgaaatggagactggaaaaggtaaaaggaaaaaacggaagcgtgaactaaatgatggggaaagtcttgaaag

SEQ ID NO: 187043 - DNA, 4084 bp, Arabidopsis thaliana landsberg
gtagttagtgaagcacagagaggacatgtttttggtgaagttggggtactatgttacagaccgcagctgtttactgttcgtaccaagcgattgagtcagttgcttcgtctgaaccgtacagtactcttaaatcttgttcaggcaaatgtaggagatggagcaataatcatgaataatcttcttcaggtttgtaataactctgaacagtacagtttgtttcaacctgttgacacacaggaccagttccataacagatatgttgtggttcatgcagcatttaaaagactcagaagatccagtgatgaaaggcgttttggctgatacagaacacatgttggctcaagggaaaatggatttacctctcagcttgtgctttgctgcagccagaggagatgatttattgctgcatcagttactaagacgaggctcaagccctaatgaaatggataaggacgggcgaactgcgctggtaagcccggatttcctttgtatataccatcatcctccttttaatgcctaaaccaaattttctcactctctatgcttcttctttgaatatctcagcatatagcagcatcaaaaggaagccattatgcgttcgttttacttctcgaacatggagcagatcctaacattagaggtaagtagtaaaaaataatgtttcactaggtcaattagcttaggatgataggatcatgtagtactaaattatcggtggctcgtacattgtttacagattccgaaggcaatgtacccttgtgggaagcaatcataggaagacatagagaaattgctaaactccttgcagagaatggagcaaagctaagcttagactcagtgagctatttctctggcttagccgtggagaaaaactgcttagacgcactcaaagacatcatcaaatatggcggcgacgtcacactccctgatggaaacggaaccatagctttacacagagcagtgtcagaaggacacttggagattgtgaagttcttactagaccaaggtgctgacttggactggccggattcttacggatggactcctcgtggtcttgccgaccatcaagggaatgaagaaatcaaaaccttgtttcataatcacaggcctgtggagaaaaaaccgaaacctgtccctggaatacctcagagtcctgtgacagggaagccattgatgaagtatagcagtgagcctacaatgcattcaggagaactcgtcttagacgggggtcaggttgttgtttctcagaaacggaaactcaataacttcagaaactcgctcttcggaatcatttcagctgcaaatagcggtaaaaccacctcacctctccatctgctctctagatactcgttgctttctcgtcacgtaaccataattttcagaacttttcacatcacaatagtcattcttatatacaattcacaactttcattacattgttctgttcctcacaactttacaaatttggttttcatttctggcttttttccagctgatgatggaggagaagttccaagaagtccagcggttcctggaggaggaggtagtatggtttatccggcgagagtgacgataagttcgccggaaaacggtgaaactggtggaaaagttgttttgttgccaaattctatggaagagctattgaaaattggtgaaaataagatgggtttcgtcccaactaaagtacttacgagagaaggagctgaaattgacgacatcactcttatcagagatggcgattttctccttctatcaagggatccttgattcacacgcaactctctttcgattttgagtaatgaaaactattggtgttgaacgcatactgcgcaaccaccacagtcaagctttatggtggtgatatgatgctaatattaggggaaaccgtaagccccaatcaactccgggattgaaatatcttttaggttttttttttgcttttgtgtatatattcactgcttactatttttcacatgtatatatatatcctgttgactattttctgttaaaagaactctctaacaacctcatgatattaacatcgaaatctacaagaagtatggaaacaatcttgtttttttcagaaagcatacaaggataaaggtcctttcttaaacgtctagacaatcttcttctctaagtctctaagaagaagcaagtgttaaaatttataacttttgtgcgaggtcgagatttgagagtaactcctcactcatcttttccaatcaagcttaaatcctctctaggtgacttatcctatttctgagatgaattatcatctcatctttcatttttgtttagatccatgatggtaaagtgatattgatgggacttgggagccaaagcattaccgaaaatgagcacaatgattgagatagagttagagacaacacacactataatattattattatttcatgcttcaaatgcaagaaggtaatatttgaatcagactctagagagcttaatctgctcccatctctctgaccaatacgaaacatccgcaatctgctcaatcaacctaaagaggtgaagttgtattttatgtctagttgaattaaaacccttgtcaaattagacaatggtttaaggttgatgagaatttgatgttggaaaaaaaaagtgatataaaagataaaagcggttcaaaacggttttgcgattgatgttaaaagagtgcgaccggttgtgggagaaccggtcaactcctagtcctagaggctagagagtgttgtgttgtgtgatttgtggtgcagataatatcttaaccggcttcaacttttaaaatctagctcggttagcattttaaaactgttttctggtttgattccgtgtctatctctcggctccgttgtatcggaaggtagatattaaaactgaaagaccactgccgtcgagagcaactcaaaagatcatcagaaccgattcgaacgatgtcgtttgggtctctcgtgcttccatctccaccttcctccttgtctgcaaatgtcaagcatttcaatggctacggtaggcttaatcgtaatctcgtgcgagcttcttcgtccgatgttcccgatttcctctctgccgattggtacgcctttaaatctctttttcactcaaatttcgtcgattttcatatgtttcaagctttgggtgttgctgggttttagctaggaaacgaacagatctgaatgcgtccatcaattggtttgtagaattctggttcccacaaactaaaatgatcaaaaattcgattttgcaaagctatagttgtagggcgtagccattagagatcctttctatgtttctccatcttttttcttcataacttatgtttatggatggatggttttaccaggttggagagccgtaggaaacgaccttttggccccagacttgatgtaaatgaaacactatttactacataagcttggaacattaccttgctttgtctctattgtagtgtactgatccgagttttagatattcttttttggtcatagtttagtgcagaagacgctgttcgacatcagcttgatgcattgaagtataatgaccatcctcgtgatgattatggcattgaggtcatgtatcgggtaaaccacatcacgaacttccttgttgtttctttcagttactacagcttttgtaatgttttgaaatgttttgtcaaaaaaacaataacagtttgctggattcgatccatttgagagatccacctatttcggtcctttctttgatcttggacaggttaacttaaaacctttcttttaccaaaactttgatgatcattagatcatattgttccttagctaaggttcttatcccctggttctcatttgttactgcagtttgaaaggtttaggcgtatttttcatcactcgtcttaccgtgtgttgcttggtcacaaggatagaaaacttttaagcagtttgttcgtggaggaggtatcatctcttttgttaatatgttacaattattatagagctcccctcatgatatcctctttttcgatatgcagaatcgtttcaagcagaggatctggattcagggaaatcgacctgaagaggaagagatatttgaattcacaatgttccag

SEQ ID NO: 187044 - DNA, 202 bp, Arabidopsis thaliana landsberg
gggttgaagcttgagctttgcacttcagatagagtcgggttactctcggatgtgactcgaatcttccgcgaaaacagtctcacagtaacaagagctgaagtgaaaacaaaaggagacaaagctcttaacacattctacgtgagggacgcttctggctaccaagttgataccaagaccatagaatccattagacaagtcatcg

SEQ ID NO: 187045 - DNA, 530 bp, Arabidopsis thaliana landsberg
atggcagtgaggcaaacggagttttgaatatttgccatactttttttaatctttcatacacttcaaagatataaaaccttttcttctttattgttctttgtcacacttttataatcaaaagacgaggttgtatttatatatgaattctagttgactttttgcctatccaataaactcctagccacgttaattatgcatgacgacatatgtctatccaaattatttgctaaaattaaattacgaagtccaaaagtttaatttcgctttgcaaatttaactacatattttaatctcgagaaatataaaaccattattattagcaggaaattagtggtaaaatatgtgtaatgttttgtacttttacgataaaatgtttttagcttaaacacgcaattgttgaagaaggtgaactagttacccgagatcatatttggaagaacttgatgaagtatgatcacgatcgagataactcaacatttatgactacgcttcagcaattgttaatgccagtaggcctcacgagtacatga

SEQ ID NO: 187046 - DNA, 272 bp, Arabidopsis thaliana landsberg
agctaaccacgtgttgtatagtactcacaaccacaacccagccaaagcggattaggcttcgtttggatatatgtggttatcgtccaccggtaaatagggacgaaaacggtcggaaatggtcggtaaacactaaaaccattaccgttttcatattttttatcggaaacaaaatcgaaaacggtaactccggaaacggaaacgatatcggtatttcggaaacatcggaaacgaaagttcggtgcggaaaatacaccggtaacgtcgaaatctaa

SEQ ID NO: 187047 - DNA, 517 bp, Arabidopsis thaliana landsberg
atggtacagaatttacaagacgagatgatggatctgatggatgttagttctgaaattcaagaatcacttggtaggagctacaatattcctgatggccttgacgaggatgacctcatgggaggtaaagtgcttgttttgtaattggaagtttaagatcaatcgcttgctacgctatgcgtctctcatatcatttacattcttttgatatatttcagagcttgatgctcttgaagctgacatgggaaacgagaccgaagcagatggaatgccttcttatctccaacctgatacagaaactgattacgatagcgagcttaacttgcctgcagcaccaacaggacacaatggagctccacatggaagagctcaggttaacttttaattcttggaattttgaaatgcttcaagtatgattaccttttgatggttggctaatgagaccgtttaacgatgtgattaacaggctgaggacgaatttggattaccagcagtgccacgagcttctctccggggttaa

SEQ ID NO: 187048 - DNA, 257 bp, Arabidopsis thaliana landsberg
ttataaaggtcttacatcctttcgggtgtgatgagtctttggctactctgttgtctgctattcctactgatgaagagattatagggtcagtgttctcaatgcctaagaacaaggcgcccaatccatatggttttcgtgtggattttttttgggattcgtgggctgtggtgaacgatactgttatttttgctgtgagggaattctttcttacatctattgaagaagttcaatgcaactgccattactcttattcttaa

SEQ ID NO: 187049 - DNA, 773 bp, Arabidopsis thaliana landsberg
gtacaaaacaatttatgcaccccaaaaaatggagaaattttagtagcatcaacgcaggactttttgacatcttcttttttgataacgagaaaggacacattttatgaccgtgcagccttttcacttatatgttcttacatgggagatgggatggattccatagatttgccaacacccacaatccttaaggtatgagatttttacctctgtagttcatcacaactgacttcagagtgttaaatagcaacagcttgttctgttggtgtcaactatcttatatatatttttctgtgcgtgtgttaatttctcattagctttttgctgccctatttcttctggtaatctggcgtcattgattctgaaattgagcgataatagttgggttgtatgacattgtacattattttctttagtcaatgagttcaaacttcaaattctgttagttattgatattttaatctgcgtgggcaaataagttggggacactgggaattcttctgccatttttagcactttctttcctttctattgaatttcttatccagattctatatttttgatgcagccaatagagctttggactggtaaacagatctttagtgttttgctgcgtccaaatgcaagtattagagtctacgtaactcttaatgtgaaagagaagaacttcaagaagggagagcatggtttcgatgaaacaatgtgcataaatgatggatgggtttattttcgaaacagtgagctaatatcaggacagttggggaaggctacgttag

SEQ ID NO: 187050 - DNA, 460 bp, Arabidopsis thaliana landsberg
atagtgggaaggttgatttgatcatgaactgtgtcgagcgtcacagtggaggcttctctgctggtggtgggatatctagtgggtaagttttagtttgtttgctacttacagcgattcaatttttttcttttgtagcttgatgacaacttttgtccaattcttttgtaggatcacaagtggccccctatcaggattaattggaaggtaaaagtaatgtatattttatttgtaatgattattttttatttctggcctaggctgtgtgtattacattactgatgtagttgaagtaatcattttatgcagcttcgcttattcccaccgcaatctgtttggaagaaaccagaagcttaatgtttccttagagaggggtcaaattgactctatatttcgtataaactacactgatccatggattgaaggagatgacaagaggacgtccagatctattatggttcag

SEQ ID NO: 187051 - DNA, 125 bp, Arabidopsis thaliana landsberg
atggcaacgaaaaataagtcatcatcatcatcatcaacgttgacagactggtctcttctaccggaggagttacttcaaattgtcaccaaaaatgttgaaaactgtgtcgatgttgttcacgctca

SEQ ID NO: 187052 - DNA, 310 bp, Arabidopsis thaliana landsberg
atgcagaattccataaatccagatagctatttccttgtattggaggtaaagttggccttaatcgaacttggggggtagcaatgtggttttcatgtaaaagttactcattgtccagagttgtaactacaggtatcggagaaacgtggctcgggtagctcatctaagggtcaatgtccttataaggttcgtcatttactcatagattttctcttgtacatgctcatatttgctgactaaatttctctcaggttcttcgcttgctagatgagcacacaggagtggaatgcgctttgtatctctgggatgaatg

SEQ ID NO: 187053 - DNA, 537 bp, Arabidopsis thaliana landsberg
atgtcagatgtaatagcggagcacgcggtggatactagtgttgaaggagatgcaaaggctgcgttaccggttcaatcgacgaaacagttctctgtgtatgaagcgacttcggaagagcttatagaacgatcaatggctcctattaagaaggagttcctttgtcctcctcctccaagccgttccgtgaagcaaaatgatgccgccgatgttagggcgcctcaatcgggtttggttcaggagaagaaatctaaacgacaactgaaacgggaacgccgcgaggtattgattcgaatcacatcggtgcttgtatgtatagcttcgaatctatctatgttttaagaactagtttttttggcaactgaaaccattggatatgagagagagtttagaacaggagggattaatttatgctctttcttcttgcagcaatctacgatcaatctctgtccgcaggttgcgagaacagaagacgttgattcatgtcagtataaagacaagtgccggtttaatcatgatattgaggctttcaaggctcag

SEQ ID NO: 187054 - DNA, 344 bp, Arabidopsis thaliana landsberg
atggccgccaggggaattgagatacatatggatcggcttcgaaggattctcagactcgaggtaaagaagctgagcgacgacgacgtgagatgtgtcgtcattaatgggaccgttgatgcagataatacgctccttaagcaaacgagagaagatgtcgtaagctctctctcctcgcgatgagtgctcaataaccatcggaatcagactgtagcttcttctaccagtggcgatgcttgtcgccatcgacgatggggttgatgatagcatcttggcgccggaaacgagacccctcatcatcggaatctaaggttgttctcggaagagtgaaattgctcgagaaatga

SEQ ID NO: 187055 - DNA, 476 bp, Arabidopsis thaliana landsberg
ctcgaaggatgtcaccgccgagttgagccccgtggcaatcgccctgcacgcgaagacgcttcacgtccgagcaatgaccgtgcgcacactgacactagatgacgtcttcatgtaactcacgggatcgcacattcaaaaagccgtgccggcgtgacggtcgtccacgctggccccgttctcgacagtcaggccgggtttcgtcgtaacatcacctcggtggcgggtcgtgcacttcgacaaatgcggcgagaaccgaccgcggtgcttcctgccgtgttcgtcaccgccttgttctacattgtcaaccacggtgccctggaaaatgtggccagccacgcaggcagcttggactacaaggcgttcctcattccgatggccatcgcctttgccgtcaccggtatgacccgagcgccggcactggtcaccgacattcaggacggttacatcgaccgtctctgcctgacaccgattcgacg

SEQ ID NO: 187056 - DNA, 738 bp, Arabidopsis thaliana landsberg
atgcaggcaaccacctcgctagatccggatgatgtgactattttgagtgtgctaccagctatttctgatactggtgctctcagtctcggtgaatggtgtcactgttttgtgcagaggaaaaagctcgataagaaggtgaaagtgtgtacagcaattcttgatatgtattccaaatgcggggagatagagaaggcgaaaagaatctttgatgagatgccagagaaacaagtagcgtcttggaatgctatgatacatgggtatgctttgaatgggaatgcacgtgcagctttggatctattcgtaacaatgatgatagaagaaaagccagatgagatcacaatgctcgcggttatcacagcttgtaaccatggtggattagtggaggaaggaagaaaatggttccacgtgatgagagaaatgggcctgaatgctaaaattgagcactatggctgtatggttgatctactaggcagagcagggagcctaaaagaagcagaggatttgattaccaacatgccttttgagccaaatggtattattctaagctctttcttgtctgcgtgtggtcaatacaaagatatagaaagggctgagagaattctgaagaaggcagtcgaattggaacctcagaacgatgggagttatgtgctgttgaggaacttgtacgctgcagataaaagatgggacgacttcgggatggtgaaaaacgtgatgaggaggaaccaagccaagaaagag

SEQ ID NO: 187057 - DNA, 93 bp, Arabidopsis thaliana landsberg
atgagaatcggacccattttgtgtccctacaaactacacaagagtactgtatgcacgcatgcttcgggaaaacttgttaatcaaattggataa

SEQ ID NO: 187058 - DNA, 239 bp, Arabidopsis thaliana landsberg
atggggcactcgatgaagactatccaatggattactatgcacaaaaaggtgaagaatggaactcttcatatctcaagaagtcatctcgtcccattcgaagaaaccctttaccttcttctgtagtttagaatgctgacagagtaaattcaaccacagcaggtattaccaagtcaaaaaggcaaatgggttttgatgatgttcctggtattttcggatgggttgatttgcttgtatcgtaa

SEQ ID NO: 187059 - DNA, 137 bp, Arabidopsis thaliana landsberg
accaaaatagtcctcaagaaatcactcgatcaaacggtggtggtgcttctctcatttggtcattcaaatcagcgactcaaaacactcctcctcattcaactcgatcaacggttgagatctttcttgacttggtttga

SEQ ID NO: 187060 - DNA, 14 bp, Arabidopsis thaliana landsberg
gcgagtttgtttga

SEQ ID NO: 187061 - DNA, 119 bp, Arabidopsis thaliana landsberg
atccgaatcatgagaagcttcttcgacccttgactctggatttctctccaattttgatttctcaacgaacacccggaggagaagaagaagaaaaaactaaaaaaaaaattgcgagttag

SEQ ID NO: 187062 - DNA, 141 bp, Arabidopsis thaliana landsberg
gaagagtatgttgatggagatgaattagggactattccatgtcaacatatgtaccatgtgagctgtgtacaacaatggctgcggatgaagaattggtgcccaatctgcaaaacctctgcggaagaagagaagtcgatttag

SEQ ID NO: 187063 - DNA, 959 bp, Arabidopsis thaliana landsberg
aattaaaacaaagagcccgatttggggatgatttcacgaagaattgtcacgttcaagtcaacaacttcgtggagaagcctgcttatgatcagatggtcacgttcaagacaaggactttgttgctaagtccgtccatggtattaatgaggatgagttatctatctacataaagcactttcttgaggtagccgtcaatgatatatatggtgataaattatctactatagaaccactcttcgatgtcaaggaagtcagtgacagtgttgtcgatgttgaaggcgacgatggtttaataaaccccaacgacacggacgatgacgctgatgttgcagatcctgatgaacatgatcaaattcaagaggaagatagtgactttgatgccaaaaagcttgatattaatttatctacatcggagtccctctccaatggggatttaatatatgatgtcaaagttaacatgccgattgataatatcaaacccatagatttcgtttccaatgtctttgctctggtgtgatgaagacgtcaaagacgcatatttcatcgggaatcaagaagtggaatcacatattaaccatgaactagtcatcaacaatcttgacgagaaggaggaagtttcatttatgtacaaggaaaaatacaattattctatttctcttgcaaatcgtcaatggaatgtcaatgacgaacctccagatcgtggtcgaagtgagattttggtttttgacggtaaggttgatctctgcaacaagctctatggtactctggtttcttatatctctaatgagaaaactcattgttatgatgattcttacgaagaagacaaagagataattgaagttaaattgcttgagaaatcaaaaattcttgtaccttttcgtcattggagattgataagagaagatttccatgtgagcagttctgcatgtgagttacgagagaaatcaaaaagaggatga

SEQ ID NO: 187064 - DNA, 112 bp, Arabidopsis thaliana landsberg
atgaagaatgggtcaacggcgggtcggtatgagtcttggtttggcgcgccgccgccggccaacccggcgcgcgataccaacacaccgaaaggctggaagagtcaggctttcg

SEQ ID NO: 187065 - DNA, 633 bp, Arabidopsis thaliana landsberg
atggcaatatctccaccaactgtaagtaaacagaacacactttgtgtttagagatttgtaaaagaagctttatattcagattctaagattcacataccgggtctatatacacatgcacatatatggtatctgtagaggtgtatggaaagcttaccaagcaatatatgaagtatatgattgggtgatcataagatatgaagatctgctgcagtatcaaacgcatcaaagcacatctagaccattaacagaagatgatatgaaagatctggttagctgtggtttcggagatccaccaacacagagaattcaatcaacaagatatggtctaatggtatcaatagtatgatgtgtatatctttaccatgatacatctgatgaggaaacatgtaaagcatatggttgtcacgtagccaacctgcaattcgtacaacacataaagggggtaaggatccaagaaacggaatttaaagatcggggtaactttggtttaatattcaaggttcacctcttgtagcttcttgcgccgccctttagactctactggaaatcgttgcagcatcaggaaaagcctgcaaagaaataatcatcaaagacgataaatcaaggcgacttcatgagaaacttccttcataa

SEQ ID NO: 187066 - DNA, 240 bp, Arabidopsis thaliana landsberg
gtcgatgagcttcttgccacgggggtagatgtgaccatctataatggacaagtaagaccatcattatttataagaagaccaattatatagttgattaatatcaaagataagaaatcatttgcataattgcatcttgaaatatgaatctaaagaatgagataaattgacatgtggtttatatacgcagcttgatgttatctgtacaacaagaggaactgaagcatgggttcacaaactcag

SEQ ID NO: 187067 - DNA, 287 bp, Arabidopsis thaliana landsberg
atggccaagtccttcatcatcgccctcgaaggctcggccctaacctggtataccaggttgcccccgctgtctatcgactcctggagaagtctccgggacaaatttctgctcaacttccaagggtaccgcccagacaccgacgccttggccgaattgtcactctacaagcaactagagaaagaaactttgcgggagtactaccgcaagttcctgactctcaagtcacaactgccttcgatcgatgaccaaatcgccattcactatgccatcagtggcttcgggcgggc

SEQ ID NO: 187068 - DNA, 69 bp, Arabidopsis thaliana landsberg
atgactagcgtggaacagcaagctgacggagacagtgaacgggcaactgacacgacaagaccccgggac

SEQ ID NO: 187069 - DNA, 977 bp, Arabidopsis thaliana landsberg
atgaacagtaccttgatttgcttctcaatcggatcataccctacaaagctatacgaattttcgtaccttgtccttgtcagtttaggtaggaccgcatattgtcccgtgcgagagttacataccaccggcactgtatatgcgcctttcatcatagagaaatggatcaaaccagagcaactatgaaaatctgggaacgtgcttacagagaacttcatgtgaaaatcagctactacaaaagacggcttcacatatatattctgattttgaggcgaagagaagacgctgaagctccatttacggttgtgttggaggacgaataagagacgtggacgagcacgcgacctggtcaagaacagctcggtgaaatatggacggcgaaacatagacccccatagcttcgacacgcagcgaaaccttgcgactgactccgctggtaatcttgaatgtatctcaataatgagatcaatcgggatagattctaacttttctcctccgttcatgatgtctcctggtattttgcttataacaaggagaaagatagacgactatatatctaaggtttgaagcctagggcatttattcagtactgaccgaaccgaaccctaattgccgaggttcgtgtaattctgtttgatttggctttaaaggcattaaccaatcagtaacagatagaatattctcaaatattagtttgaaatactgtagatattctccctgtatctagggaaatccctgaacatattgtaacaactttggctatatattgaatgcaatacagagagctctcctgatcggagactttcattatctttcaagcctttgttatattgaacggttcgatcaggaacacaccaacatataagtgaaaccgatcggtttgacctaataaaaccctagatcaaattttctagttcgtaagccgctcgctatattcttttctttaagaccaagctatttatatcaagcaaggcaagtaa

SEQ ID NO: 187070 - DNA, 400 bp, Arabidopsis thaliana landsberg
ctcctgccgaactcggagagacaactccacgaagaaccaatcttgacgaagtcatccgatttttcctcgaccgactcgacttacaggacacaagaactgccaaacgcatcaacgcgattgtcgatgcccagaatgcatcgcagaatcaaatcgagcaactcaagtcctccgtagctcgcgccggtcgacagctcagcgatgacgaaacaatcccgcccaagcaactcctttcatggaaagaccggtgaaccgacgcaataggccggcttctatcgtcgttgggtccatcgacgagcacacccgtgaaaatgcgctgaaacgtgacaaccagccgtacatcgacactcgaacatgccgaatagaagacgactatatcggtgttagcgaccgtgttctctaa

SEQ ID NO: 187071 - DNA, 125 bp, Arabidopsis thaliana landsberg
aatgtccttccacacctcgttcagttcgctgttttcagcaactggttataaagaaaagagtattactattgtctgaattgcgggtagataaacaagaaacaaaatcgaatatagatatgatgtaa

SEQ ID NO: 187072 - DNA, 210 bp, Arabidopsis thaliana landsberg
atgcgactagtctccagaattatgtgttcacgaatgggtgagatgattgatttgtttctactcgctctcatggccggattcattgcagtggcgtatgttttccgatcaaagcagaagaagaatttaccgccaaatcctgtaggttttccggtgatcggacacctgcaccttctcaaagaacctgttcaccgttcccttcgtgactattga

SEQ ID NO: 187073 - DNA, 567 bp, Arabidopsis thaliana landsberg
atgtcggtttccgtacaaggacataatatcatagaagaagcgcttcttccatattttcaggtgaataaagcttctttctatctataagctagtatgatggcagatgagaagcattcacgtgttacccaccgaggacgtgtataattatgtataatgatagggcgagtctctatcctcagattaatgtgatactaatatgttgattggcataagaaaatgttctgatatatatatgatgtcactcagctgaaattatgaacctcggtgtttgtaattcgaagtttgaggaaggtctgactaattaaattcattttgcagaaattcgacatatggcctgttaatgttcgagttgattacagtccccatcatgttgatatagcagcactaacaggagggaaatatgcagagcttgtgaaccttgtaccctggaaggtaagaaacaaaactttccaacctgcgtcttcaagattatttcagcataatttgctcatcacagaagaacaaatgcaggggattgaattacaactcaaacatgtgcatgctgctggaatctatggctggggaaat

SEQ ID NO: 187074 - DNA, 477 bp, Arabidopsis thaliana landsberg
atgtctgttgccaatttgttgaatcgaattgggaggacaagtcttgaacaagaacagcttcagcggtcatggcaggactttgtcaatttgatcagtttgaagcccgtgacaatctataatacggattttaaagcgacgacgtactacaacaatgacacggtcaaaacaaattttgtcggcatgaatatgctcaatctgacaaaatctctgatccgattggtttttcgtggttacagcgatcactcaagtgctttcgtttttgatactaaaatgccgttgtcgggaatgattcaatttgaagaagacttccgtgattttggtcgtgccattggctttttagatgcccgacaaccgaatccggccgagcgaactttcaaagagggaaatttctttagttatcatggcaatggagactcttttttaacaccgaccgaattttatgagcaactgaccgttctgatcactggcggaagtctg

SEQ ID NO: 187075 - DNA, 361 bp, Arabidopsis thaliana landsberg
atttgtctcttgcgagactcgatgaagcttcatcaatttcttgtgttccttttcttgttcctctcatgttttgctctttcttcatgggctcttcctctctgttccgattcaagtgagtgatttttttttgttatcctattgatttgatattagttctgctattgtagattgatgcaacattttgttttttgatggtttttcaggagctccctcggaggtgaattcgacattgagcttttgtccttacaaaggaaaaacatgctgcaatacaatgaaagataccagtttgatgaagcaatttcaagctatgaacatttccgacaagggttgtgcttctgttgtaaaatcaatcctttgtgct

SEQ ID NO: 187076 - DNA, 719 bp, Arabidopsis thaliana landsberg
aaaaaagagacaaggaataacctgatggaactatcagattctgctagagcaaagcttgatcaagcaaaactgatgagatccaaccttcttcaggaaaattcgaaggttatttacttcacatccactttttactattggtagttttggttctagcactttgtatttgggatatgtgttgtttcctatttataaacttagttacttttccctttccagtaattccttaaataagaagaaaaacaatttggagtgcacagatttgtctctttaagcaactctgaattatataatttcatttcagatcaagctatcaattgagaatgtgaagcacaagattaatgagtttaaggtaattaccctctgtaatctttgctagcattgtgatgttgctgttgcatgagttcagtcatgtaagattttgtcctgcatctgatactatactattttctgaattcgtcaacaatgcagccagagttaatgtcagtggatattaagatcctagaagaggaatacacagctctattgtcagatgagtccggagaggcagagtatctcagttcgctacagagtcaggctgagaaactgaaggttacactgattttatataggcgtgatttgattactaactatatgatcatgaccacctccacttgttgcagggaatttcttacattgctaaatgtggttgtggagaggaatacagtgttggtttagattag

SEQ ID NO: 187077 - DNA, 162 bp, Arabidopsis thaliana landsberg
gttattcaaacaacgaattgccaattgatcgtgttgaatcgggaaggaaaaaaaaacagaacaccgatatcgggttttgaatccgggaattcaatattcgacaaccacatcaaggaggagagattgcgaatacgaacgaatcgtaaagatctaggggactga

SEQ ID NO: 187078 - DNA, 199 bp, Arabidopsis thaliana landsberg
atgttcggcaaacggcaactgattagtgcaaccttacctaacgacaaagtggacactgcggaattctacaagcatattgcggccgactgcctgcaagagccaatgcgaatgacgcagcttctgatctggtgcggtacacgcgcgctgctggaaaagccgcctggctcgcgctctggagacgagagcgcacgattagcat

SEQ ID NO: 187079 - DNA, 570 bp, Arabidopsis thaliana landsberg
ggattatgtcgaaagagcagaagatttatgatatatgttcattcaaaagggatggttgttgatgatgagtatgtggtaattggatctgcaaacataaaccaaagatcaatggaggggacaagagatacagagattgcaatgggagcttaccagcctcaacatacatgggcacgacgacagtcaggtcctcggggtcaggtaatagcacacaaagatagtacacacatggtttcatagtcctagtcgtatcaataatacttggtacataatctgcagatctacggatatagaatgtcgctttgggcagaacacatggcactgctagatgattgctttgtggatccagagagtctagagtgtgtaaggaaagtgagaacagtggcggaggagaactgggaacagtttaggagtgaggaagtgtcggagatgagaggacatctgatgaaatatccggtggaagttgatcggaaaggcaaagtccgaccacttccaggaagtgaggagttccctgatgtcggaggaaacgttgttggatcctttctagccatacaggagaatctcactatctaa

SEQ ID NO: 187080 - DNA, 1412 bp, Arabidopsis thaliana landsberg
agaagatcgtcgtttcgctaatctaagaggagttcgttggcgtgtgaatctcggagttcttccgtctttggcttcttcaatcgatgaatttcgcagagcagcagccaattctcgccgaaggtaaacatttctgaattttggtaaattttcctctttttgtggaagtgtgttcataaaaccctaaacctcatatcaaaaaacatggttgttaatgatcaatggttctttatcaataatgtgtagtgcaatgtttcgttatgtagatatgctcttctcaggagaagacttttgatggatccacatgtactcaaacatgaagatagttccccgaattttatcattgacaaccctttgtcgcaaaatccgagtaagcttttgtttcctttgttcatagcatatctaatttcatcaatatcaactgctatttgaatgagctcatctgcaaagcatatatattgtctctagagtggtcagatatgtttgtttggctaattggaggtcttaaattcttaatcattgttcaacacatgtagttcgaaaacttaaaagttaaattgttagttcctatgtgtttaagcttatttgtctagtttaaggcagttataagtattgaggttacatgtatgatcaacgtctttctatgatgtttgtgcttccttagtgatgtcttgagactttgagtaatcatttctacgcagatagcacatggggtcaattctttcgtaacgctgagttggagaaaacacttgatcaagacttgtcgaggttatatccagaacactggtgttattttcaaacgccgagataccaaggcatgctaagacgcattttattgttgtggtgccttaagcatcctgagtatgggtataggcaaggtacatgtttggcacctttctttgttgttactgttagctgcaatttattggtctgtctcatccttgttgtttcttgctttttcaactacaagtgaaggcaaacacaaagaagaaattacatactatttgattagtgaaatggctatagaaatgagcttgctgatacatgctaattctcttaacaagtactttctgctaagagttcaattgcttttgtatcatgtgctttttctcatctttttgcaggaatgcacgagcttttggcacccctcctttatgtacttcatgttgatatcatgcgtctttctgaagtgcgtaaaagctatgaagattactttaccgatagatttgatagtttatctttcatggaaagagatatcacttatacctttgatttcaataagtttatggactccgtggacaatgggattggttcccaaggacattcaaagaattttaatagtctagatgagcttgattctgaagtccagtccctagtgatgttgactgattcttatgggacagaaagtgaacttg

SEQ ID NO: 187081 - DNA, 75 bp, Arabidopsis thaliana landsberg
atggccattatcgtgcaaatatatcgtgaaagctctctgatcaatgatcgaaaagcatgcactttgtcaacccta

SEQ ID NO: 187082 - DNA, 393 bp, Arabidopsis thaliana landsberg
ggaacctgtgtccaagagccggtatgtagtttacagttcaagtttaagctcgattctgtatttgattatcacttaccacaagtagtgacacttttttttttattccaacagcctctgctgatccaaattcggatgtttaatgatggctctgctgttaagggaattttcctattaaacaagaacgtaagtagactctctttcatgtcacagaaccagatttttgagctaatcctaaaattgctcccaatttggcagcttcctccacagaccgtccaggttcgaccttctatgatcaaggtgtataaagataaaaatttgtcaaattttagcacgtttaactccctggaggtagtcactacccggtatatgtctcttggatttatgttatcttaa

SEQ ID NO: 187083 - DNA, 593 bp, Arabidopsis thaliana landsberg
atgaatcgatggagacgtaaccagccaccgttgcagaagaagccaatcagtactggaagtgtcagccaacagtggtaaacagagccaccgatgtcggaaaaaacagcttccaccgcttatacgcaagtgatgccagacgcagagcccaacgacattgcgacataagtctccataaaaactctagcccccaaaatcaggtcgagaacctgttttctctctgaaaggtattagagagagaagagggagagaaaagatcctcccgagaaaatgacatcaataagggtatttagggttgccttgcaacctctatttcacccttaatttcatcttataatctataaatagttttagttttgcttttatttctcaacgacgacgtggttaacttcttcatctccatccttcttaatcttcttcatagctgtcgacgccacgctctccctttcctccgtcggatccactactacttccaccggatccaccttttttcaaagttctcggagacaacgaagaagactaagcatgtcggaggaaactttctgaagaaatttgagggatcaaggactgaaaatcaacctcctccatcaagtaag

SEQ ID NO: 187084 - DNA, 121 bp, Arabidopsis thaliana landsberg
caagaaagtggaggacttagctacaatactgttttttctaatgatgaatccaacattgggatttgcaagaagggatcaagatgggtcaagatcggagccaagcatgaagacggaagatgat

SEQ ID NO: 187085 - DNA, 108 bp, Arabidopsis thaliana landsberg
acgacaaaacacgaaggtgatgaaaagaaaacttggatttgtaaaaatgacattacaagtagaacaccacataaatttgagacgagaaacgcttttcgatcaaattag

SEQ ID NO: 187086 - DNA, 121 bp, Arabidopsis thaliana landsberg
gtccagggcacgtgcccccgcacctgtcaacgacaatacgctactggtgcctatgcacaatgtaaccattccaacttccgacgcctatattcgcttctccaactgtcacgatgtggatatt

SEQ ID NO: 187087 - DNA, 1415 bp, Arabidopsis thaliana landsberg
atggcagataactttaactatcccccagactggactccgaatcaaagtaaagaaaataggcgagggaattttggtcataaggtaaatatagtcaaatactatattagttcattccagtgattccctagtttccaagttgtaacatcgggaggtagatactacttttggttagattcacacaattagattgcttatgggatccataaatagagtgatgaggctaaaccaaagtataacatgaaactattatgatgatcgaaagtaactaaagtgtgtactttgcttgagttggtgtcactgtgttggtttggctcgatgttaaagtctacccatggttttcattttgttgatcgatcagaagctttgtttctgttactctctgtaaacatgagatagtcattcagacagatcctcagaactgcgagtatgtcatcactagtggtgcccagaagaaggttgaggaatatgaagcagaagatgcagaaaccatggagctcactgctgagcaaggttggtttcttctaccttcttctacgattttattctctatagatctctctatagctgtttgtattttaactcttcttatttcttcaatcttgacatgctttgggataagaaattttgcagagaagggaaagcttgcagaccccttttatcgtctagagcaccaggaagtagatttacagaagaagaaagcagcagaaccgtttttggtccgcctccagcgagtttcagacgcaagacatgctgatggtttctccctaaacagcacaacttagggttagttccaagtttgcaaattattctctgcttgcagtccgattttcgatcgtactttctaactttgttctcatttgtcagggacacagaaaacatgtagcagaagaagaggctgcttcaaggaagctaggcttggggagaagtcagacttcttcgaaagagtgaagaagatattaaggctacctcaaacgtgaaatccaagagcaagtttgataagaatcgaaaggacaaaagagcactgatccatgcatcttccatttttcctgagtcagcttactcggtgtcatcatcgagcaagagaagaatggagctggaaggaaagagaaggaaaataaccgcagcatcagcatcaaatctactgaggggaggattcaaagcttcagcattgtctaaaacgccatcaacaagcaaatgtaaggaagctgtagatttagcagctgtgcttgaaatgaatcaatgtaagaagcaataataaaaaaagtcaacttattcataagtgcagatgttctacgtttgtaaaattgaacttgatcccgacaaaacaataattagctctattcaaaatcaattagtagtataaatctaattcttgtactgttatagtgtttttctccgttgtcgtcgtgtcataa

SEQ ID NO: 187088 - DNA, 165 bp, Arabidopsis thaliana landsberg
gaagtagatgagtacgatagcttttacagaaataacatggactctctgggatattctgggatttatattcagagaaccggccagaggaagcgtgatggttgtgcaatcttctacaagccaagctggtatgataaaaacattaagcgtgacaagacgttaacttaa

SEQ ID NO: 187089 - DNA, 2316 bp, Arabidopsis thaliana landsberg
atggcttccctcactcctggagttctctccaaccttctcaatatcgccgccggaaactcaccttcttcgccgccattgttgtcttctcatcgttcaccactcctccaagtcatagaaatcgttccttgtctctctgacgaccaatggcgtagcgaagcattcttcgtcaaagtctctgactctctccacgcagcttacgtcgccgtttccaccggtgatgacgctgatctgatacgttccgatgaaattcagctaggacaattcatttacatatgcggtggtttacacgtcgagaaaggatgtcctgttcctgtaatccgtggtttgaaaccagtccctaagcggaggatgtgtgttggaaaccctagcgatctttattctagcgatttgctgcttccttttactcaggtctctgtttctccgacgacgacgaagaaaaagaatcttgttgaaacaaggagattgagtttggattccgcgagaaggagttgttgggatcaaactcctccggtgactcgtcgtcgtgacgctgcattgcttctttcttcaccacgtcttaaatctaaattggtacacctttcatctttttttttttttttttttttttcttctgtgaatcgctctgttttagtggtttgtagggattcttgtcctttaagttgcctacaatggtatgagattgatatatgtgacatgtgagaaaccaacaatactactagactagtcttcgtagaccttgaatgttgctctgtgagtcactctgtttgattctttttgttgcatttggttggattgtggaagctgttgttttgagtggtgtagggtttcttgttctttaagttgctaaaatagtttgtttcaggaagaccttaaaagttgtttcttatagatagtacagcaatttgatattggtttcacagttcatacacttgaagtccttggctttcacagatttgtgatgtttttgcaggtcttgaatgataagagtctgctaaagattgagtccccatcaaagtactttaactgtggaacctctcctgccttaaggaacaagaatgtggttaagcctggatcacctatatccatggctagttctccgaaagatggtatcaagtcacctatatcaaagcaccttaactgcgaaacccctgctttaagaagcagatatgtggtcaagcctgcatcacctatatccgtgactaggtctcctaaagatggtatcaagtccttgtcaaaggcagtgactcctccggttgcgctttttaaggtgccttcaagtcacatgacttggtctgatcaaagaatgtcatggagtggactcccaaaaaccattcaattgctcggaaaggtacggtatttggatcaatctaccgactctaagaattcgtagtcatgtctttcaacccctcctttcaggaagtttcatcacataggcaagtagcagtttcggcagcagtaagtgcactggaggaagcatctgccatggagtctgttctatttagtttgcagtatgtcttctctatttcatccctaaccagtttcattacacgagtttgcgagtccttaataatagcatacatatgaatttgttccttcagggcctttgccgagctgtgtgattctactaagaagttatctactggacaagtagtggcccggttcttggacatctaccacaatacacagaatacatgcaaagcggtccatcggttgcttactcaaaatcgaaacaacggctcgtgtagattagtagtaaataaaaatgcaacatcttgggttcaagctgcggtagtgactggtttttctcacttcaacttatttaaagagcctggaaagaaaggtgatgctgctgatcatcactacattgttatgcagaactcatccgagaaactgaaccccaaggagacaacaagttcaagaaccccatcctacaaaggcgcgaaaccgcctgcaacgaaacattgttctgtttcagaccgaagtagcttagaaggtaaaagcagtctgaaggattcaacgagtctagcggatgagctagtccaagtttccagccaatggttcttgaaatatttggagaattcattgaacaaagggtctttcttggtgaagacggaagaaacaaatggaaaagagtctcttctcgtccaccttaaagctttaaaccattggctcgatgatctgaacttaaacagaacagaaacgaacgagaaagtcgaagatttaagaaagaagctgcaacggtttctacttgagcatattgaatctgtcattggggatacttacaatatgaaaagaaagattataaattccatctaa

SEQ ID NO: 187090 - DNA, 435 bp, Arabidopsis thaliana landsberg
atgactgcacgcagctcttatacggaactccaaaatttcacccgcgatctaaaccggacaacgctccccagattgccgcctgttcctggctcagaaggcgactttgaatatttgcagcaaattgagatatggaaacgctggattaactgggagaaaggagatccccttgttctgaaggaagacgatttgactgcatacaaaggccgtgtggtttatgtttacaagcaagccctcatggcactcacatttctccccgagatttggttcgaggcggctgatttctgctttctgaatgacatggagacagaagggaacgagtttctgaagaacggcatagacgctaacccggaaagttgtttgctcgcgttcaagcgtgcagaccggctcgaaataacttgtgagtccgaacaagatcccatcaagcgaggcgctaaa

SEQ ID NO: 187091 - DNA, 553 bp, Arabidopsis thaliana landsberg
cggaaaaagtggtacaatcaagaccgaagactctgattttggcgtgaaatacataaagccatataagcagcttaggtattttcctgaaggagcacgaaactgctataatctgactgtcatgcagggcacacattatcttatcagagccgtgttcgtatatggaaattatgacctcaaacaaagaccaaaatttgatctatatcttggccccaatttctggacaactataaatttgcaagatccttggggtggtttctattatcggatttggttggaagatggtaccgtagaggaggtaatccacatgccaaagtcaaacaatttggatatttgtttggttaagacaggaacaacgacgccattcatatcatccttggaactacgtcccttgagagatgacacctatactactacaaccggctctctaaaactaaatctccgctggtatttcaagaagccttcccccactcatgaatccatcatacgggaagtcaactcatcctatcttacgggaattttcttggttccatcatacgggatgtcaatcatttaa

SEQ ID NO: 187092 - DNA, 52 bp, Arabidopsis thaliana landsberg
atggggctgctcgagccgcacaggcccctatgggttggtgatgaccgtgcta

SEQ ID NO: 187093 - DNA, 264 bp, Arabidopsis thaliana landsberg
atgggccacaacacgccaccaccggcgataccagcaccagtaggagcttatgcaggggagggagctactccaggagaggttagtttgataaacaatttgtttgaataatggtcatgcatgtaatcattgccgttattaatgtcttcttttttctttagaatccaaacctgttacacgattcgtcaacgagtttttcgcttctagaggatgtggtcacaactccaacgaccccgatatgtgatggtgttagttttgtgccgaatt

SEQ ID NO: 187094 - DNA, 75 bp, Arabidopsis thaliana landsberg
agtgataaccctgttattattctgttaacgaaaattcaacggcaagcctttaacggctcggtcaacgaaacttag

SEQ ID NO: 187095 - DNA, 388 bp, Arabidopsis thaliana landsberg
atgtcctatgatccggtcgaagaatattcaagtaagatctttctctctttgtcgaaattgtttgtctatgatctcgattagctttcatctgatcgatccgtcattagttaaccagcgtatatctaaccgtcgatctgccttagtaaatcccttaattataatggatctgcttttttttcaattccgtctcgtaattataatgaaacctggcagatgctgacgcatgcatcttttgggacatggggagttacccatccctaatggtctggatccttgtttagttaaagagaagatcaactcagagctcatggatctaggttgtaggggggatgtgtcaatgcacgcttacggtaataaggatacattctcggatgacacaaaacgttga

SEQ ID NO: 187096 - DNA, 493 bp, Arabidopsis thaliana landsberg
ctgtcaccggacttcatagacaaatttgcacggcagacgggacatgtggaccgagaagagagccattcgtcaatgcaattagcatggaaagtatggctacaaggaggcatccaacgtagcgactcttcgtcttcaaactcgcatagacaaattgcacattcaactccgccgttgcctatcttgaacgctttaacctctgaatataggaaagccggaaaggactcgatgacgtccttgtcaatcccacgcctcactctactgtgtaacatttcatgacctcctgtctcattctcttcaatacaacatccatagtttaagcaataaacgaccaaaagtaagaggaacaacgaaagcaaaacgatcccaattatcgatgactctttactttttccattgcgacctgctgattccgacccttgctggcaagttacgtaaggcaaacattggaaaaggaagagtggcaataaaacacatgctaggatccgatggctga

SEQ ID NO: 187097 - DNA, 411 bp, Arabidopsis thaliana landsberg
cgagtggaggatgttcgcccaactgcgctccttctacaatcgggctggagttggatttctggtggctggtggaaccgccacagcgagacgaagaccatcgtcaccagcaagcgggagaacgggtcgacgacgctggtgagctctctcatctgtattctacactaaattatgaattactcttgcattgtccgtctgtcatctgaaaatttatctctcgctgtatcggcgtctgaatggttggtggttttccacaaggtccaattcgaccaggggcatgatctggtgctgactggaccctacagggccatctctgcgtacgggagcgtctccgttgaaatcgacagctccaccacgacagactcctccaactcctacattgaacttggcatctccacggcagagatagactac

SEQ ID NO: 187098 - DNA, 655 bp, Arabidopsis thaliana landsberg
atgataggcaaggcagaagaacactgtgaaaatgatcgtggtgctgttagcgaattagaaaaacttgagtgcgcggatgaacctgaaattggtatgagttctgaaagttttcagttaactccaacttcagattctgaaatgataatgaaccttgaggtcgctggaggaatagatgtcgttgtaattggttgtggttcttccgatcaaaaagctgaagaagaatctgaaaatgaaggaaatcaagaatcagacgatactgataggaagttgtcacttcctgatgaagatagagcatcaagtttaataagttcctttgaaacagccaatgagactgtggaagatgggaatcagattaataagcaggtcaattttcagtctgatagcgaagcaaaccaaatctcagtgggcatagaagaaaccagtttgctttcggttaaagacattgagaggaccatgcctgaaaactcttccgtaattgcttatgatataatggaaaatgagacgatggcacggctgattcataatcacacttttatggagcttgacgagtacgaaggaacaggtgatacaagtgagaaactcactggatccagtttccagaattcttcagaactattatcctctaatcattctgtggagctgataagtgagagaa

SEQ ID NO: 187099 - DNA, 261 bp, Arabidopsis thaliana landsberg
atgggagagcagcgccccgcgcgagcgaggcttcttcggacgactcctcgccggcaagcgaagctgaactctcttggcgagcggagggtgtcagccctccgtgctccggtagacgacaacgcaaaaaagcccgtcacggcaactcgctaacgtcgactgccgggagactccaatcgatcggcggcagccccgcttcgagcagcgcggcgttggcacgggaaaagggcttgctgccgaaaaatccgtaccgcgccgcgagcg

SEQ ID NO: 187100 - DNA, 381 bp, Arabidopsis thaliana landsberg
atgaggttcacatttggtgtcacaggatggccaggttccgtacatgacacaagagtattacaagatactttaataacttatgcggacaggtcccccatccaccggaaggtatataaatattttgtacatttgtagaatacagtactattttatgtcatatgtatgtaacatttgtatttaatgtttgtgcaggtaaatactatcttgtcgattcgggttatccaaatagaaaggggtaccttgcaccttataagggtcagaagtaccacattacggaatggcaaaatgcgaggcaacctattgggagcaaagaagtattcaactatgcacactcatcgctacgaaatgttattgagcgatcatttggggtgctcaaaatga

SEQ ID NO: 187101 - DNA, 562 bp, Arabidopsis thaliana landsberg
ttgaatctactgagaaatggattcagattgttgaaagaagctggcactctagtgtacagcacctgcaggtgaaaagtccaatcacaataagctctctgtgctcttgcctctccttttttctattcttttagacgtgagtcagtgatctaagtcgtgtaactatcagtttgacgcatgcccaaaacgaagatgtggtggatcagttcctttctgaaaatttctctgcaggtacttaaagtatattttcaacaaattaacaacattcattgtggtaccgttttcgaaaaaaaactcgatactttgtaggtgctataggtcagattttgtgtgattttgtatatttcttgttccttacttatggactagtgggaagactaacagaaaactgggttatgacgatgcagagctacaagagattgaaatggccaaggattggccgtgtagaagtggtcgcacgcctaagacactgcggtttgatccttccacctcagcaaccagcggccttttcgttgcaaaaatcaggaaattgccacccaacgaagcaaagaagaatgtgttgtga

SEQ ID NO: 187102 - DNA, 258 bp, Arabidopsis thaliana landsberg
gagtgtggaggaaatgcttcgttgctggtttcagaaaatgaacacaatgaccttgttggatataaccctgtctcagccgccacaagtgatgtgtttccttcaccactaatagagaattcaaacaccgatcaagagacattgacaagaacttcatcaagctttgatcaagagacagccatagtagcacacaatcaaagctttcatcaagatgacgactattctaagtatttgaccactgcagaaaactttaatgacatg

SEQ ID NO: 187103 - DNA, 460 bp, Arabidopsis thaliana landsberg
atggtcgatgatgcacctcgaatcggtacgcaccctgcactaatctcaaccgtccctaatagaatcaatgactccaatccatctccttcatcccgcaggcaggccacggtggcgcgccctgaccgtggcggcgctttcgccggagatggcaccacgacccataataccggttgtccgtgtgcgtaatatgaagagtaggttgaggcaaaacagggaagtacacccttaccggtggttagggtgatggcaggggtactcctggggaggtgcgaatccgaggggaaggcctatactccgatgagcaattcgtcgagcaccagcgcacgaccacacccgcgcagacctcgaaagcaatcccgaaggtgcagtggagctccggaccgccggtgactccaatcgacggcgcaggacacgacacgacgatgtcgaaattcccgcgacacgagatctacggctttga

SEQ ID NO: 187104 - DNA, 513 bp, Arabidopsis thaliana landsberg
  unsure (1)..(513): unsure at all n locations
gtggcgttacaggagttgagccttcaggtgcaggtggagaaggattctctggagtctgcggtgacggattagctacaacaggcggcgatgaggacggagatgtaggaggtgacgtttcttgcgttggtggtgcaggcggcggtgaaaaagaagcggagatatctggcggaggagcagatattgatgatggtggtggtgaagaaggtggtgttggcggcgatgactcattagacggcgatgttccgtttgacggtggtgtcccatttgaggtttcaggggcaggagatgaatccaccggtgagtccgccattttgaatgttgttattnnnnnnnnnnnnnnnnnnnnnnnnnnnnctccccggtgatccacgacgcaactgccttgtttcccaagcaaaaccaatacttgtgaagaagcaaatcgtatgcaatggaaacccagaatttggagagattgatgagtacctgatgaagaagattagaaagaaaatgaaagggagagagaaattgtag

SEQ ID NO: 187105 - DNA, 1619 bp, Arabidopsis thaliana landsberg
atgagttccgttaccgagatcgtgtctgagcagcaagtgatcgacggtattcaggatttggctcttcaaaatcaggttctttgttacccttattcaattcatattctcgtctcttgatgaaaattttcaaattttaaatatgtttgctttgtgtgtcggtcttgtttcggagttggagctgattctgtccatgatgcttctgcttctaagtggaaatgtatctagccttgctccacaatattagggtttcgtaaatttttgattttgtgcgttattatgtgtttaatttcgaattggacgattagggctcttcaggtttacaatgtgaagttgactgttgctgaatttgctactgatattgtttatgaatctgctttctttttctcttcataactttcacagaacttaggtctcttgttcttacatctaaacataactctttaagatgatgttgtgtgttctctgcatgtggaggtgatttaagagattttatctgaacctctctctcaggacaaaaagaagatccaggaagagatccatgagccgagtttcgggaatcatggtggctgttgtgcaatatgtttgagtgaaattcctcttcaagaaactgctatggtcaaaggctgtgaacacacttactggtaatactgttgtttcttctctttgtttcttttagatgatatacatctgatttggttacatctatattttatttgttacaaagtttagtctgtactgtagtatgaacatattgatttcgtcaaatgaattttgttttcttctcacaagttttcagttgtggaatttggttttaggtttaacctgtaaactcgtgatcaccttttatcttctgtgtttgcttttatgcctacgtggtaactgactttctttctactttgggttttaagaggagtaattcatttctatctatttagtgtgacatgcatacttcgttgggcgagttgcaaagagagtcccacatgcccacaatgtaagcatccatttgattttctcagtgtccaccgagcacttgatggcaggtgacttcccttctttatttacaattttgtgtatatattagtcgattactccatttgcttgatcaaactctttttcttattcttgtttggttgtataaattctcttttgtatttctatgcagcattgaagattttctgtttgaggagagtgtgtgccttctccttagagcctcatggtttgtaccattggatgtggtggaacaggcgtcgtacagccatggttaccatgatgattttgacattccttgtgactacgaggatgaagatgatgaccttgacgagttttatctgcacggctcaagtcttcgcataggaaatcggagatggggtggcaatggttttgtcagatccgggcgtcaagaagccaggcctgtccagagatacagtggttctggttctagttccagttccagctctgggtcatcctcaagtgagcctaaggataagcaggtgaagacgacaaacacaacaggaagacgtgcaaaaagggcaatgaagcgtgaagctgcaaacaaagcagcggaagtaactgcagcagcaaagcacgaggcccatttggttaggttgggaaggaagtga

SEQ ID NO: 187106 - DNA, 1531 bp, Arabidopsis thaliana landsberg
ttgatggagaggtgaaatgtgagaggtggaagagggatgatgatgatggtggtaataatggttatggttttgatgaatcaaagaagacatggtggttgaataggttaatggtggaggaagaagatgatatcagagtgatagacggctagggtttcaaggaaaggatgatatgtatacaaattactattttgtcattcttatttgtatgcagaccacgtggtcagagttcggtggatgtgtgttgatggtcgataattcaaaatgattacgttttgataatactatccataaaacaagtgttacgttatgaaaaagatgttgataaaatatggtgaaaaagagctgttggtcatatccacaaaagtttatttacgaaaatgttaatatttatttatccacgattatatattaacaaataataaatacgagtgtatattgtatgattggttatgaacacatcgatctcaatagtattttacgttttcagattaagaagaatgctttagattatcatggaccagaattgatggttatagattatgtacatataaaacttaggatttagggtttaggctttaaagtcaagggctagggtttatgtcaagggtttagggtttagtatctagggtttacattttaggatttaggctttattgtctaggatttagcgtttaatttagatgattttgggttttgggttgaataatcatggttgtctacaatgatttagggtttatggttacatgtttctcgtttgagattatatattccattgttatccatatggattggatcatatgaattttctatttaaatttgtttatatttaggagacttatgtttaatatttatggacaacaacaagaaggtttaaagttaagagcttaggatttagggtttagggtacgtgatatggtatatgtatattgttaagggtttagtctttatggtttagggtttaggggtttagggtttagggtttaaggtttagggtttagggtttaaggtttaagttataagaatttctccatacaatacataaagattttttgcctttagacatttccaaaaaaaggattgtagagactatcaaggctggaccagtatacaaaatctctagatttgtccaaccttatcaatttcaggctgtctagtgaaaatacagctaccattccctccctcccggagataatccaattccttaactcaccaatcccaccttcagctacatggctaacaatttttctaagaatgcctgcaggcatatggaagtttgttgacggtccttatatgtgaaaaacggaatttaaattttttataaatagacatttgactcttttataaaaactgcctcaactcttttttttttttaaaccagacgattgattctagatgttgaatacaagtttgttcggccattcgtcgaggagtttgttgacttctactatggatgtaacgatgtggattattggtcagaacaggacgatgcatgtagtgacccttctcacaaactattttgtggacctttaag

SEQ ID NO: 187107 - DNA, 3639 bp, Arabidopsis thaliana landsberg
agactactttgtccacaaacatctgaacttcgctttcatgaccaggtgacctgggctggatttggcattcttgaactgggtcaacatgtcaccagacatgttctcttactcggttatcagaatggctttcaagtctttgatgttgaggatgcctctaattttaatgaactggtctctaaacgaggtggtccagtttcattcttacagatgcagccattacctgcaaggtctggtgatcatgagggtttttggaactcacatcctcttttgctggttgttgctggggatgaaacaaatggcactggtttgggtcacagtttttcccagaatggttcattagcaagagatggtagttcagactctaaagccggggatgccatcaattatcctaccactgttcgcttctactcccttaggtcccacagttatgtatatgtcctgagatttcggtcatctgtttgcatgattagatgcagctcccgagtagtcgctgttggccttgcgaatcaagtgagtattactgtggttcaataaattcagattctttattagaaaattcttccataccaatcgtactttatcttagatgattggcaagataagtgtttggtagttggtcttgagaccaaatgaaccttgcttgtattgaatgtagtttaactatgcgtagtgttattatacttaagtataagagattatcttttgttcttatgccatacactgacggtttccatttggtgtgtgcagatatattgtgttgacgcacttactctggaaaataagttcagtgttctcacttatcctgtcccccagccagtgagacaagggacaaccagagttaatgttggctatggtccgatggctgtaggtccaaggtggcttgcatatgcgtccaaaagttccatgaccatgaaaacagggcgcctaagcccacagacgtttacttcttcacccagtctcagcccaagttcatcatcaggtggaagcagttttatggcccgttatgccatggagtctagcaagcagttagccaatggattaatcaacctgggggacatgggatacaaaacattgtcaaaatactgtcaagatatgctccctgatggatctacttctccagcatcaccaaatgcaatctggaaagttggtggggtttctggatcagatgcagagaatgccggaatggttagtattaagatggatctgaacattgcgggcaattcttgggtcatgctattctcttacaccaaagatcttaatcatagtcacttactttgagctttgctctcttgctatttttttttaattgccagattgtgatattatttgaatgttcgtccaacaggttgctgttaaagatcttgtttctggagctttagtatcacagttcaaggctcatacgagtcctatctcagcactttgttttgatcctagtggaactctattggttactgcttcagtatgtgggaacaatatcaatgtctttcagatcatgccatctcgttcacataatgcacctggtgacctaagttatgagtgggaatcttctcatgtgcatctcttcaaactgcatagagggatcacttcagctgtaagtatactttttggttgatctatgtccttttcttttcaatgttctctttgcttgattggattttttctgctctttttaacagattgtccaggacatttgctttagtcagcagagtcagtgggttgctattatttcatccaagggtacttgccatatatttgttttaaactcttctggtagcgacgctgcgtttcaaccttgcgagggtgaggagcctacccgactaccagcttcatccttgccatggtggtttactcaatcgttgtcaagtaatcagcagtctttatcgccaccaacagctgttgccctttctgttgtaagcagaataaagtatagcagttttgggtggcttaacacagtaagcaatgctactactgctgctactggaaaagtttttgtaccatcaggtgccgtggctgctgtttttcataaatctgtcactcatgaccttcagctgaactcccggactaacgcgttggagcatatcttagtctatactccatcaggccatgtggtgcagcatgaacttctgccatcagtttgcacagaatcacctgaaaatggtttgagagtgcaaaaaacatcacatgttcaagttcaggaggatgatttgagggtcaaagttgagcctattcagtggtgggatgtatgtacaaggtctgactggctagagactgaggaacgacttcccaaaagtatcactgaaaagcaatatgatttagagacagtgtcgaatcacttgacaagccatgaggatgcatgtctttcccttgacatgaacagccattttagtgaagataagtatttgaaaagctgttctgagaagccccctgaaagatcacattgctatctttctaactttgaggtaaaggttacctcggggatgctaccagtgtggcaaaattcaaaggtatttgtttagtcaaaaactcttcctttctttgatatatctgtacttgtctcttgattttttactttcttgatgtgttgctagatttcttttcatgttatggattctccaagagatagtagttccactggtggagagtttgagatagaaaaggttccggcccatgaacttgaaataaaacagaaaaagctgctgccagtttttgaccatttccacagcaccaaagcaacgttggaagacaggtattcttaaatgttggacaaaaatttctgcgtaacttgctgtcttcttgtattgtgcattgcttgacgaaagttcatagtgcgacaagtattttaacgtgtgattatttgcagcctgtcctcttttccgaatattctcttttatattcccaaaagttttctttgatctgtatatcttatgctttgaatcatggaacctttgacataggttttcaatgaaatgctatcacacatccgcaacgggatctcatcaagttaatggaaaaatatgccaagatattatcaactgtcactctaagccaggatcaattgagtccgccgaaagttctgaagagggtaaattattatgtttctgcccctaaaatattcttgatggcagagatcaaaatctagggtcgttttaattcaagccacagtggaagtaaccatttggtaatttaatggctataggttcaacaaaacagatggagaatctccatgattcggatcatatgagcaactcaatcaagtcttctttacccctttacccaacagtaaatgggatctacaaggaaatagagaagaacaacgcaaatgggtggatggagaaacccgtaacagccaaactctctacactcaaagaaacccggatcacaaatggttttaccacaccacctatactcaccgatagtgtcaacgaacagatgctctctacaggaaaacctcctatgggctttggttttgctttgcatgaggagcactgtaaagcagtagcagatccaaaagaagaacacctgaaaaagaagttagatgaagttactaatgttcatcacttaaacgtcaacaacaacaacacagagaaactacaaggagacaaaatggtacatggtatggtttcctttgtaggtgattaa

SEQ ID NO: 187108 - DNA, 74 bp, Arabidopsis thaliana landsberg
taaagcggctaatatcagcattgcctcgagatgatataaacgacaccgttcgataccgatccaatggaatttga

SEQ ID NO: 187109 - DNA, 45 bp, Arabidopsis thaliana landsberg
atgacgacgtcgaagacgacgatgatgatgtggacgttgaagacg

SEQ ID NO: 187110 - DNA, 52 bp, Arabidopsis thaliana landsberg
atgaggcctgagagggttccccgacgtgaatgtgtacttgctaggaagactg

SEQ ID NO: 187111 - DNA, 64 bp, Arabidopsis thaliana landsberg
atgtacagtttggtagaactggatttactggccatggacgagagcaaactggaaacggccaaag

SEQ ID NO: 187112 - DNA, 114 bp, Arabidopsis thaliana landsberg
gaaactggtgggcacgtgtacgtcctctggaacagaactaagtactttatgacgagttctacaaattcgatgcgagatcaggtcatggaaacaaatgaaggtgctacaacttaa

SEQ ID NO: 187113 - DNA, 543 bp, Arabidopsis thaliana landsberg
atggaatacccttacaatgcaattattggtcgtggcaccctcaatgctttcgaagcaattcttcatcctgcttacctttgtatgaagataccttcggatcaaggacccattgctattcatggaagtcaggaagctgccagaagggccgagggaaactggactgactcaaaagcaatccataatatagatggagctgaagtttgtgaacagtacaaattcagaagggagaaagcagcttcagcagatcagccgaagcccatgctcttatgtgaggacatagcagagcagaaggtgctgttgggctctcaattatccgaagaacaggagaaaaccttgataaggtttttgttcaacaacaaagatgtttttgcatggtcagccaatgatctttgcggagttaacaaggatgttattgaacactcgctcaatgtcgacccatctttcagacccagaaagcaaaggcttcagaaaatgtctgatgacaaggccgaaggcgctcggaatgaagtcaaaagactcctcagtgcaggagttatcagagaa

SEQ ID NO: 187114 - DNA, 915 bp, Arabidopsis thaliana landsberg
atgatacgcgacgaggagcagaaagcccaagacctcgatcgcgagattcggctgctgcagcgcgaaggccacctcggtctacagcaagagcacccctccaacagcgcacacaaccggaggacacgcgcgaaggccacctcggccggcagcatggcccacccctgcagcaccgggcgcagccggagaacccgcgtttcccccagcatgattacgtctcccagcacggcgcgccattccaaggggtcaactacctcgacgagcgaagtcccctggcgccacacctacaagtgacgccttggccagctaactttcgagcggggcataccccaagtacaacggcagcaccgacccggcgcagtacatcatgagttatcaagtcgccgttgcatcagccggaggagacgacgccacaatggcgaagtctttcatcatcgccctagagggcccagcactaacctggttcaccagattgcctccgctgtccattgattcgtggagaagtctcagggacaagttcctcctcaacttccaaggtaccgtccagacaccgacgctttggccgagctctcgctttgcaaacagctggaaaaggagactctgcgggagtattaccgcaagttcttaacactcaagtcgcagctgccctctgtcgacgatcagatcgctatccactacgccatcaatggccttcgggccggcgtcctctacagccactgtatcagagatccacccaagagcttgcaggagctatatcagctcttcgaaaaatatgccaaatccgaagagctccaccagcgcaaggtcgagtcacaacggaaacccaaagatgccccgcagtccagccgcacgtggacaaggactccgcagccagactccggtcgagacggccgcagtcagcagcaagtgcacaacatc

SEQ ID NO: 187115 - DNA, 530 bp, Arabidopsis thaliana landsberg
atgtatcggacatgctcgtcgtactcaaaggaagaggatgatggaggtacacttgcctctcggctggtacaacactcgctcgcaaggttcgattaatagctcctccaaagtggtctgctcaacctagaaaagagaattgaaggagacattttaatttagtgagataaaaaaagtgaattgtgaacctgaaataaagaagtggagatgtttcataaaccttgataacacttttgaaagagaccttgcacaagacaatcacattgtggtccacctaaacaaaaaaacaaagtatacatggtaagacaagagtccaacaatgaagaggaatttggaaaatcaagaagcaaacctacagttttctttttgtttcaaacttttaaaagcataattccttcatcttccactcaggcctcacatcgtttgattcactcttaggacctaaactgaatgacgtctttagcccaatgcatatttgctgttcttatcgattaacacttttggatcgcggcgtgacacccatttcccgatag

SEQ ID NO: 187116 - DNA, 1565 bp, Arabidopsis thaliana landsberg
gaaggtccgctgctgacggaagatcttattagagaaacagaggaattagtacttcggacagggaggtcagtgccatcttttatttgttgtagtttgatataaaatttatactccacagcgattctggtgattgaaagttaaccaatctgctaatgaattctgagttggtgattgaaagaccagtaacagtcagttagattgaaaataagagacgtattatctggctgaataatatataattccgtttcgttattcagacatccaattatcttgatagattggattattgtctttcttatggttcagcatgggggctggatgttctcaactcttgtctgacatgcaggctttcaaggtgattatcttaatgaataatcttattactgtctggtatataagcactcatgtaaggaaagaaactgtagctgatatgaaattgataagatctgtacctctgtattaggcagcaaatcctggctgtattttggaagattttgtgagatggcactcgccaccagactggactgaaaatggtaacatgtctggagatgactcttcacccgttcgaggtcaataagtacccggatgcagaaagaaggtgtgaccatttctcagtttctctatgttgttaaaccattactgtaatatttcaagtcgtattctcaactggtcttaccaacgttttaaaaaaaatattattacgtaacttatggcgtgagctgtgggaaacagctaaaccactccctgctgttaaacaagcacctttctttgatgaagatttagctgcgtaaatttcaataacatgtcctcttaaacgtagtgaaatctgctttcatcactcatggagatcttgtccatttctcatttaacttatacagagaaggaatcttgaattatttggaagacattccagctgctgaactttgtgagcagctgtttacttcgctagtaagtttttcccaacaaattgcgtatttttctttttgtgaagctttctatctgtaaggtcaatctcaaattctctcacttgcgctacgttaaatggatgtcattggttacacagttaaggttttagctgtaaatagcactttgacgattggattggttaaaaatatttcaggtttccctggggtttgtgatggtggagccagttttagctacaaacgatgacttgtcaaagcttttctttgaatgcaaggattatgtagtcgctatttgtcaggggggcgcatggaccgataagcttgatgatctatgccaggtactttactagagagctttgcacagattcaaaaacgtatctacatgcttggaaatctatcactttaatagagttaagaatgttttatcagatgccaaagtaaggccatgtggatatgaacattatgctcactaatcatacatcctaattgcatttatttggtcataataggtatacgagaccgtggaaacaatgttattacgtccagaagaagttttgagatcaatgaaacaaacagaggagtcgccatcaagtggcagcgaaacgaaacggcggtttaagcggctaggtttcatctttcgtg

SEQ ID NO: 187117 - DNA, 1476 bp, Arabidopsis thaliana landsberg
ttttgttacgcatccaacaccgcctgagaatttctctgagtcatcaacaaacgggagattttaccttgatctacttttgtatataccggatgtttcaaaaagtttattccgtttctccccgtcggccatgtctggctgccatcatcgattcatcaataaacgtaagattctccgtccatctatcgagattcagtttcgtcttcgattttgtgtttactgtataccatcagatcaacttgttatcgacttctgatgcgtcgatttacttttgcatgtaccggaaattacagaaacttgattccgtttcacccgtcgtccttgttctgctgattttcattctccatcattgatttaacattaaacgtaagcacctccgtcgatctctcgtattcagttttgtccttcttttgtgttcactgtatactttcagatttactttggttacttcacaagcagcttgttgtaccgttattgtgttaacttggatagtaccaagcgcttatgttattcattgttttgcatctttcagttcggtgaagatttagtaatgggctctgatgcggacgaaatttaccaatgtgtaacaggttctatgcgtcccaaaattcccccgtttatgactatgtccccttgggttcccacattagtatccattagggttttagtttactgcgtaaattactcaattatatgcaaacatgtaaatgtgtaacttatactgttgtgttaactttactccattgtgttcccaaattagtgtctattagggttcaactttcatttgttacttagagttatactattgttggtacctttgtctgtttcggttcccacagtcatagcataagggttttactttgctgcgtaaaaagctgacaattatgtgtatattttgttagacctatgtatccaagcacttctctgttgtaggaacttacgacttgtactccatctttctcaggtgaccttcctcctcgcttgcttgccctcgattgctacccttctcatcctgtccgcatcaactcatattcaaaggcaaaatatcttattgatatttacaatgtcttgtatggaactcctgagttagaacttctactccagtctccgcttgggtcaatttttcgcttcttgtgaggcagtgttctttgtcttgtcagcttctgcaccagttactatgtaggcagctgtttacatctgaagttgatgcaaccttgtttgtgtttgctggaaagccattacgtttttctctgaaagagtttgagcaagtcacaagtttgtgttgttctgaatacccgtcagctgctaaagtacgttctgctacttcatatgctgatggtgaatctccttactggtacaaactcattggggggcaactcggttcggcgactgtgaaatcagtggttagcggtctcaaatctgattgtgccatgccttcctggcgtaaattccaaatatctcttgttgttattgttgaag

SEQ ID NO: 187118 - DNA, 37 bp, Arabidopsis thaliana landsberg
atatgttcggaaacttgatcgggttcgggttttgtag

SEQ ID NO: 187119 - DNA, 146 bp, Arabidopsis thaliana landsberg
  unsure (1)..(146): unsure at all n locations
atggcnnnnnnnnnnnnnnnnnnnnnnnnnnnnnnnnnnnngcagaatccgctggtcgcggtatcttttccgcggactacttgcttgggatctagtttttctcctcctcgtcttcttcgagtttcgtgtgttgccacaaaccctag

SEQ ID NO: 187120 - DNA, 412 bp, Arabidopsis thaliana landsberg
tcattagttgacttacagacattttctacactgaatggtaagttttttcgaaattttaaattttattttcttaaaaaattgttattattgttctaaaaatcaatttgaatttaagtatgcactacagactcccgagtcaattgccattcaggagagattccaaagttgttgaatgatcaacaatattgcgatggagtgcataagttccatgatccgaatactaactcgtttccttggttcagtttacgagccactgaataacgaatttatcattggccaagttagatggatacctcgagaaggaatctcagagagatgaacaagctcacagactgatggatacctgttagggcagcttcagaattcctctatttcagaaaagccaaacgagagtatccgggaagcggaatga

SEQ ID NO: 187121 - DNA, 25 bp, Arabidopsis thaliana landsberg
gtagacctgcctgccgatacggagg

SEQ ID NO: 187122 - DNA, 477 bp, Arabidopsis thaliana landsberg
aagagtgcgctttgaatctcgagaaggggccatgaacggttttaagtatgaaaaactccaacaagtttgcactaattgttgccgtgtaaatcatcaagtcagccattgtccgtatttagtgcatcatgaggatttagatgatgaatcagaagtgatggtaattccagagaggcatgatggtgaaggctccaacagcctcaatcgatgggatcaagagattaactcacaaaattctaatatctcaacgtattcacctctgcatgattttcctgttctaagctggaatttttatactgcaggcaacctacctcatcgattctactcctatagcttcaggatggagaccttcaactagacctacctatgaatttggtgagagttccaagcgaaagaaaggaaagcaagtgtgggaagatcctgaacgcaacatccgacagagacgtatggaactggggataaggttttatctggtggatg

SEQ ID NO: 187123 - DNA, 94 bp, Arabidopsis thaliana landsberg
cgcttctctcccttcattcatacatacattgatcacatccatgaagaaggagaggaagagacaagtacaggaggaggaggaggaggagaaggag

SEQ ID NO: 187124 - DNA, 693 bp, Arabidopsis thaliana landsberg
cgaatacgccggacatatttccttacggacgaggtccggtgagtagttctgcaccagcgacggcgaatctggctccagagactgctgaggttcccgccggagccaagtcggcttctaaattcgttcaacatgatctcctatgcatatttttgatcttagtagccactttggttcttccagctaactagctttttgtcagactataagaagactcttcagtatatcttgtaattctaatgaacaagatacttacttgttttgtattgattactttatagtatattaatgttggtagattatatttgttagtacaatatgttttcgtaaaaacaccattttcttattccatgatatagctatgaaaaaaatcaacaaacttaatagaaacttgataaaaagaagtttataaagcaacattcaaacggaagaaacaaatgacatttctcacatagaaagtttacttgaatcctccaaataattaacttgtgcaaacctgaagggataatcttggaactgcttcacattgttgaacatactgtttcctaaaccccaatgtattggctccatataagctgtcctctgtaccatcggaccatatggaccatccgaacaactcccgtaaaacaagctttgcccgttcgctatcatcggctctgtcacattcgagaaggaagacacttccgcagtatttga

SEQ ID NO: 187125 - DNA, 2585 bp, Arabidopsis thaliana landsberg
atgcgtgaagccgatgttttggtggccacgtatcgctcatccgctagagcaacgagcgtgtcatcacgggcgtatgacacgtgggttggtgactcgcccatacgcttgacacgtggacatgctgacgtcactatttccttgcctatataagctcaactaaaccccaattgttttgtgaagagaaagtgagcagaagtgaagggctgccgagtttaaaccgttcgtccgattcaagttacggtcccgaagcttataactctgcccgaatcattgcacgcattctgttggtaaaaaagtgagttctggataatggtttaagtcgcataatcatattctcatgcattctagattgatttcgtgagttatatgaattgtgtaaatggttatatttgagtgcatatgtgatctttagattcttatgctgatgtttatggttgggaggttatgttgggatattgatgattctatgtgtttgatttaaccatatgtttcataatatcttaacctttgggatcttggtacgtggtgcttgtggtaggaggcaaagaccataagcgtgcaaagatcgtgatatgtttgaccttcgtagtgaaccgtgctattctggggtcttgtaacgatgttacttgatcgccatgaagtacggagaacttggagagacggggctagctaccctggccgagtgtctacacgatggtgtaacatttggtagtgatgctccggttgcatacctttgtggttgtaacgcaggagatcacgggagtgtgtgtgtttggtgttgggtttgaaggcagcatatcgggcccttttaaaaacttaataaaactagagtcttaatgcattgcatttatatgtagttgcttcggcaagctacatttcgttgccattctctattgcgtgtttcatgttgggtatttgggttggggtaaactaatgtctgctgcagggaatcccgagctcatagagtaatcttagattactcatgattagattactcatgattctatttgttttgcaggaaacccgtagtgggaaatagagggcatggtggacattaggaaacccggagtagttttgtgccttttctaaaacaagtatgtttctattatgtatcgtgcttttggcactaggccctggccatgaaacttataaatgtttggtaacatgttgtgtaatattaatacttatgaaataaatcgggttttcttgtacaaattgcgagtaatgactgataatgacttagtccgagtcggcacaacatttaaatatcgcgagggttggcaagcctaaatgatgtttaagtgggagagtggtcgtggatacaccgcacaagggttgagatgggttcccgaacctcggttggatattgatgatcaatctcaatgtggcattttcgaggcgcatctgacttgtccggtcatagagcgtctcgggggcgttacaatttgtggtatcagagcatggttaatgatgctagcaggactcatgttttttcaaatgttttatcgagtaaatgagtcgcagaggcaattagcaacccggctcatccatgtgataggattaggttagatagaataggatttacccttagagtgtattaggtaatccttagagatttaggtgaaacccttttagtcttttagtggtagagttgtctcttaatccttagaattcgagggcgtattcttttaaggagggaagaatgtcataccccttatcaggtctaggactaggccaagcaattttagtcggcaatttagcaagccgtacaatcggaacgatcggaagaagtccttacgggacgagtattgtttcgtcggaccaacggtctggcagttttggggatagtcatgagcaagtggtcagggaaccggatgggtgagtcaagtgcaacggggacttgggtgactgggattaatgtgttgatgcgttgagggaacgcgtgaacccgtcgtggttacggttctttgagatgatcaccgttggtaacggtaatatccccgagtgcgtgggatatgtttcacccggtaccgtggcccttagtaatatctcatcccttactaggcgttgcttatgtactattttccaaacaagccgctacgtgttcgtcgagctttacttgtgcctgggcgatcggcatttggatcacgtagatcatgcctgatgatcggggattttaattgatcggactgagcgtatgatcgagagtgcttttgttgtgtaagcagctagttagaaatagtggcctagtatagtcatgggcagataggtattattttagataagagcaaaatcggatagagatgagatttggataagtatggttgtggataggaacgagaacggatagggacaaaagtggatagggacgtgagtggatagggacaaggtacggataagaacgagtgtggataagtataaatttcggataagtatggaagcggataaggatcgacttgtggataagttcgttcatgtctatccgttccatatagataagatcgtccgagtttatccgtgtacggataaggtcgatcaagtctatccgcgggtttttggatagagttatggataagcttgattga

SEQ ID NO: 187126 - DNA, 691 bp, Arabidopsis thaliana landsberg
aaaacggagatcgggtaagagttacgactgttcccaaccttgcttctggctgttggaccgctgatttgttcgctgtgtatatcgggctacttcagccccactctgatgatatgtcccgagttgtggaccaactcttaaagttgttcgccacctttataggtttgtatcgtttaagcagatctataatcatatgttgtataaatgtgtttactagcctcctgggactagtaattgtatcacatttgagtcccagaggattgggacgcttcagtgcgccacccgacagaaggcaaggatagccttccttgttggcctccaatggctcctagctgccttggggctataaaagagacccctaggcgcatggagagtcacccaagcacactctaagcattccaagacttctagtcctcactttcacgcaatcagttcatcgttcttgagattggagcacttttcgagttgtaaactcctcgcacgtgttttgtgtgctcatcttctcacttgtgtgcatgtttgtgatgtggatttaattctagtgtgtgttgctcttcccaaccttacttcgtgcattctttgtgatcaatcttgtaagggcgagaggctccaacttgtggagattcctcgcaaacgggaagaaaactataaggaagaataccgtggtattcaagttgatcattggatcacttga

SEQ ID NO: 187127 - DNA, 164 bp, Arabidopsis thaliana landsberg
atgcagagaaatggaacccatttcagagatattactcgtttggagactttgtgcttcatcgtggtggagaggttcaaagaagaaagagagtgtgagattagaacatgtccagatttaaaggggaaagagacacaacacaatcaagaacatttcattcatgggat

SEQ ID NO: 187128 - DNA, 1068 bp, Arabidopsis thaliana landsberg
atgtctgattcttcctcaagccatgactcaccatcttctccggcgatcaccggtgattcagaaaccacagtgaccaacaacgaatcagaatccaacacataatgtcaaacagcaatccaatccttatccacgatcgtcacaaacacaaacattcgttccacaataaccatcctcctcgacgatgaagccgtctccaccgcgatctcctctctcctcctacgtcccgattcaggcgccggagataacaacctctgccgttggctctacgacacattccaatccgcggaaccatcgcttcagcttctcgtcctccgattcgttcctttaatcgctggtctctacctctctcgtgtccctctccgtcaaccacaagccggattcgaagccgttttactcgctctctacgcgcacgaaacaacctcacgtgccggtcaagcaataaccgtcaacattccagatctctcatatccaagcatttaccatgaatccaaaggtctcacaaggaacaacaactcaacgtgcctcaacatcgctgtgatctcctccacgttagatccacacgggacggttagatccacgcgccgcgcgaggatcgtcggagtcgcgttggagctttactatagcaaaatctcgaaaatgccacgcgaatctaagcttaatttctgtgaatcgtgtgagaaatgggcggggcaaaacggagaaacggagcaatcttcacgggcagtgattccgactttgagcgatgattcgtggagagaggaagagaatgttgctattggaggaagatctgagagagatagtggaaggattccattgccatgggagcttctccaaccgattttgaggatcttagggcattgtctccttgggctcaaaatggaagatagggagttatctgaggcggcgaataaagcttgtcagagtttgtatctccgatctctgcatgatataaatccgaaggcgattttggctaccggaagtcttcttcggctccgtgagatggctcttgatcccaagaatcaaatcgatcacactgagctatcaaacgacaccgttctctccgtttga

SEQ ID NO: 187129 - DNA, 71 bp, Arabidopsis thaliana landsberg
atgaatctttgccaccgtacccttgaccggagaattcataaggaccgtcggcgacgactgcgtttttaccg

SEQ ID NO: 187130 - DNA, 69 bp, Arabidopsis thaliana landsberg
acaatggggatcacatcgtctggaccagcttccacaaggatcagtgaaggctctatgcttggatcttaa

SEQ ID NO: 187131 - DNA, 178 bp, Arabidopsis thaliana landsberg
acatgaagatgaatcttatgttatggctacgagtgatcatggatcgcctatgaccgttgttgaagctgaagtaagaactccaaatcctcaagctctacttgatggctcaaaagtggttacgaatactgtagtttctaagagatcatcaagcaaaagtaaaaaaggttctcttaactaa

SEQ ID NO: 187132 - DNA, 2695 bp, Arabidopsis thaliana landsberg
atgcttgtgtatgagttcatgcacaatgggactttgaaggagcatctttatggtaacatatttttttatgataggacggtatattttggtttaacattatgttaacaagtggatttattttcaggcgtggtaccgcgtgaccggagaatcagttggattaaaaggcttgagatagctgaagatgctgcccgaggtccgtgaattttacaaaataaaacagaaagcactcttgatctctgatccgaagccatttttcgatatttgattttgttggttttgattgtttctgtagggatcgagtatcttcacacagggtgtgttccagcaatcatacatagagatctcaagactagtaacatcctacttgacaaacacatgagggcaaaggtttcagatttcggtttgtcgaaattcgcagttgacgggacctcacatgtctccagcattgtccgtggcacagttggatatcttgaccccgagtaagctaagacttaaactaataccaagaacttcacaaatattcaccaaaactagcataatatcaagaactcacatattttatttattcgatgttaaaggtactatatatcgcagcagttaacagagaagagtgatgtatatagctttggagtcattcttcttgagctaatgtctggccaagaagccatatcgaatgaaagctttggtgtcaactgccggaacatagtccaatgggttagttcaacttttttttttgtggttacgctttgtttgaatatatgtaatatggaatcatatcggtttataaatcatcgcttggtaacggtttttgtaggctaagatgcatatagacaacggggacatccgagggatcatcgatccagcactagcggaagatgattacagtctccaatcaatgtggaagattgcggagaaagcgttgctctgtgtgaaaccgcacgggaacatgagaccgtcaatgtccgaggtgcaaaaagatatccaagacgcgattaggatcgagaaggaagcgttggctgcaagaggcggtatatcagatgagttttccaggagctcggctcattcgtcgtcgctcaacatgggaatgcttgacctggctggatcacagagttatgtatccattgatgaatcagtattgcagccaacagctcggtagtagattcggctttgtttgtacagatgcattacttgcttgtgtttttgacctttcacattgtctctggtctttagttattagttttgagcttaacactacttttttttctttcttttggactcgaggttacaagaagtgcttcgagtttgtttgtttttcttttattgttttcagactaactcggtgatttatgtgggattgtgatatattatgttttcttttaactgattttcacattttcaactgattatataggatgatgtttatgctctcgtagaaataagttctataggttattgacacattcgagattcaggcgcagttgtgttagtagtggtcaaaccaaacccacgagttacttctcatgatacagtaggttaataaagggcttgaatggtgtacacttttattttacgttttgaaaacataattctgataaatacatgttattctaaaaaatttacgctaaaattatagaacatgaatttaaatactataatctataactatatttttttaaaaacattgatttaatgatatgggatgtttttctcagtgcttataagccaaaaaatatgttggtaatctcaaaaaacaaaacttgaaaacaaggaggccgatcagggttctttgggctttggaatcgagaagtttgatcaatgttctcttggtacagcctgatgatgaggccccattagaaaagctatttcatactccagagtccatatctgaatgtacaaggtttttaaatggagaaaagcctatagaagaaattgttgactatacttcttcttgtactagctgggaaactgatactgactatacagatactgagaaagaagagtccaatgttctcttggtacaggatactgatactgagaaagtggagtccaatggtctcttggtacatgatactgatactgagaaagtggagtccaatgttctcttggtacagcctcatgatacagaaaaggtgtttcctacttcaagctcagtatctgattgtacaagcctattagatggaggaaagccgcctatggaccaaagcgtaagctcacaaggtgttgacaatattactgcgtgatctattttttattttatctttgtttatgcacgcgttctccgttttgcaaaccctttcttctctatgtttttcttctctcccaatttgctctatgtttttcttttcttctctcccaattctatatcgtgatctcagtcgaaaccatgagtgaagatttctccagtaagatctctttcttccatatgtcatacatgtagacgttctttgtgggaaatggacactccttggactatcctacagaatccaatattatcctcatctctaacaacatcgaaggtgatattgacttcatccagtgtcttgtatcttcagcttccgcaggttacaataatctcttcgtagagactactgaggctgctcccgagaaccttgaaaccacaggatggccgacatacatattacaaggagggaagcctatcggccgaatccgctataatccgcctcgcgatctgtag

SEQ ID NO: 187133 - DNA, 175 bp, Arabidopsis thaliana landsberg
tccctgcggccttatggcgtctgggagttcgggtgtctgggtccttggtgtctgggtttccgtgcctttggggcatgggtcttcctgttctgcggcttcgtggttggggtcccttgtctccttggtcgccttttcgctgtgggttttggcattcagtgggttggggtccgctctc

SEQ ID NO: 187134 - DNA, 78 bp, Arabidopsis thaliana landsberg
atggctatagtgctgattggtgaaggattggtcttgacgcgaatcccgagaaatctgatgagcaaatatgctcaacag

SEQ ID NO: 187135 - DNA, 817 bp, Arabidopsis thaliana landsberg
tcactggttcgtccgcaataaagtctgtgcctcttgcaatacaatagtggacaattaccaaggcagatctttcgattacctctacacagggattcagatgagtaatgaagctttaggttttacaaaacggctcatctctcaaacctcttggcttgaagacaagaagcttcacttagtacttgacttggaccacacgcttgttcacaccattaaagtttcacagctttctgaatctgaaaagtatataacagaagaagtggaatcgaggaaagatctacggagattcaacactgggtttcctgaagaatctttgataaagctgagaccttttgttcaccagtttctgaaagaatgtaacgagatgttctctttgtatgtttacacaaagggtggttatgactatgctcagctcgtgttggagatgattgatccggataagatttactttggcaatcgggttataacgagaagagagagtcctggttttaagacgcttgatcttgtgttggctgatgagcgtggaattgtggttgttgatgataagagtagtgtttggcctcatgacaagaaaaacttgctacagattgctaggtacaagtattttggagatcagtcttgtttgttgtcagaatgtaagaagaagatagatgagagtgatgagaaaggaccattgaacactgctttgagattcctcatggatgttcacgaagaattcttctgtgactggtcgagaaaagacttggattctgtggatgtcaggcctttgctaaaggagatttctttgagatggaagcgtaaagcagtcggtgtggtttga

SEQ ID NO: 187136 - DNA, 56 bp, Arabidopsis thaliana landsberg
acccgcgcgtgcccgacggcgcgctgtatcgactggccgcgactcgacgcgtctga

SEQ ID NO: 187137 - DNA, 294 bp, Arabidopsis thaliana landsberg
atgggatcgagagggattatcaacgataagtggtcaatgaggattctatggggttgtgctatcggaagtgctattggtatgattgatccatctttcccacattttcatcttagagactatggtttttgttactcaaattcatgagctttttgtttgtatgggacactttctttaacccataattgtttaggtttatacatggttgctgtagagagacaaactcagaacagggctcgtgctatggctgagagtttgagagctgctgaatcacaaggtgatggtgataatgtctaa

SEQ ID NO: 187138 - DNA, 249 bp, Arabidopsis thaliana landsberg
tctctagtgtcttgcgttttcgatatggcaatgttggaaaactcctgtgtattattcgctcgtttatgcgttgagctttttcaggagcttcctccacttccatcagatgaatatcacggcgatattactacttttgagagactgttcttgcgcaaatgcagaattgagcttgaaaacgcatcccctaaaacagaacatttaccacttgtttatgttgatgaaacaaactattacggattcatcaaaacc

SEQ ID NO: 187139 - DNA, 58 bp, Arabidopsis thaliana landsberg
atgggtcatgaacgcaactcatcagtcggcagtcgcagcactgggcactcttttagag

SEQ ID NO: 187140 - DNA, 138 bp, Arabidopsis thaliana landsberg
aagtaccgcaacatggccttctactataacgaatcctatgggctcccgcgtccgctctcacctcaccggtcgctcctctacgcctctctcgtcatcacctccgtcatccttctcgccctagctccggctcgcctttga

SEQ ID NO: 187141 - DNA, 143 bp, Arabidopsis thaliana landsberg
cacggaggccgcaacatctcttggaaattttggagttaggttacaatgttatgtacaacgatgttgatatggtttggttgcaagatccgtttcagtatttggaaggaaagcacgatgcgtacttcatggatgatatgactgca

SEQ ID NO: 187142 - DNA, 166 bp, Arabidopsis thaliana landsberg
atgtgtattgctgcagtggcgccacacaagagcggtgtccgctttttcataggttctttacggtgcctgaaaaagacggtcacccacgcaggctcatttgcaggggaagaaagtgcccgatacttaacttcagccgatgatgtggagaccacttgccgctcgtctg

SEQ ID NO: 187143 - DNA, 267 bp, Arabidopsis thaliana landsberg
gaaacactgccaatgaaaagcggtggctgatcgccttcgaggtgaatcggattgatgtccagcgcgtcgacataaaacagctcgttgacgcgattggccgtcatgccaatcaaactaccactggccgccacgacgacaatcgaatcggccttgtccggtgcaacggaaaagcccaacagctgacacaggtcaaattactggaaccaccaccccccgaagattcactccggccatcaagcctttggctgtgcatggcagaggcatcag

SEQ ID NO: 187144 - DNA, 955 bp, Arabidopsis thaliana landsberg
ggtttggatttttaatgcgtttgccaaaagatgacagtgtgttggctgtcataaatattgcatcgtgtttaatgcacgcatccagggtactgcttcagtgcaactatttatttgtctaataactttatcctccaattcccagtaaccgagagtctaccatatgtctctgcaaacctctgatctgtttgcttctttgtatctaggggcacgatcttgttttacatgttctctaccatctgcattcaatggccattctggacacagatgaatcctctttctatgctactgtttatgaaaattttctcatatcagtggtgagtgtttattcaacttttttccaattcttgtttatgaatctcgcttattaagatgcttactgtaggcaagatcatttctggatgcgcttcctgcttctgacaagtcttttagtagactttttggagaagctccacatttacctgattctgccataaacctactggatgaactctgctccactcgtcatgacccagttggaaaagaagtttgtgatagtgagcgtgttacccaagggcttggtgctgtttggagcttaattttagtgcgtccaaatgagcgaaaagcatgcttagctatagcattgaaggttacttatctttcttacaaaatcctgtcacattgcagttatgtaattatgttatattctcagtgatggagaatatgagaattccaataatataagttttggattttggttgattgaagaatgtatagcaaattgcaattacagaagcagtgtgttctgatctctaggacccagaaaggaatgctgtgctcgaaactttctttaaatctacatgtttcatggccatatggtcctttagatttttccgtgttcctaacgcatgttttattcctgttatcgcagtgttctgttcattctgaagaagaggtccgcgcaaaagccatccgactt

SEQ ID NO: 187145 - DNA, 428 bp, Arabidopsis thaliana landsberg
taagtagttgtgcatacgccacaatcgtctctcatgatggtcgtgccatcactattgatggtcatcgtcgagttcttctctctggttctatccattatcctagaagcaccactgaggtaacttacatctacgttaatagttaatctattatatatgtttagcataataagattgttaattaactgcgtttattttgttgttactttgtcacatttagatgtggccggatcttataaagaagggcaaagaaggaggtcttgatgcaatcgagacttatgttttttggaatgcacatgaacctactagtcgtcaatatgatttttctggaaatctggatcttattcttttcttcaaaaccattcaaaatgaaggaatatgtatggagttctacgcattggaccatatgtttgcgcatagtagaattacgg

SEQ ID NO: 187146 - DNA, 65 bp, Arabidopsis thaliana landsberg
ctctaaatcaaaaacgagctcgaactttgatggacaattatagactagagaaggtcaccgcctga

SEQ ID NO: 187147 - DNA, 82 bp, Arabidopsis thaliana landsberg
gaaattgtttttctataatcgaacaagtttttatgtagcaattaatatgattggcatttataatcctcgcataaattcatga

SEQ ID NO: 187148 - DNA, 128 bp, Arabidopsis thaliana landsberg
tcacgaccggcgtgcgcaatggggatctgatcgcggtcagcggcgagctgacgccgaaaacgcagatcgtgaagtccggcggcagcttcatcggtgacggcgatctgatcagcgtggaagcgtcatga

SEQ ID NO: 187149 - DNA, 224 bp, Arabidopsis thaliana landsberg
atgattactttgcagataacaaaactcactaaaggtttaaatgcggtaaattcagcatgtgaggaggtaagatttttgtgcagtccattttcgtttctctttcttggaccattaatcgatctcctcatttcttgttcatcagatacgtacttcacaaaagctaaaagatattatggaaaatattctgtgcctggggaacatattgaaccaaggaactgggaggg

SEQ ID NO: 187150 - DNA, 272 bp, Arabidopsis thaliana landsberg
  unsure (1)..(272): unsure at all n locations
atgggccatgccgaggagacagtcaacatctttacgccactacctcatggcctccggtgaggccgtggaacttggagggttacgtagcaactccctggctgcagacaacgccccaccaggagcagcccttgacgcaatcctggatgtctgcacgggcatatgctgctgtgnnnnnnnnnnnnnnnnnnnnnnnggcgcagggcagttggagcctcgtgctacagaagatgctgcaccttctccatcgagaagtccacggaaggcaagttgag

SEQ ID NO: 187151 - DNA, 222 bp, Arabidopsis thaliana landsberg
atggaggttcgcgaggcaatcctggcccggctgctggcgccgcggctttgtttgctattaaagataacgatgacaccggcgagcggtttgggggaagcggccaagtttttgggcgtggctacgaacaatcaggccgagtacaccggtatcatcgaaggtttgaaaaaggctcgtgaacttggctataacgaggtcgaagcccggcttgattctgagctggct

SEQ ID NO: 187152 - DNA, 85 bp, Arabidopsis thaliana landsberg
accatcactatactcaaacatggaacgtcaattacaacgactaaaaccacttagagatacacgagagagagaacctggaacttaa

SEQ ID NO: 187153 - DNA, 148 bp, Arabidopsis thaliana landsberg
atgttgaaagatttgccggtgaggatcggatcagtagaaatcccaactgacttcgtggttctagagatggatgaagaacctaaggatcctctcatattgggaagacccttcttagctactgctagagccttgatagatgtcagaaaag

SEQ ID NO: 187154 - DNA, 112 bp, Arabidopsis thaliana landsberg
atactatacaagtatggatctcactgatagcgtactcattcgacggatagacatgacacttgcgaaaggatactttaatgagaccgagttgcatgggatcgtggcggcttaa

SEQ ID NO: 187155 - DNA, 246 bp, Arabidopsis thaliana landsberg
atgtcgtacagtgacccaaaccaaaatccgattccagaaacttacgctccatcaaactcaactgaatcagagaaactgaaactttaccaagcttttatcttctctgttccaatctgtttcacattcatcgttctcttcgttctttacgtcatttaccttcgtcgaaacagcaccaccaatgttgattggtcttctcttggcatgcgtggtggtacctttgtccccaccaacaacaatctctcaacg

SEQ ID NO: 187156 - DNA, 976 bp, Arabidopsis thaliana landsberg
gatcgtgactcttccattgcctttttgcttatgaaaactgagttgtatgaatgtgatgcaaaggacgtgatggtggtccatatttatatagtaatagttccaagtcttcttatctatcttctttttgggttttatttttcattttttcgtgcttcttttcttttttattttaaatgacacaaaataagagttttttaaaaaatatatttttttttgctgttgttgtcgtcgatgatcgtttttatatccacattccacacgctcgatctctttgtccttttgccgtgagcagtgagaaacagaagcaaatatgaaagtaataaattatgtcgctatatttgatacaatgtaccggttatcaactaagtttgaaatcatacaattatattttactataaatttgtaatatatattgttttatttttgtcaataacctgcattaaatacgttcgagtgatagactaattaaatacaagaattataaaattttaaatggaagatacaatcatatttttgtttttatatggaaataaaactatatattatatattttttacttcatccaacgattaaaattgtaacctaactattaaatgtctcacagaaaccagaatacgctattaatggagagaatcaagaagcaacgagatctgttgagaaggagattgaagaaatgcgaaaaggtgaagaagacaaaacactcagctcagtttctgacacaactccaaacggtgtcgttgagccaacattactaaagcagatgactaagcccaataagatggtctggaagcccaaagaagatcagaagcccatccagcccatccaagagcaacggtcacctacaacaaaacaagaagacaaacaagttagttatgtggctaagagaacgtcaatgaaaagcatcttcagctgtctaagtcaagatcctatattgaccaataggttcaaatgtttagaggatgaggatgaaatgtaa

SEQ ID NO: 187157 - DNA, 501 bp, Arabidopsis thaliana landsberg
gagtgttagatcctgaagaattgtttgggagcttaaagattgacgagaatgagattgaagttgaagtaaatcataatcacacacttccttcgaaaaccgatgctcgtccaagttttgcttgggacaatgctttttttaccgatccaggtctcatcgttttacttcaaagttctttaccctacttgaatagtcaattattccacactattccactattcatctcatatataacaatcaaaccttatcatttagctttgactctgtatattcaaggctgacattgtctatatttatgctaaggtgttcttgatgctgaggagttgtgtcttgtgaacaatggtttcaccagtaacacgcagcttcgtaagtctgctgatacgacgacaactcaaggaagcagattttctgtggccagcattgagtttgatctgttccacgacctgagagcctctttacgtaattcaccgaatgtgaagcagacagtaactcaagagacccatc

SEQ ID NO: 187158 - DNA, 1411 bp, Arabidopsis thaliana landsberg
atgagttttaaccccatctcacctttggatccaatccctttgcctttgagtgaaagagttagtattgatggtaaaaagaatgccgagctagtgcaacagatccatgagaatacgaggagaaccatagaagaaaaggccaaacgctatgctaagcaagctgataaagaaagacggtggaagatttttgaagttggagatcaagtttggattcacttaagaaaggagaggtttgcatctcaaaggaagtccaaaatcatgccaagaatagacgatccattcatggtaatcaaacgaatcaacgataatgcctacaaactcgatttacaaggtaaatataatgtgagttttagcttcaatgtttctgatttgataccttttattgcaaatgaaacagatttgaggtcaaatcactttcaaaagggagggaatgatatgatcatggacaacactaaggatatggagcatgaactgggcttgaacgtgagcttgtagctgaggaaggagctaagcttgtagctaagaaggagcttgtagttgaggagaagcttgtagcggaggatgttattgtcacacctacttgtccaatgactttatctagagttaagttattcaatcaagccattggagggatgcgcaaccacatttgggaccgaccaaaggacttgagctaagtcattacctctttggttttgatccaagctgaaggacctcatcaagatggataagtgattcatgagtgccctttttccctgcatttaattttgtctcaatgggttttccaaaggaaggtttttaatgaggcttatgttttcacttcatataatccattttgatgattcaaggcccaagcccactaaaataaagagacaatttcgtggcctttgaagttgaagggttacttttgaatttcaaactttgtttttaatttctattgtgttattgatatgtctataatttgcatgttttcagtgtccattcatcatcgttttgagtctagttttgtatcattcatcactgtttgatatcatttctcatcattattgcatcctttgcatgattaggatagtgttgcatacatattgcatttctgagttgttttcaggtaatttggagttgtttgcgagcaatttggaagaaaagagccagaaccagaagacatactcgaccaccaggtcgcgtgcatccagcaccatactcgaccccctggtcaagtgactttggagccattcttcccatctactcgacccccaggtcgagtaacctcagctcaggccacttgatgacgccactcgaccccctggtcgagtatcactttgccacaccactcggccattcgctctaccacattactcgacccccgggtcgagtatcatcactcaccaccaacaccagtactcgaccaagcacttga

SEQ ID NO: 187159 - DNA, 15 bp, Arabidopsis thaliana landsberg
atggggaaggttaag

SEQ ID NO: 187160 - DNA, 333 bp, Arabidopsis thaliana landsberg
atggcgcagacacaggcatatcacgaggcggacggttattccgtcaaggtcactcgcttctccacggagcagccgatcgagtcggtcattcgcacgcccgacaatcagctggcgatgttcctgccgctgggatcaatgaatccgggcgaagggcgctgccccgaactgggcctgctcgattaccggcagagcggctcgatccgcttccggcccgccgcgacgacctatgaatggcgcaatctgcaggggcatacccgtgtcctgatccatggcttttcgaacgaacggctgcggcaggcgatcgagcaggattgcgaatggaccgaggaaacg

SEQ ID NO: 187161 - DNA, 357 bp, Arabidopsis thaliana landsberg
ctcaaggaaaatgccatcaattatgccgaagtgcatgtgtccgacatcagttatatcgacaccaaatcgagcaccaaggacgattatactttttatatcgtgagccgcagcacaggcaaacccttgtccggtgccaaattcaccgtgatcaattatgactacgattcgcgttcgtacagctacaaacggaaccgcggaaaaacctatacggccgatgcagatggaaaaatagtggtggaaacccctactcgcgattaccgatatttctttgccgatattgtgtacaacaacgaccgttttgtatcggaccgccagcattaccagtaccgtccgtatgaccgccagccttatgagcag

SEQ ID NO: 187162 - DNA, 354 bp, Arabidopsis thaliana landsberg
atgtccttttctaagaaaatcaagagaaagaaaacagatctatttcagatcatctatgccccccagtttctagtgtgcttaggtaagagatcaatctctcgctcctcctccatctaataatgtcagagacaggacataaaaagcatgaactggttatagtggatcaataagaggattttaattggagctactatttgcgacaaaaacccatgtctaatggttgtcctttataggtccagcattgttgggtccttcaatatctctctctctcttctagtaattaagaaagagatagcacttgagctcatattaaagaagatgaacacatttggtcggcccccaccttctttatag

SEQ ID NO: 187163 - DNA, 403 bp, Arabidopsis thaliana landsberg
aacttgtattaatctaaacgagattctcattgggaaaataaaacaacagccagaacacgatggaagcgacgtacatgtggaactaaatgttgatcatgagcatgggtcagacatcatagctaacatgacaaaagcaccaagggttaagtacataaccttttatgaagactctgagagcattccggggaagagaaccgcagtctgggagcttgataaaagtgggtattaaacatatgaaacatgctcccaaagtaccttgcattgttttttcaacttttgagtaaccgttattgtgcagcaaatcacaggaacatagtaagatctccagttctgatgagggagttatggcttcagatgtggcatgacattcagcctggtgcaaagtccaaatttgtcaccaaag

SEQ ID NO: 187164 - DNA, 417 bp, Arabidopsis thaliana landsberg
atggggatccaacaggagatagtttgcatatggaactctatgatcaaggtgtacgtgaaggtgcacttggtttgctactaaactctgtaagaatcgttataataacctgttttttaactgcactgctcttcaaaattcaattactggcccgatattgaattttcttcttccctgtttccgtaggttgttcttgggatcagctcatttctcattgaaccaatgtgtcagcggatgggtgctcgggttgtatgggctttgagcaattttactgtatttgcctgcatggcaggaacagctgtaatcagcttgatgtctctcagtgatgacaaaaatggaattgaatacataatgcgtggaaacgaaacaacaagaaccgcagccgtaatcgtttttgcactccttggttttcccctagct

SEQ ID NO: 187165 - DNA, 120 bp, Arabidopsis thaliana landsberg
tcagttgatgtgtggtcttgtggagtggccctctatgttatgttggtaggagcttatccattcgaagaccctaaagaccctcgcaatttccgaaaaactgttcaggtcttttatatataa

SEQ ID NO: 187166 - DNA, 219 bp, Arabidopsis thaliana landsberg
atgatctctgcttatggtactcatggatatggccaacaagctgtagagctgtttaataaaatggaggatgattgcggtccaatcccaaataacgtaacatttgtagctgttttatcggcttgcgctcatgctgacttcgttaagaaagaacgttcagtttacaagagaatgaccaagagctatagattgatcccaggagtggaacatcatgtttgtatg

SEQ ID NO: 187167 - DNA, 45 bp, Arabidopsis thaliana landsberg
atgggatcggaaaggcttgttccaatcgagagagtgcatttttga

SEQ ID NO: 187168 - DNA, 390 bp, Arabidopsis thaliana landsberg
atgcaggttttcgatgagcaaatggtcatgtgcacaggtctcatagatttggggatgaagaaagtcattcagaacatgtctgatgtgcgattgtccaagtataccgttttcccgccgtccgagtttgcgtcactggtcacttttcaactattacaggatgtcaagggttccaccttggatatttcagaaatctatctggagtatctcaaatcactggtaagccggcctgcagaaataaacacagattgctaacaccacccccaggaatcccaaatcgagtccaaccctctggaccgcagtcatcaagacagaatcgtctctttaaaacaggagatctcagtcatcagtgagactctaactcaacaacaaaaggttctgaatcaggcgcaa

SEQ ID NO: 187169 - DNA, 354 bp, Arabidopsis thaliana landsberg
ggaaggagacgaaagcgaattgggaaaccaagattgctatatcccaggacttgtacctaaaattccagggcggttctactattactttggcaaaccaatagacttagcaggtatctatataatctaagtgtatgctctctacttcaaatcactgacctcattacttgcaataatggcggggttttttttccatggcaggtaaggagaaggagctgaaagacaaagaaaaggcacaagaggtttacttgcaagcaaagtctgaggtcgaacaatgcattgcatacttaaaaatgaaaagagagtgtgatccttacagacaattgttgccaaggatgatgtatcaagcctcacatg

SEQ ID NO: 187170 - DNA, 94 bp, Arabidopsis thaliana landsberg
aaaatatgttcatattaaatccacgtgtcggataatcattggtcacatgcttgacgaacagctagattctggcagacgaacctttttaagagtt

SEQ ID NO: 187171 - DNA, 505 bp, Arabidopsis thaliana landsberg
atgtgccgagcccgggaaatacccgctcgtcgtcgaccccgtcatcggcgacgtcaggctcaccaaggtcctcatagacggagcagcagcctcaacatcatctacgccgagaccctcgggcttctgcgtatcgatctgtcctcggtccgggcggcgtgcgcctttccatggatcatccccggaagcgcgtccagcccctcggacaactcgatcttcccgtctgcttcggaacaccctccaacttccgaagggagaccctgacgttcgaagtggtcgggttccgaggaacctaccacgcggtattggggaggccatgtacgcgaagttcatggtcgtccccaactacacctacctcaagctcaagatgccgggccccaacagggtcatcaccgtcggccccacgtacaaacacgcgttcgaatgcgacgtggagtgcatggagtacgccgaggccctcgccgagtccgaggccctcattgccgacctagagagcctctctaaggag

SEQ ID NO: 187172 - DNA, 75 bp, Arabidopsis thaliana landsberg
aagcaatatcgggacacacgcaaaaatggagtatatgtcaacgtgtacaataatattatatattgcgaatcatag

SEQ ID NO: 187173 - DNA, 1260 bp, Arabidopsis thaliana landsberg
atataaaactaatggaggcagaggtggaaggtttagaagagctgtcaaagcagctattcttggaaatttatgaactccgccaagcaaaggttcccttccagtacttttccgttaatttttaatttaaataccgaatttactcatcagcatggaaatgacatcttcgactaaattacttattacctaggttattacctggtggtcttgttacgtagtaatataaacatttgataagcacttatcttacttcatttcatttgcaggatgctgctgctttttctcgaacttggaagggtcatgtgcagaactttcttggctatgcgtgttccatttactgtgtgtataagatgttaaaggtttgttttgtctttatgtgaggtgctagcctttagtaattttaactctatgttatcctagcattgcaagactatgtcaaactcttccgcatggatgtgacaatggcagtgttagtttttgttatagattgatgcagagttcaaaaattaaggagtttctttgtctgaacttctttacttctttgaaaagagagctgttctgagaccagtaatggtttattagatgaaaatatctcctatatctctaccccaccgctttgtctattgtaagtttgtaactaagaacaagtatttctaacttctctatttttcgtttgtcttatctgcagtctctacaaagtgtcgttttcaaggaggtattctcttgtccatgttttcttatacactttacaataaattcttgcagcgttatcatcatttgtttactttttacgacatggaatagtgattagcttgtttacaggcgggcacgaaagatcctgtcacgatgatgatcagcatattcttgcagttctttgatataggagtagatgcagcattgctctcacaggtttgtgtgactttggatttttgttgtatggagtagtagattcaaagaattgcaagcaggcttgttaatattctttctccttacaacatatcgtccagatgaaaagctataggattattgtttctcaattaataactctagtttcatagggcctttgatgggatgtgaattttctcatttcttagaccttgttacactagatggctttttatcttgatgcttatatggttctcaacttaccttatgtaggtctgatgctctctctttgtttattattttcagtatatttccctgttatttattgggatgttgatcgtgatatcagtgaggggattcttgacgaatctgatgaag

SEQ ID NO: 187174 - DNA, 77 bp, Arabidopsis thaliana landsberg
aatcacccagaactctccatccctgcaaatatcgacgcattgagagcaatccaaccttcgaccttcacgttccgatg

SEQ ID NO: 187175 - DNA, 350 bp, Arabidopsis thaliana landsberg
aagatcaatagccccagccttagaggaagtctctgaactgaaaaagttgcttcagaaagaagctcaatcaaagatggcggctgaagaggaagtgaataggcttaaacatcaactcaatgagttcaagaaagtcgaagtataccccgaaaaccttgcttttatccttcatgttttggtttgtttgtggattattcattttcaactctgtaattacttaggcatcagggaattctgagatcatgagactccacaagatgttggaaaatgagactcaacaaaaggaaaaactagaaggggaaatagcgacattgcattctcaactactgcaattgagtcttactgctgacgag

SEQ ID NO: 187176 - DNA, 119 bp, Arabidopsis thaliana landsberg
atggagaatagtattattctggacatttgcatctctgaaaagaaccgagaaaagttcaaatggcataaaataaacttctctggagaaaaactaggagaaaccaacaaaaagcacgaaag

SEQ ID NO: 187177 - DNA, 69 bp, Arabidopsis thaliana landsberg
ctctatcggtcagcgaaggcacatgttagtgcaacgcttgatcggttcgagagtcgagaacggcattaa

SEQ ID NO: 187178 - DNA, 60 bp, Arabidopsis thaliana landsberg
ataagtaaaaacaacgacaacaacaacaacaaaacatctgaatgcattgattctaactaa

SEQ ID NO: 187179 - DNA, 41 bp, Arabidopsis thaliana landsberg
gtactttgggtgttgaagagccaaaaccagagcctacgtga

SEQ ID NO: 187180 - DNA, 928 bp, Arabidopsis thaliana landsberg
atgataatgagaattacctttctggaaactggaaaacaatgcccaccttttcagtgggaagcaagtcaggatccgccttcggctggccatcatccccatatccttggatacaaatggaacctgatgttggtttgtttagcccagcaagaagctacagaaaagaagaagaaaaccccaaaagttgctacagactacaaacaactcaaagaacagtgccggatagctgtgtgtgatgacaagctcgtgagacaacaaaacaaacctgcaaaagggtagttttaccactcccactcttcccaaagatcaagccaaagctgcaaagagtaatagagtcacaaaactattaagtaggcatgttgtttatacacagtacctcaagaaacagccggaattaccttttctcgcgcagggaaaaattaactccattcaagatattcaactgtgttccaggaggacggtagcagacatctctaaccttgaaaataaatgtaaggcattctcacaattcaatcctttagaaagttgtatcaacgacattcactcgaattggaaacccacctcgatgcaagaataatcgcaagagattactcgaggcttcttcgtcctccgaaatctcaacctgtcaccgaaacaaaaacaaaccagacacggtgagcattcaagttgcgatgaagagtacacaaggagagtgatagattatggaggtcgtgaggaagtggcgtacggttgcttccagccaattgcagtggaggagaatgatgctggtggttcagcgatgccgaagacaggcgtggggctcgaaaacgtcgacactgccatggttaaccaatatactgaatgtcctccgccaatttctcgaactgggaaattaaaatcggaatctccggaaagaatccccggaaattttcaaattcctagtgaaaactga

SEQ ID NO: 187181 - DNA, 70 bp, Arabidopsis thaliana landsberg
agttcaccataaagagattcgacgaatccaacggctcgtgaatgaagggtgcatagagatgggagagtag

SEQ ID NO: 187182 - DNA, 722 bp, Arabidopsis thaliana landsberg
ctaagcatcagagaaaccatagactctctgctacaaacaagaaccagactctcaccaaagtttcttccatttcatcctcatcaccatcgtcttcttcttcatcatcatcaacctcatcatcatctcctttaccttctcaagactctcaagcccagaagagatctcttgtcaccatggaagaagtttggaatgacatcaaccttgcttccatccaccacctaaaccgacacagccctcatccacaacacaaccacgagccaaggttcaggggccaaaaccaccacaaccaaaaccctaactcaatcttccaagattttctcaaaggatctttgaaccaggaaccagcacccacaagccagaccacgggttctgcgcctaatggcgattccaccacggtcactgttctttgcagctctccttttccacctcctgcaactgttctgagcttgaattccggcgctggcttcgagtttctcgataaccaagatcctcttgttacctcaaactctaatcttcatacccaccatcacctctcaaacgctcatgccttcaacacctctttcgaggctctggttccatccagttcttttggtaagaaaagaggccaagattccaatgaaggttcagggaatagaagacataagcgtatgatcaagaacagagaatctgcagctcgttcccgcgctaggaaacaggaatgtgcctctcctcttccctcctaa

SEQ ID NO: 187183 - DNA, 152 bp, Arabidopsis thaliana landsberg
gagagctatatcaaagttttacaaagggaagtcaaagtcgttcatgagcttatcagaaacttcatctttgccggtgaaggacttgacgaaaccggagaatctttatagtcgtcgtcggaggaatcttctcagccaccggatatgtagtcgtg

SEQ ID NO: 187184 - DNA, 92 bp, Arabidopsis thaliana landsberg
atctctcaccgtacacgtcaacctcttcaccaaatctattgactttctctctgtgctacgtggcgatcatccggtctgtttcccgacaataa

SEQ ID NO: 187185 - DNA, 387 bp, Arabidopsis thaliana landsberg
attcgatcctcgattaaacctcacaagctttgtaacaatctctcaactctcacaaaactcagctctagaacacaatcgaacaagtaaagaagaagaacacaagactcgatttgttaacccggttcaactagatctgtgtgatctaacctacgtccggagccaaatctatccggtaaattcactagatcaaaggaagagttatactcaaacttgagcttacaacaatggcggaatctcgctctctctagatacaagaataacagaagaaagatgaatgtgataatgacgttgaaacaaacttgagttggttaccctccactgcaggtaaaggcttctctctgagtcatcatctttcggtttactcagcaatcccaaaaccggagataa

SEQ ID NO: 187186 - DNA, 70 bp, Arabidopsis thaliana landsberg
atggtatgcccggagcagttaataggccataaaggtaaggcccagaggggcatcgatgatgctgttcaag

SEQ ID NO: 187187 - DNA, 591 bp, Arabidopsis thaliana landsberg
ttgcaggatgaagtaaacaagttgaatgaacaccaaggagagaacaaagaggaacatattcagaaagctattgaagctaaaatggatgctttgcttcaatctctttggcaaatcaatgttctcgacatcgaatccacgctatctcgtgtttgccaatctgtaagatactatgcttcatcatacattatatgaccatttcttttgtagcaacaatcgacgaattaatcttgttgttaattatatatgtatctttctctcacaggtgcttaaagatccaagtgtttcgaaggatgttcttcgagctcgtgccataggactgaagaaacttggaacgatcttccaggtgagcaagaagaacaaaagggttcgtatcataacataaaagaaacactcattgtgtttagatttaagatgtcgagagccaaaaaaaaaactttttgaaaaatacatgtaactcaaaaccttagtgaatttctctgttctttttctttgaagggtgctaagaagccgtacacgagaggaagcagcttgcgtcgggaagccaccaccgtgaaaatggacaccggaggttcttcaaaggcgacgtcttga

SEQ ID NO: 187188 - DNA, 309 bp, Arabidopsis thaliana landsberg
gctggcgttggtcaactggccgctctcgggaactcgacggcggcgtacggctaaaaatcaccggactgtccggtggttcacggactgtctggtggtgcccggactgtccggtgagccaacggtcggccgagccaacggtcggctgcgcaatccgcgcgtgaccgtggccaggccaatggtctgatgggggcacggactatccggtgtgcaccggacagtgccgatgcgcatacggctccaaatcttcaacggtcggctgcgcaatttaggaaagcaatctgcaccggacactgaacaccggactgtccg

SEQ ID NO: 187189 - DNA, 220 bp, Arabidopsis thaliana landsberg
gaatagaaattggcagggactagctgttgcaattgtcaagctttgggagaaatgtgagcttgccaagatagcagtgaagagaggagttcagaacactaatagtgagctgatggccgaagagttaaaggttgttggtttacttctagtgatcaaagtatcaaactatttgtggctctgtttgcgaacaatagaaaattatgcccttcggagtcccatataa

SEQ ID NO: 187190 - DNA, 745 bp, Arabidopsis thaliana landsberg
atggctaccggacaaaacagaacaactgtgccagagaatctgaagaaacacctcgcagtttcagttcgaaacattcaatggagttatggtatcttttggtctgtctctgcttctcagtctgggtaagtttcttaaatcatattcattgaacactagatattggagattttgaaagatattgatgaagtaaatttcttgattttaattggaaaattagataaaacttatgtgttcacttcaaatcaaaactagtgtttagttctacaactcaagacaaggttctctaggtttttcttgattccattgattttttcttataaactcatataaggtttcttgatcttctttaaaagttcaattttttttctcttcttcttgaagttcttgattagttcaagaaaatgttttgtttgttttctttattcgatttgatatttgtttttgtttttctatatataaaaagagttttagaatggggagatggatactataatggagatatcaaaacgaggaagacgattcaagcttcggagatcaaagctgatcagcttggtctacggaggagcgagcagcttagcgagctttacgagtctctctccgtcgctgaatcttcttcttcaggcgttgctgccggatctcaagtcaccagacgagcttccgccgccgcactttcaccggaagatctcgccgacaccgagtggtactatttggtttgtatgtctttcgtcttcaacattggtgaagg

SEQ ID NO: 187191 - DNA, 128 bp, Arabidopsis thaliana landsberg
atcagacgcaaatctatgatctgaaaaatggaatttttggcgggggacctatcccagacgaagcgttagagattgattcagagaagacgaagatgaaaacgaagaatatccatctattaaatatataa

SEQ ID NO: 187192 - DNA, 553 bp, Arabidopsis thaliana landsberg
atgagttcgaatggagagaagaggatgatgaaaaggtccgattttgcgcagaagttgttggatgatcttcgagtgaggaaagaacagctttcaggctctcagaactccctacaaaaaggtatgaatgaactagcattgatccctgaaacgagagagcatgtagctaagctagattcttgaatcttttcgatatcgcacaacgtttcgtctgatagatctatatgtagaagttttcaacagaagctaaaatgctcccagccaattcattaaggcatcaaaagattatgaactaaccaataagttccgggcttaggacgataatctcctatggtcggtgaccacaacaggttaatttagtcccttcccggccgctaaagaatttttttgtatgcatatattcgaacaaaggctgtaagggattcacaacgatcatagctcgtgtattgcaacaagctacaaagaaaaaatctctctaatgtcaattccggcttttctggttgcagataaatatgcatattcgaacagaggatttaagggatccaaagcaaaatct

SEQ ID NO: 187193 - DNA, 159 bp, Arabidopsis thaliana landsberg
agatgcagagagagcggaaacacggaagcagtggctcgtgaaggaattgtgaagtgcgtttacctgttcaataatattgttgatgaagagaaagggatcgaatgtttgcaaaagccgcgtctaaaggacacaaagctgcctcatatctctgtggagtga

SEQ ID NO: 187194 - DNA, 459 bp, Arabidopsis thaliana landsberg
  unsure (1)..(459): unsure at all n locations
atggttcgcttctgccccaagcgcatgagcggcatcgatgacgtgaccgaacatgggcttgccggcgatcgcgtacagcactttcggcagcgcgcttttcatgcgcgtgccctgcccggcggcgagaatgataacgtccagcggaacgtggcggctcatgcgccgagtgtagcggcgcgcnccaaccgcgcaccagcgtcgtgtagacagcagcggcataatggaactccacctcgttccgccgtcgccccgacggcagtgcgctgcatccgatgccgtcttccgaatccgccagccctggccttgccgtcaacggcatcgacgaaccgttgatcgaacaactggtccgcacgttctacgcccgcgcgcgagacgacgcgctgctcggcccggtgttcgccgcgcgcatccgcgactgggaaccgcacctgacaaaaaatcatggcgttctggtcgaac

SEQ ID NO: 187195 - DNA, 557 bp, Arabidopsis thaliana landsberg
cccctgcgcgggctggagacgggcctgaccggcctggatgacatcgagatcgagggcgcgcacgaccccgagaccggccgctcggcgatcatccgcgcgctcggcaatccgacgcccgaccgcctgcgcgtcatcgcccaggccttccgccacggcctctcggtcgaggacgtcaatgcggcgagttcttacgagccgtggttcctgcgccagatcgaggagatcgtgcgcatggaggaagatgtgaagctggatgggctgccgggggtgcgtgcttcgacacgcgccgatggcgctgctcagcatgacgaacacggtgggcatgacgaaaacaacaatgctcgtcatcctgagcaggccgcctcggcggccgtgtcgaaggacgcactggcgttccgcaagctgaaggccgccggcttctcggacgcccgcttggcgaaactggtggggtcgaccgagaagcaagtccgcgctgcccgccgggcgctcgacgtgcgcccggtctacaagcgcatcgacagctgcgccgccgagttcctggcgaccacgccttacat

SEQ ID NO: 187196 - DNA, 367 bp, Arabidopsis thaliana landsberg
gaatttctcatatccaaggcagcttaccacaagaaccccaccccatacaactagttgggggggctgttcgccttttgaatcaaacaaagtaagttgtaggtaggggcttcatagctactttcattctaaaggaaagcgaagaaccaatctttagtcaataggagccctacttccctcgacctcatcacttcaattgttgcgcaaacctctttcttagtcaccgggcggagcgcacctttgtcacagtagggcgagctgtttgatagtgacttcttgcgtttggtagggcgacgaaagggctacttccttcaatctaggaaacagccggaaactcgagaaggtcgcctttggaagcgttcgccagtaa

SEQ ID NO: 187197 - DNA, 79 bp, Arabidopsis thaliana landsberg
ctatgtcttaagctgcttccgatactcctacgcgacccaaaacattgaaaagatgtcggatagatcatatatgagttga

SEQ ID NO: 187198 - DNA, 209 bp, Arabidopsis thaliana landsberg
aagagagagagagttgggaacaaacttggatctcgaacagtggcattgacggtgtagccacggaggagcaaaagcttgacaatccaagacgctatgtagccggaagctccggtaacgcagaccacctttcctccgcagttcatatctcctgtctgagtctctctgtgtctgaaaataattgttttaaagagaacttccaactcgaatga

SEQ ID NO: 187199 - DNA, 623 bp, Arabidopsis thaliana landsberg
gaagggaaccagattacagtcacgtgaaaagatttggttgccttgtatattatcatgttgaacagggcaaactaaaaccaagagcaaagaagggagtatttatgggatatccacaaggagttaaaggatacaggatttggagtattgaggacaagaaatgcgttgtaagtagagatgtgaagttcagagaagatgttctgtacaaagacattggaaaaatgtcagaagcagaaaaagatgtatcgaaactgaatggaaggaacataaccattgtggtacctggtaatactgtagatggagctactttggaaagtcaaggagaaacctcttctcaggatcatactcaaccagctgaagctggagatggagttattgaggtacctgaaacagcagaagaagaggcagtatcagatgatgagtccactcatgaattggataattatctgctagcaagggacagagataggaggaccaatatcagaccgcctagcaggtatgatcttgggtatgtagcaatgtatgctctgacaatgtgcacatgttatagatctggaggaacctcagaactatcaagaagcgatgaactgcagagaaaacgagaaatggaagttagcggctcatga

SEQ ID NO: 187200 - DNA, 177 bp, Arabidopsis thaliana landsberg
aaagaaggaacaattgagatcaagcgaagagaagataacaggagaaaacttaccggtgataatggaagcttcgatgtgttatcaacgactgagagaggaaccggtagcagcttcaaggtagaagaagaagaagaagaagaagaagaagaagaaaattttgcgtctgtgtttgccgaa

SEQ ID NO: 187201 - DNA, 199 bp, Arabidopsis thaliana landsberg
attgaatgataatctccttcaatccacggccgtcgtctaccgtccagaacaagatagatttcagttcaccgggtaatgatctagccaccgagatgctttctccggagacaacgaggaactaagaggatggcgaaagaaaacactaagacgctctcgtttgtggtttcaagtttcagaacaagcacgagtcgccgcctga

SEQ ID NO: 187202 - DNA, 48 bp, Arabidopsis thaliana landsberg
atggctaaagcaagacacaaagatgttcatgcaccttttgcagcaaag

SEQ ID NO: 187203 - DNA, 1156 bp, Arabidopsis thaliana landsberg
aagctttgccttcaagcgtttgtattttcggatgcgaagaagaaaaagatgcagccgaagcatcagtgtctgaggtcgagaatagccgctggtgaagtaaacgcgacggaggtattattggtgaagaagataatcgacgagcagagagaagaagtctttgcagctgattcacccgtaccgacgccaacattttcgaaagagaaagcgatcacgagtttcggaaactgcggtcggaagttactgacgtcggattcgtcgtcggcgaaattgaagaagacaagtgagtgagggcaaaagtggaatgacgaattctcgaaggatgtaattttaacgggctacatattaaactatatgggcctataaactatagtaaggcatattaaaaatttagattgatgataatcagtaaaacaattagagaaaaagaaatttagattttagggttaaagttatacgctaattttcacgattgagaatttagagttgagggtttctattttaggttttagtgtatttctttttattaatttctaaaatctattttcctacaaaagagtataaaattttggggctattacgagaatgggtactttctaacccaaaaactaaaaattggacatttttacaatggatttatagggaaaggtactttggtgagttgggttaacgaaattacccttgccctacaatttcactcaatcaaaagccatcttcttgagtcatcttctccgacaactcacggcatctaaatgttggttatgataaactcaaaaaatcaattaaaagttttttaatggaataatattaaaccctaaggagataatttatagggaacccaattcaatcaaaaaaataatcaaatcaattgaggaaattagctcttaaaatttcgtttgaatcaattgagcagattagctctcaatcagaattcgtttgaatcccaaaattcgttcgattccagaaacccagaattcgtttgataatctcgtcattatcaatctctcaaatttaaaaaataagcttagatctacctaattcatttgaatcaagctcgaaacccagaattcgtttcaaattcgcgagcttatctcaccacattctcttgcttctcagcctcactaacccttctctttacagtttgatcggacttttatag

SEQ ID NO: 187204 - DNA, 2672 bp, Arabidopsis thaliana landsberg
ttaaaattggaaattttgatgtttatcttctatggctttgttcagtataactttgaaggaagatatgaccttgtcaaatttgtgaagcttattggatcaagtggtctttatctccatctacggataggtccttatgtttgtgctgagtggaactttgggtattttcttttttgcaaccattggtgtctcttagtcttcttttttattcagctttctctttattctttttgctccaattctttgttagggggttcccagtgtggctgcgggatattcctggcattgagtttcgaacagataatgaaccttttaaggtacttttttttaattgaatgctcatttcacattttctttgttattgtacttattaaattctgttttagcgttgttatcatcggacagactatcatatctttgtgtttgctattttccagaaagagatgcaaaagtttgtaacaaagattgtggatttgatgcgagaagcaaagctcttctgttggcaaggaggtcccataatcatgctgcaggtcatatgaaaatgttatatgttttgaactttatatccaaatcagtgagctttctttcttttattagtctttctataaaggtgtgattatacgtatgtggtgacagtctccggcattctttgttcgctgacaggacttgtcatgggctgaccagccctcttaattgaatgttgttaaattaatgcagcttgttgaatgagaatgcaccgtcgactgaaatattttcttacacagatcgagaatgaatatggggatgttgaaaaatcttacgggcagaagggaaaggattacgtcaaatgggcagctagcatggctctagggcttggtgctggagttccgtgggttatgtgcaaacaaacggacgctccagagaatattgtaatgttgctaacttgatttttgtgcattaagatgtctctgtttttatttgttgctgatcttgttcaccaggctgatgatttttacaacgattttctttgggtgcctaaaataagattgagatactcagtatttaccgacctgcaatcattgataatgacttgtaaaccatttgtttcattgattttctttggaatataaaaggggttttatctttcaattcataatgaaagattccttgtttttgaaaaccatccttgtgacgcctattaatctctttttatctcagattgatgcatgcaatggatactattgtgatggttttaaaccaaattcgcggacgaagccagtactttggacagaggattgggatggatggtatgtttttgtcatgcagtcttctgacaaagctttgctcttatcaaataagtgttttggtgaagtttttatttcaaggccaatgtaccagttggccttaactgttatgttaattggtatttggattaaatgagtatgttaggctgactttttgaaggtacacgaagtggggtggaagtttgcctcaccgacctgctgaagatcttgcatttgcagttgcaagattttatcagcgtggaggaagctttcaaaattattatatggtacaatagttacagactagattgttttctatttttcttgtccactttttcctgccgtagttcatttgcagcatcatcttcctgtttcatatttatttgcagctgatttcaaatgatattcagaaacaacaatgactagttccataggttttttgcttgagttgagaaactaggttttactaagccatagtatttactttacgtccctcccgtagaaccctcaaaaggcaaacgatgtaggagataatctacacaacttgcgggaattgtttttactcaacttgattattgaatgcctctgataacgctttcaatctgtttgcgttgcatatattgatgcgtctgttttatggttgcagtattttggtggaacaaactttggtcgaacttctggtggtcctttctacattacaagctatgattatgatgctcctcttgatgaatatggtgggtgcaagctaaggctagcaggagagcagattgctaagaaaaatttagttacttagttttctaatgaaattttgtttgtcatatactaaggtctgaggagcgagccaaaatgggggcatctaaaggaccttcatgctgccataaaactttgtgaacctgctcttgtcgcggcggatgcacctcaatatagaaaattgggatcaaagcaggaggtgttatcctactctcaaatgctagttgcatatagtgacattagtagaactcactcttcttatctaggtataataaactagtgctgttagatagatttcctgccggtttgattcttactctgctttacctgtcaagattttcacttagttctactataaggatagtcttcattgccatctattgggtgcttcttttaaatgtacgtataaatgtgatttatctactgaacaaaatacgggcctgttatttgattacctttcagaatgaagatgaggttttatattatacatgcttaagattccagattcttatttgtaaataacgcaaatttcaggcacacatttatcatggagatggtgagactggaggaaaggtgtgcgctgcatttctcgcaaacattgatgagcataaatctgcacatgtgaaatttaatggccagtcatatactttaccaccttggtca

SEQ ID NO: 187205 - DNA, 68 bp, Arabidopsis thaliana landsberg
atgatttgtttaataagagattgtgaaccgtccatcttggaaacgaaggacggcactagattgatctg

SEQ ID NO: 187206 - DNA, 274 bp, Arabidopsis thaliana landsberg
atggagcataagaggatgcttacctcagtgaaaaatggagcacaagaggattcttacctcaaagaaaaaatggagagtaagaggatgcttacctcggagaaaaaatggagcataagaagatgcttacctcaaagacatggagaaataccggtggtaagagaaaggccacaagttcaattgtcttgcagaagaaacaattgacaaagagtatcaaattgtgtaccaaagagaagaacaaaggaagaagtttgaagtaaatcagaaactcaattaa

SEQ ID NO: 187207 - DNA, 446 bp, Arabidopsis thaliana landsberg
atgactttaagcgttgatcacatggatcatgctgcattaacaacgaactcaattcatttacaagatgatgtattgaaggagatactcacacttaacgccaacacagagtatctcaaacgttttctcgatggaagctctgataaagagttgttcaagaagaacgtaccggtggtgagctacaatgatgtcaagccttatatcgaacgtgttgcgaatggagagccctcggatgtgatttcaggtggaaccattacaagattcgtccaaaggtacataaatatatcattatgattaatcaatggatcaagtactagttttgatttggaggtgatggttgtgtgtagcacgggaacttcaggagggatacataaaatatttccagtgaacgataagtacatagagaatcttggataccttttggctgtatcctctctcattacttccaa

SEQ ID NO: 187208 - DNA, 387 bp, Arabidopsis thaliana landsberg
atgaagttcaaccgtaccgttcttgcggtcgctgttgcctccgcgatggttcttgcactgtccgcctgcagcaacaccggtagcgaaggtcagtctgctgccgaccaggcccagaacgccgcggccgccgtttcctcggctgccagcagcgcggcccaggccgccggctcggccgctgaagccgccggcaacgccgccgccgctgccggttcggccgctgaagccgccaccggcgagcccgccgctgcgtcgaccgcacctgcgtcgtccgagcccgcttccagcagcacagcagcgccggcttccagcggcgtggtcgccgcggtcaaggatgccgcatccaagaccgagcaggccggtgccaaggccaaggacgccgccgacaag

SEQ ID NO: 187209 - DNA, 412 bp, Arabidopsis thaliana landsberg
  unsure (1)..(412): unsure at all n locations
ggcgcgtatgcagggtaaaaatgcctgctgggtgccgggcaccgaccatgcatccattgccaccgaagccaaggtggtgcagatgctccgcgaaaaagggattgccaaatcctcgctcaaccgcgatgaattcctaaaatatgcatgggaatggaaagagaaatannnnnnnnnnnnnnnnnnnnnnnngaaaaagctgggatgcagcctcgactggaaccgtgtttcctttaccatggatgaaacctattaccgttctgtgatccgggtattcatcgacctgtaccagaaaggctggatataccgcggcaagcggatgatcaactgggatgtaaaggccaaaacagcgctgagcgatgaggaagtgatccgcagggaaacacaacagaaactgtattacctgcgctaccag

SEQ ID NO: 187210 - DNA, 361 bp, Arabidopsis thaliana landsberg
atgacgagcgagaggagatcgccgcgcgacggcttctcctgccgcagcgcaagaagcagcgccgcacccagcagcgcggcgatcaccgcccgggcggaggtgagaaacagcggcgagaaatccgtgaccgccacgcgcgtcgccggcagggagccgctgaagatgacgacaccggcaagcccgctgccccaaccgttcatggatgttttcatgtttcctcgctttccttactcccgctacgcgcgaagggctggccaagacaggaacaaatccatacaatttcacaaaactgtactggttcgaattcccatacacgaggcgcatcatgctggagcctgccgcgagaggccggccgagcgag

SEQ ID NO: 187211 - DNA, 196 bp, Arabidopsis thaliana landsberg
ttgcaacaaaaagatcgtcatactcgtcctgaaagcttatccaactgtcggaatagacgctctaccccatgctaaacctattcatggccccaagcaagatacatcaagaatccctaaactaggtgaccttcatcccaagcgaaccctagttcaccgcgcccttgagctttcccttgttttgtacaagatcgatcag

SEQ ID NO: 187212 - DNA, 88 bp, Arabidopsis thaliana landsberg
tgagttgtctagagcacgcatccaaactagtgtacgtgtcatcagggtacagcgcataggctttttcaccgaagccaggctctatggt

SEQ ID NO: 187213 - DNA, 739 bp, Arabidopsis thaliana landsberg
atgtccatggcgtcttcttctcttgcgacccaatcctttatttcttcctttcctctatctcaccgacttcacttccctgtaccttatcttcttgttcgttcttttttctttcgaaaaccacttagtctctctgctacttccccttcgtcatcttcttcttctccttccattttcctctcctgcttcgatgacgctttaccagataagatccaacaacaagaaaattcgacaatcaatagcgaagaaagtgaatgtgaagaagaagatgaaggagatgatttcacagacccaattcttaaattcttcaagtcacgaactttaacatcagaatcaactgcagacccagctcgagaatccaaattctccctccagaagaatcgtcgaacttcctggcatttagctccagaattcgctgaccccgaaactgaaatcgagtctgagcctgaggaatccgtctttgtgacaaaccaacaaacacttggtgtgcatactccattcgaaagtggcgtcgctagggaaatcttggaacttgctaagaatttgaaagagaatcaaactttgggagagatgttatcaggtttcgaaagaagggttagtgatacagagtgtgtagaggcattagtgatgatgggtgaatctggttttgtgaagagttgtctatatttctatgagtggatgagtttacaagaaccttcccttgcttcgcctcgtgcttgctctgtgttgtttacattgctcg

SEQ ID NO: 187214 - DNA, 1056 bp, Arabidopsis thaliana landsberg
atgaaagctagcaatgttctattggacgatgcaatgaatccgaaaatctcagattttgggatggcaaaattgtttaatactgaccaaacaagtcagaccatgtttacaagcaaagttgcaggaacttagtaagctgcccaaaaagtacccttatagtactaccaattctatgaaaaaagatttttaaaaaccatttttttgggtcgttgcagcggttacatggctcctgagtatgcaatgagtgggcaattctcggtgaaaaccgacgtatttagtttcggtgtactagtccttgagatcattaaaggtaagaaaaacaattggtctccggaagaacaaagctcattattcctccttagctatgtaagtgaaaaatattattgtgtaattttgatttttatgcaaataaactctcaaagtcttctatttttacaattttactctctacgtccaaaataaaaaaatatacaaaataatcatatgaagtcaaaattaatacgcaatatagccgatttttgcaactttacatatattgtagatgttttcagatatagttgaaatcttcatctcaagagattcaatttgatatattatttatcaaaattttaaaatttggtaatagcgaaaaaagctatattgtgtattatttttatttcatatgattattctgcatttttggacgtgaatgataaagttgcaaaaatgaacgactttgacatatattcaactcatgtataggtgtggaaatgctggagagaaggagaagtgttgaacattgtggatccaagtttgattgaaacaagaggtctaagtgatgagatcaggaaatgcattcacattggtttgttgtgtgttcaggagaatccagggagtagaccaacaatggcttctattgttagaatgctcaatgcaaattctttcactttaccgagacccttgcaacccgctttttactcaggagttgtagactcatcgtcaagagacaacaatcatacaagaaacccgcgtattgcgtctttgaatgatgttacaattacggagttagatcctcgttga

SEQ ID NO: 187215 - DNA, 512 bp, Arabidopsis thaliana landsberg
aggatgcaagaccttcccttcttactccgaaggttgttgcgagaaatgatggatccacaaagaacgcttccactcgtcatcagagctcgtgtttatattgcggttagtttaacacattcattacttctggacccttattaagtaaatcttctgtgattaaatgttcacaactttgagcacttgatcacatctgaactaaagaatgctctgactaacacaaaattcactgctttttatttgatgcagttgatactcagtgcgatttacataatcagcccaatagatatcattccggaaggtaatcctcatttcatctcttcagtatattcatacaatacacacactcttctcttctatcaacatattactgaccaatactttgtatcgatttcttgtcaggagtcttgggggttatcggtttactagatgatcttctcatagccctgatttgtttcctccatgtcgctgctctctaccgatccgttctctattcccgtcatggtggttcgtga

SEQ ID NO: 187216 - DNA, 112 bp, Arabidopsis thaliana landsberg
atgagattttcgtccccggtaagctctccttggtctgccaaccattgtttagacgccatggtcgactcgtacggcctccacagggtaccgattgggcatcaaaatcgtctag

SEQ ID NO: 187217 - DNA, 227 bp, Arabidopsis thaliana landsberg
atggtctatgatgtggttcacaatacgttcggtgatgcaaccagcaccccgaacgaacagggggtgaccatgaaggctcaatattatctctggccaataccccagcgcgagatcgacaccaacaacaagctgaagcaaaacgcaggttggtaaaataattaatataaaagaccggttatcacagccggtcttttatatttacagcgtattctattattaacttttga

SEQ ID NO: 187218 - DNA, 535 bp, Arabidopsis thaliana landsberg
  unsure (1)..(535): unsure at all n locations
tcgacgggaccggcaactgcaacgccgacgtcaacttctggcgctcgctgtcgaacctgacgctgaacgtggacctgccgtccacgacgccggactacggtgccggcgacccctgacntcgtccggcgccgcctgtgacaacaccgccgagttctgggcagtgtcccaggcggccccgctgcgccgggtcgacatcaacggcagcgtgaacttccaggactactgcgccagcgacgactacgccagcggcgggtacatcgcggacagcgagatcggcggcgacttcaacacctacggcaaccagcagtacttcgtgcgcaactcatccatcggcgggtccaacggctgccccggcgggctgtggaacaacgtgtactcgggcgggcggggcgcgcccgcggcggcgttcaccggacagtgcgagcagaacacagtgctggccaccagcccggtcaccgaggaagagccgttcctgtactccgcgggcggccggtacggggtgttcgtgccctcggtccagcgcaacagctcgggg

SEQ ID NO: 187219 - DNA, 564 bp, Arabidopsis thaliana landsberg
atgacaccagctactgcatatacagtgaacacaggttagttattctatatatatcttttagttctccaaactactctgtctattatgtaatttttatcttttaaatatccgaatcattaatctaaatcttattttatgtattataaggacaagaactgagtaatccatattcatgtataagcaaccaaacacagacatcagtaatgtcaacagagtattctcatatacgaaatttacaagcagaatttgagaaagcatcaacatctgctaccaatccgagtaagaatatataggtttacaaacatttctcttaaagtatcattttatataagttgtgttaatttataaattttcgatgtgatcataggagcagaagctacaatcaattcagatactagcagtgatgatgaaaacatggccaatatgatgtttgatggtgcagtatatgaaagtgatactgatgtggatcaaaattactctcttagtagcactgacgatgaaagtgcagacacaaccgcataccaaatagaatctgaatcaatggctaatgtatctactcatgaa

SEQ ID NO: 187220 - DNA, 172 bp, Arabidopsis thaliana landsberg
acaaaatctcgacggtgacgctgaggttgaaaaaaccaatcgaaccgcagacgtaccaggaaccgaaccatgtatcaacgccattgaagaagaagaagaagaagaaggtgaaaaacgaaagattgagaatttgtttgctttgagaaccaaacctcaggaaaaaagagttaag

SEQ ID NO: 187221 - DNA, 492 bp, Arabidopsis thaliana landsberg
atgggtctaattggatcaaatcaaaaatctaaattttctaaactctctcgaaataaaatgattgaccatattcaaaacccatgcatcgctaaagaaggtccaaatcacactattcaattctacagtaggtcgtactaaggtaagcataaaatcatcattttcgtactatatatctacaacatctctttttgtaattatgtgaaactagtgtatttgaacaaacatttgttgtacctcaatatattaagacatcaaaaatatattagaaagaaatatgtgtacagctttgatgactcaactcggctcacatgatctttatgtggtgttattaaacatcttcagatatgatgtgtagccataggaaaaattgtagatttaaatgctttacatggatatgatcaattgaaagtggaactagagaaactttttgatcttaaaagcaagttacgaatccacaatcaatgggaaatgacctttaaagacaatgaatga

SEQ ID NO: 187222 - DNA, 198 bp, Arabidopsis thaliana landsberg
caaaatggtatttatacagtatcattagttaccactgattcgcatggatgccaggattcaattacaaaactggatacccttaaaatatacgatctggaagtgggcattggtgtagatactgcggaagggtgtgctcctcttaagatagatattggaaccactccctcaactcatacggtgcttcctcctgcaacgtga

SEQ ID NO: 187223 - DNA, 275 bp, Arabidopsis thaliana landsberg
atgggagacgaaccacttcttcagaaagtcaagattcaagaagacattgaatccggtaccacttcttcaaaaagtcaagattcaagaagacattgaatccgttaaaggaattcgtgtaaataatgacggcgaagaggacggtcccgttactttaattatactcttcacaaccttcactgctctctgcggcaccttctcctatggcactgccgtaattttcttcatcttctcttcttcttttcttttctctatgttttttttagggtaaacactga

SEQ ID NO: 187224 - DNA, 72 bp, Arabidopsis thaliana landsberg
aagaagaagaagaatcgaggagaaagattgaacaaggcaagaggaaggaggaggagctcagcggcgtcaagg

SEQ ID NO: 187225 - DNA, 170 bp, Arabidopsis thaliana landsberg
tgatctctgccgcacatccattgccaattttcacaaaagctgtccgaacaaaaattgttcagtcgatatatgtctttcttgctgcaaggaactaagtgagggcttccatcaagagagagatgggaagaaaaatgcagaagggaaaggatatgaatgtcgaatcccagcag

SEQ ID NO: 187226 - DNA, 201 bp, Arabidopsis thaliana landsberg
agaagttcaggtgccctggaaaaacaaatgcagtcgttgggcttggccccggagaaagtgattattgctaaaacaagaagggagagtcaacacaaggagcaaagcaagtcaaggaagttgaagcccgtatctttcctaatgtgcccatattccgttggttcatggaacgtggtgtccaagcaaaccccgcaaaagtgttaa

SEQ ID NO: 187227 - DNA, 933 bp, Arabidopsis thaliana landsberg
aagcatgctgcttctaatgtttttgacaaaccaggacagcgtgaaaatgaaattgcaaagtcctctttgactcaagtaagacctgtcagtggaggaggaagggaggccaacgcttggagagtctcctcaccactccaaaatgaaggtgcaaatcataataattatggagcaaggccctctagtaggggcagagaagctgctaagaaaagtaactacgtcttgtcatcatcaagggaaaatgtttggaataatagtggagctagagaggctccatatcagcatggaggaagacagccatggaataataatatggatagttccagcaacaggggaacttataatcgggatgggtatggaattgaatatcagaataggtatgggactaactcttccagtatggctctgcatctggtgacaaatttcttttaattaattatctctatatgaacttcttgcagggataaacgctccttcttcaagagtgacaaacctcatgtggaagatccttttatgaaagactttggtgactctggttttgatgttcatgatccattcccagtacttggtgttactaagaagaagaaagaggctttaaagcaaacagagtttcatgatcctgtcagggagtcatttgaggctgaacttgagagagttcaaaagatgcaggaagaggaacgccggcggattattgaggaacaggaaagggtgatagaactagctcgaacagaagaagaagagagactacggctggctcgtgaacaagatgagcggcagagaagattagaagaagaggccagagaagctgctttcagaaacgagcaggagagactagaggctacaaggagggcagaagagttgaggaagtcaaaagaagaggagatacataggttgttcatggaagaagaaaggaggaagccagctgctaagcattag

SEQ ID NO: 187228 - DNA, 113 bp, Arabidopsis thaliana landsberg
atttgtttcttgaagatcttgacgtaactatgatcatatatattctaaaaacgtttgaccatttacagcaatcttccaaaactatggaactaagtttggagttcgaaaatgag

SEQ ID NO: 187229 - DNA, 508 bp, Arabidopsis thaliana landsberg
gtaataatgatgattcctatttggaaggctatatacatgatcgtaactttgtagattcaatctctaaaggtctgcgacaccaacaaggagaccagtacatggtagtgattcgggtatggtggatatccttagtggggacgtctataaacctcaaggcaactcctcctcacagggagtaaagaagcctcctcctcctcctccgcatacttcttcttcctcttcttctcctgttttcgatgatgcaagtccacaacaaagcaaatcctctgaggtaattaggaatattccacctccgccttcaaggcacaaccagaggcaacagttctttgagcatcaccactcgagtagcggctcagattcctcttacgagggacagacccggaacctttctttgacaagtagtgaaccgcagaaagaagagaaaccagaggatttgcttttcaaagacctggttgagttcgccaaaaccaggtcctccaaagccaacaataataataggtcgctctga

SEQ ID NO: 187230 - DNA, 252 bp, Arabidopsis thaliana landsberg
atggaaagaaatggtggtcactacactgataagacgagagtgttggatattaaaccattgcgtactctaagacctgtgtttcccagtggaaatcaagctccgccttttgtgtgtgctccttcttttggaccatttccttctgggttctcatcgttttatccgtttagttcgtctcaagcgaatcatcacacaccagatcttaaccaagctcagtatccaccgcaacatcagcatcctcagaatccaccaccg

SEQ ID NO: 187231 - DNA, 37 bp, Arabidopsis thaliana landsberg
atgcctgatgattttgcattgccttataagatgcaat

SEQ ID NO: 187232 - DNA, 203 bp, Arabidopsis thaliana landsberg
gatttttattatctacaaatcgaaagctcgtgcctttcgaaacagaatctaccaaaatccaatttatattcataagcatgaagggagaagagaagatgacgaaccggcgagcgaattccgacatatgttttgaaattagatttggtcgcggagagaatgagataaacggaccagaccaggaattagatttggggatctcttga

SEQ ID NO: 187233 - DNA, 2152 bp, Arabidopsis thaliana landsberg
  unsure (1)..(2152): unsure at all n locations
atctaccctcaatcctcgaatataggcgcagcattaggggatttatcatcaatgctagtagtgttggaacgggtacgctcgaataaattaatttgttatggatttttcttaacatcaatgtatagggcatgaaatcatgaattttaatttttcaggtgtaatcaattattgattaaattatattcctaatatatgtaactgtagtagtttgtacgtataaggtttgctagagcatatagcgatcaccgattatatattattgaattttccaattttatcataatcgttttacgtactatcgagtacatatattactttcttaaaaggattaaattctccttataagcgttgaatactttatgtgaaaccacactcattggttttttgaagaacattccacagtacaacttaaaacgcatgtgtgttcttctcgccaggtaaatgcgttcacactatgcaccgacctaagtatttcttacataaccaaacttatgtcttttattatttagattcaaggtaataagtgataactatatttttttgttaaagaataagtgataactgtgtcaaagaagaaaaacataacaccttttataacttaaaagtgagtaccaacattctataagtttagtgttatgctacgagtttggggtcaaaatatcaattatcttttacgttctagacttggcctaaatattttttttaataaatctctttctctaactcataaatttaagaatgctcattccaaatttcggcaaatttattcgattttaaaaaaaccattcaaagcaatataaattgtaaacaaaatttctatgatatcaagacattatatattgtgataaatagatattgattggcaacatgatgattgagatgctctttctttcactctactgaaatttgttggaaagagtttttatgagtatccaaggtagatgtgaaagatagagagacccaccacttgtgttccccaattgtcatatctatgtggtggctctcgcagtatcaaacatatagacatacattttttacatttgttagtatatggtatcataaataatatatagtatttgaatncaaataaaagaaatgggacctacaatattagtgccacagacctgtcctacaacaaggtctttcacatgcttgtattgggaagatttgaaagagtattaacacctatctatctatcccctttggcaatatgcttttcttgcagaaaataattgaaatgtctttttaaaaaacattacaatttatatataaagaaaagagaaatatttgatctgaattaagcttctccaactagctccgctgctcccatgtgcactgcttcctctccttctctctgcctctttcttgggatacttcaactctccactctttattttttaaaaaatattttttgtttgatacttttcttttcttgtatgttatatattgacccagtcatatattaatgtattttttaggtaaattacccgtagttgttattaaacatcaatcaaagtctcttatcttttattaaccggagctaaagcaatggttcctttgttcacaattattatcatgcggcaagcaaaatatctagaactagattatctagggcacgtttgagcgggtatcttgataaagtaatcaagtgaattatgttacttcatatgcaccacaattttgctagagtttgaatcgtacaatcacctttacttacaaagcacaatgtctttgttgcataccaaaccattacctacaaatgtgtaaatttattgcgttcaacaatcatccccttttgagatgtggtgttaagtttcatgggcctatataaaagttttgttgtctctttagtgctgctctccacagtgtcgcgcgcgtgaagaatacattctaatgatgctcgcgttaagtatttccttgtaatagttttgaaatcacgtgtgttgagcctatgggcctaattatttgggcctttaaaagaccacataaattttttcagaaactacggctccggttcgcagccccatcagaacgtagtagccatgaaaatatattttcaaaatatcgagaagaagaacgtgagatacataagcaagtatatttttccttacatcgatttttcacatcggaaatcaaacctaacttcttctaa

SEQ ID NO: 187234 - DNA, 200 bp, Arabidopsis thaliana landsberg
atgggcaccacctactgcatcagtataagcatcacaggcttcatcaccatgaactgcgcaatcatcttcgtagtcggggtcgggatcaatttcagcctcgacttcgtccgtcactcttatcgtgcttcggtttcgatgccggcttggaacacaatcttctcctccggcaacaagctctattccgactggagcttcaaccg

SEQ ID NO: 187235 - DNA, 1761 bp, Arabidopsis thaliana landsberg
atggggggcgttttactttccagagcttcttctgatgtgaacttcgtcattgtgaaaaatgtcttggctgccaagtacaaggtctattgttcaaagattgcgatcaatattcttttaccttctgaaggttcacatctgtagattatataactagcttcttatcagtttcacctttgctttagtaacatatcaataccgctgttttccataatgcatctcagaaaattattccaactatgttagataaactaaaagtgtttatcagttcatttagctttaccccaattagatgaatttttctctgtcgatgccggtaaattaaagttagatagaatcatagaagtggctgttgatcttttgcacggtgcatgtgagaaattacattttcccagcagtacatagtgcctacattaaaagaagagaggccttttcgcgtaagtaaagatgtaaaatgcccctaatgaaggcctcaaaatataggttgtcgtcatccccctattgacgggttctgctttgttcatttttagatggtagctggatgatgtatataatacttaggctaatgcaggattgcaggtttacttctcagagtgaaaaacaccggtgttttctgaaattatttttagtcagcgtcgtgcctctactgacttatcattacatattatatcctagagcagagtgaactgatgaggttcatgaggaagctgttatgcctatttcattgggtctgataaatatatcttattttaacttgcagtgggccctgaataagaagccaatcgttactctgaattggttacatcggtgttggaatgagcaccgtgtggttcctcaggaaccatataagattcctcctttttctggattgacaatctgtgtcacaagaattccagcaggttagaaaaccggtatattcaacatatgcgaattaggttctttgttgacagttaatcagtgatttattatcagatgaacgcaagggaatggaaaaggtaatttcagaatatggagggagctactctgctgagctaacaaagaattgtacacatttgatcgctgatatatcctttgaaacaaaatttaaaaatgtgctattcctaggacatatgttgattttgtgtgcgcattcagttgtgctgataaattagcagtattcaaggcttaccaatcgggttctctgaagttacaagatatgtgaatataaccattacgtggttgatatatagatgccttaaattccaagttcctgtgcactaaagtttgaggttgcgttatttggactttaatgaaaaatgattccttgaccttgcatacgctgctgaaggtgacaaatacaaagttgctcgaaaatggggtcacattcaaattgtcacacggaaatggtttcagcagtccatcgataaaaagggtgacgttgggtgcttctgcattttatacattctcttactgatcagtgatcggtatattggctctctataagttaacagattcattcgatactgatatgtcaccttgttatgcgcagtttgtctcaatgaagagtcatatcctgttctcggttccatacccttgacaagaggagtgcgagatttgggggttcataatggtctagaaaagtttccttcggctgcaactgcgtccgcggcagattcatatgtttcttgtgctcagtctagagactcagatatagaagcttctgtttcacaaaatgtttttcccacttctatgaatcccagtaccgatgttaaagaaaccaagtga

SEQ ID NO: 187236 - DNA, 377 bp, Arabidopsis thaliana landsberg
attccaatccgtatggctatggtcggattacgatcagaagagcgttcgaactgtcctcgaatgtgatcgcccgggtaatcaacaatgcgtatcgaaaagaaccgcaggtgtttattgaccgtttgcggacctttggaatcggagatactttgggtgttgctattcagggtgagccaaggcctacattaccttctccgggaacgaaaaactggtccggaatttcattgccctggatgtcgatcggctacgaagtgcgacaaacaccgttgcaaactcttgcgttctacaatgcagttgcgaataacggaactttggtccgtccgcagtttgtggaacatatacgtcgcggacagcgaattgttaacccgtctaagccg

SEQ ID NO: 187237 - DNA, 748 bp, Arabidopsis thaliana landsberg
atgcagcccatttttgtatctgagcccttgcacatctgtattatgtttctgaagtttcacctgacacaagaaacaaaagccaaaaccccaaagttagaatcattacttccaaacatgagtgatgccaatccagtgataaactatctaaaaatggttagcctaaaacaagaaatgatttttatgcatagaaagctcctaagcaaaaaaaacccatttaagtcccaaacagcatcagaagaaacctcattgagatatatgatggatggttttatatcttctttgcttaacgatagttttacgcatagaggtaaacaatcaacacataactgataagtgaatatatatcaatggtccagtgtagaacactttctcacaccaatgcatccttaattcaaaactctgcagctaagtatagaattgaagtactgaaacataatttctcaaattggaagatgaaacacatatatacccatttggtgtaaactctgataaacacatattttacaagaaaaatcgaaaactaggattgaaaattgagtaccttgacggtgtcgaaagggtggccgacggcgacagtggcgagaccagccatcattccggcgacatattccttgtaaaacccgaagccctctcctgtcgtcgtcttactctctcccattcccacaacgccaccgagcagaagaagaattattcacttcactacggtgtcttttgctttctacaaaaaaaaatgaataattcagagtga

SEQ ID NO: 187238 - DNA, 203 bp, Arabidopsis thaliana landsberg
ctgacgaagaagaagacgacgacgacgaaggcaacaaaaacgatgacgtttttcttctatcagtagtatttcttctgaaggaaataaaacgcagcgttttggcgaatcttgctccaatacgttggatcaatttcctcgcggccggcgagctccttagaccaaaactgagaattccgacgagaaccacccttctccggctgtga

SEQ ID NO: 187239 - DNA, 468 bp, Arabidopsis thaliana landsberg
caatactttcgctggccacatcccaacttcaatgggaaacgtaagagagctcgaatcactagatgtttctcaaagcaactttcaggagacattccacaagagctaggggacctctcgtaccttgcgtacatgaacttctcccataaccagcttgtaggtctagtaccagggggcactcagtttctaacacagaattgctcttctttcgaggagaatgcaggacattttggcccttcacttgagaaagtttgtgatatccatgggaaaacaatgcaagagtccgaaatgccaggatcagaagaagatgaagaagaggtgataagttggatagcagctgcaattggattcatacctggtattgcctttggattgatgatgggatacatattggtttggtacaaaccagagtggttcatgaacgtttttggcaaaaacaaaagcagaagcacaagcagcacgacgcgttaa

SEQ ID NO: 187240 - DNA, 457 bp, Arabidopsis thaliana landsberg
atggactatttcatcaaacttgtcaagaagaagtataacaaagacattagcaaggatcacaaagcccttggtaaacttaggcgtgaatgtgagcttgcgaaacgatctttgagcaaccagcaccaagtccgtgttgagattgagtcgctctttgatggagttgatttctctgagcctttaacgagagcaagattcgaggaactcaacatggatttgttcaagaagactatggagccagtgaagaaggctcttaaagatgcgggtttgaagaaatctgatatcgacgagattgttcttgttggaggaagcactcgaatcccaaaagttcagcagatgttaaaggatttcttcgacggcaaggaacccagcaaagggactaaccctgatgaggctgtggcctatggcgccgcggtccaaggtggagtattaagtggtgaaggtggagaagaaacacaaa

SEQ ID NO: 187241 - DNA, 58 bp, Arabidopsis thaliana landsberg
atgggcctgaaacaccacaacagcgacacgagccacaacgcgcaaaatggaaccaaac

SEQ ID NO: 187242 - DNA, 875 bp, Arabidopsis thaliana landsberg
atgggagaatggagcaacaacctcggaggaatgtacacttatgcaaccgaggaagccgatttcatgaaccagcttctcgcctcttatgatcatcctggcaccggctcatcctccggcgcagcagccagtggtgaccaccaaggcttgtattggaaccttggttctcatcacaaccaccttagcctcgtctctgaagccggtagcttctgtttctctcaagagagcagcagctacagcgctgggaacagcggctattacaccgttgttccacccacggttgaagagaaccaaaatgagacaatggactttgggatggaagatgtgaccatcaacacaaactcataccttgttggtgaggagacaagtgagtgtgacgttgagaaatactcttctggaaagactcttatgcctttggaaaccgtagtggagaaccacgatgacgaggaaagcttgttgcaatctgagatctctgtgactactacaaaatctctcaccggctccaaaaagagatcccgtgccacatctactgatgtaagtctttaattttctaactggttggcaattagctagagagatcacatttggtttagtgactaatatagaaacggttttgcaatggactcagaaaaacaagagagcaagagtgaataagagggcccagaagaacgtagagatgagtggggataacaatgaaggggaagaggaagaaggagagacgaagttgaagaaaagaaagaatggggcaatgatgagtagacagaactcaagcaccactttctgtacggaggaagattcaaactgcgctgatcaagacggtggaggagaagactcatcctctaaggaagatgatgcctcaaaggccctcaacctcaatg

SEQ ID NO: 187243 - DNA, 288 bp, Arabidopsis thaliana landsberg
atgagacgggtgaagaatagcttggaacagaagaaaatcaaacttcagtataccaaagaggcagtggatctccttgctcagcttggctttgaccccaactacggggcaaggccggtgaagcgagtgattcaacagatggtggagaatgagatcgctgtcgggattttgaaaggagatttcgcagaagaagataccgttcttgtcgatgttgaccacttggctagtggcaacaaattggttatcaagaagctccagagtaatgcttcagctgaagaaatggccgcttaa

SEQ ID NO: 187244 - DNA, 487 bp, Arabidopsis thaliana landsberg
aatgaatgggtgatctgcagggtatttcataaaactgctggaggtaagaagatcccgatttcgacgttaatccgaatcggttcttacggaaccgggtctagtttaccacctttaactgattcttcaccatacaacgacaaaaccaagaccgaaccagtttacgtgccctgcttctccaaccaagctgaaactagaggaacaatactcaattgcttcagcaacccttcccttagctccatccaaccagattttctccagatgattccactctaccaacctcaatctctcaacatttccgagagttccaatccggttcttacgcaagaacaatcagttttacaagcgatgatggaaaacaacagaaggcagaacttcaaaacattgagcatctcgcaagaaaccggggtttcgaacaccgataactcatcggtttttgaatttgggaggaagcgatttgataatcaagaagttccatctccctcttccg

SEQ ID NO: 187245 - DNA, 453 bp, Arabidopsis thaliana landsberg
atgattatgctggtcaacggttcgtcgcgcttgtggaatgtaagtggcatcaccctgacggggggcctgtcgggcatcaagatcaagagtgaatcactgcagaccctgatggctggtggtatcgcgttcgatacgccacggcctgatgtgccgctcaaacgccacattccacgcttccgcctgcatgacagccaggaggcggtcaaccgcgcaggaacgttgattaccattcgtgtggaccgtgccgacggcctcaagcctggcacggcgatacgcttccgcggcctggatgtgggtagcgtcgagagcgtcgacctgaccgatgacttgcaggcggtgttgctgcgggcgcgcattaccgaagcagcggaccgtatcgcccgcgtcggtacgcagttctgggtggtcaagccggcctttggcctggtgcgcacgcagaacctcgacaccttg

SEQ ID NO: 187246 - DNA, 1949 bp, Arabidopsis thaliana landsberg
caaaacgtcaccgttcacacaatttgctactacgatggaggtaacttcacatccaacacttcatattcccttaatctcaaccgtctgatctcgtctttacctgatctaactccaaccatcaacggcttctacaatatctccatcaatggagaagtcaacgccatagctttatgcagaggagatgtcaagccaaatcaagattgcatcagttgcatcaccaccgccgcaaagcagctcgtagagagctgtccaaacatcatcgaagccaatatttggcttgagaaatgcatgtttcgttacacaagaagaaaaatcttaggtcaaatggagccggttcctttttcttatacatcaagtaatgttagtgtgacagacaagaaaggtttcagcaagggtttaggtgacctattggattcattaggagcaaaaatcgatgctgcgaatgagaccaaagaggttaagtttgcagcaggagtgaaaggaacgatctacgtgttggctcagtgtacaccagatttgtttgaatcagattgtagaatatgtcttgctcagatctttgatggagttcccacttgttgtgatggaaagacaggtggatggtggactaatccaagttgctatttcaggtttgaagtgtatccgtttttcgatctttcagttacttcagaacagaagcaacctctttcttctcataataataacaccagaagaagtgatcaaggtatattacaagttaagctaatatcatcaaattgattaggaatttagaatctaccttttgattctctgttgttatttgcaggaaaaagtaaagaccggtctaaaactctcatctttgcggtggttcccattgtggcgatcatattaggtcttgtgtttctctttatctacttaaagaggaggaggaaaaagaagaccctgaaggaaaatgctgaaagtaagtttttggagctgattgagataactaatgatgctaaaccctattcttctaccttattatgaaagtttgcgctggctaattttgatctgcagatgaatttgagagtacagactcattgcattttgattttgagaccataagagtagcaacagatgatttttccttaacgaataagatcggtgaaggtggttttggcgttgtctacaaggtaaactcatcctactatactcttttttaccctaatcttaatctacagattaactttactcactgtgattcaataagcctgtcataaaatccatcagggtcatctcccagatggactagagatagctgtgaaaaggttatccatacattcaggacaaggcaatgcagagtttaagacagaagtactcttaatgactaagctgcaacacaagaatcttgttaaactctttggtttctccatcaaagaatctgaaagacttcttgtatatgagtttatcccaaatacaagtcttgatcggttcttgttcggtatatatagtctctcattcgatcttttctccttccgatgattagcttttctctgtttcatttctttcctctgctaatgaatctagatcctatcaagcagaagcaactagactgggaaaaacggtacaatatcatcgtaggagtttcccggggattgctttacctacacgaaggctcggagtttccgataatccaccgtgatctcaaatcctccaatgtgcttttagatgaacaaatgctacctaagatctcagattttggaatggcaagacaattcgatttcgataatactcaagcagtaacaagaagagttgttggaacttagtaagtctagttattcaaaactaacaccagaatcaatctcaatgtctcatctgtctttgttttctgtagtggatatatggctccagagtatgcaatgcacggaagattctcagtgaagacagatgtttatagctttggagttcttgtacatgagactccttacccgtaa

SEQ ID NO: 187247 - DNA, 640 bp, Arabidopsis thaliana landsberg
atggatggggctaaagtagtgaatactccaattggtgctcatttcaaattatcatcagttcataccgatgatgaaagagtagatcctgagaaagttccctactctagtgttgtaggcagtctcatgtatgctatgattggaactagaccggatatagcttatgctattggactggttagcaggtttatgagtaagccaggagaagtacattggacagcagtcaagtggttgttgaggtatctaaaaggatcaacaggattaaacttgatgtatactaaaggatctgattttaaagtgcaaggttactgcgattcagatcacgctgcagaccttgacaagaacaggtctactagcggatatgtgttcatagtgggtggcaatactgtgagctggaagtcatgtctgcaaccagttgttgctttgtcaaccactgaagcagaatacatagctcttacagaggctgtaaaggaggctatgtggataagaaacttgctagatgatatgatgcttggaactgagactgctgaagtgtggagcgactcacagtctgcattgtgcttgtcaaagaacaatgcatttcatgaaagaaccaagcatattggtaagaagtatcatttcatcagagacattattgaagcag

SEQ ID NO: 187248 - DNA, 131 bp, Arabidopsis thaliana landsberg
ctaaacaatctgctcgagtattagaactacgaagaagaaatctaatacgaaaagaaggaaaaaacaaactaaggagcgatagtatgccaattccgctgcgaatgtcggccaatcttcttgattgtcaatga

SEQ ID NO: 187249 - DNA, 197 bp, Arabidopsis thaliana landsberg
tggacacattaaacaatgatcttaaagtacgaatgaagaaattaaagaaaatggaagaggaagaatgtggaaatggagaacgtaagtgaaagtgattggaaactaatggaatatccgtttttcctttagtcatggtggaagctgacgctgagaacctacccctccaattgcactactcgctctattactttatctaa

SEQ ID NO: 187250 - DNA, 197 bp, Arabidopsis thaliana landsberg
ttacacgctcatccttcaaatcggaaaatagaagatttacttactctgacgttaacaaaatgacaaataactttcaagttgttattggtaaaggagggttcggtgttgtctatcaaggttgtttaaataatgaacaagcagctattaaagtgctttctcattcatcagctcagggctataaagaattcaaaacagag

SEQ ID NO: 187251 - DNA, 368 bp, Arabidopsis thaliana landsberg
tttacgagattgactcaaaaaggaaaatggaaaatctctgggtcatcttcttgctcacagctactttgaccttcttcatcaccaagttcctatggagtcaaaaccctaaactacctccaagtcctactccacttccgatcatcggtcatcttcatctcatcaataagtatcctttaccacaagctctacatcatctctcttcaaactacggcccggttctgttcctcaaattcggatgccgtaacgttttgactctctcttctccagattccatcgaagaatgcttcaccaatcacgacgtaaccctcgcgaatcgtcccaagaccatcacctccgatcacgggagctacggctataaaaacttataa

SEQ ID NO: 187252 - DNA, 53 bp, Arabidopsis thaliana landsberg
atgccgcacaacgtgttctgcctgccggaaatgattgacacagaatcagcgtg

SEQ ID NO: 187253 - DNA, 1198 bp, Arabidopsis thaliana landsberg
attttgtgggtcaaagatttggtccaaaatcttatgagcatgggatatattcctcaaagaagaactccgctataaacaatttcaacaaggagagtcaatgctgtgttctgctgttggaaacacgtgcctgcagtcaaaccattaaactcttgcgagctgatgcgtttattctttttggaagcagcttgaatccatcgcatgatgttaagcacgtagagaagataaaaatcgagtcatgttctgaaagaactaagatattccgattgtactcagtatgtacagttgaagaaaaagccctgattctggctaggcaaaataagcggcaaaataaagctgtagagaacctaaaccgctctctcacgcacgcactgctcatgtggggggcgtcatacttatttgataaactggatcattttcacagcagtgaaactccagattcaggagtttcatttgaacaatctattatggacggcgtgattcatgaattctcgtccatactttcttccaaaggtggagaagaaaatgaagtcaagctgtgtctacttttggaggccaagcatgctcagggaacttacagcagtgattctactctatttggtgaagaccatattaagttgtcagatgaagagagtccaaatatattttggtcaaagctgttgggggaaaaaaatcctatgtggaaatacccttcagatactccccaaaggaatcgaaaacgagttcagtattttgagggttctgaagcgagtcccaaaactggcgatggtggaaatgcaaagaagcgaaagaaggcttctgatgatgtcactgatccaagggtccctgatccgccagtagatgatgatgaaagaaaggcctctgggaaggatcacatgggtaaaatagtttaatttctgctccgatacctctagtgttcattgattatgcaactactttgctgactatctttcctacaggggctttggagtcaccaaaagtcataacactccagtcatcatgtaaatcttctggtacagatggtacattggatggaaatgatgcttttggcttgtattctatgggcagccatatctctggaatcccagaggatatgttagctagtcaagattgggggaaaataccggatgaatcacagaggaggctccacactgttttaaagccgaagatggcaaaactttgccaagttttgcatctttca

SEQ ID NO: 187254 - DNA, 214 bp, Arabidopsis thaliana landsberg
atcatcacctgcgtcgtcgagcagttcgtcggaaactgcgccaagggcggccggggttttgaaacccggaatataaaagttgggcaccgtgtatttcgagccgtcccagcggaggagctgacccgcggccgtcggagccgtcgagtcgacgggctgtccttggatctgcgtcgtgttcgtcgccgttcccggcacgtttccgacgagattcgcg

SEQ ID NO: 187255 - DNA, 342 bp, Arabidopsis thaliana landsberg
agcacaaagaaaaccaaacaagaacagaggcaagagagacaaacaaagcacgaagagaaaaacaaaggcaagaaaaacgaagcatacacagcgagaaaaggaaacatcgacaacaaaagctatcacccgaagaaacaacacgaacaggaagaacaaacggaacaacacaagaagagacaagaaacaaaacaacagggaaatccaaacgcaaacccaaagaagagcagaaaagccagcaagaacagagacggacacgacaagcggaaagaaatagacaaagaaaacaagaaggaacacaataccacaaaaagggagaaaaccgacaaacaccaacgccgctag

SEQ ID NO: 187256 - DNA, 495 bp, Arabidopsis thaliana landsberg
gaaaccggcgaaggctccctcgctgcccctgcggctaatgtgtccggtggtggctcgtcgccaaccgctgtgccgagggctgaggatcccccgaagacggcgatggagccggcagcggaggatcccacggcggctgggtcttcgcaggtggcttagtgggtgtgggtagttagagaattttgcatatgttgctgaaccttggttgctgcgcaggttcaagattttgggcctgcgcacgcaaccgctactgctaattttgtggcggcttcgaccgtggatgctaggaatgaatcggatgagtctgcttctaagttttctgattttggtgactctgggagttcggttgagtggacggaagagtcgtcggatgaggacttggattactttgcggccttggatgtggcagcggcggaggcttcgcagcgtgctgcggatgctgaagttgtcctggtcagagtgctgggcgtagcggcgaagggcggttgcgacagtaga

SEQ ID NO: 187257 - DNA, 542 bp, Arabidopsis thaliana landsberg
atggggattatgtctgctgcaattcttttagcagaggcaactctccttcttagtaaactggacttgtccctcttctcaatacttataagctctgtgaaatccgatgaactgctagtgcaggtatgtgtacttttacatttttattcagttctcacttcaatggagtggcgtgatatcttgttatcttatagtagcaaattgtttcgccttaccagtaaattcctcttcaatcctgatcattttgctttcaggcatttgcttttgtacctttggtgtatatgtgtgtctgtacatattattcacttttcaaaattgggatgctgatgatttattccttgactcctcgacaaacaagttctgtgaatctgctaatgatttgctcgtaagtgaatatctatccatcatttttcttaaataaaaaatttacatgcttatagctggtttatatgtatctctttaggatgattgctcgatatgcgccaccaatatcttacaattttattaatctcattcaacttcattctgagactatatttgagaag

SEQ ID NO: 187258 - DNA, 240 bp, Arabidopsis thaliana landsberg
cctagatcgtctatatccaagcgccgtcgtttacttggaggtaagactctcacttgtgtttcaaattcaggtttctttctttcgtcagcagtatgctacaactttgcacatctccagtttttctgcttttctcagtttttgaatttttattctcaaactgttctcttgcaggactctctgcttacaccacagatcaatcactgaggcaactgtttgcgccttttggtcagattacagaag

SEQ ID NO: 187259 - DNA, 441 bp, Arabidopsis thaliana landsberg
tttggtatgtggttggaaaggattgcgaggaggactacatagttgctaaaagtgctgaagaagcccttgagaaagcccttgagaagtatggaaaagatgttgaaatatatcaggatccagatgttcttgacacctggttttccaggttagtttttcatttatttggagattacttttcttctgtgtgtctttgttttagaaatagtcactagtttaatcatgtgaaagtatcagtttcctcggaatagtcaccatgaattagtgcgtttcctcatatatgacgctgaacatagttttcctcattttgcattaacttcctatattatttatttagatgttttttttctgcagctcgttgtggccattcagcactcttggctggcctgatgtagcagcgaaggatttcaataacttctacccaacaaatatgttagaaacagg

SEQ ID NO: 187260 - DNA, 542 bp, Arabidopsis thaliana landsberg
gtagatttgaagttgaaggttttcagagggaagtcagctaggaaagttcttgtacaagaagttaaatcgtgtggagctacaagtttaatcgttggttcctctaggaaacatcacactatccgttcttcagcttctttagccaagtattgtgccaggaatcttgccaaggatgtctctgtttttgctgttaaaagtggcaagattatgttccgcagagtacctaataccaatggtatgttaccgcattactttctcacggtaatggtggtttgttctctgatagttcttaaggtaaaggtttgggctttgcaggtgcagatggtccacagatgaatattccctctttagtttgtggatcaccagatattgctattgaagcggcaaagattggaaacagttttagccctgctagaacgagctcacgctggacaagaactagtcgtagttcgtcattgcagtctcctgacagcttaggtgtagacaatttgttggctttagtgccagtaccaacaaatgagactgattctggttcccttgagtaa

SEQ ID NO: 187261 - DNA, 637 bp, Arabidopsis thaliana landsberg
atgacaaagataggaggtattcttgtttgtctagtcattgtgggcttagatgtagctgctgcaatcctcggaatccaagctgaagtcgcccaaaatcaggtaaaataaatgttctctttcaaattaataaatgttgtttccctaatttatgatgctaaaattggtaatgatggttgcataacatacatactgtctcaaacttagaaattttctcaaaaaaaaaaaaaaaacattaggaacctgaattaatagatttttttttaacaaatgaaaccatcgatttcctctattgtaggtgaagcacatgaggctttggttatttgagtgcagagagccgagccaggacgcgttcaggctcggtctaggtgcagccgcgatattggtaatggctcatgtcctacttaacttggtcggaggctgtctttgtatttgctctcaagacgagtttcaaagatcttcttccactagacaaatctccatggcttgtcttgtcctcacttggtacgttaatacaaaatcttcttggcattaataattgttggtccaagtaaaatgacatgattggctggtgtaatcacaggatcgtattcgctgttggatttgggagtatagtgattgggacgatgtcgaacagtaa

SEQ ID NO: 187262 - DNA, 667 bp, Arabidopsis thaliana landsberg
gatcccttgcatgcggaatccgagtattttaggcgtgtgtagaatagtgtgttgttgttccgttctgtggtggatgcctatgagctttgatcatgagtggtcagtcatgctaaggtatggcccggaacataggccgggaatgcatgacgatgcatagttcttattggttttctttgtggattcaataagatgggttggtcggcagttgacaagtccctatcagatccaacttgcgacggtgtgtgaggagaaacagagcacatagcccatagaagaagtgtctatttgtttgccgatagtattctcgttcactaaggcttattcatttcttttgcgtgcttcgtgttcactgaaaatccctttgcgattgttaacctcattatcttgcttgcgttgctttagaattttaattcatagtcccaactcactgagtaatactagattactcgtgattctacttgccttacaggtaacacgtagcaatcagcaagtagaggggacacgaacgttaacaccgccagtccggaaatgccatctatcccaaggggaattggaatttacatatgccccttcaaagattgaatatttggtgttagaggaaacagagcacgagatcttggaggtgcttcggcgtataacacatctcaggcgaccacggaaactctag

SEQ ID NO: 187263 - DNA, 391 bp, Arabidopsis thaliana landsberg
gcacccggccctggagcgcggataacaccgagattcaattcaacgaagcggcgaacacgcaaaatacgaaagacggagagggcttcgattccgattttaattcccgcaattcactattccaatataactatagccatgacaacgcgggcgggttcatgcttatctgcacgccgggcaagcgcaattccgccaacaacgtcggcaataccggaacggttatccgctataacatcagccggaacgaccatcagcggatcttcaatttgagcggagccgatggcgtgcgcctggagcataacgccatttatatcggacccggtgatcatgcgcaagcgctgttggtcagccaaagggacggatggccgaagaacgcgctcttcaaggacaacaa

SEQ ID NO: 187264 - DNA, 18 bp, Arabidopsis thaliana landsberg
gcatgtgacacctatacg

SEQ ID NO: 187265 - DNA, 352 bp, Arabidopsis thaliana landsberg
atagtctaatggattgggtctctgtaacaacatctgaaggagacgatgattgtgcctatcgatcatcggatgagttaaggaaatcaagaatggcatcttctcagagtcagctttctgaggatgaacaaggtattaaatctttttatatttcagcttcattagggtcttagaacgatgtcatgaaaactcctcttgaccatagttttgtcttttgtgtttcgcagcttcaaacaatatgattcaaccacatcatcatcaagcgagctttaaagtgaaagatggtgattttaagcgatcattcttctcactttctacattccgcagcaaaggaaacgactcgaagccaagataa

SEQ ID NO: 187266 - DNA, 371 bp, Arabidopsis thaliana landsberg
atgctgcggataattcggcatggcagggttaagcggcagtacgctttgtacgtaaattttcgtctgcggacaggcggcgcgcacttgttttacaatcttcatcatattatcggctataaccgcatcaggaatatccttaccgatgtcattaataccgcaaagtatgaagagtttggatggctgcctgtcggtaacatcttttaaacgtcttaaaattccataggtaatatcgccgccaataccccggttaataacggtagtgtcattcagcactttcttccagtcacccatttcggtgatgctgttacccaggaacataatatgtccggttgtaatcggttccttataatattgcgaaatgccactgggtg

SEQ ID NO: 187267 - DNA, 138 bp, Arabidopsis thaliana landsberg
atgctagcatataatcaaatcacactcctcaccttcttgattgtagaagaagagcttgctgctgggagatccttaaagattcagtatccagttcaggtgcattataactgcatggtgtggcatgacaatgaagcatgt

SEQ ID NO: 187268 - DNA, 51 bp, Arabidopsis thaliana landsberg
agagaacgacggcgatcaaacaaacgtcgccgaagtttaggcggcgagtga

SEQ ID NO: 187269 - DNA, 53 bp, Arabidopsis thaliana landsberg
tcatcgatcgaacaactttggagatacatgatttagcggtcaataaaaagtga

SEQ ID NO: 187270 - DNA, 869 bp, Arabidopsis thaliana landsberg
atgggctcggttaaggaatgttctcttaaggcccttgaggaactcacaaaggccagcaaagttttggtaacgatcgagggtttgtttcttgaggttacaaacttaccgcacaaattgttaacaaattatagttaattttgtttttttaaacaaattgtaattcaatgcaatggtacatatatgttgtaatatatttagtaactttcagagtggaatttagactagttgttattatttgttttgtgattattttctttattttaatacttatgttatcagtattttaattatgtttaagcttttctagggctttgcaagcttttgtgtagagtcgaagctattttcatattatgaatactcgaatatatatctaccctgatttttctttaattccagggacagttgattttatcatttctatttcctatcatttttaccaacatttttctactctttcgaactttagtgggattctgtctgtattttcaaaatgctagtaaaagtataaaccaagttgatatttttagctaaagttgcaaaagattatttcctattggtcaagactcaagaatatatatcagatagattctttctttatatatagatactgtttgtttccgatttgattgctccactataatcatgttgttgaacatcgtccgtttatgtcccaaattgtttcgtcgaaaacatgaatggtttgttgggggtgcgaaaacacatttacggccatgattgttcctctctctctccaagtgtggcatgtactcgcaatcggtgactgtggatgtcggattcggtccatttcggtccaatccgcattcaatgggcttcaaggtgaattgggcccaattcaccgcccagcgtga

SEQ ID NO: 187271 - DNA, 788 bp, Arabidopsis thaliana landsberg
atgttattacgaatggtacaagaaaaaatcggaaacgaaaacccaaaggtggtcctagtgatgatggcgagtctctgtcgcaaccccccaaaaagaaaaagatttggtggacgaatcctcttcaagacctattcttacaggctatccaacatatcggttatgatagtaagtgttttgattttcttaaaaaaaatcgatatatatatacatgatagtatgatacacacggtttattttcttacaattcaggtcaccacacactaactaatgttttacgtttgtttactaatcttccaaagaggtggtgccaaaaaagatcctcgcgttcatgaacgtaccatacttgacaagagagaacgtagccagccatttacaggtttgacatctcttgtcaaaaatgtatttggattttattgtttaaaatgggaaaaaatatattaaaaaaataaccctctattaactcgaatcaaacaaaaaaacattttactatcttattaagcataaaaattttccaagtttgagttgattttttgatttgaacctatccttagtcaacaataagagctcgttataacaccctctagagaaggtttaaacttttaaaagttgtcgaaaagaaatagtgtttggttaattaattggcttttaaaagcttgggaattttttttcatcctctttaaatacatcataccatagattatgtgacattctactttttatttaacttaaaatcaattgctacattttgcagaaatatcggatattcgtgaagagagtcctgcatcaag

SEQ ID NO: 187272 - DNA, 450 bp, Arabidopsis thaliana landsberg
agacgtggagctgtgagaaacacctctcagatctccacggcgcccaaaaaccggaacgaaactgagagatttctcaagaccaccgaaaaaagccaaagtaatgcatcagaacccagttcaaccacacctcaactgccggagaaaagaaccgcccaccaccgtaaatcaccgttgaaactcttccgtcatttagatctgaaagcaaaaagaaaaggaagaaaaaacaaacgagatgtactttttgagaacaaggagagagaagagaggattttaatttggaacgattgtccttcttttctaaatccagaagacttcaagtctttagtttctgatttccacccagacgacatagaattccaacaagttttggaacttgttaagatgggctacaaaatgaagaaaactgaatggaatacaggatgcgttgatgttcttgttgcccttgaagaa

SEQ ID NO: 187273 - DNA, 564 bp, Arabidopsis thaliana landsberg
atggtccagcttctaccagcagctgctttttccctatgtgctggtttcaaggtttcacttccattgcctaaggaacatcttccaacaccatctcaatgggatgtgtgtgaacaggtgagtgatgtggtgaaggtgctggttatgtttgataatttttcatcttatgaaagaatcaagactgttactggaatttgtttttctttcttctgcagatagatgatgttgatcgagaaagaaattttggactctttgaatgctctgtggaggctctaacaagaatttgctcaaattctagcaaggtggaggatccttgatttcttttccgccttttcctgactcatttctccgctgacagtttttttgtttccttgtagttcagatctctggctgccaagttcctgacgtagtacaactacctctggtgttaagagatccattgcttcatgacatggatatctattttcttagcattataccggaggtcaaggagaaaggaccattgtctgacatctttatgggatgtgctctgttgtgtcattttatgcatggttcttacatcacaag

SEQ ID NO: 187274 - DNA, 415 bp, Arabidopsis thaliana landsberg
atggcacggctcctcgccgcttcggcggtggttgctggcgtcctcggtgctctcgtctccgccccgtacgcttcagccagcattccaggtatcacccctggtgacctcatcaaaattggaaaccaaggctgctctgtaggtccatacgtggacttcaaagatggtggagtcggctttctcaccgcaggacattgcggcagcgctggaagcgtggtggagtggaaaggtaaaggtaatagctacctccagatcggaacagtagtcggttcggtcaacgataagggagcgggaaaacaccaggacttcgccgccgtgaagttgaacatgaatgctattcgccccgctttaggcggttcgtatctggttcagacttatctgactggggctgaactgaaaaattcaatggcacatggag

SEQ ID NO: 187275 - DNA, 52 bp, Arabidopsis thaliana landsberg
atgtttctaaaatcggatagaatgcgaacaataactgtttcggaagtccatg

SEQ ID NO: 187276 - DNA, 224 bp, Arabidopsis thaliana landsberg
atgggtcgtgccatgccaatagattctcatgaagatcatcatgttgtcacagttttacatgacgttgataatgatagatcaagcaatgttgatgattcacgtggagggagttcacaggactcatgtcatcatgttgccataaagattgttgatgataactcaaaccatgaaaaacatgaagatggtgaaatacatgtacatacattaagtaatgggcatcttca

SEQ ID NO: 187277 - DNA, 379 bp, Arabidopsis thaliana landsberg
atgatgttcatcaagtgtatcaaagagttagaagagaaggtacccttggttgatactcctaaggaagtgattatggaaagatcccaagaagttcaggaaatggttgagttgagccaagagtgcaatactactatacagaaagagagtgttctagaaatgctggaagggcttgttgttaaaaatcaattccaaacctctttaactaagggagctgaagctaagtatctttctagtgagaccttgatctcaaagaaatcattagcctcacacaaggtggtagcatggagagatgtcattaaaggtgtgattgggtcaaaaacagaggttatggcagcaaaagaggcatgtccaactcatgctcgaccatctaactcgacat

SEQ ID NO: 187278 - DNA, 1208 bp, Arabidopsis thaliana landsberg
atgatcaatttgtctctttccctgaccaaatacatgtcctatagcttcatatggatgctctttgtgatccatatatcttgtgttttatcagctactgagcttgagcttcacagacgctgcaatggcacgtttagctgcggcgatcagagagaactcttttaccctttctggacatctggtagagaagactgtggccaccctgacttcaagctcgacgactgtagcggaagattcgcagagcttagcatttcctctgtgaaatttagaattctagcgtcggtttatggctctaatatcataagactcggcagatccgaatatataggcgatctctgtccccaagatcctataaatgcaccattcagcgaaagtgtccttccatttgctcctaacaccgagctgctgactattttttacaactgcagccgagactttccacagcaagttactaattttggagactttgcttgtggggatgatagtgatgatgatagaagttactatgtgacgagaaacctctcgtttcctccactcagtgagattaatgaccttttatacgacttcagtcaatcttgcgatagaaacgtcagtattcccgcatctggatcgacgcttaacatactgcagagcactccgagtaacgataatctaaagaaggctctcgaatacggtttcgagcttgaacttaaccaagattgtcggacgtgcatagactctaagggtgcttgtggatatagtcaaacctcaagtagattcgtctgctattctatagaagagccacaaacccctactccaccaaaccctactagaaacaagggtaatatttcctacatgttctaatttcctaatggctcttccacaagaatcaccacagaaaatccttttagtttagttgaccaaaaaaaaaaatccttttagtttctgataactatatacagaaactccctcgagttttaagttattcatttccagtaagattcacagttatgtgtttagttcgaactaaccttttttctgttgccattccatagatacaagcctctctattggagcaaaagcaggtgtttcccctttccccgttctttcgcaacacctgatttgattaccattgacaacagcatatacttattatgaaaactgttttttgttttcctctctaggcattgcggttgcttctgtatcgggtttggccattcttctactcgcag

SEQ ID NO: 187279 - DNA, 287 bp, Arabidopsis thaliana landsberg
atggcgtatcggagaagacaagggatcacaagagcttcaacattcaaagaagacatctatcatcaaccaccagatcccgatcacggtgatctcaaaggtcactccaatggcggatccttcagatcttctcaatctttctcttctcattcctcccttgccgctcaagcaatccgtgcctcctctcaggtctgatctctctttttctctcttcataagattactttccctgcaagaaacataaaattcaaccaatctcaggctcaaggattcacggcttacgaggataa

SEQ ID NO: 187280 - DNA, 3044 bp, Arabidopsis thaliana landsberg
ctgacaaagagaatcaactatgtgggaaactttcctatcaacaacttggcattgcaaagctttctgcctttcgtgaatggttatctctacatccacttctatcaggattggattataccccagaagaaattgatggagacagaagctcaactaaaatggtcgtttttgcacatcaccataaggttctggatggaattcaggttaatatatttaattctcgtcattaactctttgaaaattcaaaactttatatctctgctagctcatttaacatattcgaacaagtattttgcttttaaattttttcttgtgattattgcttttcaggaatttatatgtgataaagggatgggtttttgttcgcattgatgggacgacattgccaagagatagacaattggctgtacagctttttcagttttctagtgaggtatgcacaatatcttctatacatttatcaactcttgaatttattgtgcttgttagaatgtgtggtatttgacctatactttggctttcccatccaggtaaaaattgcaataattggtgtagaagctggaggagttggactggatttttcagcagcacaaaatgttgtgttccttgaattgcctaaaacaccgtctctgttgcttcaggtattttccctgtactgctctttttatactttttaacttcttgttcttgttcttaaacctatctgcaaaatgcggtaaggctgctagatgcataatcaattgattacattttgaaggctgaggatagagcacataggcgaggccaaacaagtgcagtaaatgtatacatcttctgcgcgaaggtaaactcgtttgctgctgttatactagttacttgaagtttcccttatccactataattgaatagcgacgactcttatgtaacaggatactatggacgagtcaaattggcaaaatctaaacaagaagttgcaccgtatttcatctaccactgatggaaaatatgatgggaagactgaaatcgaagtacctctcaaatctttgctctttttctcaattctcagtagattattgtccttcccattagatgttcacaccacatagaggtttattcatatgtcataggcttaattttattcacatgacaaccattagtttatatgataaaaaaattgtctgggcagattgaaggagcatctattttcaagcctgctgaagaaagcagtgaaagagaagttcttgaagggcaaccatcagaatcaaatactgtagtagctgataagattgttgaaagctgtgacgatccgggaactgagacagatgtgtcaaatactattgatctcaaggtttatctcttgacttttcattgatcaaatagtttggacctttatgacctcggaatttatctttcgtataccatgaatatctgagttccataatcaaggagacatttggctgaatgctttttgatttttttggcctagcaggacgacatgacttctcaattggaaatattagaagtctgtccttttgttgagaatggttccggctctggcatgaggtcttctggcaccatttctttgactatgttagcccaggaaaaccaagaaaatcataagcctaaaaatgtatgaacttaaatcttatgaaaggtctatttttcttctctgacatgtcctaaaatgtaaatacattttcttatgatgcagcttattgctgatgatgggcttgtgaaagaagttgattccagttccatttttccactcatagattctctgagatttgaggtaaagttcaaagtctgcattggctctttatatttcatctgttattcttgttgccttggtggtcatgaaaagtacaatcattacaaggaggccaaatttggtgaatccactgcatacttttcaatctcgtgtcagtttctaagtttattggatctacgctgcaatctgattcttacttctattgggaaatttacaaatgacattatctttacttgtttggagttgaaaacgcatataaatcagatcttaaattctttcaggtgagccaaaacactggaagaattcatttatactcgtgcattcctgggaaagatgctagaccaaggcctcatttccaaaacttccgtccagaggagattgaagcaagcaatccaagtcagggtaccacgaaagaaaaaaatcctgaatccattacagatgacccggttcatgtacttgctatcttagaatttatgaaagagtggaaatcgctacgggcaatcgaaaagcggaaactacttggaaagcctttgcaactacctttatcactggagttgagctacctgagtgaaagtactagtcacaacagcgaggtatatcttgtagctgagaagtgcttaccaaatattttgattccaaaaccattattaagagttttttgtatcagggattgcttaggggagggagcaaaagacgaaacacaccgttttctgagatcagcattcctttacctgaaaatgcagtgtggataaaggtcaaccttcgaagtggtcaccaaagaaaggaaaaagaatacacccaagcttggagtatgagcaacgaaccactctgtaaactctgtcaaaagccctgcgcgtgagtgaaaacatggtgtatttactgactgatagtttttggttactgtttttaattaactttaaattttttgtttgatctaggggatacaacgccaaagagcctgagtatttagaggatcttttctgtgagcttgcatgctatgaagactaccggacaagaacaagcagcagatacattcgccaggtttttcttggccattctttcattatttaatgcaaatgagtgttgattaacaaagtttcatatcaagtatatctttagtgcatcactaacaggtgtaaggtttcaaatctcaggaactttttcagatagaacatggaatttgcacaaactgcaaattagactgccaccaacttgtcaaacggttaaggcctttaccactggaaaaacgacgtacatacataaacaaagctgctccagaattgtttgcccggaagaactt

SEQ ID NO: 187281 - DNA, 159 bp, Arabidopsis thaliana landsberg
actctccaacaaatgacgagattaacaaccgtgaacatcaataaaacatgtgcttcgtcggaccgtgttattaggtataattatattccacaccggaaattagacaaggatcttgacaatatatcagagatatgggtttctcaactaattgctaattag

SEQ ID NO: 187282 - DNA, 1426 bp, Arabidopsis thaliana landsberg
  unsure (1)..(1426): unsure at all n locations
atgtcagcagatttgaacagaactgagattccttcatctgtaagcagcaaggctctgttatacgagagcttaaaaccaagcatctgtaagattacaaaagtccactcgactttgtcctgcaatgggaaaagggtgggtttcatatgctttcgcaaatctaatgagtccaccctctactcattctccttttcaagcattcttggttaagagctccaacctggaaggtttcactctgactgaagatgaggctgaatccgtggagtctgtggttatgcttcttcagaaggatgatttcaaggatctgaaaacgctgggcaagatggaaactatcatacaattactgcagaccattccgaaccaagagcattgcagcagcaagtggtgcaataggagagtagcaatacaatgtgtagatttctctaagcagactatcattaggtttggttccatgaggagtacgtagaacatataaaatcagcactcttgacatttcaaagtcattccttggctgctggtctgagggatgtgtggcgtttattggatagtaatgctgtgtctttggcttctcaacaaaagaagtcatcagtatctttaaaggcagtttctcctagtttgtattggttatcatcctgtaacatnnnnnnnnnnnnnnnnnnnnnnnnnnnntcacgatatggaattttaagcgtatagtaatattggatcttatgaaggaggagccgaaacagctcctgcaccagggactttggtgtgttagaaaaaggttcacaacaaagttcctgagatagtactactatcttggctaacccagacaatggaagccgcattatggttgacaggtattgaagtcacatcatatttagagcaaattgtgaagctgttcttggtgttctaaggaaaccatggacatactcttcatgttgatggaagttctttttgtttatgacccaagggaatttccatgatgttgctgccattgttagctcgagtttgttttcatcaagagtgaaagaaatccgtattaggttgcaggtaaacattcataacactaaagcagacataatagagcataattgtggttgcaggtaattctcgttgcttatattttgtaactatgttcgtcaatcaattatgtgccacttactataacaaagtaagcttgatttactggcatatgatgaaatccagctccaacacgaaccatactggtttacttcattcttttcaggaacatcatgatctcttactggctatgttaccagctgttgtttttgttgctgaagttcgactgagtgtagttccggaggcaacacaagcacatcgcaacagtagttacacagaagtttcctttctagagttagcaacctcagtaaaagcctctcctctactcggacggcacttgctttgcaaagaacattacttctga

SEQ ID NO: 187283 - DNA, 274 bp, Arabidopsis thaliana landsberg
attgttgtaatcggcggtggtgagaagcccagcacggtggcctctgacgatcgcctccaagtatccgccatggatattgaacgtaagcgcctcgaatccgtacatctttctctcctgattgtaagaaatttcagatctcaaagattatcgccggagatctgatctgaattctgaagaagaagaagaaatctatgcagagattgtgatcgcgaagaagaagataactttgaaattgactggatttgtttgcaacgctttaaaccagtatccctaa

SEQ ID NO: 187284 - DNA, 452 bp, Arabidopsis thaliana landsberg
gaccgttccatttacgtgcgcatctcgcgcatccgggccaaggtcggcgatgacccggagaacccgaagcgcatcaagacagtgcgctccaaaggctatctgttcgtcagggaaatgagcactcactgaccggtttcgccgcggaggttgcccttgaacagcatcttcgtgcgcatgtatggcggcatcctcgccgcgctgctgattatcggcgtgatcacctacgcgggtgtcaatctggtcaaccagtaccgctcggggctgtaccgggagaacatggcgcgcggcaccttctacctgatggcgcagggctatcgaacgcataccgatgcggtttcccgccagcactggacacagcggctcagccagagcctgggcgatcaggtgacgttgctcgatgccgcccagctggctctttcctaccgcgaaaactgtatctggatgaaggacgg

SEQ ID NO: 187285 - DNA, 381 bp, Arabidopsis thaliana landsberg
  unsure (1)..(381): unsure at all n locations
atgggcttctttgcggaggctgggccggtgcagatcttcgtgtccaaccatgtgagtgattctgccttgtttggagctgcttcatagtcaaagtgttgaatgctaaagaaatttcagaattctttctggccattctaggaattatgctctgcttactcgctcctttagtcctttatcacttccataaatatacnnnnnnnnnnnnnnnnnnnnnnnnctagcatagacatcttgtttaaacttcaattaattaatgtcagtcagtactgttttgatgagtaatgtttttcctctgagctatcaattgcaatgcagttgattccagacgatatggagttccaatcaggagatgtgccgaactacacaacttctgatggatcg

SEQ ID NO: 187286 - DNA, 447 bp, Arabidopsis thaliana landsberg
atgaagcccggcaacgacaccatcttcaagatgatgggctatttgtctccgtactttccttctccgggctttggcgtggacgagtacccgctgcctgcaggagctgagatcgttcaggtccagatgctgtcccgccacggagcccgctaccctacttctggcgtcggcgttgttgatttcgccaagcgcattgccaatgcctccaacaagttcaatccgaaagggccattgaacttcctcaagggatgggagtatcatctcgggtctgagattctggtaccaaaggggcgtgaagagctgtacaattcaagtaggcactgaggcttcgttctggtatgattcgatatcctacgtggaaactgaccatccatctgtataggagtccttcataactacatgtacggcagtctgtataatcccaaaagcaagattattgtccgcacaacg

SEQ ID NO: 187287 - DNA, 261 bp, Arabidopsis thaliana landsberg
gctcttatgaatggtagaatcagggctccgtatcaccgagtaagagtgaccgagaaaaagaggacaagatacacagcagcaattttcacgtgtccaaaaccggactatgtcatagaggcaccaaaagaacttgtggacgagaagcatccacgtctcttcagaccttttgattaccgcgacttgtttacattctatcactcagaagctggtcgcaaaattcaatatactcttcaagcttattgtgccgtctccgaagcataa

SEQ ID NO: 187288 - DNA, 642 bp, Arabidopsis thaliana landsberg
atgcaggttagtatggtctctttagaatctatttttagtgttcccaacttgttttaaatgtacaatgattaatcctatcctggcatttcttttgctgattattatgcttttgcaggctgtaatggcaagtgatttttctatcgcccagttccggtttcttgaaagattgctcgtcgttcatggacactggtgctacaaaagaatagctcaaatggtatatgtgtttacaagatgccttctaattctaatgcatcctattttacacttttcacgtttctggtttctaagatatattgttttgcatccagatctgctatttcttttacaagaacatagcatttggtctcactctcttctattttgaggctttcaccgggttttctgggcaatcagtatataatgactactacctattactcttcaacgtcgtccttacttcattgccagtgattgcccttggagtctttgaacaagatgtttcctctgagatctgtttacaggtaaggtttactaagctgctgtgagtttgtcactcgcaacaaactaactcgttctttgttctgcagtttccagcgttgtaccaacaagggaagaaaaatctcttctttgactggtatagaatatttgggtggatgggaaatg

SEQ ID NO: 187289 - DNA, 313 bp, Arabidopsis thaliana landsberg
ggagaactctccttcatgggtactacacctggtgggacatcttcagactttgatagtcatgaaatatttcccgaggaacttgcaagtagcaaagtggattctaaagctgcccccctttatcagagattgctatcagctctaatttccgaggactcagccagtgtaaatgaagatttacaatttgatggatttggagccgatgttgagtcagaattcagtgttttgaatcatatgatggagttcaatggttataggagcgatagactggaatttgatgagctagaagatgatgtgtctgttatcccgctcaagg

SEQ ID NO: 187290 - DNA, 299 bp, Arabidopsis thaliana landsberg
agaattccatcaaagaccatgacaaaaacagagaaggaagacttaaggacttggaaaaaaatattaaaaccatcaaagctcaaatgcaggcagcttccaaagatttaaaggtattttatattttttggtcagttacttccatgccattgaacttcttgaatccatttttcttttccttatcctgggttatccagttttatcatggaagcattgccttcttttgaatttgctgtaacgttgtctctggttcgtcatgcgcatagagtcatgaaaatgaaaaagagaagcttgtgatgtag

SEQ ID NO: 187291 - DNA, 430 bp, Arabidopsis thaliana landsberg
atgagcgcgcgcacgcccttgccactgcgaactctggtgctggtatgggtcgcctgcctggtgctgctcgctgccaatgtcggcgccgcgtttctgccgatcggcgcctggcatgcaccgctcagcattgcgctcgcgttgagcgaagcggcgctgctcgccagctggtggatggaactgcgtcgcagcggcacgttgctgcgcatcgcgatattgctgccgctggcgtggctggcattgctggtgacgctgatcgcgctcgacgacgcgacgcgcgtgcgcctgccgcccttgccatagtcgagcgtcacggaaccgccgcgctgcggctgggtcggaatggaagtcagcgcgccatggacggcgcaaggagcaggaaatggaatcgcagttggtagccgccgatgccggcgcgcggatctatgtgctg

SEQ ID NO: 187292 - DNA, 410 bp, Arabidopsis thaliana landsberg
atggtcccaggacggacgcggccaccggaaggctctcgttcggtccccgctcaagggatgcgaaccagccatcaaagccaaagagccggaggccgccccgtagggggcactgacggcctcgacggtggggaagcttcccccggccgccaccacatcagcaccgacgactggcgtctgcctctctaccaacgccgcaccggcgaacgcaggccgctccaaagcgcaccgacaggtcctcgcccccgtcctcgccacgaaagcgaggaagagggcggaatgttgcatcctagctgggcagcaacagttcgccttccccggcatggctcgaggacgtctcctccgcagagctagaggatggttgccaccaccagaagctggaagaagaggtggaccgccggcccgcgcgggag

SEQ ID NO: 187293 - DNA, 84 bp, Arabidopsis thaliana landsberg
agttcgactccacatattcgtgtcttctgcgttgtaaagcttttgtttatggatcgtcgacaaaatggtgtaagaaaaactaac

SEQ ID NO: 187294 - DNA, 1785 bp, Arabidopsis thaliana landsberg
ggtttaagagaattgctgtcttcaccggtcatggctgcaaaacttgtgtcctcctcgacttcttcttctttggttccatccattttctcaccgtttcaacctcggagttcttttcaggtgacagtttcttaatttctttctactcagcgttcagaatttcttctttgctgcatctgtgtttcatgctcccagtgtaatgtctcgacagatatttctcccaatgtggtttgagaggttgaacagggttcatttgatctagtaggagaatttacttgacacatttgagtatactaaaatcaatgtgtctgaagtggactttaagatatagtttttgcaattctaacttagatttgattgggacattgcagtcttgttctccatagatgatgtctagaaaaaactggaacttcatctgatcaataatgctttttattaggttatgataaaatgaaatcaagtgttggtttcatttgttgttgttgatgaggttattacctgctgtttcttggtcttgggaagcccatgtttatggatatttgctgatatttatcttctcgaaacttcagtttcgttcaccgagggttcagcctgctcaactccattgttacccttctctgcaccttcaaactgataaaagtaagttcctttcttactcttaattgttatcctttgggggtatgagtgacttgtgagtaagttttctgactgtatttgcattcgttatgaacagttggctctcttcacatttcctcaagaggccaaaaaccaagcgaagtctcccgaaagagaacttatttgcctcttgctacttcagaagaaaagttccactacactgaagatacaactaatgatccagacacagtaagtccccaaattggcaccgaagctacacctcgagatgatgattcaactatccaatacaatagaagtgacgggaaaccgggtttcatttcgttttacaatcctcggaataaaactgaggatatcattatcccccctgaaactcaaagtccatggggacgcctgctctggctcattggtcctgcagtcttagtctcctctttcattttacctccagtttatttacgaagaatagtctcagcagtttttgaagattctttgctcacaggttcgtcttgcttctcccttttccgatttactcgtcacgttttcttcgaaaattgcagagacaaagtcattgtatctttcttcctctattgcagacttccttatcctattcttcaccgaggctctcttctactgcggagtcgctgcatttcttctgataatagaccgctcaagaaaaacatccggaaaagttcctcagaaccgaatcaatcctcctcagttaggacaaagaatctcttctgtagcaacattagtcctgagtcttatgattccaatggtgacaatgggattcgtctggccatggactggacctgcagcatcagctactcttgcaccgtacctcgttggtatcgttgttcagtttgcattcgaacagtacgcaagatatcgtaactctccatcatctcctatcatccccatcatctttcaggtatgtgatcactcttcttcaattcacacctctcaaagatatttcactttaacacacttttgaaggaacctttttggttttgtaggtatacagacttcatcagctaaacagagcggcacaactagtaacagcattatcatttacggttaaaggagcagaggcaacagttaataatctggcaatcaagaaatcactgggcacacttttgaatgtgatacaggttttgg

SEQ ID NO: 187295 - DNA, 346 bp, Arabidopsis thaliana landsberg
gactccggctacatgatcgacacgtcgacgccggacgacgcagaccagggcacgggaagcagcatcggtgcgccgtcatgggtttcgatatggcgcgcgctcttggttggcgctggggaagctgggatcagcggctatgccgcaggtctcggcggaacagcatctgaggccgcgcagcacgccgcgaactccatcaatgcgtcgtctcaattcttcaacgccactgcgtcggggacgactgtaaccatcacggaaagagggaacgccaacaatcagtgggtcaatgcggtgcagcctgtcgccgatcccgattatccctataaggccagcgtcggcaactcgacga

SEQ ID NO: 187296 - DNA, 133 bp, Arabidopsis thaliana landsberg
atgaaatggtcggagagagaccggagatggcgggaggaagagcacgagaatgaaatcagtgtctgtctcaaccggcaaacgaaactagtctttgccgtggaattccaagtacggaaagagtcaatgttgaaaa

SEQ ID NO: 187297 - DNA, 1065 bp, Arabidopsis thaliana landsberg
  unsure (1)..(1065): unsure at all n locations
atgctggcgaatgcacttgggtttgnnnnnnnnnnnnnnnnnnttaatactctgatgtgggttaaccaaggtgttcctgatgatgaaccggaggtaaccaacggattttatccttttgttgtttgtttacagtatcagataagggaacagaagtattgtttgctaaccgagtctggttgggtgtccgttttaccccgagttgactcggttcttgtgacgttgggtgacattgctcaggttagttctcttttgcttttgacaattgacagaacacatatgtctcttttatttatctataattaattggttagttgtcttccttaaataattatcaaattatcatcctttgtaatggaactttattccactataccgttaactggctgttttaatgtattttaaacattatccaaaataaatgttttccaacgcatcgttcaaaaagagaacaagaatttggatatttccgatatttattgttgacaacaacaacaattgtggagcataaccggggaatgtgttttcacttttcgtttgaaacagatttatggcattgggaaagaaataagaatttggaaatttccgatatttaaatacttatacacatcacatcgcaattgtacttagtgtcctatagaattcaacaattcttttttttttaggtcaaaacctaacagctttctacaatatagttttcaacttttgaacagctaacaaacaacttaaaattggcaggtttggagaaatggagaggtcaaaagagtgaaatatcgaccagtgttgtgttcaggacaaaaagatggtccagtaaagtgtgtaacaatgacattgatgcttacacttcccatggacagtatggtttcatcattgaaggatatgatcagtgacggcgacaaagaagaagagtatgcagaggaggaggaagaagatggaggaacaagaagtgatgagagaagggcatttaggccttttagtttcaaggagtacgcatggagagtgtaccaagaacgtctcttcttcagggatccacttgacagatacagaatcaaatctttaaaagattga

SEQ ID NO: 187298 - DNA, 708 bp, Arabidopsis thaliana landsberg
atggattttgttttgggccttcctcgcactcaacgtggacatgactccatctttgtggtggttgatcgattttcaaagatggtccattttataccttgtaagaaaagaacagatgtagtccaagtcgcgacattgttattccgcgagatttataagcttcatggccttcctctttcaattgtctcggatcgagactctagatttttgagccacttttggcgttcgttgtggcgtttgcttcagactagtctcgtaatgaattctgcttaccatccacaaaccgatggtcaaacagaggtcactaatcgagctttgggtgatctattgagatgtctagtcggagataacattcactcttgggattctgttttgtgtcaggctgaatttgcacaaaatcatgcagttaatcgaagcacaggttatagtccttttcatgtagtttatgggtttgtgcctcgaggttcaataaatttaagcattgcaccagatcagacaagatctcatggaagggcttgtgacatgattgatgattttgcaaacattcatccaaaagttaaagctaatttggaagttgcttcttctaaatacaaagctgctgcagatacacgcagacgtgatgttcaatttaacgttggtaataaggtttgcgctgtcctcaccaaagatcgttttccgtcgaaagcttataacaagctaaaagcaagaaag

SEQ ID NO: 187299 - DNA, 629 bp, Arabidopsis thaliana landsberg
atggcgaagaaaacacaacgtcgtgctgctgctcgacaggagagggaacagttagggtgcatgtggggatttatgaatatgtttagtttccgccatggaccactgtctcacaagctgcttctcgaccaaaagcatggtaacaaccttctcaagtctctggcatctttggttttgcattaaccgtggaagacttcctttggctaatagttatgttaattgttcagctgctgtaaatcctaagaacaaggagcttaacaagtccaaattacgcgaaaaggatgctcaagaaacccatgtaagcttttaaacttattggaaacatccttaactcttttttctgttgccttaagagtctcctgtggattaattccttgaactgtttaaaggttggtgaagaacgcaatatcacgataacgattataaagccaagtgtgaagaagctcatagcagaagagttgtccattgacaaggaaatcaagaagcagagggagaatgctgaagcaggacagttgtcagactctgaacttgaaggaagaagaaggaaaaaccaaaggagaaaaaacaagactcgcaagaaaagctgcgataattttagccatatgaacttagttgacagtgaagagcctcta

SEQ ID NO: 187300 - DNA, 967 bp, Arabidopsis thaliana landsberg
atgagtggggatatacttgcatatggagcatcagatggaagcttaacagtttgtagtctcttagaagagccttctgtcctcaagcagttgacaggtcactctaaagatgtcacaggttcgattgactggtactgttacttttgtcttttctgtatctcagtatctgctacactgaattgctcttgaataatctgagaatatgatgatacatggtacctactttctatgctttgttaggggtaagatttgagtggaaaatgtaaaagaattatctgtaatggatagagcataagtgtgtatgtatgtcattgggtttagatcctatgtctaatattaatacaaacttcttatcagattttgacttctcgtcaaacaatcaatacatcgcgtcatcatcacttgataagacaatacgagtatgggagttgtcaagaggcgtttgtattagagttatatatggaatctctccacagtattggatccgtttccaccctgtaagtttgatgttcttcatcatctttttttttttttttttgtcaaagatgttcttcatcatctatatatttctcccttgtaacaacttgcaactttttgttttgattgtgaaagtcgtctcatataagatactgagtgcggatggtttttgttgttttctcttgcttctccattgaagatatttcatttccatattttcaacaggttaataacaatttcatctctgctggcaatgcaaacaaggaactcacggtaacttcactactccttgtagctaagtacattagtgtattgcttttttcgtttgttttctaattgtttacttattttatgcctaacatctctctgcttgacaaagtaggtgttcaatttcagcactgggagaattattaaaaaactgttgtttgaggatgaggtgacatctatggaccatgatcacactggccaaataattttctgtggagatgggcag

SEQ ID NO: 187301 - DNA, 49 bp, Arabidopsis thaliana landsberg
atgggcgcatccgccgtcgtggccgggtcgattcacgccatagagcttg

SEQ ID NO: 187302 - DNA, 327 bp, Arabidopsis thaliana landsberg
tataagagaacacttgcttcccaagttattcgatatgcaacaccttcaagtgttagatgcttctgactatgaagaaatagtagcagcacctatccaacactcaagtttcgcatatagggtaaacctttggtctcttaatgagtttaaactgattcaggggctttttgtgtacacgtgtgtgatacctttaaaccattttgtgagcagaaactagggtcttctcatcatttatcagaaggtgaagatgaattctacgacgcggagatattggatgagatgactacaagcagaggtgaaataaggatccgaaccataagttttaaagag

SEQ ID NO: 187303 - DNA, 550 bp, Arabidopsis thaliana landsberg
atgattgaaaacatcgccgcctatatttccagccgtttccagaatagcgcactcatcgaggatatcaaaggaagctatccaaaacctcgttttgatgaggatcttcaaatgttctgcaagtatgcttttaaccaaaagacccctgaagatggtttcgatgaactagctcgtgaaattacataccatgtcggtgaacttccgttaggactaaaggttattggatcccactttcgtggattgtccaaggagcagtggccaatggaagtatcaaggttaaggacgtaccgtaatggagatattgagagcattttgaagttcagttatgatgctttatgtgatgaagataaagatttattccttcatatagcttgctttttcaacatggaaaaaataacgaaagtgaaagaacttcttggccaaagattcaaggatttgagacaaagccttcacattttagagatgaaatctcttatatctattgaacatactgatcttgaagattccgagtattatgagtccataaacatgcgtaacttgctggtccaactag

SEQ ID NO: 187304 - DNA, 163 bp, Arabidopsis thaliana landsberg
gtttaaacagtactcgcgcaaaagaaaagggcggcgcggcttaccggcggcgagagaggtccggcgaggggcggggttggctccgggaggtcctggtggtcacaacggtgtacggctcgacggcgggggtggccggaatcggtcggaccacgtgcgcaggcag

SEQ ID NO: 187305 - DNA, 925 bp, Arabidopsis thaliana landsberg
gtggaccgacggtacaaccattactgcgagcaaatgcagatggttgtgaactctttcgacatagtaatgggccacggtgcggcattaccgtataccgcattggctcaaaaagctatgtcaagacattttagatgccttaaagatgcagttgcggctcagcttaagcagagttgcgaacttcttggggacaaagatgcagcgggaatctcttcttccgggttaacaaaaggtgaaactccgcgtttgcgtttgctagagcaaagtttgcgtcagcaacgtgcgtttcatcaaatgggtatgatggaacaagaagcttggcggccacaacgcggtttgcctgaacgctccgtcaatatacttagagcttggctcttcgaacatttccttcacccgtaagtcaattttttctttctttctcgttatttattaattattatagagaaactgaattttgaaaaaagctgagaaaaagtatttattttctcgttatttcacctctactttctttagtactatgtctctagaattttgctattttattgttaacgagagtgaacgaaaaaatggaaataaagcaaaagagtagtgtttttgtactattttcacctctctgacaaattgctttaagagtaaaacaaaacaaaaaaagccaagtaaaaaaaaaaaaaactggatcgatgatatgtaatcatcaacttttcttttgtctgttagattctcacgcccttgttaggaaaaagtctgtactttttcttgcgtctacttgattgtattgtatatagtgaaaagataaagaaaataaattacattgagtttattagggcaaagatagagagtgatgtcattttctggtctctttctcaggtatccaagtgatgcagataaacacctattggctcgacagactggtttatccagaaatcag

SEQ ID NO: 187306 - DNA, 362 bp, Arabidopsis thaliana landsberg
atgccaccgccttttgacggtgataatcgacaatataaacgtggtagtaccaaggtttgctaccaaacgctttttctatctttaccgaggaagagcctacatgaataaataaaggactcaaccgcttgacactttgcagcatggcgaaatccggcgtgctgccatacccgccaacaaaggcatataccccatcctgactcaccatacgcgcggtaatctgagcggaggtattcggatcccccttggtgtctgcgatgagcagcttgattttcctgcccaaaacaccacccgcctgattcgtttgctcagcggcggattttatgccgtccagtatcatgcgcccacctcctgccagcggaccg

SEQ ID NO: 187307 - DNA, 382 bp, Arabidopsis thaliana landsberg
gtaattatgggagatttctcgattcagatcagttctaagctgatcaatcagctagctgaaggtaacgatcaaccaaagaggagggcaaagaaaaccaaacctaaagtctcaccacagagcaaacagaaaacaaaccaagatgaagagaagaaacctaatccagtggctgaattaccgatgcagccaccgtttttcttcccaataccaccacaaggagcagcaagcacagagctggaatcgataaaatccgttgtgaaagagagtgagaaggttcttgagaagctggagttacaagagaagaacattgttcgtgaagttacggacagagccaaggatctgagggagaaagagattaaaatcccggaacctaaaccaatgcctt

SEQ ID NO: 187308 - DNA, 386 bp, Arabidopsis thaliana landsberg
ggatgtatcccagtgtttttggaagaagtgtgtgatcaatactataatggctactgcaacaatattctgtggccgatttttcactacttgggaacgccaccagaatatcgtaacgatgcaaccataacataccagtcacagtatgaagcatacaagaaagcaaatcaaattttctttgatgttgtcaaagagcactatgaagaaggagatgtggtttggtgccatgattatcatgttatgcttcttcctcaatatcttaaggaatacaacagtaagatgaaagttggatggtttctccatacaccatttccttcttccgagatgtacaaaacattgccctcacgatccgatctgcttcgttctgttcttactgctgatttagttgg

SEQ ID NO: 187309 - DNA, 209 bp, Arabidopsis thaliana landsberg
atgatatcaaaattctcagctgcgcttgaaggctcagtgaagctagggttgagacaaggaatagctaaaggaatcgccattgggagcaatggtgtcacttacgccatatgggggttcatgacttggtacggaagtcggatggttatgtaccatggtgctaaaggcggtactgtcttcgcagtcatcatatgcatcacctatggtggcac

SEQ ID NO: 187310 - DNA, 687 bp, Arabidopsis thaliana landsberg
atccgtggaagtcgaatttcgtgtaaaatagagatgggggaaaacgatgatggttgctcgactcagctaatcgatgggaatggtgaatttaacgttaagggtttggataatttcgtgaaaaagacgaagctttctgattgtggtctttcttatgctgttgctgcaatcatgggtcctcaaagtagtggtatgatatcctgagtttgcttttgttcttttttaatttgaagttcgaagttaattctaatcaaagttacaagtttttgttgattttggaatctgggtatatgaatttctcaactttactagattctatacttatatgatttcagcttgagacatttgcaaagtctttgacttgctgagatatttcaaatgcttattgttgttgtatgtcatttcagggaagagtacacttttgaatcatctttttaaaaccagttttcgggaaatggatgcttttgcgggaaggttagtgattgtcatttgtcaattattgttttttataatctttttgtggcaatgccacttttggggttgaaattgggttgactttgtaaattactcttcattttcattttcaggagtcaaacaactaaaggtatttggatggctaggtgtgttggtattgagcctttcacaattgctatggatttggagggtactgatgggagagaaagaggcgag

SEQ ID NO: 187311 - DNA, 122 bp, Arabidopsis thaliana landsberg
cggtgtgggcgtactgccgctgcttgattggataggcacaccgcctagtctggtcgccgcctgccagcagagtggacggggcacattaaatgccgagtcggacatcacccgtctacagggcg

SEQ ID NO: 187312 - DNA, 246 bp, Arabidopsis thaliana landsberg
gttttcctgaggaataatgcgaaggctgatatatcagcgaatacggagagcctttacacacttacgacagacaataccaatttaaagctggctggttcaactgaggactatacggtaataaaggacgcggtaacaaaattgacccttcaggatttcatagcagcaaaaacgactgtggattctgtcagcagcgaaatgctggcggtattaaagatcaaaaaaggggggcgaaaggcccggaagtga

SEQ ID NO: 187313 - DNA, 613 bp, Arabidopsis thaliana landsberg
atgaatcccaacctcataattcacctccttctctgcatgcttctccaccttctcctgacatccattcttcgtctaaaccgcatatatcggctgacggcctctctcctccctttgtacatcagccatccggtttgcctcctccccaggttattttctttgcctcttctcattttcacaacttcacacctgcttctattctctttatttctttcactctgcaaggtatataagtactgactatttcatctacctctttgttttaaccctcatcctgtcttagccttttaagtctcactcgtctcaacctcctacgcctcccttgtctgaaacatctctacttggcgttgcctcttttggtcctgcagaaagtcctgtcaagggttcatctactcttgagtctgcaagatttaatacagacgctgttgcttctaaggctagtccttcttcagacttggtactcctttattataaactgaaagttctgctttatgtccttcctttcattaatagttttttccatgtcctgcaggttcagcacgttacccccaattgtagcttcgtccaccaaattcccataaactctccgttagataaactaccttcaaatgaagag

SEQ ID NO: 187314 - DNA, 1168 bp, Arabidopsis thaliana landsberg
gaataggaagtatcctaacgcagctaggtcaagtagaggtactgcaactggttattggaaggcgacaggaaaggatcgagtcattgagtacaattcaagatctgttggactcaagaagactcttgttttctatagaggtcgtgctcctaatggtgagagaactgactgggtgatgcatgagtacactatggatgaagaagagctagggagatgtaagaacgctaaggttagtattatagccaaaactcatctgtttctctttttgatttatttgtagtttaactaaactgtcttaccttcaggagtattatgctctttataagctttataagaagagtggggctggtcctaagaatggtgaacagtatggtgctccgttccaagaagaagaatgggttgatagtgatagtgaagatgcagatagtgtcgctataccggattatcccgtggtccgttatgagaatggtccttgtgtggatgatactaaattttgcaatcctgtcaaacttcagttagaggatattgagaagcttctcaatgaaatcacagatgcacccggggttaaccaaagacagtttgatgagtttgttggtgttccacaggttagtttcttctctaataacatattggcttatgctttctttcttttttgggtcctttggttattctgttgtgcttccttcactaaatagatacttgtatttgcagggtaatagtgcagaagtgatacagagcacattgctgaataattcttctggagagtatattgaccctcggacgaatggaatgttcttgccaaatggccagctatacaacagggactcgagttttcagtcccatttgaattcatttgaggctacctctggtatggcacctcttctagataatgagaaggaggagtacattgaaatgaatgatcttctgatccctgagctcggtgcttcttcaacagagaaatccacagagttcttgaaccatggtgaatttggtgatgttaatgaatacgaccaattgttcaatgacatatctgtttttcagggaacttctacagatctgtcttgtctgagtaattttactaataacacatcaggccaaagacagcaattactttatgaacagttccagtaccagacacctgagaaccagcttaataactacatgcatccta

SEQ ID NO: 187315 - DNA, 44 bp, Arabidopsis thaliana landsberg
atgatcagcaatcgtcgaaaaatagcaaaaaccatctacaggag

SEQ ID NO: 187316 - DNA, 2222 bp, Arabidopsis thaliana landsberg
atgatcttaaagaatccgaaaaaacttgttgaagaagccaatgagaaacttaaagaagcattggcagcacagaaacgagctgaggagagtttcgaggttgagaaattccgagctgttgaactggaacaggctggacttgaagctgttcagaaaaaggacgtaacttcaaggaacgagctagagtctattagaagtcagcatgcgttggatatctcagctctcctctccaccacagaagaactccagagggtaaaacatgaattgtctatgaccgctgatgctaaaaacaaggcgcttagccatgctgaggaagcgacgaagattgctgaaattcatgctgagaaagctgagattcttgcttctgaattagggcggttaaaggcattgctcggttcaaaggaagaaaaggaagctattgaaggtaatgagatagtgtctaaactgaagtctgagattgaattgttgagaggggagcttgaaaaagttagtatccttgagagtagtctgaaagagcaagaaggattagttgaacagcttaaagttgatcttgaagctgctaaaatggctgaatcttgcactaatagctcagtagaagaatggaagaacaaggttcatgaacttgaaaaagaagttgaagaatcaaatagatcgaagtcatctgcttcggagtctatggaatcagttatgaaacagcttgctgaattaaatcatgtgctgcatgagacaaagtcagataatgctgcacaaaaggaaaagattgagttgctagagaaaacaatcgaagcacagagaacggatcttgagaaatatggacgccaggtttgcattgcgcaagaaagtgcttcgaagcagaagtctttggtctttgtattgtgagaaccttttgaatcattgtactacttgattcaaaaggttctttatgatttactactaaaactaaatgagatttcttaacttatatgaagttagatatagatgctatttttttatttagatttcgattccttcttatttgttactttaattcgatgtaaatgaaccataactatgtaaacctattcctaaaagattgacgccaaaatagcatatccaaattaaaataaaaccgatcaaagccacaattgcagaatttatacccctaacattcctatttgttttaatatgtaaataaattgcgaatatagtccaagtaataaatgcccaagtttcttttggggtcccagttccaatatgaaccccatgtctcattagcccagacagctcctgaaagaatgccgacggttaaaaagataaatccaagactaataatacgaaaactccaaaaatctaattgttgaatcagttgatacctataataatttctagaaaaactaaaattaatgttttgttgtagtaaaatagaatttctttcatttatgtagtaaagtacatcaaaagaaaataattcatttaataaaaattttttttttatattctttttccaaaaagtaggtccgactttgcgaaatgtaatcactagaagagctattgataataatgatccgcataacagagcgccatagcctaatatcatcatacttacgtgcatcattaaccactgggactggagagctggtactaatattgcagactgaggcattttgtttaaaagacctgaagtagcaaaaccctgaataaaaataacacttggcgcagttattgggtttaacttatttttgtggttttttattaaaataggaaaccatatggataattgccaaagcccacgaaagtaaaattaatgattcatataaattacttaatggaaaatgtcctgaataaatccaacgagttaataataatcctgttataccaaaaaacgtaattatgattcctttatctgatgaatcaaaaaatcctatgatttcatctaaattaactaataaagttaaaaaataaattgtcagcacaattgaaacgaccgaaaaagatatatgagttaatatatgctctaaaattgaaaaaatcataaaaaatttgttaaaaattaataaattaatactaggttttacccgattttagaaaaaagtcgggtattattttgattataaaacttataatatctcttttagaagatcttatgccgctactcggactcgaaccgagatgctctagcactgcttcctaagagcagcgtgtctaccaatttcaccatagcggcaacttgttcaaaacaatattaa

SEQ ID NO: 187317 - DNA, 932 bp, Arabidopsis thaliana landsberg
atgatgaagatgatcaaccatgcacatcatcctccgaggacgaagaaacaatccgacgcatcggaaaggtaatgaggatgatccacaagattaatctaatgggtgtgcccctgcaggtcaaggatcttctctttaacattgacaggaaaaagcaaaggaagagaggatgcttcgcatgtggggagaagggccacttctgggacaactgtccaactatggccaaacccaaaaaggagaggagcaaaggcaaggcgctgacaagtgttagaacttgggatgactcttcaagtgaagatgaacctccaaggacgcgcagccaccggtcctcatcacgctcatcacggtcatcacacaaatgccttatggcaaaaggtaacaaaagcattccatcctctagtgatgaaagtagtagtgatgatgaaggtgagggaaagccctccgtagatgagcttgcggaagccgttgaatttttccaggatgtttgcactaaacaaaaagctcaacttaaaactttgaaaaataagttgattagctctcaaaatgattacaaaggtttgctagaaaaatttgaaacttttgcaaacttaaatagtgagctatcaactaaacttgagctattagaatctagtgctccatccactgctactgatgatagccttattaaaaagaatgaaaaacttaaggctaagttagctagctcccaagaagctattgaaaatttgctagagaaaatggaaattcttagcatacacaataatgagctaactactaagctagaaaacattggtagcaccccagcagcatctttagttgaaattcctgaaattattaagaaagatgcttctacttcctgctttgacttaattgatgattctaacccctgcaaccaagttgttgttgagaatattgttatagagacatgctctgatgag

SEQ ID NO: 187318 - DNA, 110 bp, Arabidopsis thaliana landsberg
agttgaacaaaaagtgcaaaatccatatatatcgaaaacaagaagacgagaaacaaataaagaccgtgtcggaccagcccccggttatagcgggacttctagtcacgtag

SEQ ID NO: 187319 - DNA, 213 bp, Arabidopsis thaliana landsberg
atggcaatatatgaaatagctatttcttctttgatcacattacgggccgtttcttatgcggctttttatctttcccgctttaacccttcccgggtcctgaaaggaagttttgccaaagcgaagaccggggcctacatccaacgcctgctgttgatctctcagattacattaacaactgtattcttagttggagtgatgattatggcaaagcag

SEQ ID NO: 187320 - DNA, 237 bp, Arabidopsis thaliana landsberg
aacaagacgatgatctgatcctcatctctctaagaaccattgatgagagtaaggaaataaattaaaccactccgagttcccaaagcatcgatccaatttactctgaatccattgaccattccttgttcctccccaggtaaaaccaatacatgtacttcccagttcatgcatgtcacagttaagcagcatattcttgaaaggctgaaaagaagatatcaacctaaccgggccccctaa

SEQ ID NO: 187321 - DNA, 265 bp, Arabidopsis thaliana landsberg
atgctgctgtcagaggtgacggacgacctagagagccgctatctgagggcccagcaggccaccatggacttcacgctgtcggtgccgtcaaaaggttcgttgctgcgtacactattgacgcaggttgtgtggcgtttgatgagtgctggacagcctgttagccactcatcatgcagctgcggcgcttaactacatctgcggcgacagcaatcgacagcggcctttagtcacggttcgtgcttcttgcatgtacttgccacaatag

SEQ ID NO: 187322 - DNA, 148 bp, Arabidopsis thaliana landsberg
aagcaagtgtatttcaggagcatttctactgatggacgaagcaagcctttggtcgggaaagcgtgcaaagaagcttcacccatgcgtgcaagtggaaaaggtgctagacaaagctgatagcttcggcgacaacagaggaacttcggac

SEQ ID NO: 187323 - DNA, 53 bp, Arabidopsis thaliana landsberg
atgatcattgtccgcgtacaatggtcggagagttctcggtatggacgtgtaat

SEQ ID NO: 187324 - DNA, 374 bp, Arabidopsis thaliana landsberg
cgaaattgataccaagagcaggctcaggtagctccggaggcacttcctctgctggtagattcacttcccatgactcattagggtgtccgtacaaacacaaattctccttttctataaccacaaacacccaaaaattgaaatcaaatctcaataaaccacataaaagggtatctaaaaatcgaaatctttcatacccggatcgcattgagagtaaaaatcatcaacatctggaaaaaatcacaaaaacgaacaagttaaaggacgaatccaaaggcattacgaagaaatctgggaaatttagagaaagagagagagagagaggatttagacctttagtgagagcacgaagaagagcggcacgacgagcggaataa

SEQ ID NO: 187325 - DNA, 2660 bp, Arabidopsis thaliana landsberg
ggatctcatcatcactatagtggatcatctgaccataatactggagtttttggtcgatttcgggcaagacataatcgatcaggttcgctcactgagggcagcttaggctataatactattgatcttcgcacttctttgataaaactagacgcagaagacatggatcttcgtctctgtttcagaattatttctcctcaaaaaacttacacacttcaggtacccagtttactcgctatagactaggttgcaagtcaccgggcttacttagtctgaatttttcctgttgggtttttccaaattcattatatgaaaaagagagctgtgccttgtagacaacctgcatggaccctcttagcaattgatacttaagtatctctatactaattccttcttcccctgatccaagtacttcagaatgctgacaacaattatgctaccttaccaggctgaaaatggagcagataggatggactgggtaaataagatcacaaaagctatagggacgcttctcaattctcattttctgcaacaggttggttgacacaataagcctctggctttcagttacaaactaaattgatagcaaagccttattagtaatacatatcgtttctgcagtcacctgtgcgatacttggataaagacaactccagttctgctcctgctaatgctgtcgtctccggggatcaaattcgacataatgattcaagacaaaatatcggggatgatgtctcaacaatactcagaggacttccgggaaataatgcatgtgcagagtgcaatgctcctgagcccgattgggcatcgttaaatcttggagttttgttgtgcattcaatgctctggtgttcacaggaatctcggggtctcatatatccaaggtgtgaagtgctgaaatattcttggaacaatgttgttaaacatcttcccttgagatttcttgctgtatgagctggcttgtcttataccacgtccgcgaattcttctcttcgtgcatggcggatttgtagaactcaatgtggtattctagaatttctttgtaaaactgactccaccaacgttcaaattttttgcaaaaaagtcaacatcactgtagctataacctttggagggttcaagtatccggattaagttggttaatggaattttctttggtgtcagtcctatatctctaagctgatttcataaatgttgtaccccacaaactgcaggtgaggtccctctcattagatgtgaaagtgtgggagccaacgattcttggacttatttagaaatttgggtaatgtatactgtaattcactgtgggagggactacttcaccttgacgatgactggtatgatctctaaggataaaacatttgttttgtattttgaagtatagaccaattatcatacactctatcttccaacattctcctgtttcatatatcatgcatgtagctgatgaggtacatcgtgataaacagtgtggctttttgcagcgaagacggatcagcattgtcgcatgcttcagtttcaaaaccatgtccagaagattcctttagtgtgaaggagaaatacattctaggaaaggtatgacattagttgttactttctaatgtccaagttgtgaaatgtatcttcacggggatgattgatcattttactcatttattgaactagattatgctttgtgaaaaggcaaagatgtaaaaagcaactaatactaaaccttgattgatgttttgtgtttgggccagtacctggagaaagcattagtcatcaaggatgaaagtgaagcaaacctttctgctgcgagtagaatatgggaagctgttcaaagcagaaacatacgagaaatctatcgacttatagttactactggggatgtaaatatcatcaataccaagtttgatgatataactgatatcgatgcatatcaccatattgatgcagcagagaaagcagtaaagaaaagacatgatccaactgtatgtcagagaattaaagaatccaacgaaccaagaagctgtcttcaaggatgctccttgctccatgtggcttgtcacattggtgactctgtcttgcttgaattgttgttgcagtttggtgctgacctaaacataagagattatcacggaaggactccgttgcaccattgcatatcatcagggaaccacaaatttgcaaagattctactgcgaaggtatattttaactcttaagaaacgcactcttaatgaatgttaggactcaaactaaaacctcctagttccacttccccttgattccatgactctgtttctttggtagcttggctcttccattgcatttttcttgaattagtcgttggtagttttggctcataatgcggttgtatttatattttcttaaattgtttttgaaaacgcagaggagcacgtccgtcgatagaggacgatggagggctaagcgttctagaaagagcgatggaaatgggagcgataactgatgaagagctctttcttctcttagccgagtgcgcataaaccttcactgcacaccgacatgcacagcttctttagaaacacctttggaagaccctaaaacgcaaaacaaggaggtggtacaagctactagattccgtaaaggcatgatgaaacagccttttgagtcgttgtttgtcaatgtacaagggatatga

SEQ ID NO: 187326 - DNA, 386 bp, Arabidopsis thaliana landsberg
aaaagtcaaagctaaagcattgtcagcgattgaagatgagcatgaggaacaatttgctagacttaaggactaccgtttagagctaatagagtaagttatttatcttatctctcaaattcatataacttaaattatctttaacgttgcttgttgatccgcaggtctaatccagaatcaactatagaggtggggactgtcatgactgatgatggtgtagagaagtttgacaggatctacgtgtgtttagcaggactccggaaaatctggcttgctcattgtcgacctataattgggatagacggctgttttttaaagaacaatgtaaaacgccaactcttagctgctattggaagagatgccaacaaccaattctttcatgttgcatg

SEQ ID NO: 187327 - DNA, 81 bp, Arabidopsis thaliana landsberg
tttccaaatttaagactcggtacttttctccgaaagagttggaacgtgaatgaactcacgaacgatgtggaagtcacgtga

SEQ ID NO: 187328 - DNA, 413 bp, Arabidopsis thaliana landsberg
atgtgggctataatgccgggtttgtcgacggctacaatgcagcgaattttaatagcccttattacggcgggataggctcctattggcctggcagctatgcaggcttatcgctcaacttcggttacggggggttcagaatgcgatcttctttcggattcggctttcgatcgaagatgggatattcaccgtggggatattcgccctggggctactgcagcatgctgagctatggttatgatccttaatacagcccctggggatacagtacgtggggatctaacaccatgtacggctggcgtggaagctactacgatggcttctatggcgggtaccgctattcactcatgggcttacagccgtgcggtgatcgcgattaacagctctgacagaagctatacgagaacctacggacc

SEQ ID NO: 187329 - DNA, 234 bp, Arabidopsis thaliana landsberg
gcttggcacttcgctggccggcaccagcagtgcgttgaccagcttgagatcctgcacggtcagtgcgccggcggcttccttcaggaacagcttgttgaggatgaacgcatggcgcgcctgctaatactgttcgcgggcgctcatcaggttgccctgctcgatcagcacgttgacgatggtctgggtgccgacagacagcccggcctgcgtggccttgagcgcgctttgcgatga

SEQ ID NO: 187330 - DNA, 109 bp, Arabidopsis thaliana landsberg
gtatcgttttatgcccgcttatatgccttactgtggctattggaaactctgcaatcatctaaggccttttaccagtacacgcgatttggactctatattcgatagcgag

SEQ ID NO: 187331 - DNA, 163 bp, Arabidopsis thaliana landsberg
gtggtatgcaattgttgggatgcatgatgttgcagttagaaacatgctcaaagtattggactgtggctaccaatccaaggcaacccaagagatttttctgagggactttttcgacattgttaaggtgcctagcctatacttgcggttttatacgctccactga

SEQ ID NO: 187332 - DNA, 1145 bp, Arabidopsis thaliana landsberg
tcaacactccttctaatgttgacaccaatattgataagacgacaaaaaagtttcaaggcatcaatatttgacgaggttcggcaactccttcagcagaataataagaatacagttggtgtccacgcatttgtgaatacccttcttgtagtttctcctccaagttcagttattctttgtcgggtgacacgttctgcaggtgctagactgtctacggagtcatactctgcgcgttcagcaaacaacaagagatgctcagcctttaatggtaaacaatcagctgtctctgatcctgcgctagattccctgcacactgtcaactcccttgttaaaggaaaacactgcactgtgtctcctctgaagtgtacattctcaggtactaagctttttgacactgatgttacgcctcctcaggtaaagccagattttgcctgcaaattgtttgcctttttccctctgccatcgttttattatcttcacttttgtaggcatcctctccttcagtaactggtagccatgctcctcctctttttcctttcccgtcaatcagtccggttccactgactcaggtttgattttagtatcagttaatacttgtgttgtgcacattctacacttgtactctttcgttccccataacgtttgtaaatgtacagcagaaaaaaacttgttgttcctctttgctggttgaggctgacaaatacagaagccagacttctgcttcacagtcttagttgcctacccatgtgcctccttttagtttggagcccttacttgttactcaacctacaactgttgatactcccgttgttgttcccccgcctgccatcacttcatcgtctatgcctaaacgccatccatcaaattgcaagttaattcctgtgacttcagttaaaacacgccggtctacgcgccgtcatccgtctcctccacaacaatcagagtttgttggccccgcaaataatctgcgcaacacaaaaccttgtctcaaaccagaatcctcaagcaatgcgaacaatattctcattacatttgctacccctaacaatgatgtggttgacatgtttagggataaactctctaaacatcagaacaagtttgatgtgccaatgcaactttctttgggttttctatttttaactgcttaa

SEQ ID NO: 187333 - DNA, 180 bp, Arabidopsis thaliana landsberg
atggaggatcggattggaggtaggcgaagcggttaggatattgagactgaagaatctggagttcctctttagccgtttccactagttgcatctgccacgacgacgacgaattcatcttctcgaaaaaacaatcttctttcttcaattctttcactccccgagaaaagaaaactaaagaga

SEQ ID NO: 187334 - DNA, 1345 bp, Arabidopsis thaliana landsberg
atgcagtacgagggggatcaggcattttcaatgggagagtatgcagcggaggacatacctatggtgatcctgattttccctgtgagttaggaagcggagcagagagtccagataaatcatatgggaatgtgactggtggagggatgataggtcagtactattgtatttcacttttctgcttatatattttctattatttttagaaaatctggtagccaatactcttgaaatagctatctactcatctagcactgtcaagtgacatatacaaatttgttttccaccttttcagtaattggctccatccagtttcctcttttgactcttaatctgcggggatctctgagctctgatggtcaaagcctttggaagccaacagcgaatggtaacagatctttggtcggtggagttggtgggggatctggtgggacgattcttcttttccttcagatgcttgaactctcaaagaattcatctctatcagttcgagggggccggggtgggcctcttgggggtggtggaggtggaggagggagacttcactttcactgggacatgttacatactggggacgagtattctcctgttgcaattgtcaaggggtccattagtaataggtatgcaccattatcatgacaagtgtagtaatctcacttgtgtgcttgctactttctgggtcatttgttttactggggtaaagcatgcatatatacgttgatttagtagaggcagcgtcatggatatgagaggataatggtatcttagtgtgtgatggttgagactctgcctgtactattcccttatgaatattttggaacatttggaagtctgggcctgacagaaatttttttaacctgcaaaacctgtcttcatgaaattctaacacagacgttaaattgttttctttctggtgtcttcagaggaggtgcaggggacaatggaggtcgattcggggaagagggaacaatgactgggaaaaagtgtccaaagggactctacggtacattctgcttggtaagtattctggtttattatgttgtagttacttcgacactgtccatttatggcttacccttggccaattctgctcatcttttattctagcaattaaatgggcgtaacaaaccacaaaattagacaggcccagtagcgttctgttagcataattgcaaatctctgtcttgtttgcttgtgcctgatacttctcgatatatctggattcatgtattcttccaggaatgccccattggcacttacaagaacgtcgaaggctctgacaaacgtctttgtactccctgcccgcctgagcataatacaagtcgtgcaaaatttgtatacgtacgag

SEQ ID NO: 187335 - DNA, 54 bp, Arabidopsis thaliana landsberg
atgattaagtatggtgttaagattgaagaaagacataaaacggaatttgagcag

SEQ ID NO: 187336 - DNA, 133 bp, Arabidopsis thaliana landsberg
atggagcctccacaaacaactgccaataccggaggtgaaggagtcaaagaattgaagatcaacgaaaatggtggaatcagaaatgtagtagagggagttgatcttcgggaaggaaacatatacatcacttctg

SEQ ID NO: 187337 - DNA, 63 bp, Arabidopsis thaliana landsberg
atggagtctgatgatctatcagaccattatcgaagtgtcgatgatcgagatccatgctgtcat

SEQ ID NO: 187338 - DNA, 24 bp, Arabidopsis thaliana landsberg
ggaaattttgttttggcagtgtga

SEQ ID NO: 187339 - DNA, 774 bp, Arabidopsis thaliana landsberg
atgggtttgacggttaagcattttgaaaaatttgaagtttccaagcatactcttactgattgtcacctagtggaaacacctcagattatctgtttttgtgaatgtgatgaactcaatcaaatcctggaatttctaaaaaagatcaagtgtgaaagggatgatggtacagatctcgtttgcagagtagtggagagtttctactgtgctacacaagttaaagaaaagctcgactttgaccctcagttttcagttcttctccttgataagaggctgctgcaatgcaaaatttctcgattcgatgatgaagggacaatcagtgtctttgatcccaatgttcactatgccaatgcgcatgcccagggaggttatatcttatcctggttagtcgacaactcttcagaagataagatttttcgatttcccacgcctatcaggatgcataatcttgatatttgggtcgctgttctgaaagccgtttggttgacatgtatgactttggcaactaaatatgcaaagaagtggaagctcctagattatgatgcagctcttactgccgccaaaaatttgtgtattagcgaagatgtaaagaggaggaatctacagaaagatcaatggaccagttatgcatctcttctatgcgatacatgtgaagagcatttaaggagagacgctggaaaatccctgaatgcgaaattattcttgtgtgtagtacaagatgttttcaaaggagcatcatttccgacattaattttctcaattgcatcaatgttatac

SEQ ID NO: 187340 - DNA, 224 bp, Arabidopsis thaliana landsberg
gttacgatggcagcaatactccctggagagccaaatggataccgctgaaagccctgatcgccaaaggttcactgaacagcctggcaacaagctgggtggcttcgggtaatatcagccttgatagctataagggcactgtatgtatcgctttccgttatgagggagccgatccctctaagatctttgacaggagaaccaccacttttcagctggataatatcagg

SEQ ID NO: 187341 - DNA, 474 bp, Arabidopsis thaliana landsberg
acacatccgaatataagtgaagtggagaagaagaaagtttgtagcttaatggactgtaaaaagctatcgcgagatgtgtatgctcacgcagctcaaaacgatcgtttccaagaaaatttaagcaattcagattctccagcaccagcaacggcagaagaaactctttctcctcctgagctcagctcctacaagaatgaactctccaaactaaaccgggaaaaccaatacttgaagcttgagttgctcaaagtgaaaatgaagttcaaggagttggagaaggagaaagcttttgaagtcatgagtggttcggattgttcttcttcggtttcaactgcttcggtggctaagcctcgattacctagaaagtcatttataaactctgtttctcaaaaactcgaaaagcttattaacccttttggcctcaaacaaggacaaaccaaacaacctaaaagcagaagacactctatatcttga

SEQ ID NO: 187342 - DNA, 295 bp, Arabidopsis thaliana landsberg
atggaagctgtacttgaatccgcaggacctgaatgcgttgttcctggccaagtaacacctcttcggttacttggtgttaaggtttgttacttattgagaaattactactttagtttgagttctcttgatgatgtttgagggttggaattggaaagaatgaggatagttatttgttgtgcttgcatgtgtgtagtagaagtttttagtattcaaattggcttagaattcatacaggaaaagtgtcatcttctgttgtcttccttgtagaatgttcgagttgatttggtagttttgt

SEQ ID NO: 187343 - DNA, 79 bp, Arabidopsis thaliana landsberg
actccaaatgtttgatcccacatatatcgagcatctacaccacaacatcccttctgagtgctggcttgttgcagagaat

SEQ ID NO: 187344 - DNA, 2942 bp, Arabidopsis thaliana landsberg
atgggagcgaattcgaaatcagtaacggcttccttcaccgtcatcgccgtttttttcttgatttgcggtggccgaactgcggtggaggatgagaccgagtttcacggcgactactcgaagctatcgggtataatcattccgggatttgcgtcgacgcagctacgagcgtggtcgatccttgactgtccatacactccgttggacttcaatccgctcgacctcgtatggctagacaccactaaggtccgtgatcttcatttccttcgctccttattctgtcggtcgagtcacttgttgatgaattccaagcgaaatatagcaatgaagcatgtctcgtctctcttattgattcgttcattagtcaacagtgacgcttctgaatctgagtttagagtcatataaaacagctgactcggcgagtgtttcccatcgcttttggttcgctaaatgtagcgcaatgaatgtgtaattagtctgcgctttttattcaactagatctgcaagtttttcagagtgctcaatagtagttagaaaatgttaggtcattttacttgtgcattgtgattcttttggttgttgcttactgatcgacgtgatggatggtttacagcttctttctgctgtcaactgctggtttaagtgtatggtgctagatccttataatcaaacagaccatcccgagtgtaagtcacggcctgacagtggtctttcagccatcacagaattggatccaggttacataacaggtagtttcggatttttctttcttttgagttttcttcaatttgatatcatcttgttgtgatataatatggctaagttcattaatttggtcaattttcaggtcctctttctactgtctggaaagagtggcttaagtggtgtgttgagtttggtatagaagcaaatgcaattgtcgctgttccatacgattggagattgtcaccaaccaaattggaagagcgtgacctttactttcacaagctcaagttagtccttatcaggctaatgtcttttatcttctctttttatgtaagataagctaagagctctggtcgtcttcctttttgcaggttgacctttgaaactgctttaaaactccgtggcggcccttctatagtatttgcccattcaatgggtaataatgtcttcaaaaactttctggaatggctgaggctagaaattgcaccaaaacattatttgaagtggcttgatcagcatatccatgcttatttcgctgttggtaccggcctactatccttaagttaccattttattttttctctaattgggggagttatgttgtgacttactggattgagctcgatacctgatttgttgttgatttaggagctcctcttcttggttctgttgaggcaatcaaatctactctctctggtgtaacgtttggccttcctgtttctgaggtgacctctgacttctctttagttttaagtagttgatatcaaccaggtcttataactcactggattttccttttgaaagtattacttttgttaattgaactgctgtacgcgatatggtatctgtagatcttgaagtgctagttatcaaagaacatattgtgggtagtatacctgtcagcggccttagctaatacaaccaaaccacatgtacactgatttagttttcagattattatggtagactttaagttgagaagaaactttgactgaaatctttttattttaataggctatgatttgtttattgaaatcatgtgacatattgacatgcgcttctcatgttttttgttggcaaggcttcagggaactgctcggttgttgtccaattcttttgcgtcgtcattgtggcttatgccattttcaaagaattgcaagggtgataacacattctggacgcatttttctgggggtgctgcaaagaaagataagcgcgtataccactgtgatgaagaggaatatcaatcaaaatattctggctggccgacaaatattattaacattgaaattccttccactagcggttagactctgtatatgcaactgtaacactaacaaaagtttcaccaagaatgttcactctcatatttcgttcctttgatgtgtatccatcagttacagaaacagctctagtcaacatgaccagcatggaatgtggccttcccacccttttgtctttcacagcccgtgaactagcagatgggactcttttcaaagcaatagaagactatgacccagatagcaagaggatgttacaccagttaaagaagtacgtacctttctttgtgataagaaatattgctcatcgatcatcacttgctggcttcttgtacgtcaaattgttttgtttaaatctctatatcaattgttcatatgctttgtctttcttactataagaaacaagtataatcagaaaccttattattgattatcagttctctccttatattatggaatgtctttttcgtttacagttatgaatgcaaaagggggtattttagttgattgattctctcattctctagtttgttttgactaatagcgtcaattttgtttttctagcaaatctttgtgaattatatataacatgctaactatacttttcaggttgtatcatgatgaccctgtttttaatcctctgactccttgggagagaccacctataaaaaatgtattttgcatatatggtgctcatctaaagacagaggtatgatgcattctcaatatcacattatgcgttgactttgttattatattccccatttggtttgcaatatctttttgaattatgatttatcttctcccttgcatcttatgctattaagcgttaaaggtactaaatgtatgaagctgtctgtcataggttggttattactttgccccaagtggcaaaccttatcctgataattggatcatcacggatatcatttatgaaactgaaggttccctcgtgtcaag

SEQ ID NO: 187345 - DNA, 87 bp, Arabidopsis thaliana landsberg
atggtccccttttggactacagtttctcgaaatggctcatcagactcagagacgactctccaatctgcttcaaaagccacaaaacag

SEQ ID NO: 187346 - DNA, 73 bp, Arabidopsis thaliana landsberg
atggccaatgcctcggtacgtaccggggcgaaagttaccttcgatggaaaaacacaggaagtaatggccaacg

SEQ ID NO: 187347 - DNA, 709 bp, Arabidopsis thaliana landsberg
atggaagtgcatgcctctctttttcggttcctcatcaatgaacgtggtgatagtttcaaagctttacagagaaggagtcgcaagtcgaaggtcagatcctcgtctcatgaaaatcatatttggctaacaaattaggccgcacagtaatatgcttttctcattcaacattaagtcgccagccttgtgatttttcagttttgtttttgtggttgatggcatgcttgttgctttatttcatcttatttcagataacattgatcacgtgggcagagtatctttgtgatttcctggaatcagtcaacactcctgatttgtgcttcgatgttggaacgatcaaacgtggacattatggtctcttggacccaaatgtaaaattgaaaatcttaagggaattagtgaaccatataaccgaaacaggtatgttcaagggggaaatagatgagcttgttgaacaacggcatgcccttggagctgctagaagagaagaagcattggcggaggcccgacagataagagaggagaaagaacggtccaaaactggtgaggaagctaatggagttttagacaataataggttggagaaaaagaaaaatagcgcacaagtattagaaagcagtgaagacagcaaaaagaatgagagcactgcagggggaagcaagatggagaatgggtctgtttcttcggaaaacattgaaaaatcagagaaaag

SEQ ID NO: 187348 - DNA, 86 bp, Arabidopsis thaliana landsberg
gagcgagaaaatttgaaggatgcgaaatagaggatttgggccggaaagaaagagaattcactgaatgggccgaaaaaaccgggtaa

SEQ ID NO: 187349 - DNA, 351 bp, Arabidopsis thaliana landsberg
acgcgtaaaaattaccggagaagcctattttgaagtcacgaaagatcctcaaagggctttcgtggtggaagcaggtgacctgaacatagaagtactgggtacccagttcaatgtcaacgcatatgacaatgagaagacgatcaggacgaccctggccaggggccttgtacgaatatcggaaagaggcaaaagccagttgctgaggccgggggagcaggccggcatggaccgggagaccggggatctccaaatacaaccggtcaacgtggatcaggcgctggcctggaagaacggcctgttttactttgataatacgaacatcagggccattatgaaagaagtcgcccggtg

SEQ ID NO: 187350 - DNA, 1480 bp, Arabidopsis thaliana landsberg
atggattcgattgtatgcacagcactggaggaaatctgttgtcaaggaaatacagggatcccactcgtttctctctggtcaaggctctctcctcctcctctttctccttccgtcaaggctcatgtctggagaaatcttctcgccgtccctcagctccagttcaaggcgaaaaacactgtgtacgaaccatctgatgcttcgattcaacagctggaagaggcactaagactcgatttgaggatcttcgcgaatgagaagctccgaggtaacttcgttggcttgtacgatgctcagtccaataacacgactatttccgctattcagcgtcgcgttctcgagcggcttgctgttgctcggtaagtgcaaattctgtattctcttctagctactcttaagagttcgagctcgtataatattatgttgtatgtgtttgatgcagagccaatggagttgcacaaaatctgcttgctaaagagtttggtatcgaaggtagaaacttcttctatattgtgaagcaccttgagtctcgaggtttagttgttaaacaaccagcgatagtgagaacaaaggaagttgatggtgaaggggattccaaaaccacctcatgcattagcaccaatatgatatatttaagtcgttacgccaagcctttgggttcccagcagagatttgagatttgcaaagaggactctttattggagcaagaggctactcccgccggagatagtttacaatcagaaagtacaaaagaggatacgctcattaaagattttctaccagcaatgcaggcaatttgtgataagcttgaagaaactaatgagaaggttagtaagtgcaaatcatttctttctttttttatcaagctggagcattctttctctatactcatttgttgtagtgcaggttctagtcgtctcggacattaagcaagacctcggttatctgggatcacattcaaggcatagagcttggagaagtgtaagtatatatttcttttttctcttatagagcaagaggaaagagactttcaacactttgccaatttctttttggtagatatatctttgaaaaattaatacgtgtgcattttggatacatcagggttgtcgccggttgacagattctcatgtagtagaggagtttgatgctgtggtgaacaataaggtgaactataatctgcatcacattccatcatgcgaatacatttcaccacatatggtggccaattgcctttatttagcatttctgatctgttttatttggctataaaatatttggattgtcttttctgcaggttgaacgatgcctccgtttgttaaaaagattttcagcaaaagattttaactactctgggaaaaagcaactcctaaaattcggaaggagtattcaaaaaacagaacaaactttggagcttccaatagataatcaaatttatgatatggttgatgctgaaggatctaaaggcttggctgtgatggag

SEQ ID NO: 187351 - DNA, 293 bp, Arabidopsis thaliana landsberg
gttctaagcttaaaatatctaatatacctcgaaattgggaagacagctccggttcagaagacagctccggttcagaaggatcgatcatacatgaagttgatgatgactatgaagacgatggccatgatgatgatgacaaaaaagttgttgctgatggtgaggctgagggtaaggctgaaggtgttgcttctagtgatgatgtttcttccagtgatactggtgatgatatggacgagatgcatttttatctgatggaacttatagtcaatggaaatgctgcagggttttcttag

SEQ ID NO: 187352 - DNA, 366 bp, Arabidopsis thaliana landsberg
tgaagtccgcccttatggagcagtcactcttgctggtaagagtgaaaatttcacagtaaattgtcaaaggctcaagaaatacttagcagatcaaatctttccagaggtgacgacggttcatctcccggaacttcttgatgattaaaggagtaatggtgtcgagctaatgacttaaaacaaggtcacttgggaggaagtcccatgcctttctctgtacatattttttgttttctttgttatttttgatgcgttttactagtgttttcaggagataaccgccaatgtttaagtgtaatggatccaatctcagagattcactcgaccgcatgccgtagagatcgattgtctgtgtgcaatcgagcataa

SEQ ID NO: 187353 - DNA, 616 bp, Arabidopsis thaliana landsberg
atgtggcgacgaaggcaaaattatcgtattatcgtcgccgaatgtacgactattgtatgtagtcggatacgtagtcgacaaagtacgactactttacgactacatattggtctaagtaatgttgtcgtccgatagtcgaaattggacgactatgtaccgactaaatattgtagtcgctaaaatacgcctatgtaacgactatttgtactcttgtcgtaaagtcgttgtccagcagtcgtaagttagtcgcaaaaaggacgacgacattgttagtcgcctttcatagtcgtcgtttgtctgttttcttgtagtgggttgactaacgaagaagaaccaagaagttcaaagggaaagatcaatgtgattcttggaagctccaaactttgccgcgattcagttagtgctattaaaaagcataggcaaaatgttctacttaaatcaagtttgagtgaagaagtgaactaccaaggcgcttcaatataatttgacgacgaagaaacgcggcaccttcaaagacctcacgatgacgctctagtcattatgctggacgtggctaactttgaagtgtcaaaaattctcgtcgatacaggtcgtttggttgatctgatctttctag

SEQ ID NO: 187354 - DNA, 306 bp, Arabidopsis thaliana landsberg
ccagtcgcattatcatcgcccttagatccgtcgttttccgctggcgtccaagtctccatagcctgatttctcgtattggttgtagctccatatcggtgtctggttttgaatgtgaccctaatttctttgttaaccaaaatttgattgttgttatgcaagggaattatggtttgtgcaaagttagtctatccttcgaattcgagtgagagtgaagatgagaggatccgtgatgacacgatccgtgaagctgatgtgaaccgagaagaagtggaagaggaaaaaaatagtggaagaagaaagctgtga

SEQ ID NO: 187355 - DNA, 756 bp, Arabidopsis thaliana landsberg
atgctgcttttggcatggagtatttgcactcgaagaacatcgtccactttgatctcaaatgcgaaaacttacttggtcaatttaagggatccacaacggcctatatgcaaggtaacatatatattgatgaagatcgttttcccctatagactgagaatcctgagaaactgctacttaagtatgaaactctgatttctacaggtgggagatcttggcttatctagaatcaaacgtaacactttagtatctgggggagtgagaggaactcttccatggatggccccagaactcttgaacggaagcagcacccgagtttctgagaaagtaaactaatccaaccactatcctattagtttcactaacaacacaactcacatttgttttcgatctgaacaggttgatgttttttcatatggaatctcgctgtgggagattctaaccggagaggaaccctatgcagatatgcattgtggagcaatcattggtaagtcaaaaaccatcactcacaatttcacttacctcaaaacaaaagccactctatgctcatttatttcctctttttaaggcgggatcgtgaagaacacacttcgacctcctataccaaaaagctgttctccggaatggaaaaagctgatggaacaatgctggtctgtcgacccggattctcgtcctccattcaccgaaataacatgccgacttcggtccatgtcaatggaagtcgtcactaaaagcaaaagaagagaaaataaaccctga

SEQ ID NO: 187356 - DNA, 339 bp, Arabidopsis thaliana landsberg
atgcggacactcatgacagaggaatccaatgatgcagacagtgattccttcttgttggatgatgattccaggtgaaaattctgttatgataaacaaactacttataatcttataagaagttttaacgtgtcggattggaaatgatctaagatccatcctttacgtcaagttattgttttatggagtgtatgagatacaactaactgttttactactaattttgacagcattcctttctcaatcgatgatatttcaagttcgatggaagagaaggattttgtaggaatcaaaccagcagaagaacttcttgaaaatccagcatttgtattcttgcactaa

SEQ ID NO: 187357 - DNA, 495 bp, Arabidopsis thaliana landsberg
  unsure (1)..(495): unsure at all n locations
atggcaaagccgctgtcgaggtatttcatatggtgccagtttccgtcgggcataaacagcgtatctccatgccggagagtaatatcatacccgctggctttttccagtgcgggaaactgctggtaatccaccttgcttttttcaggatcataataattgctgaaatcggcgaggctcaacacttcaaaaggcttgcggtacagccgggcctgttcttcgagtgggaaaagcaatacccttttcctgccgatgaactgtgtatgcaggatatggcttacatcaatatcaaaatgcatatgcgtgatggatgtctggccgccggtaaaaagcannnnnnnnnnnnnnnnnnnnnntttcatcaggtgctcgggccaggtaaaatcattgatcagttcgggcgcatggtcaaagatgttgaacaggaaaatacgccagcccgcgggtccctggctgatcatatcgatgtattcaccaaaggtcttataatcatctgcg

SEQ ID NO: 187358 - DNA, 180 bp, Arabidopsis thaliana landsberg
gaaagagacgagccagctttcaaaatggtgagccacggcgatgaactccactctgttgagtttggctcatcgatctctctcttggaagcgttctttatttcgttagcagtaactagtcatcagagttggtgtcaggaggaagaagaagaagaagtggttgtgatcggagattgtctgtaa

SEQ ID NO: 187359 - DNA, 134 bp, Arabidopsis thaliana landsberg
gctattgcaacgatgtttcgacaaaggagaattcgtctgaaattaatgacaactatttgttggaaacttgtcagaaaagttgtcggatatttgttggcaatttcgaaggaatttcaaactatattacaagctaa

SEQ ID NO: 187360 - DNA, 692 bp, Arabidopsis thaliana landsberg
ttggccttgatggtgacaatgtcgaccatcggcattattctgcttcccatatgcttagacttactggacatgagggttcaatatttcgcattgtctggtctttggatggatcaaaaatagtctccgtctctgatgatcgtaggtgaacatttgttttgtgtttaagaatttaaatacttcacatttccctgcttccttttgtcaatgtatctaattgcataatcttttgcttttgtagtgctaggatatgggaaattgattcgcaggaggtcgttggccctgtgctgtttggtcacagtgttagggtttgggactgctgcatctcagattctgtatgtacctcgaatgtctttgacttatcatataattttttaatattttgtcttcatttgaggtttatgctaaggtataatcttattaaaaaatgtgaatatcagcagttctgaggtgagaaaacttatcagccagattctagtgaatagggatactgtcactgttctaatttctaagcataagctttttaacgtatacatttgttcttacctatgatcatatacgattcatgtgcacattgcaattcaacttatagagttggtttttctgtttcagttgattgtcactgctggtgaggactgtacatgccgtgtctggggcgtggatggtacccagctggaagtgataaaggaacatat

SEQ ID NO: 187361 - DNA, 255 bp, Arabidopsis thaliana landsberg
atgaaatccgaaaaagtgaaaagctatgaggtgggttacaaaggtttgatcgctaagcaattgctattcgacgttaactactattacagtcagtacaccgacttcattatcaataccgtagtagcagcggcaccttcgaatatcctggcggcggacggctccgtgaaccaggtagctgcaatggagttgctggggccgggtaggcagttgtatcagctgtataccaatgccaaagacaaagtctccattcagggg

SEQ ID NO: 187362 - DNA, 106 bp, Arabidopsis thaliana landsberg
atgattccccgaggcagagaagagcggatatgtgtgcaacttgaaaacgatgtgctttcaaaaactccacagattggaagccttttagtggctgcccgagaaaact

SEQ ID NO: 187363 - DNA, 72 bp, Arabidopsis thaliana landsberg
atgaacaatcgtcgaaaacctaatctagggatagccaataaaaaagcctctaaaatatcgaaaccagaacgt

SEQ ID NO: 187364 - DNA, 433 bp, Arabidopsis thaliana landsberg
atgtacctccgaggactagatattatgcggatagctcagcccgtttgggtttcatggaggggcctgagatggagagaaagatgatgacaagctatgcgggaaacccaaagtactccttcttctggagctcagatcgttatcatgcttattaccagaaaaagcttgctggataccgtgcgcagaattacatgagggacctgagatcaaacttagtgattatgggatacctgatgttccattgagggtgagggtaagggaaccaccgcttcagattccaaaacctcctccgggctttgctagtgaccagaagccgacaatgaagtatccgcctccaccacctcgcaagtatgcagctatactccctgaatggattactggcaaagagcttgaaactatcaaggaaggggatatggacgagaaacagcaacgatag

SEQ ID NO: 187365 - DNA, 175 bp, Arabidopsis thaliana landsberg
aacatcatcttctcgccatttgtctttaaaaactctaatgcaacattgtcactgtcctcatcttcatcggaatcgactgatctcgagttcgttctccgttggtttagaagatcgatataggtttggagatcgtgaacgcaagaaatgttttgaacatcgaaaaaatctagcgtga

SEQ ID NO: 187366 - DNA, 1010 bp, Arabidopsis thaliana landsberg
atgcgaaacccattgattagagatcctaattctatccgtgaggacacagacaatcgcttttgtctcggagcctcttctagaaaccatgctcaaaatgacacagttcaaatcgatctctctctaagtcaatccgtaaagcttgagcatcctagacttccggtttgttcggtggattttgattcgccgtacaaaaatcccgatcaatcagacaaggtcagcggccaaaagaccaagcaaattaggtccggtttaattcgtctgaacattttaataataacatcttcttagcttatttgatttgaaattacaatttcctaactattgtaacttgtaaacatagaatttctaaatttcgagtatttttttttttgtatataagagtgttatttgttgaatgtggattacagctttcagagatcattgattctttgaagctcaaacaaagttttcagtaataagctttcaaagttgataaataaaggaatcacggtatttcatcacaaataaaattcataatgagcacaaaatttcatcaccaatgtacaaaattgtttacaacaaagaaccctttacagattgtaaataaatctgacaatgatttttacagattaaaggaaattacaggaaacgtaaggaactctttctccaaaagccagtaaagcgaagaagctaccaccaagaaattacctgaaaattcaacacaaaaaatagacgataataatctactagaaggaataacctaaacagacaagataatcgatagagtgaataaagatctcagacatccaaggaaggataaaagctgcattaactctcaagcccggcgaaaggcgaaagctttaggcggccactgcgaatgttttgagaaacaagccttaagtttatcatcattgatcgttcttacagacaaaaacataaaagcgagaattaaaacattcataggtttcagacatccaaggaaggataaagctgcattagctctcaagcctggcgaaaggcgaaagctttag

SEQ ID NO: 187367 - DNA, 201 bp, Arabidopsis thaliana landsberg
atgaaaagtacctcaagtggctacaacaactccttcgatgaggaatgtaagaagaaacgcgttcttgttccacaggagacggcctaatcagtaatcacctctctctctctttttttccctttcatagttgccgaagaaaatgacccgaatcctacgccggagaagctcgccggatcctctgttatctcaatttcgatttga

SEQ ID NO: 187368 - DNA, 232 bp, Arabidopsis thaliana landsberg
atgggtccagccatcagcaccgaatacctggaagtacaccatgtagtagcccgattgagtcttcgttccatcatcgcgatctccctcccatcgaaggacgccttccgttcccagcaacacgttgttggcgagtttgcggacagcgaacccgcgactgtcgcagatgttgacagtcgcgacgagtccaggctgatcaaaccgataagcgatataagtaaagttcggttgcccg

SEQ ID NO: 187369 - DNA, 358 bp, Arabidopsis thaliana landsberg
gataaaacagaaacccaagggacccttaaacgctttctaaggagagctcaaaatgaatttgagcttaaggtgaagaagataaggagcgacaacgggtccgagttcaagaaccttcaagtggaggagtaccttgaggaggaaggaatcaagcacgagttctccgctccctacacaccacagcaaaatagtgtggtagagaggaagaacaggacgctcatagatatggcgaggacgatgcttggagagttcaagacgcccgagcggttttggtcggaagctgtgaacacggcttgccacgccataaaccgggtctaccttcatcacctcctcaagaagacttcgtatgagcttctaaccg

SEQ ID NO: 187370 - DNA, 558 bp, Arabidopsis thaliana landsberg
atggctgtgactcgggtaatcacatcgtcatcgggtatatccgcagcggagcttaaggttttgtttctctttcgctaactcggtttcgctttaattcaagaagatgataagataagttgtaacttttcggtttgtgtttgcattgcaacaggaacaagagaccgatgaaaacagtggaagtttgcagctttacgaacggctaagtttctcatacccggcactcctaatgcctcttatacacgaaagagataccgtaagcataaaaaccgaaacaaagcgacactcaaaaaaaccgtatgctgataagacttgaccaaataatgtgtttttttgccttgacagtatcttgcttggtcattgaagagaagtaaggcagtgaatgggtgtaaaacagtggtgggagtgatcgggaaaggacacatgaatggtgtcatctacgcgttggtgtcagactctggggatctccggtttagagatttggtgggaagaggagattcatataatggtggtactggtactacatcgaacggttggattcaaaaggttttaaagagcctc

SEQ ID NO: 187371 - DNA, 367 bp, Arabidopsis thaliana landsberg
atgaagaaagaagagacgccaaagaaaagactagtgacgaaagaggaagacgcggaggtactctcattctctaatctatttcttcgatagtgttgattctccgcaaaatcctctcgagagaatctttcccaaaagagattagatttggtggaagaaaagagttcttcgtcttcttgttgttgttgaggattgaagaagaagagaaatgaaccgacaaaacggtggagggcagcggctgagatccgctagacccaccacaattcacgattgtgctctctccggcgatcttattgctttacagagacttcttaaagacaatccttctcttctcaatgaacgcaatcccgtcgtaatgtccaaatcttga

SEQ ID NO: 187372 - DNA, 808 bp, Arabidopsis thaliana landsberg
atggaacaggtaaacagacactttatctcccctctctctccctctgatctctcttaccattaacctaaagatagaatgaatcatttgttgcttttacagttagcgtcccttaaggacaccatagcgagaaaagacgaagagatagagagacttcagcatcagcctcagagacttcagaaatcaatgatgagaagaaaaagcataggacatacagatgacataaactcagatacaggagaatattcatcacaatcaagatactctgttactgacggcgaaagtttagcatcctctgccgaggcagagtacgacgagatactaagcgagattacgtctgatgctgcatctatgggaacacaaggatcaattgatgttaccaaaagaccacccagaattttagacaggtttaaaaccacatcttcatcttgttcttgtggttttaaaagatatatcttttcttcttttaacgttttaagtattggaattgcagagctaagtcggtgactgcaaaatcatctacgagtgtaacacggccactcgataaacttcggaaagtagctacaagaacaacatcgaccgttgctaaggtcacgggcttgacatcatcaagtaaaggcttagcgtcatcaagtaagcaaacttaaaacctataggttttgaagattttttaaaagcattgattagtgtaaagtaggttcaatcatcagattaataataaagagttttgtgacttttgtctaatcgatgatgtttttgcaggcattaagaagacgggaagtacatcaagtttggcaaagtcttcaaaacg

SEQ ID NO: 187373 - DNA, 656 bp, Arabidopsis thaliana landsberg
atgctgatcattttatatgatgccagtggccgcggtaagaggagaagagtagaacaagagcaccactcagatctcaacaacgagactgcaggtatattgtactctcgatcggaggcttgcattgatacgacgaacaactagctagatacgtgtacacttacgcaattctcattgttttgtgttggtggtcagctcctacaggaggatcagctggtgaggaaattgttttgccttttaccaagactttagcttcgtggaaagagtttgagtctgatgaggtctacaaaagaacaccacaacgtcctcacttaccatcattggcttacacgcatccaagttttggtgaaccgactgcagcctatctgactgcagcttttatcgattgtgtaaagacagtagatggtatgtgtgaggacactccaaaaagtgaactagatgtctacagagagacatttaaaatgttcgaggagcatggtttcgacgttgcagaacctttatcacaggtcctcacgctgttagttctccgcaagatgagacgtgaatccctcagacaacaaaaagggatggagaaagagatggcagatgattatagcaagctgaaaaagagtctggtgaggtgcaaaagcagctttgaagacaaggagacggccaaataa

SEQ ID NO: 187374 - DNA, 406 bp, Arabidopsis thaliana landsberg
  unsure (1)..(406): unsure at all n locations
atgctccgcttcggcgaaggcctggtcggccagtgcgccgcgcaggcgcggctgatcctcgttgtcgtacgtgccgccaggcacggtgcagatcgaatccggcgtgctgaacncgctcacgcgcnaggtggtcgtgctgcccgtcctgttccagcagcaggtcaagtcggtgctcgagctggtgtctctggctgagttctcggacgcgcagcgcacgttcctggagcagctgtcgggctcgatcggcatcgtgctcagcacgatcgaggcgacgatgcgcaccgagcacctgctcgcgcagtcgcagcagctggccggcgagctgcagtcgcagcagaaggagctgcagcagaccaacgaggacatcgcgctcaaggccgcgctgctcgccgagcagaaggccgag

SEQ ID NO: 187375 - DNA, 60 bp, Arabidopsis thaliana landsberg
ctagtcaagatattacgtgttccaggggaccgagttgtactattatcggaacaaccctaa

SEQ ID NO: 187376 - DNA, 135 bp, Arabidopsis thaliana landsberg
gagcccgaggcggtgatcaagggttacaccttcagctggttgcgcctccactattttggcgacatgaccagcaagatctgggtgctggttctggtgcgactgatcatgttgaaccatgaccgtcgtctgcgttag

SEQ ID NO: 187377 - DNA, 1602 bp, Arabidopsis thaliana landsberg
  unsure (1)..(1602): unsure at all n locations
atgctggccttgtcctcggtcgtcaacctcgccagatgtgagatcttatctcttcaaatggtaaaacatcattaatgaatcgtgtcgggaaacaaggaaacccgaagcaataatcatacttacttaccaacaaggaacgaatcagtttcttgccgccccactcatgctcgcttgcgtaaacaacatcaaccctaacctctaccatgaactgagcgtaagtaagtgtctcctcgaacagtaaacccatgtcaacatacgactgggagtagtgagacttcacggataaacccttaccaacccgttgagaatcgtatcgttttaaacccgcgcgggtcaaacatctctgttttgcgactttttcacacttccgatggctaatcataccgcaatgttcacaaaaatccccaagattcttgtacttgaactgaacaaactgaagccatacaacctctagcaatggttacgtaccattccgttcaccagcctagtcgtgtgaggtttgccagaagcactataagtcgcttgaatctgttcgggaacacattactatattttggatttctttcagtttacatatttctgttttgaggttaaaagatttcagtcatttattaatggttcgacctttggggaacgaaacctagcttataccaataccagaaaacttcgagacgataagaggcagactactgctaatttgtaagcttgaatggtgccttgacaatgtgggctatgaagtggtgaagttcgagaatgactctacaattacatcattcatgccatatcctcccctcaagaatggtcgagactccaaagttgctaactnttttttttttttttatgctaagcttgtaaatatcattagaaatgaaaatgaaggaattacagaaacaacacctaaagtagagtaatcttggaaaaaaaggagagtaaaaaacaaaattacaataaggctaaagtaataaggctaaagtaaagtatacaattatctaatccaaaggagcacgagcggacgccaacgcttcctatgtcgtcttccggaaatgatgttgcggacttgacgatcaacgagcttgaaagttccagaggcagtgatccaaaggttgttgtgaaggtagttattacgctggtgccaaatatgataagatacggcttgagaaaccaccttgcgaagcagagagggggcggaagaggttgaatggcgagtccaagaaagcagctcggcccaagttagcagctgctgatgagatggcgaaagtcttcgaaaaacctgagtccaaattgacgcagcaaactcgcaagtcaaaagaagatggtcccgtgattccggtagagtagagcaaagacaacaactagcatcagaaataactccccatgaaagcaggcgttgcctagtcgggaggcgattaagagtagtaagccacatgttgaaagcatgttttgggactgcacccttaaaccaaacagagcttgcccaccgtttaatctcctccctaggcctcagcgattcccaagtcttggaagaggaaaaacccaaacactcagaatcgtcaacaacccaagcataattatccttctcaagggttgagcttggaaggttaa

SEQ ID NO: 187378 - DNA, 36 bp, Arabidopsis thaliana landsberg
gtatgtgtaaaagatgagtgtagaaggaagaagtaa

SEQ ID NO: 187379 - DNA, 983 bp, Arabidopsis thaliana landsberg
gaagcgaaaggctaactttgacgctgcaatggtgaagctgaaggaagggaatgtcgcagcagctactgagctttttcaggtgcttacttcttatttcagtggcttcggtctataaaatgtataatagtaactatcactgttaattagcagctacagagcattttcaggtgcttagttcttttcatttcaatggcttagatctttaagttgtgtaagtatttgcctattgagtttctatagctccaggactagtctgtgtttagaaagacattattacacgctgcttttttctgtatgtctttcgtgtcaattttaaaccagttcccaagatccttcagagataatatgttcctcttgaatcttatgtctagtttggcagtcctggtgtgttggtttgtgagtttcgttagtaatttttatcatgtactctgctttattagattttggtcgagactatgatattgtgtgagctcatgcctattttcatcacgattgcagagagcagttagtgtaacatcatccatggctcatcaattgattcaggtataaaattgtttattaaatgagtaccttttcttagggaaatatgaatcatctctagggccctaacaacttctcaggttctgaaatcagaaaacgtcgaatttattgtagctccctatgaggctgatgctcagctagcatacctatccagcctcgaactggaacaaggcgggattgctgctgttataaccgaagacagcgatttacttgcatatggctgcaaagctgtaagatattgttttctcacacaaataaaaaccaagttcatgattagtgttttaagagcattgtatgatatgtttccccaacttctgtatggaaaaaggttatctttaagatggaccgctatggtaaaggagaggaactagttctagataatgtttttcaagctgttgatcaaaagccttccttccagaattttgatcaagagctattcactg

SEQ ID NO: 187380 - DNA, 29 bp, Arabidopsis thaliana landsberg
atggtcaagatcgaaacacgcagccaaag

SEQ ID NO: 187381 - DNA, 653 bp, Arabidopsis thaliana landsberg
  unsure (1)..(653): unsure at all n locations
atgaaaatgtttagatcaaaaacatgtaatatagttaccaaatcaaagaagaagagtgcaaaaaaaagtcctcttctgcggactgccaaacaagcccatacaagcgtaaacaatgtcgcggcgcagacagctatctgtgcgtacaccaaatacctgtcaaacatcaaatcatacactttaatcactcgatctcttactttcaataaagatggggggaaaanttttnnccaaatgatcgaatgaatgaaaaatgccaaattatgatttgtcccacatgttgttcttcctacatcatacgtgagggatgttttttttagaaaaatgtgttcatcttttcaatcttttctaccgaatatgtgatctgttttcttcatattttcaacgtgaatgatgacatttcatgcagatggatgcttcgttgtatcatatatgaattatttcaataactagatcattgcaccttcacaaaataagaagtagatgatgatagaaaaggagaataaatttaaaaaaatatatacctaaaggcagaggagtagctgtatttagcctcaaaagcgatgccataaacagatgcgacttcacggttagtgatcatgacccacatcgaggccattgcagctccgatggttaacactctcatcgatacttga

SEQ ID NO: 187382 - DNA, 235 bp, Arabidopsis thaliana landsberg
agttgaagaagttatatcgcaaggaggttgttgaacgcaatatccattgcaccatcggcaaaagtgaaagataccttccaacaggtaccgagataacctaggtcttattgctgcacgacagaggtccaacggctcgttgaaatcacagatggttcagccctaggcaaggcatacttcttgaaatcttatcttaaggcacgcaagcacgctatgaagccggagactattcgagcgg

SEQ ID NO: 187383 - DNA, 1122 bp, Arabidopsis thaliana landsberg
gcaagtgcactgatgcaatctttgatgagtttagctgcacaaaaggcccagattgcagagactggagaagaagttgaagtggatgaactcaagactaacacagttatagctgtcaaagctggtgaaaccataccaattgatggagttgttgttgatggaaactgtgaagttgatgagaaaactttgaccggtgaagcattccccgtgcctaaactgaaagattcgacggtttgggctggaaccatcaatctaaatggtataaaaaaggctcaagcgttacacttttttcttatgaccttcaccttcaatgtttgatatttccagctcctctgtttttcaaggttacataactgtgaacaccactgctctagctgaggattgcgtggttgcgaagatggcaaaacttgtagaagaagctcagaacagcaaaaccgaaactcagagatttatagataaatgttccaagtactatactccaggttagtatcagcacctgactttttttcttcattacaactttttttgttcttgattgagaccttaaatctttttgcttgtatgcagcgatcatcctgatatcaatctgttttgtggctatcccatttgcattgaaggttcacaacctgaaacattgggttcacttagcactagttgtgttagtaagtgcttgtccttgtggacttatcctctccacaccagtagccactttctgtgcactcacaaaggcagccacatcatgacttttgatcaaaggagctgattaccttgacacactctcaaagatcaagattgttgcttttgataaaaccgggactatcactagaggtgagttcattgtcatagatttcaagtcactctctagagatataaacctacgcagcttgctttactggtaaaaaaaaaacttgtgtactgaccataacaagtttgctgagataacttatgactgagactttcttgttatataatgtttcagggtatcaagtgttgaaagcaaatcaagtcatccaatggcagcaacaatcgtggattatgcaaaatctgtttctgttgagcctaggcctgaagaggttgaggattaccagaactttccaggtgaaggaatctacgggaagattgatg

SEQ ID NO: 187384 - DNA, 101 bp, Arabidopsis thaliana landsberg
atgaagaatagagaagaagggtacaaagatttaccagaaatgaaggaaggagtagtgataatggcggagatgacgagtcgattggccggagcgggagatat

SEQ ID NO: 187385 - DNA, 474 bp, Arabidopsis thaliana landsberg
  unsure (1)..(474): unsure at all n locations
atggatgctttcctgggatcatattcaggtnnnnnnnnnnnnnnnnnnnnnnnnttgggggttgatgtttcagaaattgctgcgaacaattcctccaccttggggctggaagcggtcgcagtaaagacggtgcgtaaaaatctgtttcatggtgatgaggaaactgttggtaaggagagtgagaaagctactacggatttattgtagcagcgtgatcttttctcggattatttgaatcagctcatggttcaagattacacacttgctgaggaaaactctttaagtttcttggatactattatggaagacaaagaggatacatttcagataacagatccttctcagcagtctaatgaggaagtgtcacaggaggaggtaatggttaatgaggaaactaaggaggttgataaaatggaggaagaaacacaaactaatggagaagacaatggtactgaaattcaagcaggacagtaa

SEQ ID NO: 187386 - DNA, 1111 bp, Arabidopsis thaliana landsberg
atggagacgaaacagtatcagaaaattctgaaaagattgttgatgattagttatggcgtgagtttaaaaatgataaggtctgccgcatttgattaaagttcgtatactttcgtagatattagtcaataatctactttaacttcgatatactacacaggatgagatatccagggagacctgcaaggattcagtttgttccccacaaaagcatctggtaattgtttattaagttcattcatatttttcgtacttaacatgggtcatatattctcaggtggttctttttcaggatgaaactccatccatgaagacctacaaggattcagttgattccccacagaagcatctcgtaattgtttatgaagttctttcatattttgtttccataacattggtcatatattctgtgagttctatttaaggatgatagtccatcagttatattacccaagtttatatctgctgatagccccgagctccctctctctgatcaaccaatctatgacactgagtcaaaatctagagacgaggtaaatttttcaatatcggtttcaaatcaaaaatatttaactattatatacctaattacattttcattttaccttagcatctgccttctgctcgacctcctacagttttcgagaccgcaacgaaaccatctcctaatgatgttaccgaggttttcttcgacgtcctgctgttttcattttactttgagtttcttagaatggatgttactcatatgttaagttatacatcttctatcttatcaaggagattaagattccggacttgtccttggctgaaaatgtagacacattgcttgacatagtgtgcaagaatataagttcttcagttgttgctcccgatgaggtaaggaaagagagtcttgttatgatagaatgggaaccagccatgaacccacaggtaacattatcatccattatccacgtggactacgtattttgtatggattcccaattgtggatatacttaacttcgtggataactcacttcatgccctctttcccttgtaggatgataaaaaaaagatgatcaaaaagatgatgatcaaaaagaagatgatgagattgaaagcgatgatgaagag

SEQ ID NO: 187387 - DNA, 103 bp, Arabidopsis thaliana landsberg
cgcgaccaagtggagttctactcgacaaaatctcgttaaaaccagcgtcttcgagaaactgaatgtttacaagattgtaaaaaacaagaataagagtgggtga

SEQ ID NO: 187388 - DNA, 304 bp, Arabidopsis thaliana landsberg
atggcaatgttccgaggcgttcttggtgtcgcctcgggaagttcctttgacgtgatccccgaggtgttttggaccctggctcggggtggtcctttgacaagatcgccgaggcattaatcattgttggctcggttttctaggtggaatccgaccccaacagcttgcccccagctcattgacttagtagagacgatgagctttatagattggttctcgagccgactatttatcttcctagattttaactgtcgtttcgtcttcctggacggtcaaacttccgttgcgcgccgacgactatttttga

SEQ ID NO: 187389 - DNA, 174 bp, Arabidopsis thaliana landsberg
atgctagatgtagacattgttggaaaggtgtcagaccagtatgctattcattactaccgccataaaccggataatgatggattattatgtcaaagaattttcggtcctataaagagtgagatttgcgcttgtgagcattatccagtgttcgaagatcaaaaagtagtctctaag

SEQ ID NO: 187390 - DNA, 330 bp, Arabidopsis thaliana landsberg
atgaagaaggtgaagctatctttgatagctaatgaaagatcaaggaaaacatccttcatgaagaggaaagacgggatttttaagaaactccacgagttgtcaactctgtgtggtgtccaagcttgtgctctcatctacagtccattcataccggttccagagtcatggccgtcaagggaaggtgctaaaaaggtggcttcaaggtttctggagatgccgccgacagcccgaaccaagaagatgatggatcaagagacttaccttatggagaggattaccaaagcaaaagagcaactaaagaacctggctgctgagaaccgagagttacag

SEQ ID NO: 187391 - DNA, 358 bp, Arabidopsis thaliana landsberg
  unsure (1)..(358): unsure at all n locations
atgatatgtttgggcctcgacggccgcaaaaaacatacgcatactacagacaaactgatcctgcaggttcagacatcaataggggggcagcagcaccctcggcgtcgactccaccttcggcggaatccggcccggcctcggacggcgacactgtgggaggatgtccacctcnnnnnnnnnnnnnnnnnnnnnncctgggccatcgccgctagggtctcctccaggaacccggcccaagcagacggcttgatcagccgctccgtagcctcagccagctgacccccgaggacatcagcccggctcatggcctcggcagcccgactccagggttggtcccgccaatggacgacctggccag

SEQ ID NO: 187392 - DNA, 288 bp, Arabidopsis thaliana landsberg
ccgcgccaaaacccctgatcctgagccccttcgggccgttccgctggaaaaacagctcatcggcgtcaacgccaaaaccagcctctttcccggcgcgcgcagccgctcctcctggtccggcggcaagaaaacaagaaaacatgccaggcatttagtccgtgcccgccatggcggctggccgcgccgtcgaggccgctaccgcctccaccaggcgcaggccagccgccgactgactccatacgcgccccttgcgtgccgacgcctctgcacccatcccgcgaggttctg

SEQ ID NO: 187393 - DNA, 540 bp, Arabidopsis thaliana landsberg
ctgcaaaccggatgctgagacgtacgatgctcttatcaatgcccatggtcgagctggtcaatggcgctgggctatgaatcttatggatgacatgttacgtgctgctgtgtgtaactttgctttactcatgtaaagtttacatttttgttttgggtttccatgatgcccaactaacaattaagaataatctatttcacttctgatatggttttgacttttgactcttctctggttttgcagattgctcctagtcgttcaacctacaataacctgatcaatgcttgtggttctagtggaaactggagagaggctctggaagtatgcaagaaaatgacagataacggagttggaccggatttggtcactcataacattgtgttgtcagcatacaagagtggtcgtcagtattcaaaggcgctatcttattttgagctcatgaagggagctaaagttcgtcccgatactacaactttcaatatcattatatattgtctgtcaaagctcggtccaagtagccaagcccttgatcttttaaattaa

SEQ ID NO: 187394 - DNA, 175 bp, Arabidopsis thaliana landsberg
ggggcattttgggtactggcaccgtgatcaggctatcggtaatggcatgctgaaaactgtctgtaatattgatccatctctgtatggcgagcctgtacaggaagaagcgatccaggtccctttcctcccagttaaaccagttcacatctttgatatctgccgaaaatcctttcag

SEQ ID NO: 187395 - DNA, 336 bp, Arabidopsis thaliana landsberg
gacgccggcgtccccatcctcggcaccaccgtcgactccatcgacgccgccggcgaccgcgaacaattccgcgatctcgtccaacgcctcggcctcaagcaacccgccaacggcatcgcccgcaacgtcgacgacgcccgccgcgtcgccaaggaaatcggctaccccgtcctcgtccgcccctccttcgtcctcggcggccgcgccatggagatcgtctccgacgaatcccagctcaaccactacatgacccacgccctcgaggccgccgtcggccccgtcgccgactcccccatcctcatcgacaagttcctcgacaacgccaccgaagtcgac

SEQ ID NO: 187396 - DNA, 475 bp, Arabidopsis thaliana landsberg
atggctagcaaagaacttgcactagcacttagcctctttgttctcttgagcattggatcagccagcgccatcagggtggctagatactccagctctcaagggcaaggagccggagatggtaatggtagcgggtatctgaacggtggtggctctggatccggagttggatctggatccggtgagagtgatggggctggagtccatgcaagcggtgggggcggaggcggggccagttcttggtcgcagccggcgggttctggggctgcggctgggtttggcacagggtacgggtctagttatagctcgcagtcacgttacggctatggcgggtcgactagtgctgggggcagtggtcgcggccgtggtgctggacaaggctcggcagacggtggcggcgggtatggtgccggtggtggcgatggatacggttccagcgtagcgaattccggcaacgtggtctcggccacaccagcgc

SEQ ID NO: 187397 - DNA, 199 bp, Arabidopsis thaliana landsberg
atgcggatggcttcaccgcgatgcggccagcgacggggactccggtttcaaaccgaagcctgccggccgttgcgccggtcattgcgcctgccgatgcgggatgggacgaattcgctgtgtgaccacgaaggtattgcgaagaaagcctcaaacgaaaaggcgacccgcaggtcgccattagtcgatcgactgatcgccc

SEQ ID NO: 187398 - DNA, 375 bp, Arabidopsis thaliana landsberg
aattttgggaatcttgtacattttgagaagaatttctatgtggagagtcccactgtgcaagctatgacagagcaggatgttgcaatgtacagaaccgagagggatatatccgttgaaggtcgtgatgttcctaagccgatgaagatgttccaagatgctaactttccaggtattttgattggattggtcatagagtttccagttcatttatatctaatttgggttcttagtttaatggttccttttatctgttagataacattcttgaagcaattgctaaattgggatttactgagccaacacctatacaagctcagggatggccgatggcgttgaagggtagggatttgattggtattgctgagactggctctg

SEQ ID NO: 187399 - DNA, 293 bp, Arabidopsis thaliana landsberg
gagagcccacacgagcatcagcagaacctcctcttgtcccgcatcatcaccaatgtggtaagtagtggcggattctggccttagagtacgagaaagctaaggatttacaggagaaacttaacgaagccgttgttgttatgaacaagagccttcaggtagaattaataaccccttgaatcatagcgttgcggactgacgaatgtcataggacatcaacatccaaaacatgaacgtggagctggtagctcaaatgtttaagaactaccaatctaacgttctattccatcttgagg

SEQ ID NO: 187400 - DNA, 308 bp, Arabidopsis thaliana landsberg
ccttgtcccaattggagccggtaccgaccgcagtcgcgttcgggttggcgccaccgttcgcgacatcgtacttgaaacccttcaaacccaggttgtaggcgaattcgccttgcagccgggtcatgaggacttccaggccggtaacatcgtcaacgacgatatccgacgtttcggtgacttccgcctgcgcaccgccggccaccaggccgagggtgtagtaatcggtgacagccggcgaaccggacgtgaccttgagcgacgcggagtcggttacgagaaccgggcgattcagcgtgatcggcgtaccg

SEQ ID NO: 187401 - DNA, 143 bp, Arabidopsis thaliana landsberg
ctgccagactgttggccacgcttgttcccgtgtttgttgacgatgaaaatcctgaccagaacggttctacccatggaactaccgaaccagataacacctccacaccagaagagactggaactattccacctcggcagccttga

SEQ ID NO: 187402 - DNA, 520 bp, Arabidopsis thaliana landsberg
ggctgctccgctggcatctattacaattcgttaccttgttctgtacaccactaatgagagttggaaggtgagatttgcgagcatgatgtaagaaaattgttttctggaagaattagtactctgaatgaattctcatttacaggttgtaaatctgaaagaagcaagggacttctctactaacacaggatttatttatttgtttaaggtattgatgccactctttagctagttttccttgatacatattcttgatggattaagcattccatcttagcgaaaacagtgccatatatctatctatttccatggcgcttgcttttaaaagttctttattcctacctgataatcttctttgaagataatattcttgatgtgatttttttctacatgtgatgcatatcctttcgttatcagaaacttgaatgggaagctttatcaattgatcttctaccacatcctgatatgttcactgaagctaatttagcccggtctgtagaagcaaatctcacagatgacgatg

SEQ ID NO: 187403 - DNA, 82 bp, Arabidopsis thaliana landsberg
atgaagagtgtagttgcaatggtggcggttcagtttatcttcgccgggatgttcattttgtttaagataacggtcgacgatg

SEQ ID NO: 187404 - DNA, 892 bp, Arabidopsis thaliana landsberg
gcccacgaaagaatgaccttacgatttattggtcccttgggcctttcgtgaggtattttactcttttagtggacccgggggatatctatccccacagcgactgcttcatgatctacggtgggcaagcggcgaacgcatcggctcggcaccgcaagcaagagcgtcgggaggtctgctcggtaaaggtggcggcgccaatctacctagactggttcgacaagcccatcaccttcgaccagagggaccacctcgaccgcgtgccgagcccagggatgtacccgctcgttgtcgatcccgtcatcggcaacatcaggcttaccaaggtcctcatggacggaggcagcagcctcaacatcatctacgctgagaccctcgggctcctgcagatcgatctgtcctcgatccgggccgacgcgacgccttttcacgggatcatccccgggaaacgcgtccaaccccttggacaactcgatctgcccgtctgcttcgggactccctccaatttctagaaggaaaccctcacgttcgaggtggtcgggttccgaggaacctaccatgcagtgctggggagaccgtgctacgccaagttcatggttgtccccaactacacctacctcaagctcaagatgcccggctccaacgggtcatcaccgtcggctccacgtaccgacacacgtacgaatgcgacgtggagtgcgtggagtatgctgaggccctcgctgagtccgaggccctcatcgccgacctggaatgcctctccaaggaggtgctcgacgtgaagcgccacgccggcaactccgatccagcagaggcagttaagtccgtccctctcgaccccagcaacgacgcctgcaagcaagtctggatcggctccgagctcgaccccaaatag

SEQ ID NO: 187405 - DNA, 178 bp, Arabidopsis thaliana landsberg
ctgctccttgacctgctttatggaaacgatgaaatcagcaaaaattttaaagagaacatcagaccttatgacaccatgtttgcatttacttctatgggtggaaggatagatacatctataaacagaggacgaggaccacctattttccgactgcaaggacaaaatgtccataagattg

SEQ ID NO: 187406 - DNA, 474 bp, Arabidopsis thaliana landsberg
cgtcgcgcggtcgagcggatagccgtgctcggcggcggtccggtcgtcgatcgccgcgatcgttgcgaccggcggcggctttcgcgctccgatcagcgtgctcttcagatcggtgagggtcgcttctgggcgatcgagaaacgaggcgccgccggaaagctgcagcgacccgaggaacgctccccagagtgccgcggcaagcagtgcggcggtgacgataacagactggcgcggcatcggttgctactgaccgaggcgggcaaggagtgcggcagcgcgaggacccggccagcggcgcacctcgagcggcgccgtgccgctgcggacatcgacgccctcgcccggccgcagcaccacgggatcaccctgcgggcggcgcacgccgacggcgccgcgaacgacgagcaccgaagtctgccccccacccccatcgaccgcccattgcgtgccgcacacggcgacagatcgcctgcg

SEQ ID NO: 187407 - DNA, 667 bp, Arabidopsis thaliana landsberg
atggctggtgtagttacctatactggagccaaaatcatacagaatgcccgtttgcttattgagcgaattgggaaaccacttgagttggatacagatggtatatggtgttgtctccctggatcttttcctgagaactttacttttaaaacaatgtaagattttgtaatctccatgatttacatcattacatgtctatgttaggaatttccttgttctgttttttttttttaatatatagcatttcactctaaggtatttccaagaggcgttttatttccttgtttaattaaggtggattacattttcttgtggttctagagatgttaataaaccatcaatggttttcattattgcagagacatgaagaaactcaccatctcgtatccttgtgttatgcttaatgttgatgtggcaaagaataatacaaatgatcaatatcaggtttgccggctattccttacttaaaagtagcttctgtgttcagtcttaaataagcagatgatataacaagcccttttgtggttctgaaagcattttgccttgtgttcagtttctgtttttactcttaattttggttttggaacagactcttgtagatcctgtacgcaagacatataaatcacatagtgaatgctcaattgaatttgaagtagatggaccgtacaag

SEQ ID NO: 187408 - DNA, 436 bp, Arabidopsis thaliana landsberg
atggcggttgtggcggaggacgatgatgagtatctccgagacatcgttgtgagttttctattggctggtcgggatacggtagctgctggtttaaccggatttttctggttattgacccgtcatccggaagtggagaaccggatccgggaagaactggaccgggttatggggaccggttttgactcagtcactgctcgttgcgatgaaatgagagagatggattatttgcatgcgtcgctgtacgagagcatgagattgtttccgccggttcaattcgattccaaattcgctttaaacgatgacgttttgtctgatggtacatttgtgaatagtgggactagagtcacgtaccatgcttatgcaatgggtcggatggaccggatctggggcccggattacgaagagtttaaaccagagaggtggttggataacgaag

SEQ ID NO: 187409 - DNA, 207 bp, Arabidopsis thaliana landsberg
ctatacaggctggcgctcgtcctcgatccaaacaccccgggcccgtggcggctgtcccggctgcacaccaacacgctcctgggtgcgggcgcctctccccaggtcaagctgccccacactcgcgcccgtaaagtggcccaacccacactgcccccaggcccggtgaacgctgtgctgcgcccgctcgagcgagcctccggcacctaa

SEQ ID NO: 187410 - DNA, 638 bp, Arabidopsis thaliana landsberg
ctctgttcatggatgaaataacaaacggcttagacagttccacagcgtttcatattatcaagtctcttcagcaagtagctcacattaccaacgcaactgtgtttgtttcccttctacaacctgctccagaatcatatgacctctttgatgatattgtgctgatggctgaaggaaaaattgtgtaccacggtccacgcgacgatgtcttgaaattcttcgaagaatgtggttttcaatgcccagaaaggaaaggtgttgcagacttcctccaggaggtaattaaaaagctaaaaactctgtttcttgacattgaacgttatttgatcccatggtcctgatcttgttttgctttgtaggttatttctaagaaggaccaaggacagtactggctgcaccagaacttacctcacagctttgtctcagtagacactttgtcgaagagattcaaagacttagagattgggagaaagattgaggaagctctctctaagccatatgatatatcaaaaactcacaaggatgctctttccttcaatgtttattctcttccaaagtgggaactattcagagcatgcatctcaagagagtttcttctcatgaagagaaactatttcgtctaccttttcaagacgtttcag

SEQ ID NO: 187411 - DNA, 364 bp, Arabidopsis thaliana landsberg
gggagacagcttgaagaaagttctatggcttctgttgcagattttgaagagggagttgcttttatccttggtcaggtcaaagccgttgaatcaactagtgagggtaagaaatgtgctctccaaaacgatgaaagggacttggtaggatgtgcgacctcggaaatgttggaatctatcagcaaaaaatgcgaagcaagcattattgatgataacaaacgttctgtgaacatgaatgctttacaggatagtactccatctaatgttgaaaagcatcctgaaacattttcagtagcgaagcctgctttgtctagcacactctcctctgcacatagtaatcaaatgagaggaagggactgtgttccat

SEQ ID NO: 187412 - DNA, 75 bp, Arabidopsis thaliana landsberg
atgtactatggcatccgcaaatatcagtttcccgtcttggaaaacaaccgaaccatcctcatacttttgctcaag

SEQ ID NO: 187413 - DNA, 311 bp, Arabidopsis thaliana landsberg
atgaaaaccatcataataacaagaaatttgtggctggtggtagagaacagtgttccggtcttccggaccaaccaacacatttagaagtgacatctgaagcggtgcaattgaaaaatcaatggaacgcagtatcaatgaaggatatgatggcactgcaacttctgcaaacaattgtgctggactctatatacgcacttggttacacttccaaaggtgcgtgtaagcatgcaatctattcagcccacgttctctctccgcccgtggacccacctttcatccgacaatcgataggctacgtctcgaagttctaa

SEQ ID NO: 187414 - DNA, 442 bp, Arabidopsis thaliana landsberg
atgagaagaagaagatgtagaacagaggaagaagcatcggaggaagaagacgatgtcggagaagaagtcgtgaacaaggtcaacgacagaagcaaagtcaacaacataaaggagttgggctttgttgttttgtaataagtaattgggctaattgttttgttaggcccaaatgagtagaagtattgtgttgtgttgttagtctaagatagagtctatgttgtgtaagagtgaattaaggagttggaagttccaacatagtagagtggctgatgtaagtcttaggacaatgatgtggtctagagtctaagtgtgtgtagtgtagcaagtggagcaaaaccactatatgtatgtgtgtgtttatgttgtgtaagattatccaagatattaacaatgtagtcttaaaagtaaatgtgttcttgttctttctctctagaacaagtaa

SEQ ID NO: 187415 - DNA, 1953 bp, Arabidopsis thaliana landsberg
atgatgttggacgaactaagaagcatggactccagccctccttgttcacgggcttctatatatactgcatctcctggccgcacagtattacaagcaactctggcaaaagagttccattattttgataagtctttgagtgaatcaatagatttgaaagcaactttaactatcggggcctatctgccactttctgtcagacaagatagtgacgggaatcatcatggtggatattggtttgataaggcacaagaggaaactgattttggtgttagtaagctatatcttgtacctggtacatatgttgacgttatgcttctgggtggacctgaaaggtgggatgacaatgttgagttcaccgagactgtgaagacattatatgaagatgaggaggatcttacaagcagagttaacgtccatcatgaggttgaccgccgtgctaacatgtatagaatttcatgccagaagcttggctcctatgtaagttgcaggcattctatgcgattattttgtatatgccggcattactttttatatctaaagtgaaatgacactgtcacctcttccctgcttgtgctcatccagaaactggtcttcttgcgtgggaatctgctgggtatagaccatcctgtacctgcagttgcagaagctttattgtctgttcattgcagcttaccatcctctgttgtgctcattgttgatgaacctggtatgttgaatatttccaattccataggttggatctttcaggagttcctctagaggttatttaccttagtggttaaggtatgccatgatttgctcatgacatgaggtatacatgtcattttgcagttaacaagcttgatgtgattagagctgctagtcaagctgacagggcaccaggacgacttcgtgtaactcctgtgactgtggcaaatgggcaaataattcgtgtggctgctgttggtattagcgagtttggagaagctttttcaaactcctcaactctttctctcaggtgggaattgaccagttgcaacaatttggcatactgggacgatgattataactcaaaaatgacaaagtctggctgggagagatttctggctctacgcaatgaatcaggattggtaaatatattaaccaattccctcctcattatttcattcttccgacgttaaattatttatcattttctatataccatatactgttttgacagtgcactgttcgagccaccgtttctggtattgattattctttcaaaagccaatactcaactctgcttccacaaggttctgaaagtactctcactgatgctgtacgcttacaggtatgcatcttggtatactaatagtaatagcttgattcattactcccacatttccttatcatctacgcttaaggatcaaattagactttccttcagttaactgaattaccttgttactatttcagatacaactgtagttgtttcttatttctgtaaatcggttgaatatgcagttggtttccacactaagagtcacaccagagttcaacctggtctttttcaatcctaatgccaaggtaaatcctactcattagcaagcgtttcacttaaaaaattggtaaacaatagattgatagtttgatgtatacttggaagcatggatgggttgcaatgagtatttgcatttccccgttttttttttttttttttttttgtgtctctggttctacatgatttgagagcaccataactaggtctgtagtactaattcaatagttttccacccgaaggtaaacttgtcaatgactggagggagctgtttgtgggaagcagttgtgaataattctcgtgtagcagaagttattcgacccccatctggcctgcaatgctcacgaatgatgctatctccaaaagggttggggactacaatcgtgacagtatacgacattggagtttctcctccactttcagctcttgcgatg

SEQ ID NO: 187416 - DNA, 128 bp, Arabidopsis thaliana landsberg
aaaagttattttataagttcttccgccgaacgccggacatcggaactgctgctgtttgtcgtgaagtgtggggaccggatgaaccggcaatgccggtaaagatgtaccgacaaatgctaatgccatga

SEQ ID NO: 187417 - DNA, 131 bp, Arabidopsis thaliana landsberg
aaggtgcatcagcaaatagaggaactagtctcattgctaacagtgttacgtctgacgggacgcttcagtcttatgtagcctcgggttacccaaattggatgcgtaacgtcttttgcgatgagagagtttaa

SEQ ID NO: 187418 - DNA, 101 bp, Arabidopsis thaliana landsberg
ccaccgacacgggcagccgcagaggcgtagagagggaggaggaggtcgacgagagagaggagaagaaggaagacgaccttactagtcattttgatttgtaa

SEQ ID NO: 187419 - DNA, 425 bp, Arabidopsis thaliana landsberg
  unsure (1)..(425): unsure at all n locations
atgctctttgcttcttcgagaaatccagctcgaccaagcaaatcgaccatgcaagtatagtgatccctaagcggagccacaccaaaatctctggtcatagaagaaaagtagtgccgcccttcttcaacaaatccagcatgcccgcatgcagaaagaacaccaatcatggtaatgtgatctggtttttctccanactcaagcatttctctgaacaactcaagagcctcatttccataaccattttgtgcaaatccaataatcatcgcgttccaggaaacacaatctctttccatcatcttcctgaatacaagataaccctcttctacacaaccacatttcacatacatatctatcaaggaattgccaacaaatatatcatcttcttcaccagattgaaacttaaacccatgcttcaagacatgcac

SEQ ID NO: 187420 - DNA, 75 bp, Arabidopsis thaliana landsberg
gaagccactccgacaaaatgtactaacccctccctgtacgactgcatggtcgaggcaagctcagccaaagcctga

SEQ ID NO: 187421 - DNA, 202 bp, Arabidopsis thaliana landsberg
tggaaacggggggaacaatcgttgaagtcaagcgtcaacaacaggacgagaggtggatgactaacagtcctggttgggtgcagaatagggagcggtactggccagcgggcggtcaaacggcggctggctgtccaaagtttacgggtggaaaggaggccgtttctggcgccagaggatgtcattttcggcgtcgttttcacag

SEQ ID NO: 187422 - DNA, 222 bp, Arabidopsis thaliana landsberg
atgcggtcgccttgggaccgattgacggacgcctcgacctacgggccctctgggtccgaggaagatgacgatcccagcatctgttgggatttctctggatttggcaaccccagtgccatgcgggacttcatgaccgcatgtgactactgcctctccgactgttccgacggaagccgcagccttgacgacgaggactgcggcccaaaccacgaatgtttccac

SEQ ID NO: 187423 - DNA, 475 bp, Arabidopsis thaliana landsberg
agagcggtaagacatcctgatgcgatgaagtcagtgttcaacgccgtggattctataagcaaagagctcgctgcgatcattcagtctaaagacgagacctcagttacagaaaaagaagagagaataaaagaactcatggagatgaaccaaggtctgctcctgtcaatgggggttagccacagctcaatcgaggctgtgattctaaccacggtcaagcacaagcttgtctccaaacttacaggagctggtggcggcggctgcgtcctcactctattaccaaccggtaaactttgtcaggaactttcaatcatcctttttgtcaatttcggttcttgattcttaaattaacccctctctgcaaaacaaactcgtttcagggacggtggtggacaaagtggtggaggagctcgagtccagcggttttcagtgtttcacggcattgattggtggtaacggagctcagatttgctattga

SEQ ID NO: 187424 - DNA, 1289 bp, Arabidopsis thaliana landsberg
aaactgtggctgacagcagcaggttacctccaaaaggaaagaagaagacatctcccagaaaagtcacagtgttgcggtcaagcaaccggattagggacagtcccgtcatgtccaacagaagagagagtcggcctaccattccggtacagcagcggcaaacagctgttagagggtcgactaaagttcatgttgttaggcctggaaaatgggagaagatacctccaaatccaccaccatcttttattggtccgtttgacccgtttgttgttccaagtccagagagagtgaaatgttttcttaaaaaaatggaacggagagtgtaattacaggccctatatattcagaataacttatttgttatcgcaactaacttgctggtatatggtaccatgtagatcttatgctctggttgatggcgttgtaatggagaatactgaatttctaactatttacgaggcacaaacactactagatgaatcagtaagttatacatgcaatctgtgttgtttcaaataaaactgtgtgctcactgcttctttagtaggcctaccaatattaatggtgtgtgctaataaaaaaactgacttccacaaggaccagatctgttagtgaggttcatccagatgcagctggataaaaagaagctgttgcgttttgattttctactgtcacgtttcttgtcatagctacgacgccagtacaacaaattttgtgcagcttcagataagagtgctttttacttccccacgcttacaagagtcccattcatggtgcagccgaaatggtttgatgaggttgatgtcatctactgccgaatgcaggtcgagaggcagcatagggttgggcttgtcatcaatttgaagaaatgggaagtcattgtattagactgcaagagggaagtattgaacgacgagcatgtggcgaagtacatagaacacataataatcatgctcctgtaccttattcgaaagcatggtgtaaacgggagaatgctaacacagaggctcgatcctatgacaatgagtagacccaacttacagttcaatgtttcgtcattaggtatgtttgtcttccatgattgagttttgctaagtgtttcatatttgactatatgacatatatatttcacgtgtgtttttcaggccttgttggaattatgtgtgtgatcttacttgagctacattcagttaacgccatggactattgtgctaaactagacgaagagaagatgcgaggggcagctaaacagtacgttatcaaaatgttcaatgccttgtctccagaaacac

SEQ ID NO: 187425 - DNA, 592 bp, Arabidopsis thaliana landsberg
gttgcagaaggggaccttcctattgttgcctcgcaagggtgagttgtcataattttcctgaatatcatggtaacggattagtgatccatttatgagcttctcttcttaaccttataggcgggagattgaagtttacaaaaatcttgatccagccatccgtgtggtgattttaaaagcgttatgtgatattcgtgttgaggtattgttgctactgtatgacgatctattatccaaatcttgataccatctgtattgttttatcctctaaaactttttgttatttgtgaaacgcactagagttgaaactgaattttcattatgttgtatatctgtattgatgtatatagggtaccatgtatatatgtttacagtttatgatgtccattattaagctctggagctttctgatgcgatgctaatgactgacttgaaacaaagtggttttaacacttatagttttgattggttttgtgtatttcttacagcaagaggatatcaggagctacattgacaactctcttaaaactggtgttcacctgtcagtttttcgcaaagatcgtgttgggggtgattcacatggagttaatttttg

SEQ ID NO: 187426 - DNA, 581 bp, Arabidopsis thaliana landsberg
atgattccaagtaacatattccacgtgaactttgactttgacaccgaattgatcaattttaaaaacaagatgcagtttatatgcgagagagacaaagatatttgtaagtactgttatgttgtctagtgaagagtactttgtttataaaaacaatgtttggttttattcacattgtcattttattatttggaccattttcgtcttgcttagcatcccgtgcatgtctcatctaaatcctcactattaagacattttaacgcacactacatgaatattataagtttttcctttctatttctgctggtgtcatacgtactgttcatatagacatcaataagtttcttgtacaaacaactagactatgcaaaattataagagctggattgtatattgttaaaactgaggcatgtatgagttgtacgcttaaaagtgaaatattttttcggtcgcaggttatatactagaatgcagttagattttaactaagaaataaaattttgaccaaagcatttacagtataatgcatgatttatgttactattgctgctgtctcattttcagattttaaaaatcagatctaa

SEQ ID NO: 187427 - DNA, 245 bp, Arabidopsis thaliana landsberg
atggaaactggcaacgttgtgaatgcacaacctgaattatcaggcataagtaagaaattttgacttttttattttatcttattgaacacgtgttttggttataatgttttggtttttgttcggcagttgatagatccaagagctatatgtacgagcagttatggaaactctgtgcgggacctttgtgtgatattccaaaatttggagaaaaggtttattactttcctcaaggcaatatagagctt

SEQ ID NO: 187428 - DNA, 2976 bp, Arabidopsis thaliana landsberg
atggccgatcccgcagctgaatctattgatgcaagttcgtcgcggtttgggagagtcgtatgttataaccaaacggcaatgcatggaagcaacaccatttcagccgcagctcctttctttatgacgcaactgtctgtcgctaatcttacctaccgcatactctactattttcttaagcctctatgtcttcctcctttcgtcgctcaaatacttgtgagtagtcaatcttgaaaacatatttaactaaccattatcaatctttaaactgttttttttcattacttattacccacaactattgcaaacctatgtttccttttttttctttgttagctatgtcctaaagagtcttcatcttcaaattcttgattaaatttttgctaacaattaacttcattgttctaacgaaagtttagctttttgcttcttttttttttcgaaaacggtgattttaagataaaaccaaaatgataaaaaatttaagatttgtccacttgcaacatacgatttatattattggatctttttcaaattaatctcgtacataatttataatatgatcctataataattgtaatgattattttgtttacagtgcggattactgttcagcccgactgtgctcggcaataacgaagtggtccttaaacttatattcccttataaatatacaatgcttcttgagacattcgcaaacttagctctcgtttacaacgttttcctcctcggtctcggcttggacttgaggatgataaagatcaaagacatcaaaccagtgatcatagccattgttggcctccttgcggctttacttgccggtgctggcttatactaccttcccagtaacggagaggccgacaaaatcctagcaggttgtatctactggtcgatcgcatttggctgtacaaatttccctgatcttgctaggattcttgcggatctcaagctcttgcgtacggatatgggacataccgcaatgtgtgcagccgttgttactgatttgtgcacttggattctcttcatttttggaatggcgattttttccaaatctggtaactaaatatggttgttcccttgtgttatttttcctcacacacgcatagttactgaattatagtactaacgaaaaccatatttaatttgttaggtgtacgcaacgaaatgttgccatactcattagcatcaaccatagcttttgtccttctctgctactttgtgatccaacctggagtggcttggatcttcaacaacaccgtcgaaggaggtcaagtgggagacactcacgtatggtacactctcgctggagtcattatttgcagcttaatcaccgaagtatgtggggttcactcaattaccggagcattcttgttcggtctatcgatccctcatgaccacatcattcgaaaaatgatcgaagagaagctccacgatttcctctcgggaatgctaatgcctcttttctacatcatctgcggtttaagagctgatattggttacatgaacaggaccgtgagcgttggaatgatggcggttgtgacttctgcgtcggttatggtgaagattttgtcaacgatgttttgctccattttcttgcgtatacctttgcgtgatggtttagccattggtgcacttatgaataccaagggaacaatggcactagtcattctcaatgctggacgagacaccaaggcattggacgttattatgtacactcatctgacgttggcgtttctagtgatgtcaatggtggtgcagccactattagccattgcttacaaaccaaagaagaagttgattttctataaaaaccgaaccattcaaaaacacaaaggagagtcagagctttgtgtattgacatgcgtccatgtcctccctaacgtctctggcataaccaatctattacaactctctaacccgaccaagaaatctcctcttaacgtttttgctatccacctagtcgagctaacgggtcgcaccacggcttcgttgctcattatgaacgatgaggccaaaccgaaagctaactttgctgaccgagttagagcggaatctgaccagatcgctgagatgttcacagctctcgaagtgaacaacgacggggtaatggttcagaccattaccgcggtttcaccttacgcaacgatggacgaagatatttgtttgttggccgaggataaacaagcctgcttcattttattgccttaccacaagaatatgacgtcagacggtcggttaaatgaaggtaacgcagtgcacgctgaaatcaaccaaaacgttatgagccacgcgccttgttcggttgggattttggttgaccgtggcatgacgactgtccggtttgaatcttttatgttccaaggcgaaaccacaaagaaagaaatcgccatgctattcctaggaggtcgagacgacagagaggctttggcttacgcttggaggatggtgggacaagaaatggttcaactcacggtcgttagattcgtcccaagccaggaagctttagtctcagccggggaagccgcggacgagtacgagaaagataaacatgtcgatgaagagtccatctacgagtttaacttcaagactatgaatgatccatcagtgacttatgtagagaaagtggttaagaatggccaagaaacgatcacagcgattttagaactggaagataacaattcttacgatctttacattgtgggaagaggatatcaagtagaaacacctgtgacctcagggttgacagattggaatagtactccggatttagggattataggcgatacattaatttcatcaaacttcacaatgcaagcttcggttcttgtggtccaacaatactcttctgctaacagacaaaccgcagaaaacaacaatcaagaacctgtccaaggtaaagccaagaccgatcatgaggctacgccttttatggaagacgaggatgatgaagtagaacatcagtacagtatgcgcagatga

SEQ ID NO: 187429 - DNA, 69 bp, Arabidopsis thaliana landsberg
atgaatgaaaaagatcaagaagcggaacccagtgtggtagtgagtagtgtaatgttgcggtctgatgcg

SEQ ID NO: 187430 - DNA, 551 bp, Arabidopsis thaliana landsberg
atgattcacccacccccgccagtggagagacactcgtttcagttctgacttcctttctcgcgatggtttccttccatcttgtggaagtgcttaactccgccggttaccctacgccccctttgtacacggtgcagttgtatgaggagcatcgggtacctcgttgtcgggtctggctgactttggaggctcatccccttcagccgggttggcgttctcttgattctgagacgattggactcaggacggacgacactgttgaagcagcagccatgaagactctgacgactttctgtggctaccatcctctggagatggtgatgcaccccttgggactcttccctgctgagaagaaggatgatcccatgtggtgtaaccgcgtgagccatgtgaaggatgtgtgggcgatgtatcctgacttggttgggagggtcactgttcagtgcatgagtgcgctgtaccgccttcaggcccttcagagcgatgccatggcactccttgctaacaccgctcaaactgccaagctcactctcgatagtcgagaagattttgtg

SEQ ID NO: 187431 - DNA, 631 bp, Arabidopsis thaliana landsberg
atgcaaccaaacattggtggtccttttgtaaatgacgtcgttgaaggttggctacctgaaaatgggaccaatcaaacccatttgtttgatgcatcggcccattctaaccaactcaggtactataattgtttttttttctttgatcaagaagatttgtaaacttttcacatttttttataatcttgatcaagaaaattcagtaaatttttactttaaagaaatgtaaaattggcagagaattatcatcggcaatgtatgaaccattgttgcaaggaagtagctcaagctcgaaccaaaacaacatgagtgaatgccacgtgacgaaccacaatggtgaaatgttccctgagtgggctcaggcgtattcatcctcggccttattcgcttctatgcagcaacaggtttttttttggtctttttctttgtttttaataacttaagttaaaaatgttgacttttttggtcaatgtgccagcatgaaggtgtgggtcccagtatagaagagatgatgccagctcagcagagtgatattccggcagtgacggcggagacacaagttaatcatggagtctccgactatgaaacaaaggttcctcacctcagtagccaatcatgtactgcttatcgatga

SEQ ID NO: 187432 - DNA, 1673 bp, Arabidopsis thaliana landsberg
ttagaggatatgtgactggaagtactgacacatctttatggacggtgtacaataaaggtgttcggaactactgtgggaatgagctctcagatggtacagtttctttattgccatttattagttgtcttcttctttaagtgcatcttagaagatcactgatatgctgattactaaattatgcaggattagttaaaaaccagaagcttccagctaatatacttacaccaacaactaaggctgcggatcatgatgtgcccatctctccaaatgaggtctaataaccctgagacagtaaataaatgtagaaactatagaaaagtttttgagtcatttgtttgctcttcttgtgatcttagctgtaagacaagaatatctaagccacaattgtgtagttctgtgtttcttctaattctccagatgattcatgcagatagttgaaggtggattcatgactcaagctgaatttgatgaagcaagtatgaaagctttgagcttgtttgagtttgggcaggttagttacaactcctccgtctaaagccatagacttttgcgattttcataatctttaaattgcagaccacaagaaatcagttttttgatatatttttgctggtttctatattcaaatgttgtgctttgttggaaggtctaatagattttaatatatcatgcttgcttcagggggtggccaagaaacatggactgatattggtggacacaaagtatgagtttggaagaagtagtgatggctcaatcttattgattgatgaggtctgttatcttttctcttcgtttccatgtctgtctctctttgaatgcaaagttgaacacatatctgcactactgccaaaatcactgattagaatcatcatccacttgttcacattgttcatagattcatacacccgattccagcagatactggcttgcgggttcatatgaagagcgcttccaaaaaggcctggagcctgaaaatgttgataaggttagtgattttgcctgttttttctctcagtcaggtttcattggtttgcagtactttgttcactcacatgttctcgtttttttaatccaaataggagttcctaagattgtggttcaaagagaactgcaatccgtatgaggacgaggtatgcttacatcttcacaatgtaatttccatttttcctgctctatctgagaacccctgctaaaattcgtggtgtctcgaacgtcggtaattgtcaggtcctgcctgctgctccagcagaactcgtgactgaattagcttggcggtaatgtattttgatctgtaaactttataataggattgttctagttcatgttttcgatatggaaagaaacattgtgtgtacatgctttaaggctctgtgagatcagagattcgctggtctacgttagttttcgctatagtcttggtattgaaaactgatgcaagaaaccgtgatggcaggtacattttcttgtatgaaactatcactggatcaagaattgacattattccgactcaggtatgatcctgatcaagcccaaaatatctactttatcaccctcagtttatcggagtttcaagtgtattgaactctagctttgttgacaggaaccaatacatgaccgaatctcaaggaacacaagccaagcactttcatctctccgtcaactttgatctttaa

SEQ ID NO: 187433 - DNA, 295 bp, Arabidopsis thaliana landsberg
atggtgaagagaaatcgagatttacctctgaagattcgtggtgaagaagttgttctcttgaggaaggaggagaaacgacgaggaagaagaagaagaaggagaagaatgttccagtttatagaaagagtttcggttaaaaaaacgcaaagggtaaaaacggaaatttgttggaaagattattgaaatgacgataatgtccttgtacgagctagcccacgtttttccatagagtctatgcacgacgaactcattactcactcactagccgccgtccgccgacactgccgccgtgtga

SEQ ID NO: 187434 - DNA, 281 bp, Arabidopsis thaliana landsberg
atgaaatcagatagatctgaagaagacgaacctaagaagaactgcaaaccaatcgaagcgaagaacagtaaacgccgccatgaaagaccaccagttgctgagttctgtctcatctctctctgtcgatatgacttttctgcttgtaagcaagaacggatcgatctttactgctgcagagaacaaattcttctggtggaacaacttttgatgttgaaattagaaaaagggaaaagaacaattcgaccacccagattttctttacaggattatatgccttgtag

SEQ ID NO: 187435 - DNA, 463 bp, Arabidopsis thaliana landsberg
atggcttgtagctttatcaaggaaatcgccggagaggccggggtggccccggccgccgtgctgcgttacttcaacaaagagcaactcctcaccgaggtcctgcgcgactgggaccggcaccaggggttcgttgatggcgcggggcccggcctcgccttctttcgtgctctgcgcgagctcatggagtaccacatcgcacatcgcgatcaccttgagctgtacctgacctttgccaccgaggcctcggacgcccggcatccggcccacgacttcatgtacatgcgatacggacgctcgctggcaaaaatgcgccgtcggctgacggaagctatcgacctcggcgaggtgtcgttcatggacgaggcaaccgtcacctacgagatcgaatgcctacacgccatcctcgacggcgtcgaaatgcagtggcttctcaatcccgatgtcgacctcgtgggagtcgttg

SEQ ID NO: 187436 - DNA, 102 bp, Arabidopsis thaliana landsberg
acagtacagatgttatctatattgcaatcaattatatcttccatgagaggacgaaatatattgagattgactgccataccgtgcgtgacaagttggatgatg

SEQ ID NO: 187437 - DNA, 2236 bp, Arabidopsis thaliana landsberg
atgccaaaacgccaccgtctcctggctccggtaatttatgcgtgaccatctcatttgctccggtatacaatttttgatctgctttctcttgtctacagaaaagtttgttgttttatcgtataatatattggcggattaccttgcaaatgatcactggagaagtctttactttcacataccgaggaatatgttgagttgggcatggagaaagagcaaattagtgttcgagcttagcctatggtctgcagatataatgtgccttcaggttatagtttctgctatatcttcttggtaattgcttgtatgagggactaaggagacaaaactttcttgctttactatttttttatcatatgtatacagaatgtatcttccatatgtatagtaatctaaaattattttgtatatgtcaggaagttgataaatttcaggacttagaggaggagatgaagcaccggggatatagtgctatttggaaggtaggtttgttgaaaacttttagttgtcttgagtttgtattctctacggactctcttggagtaaagattaaatggtatgcatcataagaactaggcttcaaatgtggggttaactctattttataaaactgtagatgcggactggtaatgctgttgacggatgtgcaatattttggcgatccaataggtttgattcccttgctcttccttgtgtggatcagtctggaatcttgtttaggatttcattgttatcatattagattcaagttggttcacgaggaaagcatccagttcaatcaacttggtctccgagataacgttgctcaaatatgtgtgcttgaggtaatatggataccttatgttgatagtgacttatatacatttgcctctttgccctaaattaaatttgctctgtgtagacattgttgacttcacatacaaaagaaaatgagacccctccacctgaaaggtaacttaaaagtatctgtaaatgttactatcatatcattttatgggtggataatttcactaggaagtggccgattttcttcagatttcagtggttttctgtatggactatactttgtgggtgggttgaagtgaattaccaatttcttttacagctctgctggttcccatcgagttgtcatttgtaacattcacgtgctttttaatcctaaaagaggagactttaaacttggtcaggtactttcctttaatgccatattctagtttgtagaaatcttttgccaaacgacagttttactctctggtttaactctgtctatacgctatgaacatgtataagtgttaggtgtttgagataaaacttttgaaaccaaacgcttcgccccttgcttaacttggtttctttaactgtttccatttatcatctatgtatttatctctgttacgtaggtcagaacactcttagataaagctcatgctgtttcaaaactctgggatgatgcgcctattgttctttgtggggatttcaattgtacaccaaaggtaggacaatcttaccttaaccagtttgtataccccaaaaaacttgttttgtgacatggtcataacattcttccacctggttgcagagtcctttgtacaactttatttcagaccggaaggtaaagcttcattgttaggaaagtccttcacctattcgcaacattatatatatggttcacattgtgtcttgtgctgctctctgcagttggatttgtctggtttggccagagacaaagtttcggggcaagtttctgctgagtttcgtccaccaaggccagaaaattatacaacgaggtagagcaaactcaccaagttcttcgacatcattaagtatatggttatgcaacttaacacctccatgtctaccctagaatatcgggttctactctgcttttgcaattgtcagcatggttgataggcctcctcaattttccaggtatcagtccgccaacaaatctccacaaggtcaagttcaaccaccaaatttgatcacaaatgctcatatggagaataactccaacatagatgttggaacggccccctccgagaagacatctgagcttccatgtggtgatacaattcttgctggtcacgaagccacctccagctctgaccaagtattaccatgcgagaatatggcctcagattgtcagtttggaatagaaaacagaaaacctgatgattccgggaatctctcgacagctgaagatctttcttcactaaccatatcagatacagaaccttaa

SEQ ID NO: 187438 - DNA, 1699 bp, Arabidopsis thaliana landsberg
atggaagaagcagaaaagtatcctaccacttcgacagtatccactggatatacattgtcacagccaaacggtagtcttgcatctcctggtggtcttggtaaggctacacattttgacaaaccatcaaagctttatcttcaggcttcctgacagtttcttcacccttttgtttctgcagcgaataaagcttctgtggctcatcagtggcctagtagtgaagttgctactgctaacactagtggaagccatttcaaattggacagacctcagatggtacttaacggtgcttctcaagggactcgtaagtcctcatatccccctttgttttgtatagatgcagttgtagtgataagattcttttagtctttgatttggaaattacaacacttttagtatgggtagggtattctggttggtttgctgttttgctttatacgataggacttgtaaattttagtgaaggtaatcataacagccaaatacagataattggctaatcactaggcttgtagctgagtaactagccctcatgcttagaataagtataccttttgtgaatactatcgttttcttttgcaaatcttactggtcatggtagcctttctttttggttaggtttctatcctgagttgctaaatttatatgttatgtttctagttctttaatagctttttcatagttgattttgagtttgtttcatatattacttgtttcagcagtttcttccgcgaattattatgctgaaccctggtctgcccaacttccatccaccatatctttcagtactgcaccagataagaaggttccaattcaaagttctgtcaggacagcagatccaagctttaggccattcaggcacggtacattcactggcacaaatcagccaatgcattacagtcaaacttcttcgttcggaggcaaccatactgaaattgctaagttaatccataaagttctgcaaccgcgggctaaacaatatcctttgtggaatccaccttcaagagagtatatgagcagggcaatggcatgccagatatgtgaagttaccatcaatgaaatggacactctactgatttgtgatgcctgtgaaaaagcataccacttgaaatgtctgcaaggaaacaatatgaaaggggttccaaaatctgaatggcattgctcaagatgtgtgcaagcattcaatgggaagccatttcctcctacatatgggcgtgcgactcgtgccgtagcgacgactacagcaaaaatgccttttagggcagccggagttctatcatcctcagcaaagaagattggaccgatggatataaaggctaatcaacaaaaaccaattgtatctacgttttcaagattgcaaaatactggcttggtttctggagcagcaactacatctcagtttgagtctgctagtgtaaatgcaaagacaactgcaagcgcagcaaagactactaacattggatcacagggctctaaggaaaatgttgcctgtggtgctaattctccagcaccggtatcgcttaccgagactccaaatcgtacaggaatcgcaagtacaatttctgtgataaacaatggcctcatttcaaaacctttaacaccagttggtactatgagcagcacttctccaatgcctcctgctaaccaacttcccgtgaatgcaaccatcataaacaagtccgagtacaccaataactgctag

SEQ ID NO: 187439 - DNA, 3792 bp, Arabidopsis thaliana landsberg
atgcagacgtgtctttattcgggggagcatggaattcttctcattgtagatcgctgcttgacattgtttgacaatccactggtccactctcttcacacaacttacaatgagctcaaggtaggttaatgaaactgttaagcttgagctatgattgttatcagcttcttgcatatccacatatacatcaataaattccttcattcgttgaacatatgtagttacagaaagaatgcaagaaccagagtaagaaaccgatttctggaaaagataattcaaagaatctatacaggtatcgtatcttcgtctgtagagatttaatattttgaattttctcatatagcttaaaaatgggtgtgtttggcattctaaatcaatgtcacaaaggagacaagcggtaagaaccaccaaaccccatcgacgaagatggtctcctggaaggtaactgtcctaaaacagagattagcatgtttcagaagtttttgtgagaaccttactgtcctaaaacagacaatttattttgccacatgttgtagatttggcacgtaagagacgtagagaacatacttgttggagcatcaaatgatttcctccaaagaaattgattagattgggaagactagtgtctcgcggctgaataggtaagcatgcttggagcataacggctagcggcaatgtccaactgccattaggaacaacctgagagacattacccatttgagccagtttgatcaataagatgactagtcttcttaacgtcgaagcttgatcagcctcttccacacccagcttccagaactctgaaaatctgcatcgacctctttgatagcgtgatatgtgtgcatgcttacattcatatgtgcatacattcatgcattcatacattcatacatccatacattcatacatccatgcattcataaatacatacatccatacattcataaatacatacatccatacattcataaatacaggcatgcttacatttctgtatgaatctatgcatatttgctttcttgatacattgattgcttatttacttacattgtttacttgctttcttctttgcttcttttacttatttgatttcttaactactagcttgcttgtttttttctctctgtttattacatctttaacttgtttacttcttgtttgtttctttgattatttggtcgttgttcactccttattgcttcatttcatttcttaatttgtgtgtttgcttccttcttactcccttcattgtttgctcagaccatacatgcaattaacttgtttacttatttttgccagcttctttatttcttttattatttggcattcgcttactcaactaattcattcatttgcttggctcttttacatgtttccttctttggtttgtttcttttcttctgtcgttgttttcttacatgcttacttggcttcttttattttttgtttactcacctcattgttaattaatttatttccttctatttagttctatgcttctttcattgggtataaaagattaattttgaatatatataaaatttacgataagataattttgacaatatgcaaaatcgaaacactaataaatatttgaataaccgaaccaaacccgaaatatattataattatattgacttgatgtagcccaaaattatttttataaattcaaaaatatcaagtactataaatagatcaaaattactaaaataccaaaaataaccaacaatggaaaaattaaacaaaattttatcaaatctaaccaattttttcattatctcgggtacccgaaccgaagtagccaaaaccaaacgtggcacgcatatatacatgtatggagccaccaggcctaaactataaaacccaaaaaactagaatcgaacctgaactagtacccgaacgcctgaactagtactcgaacgcctaggcctaacaatgtatacgtaaaaatataaaactttatcacatttcccgattttcattaattgtataataattcattatataggggtgtaacactttagctagagacattccaaaaataagtcactcgggattagaagtgggcgtttggatacccatttgttcgggtattttaagattttgggtttagatcggattctagtcggatatttcagatgagattcggattacccaaagtttccaaaaatcaaatttttataatcaaatatatccaaactactcgaaaatacacaaaatatctaaaaactttggaacattttttactcaaatttacttaaaagtagattaaatacctaaaattacttaaaaatatctgaaaatctgcatattttgatgcttagattattacaaatgtaaatataaataatattttgagagacaatgctatgatgatgatgatgaatttgagagacaatactatgatgctgagcggcctgatcacgtaatggagacaaatgatgaatgggatatgtatgagcaaaccgagagagcatcaagcagaaaagcagttctccaaggataaacctccttacatttggatgctccagatctttaatagcggtgaagagttaaaagatcaacttctgagacatgttttgaagatgaattatgatgtccaggtgtgtagatgggatgcgactaatttgcagctatatgcagtaacgagaactgcaactggaagatatactgctctgcacaaaagcgtacagggaaatggaaagtgtagacctatagggacgagcaccaccactctataagcgggaaagcaagaatgttgaaacaaggggtctgtaacgctcccgaatcaaatcataaatcatcaagtaaacttagttaagttcatatttacgtagcctagccatgcactagttcattccattccttaatgatattaactatcaagttcgtcaaatgcccatattattttaagattcaagttcataagccgaattccgattacttaagtttaagtgagtaagcatgcatataatctaaagactagctctagaaaacatgcaaacaaacacacaattcgaccacaacgcacagtttcggtaagtttcttagtcgcaggcataatctcttgatcacgatcgatgacttcttactcggacgagttctctcgaccacaagcgatgattccccaaacacggaaacactttcctagaccacgggcaagatttactgaattcgggcaagttttcttggtttcggacgagttatcggtcagacaaccttacagtctctctcgccttcaaaaatgaaaatgggctgagaatagcatcattttatagtccgcccaaggtcggccatgtagcaccgcccgctgccacatgtctagacagttgccgcacccacatgcgacaggtgtctcgggcgatggcgtggcgacaggtgtctacgggtgtcattccattgccccatcagcttcagctccaagactcagccaacttcggctccaaaactaagccgactttggctccaagattggtgacttgagccgcaaggcaccgcaagtgaggtgtccacacatgtcggttctccacccggcagggcaaacttctctcgcagcatgcccaacttttcccatctttgcccatttgtgcccattcttgcccatctttgccttttgacggtttagcactttttgggcacatgcggtcaattggccatgcattaaggcaactttttctcattcggtcctttggtagacccgatgcccttatgcgggtgactacattctcccctccttaatagaattcgtcctcgaattctaactcggtcatttctgacccccatgaattcttttga

SEQ ID NO: 187440 - DNA, 809 bp, Arabidopsis thaliana landsberg
aatcttgatgatagtgttgatgatgagaaactcaaggagatgttctctgagtatggaaatgtgacatcctccaaggtaataattaattaaaaactcatacatatattcataaatatatatgttgttgatgttacgttgtctttgacacaatcctttaactaatgtaggttatgcttaatccacaaggaatgagcagaggatttggttttgttgcttattccaatcctgaagaagctttaagagccgtgagttactaaaactataatatattcttcttttattgttcgtctcttttgatatctgagagattgttacatatgagacaatgcagctgagtgaaatgaatgggaagatgatcggaagaaatcctctatacatagctcttgcgcagcgcaaagaagatagacgagcacacttacaggttttttaaaaactcttttaacatatttaaaaaaaatgggtttgttaaagctatatgtgtgactaagtacataagtttgcaattttttcaggcgttgttttcacagattagagcaccagggccaatgtcagggttccatcacccgccaggtggaccaatgcccggtctacctcaacacatgtacgtaggccaaaacggagcaagtatggtcccgtcccagcccattggatatggattccagcctcagttcatgcccgggatgcgtccaggttctggcccgggcaacttcatcgtgccttatccgcttcaaagacaacctcagaccggtcctcgtatgggattcaggcgtggtgctactaacatgcaacaacacatccaacaacaacaa

SEQ ID NO: 187441 - DNA, 397 bp, Arabidopsis thaliana landsberg
atgcctgcgcttctcgcggaggcttcattttttacaaatccttcggaagagcagcgattgaaacaacccaaacataatcagaatgaggccattgcttataccgaggccattatcgcgttttttgcgaagcctgtcgcgcccattgtcgctaaaaactcgaaagtgccggtgatccccgcattcaaagtttttcaagaggccgaacgcatgactcccattgcaaaacgttggcgccaggacttcgacgagggaaaagtatttatgacgaaacgcgatacggcattgctgcgcgaatcatacgagcttttcacccgttcagcccgttcctttcccgactcctggctggccggacaatgccatcaaaaccgcgccgtacttttgcgcatattaggaaagg

SEQ ID NO: 187442 - DNA, 107 bp, Arabidopsis thaliana landsberg
atgtccataatcgttgatgcatacaaagaattctattgcaataaggaagcgtcacgtgaacgtaacaacggggttaataaagtacccggtctattacatcggtttaa

SEQ ID NO: 187443 - DNA, 329 bp, Arabidopsis thaliana landsberg
atgaatgcctcgccccggcgccgcggcgccggcatccccgccgccgtcacgccggtcgctttcgctcgggccatggtggcggcgtaccggcgctacgggcgcgatccggcgccagcgctggagcgggcacagatcacgccaaggctgctgcaatcgccggacggccggatgacggcgcgccagatggagctgctgtcggccgcggccatgcaggagctcgacgacgaggggctgggcgccttctcgcgccgcctgccctggggcagctacggcatgctcgcgcgcgcctcgctcagcgcgcccgacctcggccaaacgctgcgacgctg

SEQ ID NO: 187444 - DNA, 453 bp, Arabidopsis thaliana landsberg
atgtggaaaaacttccatctttgcttcccatcaaatctcaccaagccctcttcatctccgtccggtgccacctccgacgatcccaaccgtccatccattcttctcatcaacaactttaacctcctatatgacgactcctccgccgcccaccgccgcctatccaagcctcttatccacgacgttgaaccctcttccaccttcaccgcctccacctccaccgcagctaactcttcttcctcctctgcctcttatgatgattccgataattacggttttgcccctgacgacgactctccccctcctgacttaaccgccgttttagcctcccgccgcttcttcttctcttctcctggctgctcaaactcaatcactgactcgccagatctccgctgccgggataattacgatactgccactaggcttcttaccggaggaaccgccgtgaaacactac

SEQ ID NO: 187445 - DNA, 236 bp, Arabidopsis thaliana landsberg
gcatccacatgtcgcacgcgaacatcgcagcagcgctgctggcatgcgacgacagctgcttcagcctggagcagttgcaggccctggcccatgcggtgcccacaccacaggaggtggatgatgtcgaagcatacctggcgggccgtcacccgcagcacccgggcaccaacgaccggtcgctgctgggccccgccgaggcgtacctgtcccacgtgctgcacatcccgcggctatag

SEQ ID NO: 187446 - DNA, 295 bp, Arabidopsis thaliana landsberg
atgcacttgatgcacccatctacaactgcaagagacagtcccacagcgtctgctttgacaaaccgtgctaaacgtccatcagataaaaccgaccattttcaggtcaacaatttcaagcccttgtgatactcatgagattgtgtgtcctatctgctggttctgaaatgtttttaatctctccagctgtaaaccctgtctcatgagcaatcactcgctagccggctgcaacccactccagcccctgagactgcttcccatcttgtagggcttcctgcggttcctgtctttgcctgtg

SEQ ID NO: 187447 - DNA, 342 bp, Arabidopsis thaliana landsberg
gaattggttaatgattttccagaggcagtaataactagattctcgagagtgttacctcgttgtttgctattttcccttgaatccgttgaaatggaaagcccgattacgaagaaagcaacggaactgaaactggtcagatactttctagagaactcagcaacacttaagaagtttgttctacgtctgaatcatgagtctactggagagaaacacgagcctggtgtcttggaacaactcattgaatctccaagacgctctagtttgtgtcaattagaagttcttgcagtgcctccaaatccggaaccgtggtggatttatgtaaaaccccagaggtttctttag

SEQ ID NO: 187448 - DNA, 300 bp, Arabidopsis thaliana landsberg
atcttaaggttacgatcaaagaatcaacactcattttcccatctgaagaaaccagcgagagaaaatccatgttcttatccaacgtcgaccaaattctcaactttgacgttcaaacagttcatttcttccgacctaacaaggagtttccaccggagatggtctcggagaagctgagaaaggcgttggtgaaactcatggacgcttatgagttcttggccgggagactccgcgtggatcctaactctggacggcttgatgttgactgtaacggagctggagctggctttgtgacggcggcga

SEQ ID NO: 187449 - DNA, 637 bp, Arabidopsis thaliana landsberg
acgacggcgagcagaagatcggagttgaaagagttaccgccgagggatgtggtactggaggagataaaggcgagagacagcggtaccaattggtttgatggattagggttaatccattcgtcgacaacttcgtcactgggaccaacgattctaaaacccaatgagaacgttggtcgatgagggtagcggagcagctaggcttcatggatctaggcgcaggtgacaggttaagctcgagatcaaccattttcgcagatttagctttcaagcatctcgccaatagcacaacgggataggtttcatcaagagtatccagcagattagaggaccaaatgggagaagaggttctgggcagcctgaaaagtggatctctgaccaccaaaaccgaaagcaaaaaggaagcgctgtggtggtcgggagagtgacaaaaggggacaaagagtttgcgagatgcggaactgagacaagagaattggaggagcttaggtacatcccgacgccggcgagcaaaagctccaccggcgttggaaaatagattcatgaggatgtcttcgattttcgtgcttgggagagttcactgtttttttttttctcattttcttatagcttttctcagacgactgccactagattttaa

SEQ ID NO: 187450 - DNA, 241 bp, Arabidopsis thaliana landsberg
gactttggagagctttccagggctctttctccgaagcaaccaccgtatatcaaggtgagaagcttaagacctagtagctataggttttaatccttttattttttttcgctttcaagatctaaaaaggtcactttttccccatggttggtactcttaacatttcatttttttcttccagcggattttagagaactttcaagggttctttctttgtccgaagaaaccaacgtatattctttaa

SEQ ID NO: 187451 - DNA, 3548 bp, Arabidopsis thaliana landsberg
ttttgtaattaaagaatactttgggccaagccacgaaattaacgcgttgaccagctttgtctcacaatttggtatcatagaccggtcgtgtggctttgcgaggtcggtggcatgccttgtgatcggtatccgatagtattccttcaaaagggtgaaaaaaactgtttggcagatcggattaagttgatatttcttctagcgttatattgactcttctagctttctataaagtccaagatttctccttagcaagagtagctagttagaaacagcagtcatagatcagtcgcccatactcccacacgaggcagcataggagatttttagacaatgggcgaaaacccgatccaacaataatttggtgcaaagaaagaccttggaaaagaaaccaaacccatgaaacttcgaatatgtactaaaatgtggtttacttgtcttatggtctattttaccttaacttacaaaccatttctgactctaaaaatacttgaatatcttctcttagctttgatatcacaccaaacacttcctaatatataagaaacaatagccaaaatgggcgaaaatacgatgttattagaagagacactatgactagacggatgtttaggatcatgagggcatataaaatcattctattcatgtatcataaaattggatgtatatacgttttcagagaagttttatatcaaaatagctagtattggtgggtatttaatacaaggtatacaatagcatgccttttggcgggaggagagtgtcacaatttcttcataaattgagaaatgtgatgtttgtaaggcgttaataagggttttaaaatggtaagtaattataagaaacgagtggttacacggtttctatctacctctacttcattgaagataaaaacgaaagcattagttaattaacttcagacttagtttttttctggttaattaagcataaatatcaaaacaaattcaaatcataggctaatttataaattctagcaaatcaagatttggaattttagattacataggttttaaaggaatgggtgcaaatatatctcaatataatataaaagaagtatatttttaaaaataccatactattaagtttatttttcaaaaaattccaacactagtttatttttttaataatatcataaatttaggtatatatttgataaggcctgcctaattaggcgagtataaaaagtacatataagttatgtcaatgatatttgaattcaaaatagtaattcacaaagtaaaatattttatttcataatttcaatcttatacattccataactattaattttatcataataaataaaataaatttttatacatttcatcttattaatgatatctgaattctaaataatagcacacatatttttctaaatttcatttattaattattttaaaacctaatttcaatattttacattccttttgtcaatacaatttgactatctatttcatcataactaggatttaacctgcggtttatttggttcttatactaaatatttgaataaatttgatatcttaaacttataaatataaatttctaatgattagtgaagaatcgtaatatatgatttggatattattgatttcgtgattgaatatagtgttttcgtgactattttacaactactttacgtctattttccgactggttaactactatgttgcgactacttgttttgtccaaataagaatttggtcatcgattgttgggtttcttgtttattgtttgaatttagggttttttcttgtttgttgtatgaaatgctataaactatgaaaagacatacatataattatccaataaattcatatgactaggaatagtcttatataattatacgactatgatatgactaagagaatcataccctttgtacagtattataattgtccaatagtcgtaaaattgtcgtacactaatttacgactattttacgacaaatagatacatacccagggttcagtatttttaatcgcaaactagtcgtcatattgtcgtaaatctttaacgactatggaacgactacaagattcacatgctctgtacaatactattaatcgtcaagttgtcgtcaaatagtcgcccaataatacgactacagaatgactaatatatactttctgtattgttgtcgtacaatagtcgtaaatcaacgacaagtttacgaccacaacttaacggctatgtattaactactagaatcattagtagctgattagtcgtaaaatttaccattacgactacttagcgactacctctgtagtcggtaatcgcctgttttcttgtagtaattatgtttcaagccgagaatgttaacaaagcatacatctttgaccgaagctaccaaaaattttgactcggcacaaaaatcttactctccacttgaaggtaatctttcactgaatttgtccatataatcatttttcttggttaacactttacacaatcgtcgtatatgccttcttttttctttagtattgttcgaataacaaaattattctcacaattaaaggacatcgttggaaacaagtgtcattgtagttacccggtcattgactatagggacaaccgtggtaagaaattttgcgtcggagttatttccaattttggcataaagggaatatgccaaggggttataaggtcttgggaaaagacttataattggaaatactaagtaaaattctcttacttgactaagtcagttttggtcatggaattgggtaacgctgtgaccctgccatgcgggcgtacaatggttgaggacggcctaacttgtggcctagatgattcttggaatggtcgaatttagagaaatatttgaagcataaattccgaaaatcgaggcaaaagcgtaagaaaagtaatcatatgtcggagagagaaactccaccttatttacaggatcgacgcaatgattatatctctgccccaatcaaaagaaagatattgcccatggtataagttaccttccttgggcgatatcgaggcaatgatttcagttatgagctaatccatgggcaagttacctattttggacaaaacgaggtaatgatgagtttggccgcacaaacatcgagtcaatcatggagaaggagtgttgccatacgttgggcgacacaaacttcgacccaatcacaaggtggcgtgtcccatagggttggacgacgcaaactccaagccaatcggaggaaaggtgtcgttgtgggttttaagtcacccaagacgcgacatgtgtccatcatgggtcgaatctcctcctctataagtagaacaaaggctttggagctaaagagaaatcgtgagagagagagagatagattcaaaatcttcgtgaagtgacgaccgctcctgaagccgacggtagaggtggacgactgaattccaaacggtgtagcagtttccatgaaccatccgacgatcaacttccgaaggtagatgaagtcttcgcgatcaaccagaagttcccgatcgacgttgtcattccgctaagtcatcactctcatccgatccgcttaatcata

SEQ ID NO: 187452 - DNA, 256 bp, Arabidopsis thaliana landsberg
acctggcggaaatgttcgtccgggtcggggccagccgagtccgtgacctgtataccaacgccgagaagaacgcgccaagcatcatattgatcgacgaaatcaacgccatctgccgacaacgcggcaatggccagggcggatgcccgatgatcgtgaacaaaccttgcaccagctggtggctgaaatggaccgcttcgaaggcgacaatagcgttatcgtcatggccgcgaccaaccaggctgacatgcttgacccg

SEQ ID NO: 187453 - DNA, 520 bp, Arabidopsis thaliana landsberg
atggttacaatatatgatgatgactcgatgagtttccaacttgttaaagaaggtgaggaagactaatgaatccatttatttacaattatataaaagtacaccactttttgtaagaatcgaaaagtaaataactggcggtaaaatcggtcataagcctaaaaaaaagtttagatttagagctctacaaacattagggccaacatagacggacttgattgataaacgacaaatattaaaacaatggattttaaaagagattttgctatatgataaatgagggaacagcgaaaatatttggaaattcattccaaacttgtgaggacaaaacaggatcggaacggtatcttcattaatgtcaggataaggactaggacccctgatatgggcatattctagctttctttttatcttgtctgtagacaaagttatcatgttgatcgggggagttgtgtggcctatcgttcgttccgatataaaaggattttgtatgatccttaaagtcatccataaaatcgattga

SEQ ID NO: 187454 - DNA, 101 bp, Arabidopsis thaliana landsberg
  unsure (1)..(101): unsure at all n locations
acncttcagatcggaccgttgaccagcgacaagaaccatcctcctatttacaggcgtttgatatgggaagagtaccttgcagccaaagcaacacactttaa

SEQ ID NO: 187455 - DNA, 1089 bp, Arabidopsis thaliana landsberg
atgagttcccaattggctgctgctgagcaactctctgagtgtctctcaaaacaaatgacacatttgaaaatcgattcacctgtaaaaaagaatgtgaagcaggagttgttcgagacaattgggatcccttacgatgcttctttcagctcaccagatgcggtaaaagctaaaaatgcatcttcagcaaaaaacctattactctcttctatccccgcaagtataaatcaacagtcaagacaacgtcagtcatctgctatgaaaaattctgaccctgaaactgctaggaggagaagagaatcactagacagggtaatttttgtatgaaatctttgactcagtactagccctcacggtatatgcacatattctctagtatattaaactgtgaagaatttatatgcactcctttatttatggtgtatcctgacgtgtggctctactttttgtgatctatttacagaattgggctgcttttgagcctccaaaaacaactgtcaaaaggatgcttctgcaggagcaacagaagacgggtatgaaccaacagactgtcttgagtgagagactacggtctgcgaataatacacaagatcgatcactgcttcgcgtgaaagatcatgcatcacctgtagtctcctcgaataagggtgagctaagatatactgcagagtgcattaatttgatctcgaagaatgtttttgtgtttcatttgttttttatatctactatattgcttctctggtttgattgtgtaacactttgagcaggtattatggaatcattccaacaagacacatctgaagctcaatcaaccccattcaaaacgaggccacctatgccacaatctaacagtccctttaccatctctccaatctctgcgtcaaaaccaagtttcaattggtctggaaataagtctagcaatacaacttcttatgctgaggaatctgccccatcgcagattaaggatacaaggacagtttcacaaccagggggatcaagttttcttccgaaacgaccagtggcctcgactgtacttgaacagacagaaaagaaggctggagaattcaaattttccgaagctaaggccaatgc

SEQ ID NO: 187456 - DNA, 163 bp, Arabidopsis thaliana landsberg
atgaaggaaaaatatgcagcctgttttctcaatcctgtaacatgggatgacatgcggtgtatggattatcaatacaaggattttaaattgccgtatcatgccaagcttttcacttttattcgccggttaaattatccggatgatgaagtgtcaagaaatggaa

SEQ ID NO: 187457 - DNA, 124 bp, Arabidopsis thaliana landsberg
atggttggcgacggcagtagtactgccgccgaagaggataagctgatgggaattgttgacgaaaaccgccgtgagagtatggccgcatctaggacccggccaatcctcatcggtatcgtaaaag

SEQ ID NO: 187458 - DNA, 1783 bp, Arabidopsis thaliana landsberg
  unsure (1)..(1783): unsure at all n locations
atggagtctacagcggctgaacaagacgagagaaaaattgtatcggtagcatcgaacgctagccaggacatcaaaacggctgctgctgcatcgcggatcagtagccaaaacggcgcttctccatctccgtcgctcaactccaaggacttcatcgtctcagcagcagctaacatcgcttctcagccgttacagaactacgattcgaacgtttggggagtactcaccgcaatttcaagcaatgctcgcaaacgccggcaggtttgtttctctcttacaaaacccatattctttcgaattccaactttaattatgctcagtgttttggtattttggaactttaggtctgttatgcgattctcgttcaaattttgatttggattcgtgatcaatagggcataaatatacttttgacttctgatgagcattgcttaggacggctgccatgtcacgctagttatcaggtagaatcaaatgcaattagcgggaatcactgtaaggtattccgtaagccggtaacaggcggtgatggggatgatgtaactgtctttatggtagacacaaggttagtgaactctctcctgtttcaattgtgtggttcatcttttttttgcagttgtttatgtcttcggctctctttgattcagcacaaatggtacgtttctcaattgggaaaggttaacaaagaatggccctgaagtcagggttcaacacggtgacatcatatcgcttgctgttcctccagagcatggtaacataagttttctgtgcattagcattgtgaattcatatctcaccttttatcacttgtttaagttaaactgatttgttttgtgtgggttactatactgtttccagttttatgcccatttttctagatcaattaacatgttaacactagacatctgcattttttcagagaaggcatttgcatttgtataccgcgaagtacttggtaataatcctgcgctgtcctgcatgaacagaaaaagaaaagcaggtacgagtcacgaaggtcacacatttttttctttctgtcctaactttccatgtttatatataactaaagaatggcacgtctcagggctctttttcaccattataaagcatatgttttttgacttctgagttctgattagtgtttttgctcatgtgaagaggatactacttgtgaaattaagaggcagaagggcataggcatcagtggtcccaatggtccaatatctttggatgattttaagagcctccagcgttcaaacacagtatgttcatcattgatattagttttcattgttagatgtaagtgattgtatcaatcttgatgtcattctcaacttatgtgtcaacgaatcactgttgtatgcaggaactgaggaagcaattagaagcccaggtgcttaccattgacactctgcgtaatgagtcccgctcaattnnnnnnnnnnnnnnnnnnnnnagttgagtttttctttgaatccttgttgtggccagtggtggtttcgccatgttaaatgttgtttcaaacgattgagtgattgaaggattatttgagtatctctactgaaatatctttgcatttgcaggaaataaaacagataaaagaatccactgcaaaatcatttcataatgaactgattgagctacgtgatcaattagatacgaagcagaaggaactggcgcaggtcaacaaattatcagctgaacagaagaattccatagatgaacttggtgagagagtaagcgcttctttgcaaactctcagtgaagcaaatgaagtaattcaaag

SEQ ID NO: 187459 - DNA, 389 bp, Arabidopsis thaliana landsberg
atggcaggacccatcataagaagcggcgatctggtctccgtggatgcgacacaggcactcaaaggcgatttctatggtctcggctctaccgtaaccctctccgggccggctgaacatgatgcatatcttggaggaagcgcggtcacggtcaatggtcctgtatctgaggacctcgtggtcgcaggaggatccgtgcaggtccatagcgagatcgcagacgatctccgtgtgctcggcggtgaggtcacgttgtgcggtgaggtcaagggagatgtggtcattgttggcggcaccttcacggtactttccaccgctcatatcgatggcgacatactcttcttcggaggaacgctgatcgtggaaggtgatgtcgatggcaccatacacgg

SEQ ID NO: 187460 - DNA, 57 bp, Arabidopsis thaliana landsberg
atggccgtgcggaactttcctactaacatgagtgttctgaagggccaggatatagat

SEQ ID NO: 187461 - DNA, 167 bp, Arabidopsis thaliana landsberg
atatatatacggagcaacttattttgactgatcgtgctctactcaatcttgatctggctggctactcctttcctgtggttaaagctttttctgtgacaaattttcaatttgaagaagtcaaaattggatattacgagccaaaaaaaatatatgaaagtgaagcgtag

SEQ ID NO: 187462 - DNA, 504 bp, Arabidopsis thaliana landsberg
gagccggctacgcccattgccatcgccctgagcggattggacatcctggcgctgcttttcgcgctcgggatcatcgcctgcggcttggccgtcgtgccgacgcgcgatgccgtgctgcaacgtactcttgcacgcgcccagggttgggccacgctgctggtcacattggccagcttcggcatcttggtgtcgcgcacaatggagctcgatggcggtgttttggcgacgctgtggacggacatggcgttggcgctgaaggtcacccattacggtcacatctggctactgcgcgtaccggcgctggtggccctgtggatcgcctgtggcggggcttggcaccgacccggcgcgcgctggacgggttggctggcgctgatggcattggcgctcatcgtgctgacgcgctccgacaccggccaccccgccgaccacggtgatttcactttcgccgtctggatcgactggctacacgtgctggccgccggcgcatgggttggcagcctg

SEQ ID NO: 187463 - DNA, 422 bp, Arabidopsis thaliana landsberg
cggctggcttggaagcacgggcgaatcgtgtgaacgcggaccgtattttctggatgggctgctgccgttggcctgtcaactggactcggcgccgctgaaggcgaaggcgcagaagttcatcgactggacgctggaccacccgtggcccaatggcatgttcgggccgcgcagcatcaatgactggtggccgcggatggtcatgctcaaggtgctcacgcagtaccacgagctcactggcgatgcgcgggtgataccgctgatgacgaattattttgtccatcagctcggcgcgctgccggcacgaccgttgcgcgactggggccggtcgcgctggcaggacgaactgctctcggtgttgtggctttacgaccgcaccggcgacaagcgtctgctgcaactggccgcgttgctgcaccggcagg

SEQ ID NO: 187464 - DNA, 713 bp, Arabidopsis thaliana landsberg
atggagaatcatcgagtaacaacaaactccgacgagccaccaccggagtttgagttcggatcgttgactccaacttctccgtcgcaagactctttctcagagaattctcccgccgatcatctctttttcaacggccgtctcttgccacacgcattcccggcggcgagcagtatttatacaaagcggtcaatctcgagtacgaccagcgaatacacctcccggtgcaatagtacgaacagcagcagtagttttggtagtaacaacagctcaacttctcaatctccgagaacgagctattcaaccagtaacaagaacaacagccccattaatcaagagccactggatttgaagttgaagcctccaattagcagatgtgacaaaaccgtaaatacgatgagcagtagctcctactcgtcgccacaacacaagagaaggaaggcgatggagatggcgacaacgtctctgtacaggtcgtattcatcgcagcggtggcaatatataactccggtaccggtgagaatgagtggagggataagggtcggtggccggaagaagaaggcggtgagggtgaggaagaagacggaagagagaagggtgagtagggtgatgaagttgtggagaaaacttttgatggcggctatttttgtttgtagagagtgtcatgcattggagggagcttgagtgagacttgtgattttgtgacgtggttatga

SEQ ID NO: 187465 - DNA, 1279 bp, Arabidopsis thaliana landsberg
gcatttaccaacatcctcccatccaagtatgtatctatgcacatctttcttactccagctctttcactatcttcaagatctctaacttgttcatgtctgcgtgcatgtgcaggtcatcatcatgtaggaatgaccggggcattgaagcgtcagaggaggaggccggacacggtgcaggtggctgggtctaggttaccagattgctcacacgcgtgtggctcgtgttctccatgccgtcttgtgatggttagctttgtgtgtgcatccgtcgaagaggctgagacttgtccaatggcttataaatgcatgtgcaacaataagtcctaccctgtcccttgatcagcctcttctacacttattctatgcattcaaccgttttgttttccttttgcttctccgggacatgaccatgtgtacgtatacaatgcatctttaattagtttctttcttattattaataggaatcttaaacacagtttgatccgagattaattaatcagaaaatatatggatatcaaaaaatgaaagccactcacctatttgggctctctcgctgtattatggtccatgaggccgtatttaagacagcaacaacaaaagttgtagacagaattatatttaaaaggcaacaacaaaagtacgtatacgttgttaccaccaaactttggaggctcgctaataataaccacactacccatttgttacacaccctttattttcaaccatatcatctcaccttcgttaaatgttcccacaattagctcagtattttactatatacatacacacacattccctccacaggatcaaacaaacacacgagctttctcctctacaacaaaataaaataaaattaatggcttcttcacttatcacctccgcagtcattgtcgtggttttaagcctagtgcttggatctgtagagcaagtgagtggactacgtcacgttcccaagtcccctaagatcactgatgtcaaacaccctgactttcttgtaaccattgagcccaaaccaactattctcattcccggtgttggaaggttcttgcttcctcccaaatgcaagaagccgttctacccttacaatcctgtcaccggagctccacttactggtgggggaatcccatcatataatggtggacaaggggccggacctcacacccaactccctggtggcgatgatacgcttgtcccaaaccccggatttgaagagccaaccccgaccattggagctggcacaggaagcaacggccaagttccaccagtgccactaccctga

SEQ ID NO: 187466 - DNA, 1173 bp, Arabidopsis thaliana landsberg
tacactgatggatctgttaccctcaaagcttgtgctggtctaaatggtatgaggttaggtggcagtgtaataacagccgtttgtgcatttcctgatgcatcatccgtagcggtaattcagtgacccaactttgctttcgttagttcatgttgtgtttgtatgggtgacattgaacagaaattcctttagttacttgtgagagtggtgtgtgtacgtaatatgtgttgcaggtgaatgagaatccaccattctatgggatacctagccatgcaaaaccacttcttggcaagcctaagaatattctaaagctaaaaaatgtggtaagcataattggtgtatcctttttcttgtgaatctttcccaaataaactatgtgaggctatattaacattccattctttcttgtttgacaggttgacccagaagatctcacgtcgttttccgagcaagaagtgaaagaaattttggaggatgtacggttagaatgtgccaggttaagctctgagatcatcttcccatgagtccattgagcttttaaaagctagtaaattaagaaaataggcctctgggtcttgtcatgatgcaggtttggggttattaagtcgataaacatcttggaacacaagagcaaagatatcactgtttctgaaacaaatccattgttgaacttagaatcaactgattctaaagaaatgaatgtgtcagtgatcgaggagaaagatgaaggatccgagaaagcggaagatattgcagacaatgtagatcttgcagaggttgtcatgccagacagtttgacaggtgaagacaagttatgtgaaccgtgctcggatactgctgctgaaacaagcactcaagaaaatgaagatctacactccactgaacaagagcattgtgaaaagattgttgaagaaagtgcgcaggccgaggcagagaatccacaagaagtagcatcagtgcgtaccgtgaagacaagatgggatgctggcgacaagatagaagaagaacaagaagaagaccccgaggatgtatttgagacgggttgtatcttcattgagtacagaagaccagaagcgacatgtgatgcagcccattctttacacggaaggctatatgataaccggattgtgaaagcagaatatgtttctaaagagctttaccaaatccggttcccaa

SEQ ID NO: 187467 - DNA, 398 bp, Arabidopsis thaliana landsberg
aaggatactttcacacagtgatatgtaacactgaagagttcaagagcaccgcgattgggcatgacctgcactacattgcttgggactatcctccaaagcaacacccaaactctttatcaatgaaggatttcgacaagatggtcaaaagcaaagccccatttgctcgaaagttccacaagaacgatcctgtattagacaagatcgatagagagctcttaggccgcactcatcggttttcctcaggagcttggtgcattggtagctcggaaaatggcgctgatccgtgctctgtccacggggatgactctgttttgaaaccaggccctggtgctgagagattaaaggagcttgttcagacacttttatctgatgagttcagaataaaacaatgttcatga

SEQ ID NO: 187468 - DNA, 257 bp, Arabidopsis thaliana landsberg
ggggactttgggagaggcatctaaaggagaaagtgcttttgcagcttgtctggaagaatttgggggtggacctgatgatcctatcagtctttcaattggaggtctgtggtcttgctcatttgttgaatatgactctatttgctatgatttaacttatttgattcttattattttgagtgacaccagggcccgttatatccaaattcataaatgcacttcgagagcttgcctcttataaggagtttctttgctcacag

SEQ ID NO: 187469 - DNA, 283 bp, Arabidopsis thaliana landsberg
atggccaagaccatttcgtggatagttgtaataggagtgttaggtttagggattcgtgtttacggtaaagtgatggcggagcaatggaggatgcggaggaagctgacgatgcagggcgtgaagggtcctccgccgtcgctatttcgtggaaacgtgccggagatgcaaaaaatccagtcacaaataatgagtaactctaaacactactccggtgataatatcatcgcccatgactacacttcttctctctttccatatctcgaccactggcgaaaacaatacg

SEQ ID NO: 187470 - DNA, 236 bp, Arabidopsis thaliana landsberg
acatctacgtgctatatccagatagctacagccgttacggatggatgctgaaattgaccagagccttatacgggctacgccggtcacccatactatggcggaaaggtctatgcaacacattcgatgagctcgggctccaactctctccggaagacccatgtgtattcaataacagccggataacagtcttcttctttgtacatgaaatcgtgctgtacagagccgggcaccaataa

SEQ ID NO: 187471 - DNA, 2075 bp, Arabidopsis thaliana landsberg
atgaggaggagagtgctgaatagaagaatgtggaacattatggacattccgatggtgctctcgaagtggacgccttttcaagaagattctcaaccagctatgaaatccattcagcttttggttactctcacagatgttcccccgtcaatgttcactgataaaggtttggagttcttggctagtgcagtgggtaagccaatacggttacatccaaaaacggaagcttgtgtgagttttgatgaagcacaaatcttaatagaagcagacctaacaaaagatctacctagagagtacgtattcacgggtgaggaagaaggagagctcgatgctgttattacatattcatatccttggctgcctccgagatttaatggatgtggtaaatggggtcatcttaaagaaacatgtttatctattgagaaaaccagcacggggaatagtgattttgtaaccattcccgcagttgcttcagaaccagttcagccatcctctccaattacgggaaaagctaaggaagttgttcatgtaactttggatgaggtgcctaagattcaatctaacgctccgggggaagtagaggtagagagaggagaggatgaaggatggatcactcctaagactacgcttagccccggaaaaagtcatgtaggattgaagtttggagaagtttctattttatcaaactcatactttgtacttcgtggcgcagaggatataggggaggaaatatctaaagagatggaacctcacgagcctgaggagaagtctaaacaggcggatactcaaacacaagaggtggaaaataaggaaaaaaaaactcagtggtaaggtcacgggttttagagctgccacctcgggcatctttaccccgtggatcaaagtctgcacataaagtgctctccaatccttctactccttcaactaggcacactcctagtggtcagagtttagggctccctccaaagcatcgctaaatgacgggtttcttcttgaatgtcagtggtttaaacgaatctgcaaagcatccaatcataaagaaatgggttcaagaacaaaattttcaatttggttgtttacttgaaacacgggtccaggagaataagatgcaggagctgagtgaaaagttgtttccaggatggtcggttttaacaaattatgaatttaataggagaggcaggatttgggttctttggaaaagtaacgtgaggcttacccctttctacaaaagtggtcaactcataacttgttcggttaagttagaagatcaactagaggaattcttctgctcctttgtttatgcttcaaattttgtggaagaacggaaaaacttatgggcagaactacaagaccacaaggactctccaataattagtagtaagccatggttaatttttggagatttcaacgtgaccctcgatatgaaagaacactcgaactgtgatagtaatccggtggtgacgagtggaatgagagattttcaacaaatgattcgctcatgtgatctttcagacatggcttcccatggtccgttatacactcggtgtaataaaaaagaacaagatctcatactaaagaagttggatagagtgatggtgaacgatatttgggctcagtcgttttcgcaggcgtacaatgtattcgaagcaggggggtgttcggatcatctacgctgtaggataatgcttaatgatgcagccgaacgaagtgtaaaaggcccaaaaccttttaagtttgtcaacgcgatcatagaaatggaggattttaagccgatggtgaaagaacattggaacaaaacagaaccactcttcatgtccacttcaactctgtttcgtttttcaaaaaagctaaagatcttaaagccagggatttggaaattggctaaagaaagattgggaaatctggtaacaaagtcaaaggaggcttatgacattctctgtaaaaagcaggaacaacacgcaaacaatccttccccacaaagtatggaagaagaaacagaggtctataacagatgggtaaaggttgcaggtctagaagaaaagttcctgaaacagaaggctaagcttcactggttgtag

SEQ ID NO: 187472 - DNA, 130 bp, Arabidopsis thaliana landsberg
ctaaaaagaagtcctccctgaagcgatttaactgggttaaaataacaagggctttgccggggagcttatgggatgagttacagatacaacaagtatgccacggcgatatcgaggatgaacagattctctg

SEQ ID NO: 187473 - DNA, 500 bp, Arabidopsis thaliana landsberg
gaggatgagcttattctccctgagatcgccggtgtccggggccggctccaccggcgggagggagctgaccagcgcctccacggccagttcctcggtcgagctccagcgccggtagaggggcgcccggcccgtccccgcccggcgcgccaccccctgcatggtcaggccgccgaagccgacgtcggccagctcctcgaggacggcgcggtggatcgccgactccagctcccgcccccgccgccggtgcgcgggatcgtgatcagcctgatcaggagacacttgtgcatcttatttggtgcgggtacactctgtcgataagatacatccatgactcttatcgagaggtgaacgacatggtccgacatgggctggaggtgtgggccgtggcgcggtcggatccggacctgactccggagtgcttccggatcgtcgaggtcgacgtccccgaaccgggggacggggaggtgctcgtccgcaacgactggatggcgctgagcgcg

SEQ ID NO: 187474 - DNA, 315 bp, Arabidopsis thaliana landsberg
  unsure (1)..(315): unsure at all n locations
atgggccggattgtcgccgtcgcgcatgaacggttcgagcgcaaagaaggcattggggttagccgtttccggccagccttccagctttacagcgagcgctttgttcacgataccttgaagctcggctacgcgctctttgcgccatgccatcgtcgccttgtattcggcgttctgaatgccggtgtcgggatcaatatcggggattttcccgtactgnnnnnnnnnnnnnnnnnnnnnnnnnncgtggtacaggtggactatggtgccaatcggcgtcataatctcgtggaataccggcttgccgccagttgcagc

SEQ ID NO: 187475 - DNA, 709 bp, Arabidopsis thaliana landsberg
atcgccaagatcaagaggaatcttgggtccgagaccaataccattgaaagtccgtggagattcgcacaagatcatcaagaagccaccactagcgccgccacacccgcaaccacaaccaccacaaacccatcagcaagaaccgtcacaatcgcggccgccacctggtcccgtgattatatacacagtatctcccaggattatccatacacaccctaataacttcatgacattggtccaacgtctcacaggtaaaacctccacctccacaacatcctcctcctattcttcatctacgtcggcaccaaaagacgcgtcaacaatggttgatacatctcatgggttgatatctccggcggctcggtttgctgttacagagaaggctaatatctcaaacgaactagggacatttgttggaggcgaagggactatggatcaatattatcattatcatcatcatcatcatcatcaagaacaacaacatcaaaatcaagggttcgagcggccaagtttccaccatgctgggattttatcgccgggacctaattctatgccgtcggtatcaccggacttcttttacactattggaccaaccgatccacaagggttttcgtcgttctttaatgactttaactctatccttcagagtagtccatcgaagattcagtctacttcttctatggaccttttgaacaatgtgtttgattcttga

SEQ ID NO: 187476 - DNA, 325 bp, Arabidopsis thaliana landsberg
gggagtagtccgccgctatcgaacaatagcgcggcgagagagaagcgtgaggtccgccgccgcacggtgagctctgctcgcctccatgctccgtcgttgggggattgtgcgtgcgccgtccgattgcaatggatagcgtggattaaggacagcgtacgccgcgccatcggatcgtgatcgcacgcgttggaatgatcgcggcacatcaaaatctggggcgctgatcgaccatcgtgcggctcagacgagatcggggcttcttgtgatctcggccctagaatttagatccaaccgcgggactgcgtaccggttcggggtgcactga

SEQ ID NO: 187477 - DNA, 178 bp, Arabidopsis thaliana landsberg
agatcagtttataagccaaatggaagaactgaacaaggagataaggttattttctattctttgcgttttcatcttatgatgttgctacacatcttaagttgcttggttggtaaaagggagttccagaaaacagtagattcgagtttggccgatgaggatagtactggcataaccgcaa

SEQ ID NO: 187478 - DNA, 66 bp, Arabidopsis thaliana landsberg
tcgcgcgaaaagtttgtgtctttaaagaagaatacaagaggagaaattgtggcagagttggaagag

SEQ ID NO: 187479 - DNA, 190 bp, Arabidopsis thaliana landsberg
atggcggatcggttactctctgaaacgcagcttttatctgacgtcatggctggcgtcattccgcttaatacttttgttaaagtcactggtaaagtaaccgttcttaaaatctttaagattaaagtccaatcgtcttcttcgtgtgatctcagtatctctgtttcggatcgtaatgttacgagtcaacact

SEQ ID NO: 187480 - DNA, 787 bp, Arabidopsis thaliana landsberg
atgacgacgaagctatcgagcttctgtttcttaacccatggattagcaggaatctcctgcgagagagaacatggaagttctcgtcgatttttctatctcccttctcgtcgattagtttctacttcgtgtaagatgcgacaacaacgtggtttcgagtgagttttttttttttttttgtcgatttctgtgttggggtttgagaatttatgtaccaattcgattgatttatgtaacttggcatttttgaattttgcattataaagttttgtttttctcagctttagagttatggtgaatgctcatagatgtgaacgtgtttataattatcttgatttaaattcatttgtatgagtttggagaggactatgagaattaaaactctgattttacttagtgatgagatcaaaatgttgcatttgatttttgatatgaatccaatttttgttaaagctagcctctttgtagcttaagttcctttcatttcccatttgatttgcattacaccaagccaaaaaaaatctgatatcttgactaatttgcagctctagtaaaagacaagaggtcaagaaaggctcccctaaaccgatcctatctataaattcaggtcttcagagcaacaatgatgaggaatctgatctggagaatggttctgcggacagtgtcccgagtcttaagtcagatgctgaaaagggtagtagtattcatggcagcatagatatgaatcatgctgatgagaatcttgaaaagaaagatgatatacaaacaactgaagttactcggcgcaaga

SEQ ID NO: 187481 - DNA, 1539 bp, Arabidopsis thaliana landsberg
atgttatctgttgacgctttggaaactgacagcttttgcttgcttacgagtgaacaggtttgtttggactattggaattcattagtgttggagttgtttgggacgcgacatcatgcgtgtcaccctgcactaactccaagtctgtttggattgcaagtatgatttctttatgttcttttataaaatggaaatcaggattatatatagtagtagttgaactttgccttgatgcttaccctgtgttttgatttacctattgccagatggctttccttcctagtacagttgatggtgttaaatctgaagtcactgagcggcaaaaactttattcagatccaatgtcaaaattaaggggactcatgattagtcgcatggctaagcctgaagaagtgttaattgttgaggacgaaaatgggaacattgttcgtgaaactatgaaggataatgatgttcttgtccagtataaggtaccaactgaacatatggcctatcattagttattctgttatagaacatatacgatgtcctccacacagcatggatttgtacaaattagcttctttttgacactctttttttcttgacccatgattttggagagaaaatttgacacactttttcctctcgttgctactccttttgatgaggaagttcgattatatgatcttacgtttttgtttcaaacataaggtattcgcatttcatagtttacaccattgcagataatgcgggagacattaatctacctctcacaccttgatcatgaagataccgaaaaacaggtacttattttgagggatgccagattttccttatcctctggactctagaatgattttgttcaaaatttacgtttaaagttctttacaatagttaatgcgtggtaatggttgtatatgctgtgaaatatgtggagtattatgataaagtatagtgcctacgaaaggtatctccttgtttagaggagaagaccagtagagtgtccctaaatttctacaatatttattacgtaaaagtattaatagttgtgaagtgttaattgttaagagtcttggatgaccctgttgtattgatatcaactttttctttttcttttacttctaagatgttgagtaagctaagcaaacagttgagcggggaggaatgggcatggaacaatctaaacactttatgctgggctattgggtctatttctgggtccatggtagtagaacaggtaagatctccactctcagtgtccgtctaattgtgttttcaacaaacaacagttaaatgcagtagcactttttggttcttggtatctggtagcatctttctaatgttagtaggctcttaagtggtctcggtctcccattgatttatggtcgactggtttcaccaccagtgttttgcaaagtttgtgtcctttactaatcatctcaactctgtctttcttttccaggaaaacagatttctcgtgatggttatccgtgatttgttaagtttatgtgaagtcgtcaagggaaaagacaataaagctgttattgcgagcaacatcat

SEQ ID NO: 187482 - DNA, 1149 bp, Arabidopsis thaliana landsberg
ctgggtcatggtgattattctgccgcaaatacaagggttttgcgcatggtgaatactcttggtgttgaaaacgaggcaaaacaaacaatagaggctttacaagctgagttacagaagacaaaagaaagacttcaagctgttgaagaattaaagagccagtctggtaaatttctgattgtcgacctttcctgtttttgatactgagtttgctacaagtctaccattcaattttactctcaccacaaaattcactggagaagcataccttaatttctctgtgaccctattctctacatcatattctatgtttccgagaataaaagggagggccaaaatctttctgttgatctgcctccggaggacttgagaagaaatattgtagtgtttcaaaaatgttattcttatttaccaaatatgctttactgtaaattctttttcatgaatattcaggagatgctgggaagctagttgactctcatataactggaaagattgctcaactaaaagagcaaaatgctacgcttgaaaaacgtgaagagaggtttgttactgataaatgtttaacatgtcctttgtgcaaatatgaccttgatttcccatactaaaacatatgtggagcctatgaattatgaaacaggtacaaaactgtttttgctgatagaatttccgtgtttagaagggcttgttgtgagctttttggttataaggtatgccacttgctcataattatgtcgtagcactcaaattttattctttagcattacaatggttccctgaaggcaatgattctggatatttcagttttctgaatgttgactatcacattgtaaaatgtaatgttcgtacttttgtccattttttacggtctatgaactgcgcgtttctgttgcaaagagggattcagctattgctatctatagttttccttaccttccgttattcgtgtagatagatgatcaaagagtcttattcatctacagaacttgtaaacttgtgaattccttttgaaaactctggcagattgtaatggacgaacatcagcgtcccaatggaatcccagtgactcggtttactctccagtctatatatgctcaaagtgatgatgaaaaactcgagtttgaatacgagtcaggaaacaccagtattcta

SEQ ID NO: 187483 - DNA, 405 bp, Arabidopsis thaliana landsberg
ccttcgggggacgagggaagaaaagattaaaccgagtatttgatgccatcggctttatataccctgattatcactacccattgcgaaggcaagggaagaaaagaaaagctatcgctttggccaccactgctgtgccgaaggcaagaaggtgaaggtcctgacccatcgaccgcgatacattgaaccggccgtggtgcctgaattttgcgaaggaacctcttcaactgccaaagtaaaacaagctgctccgattgcgcagagcaccgaaaagccgattgtagtgccgaagtgcctacagtcgggcctatcgaagccaaagatggtgcggccgaagagccgatagtggaaaaggtattgaaactgccagaaattctgagcccattagcaggagcagaattgccaaag

SEQ ID NO: 187484 - DNA, 39 bp, Arabidopsis thaliana landsberg
atgaaacttgaagatgaatcaagaaacttgcttgacaag

SEQ ID NO: 187485 - DNA, 72 bp, Arabidopsis thaliana landsberg
atatataatccttttggagctggtggtaccgcgggacgagaaccgacaatcgagtccaattttctctctcgg

SEQ ID NO: 187486 - DNA, 665 bp, Arabidopsis thaliana landsberg
atgggtctaactattgtttcagatcctgctgagataaaatccatcaaagaattttctgaggggattctgaaattaggagatggaaagctttcagaaccaaatgatggtgaagttgtgattaatactccaagtgacatgcttcttatggataatcttaaccctatagtatcaattaccaataccatttatccatctttgattcaaaatgtagaagatgcttctttcttagggacatgcaatattatatcctaccaatgaagttctcgacgcgattaacaactatatcatgaatcttttaccaggagaagcaaaggagtattttagttatgacaaaatctataagtttaatttttttactatcagatacggtaatgtctcaattgagttccttgagttccttagctcaatcaaatgttcaggattgctgacccatgtcctgaagttgaagaaaggagttcggtaatgcttttaagaaaacttgaccaaaaaaaggtttgtgtagtgagacaagattgttgataacaaggttgggagaacagatcattgaaccaagagttatctccgtaaccgacgacaacgacattgatgatgagaaagtttatatccctagattggcgcttacaccttcagatgttaaaatgccttttcgatttcaatggagatag

SEQ ID NO: 187487 - DNA, 181 bp, Arabidopsis thaliana landsberg
atggtatggtgtaaccattgcgtgaagaatgttcccggaatacgcccttatgatggtgcattgtaagtgtttttgattattcactgatgttttgttatcttatggtttgctctttaggagctcagtttctgttggatttgtggtttccaagcttcgaattatgaaatatcatcgtttttga

SEQ ID NO: 187488 - DNA, 81 bp, Arabidopsis thaliana landsberg
atggagtcaaaggtagtgaagaagatatcggagttcgcaaacaagaagaagaagaagaagaagaagaaagtacaaaacaag

SEQ ID NO: 187489 - DNA, 51 bp, Arabidopsis thaliana landsberg
ctaagtcggacctttgctcctaagaagggtcaaagtgtggactgtggatga

SEQ ID NO: 187490 - DNA, 56 bp, Arabidopsis thaliana landsberg
atggtggatgtcttcttttcggatgatgtgtggtgtggtttgatcttctgcttaat

SEQ ID NO: 187491 - DNA, 282 bp, Arabidopsis thaliana landsberg
atggaacacacataccgcgctcacactctttttcaaatctttagcaaagacaaagaacgacgcgcttactgggggaacatccgctaccttaaaccacaccctgactccctccagagaccggtcaataaaaaatatcacaagatagagtggacgaacaaaacacagtcaacaacggagaacccgaccaacgaaaccgaggccgagcaaatccaaaccaatgaaggcaaaaaaacaaagggcggaatcagcactaggccagacaacaaaggaataactacaggg

SEQ ID NO: 187492 - DNA, 214 bp, Arabidopsis thaliana landsberg
tcgaatattcaggtggcacttgacttcttgtgccctgaaagcgttggagagtcagcaagactagctgaagaaatccggtgtttaccaaacgaccacgaggcaaaacttcagattctagaggtaacaaatctttgattctgccttcccttagaacaaaccattaaccatctcagtgccttcacttctaactcttggaaatggtttgggttcttaa

SEQ ID NO: 187493 - DNA, 232 bp, Arabidopsis thaliana landsberg
atgatggtgattcggctgccactgttacgaaggtgggtttatatgaatcaaacccgtaaatccttgagcaagtcgatcagctaagtcttgtccatgtcgttgaacctcttcccaagcttctaaagatctctccatagacatctttatctttcctagtcaattcaaatcctcatacgaatcaaaacaccgaaagctcggaaatttatcagtgaaatcgagctatgaaacctga

SEQ ID NO: 187494 - DNA, 406 bp, Arabidopsis thaliana landsberg
atgaactatcgtgcttggtatcaccgttgctggttggtttcttacatgacaattgagcaggtgaatgattctctacatttcctcagatatccttatcttttgaacatatcgtttgagcttgtaaacatttcatatggtcagatttccttaagtttgcaacatttctctgatttcatgaaatgggttacttttgttagctaaacttgtgacagtttcagatggtctaagatacaccatattttttttctcatatgtgattccaagtaatatatacatgttgtctgttctaggtgatacaagagttgaacaaatctaaaagatgggctgggcttcatgtagccgatagttcttgcttacaatatcgaagagtaagggccgcatattcagttgacgtgattgtggtata

SEQ ID NO: 187495 - DNA, 188 bp, Arabidopsis thaliana landsberg
agactacagatttttatcgaagtacaaaaatttcgatttcttcgattcgatctctcagggaacaaaagaaaaaacctgtctttgaatcgaagcgaagaatcactcttctctacttgtttggtcgcgatcgagaaaacatatttgctcttcgacaaacaaaaagcagctgtttcctcgtttctttataa

SEQ ID NO: 187496 - DNA, 955 bp, Arabidopsis thaliana landsberg
gtacatgaaaacactaaagtcgtatattaagaactatgcaaggccagaagcatgtatggcagaaaggtacttggcagctgaatgtatttgcttggagtttctcaagacatctgtaccagttcttgattctgcaaaccgaaatgaagatgttgacttagatgagaagatacttgaaggtcgtcctattcataaggctaaagaagttacactatcttataaagagcgtgacattgctcacaaatatgtgctaatgaacactgcagtaataaatccatattttgagtaagttgtgcttagtaattagtattttacttatcatttttgcttagtaagacctcctgatggtgtactattctgatatgataatcaggatgcatcttgaaaaactgaaagctcatgatgttcattgtagaagaaatcaaactctcttatggaagttacatggggaacggttttcccattggttaaaagaaaaggtaagtaaatcaagttcatcatctttggtcaataagtttgtgtttttttatcgttccattatcttttttgttataatcaggtccctagtaattcaaaggagcactcggccaagctgagatggttagcctttggtccaagacatatttctcaatcctataagggttttatcattaatggacatcgatttcacacaaacgacttaaagcggaagactcagaatagtggagtagcatatgaagctttcagtatgtgtagatcaattgcaaaggatacaaatcaagtggcagacatagtttcttactttggagtgattcaagagataatattgctggattactacatgttccaggttccgttattgaagtataaatgggccaacaaagggaatggcctgaaggaagaagatggctttacgcttgtgaagttcagctcaaaccaagccacatatctccaagatccattcattatgtcttcttaa

SEQ ID NO: 187497 - DNA, 490 bp, Arabidopsis thaliana landsberg
atggacttctgggacagccgcacagaccagcagaaggctctatgcgtcagcatcatcgatgacgtgatgaaggccatggcaaacaatggccgggcttacgatgacagtaggtcatccaaggtagaccgtttcgaactcggccgagacagccgcaatcgcccggtcatgaacaagaatgatcatggcgattgggttccctaccaggactacgaaactgcttgtggcttcgaggctatgtggaaggctcatcgtgacgagcttctcagccaaatcgagcagctgccgtacaaagctgccaccgacggcatttcagaatacctcaaccgagtccccggagcttatcaggcggatgatggtagacgatactggaccagagagcaggttgtggaggctgtgaaggaatgcgggggccccgcgccccgatcacttttgatggggagtgagacagttgccattcaggcgctaaagaagatcgaagccgccgccttgg

SEQ ID NO: 187498 - DNA, 758 bp, Arabidopsis thaliana landsberg
atgccaatgtttcagccttctaagaacggtgggtttgatgggcatatcttagatctacacacggcggttaaagacggtgttcttggcggcggagatgggaaatttctggtggttgttaccgatgagaagaagaaattggatttgaaggagatgatttctgagctggaattacctgaaataccctctgttttcatctgtcctatctctctagagccgatgcaagatccagtgaccttgtgtactggtcaaacctacgagaggtccaacattctcaaatggttcaatatagggcattgtacttgcccaacgacgatgcaagagctttgggatgatttggtcactcctaacaagactcttcaccaattgatctacacttggttttcacagaagtatgttttgatgaagaaacgatctgaagatgtgcaaggacgtgctattgagattctgggtacgttgagaaaggctaaagggaaagcaaaggttcatgctttaagcgagcttaagcaagttgtgatggctcacgctattgctaagaagactgttgttgatgaaggtggagtctttgtgatctcttctcttttaagtccttttacttctcacgctgttggatctgaggctatagctattcttgttaatcttgagcttgactctgattccaaagctggattgatgcaaccagctagggtctcgttgatggttgatatgttgaatgatggttcgattgaaactaagatcaattgtgctagattgattggaag

SEQ ID NO: 187499 - DNA, 260 bp, Arabidopsis thaliana landsberg
aagcaagagagagtgtttacagattttactagcttccgagggtatcgggttattcgacccaaggttgggtggaattccaagtatgcgaagatctaatgttgatgtttatatctttatcagtagattaactgcataattatgattcatatataacatgttaagtttaacgcttgatcttgagaatacttttatagaagaagcaagagagagtgtttacagattttactagcttccgagggtatcgggttattcgacccaag

SEQ ID NO: 187500 - DNA, 175 bp, Arabidopsis thaliana landsberg
  unsure (1)..(175): unsure at all n locations
atggaatcatccaagtatgtgagctcatccgcattcaagaaactcgacccactaaccctaattctcccataatcatcgtntccttcttcagcccacaagttatccgattcctcccaagttagccgtatttttccaatacggcgaagatctctcagcgaggaagacgagaagatga

SEQ ID NO: 187501 - DNA, 45 bp, Arabidopsis thaliana landsberg
atggccatgatgggttcaacatcggacaagatgtacctctgccag

SEQ ID NO: 187502 - DNA, 551 bp, Arabidopsis thaliana landsberg
gtaccatgtcacaaacttttttgccccaagcagtcgctgtgggaccccagaggaactaaaatcactgatagatagagctcacgagttaggcctggtagttctgatggatatcgttcataggtagtgaaggtttacatgaaagcaaacaatgagatccaccttttggtcatttacaagtcattgaatcttccgactctctaacctgtgcagccatgcttcaaaaaacacattggatggactgaacatgtttgatggaactgatgctcactattttcactctggacctcggggataccattggatgtgggattcacgacttttcaattatgggagctgggaagtatgtaactttttcgtgaattttaatcgaaaatgtattgaacatacaacttccttaagcactatcagttccaacagtctcttttgatcttttctaacaggtattacgatatctcctttcaaatgcacggaggtggctagaagaatacaagtttgatggatttacatctgatggtgtaacctcaatgatgtatactcatcatggactctcg

SEQ ID NO: 187503 - DNA, 1831 bp, Arabidopsis thaliana landsberg
atcaaggcgcatgaagccgtttaagaaggtgtttatccattcctataccacttctgaagatatatctaatgaggtataaccttacaccctcatccactcaaacttcacgagcgtctccctatggtaaacaaatcctacttttgtatagaatgaaagtacgtcaaatgatttctcaacccctgaagaacacatacaccaaaactcttttatgtaggttagttgcttcctcaaagtacagttctatatcattaccatgaatatttgaattacttatgatttcatttctaggttgattccccaacaaatgccccatcagacaacatagaagagtcgtccactaatgtatcccgcagtgtgcccgcagtgaacccgcagtatgcccgtggtacgcccgcagtgtgcccgcagtaggcagtgggagcgacccgcggcggcataagtttggccgagatgggcgtgtgcttgacccatggccggcacgaacggcgagggtgcgaccagaagtcggccacgtcatcgacctacttaaggcggcgagcaggtgggtaagctgcttggtgttctatggctgagaatcggccatgtcgagctgccaaaattgtgccgagcaggttccggttggccgaaaggtgggtgatgactcggggccggctgtcgccccttgagcaaccccaggacagctgtcgaccagcgggatgcgctgggtgtcttgggtggtgactctgtgccatgtgtcgtcaagcgggatgcgattattggcgaggctccggtgactcacctactagccaaaccgacccaaaactactatatataacttcggccctcattaggaaacttcacccaaaaatctcgcccatagctagtaaacccgaggagaactcgcggaaagacacgattcggaagttggtaagttttctgaccttagttgcttttagtaaccgctgattagtccttaatagagttagattgtggtttgctagataaccgagtaagagaaggaaccaatggattcgaggggtaggtacgcctgtttcccgaggatgcgtggatcaccagtaagtctcagacatgtgaagtagcacgtgtttaggtgtttaatttgatttacttataaattgcctaggaggttagtaaatcgtacttagtgataattattgtgagctgcattgtcttttgatgtgattgcatgatgttaaagtacagtataaacgttgtgctgcccaagttctgacaacattgtcgattgagtcttgcttgttgattgtaaattgcttggtatagttaggtgttccgatagcggtataggtgaaaccctagagatcccggtctaattgagtaatactaggttactcatgatgctacctttttgtttacacgaaaccttagcggggaatctataaacggcgcgatgatcattaggccaaccagcttagattttacagctcttgcaaatactgataatgtttattatatatgatttcctatgaaaattaataaggatccgccctatatacgagttttggtaacgttttattcgtatatatataatgtaatgattcaaccctttttataatggaattgatggttgaatcaataatattattagtctagtccaagactaacacaactcgtgttctcggaacgggttgaaaagccttaggccacgaacacgacgaaaagtttctcacggttggtcgactatgtgaacggtcgtgttccggacacctggttgactaactacaagggtctaacgtgatgcttccgaatttgtccttagttttaggacggttcgggggtgttacacgcgtgtgatatggttcaaattacctag

SEQ ID NO: 187504 - DNA, 114 bp, Arabidopsis thaliana landsberg
atgcagggaaaagagctgacgacacgtaggctagagccgcaactactcgagaaagagcattgtcgtgtcgctttcgttaaatactactgtactatctttttctctgcccgtaag

SEQ ID NO: 187505 - DNA, 995 bp, Arabidopsis thaliana landsberg
ggttacgaagacaatgatgagaaggtcgaggtctcagggcccttgttgtctaaatcttatggagttgatgagcttttggaacgccatgaacgccaaattcgccagttagttagaaaatcgtggttccagaaaggtaaaaccatgatgctaataactaacaagaaaaagagaatgttttatgattaactgtgatgagcaacaattgtatggcttcgtgaattgcaggtaagaaacaagggaaatgaatgactctgcataaacctttctgtgtcatgaaacaagctccccaagtggatctagaagagagctcctagaactcaaaagactatatgcattttgatggtttgagaaagacaacgttaacaagatcttcagacagaaactgtgatggtgaagcaaatatggagaaagccatgaagcattattattttctgttaatgtcaatttataatataatcttctctaataaatcaaaattttgagaatatgacaattacagcgcagttttctgatttttcatgtataggcataagcatatctataaaatattcaattgtagtataaataaaagatctggatatttgttatacagaaattattgattataatccaaagttgggacaccatctcgttttgtgatgtgtggtggtcactggtatttaatgatgtctcgtgacgatggtgtatgggagtgatgttggattatgacgtttgttgttatcatcttgtttcattatatcatcaggatgtgacacattatgttcaagttatataatccgtgcactcaccatatgtctactgatcagaatctgagaatctctaaatcttatcaaatctcaatgtaatagtgtacaaacaaagagaaacttgaattttgtaccctttttggcagtttggtttttgagaatttcagccatctcttcctaggggtgggcacaaggcgagtacttgctattttagggatacttgttactcgacttgccttgtacgagtaa

SEQ ID NO: 187506 - DNA, 59 bp, Arabidopsis thaliana landsberg
atggtggatagaattagagactttgaagattccccgagcgacaacggttataagatcaa

SEQ ID NO: 187507 - DNA, 66 bp, Arabidopsis thaliana landsberg
ccgtcctttcgttgtcggatattcgggtccgaactccggaccggtcctatcagatcaaaccactga

SEQ ID NO: 187508 - DNA, 114 bp, Arabidopsis thaliana landsberg
atgtgctcgttcaatgatgactctttttgtcagtgtaaagcgtcaatcgtcaattgtaagattgttcctcgccatatagcaaaaatgacctgggatgataccgtcgtcagcatg

SEQ ID NO: 187509 - DNA, 267 bp, Arabidopsis thaliana landsberg
aaaccatcgacgattaagctggtggacataagcttcaagaatattagaggaacatcagggaacaaggacgcagtgaagctattgtgcagcaaggcgcatccatgtgcgaatgttgagattggaaacattaaccttgagtacaagggagccgatggtccaccgactttcatgtgctcaaacgtttcccctaagcttgtgggaactcagaacccgaaggcttgtagcgccggacccactcccaagacagctgctaagggagacttgtag

SEQ ID NO: 187510 - DNA, 10 bp, Arabidopsis thaliana landsberg
atgaaagaag

SEQ ID NO: 187511 - DNA, 374 bp, Arabidopsis thaliana landsberg
atggcgctgccccagtcgggcggcaggtcgtcgcttgcgattgcggcatatgctgtcgtctcggggccgggatcggcctttgcgaggatgcctttgcgcatgccggcgagcaccgtcgcgccgacgaggtaggggttggaatcgatgccggcggcgcgctgttcaaggtggcggctggcgggcgcgcctgccggaatgcgcacggcgacgctgcggttgttggtgccccaggtcggtgtggtcggggcatagctttgggccgagaaacgccgccaggaattgaaatgcggggcgaagacgagcatggattcgtgcatcgtctcgagaagcccggcgacggcgtgtttcagcagcgcggcaagcgtttcatcccg

SEQ ID NO: 187512 - DNA, 833 bp, Arabidopsis thaliana landsberg
atgccttggtgagtggaaagagactctttagtgtgttggtttcttttaccgtctgatatggttaatagtattataagtcctaatacatttgccaatgaactaggtgaaggaggttatgttgtttgctgcgagatggatgacatcaagaaaaagcttgggcttggacggaactcattggtaaattaacaaacctctttaagtgattagctttatatacttaaccctgatctttcgtttctataaagctgcaccacgttattataaaatgattagattggtagaagcatgaatgcatgcttgcaaaaggtggcctttgatattttataaactcaggtgagatagatactatgtgtatgaatggttctactgcaacgttgtagctttaagggctcaattcctttgttagcatcagtagacaagaaaaccagctacacattgttgagtgttgactattattccatgcgtcaaagaactttaaaatcttagctatgtttcatcaaatggtaaggtcatgtatacaatgttttcttgggtgatgttacagatagctctagcgcttttgcttggcagtgactactctcagggagttcgtggtcttcgacaggtgtgtagataactcaagcttttaaacctccatctatcggggtcatatgttattcgaggttgtctgttttatttagaattggattacaaaagactcacgattaaacttcttctgtgtacaggagaaagcttgtgagcttgttaggtcgattggagacaatgttatccttgaaaaagttgcatcagaaggactttcctttgcggaaaagccgagaaagtctaagaagcac

SEQ ID NO: 187513 - DNA, 172 bp, Arabidopsis thaliana landsberg
tatccgtgtgatacgattcgaagcagtaaagacgaatacttacactgatgaaccggaaggaaacggaatctgcagaatatgtggcgacggggatagaagaataacgacgaggagaagagagaaagttaagacgaagacgaacagtggtttcaccggagatccaatcatttga

SEQ ID NO: 187514 - DNA, 23 bp, Arabidopsis thaliana landsberg
gcgagccaacagacgacggctga

SEQ ID NO: 187515 - DNA, 83 bp, Arabidopsis thaliana landsberg
atggctctaacgctgacactttacaccatctggattttgatgctccaacacgtgaacatgctcgtcttcttcctgatgactat

SEQ ID NO: 187516 - DNA, 1556 bp, Arabidopsis thaliana landsberg
atgattccaccggaggaagaggtcaaggacattaaaattgctaatggagtcactgcttttacccggaaacagaatccgtctgacagagtcaagaaagggtttgtcttggatgatcatgtgaaggattgggtcaagagaagagtggcttctggtgtttcagagtcgacatgtttccttccttttcttgttggtgccaagaaaatggtatgttgtttgttatgtcaaattaatgacttgtgaagtttttagatttattgacatatagactacatgggatttggattttaggatatacataatatcttgagttatgaagtttggttgaagtatattgcatctgtgaattgaattcatcacctttttttggctttagtgatgtccgtgtaagatctcatattcatttagatattgtttgactactagtttacttttaaaagtcattcgaatcttcaagtcaattagtgactaaggtattagatttattgacataatgactatatgggatttggtgtcaggttgattgtcttgtttgccataagccggtgtacccgggggaagacttatcgtgttctgttcgtggctgccaaggcgcttatcactcgctttgtgcgaaagaaagtcttggtttttctaagtcaagcaaatttaaatgccctcaacatgtaagatcctcatttattgtttagaactaaggaagatttctcttcatttttattggctggctttgtattcaatgaagcaaatcatattttgttgctcttatttttggtagaaatgctcagagagacgataggccatcaaataggatatacttaacagttagttctaagtaatagtgtttaggtagggaattgaaatggattattttgattgtgtggtatcattcagtttctgatagaatggagtatgcaggagtgctttgtctgcaagcaaagaacacaatggcggtgtgttaagtgtccaatggctgctcatgataaacattctccatggtcaaaagaaatacttcacttgaaagaccaaccaggaagagcagtttgttggaggcatccaactgattggcggctagacacaaaggttgattttttagtttaccgctttcataagatacttcttgaagcttcttacgatttgtactttcatagagttttactcacaggactgacaaaatctctgttgattgagcagcatgcagttgcacagagtgagattgaggtcagtgtttatttgccacgtgccaaatgtgattgtagtaaaggaaactaattcttacatagacttgccgctcgaaaatcaaaaagagggaagagatttgaaagctggatattttgtttttatcttacacaatttcaagagctaggcactgaatgtttatctactttcttattcaggaagtcttttgccagttgcctttgccatatgtggaagaggagtttaagattgacttagcatggaaagattctgttgtgaaggaagatccgccttcttatgtgcacattagacgcagtatcctttatagtttccacattcaatatttctgccttaaaagtacataa

SEQ ID NO: 187517 - DNA, 469 bp, Arabidopsis thaliana landsberg
  unsure (1)..(469): unsure at all n locations
atggacagcatagtgatatcagcaaagaagaaagggtccaggaacaaggttacttatctgatgaatggcaaggccatctccgagagggattcagcgcctgcagggaaacagcctctgaaccgcgcgaagccgaaaggattgagtggtagtannnnnnnnnnnnnnnnnnnnncctcaacaactggtgatcatgcaagccgtcggacccggcagccacctggcggcgacagcagcatcttgctgggctagcgtgcatatggatattgtcctatgccgccacacgggtggttggtccgtccgtctgcggccatgttttcctgatcacgcgatgagtcccatctcagatgatctggttcacttctggcgtgtgtatgggtttgtgtctgtgttggttgtgacatgtccaatggaacaaccctatccctactgcgtgtggtgccccttctgtgcggattcagacaacggatga

SEQ ID NO: 187518 - DNA, 110 bp, Arabidopsis thaliana landsberg
agaaaaaattgaggcgaatctgtcagtataaacttgtactttcatcgtctccgtcttgttcctcgtttaacagttcttcgtcgcctttcgcttatgcaaaattcacactg

SEQ ID NO: 187519 - DNA, 1014 bp, Arabidopsis thaliana landsberg
atgtggcatgaactcaccaaaggtgggagttcatgaagtgtaaggctgatcaatgagatagaggctgaagctgagcattgcttttataagttggtcaaaattttattagcaactactaagtgtaagtaaataccaaaccttaataataataaagaacagtaatagtaaaataatcccaaatgcgatgcaaatgtcaaattaaatttaagttccataattaatcatgtgagggtccgagccgctcatgaccgtgagcacggctagtataccacttttacactctgcagaggttgcgtatctttacccacaagtcatgttacccatctgccaaaagatggccaatcccatacacctctaccgaggaggcgaggcagggtaacactacgaggcctttacaaagttccactagcttcagaaaacccgctacagtttataggaagctccaatgcagggttcttgcctgaccgccatcgtagcaaaatcaaccaaggacctccctacactgaccactcccctactgcccttgcccctttcgggtaaggtagtcctccactagctttcctaattaatcagccaagggcgtccataaacccttgtggtggcacgtgtttctcaagttaagctctatgttccaattaacatttaatgatcttgtcatgaacataaataaaataacaacataattggaacatagatataatgaaatattaacccaaaaccatataaagcagtagcagaactacccaagtgattcaggggtaaacaaggtaatgagataaacaattctagggtgacctattgggtcccatcaaaattaacctatgcatggataagtgatattaaagagcattattaggtaaaaagtggtcaagggcacaacttgccttcaatgagctcctgctcagctacttcaacctgctgctcaccaggatcctcagcaacgggctcttctactcgccacaatacaaacaagcacaggatatagggaaaattaacatcacaccaagcatatga

SEQ ID NO: 187520 - DNA, 231 bp, Arabidopsis thaliana landsberg
atattgaaactaacagaacaattgagtgaagctcaaagtgaaattcgaaaactgtcggaacgacttgaagaaatgccaaccaacagttcaagttcatcgctttctgttgaagccaacaatgcaccaactgatttcgagcttgccccggaaactaattataacatcccgttttatatgttagataataattatttacaaagcatggagtattgggatggtttgtatgtataa

SEQ ID NO: 187521 - DNA, 353 bp, Arabidopsis thaliana landsberg
  unsure (1)..(353): unsure at all n locations
atgctgcttcggcttccgtttctagctctgcttgagctgcttcgtctgtttctcttgatgtggatgtcggtgagtcagatctcttctctcactttcggagcacagttggtccacaatttgaaaaccgacaaaggtgacttcttccttattcacgccttgatgcaccgcacctttttcgtgttcaatctcgcctgagagcagtgcatcgataccattcnnnnnnnnnnnnnnnnnnnnnnnnnnnnnnnnnnnaatcctttgatatccgtcttgccttctcagtcctccttctcatcccataggtctcagggtcccctccaccgacccgttgtactataggtatccgggcgtga

SEQ ID NO: 187522 - DNA, 385 bp, Arabidopsis thaliana landsberg
atgggcaaatcctgtaaatatggcaagactaaaataccatgtaataatggtcaggtccgaatggttaaatatgaccagtaaggctgccagtaaatgagcggttcccgcaagacaggctttccggcccttggggatttctttatccaataataacatccctattatgaaaacagaatacatcaggaggttgagtgcctgttgttccatccagaaaagataactgaagagcaggcctccgctaatggagacaatgaagtgcaggtgtgttcgctttttcatcggtatatatttgttttttcgggttattaattattttttatctgttctcaagagctcgctgaagcccggttatggtcataaagctatcatggaatcttgtgtatga

SEQ ID NO: 187523 - DNA, 759 bp, Arabidopsis thaliana landsberg
atgcaggcttgctatatctcaatttcagaattactggatttctgcaggaacaagaagaatgagatgaacaactttgtacacggttacatgcaaaagataacatacgtcacatatatcatcaaagatgctaagttacagtttcccgtttttagagaggcaatggttcgccaggatgacttatttgcagacttgaagttagtccgtggtgttggccccgcttatagggcctgtcttgcagaggtggtgagaagaaaagcctctatgaagctttacatgggcatggctgggcaattggcagagaagcttgctatgaagagggaaacagaggtcaggaaacgtgaggagtttcttaaaacccgtggcccctttgtacctcgtgacgtgttggcttcaatgggtttatacgatactcctactcagtgtgatgtcaatgttgctccgtatgatactagtttgctcaatattgaaatctcagatgttgatcgatatgctcctgagtttctagttgggttacattcgaagattgcatccttaaagagttcactgaccatgtctggtgatagctcgctttccgctgagcctgaggagataggtatagacacttttgacaaagacaattttgatgatatcctagcagcctctgaattaatagagatagctggaaccagcaagatggaagttgagaatgcaaaactaaaagctgaccttgcttctgcaatctctcggatctgttcattaggcccacaatttgaatatgag

SEQ ID NO: 187524 - DNA, 514 bp, Arabidopsis thaliana landsberg
atgacccaagatccgatccagattcttgcagaagagtttgggtgggacaaggatcttgccaagaaaatctgggcgtttggacctgacaccacagggcccaacatggtggttgacatgtgtaagggagtgcagtacttgaatgaaatcaaggactcagtggttgctgggttccaatgggcttcaaaggaaggtcctttagcagaggaaaacatgagaggggtctgttatgaggtgtgtgatgttgtgctccatgctgatgcaatccacagaggatgtggtcagatgatctcaacagcaagaagagccatctatgcatcacaactcacggccaagcctagacttcttgagccggtttacatggtcgagatacaagcacctgagggagctttaggaggaatctacagtgtgttgaatcagaagcgtggacatgtgtttgaagaaatgcaaaggccaggaacgcctctctacaacatcaaagcctaccttcctgtggtcgagtcatttggtttctcag

SEQ ID NO: 187525 - DNA, 284 bp, Arabidopsis thaliana landsberg
gtgtcaagggaggtggcggtccgcgagaactgcggggccagccgctgctgcgcctgctgaaggctgtacacctctgtcttgcctggcgggcgcctgggccctttgatgtcgtgggtcagcagttcgccgcgaccgatgaggaaattgggttgattcatgcgtcagcctttcttctatatatcttcttcgcccccgccggctgctcaccggtgtatttgcggatcgtgtcgcgactcacgccggtaatgtcggagatcgtgtgctgggacaagcgggtctgctga

SEQ ID NO: 187526 - DNA, 63 bp, Arabidopsis thaliana landsberg
atgggctcccgtcccttgctgttgtttggcagtcagcaaccaagatgtcgctgctgctgtttg

SEQ ID NO: 187527 - DNA, 471 bp, Arabidopsis thaliana landsberg
atggacaaggacaactgtaggtgggcctaatgacttgggaggttctgtcacagctggtatcggagcgacccatctctgcagattttatgaggtatcttcaaaagaattttctaagacttatctagaaaatttcttcccttattacctaagtatctctgaagcatgtattttagggaccagataggaagagtgcaatgtatagaagattgaatcaactaaggttgattttgtaattacgcatgcatcatgctaaaaactatgctaataagtttttccccttaagaaatgccgccgcgcacatgaaagaccgcgcgcaagtcaaccgggccaatcggtgtgcccgtcatcatcttgccccacgtcatgaagatagcagcagcgggacgaatgatccaattggagatttggaagctcaagtggatcggcttcgaacagaactccgatgcaggaacaatctatgggttgcggatg

SEQ ID NO: 187528 - DNA, 410 bp, Arabidopsis thaliana landsberg
atgcctcagtttctcgcatatgtcgttcgggtcatgtcctataaagacgcagtcaatcgtccacctttcaaacttacaggaaagcagtccgcagccttcaataccatgatggaccacgcagcagagctcgcagatacgccaaatatgtccagagatgcgtcgatattatctcggatcaaggagttgcacactgagctggaggggcctgcacttgccttttacgtctcggtccttgatcacttcaccaagtccactgagtacaatagtatcctcgtcagcttcctgatggtattgagcatccggaacgataatacctgggagagctatgccaatttcacaccaaaactctctgccattatggctatctcccgggtatttcttatcaagtacactatcgacatgagagccag

SEQ ID NO: 187529 - DNA, 164 bp, Arabidopsis thaliana landsberg
cctggtcgtctctggccatgctcattatgacagacgatgtggacagtgtgaggccttggcaccatcattactacctttgcgccataccaacccttggcctccgtagcctgggtctcagcgtggctcgtcgcgttgcgggcccaacggacggcctgcgctcttaa

SEQ ID NO: 187530 - DNA, 157 bp, Arabidopsis thaliana landsberg
gcaaaacctgagcccctagttcaccgtgatctgaagccagcaaacattctactcgataaacatctcacttgcaaaatcagtgatgtcggtctagctcgcttggtacctcctgctgtggctgatacctacagtaactatcacatgacttctgcagccg

SEQ ID NO: 187531 - DNA, 224 bp, Arabidopsis thaliana landsberg
atggagcggttatccggtgttcataaatatatgaatccttgtgatatgatcagcttgcgagtaactggcatcaatagtggaagtgaatatgtaaaatctgatgtttctggaaatggtggtaataagtctttaggtaaagcatttgttgttggtggatctcctagtggagggcctattggtggtggattgactttggatggtctgttggtcttggatcagtcagg

SEQ ID NO: 187532 - DNA, 125 bp, Arabidopsis thaliana landsberg
ccttgaatatattaagagtggagttcaacgaacagatcaaaaccaaaagagtcagagacttctcatgaaagatatacccaaggaccaccgacctgctaacttcctggagatttgctcatactccg

SEQ ID NO: 187533 - DNA, 105 bp, Arabidopsis thaliana landsberg
agagagaaagcatcaaaacagatcattgccgtccggtacgaaattcggtattacgtccgacatattccggcttataaaacgatatttggtcggctttacatctag

SEQ ID NO: 187534 - DNA, 888 bp, Arabidopsis thaliana landsberg
aaccgccgtagatgttgccggagggtactgttttgatctggccgctccctccgatgaatcttctgccgttcaaacatcttttctttctcctttcggtgtcaccctcgaagctttcaccagagacaataatagtcactcccgaggtttgtgttttaaaaatatttattttatctttgtttttgttattttttccccttcttccaatgcatagaacaaagaccaagactcacgcacgtagccctatttttgtttttcattgtttatcgatttcatctcttttgagaatttccatgagtggggtttagtgtttgttcacatgatcacatctcatgaatttaaacttagtaaaacatgaaactagacatttattttgtacccttttatccttataaaatgaaaattccatttcgtatattatagatcggtgatgaatcaaacccaacgttggggatcgctttgttttttgtctatagattgggacatcaatggtggtgcatgcaataacattaacaataacgaacaaaatggaccaaagcttgagaatttcctcggccgcaccaccacgatttacaataccaacgagaccgttgtagatggaaatggcgattgtggaggaggagacggtggtggtggcggctcactaggcctttcgatgataaaaacatggctgagtaatcattcggttgctaatgctaatcatcaagacaatggtaacggtgcacgaggcttgtccctctctatgaattcatctactagtgatagcaacaactacaacaacaatgatgatgtcgtccaagagaagactattgttgatgtcgtagaaactacaccgaagaaaactattgagagttttggacaaaggacgtctatataccgcggtgttacaag

SEQ ID NO: 187535 - DNA, 202 bp, Arabidopsis thaliana landsberg
gaggaagagacagagagggcagagaaatggaaaaactttcttgaccgacaagaagacagaaccgctgaaccttgttgctcagatgaggagtttcacgatacatcttatgcctgaggtttggaatctggagaggatagtgattcagaatcagatgagggttcaagaaacgggaaacattgagaattgtgacttagtggtacat

SEQ ID NO: 187536 - DNA, 890 bp, Arabidopsis thaliana landsberg
atgaagagtaaggttcagatgtagttttgaaatatactttttgcctaattttggatgagacagacaaatctaatcaaaaagattcagctgatttgtgattactggtaacacaaatagtgtttatatttgtaatcatccatgtgggggtggaatctcctgcaccacatgtctcagttccccttacgcaatcatgtttcttgtttttaaatgctaatgtgatacctatacagtcttaagttattataaagttcatattagtgtacatgtaagagacttataaaataatttgtagtcaatcaaatttttaattgatactaacaattgatccaccgaatcagctttcacaatttctttaattgtagatcgtttgtaacattggacccacgaattatatataggtcgcattcgacaaaatactcaacatacttaaactagttgtcctaacaattagttctttggattttacttgcctatttttatattttccggcttccaccacatattaatttatgctaaagttttcgagaaatcaaatactgaagattcgtatcccgagcaagcatagatgagacgctttgtcgtttcactttgttttcccacccaaaccagaacaaaatttattggccttcgaatatttcggaaaaaacaaacaatattcatttaatggacttgtgaaagaagggtgatattaatctttaatcatgtcacttaattgatatgataaatattcaagtgaatcatgtaaagtggaaatcactgtgaagtagaatgtgtcctaagggagtttcgtacctttcaaccataaaatccggcaaactattaaggattccaatggatataaagatgaaggagagtgtgaatgtgaagcaaacttcaaaaggaagaagtga

SEQ ID NO: 187537 - DNA, 220 bp, Arabidopsis thaliana landsberg
atgagtgattgcaacgcagttcacattccaatggactccggtttgaagctatcaaaggcgggaacagagaaaggaagtcatgactcggagacagagaagaacattgagccaaaagagtatagaagaagcattggatatcttcggtatctgcctcacacacgacctgacctctcatactgtgttggcgtgttgagtagatacatgcaagaacctaaagaag

SEQ ID NO: 187538 - DNA, 234 bp, Arabidopsis thaliana landsberg
atgtcttctaaatttgaaatgagtaaccttggaaagctaacatactaccttggaatagaagtcattcaacacaaagatggtatagctttaaatcaaaatcggtatgctctcaagatcttagaagaagctggtatgatagattgtaatcgtgttcatacaccaatggagatgggcttgaaatccttaaaagcagaggaagaagaggaagttgatgccactgcgtatagaaagaat

SEQ ID NO: 187539 - DNA, 49 bp, Arabidopsis thaliana landsberg
gaatccacagatcggaggtatttcttggatatagctcgagaactttttg

SEQ ID NO: 187540 - DNA, 517 bp, Arabidopsis thaliana landsberg
atggctaccgacattacctacgaggacaccgtcaccggccagtccgacagcgcatccatcgagaacgacttcatggtcatcgtcgatggggacacctacgtcgacggctacaagatctacgccaacggcacggtcgtactgacgatcaagaagcgcaaggacagccagtcatgaagctctcgaccaagcgtagtccggcgggacaggtctacctggccgcgcagatcatcgccagtgcctgggtcttcggcgtcgtcaccaccggccgagcggtctgggtcggcgccgacgagctacgtcgggcggtgaccaggtgaacaggcgggagaagtacgaggtcgcccagcgcctccaggatcacctgtaccagtgcgcgatcgagtacttcgagagctgccccacctggaccacgcgcgaaggcgagaggttcacgctcggcgatggtttcgactgcatcacgatggcggattcgagcggccagctctatgaggtcgacgtcgatatcaccgcctggccg

SEQ ID NO: 187541 - DNA, 395 bp, Arabidopsis thaliana landsberg
tcgacgaggtggtccgccagttcgactcggcagccgaagaccttggcgtggaacggatccggaccatgtacaacggctatctggccggcagtggcatcaccaccccccggctggacagcgtgcatcgcaccctggaattcgcggtggaaatgcaacgcatcatcgaccgcttcaacggccgaaccggacaccagctggggctgtgggccggcgtcaacaccggggaagtggtcagcgggctggtcggtcgctccagcgtcgtctacgacatgtggggctcagcggtcaacctggcctatcagctgcgcaagaacacgtcgcagcccggcatctacgtcaccgcggcggtctacgacctgatgcgcgacagctggcagttcagcccggccggcagc

SEQ ID NO: 187542 - DNA, 109 bp, Arabidopsis thaliana landsberg
gaaaaccctcaggacgtgtatccagctctcggaccccaacttcgtgaagtatgagctctgggtcaaaaaccttggcatcgcccgctgtctggggctcttcttccgttag

SEQ ID NO: 187543 - DNA, 1101 bp, Arabidopsis thaliana landsberg
atggccaagaaagctttactgattgggatcaactacgtgggaaccaaggcagagctacgaggctgcgtcaacgatgtccgtcggatgcggataagcctcgtcgaacggtacggattctccgaggagaacatcaaaatgttgattgatactgatagttcttcgatcaaaccgaccggtaagaacatcagacaggcgttgttagatctcgttgaaccggctaaatcgggtgatgttctcttcgtccattacagtggacatgggactaggttacccgcggaaactggagaagatgatgatactggttacgatgagtgtattgttccttccgatatgaatctcatcaccggtaagtgaaaacataaactaaagttgacttttaatttttcatgtttacgtaacaattttaaattttccttaccagttccagttgttatgaattattaaggtgactctgttttacagatgatgatttcagggatcttgtggatatggtgccaaaggattgtcccatcacaatcatatctgactcttgtcacagtggcggtctcatagatgaagccaaagagcagataggagagagcacgaagaagaagaaagactctggagactcttcaacgatcaacaaggagacagaagcagagataattgaagtgggaaacagatctctgccattggagactttgattgatatgctgaagcaagaaacaggcaacgatgatatcgaagtggggaaaatcaggacaacccttttcgatatgtttggagatgattcaagtccaaaggtgaagaagtttatgaatgtgattctaagcaacctacaagagactactactactattcaaactgtttcagatgaggtattgggatcagttgagaacctagctcaagagtttctggagcagaagcttagcgacgatgtgaaacccgcgatccaagatgtgtatgcaggtgctataaatggtgcacttcctgataatggtatactgatcagtggttgccaaactgatcaaacttcttcagacgcaagcccaccgggtcacccggaattggcttatggagcactaaccaatgctatacagattataattggggagactaaag

SEQ ID NO: 187544 - DNA, 484 bp, Arabidopsis thaliana landsberg
atgatgaaggtacgtgatagtagacgtggcccgatcttccgtgagatacgatagcttgattgagtggagatgtcgacgttgatgatccaaggctccgagcgaacggttcctcgcaatcactacaccacggctccgttggttatcacccgtgacacacgaatgacctcgccacgaaggcttatcccagcaagcgcaatcaagaacacaagcaagaacaggaaagaaacgcaaccaaaattgtattgattacgggatggggtcactgttcgatgacagaattgatctaagcaaaacccaaacctaaatatggcggcggctgctgaataaatagagcattagggcgtgcgtggaccctggactcgcccctaatgggctccgacgcgatacatgccccaacggcccaacagacggtgtcgcagcaccaaaacagaatctgaacgctgacttgtttcgacgatttccgttgactctggatgaattttag

SEQ ID NO: 187545 - DNA, 221 bp, Arabidopsis thaliana landsberg
gcaaacaggtggcttctgccgagttctactacaccaacgacctgacctcggacaacgaacatcgcgtatggagccacgttccggcgacgatcaatgaggataggcagacgatcgttcagactattccaaaagaagggtataagtatgcgtttttctatttgaaggataccgatgggatttccgggacgacggtgtttttgaaagatggaaagatggattag

SEQ ID NO: 187546 - DNA, 100 bp, Arabidopsis thaliana landsberg
atggccctaattgacttcgtcttcagcaagaaagattacaagcctccagaaatatttggtgaatactattttaaagccgatatgtaccatcattttgctg

SEQ ID NO: 187547 - DNA, 462 bp, Arabidopsis thaliana landsberg
aaacaatcgttgagaaagagtctgcagagaaggacacttgtcaatcacaaagaaaaaggaaagaaccagttttgcatgaggttgatggctcaagtagtggtgcagcaaagaaacaagaccataacgctaaggagcgtttaaggaggatgagacttcatgcctcttacctcactcttggcactcttcttcctgaccattcttcttcttcttcaaaggttttgttttcactgttattattacaagttaggtatgttctgcttgttgttgagctatatataacttttcttgctgattggcagaagaaatggtctgcaccatctataatcgataatataatcacttacattcccaagctacagaatgaagttggagagctaactctaagaaagcagaagcttgtggagttagagagacgaggtccttctattcgagcaatctcggttcttgaattgggggaatcag

SEQ ID NO: 187548 - DNA, 394 bp, Arabidopsis thaliana landsberg
aagtgcgccgcatgcagtcagcgcgacactggtgcaggagcagacagtcgagggcatgattaggcagtgcccagtttattacgtctccgaagtgctaacaccatccaaatgtaacatgacggaactggagatgatttcctatgcggttgttatgtcttcgtgcaaattgcgccattattttgaagcattcaaggtccgggtcacctcagataggggactaggtgaattcttcagaaacccggaggcatcggtcaggattgccaagtgggcggccgaactcttcggctaccacatcaatttcgagcccaggacagccatcaagtcacaagtcctggcagacttcgtcgttgactggactgggccaataacacagccggacccgtccgcagagaag

SEQ ID NO: 187549 - DNA, 86 bp, Arabidopsis thaliana landsberg
attttgttgaacgtatatttgccagtaaaaatgagtacagacatgaacaacccaccagtgtcgtgcccaagtttatcggggcttaa

SEQ ID NO: 187550 - DNA, 89 bp, Arabidopsis thaliana landsberg
ctaaaactcatgttgatgaagttgatgaaaaaatgccaaatgctacggtctttcccacgaagaaaattgcaatgagatcacgtcggtaa

SEQ ID NO: 187551 - DNA, 324 bp, Arabidopsis thaliana landsberg
tttctactaaggagatcattctgggcactcaggatgggcagctgtttgagatggccgtggatgagaaggataagagagacaagtacatcaagtttttgtttgaattagaagaacttcctgaagccttcaaggctttgcaggtactaaaattttataccgagttggaattatatgtttcctccattggttcattattccaatcactgtcttttattgaaacaaatgtgtagatggaaacggccaacataagcagtgggatgaggtactatgtgatggctgtaacccctactcgactctactcgtttacagggattggatcattag

SEQ ID NO: 187552 - DNA, 358 bp, Arabidopsis thaliana landsberg
gaacagaaaaaaactgggttcttaccaaatattgccgtcggcgccggagaatgagagggaggaggagtatgtgtctttgaagaatctgattccgtcccgctatccagttgggactcaaacacctcagtttgagcataagcttaagtcttctaaacggcgttatgtcaaagttaaagagcctctatttgatccggagacttccgcccgtatatcttggcgcgaagtatccgttgatgacgaccaagaacaagaacacgatcgtgggtgtttctttttattgaagaaaagcattcgaagaacggtcgatatgttgtttggtcctctttttggatcagctaagttcgacgagtttcgttaa

SEQ ID NO: 187553 - DNA, 99 bp, Arabidopsis thaliana landsberg
tttggagctgagaatatcgtgactaatctccgttttgcgaaaaactcatacccgtcttctactacctgcatcacaaaaccattacacatgtccgatatg

SEQ ID NO: 187554 - DNA, 360 bp, Arabidopsis thaliana landsberg
acacatgtggcagaacggcgtaagaggaaacataatcagggatcatcaaatgaggatggtgagagtaaagtgatggagtcaacgcctgtagatgatgttatagcagaagtatctcataagaagcaaagaacagggaaagctcatataaaggtcctgtttttaccatttccgatttttccatatacgtaggtctatattttgacagtgaattaactaacattattatatggttcattataggtcgttgaagaggagaagacaagcttgctggatatttggaatatgttggagaaaatgaatgtcacaattagtgacatggacaagaatgcgagcagcagattggatgggttggagaagaaa

SEQ ID NO: 187555 - DNA, 505 bp, Arabidopsis thaliana landsberg
gcaaaaaaatcgtcgagttgggttctggctgtggcttagttgggtgagcaaaaaccgctgatatttctcttctgagaattactattaacgtgtaaaacatttagttagtttcttctttcagttgtatagcagcacttttgggaggcaatgctgtcctcactgatcttccagatagactgaggctactcaagaagaacatccaaaccaatttgcaccgtgggaacacgcgtggatctgctattgtgcaggaacttgtttggggagatgaccctgatccagatttgatcgaaccattccctgattacggtaatcatctcggtttcattttttctccttttgccttgtacataccattctcgcaccttttatttgctatgtacttgtagtattgggctcagatgttatatacagcgaagaagctgttcaccatttggtaaaaacgcttttgcaactttgcagcgttcaatctacaatcttcctcacaggagaactacgaaatggttaa

SEQ ID NO: 187556 - DNA, 69 bp, Arabidopsis thaliana landsberg
atggctcgtgatctcgcccctgaagttgaacgattacttcagtttcgtgatccaaatatacgcaagaaa

SEQ ID NO: 187557 - DNA, 1413 bp, Arabidopsis thaliana landsberg
  unsure (1)..(1413): unsure at all n locations
atgccttggccaggaagaggccacatcaacccaatgttaaacctctgcaaaagcctcgtccggcgagacccaaacctcaccgtcacattcgtcgtcaccgaagaatggctcgggttcatcgggtccgacccgaaacctaaccggatccatttcgccactctccccaacatcattccctccgagctcgtccgagccaacgacttcatcgccttcatcgacgccgtcctcaccagattagaagagccgttcgaacagctacttgaccgtctaaactctcctcccaccgcaatcatcgccgatacttacatcatttgggcagtacgtgtaggcacaaaaaggaatattccggtggcttctttctggactacgtcagccacgattctctccctcttcattaactccgatcttctcgcaagtcacggccattttccgatcgaaccatcaggtagttacaaagttcccatttttactgatcaaaaccgtaaagttcaatactttcatccataattagtgatttctgaatccgggtttgtttccagaatcaaaactagacgagattgttgattacatccccggtttatctccgacaagactcagtgacttacagatcttacacggctatagtcatcaagtcttcaatatattcaaaaagtctttcggtgagctttataaagctaagtatcttctcttcccttctgcttatgagctcgaaccaaaagccattgactttttcacttccaagtttgatttcccggtttactccactggcccgttaatacccttggaagaactatccgttggaaatgagaatagagaacttgattacttnnnnnnnnnnnnnnnnnnnnnnnnnnnnnctgttctttacatatctcaagggagttttctttcagtctccgaagctcagatggaggagattgttgtaggagttagagaggctggagttaagttcttttgggtggctcgtgggggtgagttaaagcttaaggaggctcttgaaggtagcttgggtgttgtggtgagctggtgtgatcagctacgtgttttgtgtcatgcggctataggcgggttttggacgcattgcgggtataactcgacattggaagggatatgttcgggagtaccgttgcttacatttcctgttttttgggatcagtttctgaatgctaagatgattgttgaggagtggagagttggaatggggatcgagaggaagaagcagatggagttgttgatagtgagtgatgagatcaaggaattggtaaaaaggtttatggatggagagagtgaagaagggaaagagatgagaagaaggacttgtgatctcagtgagatatgtcgtggagcggttgcgaaaggtggttcttctgatgctaacatcgatgctttcattaaagatattactaagatcgt

SEQ ID NO: 187558 - DNA, 300 bp, Arabidopsis thaliana landsberg
atgtttgctcttacaatatttgtcttgagggatacggagactcctctcttggccaaacccggtagtgaacttatccctaagaggttcgtccaccggattatcagttttgacgatgttaagctggtgaaaaacgcaatgaaaatggtaaatttgttttatttcctaattttaagaatctcttgatcatgtatacacgctgacatttttttttgcttttaatctatttttgttagacggtgaacgatgttcttcttggagtaacgcaagccggactttcgcgttaccttagtcgaaaatatg

SEQ ID NO: 187559 - DNA, 1085 bp, Arabidopsis thaliana landsberg
atcataagctcggatctattcaagcttctgaagcaaaggcatggaaagtcatatgatactttcttgaagagcaagttacttccagtagttgaagacattgcagaagataatcttggggtggactctgaaacatcactcaagattagtgaggagattgatatcattatcagttctgctgctaccacaacctttgacgacaggttcctatgtttcttttgctctgttgttttgttctgtttttttttatttttgtgcgagttgatggacaacgataataaagcctatggaatttcaccggtccttggaggatttattcagatgcatgtcaaagagggaacaacttgcgagaaagggagtcagatattacattgagtatcaaaggaaagaagaagctaaagtattttgtggccatggccaaattgtatgagccttacgcgttctttcaagctccgtaaaacatacagatagctatcagattactgactccttattatcaggtttgatgacactaatacaaggagaatgataaaggagatgtctatggaataaagagacatgacttctcatcagtggaagataaggtttaagtgtttttcagtaattctagtacatgtgaatatgtgattgtgttcacaatgtgataatctgtgtcctaccagtcaaatatacttcagtatgtgttacattgtcaaaaatatgaatattttgtgtatattacaaatggtaaaacccaaacaatcaaacccgaggtctcacatttagattcagttttttttttctgatacaagtaagtgatgtcacattgtgatctatccttatgtacaaaaccgtcgtctaaagaatctggcaaattttgtatatagtaaaatattagtggaccagaaatcaaacatattcaaaagaaacaatcgagcatttagtgtttttaacctcagaagactattttgtcattctagtaacggctcacgcagcagaggcttcgataatgatccagcagcttcgagctccataaagaacgttacagcgacaccaacaaacgagcacaatgctggaacaagacctaaaccgtatcttgtaactgaaag

SEQ ID NO: 187560 - DNA, 143 bp, Arabidopsis thaliana landsberg
aagaagcttccaaaactgcgacaccagacgatatgaacaacgggaagaacattcctgagcaagcagccattgcagccaaagctccacctagagccaaggatcctgtatctcccatggaaactgatgctctgtatcgattgtga

SEQ ID NO: 187561 - DNA, 720 bp, Arabidopsis thaliana landsberg
gattgtggaggtccatctcactgcggaacgtcatgtagtgcacttgtgtcagaaaatgtaagaggtattaaaatcacactctgacagcatgttatcttaatgtatattatgtagctcagtagagaatgataaggttgcagattgcacaatgcttttgtgctaatgaagagttaaaccatcttaaaaatctaatcatttgcagggtatgatgtatgcacttctctagggcatgcctcaagcacaaaagttgatattattggtaaggtttaagatatgtgaaaattgagactattttcaccctgtgttctaagttgtgaaaaagctaaattgttaatgctgttttctcccaacttcgtttgcaataataatgtaataaatgtgcctcaggatttttgttttgaatatggtagataaagaggatcctggcaaaggcgtcattgttcagatgtcaactggaaataggaaccaaaattgctcgctttcagtttctgttatttgccagaaaactaaagttgatgtaaggatttgtatatcagacatcctacttaagcgtatgaattgaagttgattttaggagtttttaagacgtaaaacctcgttcaccattttcttttctcagggaccactcactttggcgaaatctggtacctgtcagtatgtgagtgttcagtaactcatctatttgctcttttcctgtagctttcaaattaccaagtgtga

SEQ ID NO: 187562 - DNA, 396 bp, Arabidopsis thaliana landsberg
tgtctaacgagggcgcttagagaagagaacccaaagttcttgatggctgcatcagctttggctctaccgtttcagcctctcgtggtatcagctgttcacactggaatgatggaggttctataagaaatctcaacttttctcactccatttaactaaacctcggtcgacgctaatctaacacaaatctctcaacttttgactcaggtagcatttgcgaaacgagccttagaggatccggatttgaaaatggctcatgatgtacacaagatgtcttcgttattaggcggagcattgttcatagctgatgatcttttccctgaaacaccattcattcacgccggttggcatctcgccgcagccattggcgttggaacttgcaataagcttcttcagtaa

SEQ ID NO: 187563 - DNA, 475 bp, Arabidopsis thaliana landsberg
atggcggctccggctgccgcgacagcgagggcacaggcgctctctctcctcgccgctgctaataaccacggcgatttggcagtgaagctctcgtctcttagacaggtgaaggagattttgctgtcactggagccgtctttgtctgctgagattttcccctatctcgcagaactccacttgtcccgtgaaattctagttcgcaaatcccttatcgagtgagtccctttagcaattttacggtttccccctttcttcttccactccgttttgatgttttcccttgctctgcacgaacttgtagaagaatttttatgttgttgcgtggttagggttcttctctatttttcccaatctggagaaaagattatggttattaatttgtctgtcaaggtaagagactggttgatcgattcttctggatggcaggatcattgaagaggttggttcgcgtatggtggatcattcctatgttcta

SEQ ID NO: 187564 - DNA, 308 bp, Arabidopsis thaliana landsberg
tccgccttcgctggaacgacagccagcgccgctactgggaaggccgccgcggcaacggctggcacggccgggacaactggagcggctatcgcaacggccagaacgcgaaccgccagaactggcagcaacgccgcgaggcctggcgcgcccggcagggcaacaccggccagagcgcgggccagagctggcagcaacgtcgcgaagcctggcgcgcacaacggcagagccagccgcagggcgcgaccgacgggtggcgcggacgcggcaactccggcgcccgccacggctggcgcgggcgcggcaactga

SEQ ID NO: 187565 - DNA, 135 bp, Arabidopsis thaliana landsberg
atggaagaagttgcacagggcagagtgtggaccggtaaggatgctcattctcgtggtctaatagatgctgtcggtgggctgtcccgagctatagccattgctaagcagaaagctaatattcctcttaataagaag

SEQ ID NO: 187566 - DNA, 336 bp, Arabidopsis thaliana landsberg
gatcaaatctcagccttttacggagatctaacggtccagcgatcgtcatctacctcgctcatcacccgaccgaacacccagccacgtcgttcgccagacacggccaagccattaccggccgcacttaaagctcgagtcccgcctaaaaacttcactccagccaccgcaaaacgaagagcagaggcctgcgagactggtacaggagttctcaccgtggatggaagcagagctgaccggccgcggcgtgtggatcacggcgaggcgcaataccctggcgtccagaagcttccttcgcgcacgccccagagaagatcccgagcggcgcccaaagcctag

SEQ ID NO: 187567 - DNA, 316 bp, Arabidopsis thaliana landsberg
atgctgaagaaggggtgtccgagtgggtgaggtcggcgactgaaactcccagggcttggagtgtccaagggaaggtgacgttgatgttgtgtcgccatccaccagcagcctttttgactcggctttctctgatcactgggtagacaagcaaggggtacttgttgttggtcacttgttttttattgttgtgaaccaaaaacaaggcaacacaattgttaaacgttaaggaccttcaccctttagagcattatctcctttcgggtataatggtcttcagacgaaggtcatgaagaacaggtcttcatcattcataaaa

SEQ ID NO: 187568 - DNA, 639 bp, Arabidopsis thaliana landsberg
atggggagtttggatgatgttgagtctgagacaggtgtggagggcgtgaggatgatggagtcacctgtggttgagattgaggagcaagaggtggagctaatccaagcgcttgttcccaatttcttcatggatgactatgttttgatcgagtcagagttggaagcggggaggattatgttgttcttcccaacagtccagtctcgacgctcgttggtgcagaaacggcgtttgatctcgcgtcatcgtctgatgacgatggggatcagattgtccctagtacgccagtgatgaccccgattgttccatcattcgcgtacccgacattaccggattcgccacttacctcgttatggcgagactacgatcgtatccgacatggggacactattgagaccgaggtgggagttcctttgactttggcaccggcactctgggagccctattgttatacgtgtgggtagttagggcattatccgaggatgtgccgctactaccagccgtacggggatcccgtgattcgatgtcttgcatgtgacgggatagggcactatgcgagtgcatgtccggtggtcatggcgggatcgtcggagagttcatctcatgtgtttcctcccactgcagctgacccagcgactctag

SEQ ID NO: 187569 - DNA, 61 bp, Arabidopsis thaliana landsberg
atggtgcaatgctttgattggaagatcgacggacataagatcaacatgaatgaggttgctg

SEQ ID NO: 187570 - DNA, 254 bp, Arabidopsis thaliana landsberg
aaaaaagtgtcatcgcaaccggattaactcgtttatgtgaagtttcgactatcttgcttggcttagtggtagagctaagaccttcctccacgacaccactttggtggtttcatcaatcttatttgtcactcacatctcagtttcggatgaatgacggcgctgtagtaacactcatgaaagtttgttatctcttacttgtagcttcaaaaccagtgataggaccggaagaggcacatctctacactctactttga

SEQ ID NO: 187571 - DNA, 65 bp, Arabidopsis thaliana landsberg
cggttggttttgcagccattggtgctggtgtcgatgttgatgcttcctccattatatcaacgcag

SEQ ID NO: 187572 - DNA, 399 bp, Arabidopsis thaliana landsberg
atgaacgctttcagcgataataagtccattgctattcacaagagtcgcgcatgcattgatcttgtatcaatcaggtatcggttaaacactcgtcaacagtagtaggattgggaaaacaccagtggatttttgttctagaatcctgccagccagttggaacgtgagcagaacagctagtgagtgtgcaatgtaaggggccatttcccgacaggagttatagggcgatcataaacctataatagatccatgtaacagtttcctggtatgtgacgaaaaaagaacattgagttgtgaaatcccagaagtgaggcagtctttggagcctgtcccccatataggctgtccgtgcaaaagaagggaaagtcctattacgactatgttatgaccaatggcttttga

SEQ ID NO: 187573 - DNA, 108 bp, Arabidopsis thaliana landsberg
ctaagtacgttgtgatcatctggaatgaattgtgtgtggagcacgacgagctggatgcaagtaagagccttagcaagcagctgagcccagcgaagagccctatccgtg

SEQ ID NO: 187574 - DNA, 933 bp, Arabidopsis thaliana landsberg
atggacttggctcttcattgtcattgtgcttacccgttgatcaaactaggattcatgagagctaaatcagccaatcatcttcatgttcgaggtaatcgaatatttgctaaaatcattagagatattgagaatgttccgagttttgtagaactttaggaactgccaaccattttttctgtacagctaaactgaatttggacagattgcagatactcattcactgccgtttgcgttgcgctttgagcagagtctttcgagaacaacgattaatggagatagaagtatttggtttcaagagaaaggtggttcttctttttcttcaatgggaagatccaagaaaggatgtgtttgttgcaagaaaccgtctgataaacgaacgtcaaacccaagtaaatcgaaccaagaggagatcatttcgctcttgaaacggattcaatcttcgatctctaaaggagagtctcgaggagtcgaggaagagaagaacagcgatgagtcttctaaggaaaagccgctgaccaaagctattcttgacgttcttgagaaatcaagaaaaaaaactgagggtaatcaactatgctttggtcaaatgtcaaatccatgttctcgccatttgttaatataatcaactctgcaactgtaggagatactagtgtgaaggagaagccaccaaagagacaagtagagcttcctcgaccaccgtctagttttgtcaagagaactcctttatcttcttctgcctcaggtccaagaggtaagctcccagtatcaaacagcgataaagctttaggagaattgacaaagaaggaagagaaagcttcactgatagaaactatgaaacttgcagagctcaaagaagttgcaaagaacagaggaatcaaaggatactcaaagttgaggaagagtgaactattggagctgataagatcgtcctga

SEQ ID NO: 187575 - DNA, 432 bp, Arabidopsis thaliana landsberg
tgagatcaactcttgtgtcacgtgttcctgtgcaacctttggaagaagtgtacaacattgtgaggcaagaggaggatctgatcagaaatggagcaaagattatggatgatcaacgtgaagtcaatgcatttgctgctcagatgagaccgaagctttaccaaggaagaagtgatgaaaaagaaaagggaatggtgtgtaaacactgcaatcgcagcggtcatgcgtccgatagctgctatgcagtcattggatacccggagtggtggggagataggccacggagccgctcaatgcaaactcggggtcgtggagggactagttcaagcggcgggcgtggacgaggtgcagctgcttacgccaatcgtgtgacagttccaaatcatgactcctttgaacaagcaaactatgctcttactgatgaggatcgtgacg

SEQ ID NO: 187576 - DNA, 140 bp, Arabidopsis thaliana landsberg
aacaattttatggtcacacaaaccttagagataatacaagttttggtttatatttcgttaatgaaggaaacaattgtgtcaacaaaaagaagacgtttttagggaaagctatgtttctctctataccaatggataaatga

SEQ ID NO: 187577 - DNA, 354 bp, Arabidopsis thaliana landsberg
atggcctctactgatgcccacacgccctggcatgctgcctaccctcctccactcaacaaggcccctgtggccatgacacgtcaggcagcattggagatgatgaaggacagtaagaatatcgctggcaagaattatgtcctcatcgatctccgccgggcagaccacgaggttttacctaccttccgtgttttctgagacaacaattaatcgagcatcaactcacccattctgtcatccagggcggtaccattcgcggatccattaatctaccggcacagagcctctacccgaccatcccgtcgctatatagccaattatatcggcggaaagtccaaaaaatcatctggtactgct

SEQ ID NO: 187578 - DNA, 473 bp, Arabidopsis thaliana landsberg
atatcaagccggcaaacctcctgtggagcaaggagcaccgagtcaagatctccgattttggtgcgtcctactttggtcgacccattcgcgatggcgagcccgacgacaccgtttccgagtcagaggccaaagatttcgatgatgatctcgaacttgccaagacggttggcactccagccttctttgctcctgagctttgttacacggatctggacaaggagcaacccaaggtttcggagcagattgatgtttggtctcttggagtaacactctactgcctgatctatgctcgcattcccttcctggcagaagacgagttccagatgttccgaaagattgcgacggaggaggtgtatattcccaggaagcgtcttatgccggttcatccatcgacatcgccgactgttacatccctttacaagcgtcagaacatgcacccctatcgagacgataacgacttggcatatgaggaa

SEQ ID NO: 187579 - DNA, 89 bp, Arabidopsis thaliana landsberg
gccaaaacagtaacatcggatactggcagacacacattcatatggccagagatgaccgaccattatcgaccttccttaaactgatctaa

SEQ ID NO: 187580 - DNA, 256 bp, Arabidopsis thaliana landsberg
agaagattttcgaaattttgcaagagtttgttttgaaaatttcggagacaaagttaagatgtggacaactatcaacgagccttatgttataagtgttgcgggctacgacacgggcatcaaagcggttggacggtgctcgaaatgggtgaatagtcggtgtcaagccggtgactcggccatcgagccttacattgtatcacatcaccttcttctttcccatgctgcggcagtacaagagttccgaaattgtaacaag

SEQ ID NO: 187581 - DNA, 37 bp, Arabidopsis thaliana landsberg
atgccgccagtgtgcgctaaagagttgctggatctga

SEQ ID NO: 187582 - DNA, 422 bp, Arabidopsis thaliana landsberg
actcttagtgttaaccagctgattcgggcatgggatgtgaatgatacttcacaaaccacccaagcggaagccacttatgccgatttaaaggctcatatcaatccgcaggcctttgcgtccacgatgaggggattacgtgaatatttagaccgccacccctccccgcgccttcaggccagaattctgatttataaaatattagggaagggggaactgagcctgcccatagacgagaaagacagaagcgatatccggcaggccctgaagctggcgggactgctcaatgatccccagttactttctgaagtatatacgttgtacggggaacgttcggatatggccacggagcttttttatgatctgaaggccattgatatgcaggaaaggatcggggcaactcatttccccatgctttggatgag

SEQ ID NO: 187583 - DNA, 136 bp, Arabidopsis thaliana landsberg
atgggtcgcttcgaagatcacgagcccgggaccggaaagggcgaaatgcccgagattgacgacgtgccagtcgttggcggtgccgcgatcggccgagtactgacacataggcgaaacgacgatgcggttctccagc

SEQ ID NO: 187584 - DNA, 440 bp, Arabidopsis thaliana landsberg
  unsure (1)..(440): unsure at all n locations
atgaggtgagcatctactccagcnnnnnnnnnnnnnnnnnnnnatgaggtcgatgtaagcgcatagcaccctcgcaaagtagcacggagactaagagggcccaagctcgcctctaaacatctgtcattagtcgatgattggaccgttggaagcccgctccgagcaagctctcaccctcgctagacgaccaccataatggcttgcacttgcctaggaccttctaccagatcaggatccgaggtaggatgacgacatccacgctgacccaagctcaacttggacagaagaagaggatggtgaccatggcagtaggtgtgcataccatggacttccacagccgccacggacgccctcgccacatgccagcatgggaagggcagaaatcagcactgggggtggaacatggagatgatgaagagaaacgaaaccacacacaatga

SEQ ID NO: 187585 - DNA, 450 bp, Arabidopsis thaliana landsberg
  unsure (1)..(450): unsure at all n locations
tgactaaatccgagcatatagcatatgggacgttctcaagccgcttccacttcatttccgcacttgttaacaccatcaaaacgtaagtgtaattgagaatcacaacgaattctccttctcttcccttgttgtttagcggaagaaaagccacgcctctgtaatctttaggttcccaaccgatcaatctatattgatggcccnnnnnnnnnnnnnnnnnnnnnnnnnnnnnnnnnnnngccgggtcgtatcctcggatctccacttttactgaacattgaagcttcctacgatcctcagactcatctcggcctatgcctcatagaaaatactcaaaaggcgaggcagatgtagcagaagattggactctaaagacgaacaaagggaccttctcgagggtgcaccagtctgatatagtaaaagaagggttaagaactgacccacccgtggagg

SEQ ID NO: 187586 - DNA, 460 bp, Arabidopsis thaliana landsberg
atgcgagatcgacgtctcgtactcgtcgtccagggcgacgaggtgaccacctactaccagatgtggctggagaccccctgcgacgaccacggccagcacgttctgaccaaccggctctgcgaggagccgggcatcaccgctgagagcccccacgtgtgggtccagaaggccctggagcacgcccaagacgaactctgtctctgcggtgcggctgaggccgcaccggacgccctcacggccatcttggaggccacccgtgcctgacttcgaggtcgtggcgcaggccacggtgacggcgacgctcttcggggatggacggctcctcatctgcgagtccggccactggaatcaggctgagggtgagcggctgtcctacaccgagtggcacgaggacgtcggcacctgtgagccccaggagctcctctacaagctggtgaccgaaatgcaggaccgcgtctaa

SEQ ID NO: 187587 - DNA, 558 bp, Arabidopsis thaliana landsberg
  unsure (1)..(558): unsure at all n locations
atgataacagatcaggataagcttctaagtgatattgttgttgaagtctttccagatgctcgtcatattttctgtttgtggagtgtgctgagcaaaatttctgagatgctgaatccatttgtgagtcaagatgatggttttatggaaagtttcagaaattgcgtagcaagctcttggacagatgaacattttgaaaggaggtggtcaaatatgattggtaaatttgaacttaacgagaatgagtgggttcagttgttgtttagagatcgtaaaaaatgggttccacattattttcatggaatttgtttagctggactgtctggannnnnnnnnnnnnnnnntatcgcctctcatttcgacaagtatatgaactcggaggctacattcaaggacttctttgagctctacatgaagtttctgcaatatcgatgtgatgtggaagctaaggatgatcttgaatatcagagcaaacagcctacactgaggtcttctttggctttcgagaaacagctttccttgatctacacggacgctgcttttaagaagttccaagctgag

SEQ ID NO: 187588 - DNA, 44 bp, Arabidopsis thaliana landsberg
atgggcgacggtttctaccctgtggagaccaatcctcggacccg

SEQ ID NO: 187589 - DNA, 57 bp, Arabidopsis thaliana landsberg
aggtctctcaatcggacggctgtgatgcagacgttaaaactcacaataattcaatga

SEQ ID NO: 187590 - DNA, 152 bp, Arabidopsis thaliana landsberg
ggctggacaagctggcctgtgatttcttgcgcattttccctctggtctctattgtccgcttctccctcttcgataacatacccatcctctatatcatcgtctgtatcgaccactccacaaacatatgcaccgttgccggtcacaaactatag

SEQ ID NO: 187591 - DNA, 149 bp, Arabidopsis thaliana landsberg
aacagttggttctagcgaatccaggaccgccggtcataaatgagctacatgtttctctctttgcggacttgataggacacgacaaaatctttctgacggtggctgaggccgtggattcttgctcccctaaactgtccgacgaggtctga

SEQ ID NO: 187592 - DNA, 120 bp, Arabidopsis thaliana landsberg
tacgtacgtatatccaaatatcggaataagatacgagagaaaatggttaccccatttatttatgtggagataagaagcaagcaactaaagcaattaaaagtaccaaagaagaacatttag

SEQ ID NO: 187593 - DNA, 119 bp, Arabidopsis thaliana landsberg
ttcttgatgaattcagattctgttcaatccagctaagtaaaaagcaaaaacacgacaaaatcgaaatgagcgaaatcgcaatcgtaaacatcaaagagaacagagaaaaatcttcttaa

SEQ ID NO: 187594 - DNA, 813 bp, Arabidopsis thaliana landsberg
atggatcataagacgaggttagagcaataatttataggagcaacgtatccctcaaaatccatttttttccatcctagaatggagcgattcgaaggagaatttatgttgtccagctaatcatgcctttaagtttgtaatcgagaatataccaaattaaaaggtagtaaaagttttccataaataaaaatgggttgaagcccgttacgagttcaaccgaagtaaaagcgagttaaaataaaaaacattagtttggggacatttttggaagaggctcaggaacagactccttcatcgctggttcagcattcgaagtggatgtttcgttcttatcatccaacttgggcttggttttgacgtgtttccaggtgttgctgtcttctccttcatcatcatcttcgctttcagaagggatcacttcacccggtgcagacgcgggtcatgaacttgacttcaactgtggaggtacatccaaagcatggtcgggatcttggcaacagaatcgaagttcctccactcccattgaaagggatcgctttcctgagccctcacattcctttccacacaagcgatgcgcgcctcaagcatctgcctcttaagacccgagcgctgcctctcatcgcacatgcggtggtgtttatcgataacctaacatggaaaacatgtgaaaatagggagagagtaaaagagtcttcaaagagagcggttaccgaccttatacatgaaatcttacgcctctttcttatccttcggaggaaaatgaaaggcggcgtgcggaaagaaaatgtcggccggttcgaaaccgtcaccgaataa

SEQ ID NO: 187595 - DNA, 183 bp, Arabidopsis thaliana landsberg
gatatcttcactctctttattgctgagatttctgagctatctgatactgtaagcccttatttctctaagagggcgaaaatcttggagacagtctctcgattgaaattttgtctgctaatgctggacgaggattgccaagatttagttcacgagatgttcaaccatgtttttctctctttgttg

SEQ ID NO: 187596 - DNA, 786 bp, Arabidopsis thaliana landsberg
atgatcacaccgcgaggtgggggcaaagtcgaagtcaaggatgggctgggctttgtcggttaaaaggcgaggctcatgaagatcagagtcaattcaaattcaaacgtttgaatagttaattcgaaaattgaaacggatacatttaagatagaataattgtgtgtaaatgagaaataaatgtattctttgagtataaattatgggtcaaggaccatgtaaagacacacgcatttttgtgcaaactaactatacacattttcttacgaaactcatagctttctctataatcatcaatctattttctagtatatttgtcctcaagaataatccttctcactaaataaataaatacttgagtgtgtgaatctgacatccacacctcttaccacatccaccccccgttacccacaaggtaacggacaggcagaagccgccaacgaagctatattgagcaacatcaagaaaatacttgatttcaaaaagtcaatgtggtccaacgtactccacgaagttctctgggcctaccgaactacaccttgcaaatcaacgcaagaaacatcgttctctctcgcctatggtttagaagcagtaatccgtgtcgaaaccatagtaccaagcgtaagaagaaccgccagtcctgctaacttggacctaaacacgcaaatgctacaggacaacatggacttcatcgatgaacgcagagatcaggcaatgatcagagttcaaaactatcaacaagctgccgcccgctactataactccaatatcaaaatttggagattttaa

SEQ ID NO: 187597 - DNA, 209 bp, Arabidopsis thaliana landsberg
atgctgagaaatgatctcttgatcttgaaccttgatcggatgaattttaaggaatattttcaaggactctctgaacattgcagaactcaaaataaggtagagaaacatacattatgtggaagtagagatatgtgggtcaccttaatgttccgtttctcattctcactgcagttgatctttaattgcttcacctgttacagagactttga

SEQ ID NO: 187598 - DNA, 142 bp, Arabidopsis thaliana landsberg
aacaaagatgaaggatatattgagaatcagcaacagaacattgctgatgcaattgatcttctttcacgccttactactggaattgatgtcaatattaaattcaggaggttaatactttgtcagctgtttctgcttataatag

SEQ ID NO: 187599 - DNA, 54 bp, Arabidopsis thaliana landsberg
atgggcgatgttcggcggcatttatatagtgagggagcctttccgattctggcg

SEQ ID NO: 187600 - DNA, 49 bp, Arabidopsis thaliana landsberg
atgttgccaaccctttcgaaattccgctattccacggttaaacaaactg

SEQ ID NO: 187601 - DNA, 159 bp, Arabidopsis thaliana landsberg
atctcgttcttccttgatctacgttacgcttttagtgaccggatctgtatggatctgaaccagatctacacgccgatggtggttttggcctggtctttcatagatctgatgcatggaggctcagatctactgtacagagatactgtagataatcgatga

SEQ ID NO: 187602 - DNA, 2345 bp, Arabidopsis thaliana landsberg
ggttccaacctggatagcaatgcaaaaatgtggcgcctagttgctgaccttatgaatgatattggtatgtaaaagttagttgtcacatcacacttgatactaattgcctgtatttggttctcagttgaatgactacaagctttgttgcttttattgcaggaatgctaatggaccttctttctcctttgtttccatctgcctttatcgttgtggtttgcttagggagcctatcaagatcatttagtgcgtatcatttcttgcatcaaacattgaagttaagacttcggtttggattgatacatcggtttttaacttttttcaatcttggctattagctggtgttgcaagtggagcaaccagagcagctctaacacagcactttgctcttcaagacaatgcagcggatatatctgctaaggtactctttacttcttgtcactgtgaatgatatagaaactataaatgtgaactttgagtaattctttgcttctattttatctattgaaaggaaggaagccaagagactatggcaactatgatgggtatgtcattgggaatgttgctagctcggtttacctctggaaaccctatggctatttggctatcgtttctctctctcaccgtgtttcatatgtatggtaagtcacaaatgaaggttaaagcatagatcaaatcagaatttctctcactgtttgcctttcttatatatttagcaaactatagagctgtccggtgtcttgtattgaattcattaaactttgagaggagtgcaattcttctaacacatttcattcaaactggccaaggtaatttcgaaatgcgccattgattctttcaagttttcagtggctttcctttgttttttattggtttctctttattattgcaccatataccaataactttctttaactaaacgtgttgccagttctctctcccgaacaggtttcttcaatggagggtgtattgcccttgtgggccacttcattgaggtcaacgaattcaaagccattgcataagagagtgcagttaggtgtgagagtttcctctctccctcgtctagatatgtaagctctatactagattatcataattttcgggtaaagaatcggctcaagcttgacatatttgtgtgcaggttgcagctgctaaatggtgttggagcttcttcatacaagaatggtttgattgatttatttttccacaatctttcaaggacattagtttctctgtccatacttgacgtaagctcggttcttgtctgttgttgtacactcctgcagctaagtatttattggctcacataaagggaaatgttagtgtgatcttgcacaaagattcaaaacctgcagatgtgttgaaatcatatattcatgccattgttttggcaaaccttatggaaaagagcacatctttttattcagaaggagaagcttggattgataaacactatgacgaattgctccacaaggtaagattaaatcactaggaccagttaaaccgtgtttttatgacactaaagctactgttttcactctttttctttctgttgtttcccatgtagctgagatcaggaggttggaaaacagagcgtcttctttcgccttccattacttggagagctaattggatatctcacactttcgctgctaagttcgactgagctttatcgcctttcaagatcaaaatagtttgttaactcgttgcaaacatacaaaaatatgttagttctaagtcatgtaaaacatgtaaccgatgccggtttaaccgtaaaatgtcggtttaacattgtataacgtttgttattaatggaaaattaaagaattataataatggcagccgttttatttttttggaaacgcaaaaattggaatcggatccgcttcgaacgtataaatacttcaattttgtgattctctttcattatcacttcatgttcatcgtttagctcgtagctgaagctaattccacaactccggccaataattccgccggcgaatggaatccacggtgagtatttcgtttatagtcagacacttgtaccctagtttttggaattcgattaatttattgtttgttaatgctattaggtcatgcctgggtttgatagaattagcgaattgccggaatctttgattagtcaaatactgttacaccttccgactaaagcttctgtgaagacgagtgttttatcgactagatggaagaatctatggcttaatgttcccggacttgatttgaactgccgtgatttcccctttcagaacaacaacgaaaaactgttgattgatttcattgacagatttctccagtttaacaatgagtcacgtcttcaaaaattcaag

SEQ ID NO: 187603 - DNA, 1021 bp, Arabidopsis thaliana landsberg
cactctggaattcctcatgtagcccttagctcctgggctctgcttacttttggaccaaaagtctgccgtgactatggattattcacgttttgtctcatttacattctcggaggagtctctggaaatttcatgagctttctgcatacagcagatcctacagttggaggaactgtaagtttcactaatctttcccatgtgatattaccaaactgcaccatacattctgttctcaatcgtcttcgtgtatatgggtgggtgcagggaccagcatttgcgttaataggagcttggctcgttgaccaaaatcagaacaaagagatgatcaaaagcaacgaatatgaggacttgtttcagaaggccattataatgacaggatttggtctcatattaagccatttcggtccaattgatgactggtaagtttccaatatccatcaatatttcttcagctagttgtttcttgttcagcattctttattatttcttcagctagttgtttctacgtaagcagcctcttcttaggttcagttcattataaagaatcatgacacccatctgcacatatggttctttgaattgtcctatgatctttggtttgataagtagtaggatcaatggatcataaacaagattgataggtttcaaactgcttaactcttactttattcaatcgaccaaagatctacaacatagactatacgtaagcaataacatgttaaccaaggatattgtgtttttcttctaaccaataagtcatgacaggacaaatctgggagcacttatagcagggattgtatacgggtttttcacttgtccggtgctacaacttggtagcggcggaagtgaaaggcaagaagggattgtgacggttggaccagagaaacaaaacagcgctgacccgtgtaaatcgtttctgcttttcacaatcttcgtcgcggttattgtgacttctctgctactgattggggacggtccattggacttcccaacgtacgatgatgttgtgtattctctcatttag

SEQ ID NO: 187604 - DNA, 567 bp, Arabidopsis thaliana landsberg
  unsure (1)..(567): unsure at all n locations
atgcagaatgcaacaaatcagtcagtcctttcggctacaagggatagtctcccgctttccagtaagacagtgttcatatatcatcaagaagacccgtcattactggtcaagatatagaatctcttcaccttccancttgttcgtctataaaagcagaggaagctgccaatatccccagaaatgaagcactaatagctaaatccatcaataagaaacgtgtacaggattcaaacaagcagctaaaactctcatctcaatggagtgacctgttctcccgaaactcacggcagacgccgttaaaagaaaaggtgagggagaagaaaactcacggcagacgccgttgataatccagccattcgccagaacatctttgcagctcaagaagacgtcgaattgtctccgtccacagattcggatcttcgaaaccctaagggaaatttcgcccgagaaacaaaaggaagaagactagattggaaagaactattcgaaaccctagaatctgtaatctctctgggaagaaaatattcgcagaaattggaatctgagatcgatagagattggatgtga

SEQ ID NO: 187605 - DNA, 128 bp, Arabidopsis thaliana landsberg
ttgaccgatcggaaacggcgttgcatgaagttattcggatagtttcttctccagttggtggtctagatgaccttgaagaaaacttgaaccaggtttctgtttctccatcatcaaaccttgttacccaa

SEQ ID NO: 187606 - DNA, 496 bp, Arabidopsis thaliana landsberg
gttatgattatgaaaattttggagcatcctaacatcgttaacctcattgaggtgatagatgaccctgaaactgatcatttttacatgggtacttaatctcctttctcttttctactgttttgatatatactctctgtggaaagagcctttaatcttataatgcctgtctttctggcttctcctagttcttgaatacgttgatggaaaatgggtgtatgacggttctggaccgccgggtgctctcggagagaaaactgctagaaagtatttgcgggatattgttactggactgatgtatcttcatgctcatgtatgatcttcattgtttagcgtgcttctctcacttcatggttcatcacctaatgctgtcttcaaactgtttctatggggaaaaaaacaggatgttattcacggggacattaaacccgacaatttgctggttactagtagcggtacagtgaagataggagatttcagtgtcagccaagttttcaag

SEQ ID NO: 187607 - DNA, 112 bp, Arabidopsis thaliana landsberg
gggttcgtaggctggcccccgaaggttacgacagccgcctcagagcacgcagagcgagggatgactctgggtacgtccgatacatggccgaggctcgagctacgctcccgag

SEQ ID NO: 187608 - DNA, 185 bp, Arabidopsis thaliana landsberg
atgggaacgaacgggatggctgcggggccgggccggccccctcatccggtcgcggaggctgcctatgtcgcaatccgacaggttggaaagtcatacggatcgttgaaaggcgccgtccatgcgctcgacggaatcgatcttgatattcgcgggggcgaattcgtttcgatcctgggtcccagcgg

SEQ ID NO: 187609 - DNA, 52 bp, Arabidopsis thaliana landsberg
atggttcacaatgaggaatctacctctcatgaggaagaagaagaggatgaag

SEQ ID NO: 187610 - DNA, 162 bp, Arabidopsis thaliana landsberg
gcttttgatttttgctctacgacaagaaacgagccttttctacatctcttccattgcctttatgtgtatcctgtagctgctactttaagtcggaagaggaatccctttatccgtgtagaattgagaaaggatgacacagatatccgaaaacaaccactcgag

SEQ ID NO: 187611 - DNA, 178 bp, Arabidopsis thaliana landsberg
gcatgacgacccccttttattgtccatggaaagtaacaacttcattcttgaacaagacgttgaggacacaggatcatatcaggaagagtcggagacggaatctgagagttctgaagatgaggagacagaatccgatgatatggagacaggttctgaatgtgacgagccaaggccttga

SEQ ID NO: 187612 - DNA, 178 bp, Arabidopsis thaliana landsberg
gtggtctgatgttcttgatacagtaaggacaatgctgccctcaaaagcttggaatagtctatcgccagacctctacgctacattttgggggcttacgctttatgatctccatgtccccagaaatcgttatgagtctgagatatctaaacagcatactgcccttaagacacttgaagag

SEQ ID NO: 187613 - DNA, 134 bp, Arabidopsis thaliana landsberg
aagatatagacaaggctattccagtattagacccatcagaaatagaacctccaaaattcgtatcagaatatacttgtgcacagtcccttgtgaagaaaccctccatagcttcaacctcaaagcagatcatttga

SEQ ID NO: 187614 - DNA, 2316 bp, Arabidopsis thaliana landsberg
cagaagtaaaggtgtatctgtgagaaaaattaccttggagttagcagttgagaaagatgctcttggttcactctatggcagagatggcaccggtgtggataatctacaacaggtatataaatgataccctctcttaatatatatcttcagatgatgctagacaatgatgttgatgagtttttgcaaactttcagatttcaggagccaatgtggatgtgaaggatcctacaggaactgaagctacagtcttaatctctgggaatcctgagcaagcccgcacagcgatgtctttgatcgagtcaatccttactgattaataattgattgcgttttgcaactacttttggttgtttcgttttgagtttacatatcccaaaactccatccattttttgtgactggttttgaaaactagcacttgttgcagtgttgtctagaagaatacaacattttgccggtttaccaatactggtttacgaataccggaatcaacgacaggaaaaaaatatttaaaatgcttagtttgaagtcatactaataccggttccatattaaaatgcttaatagggactacgggcccaatataaaagtgtcaaggcccatgtaaaactttacggagttcaacgttaacggtaatactaataatcttaacggtcgtcgtcagagattcaaaatttgaacacaaaacgcagaaaaggaaaatcaaataattcctccggacacgcctttctcttacctcactctcttttatctttctttgcgttaagcttttcaatttctacatctacaaaacagagagacgatttgcttccaaataattatggatgatgttcagatcgatgatacttttccggtggatctaaatggggttacgtcactttgttcaccggagattcctagtttcgatttcgttagtgatgaaacagagaaattagagatcggagatacttccattgatgactgtgacgatgcattgggcgactccatggtgtgtgatccgaattcaagactggttcctactggtctcacaagaactaatcgcacaggttcgattctctgactgatctttggttttaatctgcatttcttcttcgtttaggaaatttctggttttggatctgattgttttatccgattaacttgttaaaccctaggattcgggattttattcatttcgcctaattctgggtgaagatggatttaatctgatgttaacgaggagagttaggtttctaattcaatgtaagttatgtattgaggcattgatttttgttattggtgtaagcagatgagacaattatgttcataaatgctggaggagatgattcaaaggtattagattctgaattgaatatctccagagatgactatttcgaaggaggagatgtgttgagaacagaagagtctatagttgaagctggagactttccgttcatttatcagtcagcacgtgttgggaacttttgttaccagttaaacaatcttcttccgggagagtacttgatcgatttccttttcgcggagattattaacaccaatggacctaaagggataagggttttcaacgtctatgttcaagatgagaaggcaagtagaaacaactgaagatggtgtttttatttcatgtagttatgaatgtgagattgtgtaaatattgtgtatatgctgaaagaagtgtttttttttgatgtgttcaggtgttagctgagtttgatatattctcggttgttggcgcaaataggccactcctgttggttgacttaagggtcatggtgatggatgatggattgattagggtaaggtttgaaggaataaatggaagtccagtggtttgtgggatttgtcttaggaaagcgccacaggtttcaggtaatggctcttctctgtgcttgctttcatatatgattttaaattgttaagggaatctcaaagttttcagtttctaactcattcgttgcattactttacagttccaaggacatcacaagattttattaagtgtgagaattgtgctaccgaaatcgagatttctcctactcgggtactgtttaactagcctgctgtcatcttttttcctaaaaatatgtgttatggattacctgagcttcttcttttatgttgatatttgagcagaagagacttatgcgagccaaagctcatgacaagtatgagaagaaaatagcagagctttctgaacgatatgaacataagacaaatgagtgccacgaagcatggatgtcactgacctctgccaatgagcaactagagaaagtgatgatggaactcaacaataagatatatcaggcacgctctctag

SEQ ID NO: 187615 - DNA, 156 bp, Arabidopsis thaliana landsberg
gggcttagtgtttgggggtttcattcctcgccggcttgtattccggaagattatatcttcccggctttgtcgtcccgtaattcactcggacttatgtatctgatcatggtttgtgataataataaaactagctttgtgaagaaaaagaaaagctaa

SEQ ID NO: 187616 - DNA, 416 bp, Arabidopsis thaliana landsberg
gtccaacaaagaacaacgctgcagcagcaacaccagaagcaacagtgataaaaaccgccatacaaaagaggccaacttcaaagctccatgagagaaggcaatgtatgaggccaaagcttgaaattgtcaaacctcctctgagctttaagcccactggtacgacaccatcatctaaatctggaaataccaaccttttaacaagtccagtgggcaccccttcttcattgttctctaacttgtccttgatagaaggggaaccagatagttgtacaacaaacatcgaagaagaggagaaagccattaaagaaagacgcttttacttgcatccatcgccaaggtctaaaccggggtatacagaaccagaattgcttactttgtttcctttaacatctcccaattcgagtggcaaaccctaa

SEQ ID NO: 187617 - DNA, 781 bp, Arabidopsis thaliana landsberg
  unsure (1)..(781): unsure at all n locations
ctaaatctgcgagcggaggcaatgctctccgcttgagaaacaatatcttatccctatgtggtgaaaatgataaagccgggactggtggagcatctacaatatctctgatctcaggtggaggcagacgnnnnnnnnnnnnnnnnnnnnattctacatagttcaacacacaaacaaacaatcaaaaacgatttctcagatttcaattccagtgacaagtaactctatacacaaaaatattcaaatccaagttaccatcatcttcagttgcagtagcagaggctgatagggagccattagaggttccaccaccgtcttcagcacatccagaacaggcagatgcgagagaacgaagcctagaagcagaacgtgaagccatgacagtggtcaacgggttttcggagaatcggcgaactcttacgcaacgtcgtgtactcagagtcgagaatccggaaagcttgggaagtagaaggagagaagaagccggtgacggagacggcggagataaatggcagagaggtgaaagagagaaacgatgacaagctttatgaaagcgcatcatctttttttaatacttgacttttttaacctttttaaagtgctctgaatgattctctctttttctattcgacggttcactaatcaaaacgacgactgtatctgtatgtatttttaaccaggaaaacaaaaaatatcaggaaaaatatcggtagtggtcactgcttatgtgggccttatctatggcccaactagcgcttatttcctggaatatggcccattataa

SEQ ID NO: 187618 - DNA, 1025 bp, Arabidopsis thaliana landsberg
aaacaacaacaaagggaattggctctgaagcctctgagagaaacaaaaacacaatggtaagagaaaaaagttgttaacgttgaagatattaacgttgaagatattaacgttgtgctagtattttttagtcttgatgacttgtctcgtgtatatctagtcttcactcttcaccaccgtcgtttagctttgtcattgtgtttgcctcatagacaagtaagtaacaaacagcccccacaaatctctctagctcactagctaagacaataacaagatgttttttttttttttttttggcaaatggtccatatgaaaatgttagtttcagtgagcgtttgggaaaagtcttatctttggaagtaaatccctataagttaattagaaatgtttgtttactgtcaagcatttaatataaaactctaaaattggttcacattttctggatttctttcattttctatataattacaattaattaagaaaagaaatctatagcataaatatcatatatatggaaagggcaaaattcaatagcattttttttcttttctttttttataataaaattgaattagttggttcgacaagtaccagctgtattcttttttctgttgtaactatatttcctttttatgtattttctcataaattgtataatgtacacctgttgaataataactagttttcatagcttaatttcgacacttgtcaattcttgatgataagaacaactggttttgtactataaaatgcatcgaaacttcttgtaataagacatatacaacttcaacatacacataatctctcacttaaaaatatctctctctctctctctacaaaatcaattccaatgttggtgggaaagataagtggatatgaagataatactcgctctttggagcgagaaacatctgaaatcacttctcttctcagccaatttccggggaatactaatgtccttgctgttgacaccaatttcaccactctactcaacatgaaacaaatcatgaaacaatacgcttatcaag

SEQ ID NO: 187619 - DNA, 219 bp, Arabidopsis thaliana landsberg
atgaagaatctgaatgtgattgatcccatgggtgccgtcgaaaaccctaaaccctttaaaggtgtgatgaagaggcttggacgtggagtgtcggatcgggcaggtccgagctctgttggtgagatggcacctctgagtgaggatgttcgtagggatagtgagatggacgcgggtgacctttttggatcgtacacgtcgactgagtcagacccttctgag

SEQ ID NO: 187620 - DNA, 165 bp, Arabidopsis thaliana landsberg
ttgttgcctcccacatcatcatcaccaaggtctatgatgcaaaggccgtctgcggtgtcagtgaggaagtagagtccgttcaacttgtcctcggctcgcctgtcagtctcctcatcgctcgaggacactgcatcgtcggagttgtggtcgaggtcaccgagggag

SEQ ID NO: 187621 - DNA, 182 bp, Arabidopsis thaliana landsberg
tcggtactcttatgtgcattcatcgaatcaagttcataacagaattagtggtgatgagaatatagcaaccaaggagcgactagtcattcctatcgtgaaagatgttattgggcggccttacaattgtcactcagtgccttcaatttatgcagtcatgtatatgtacgtggatatggaacatt

SEQ ID NO: 187622 - DNA, 200 bp, Arabidopsis thaliana landsberg
gaaaccaccccgagacgaacctcagaagcacttcgggtaaacgatttagctcgcgcaaaacgagccgtctagctacaggccgacaagaggcacctgactcggaagaaacttcgtaccaaggccaaagcaccttaaacccgaggaaaagactcagacccgacgcaagatcaagataccatttccgaaaaacccggaaatga

SEQ ID NO: 187623 - DNA, 446 bp, Arabidopsis thaliana landsberg
cctccgaaggcatcatcggaaacaacaacccacctgctgtaacagaaactctatcatccgtcgatttcccaccagagaaaagacctaagcttcaaaatcatgaccagtcgtatctctcaccgcaccatcagaacactgcaacaacatcatcctccacacccccacaaccgcttccaccaccaccaccattccagcttcaacctcagttcttgcagccgttacagcctcccgggccagtaaaccacacaccattcaactacaccatagcaacctctactgcaaccactcagcaacaacaacaagaacaaggtccttgggtacctgggctcactcaactttcaacaacctctgctccatcggagaattcataccagaagtttcagggacaagatggtttctatggcattaactcatctgtgcctattacacctgtcactcgccagtag

SEQ ID NO: 187624 - DNA, 376 bp, Arabidopsis thaliana landsberg
atgtctgatcaagtttccggtaaaaacactagatttgggaaggtaaaaataacttcaaataatatggatcatcattcatgtgccgaagaatattcaggtaatatattcaacactctacgtgctagattttgtttttttttaattgcatgatcagtcttagcaattaaatagttaggtgtgaattccttttagtattgttgaattccatgcatctcctttatgttggtcaacgtttcatacgcaagatgtttcacatctatggctattttcttagcttttcgtatttgccatagatgaggatgttgaagtgcggttcatgcctgatattttggttaccgtacacaacagcgaagtaggcgtcattcgagatgtctcg

SEQ ID NO: 187625 - DNA, 909 bp, Arabidopsis thaliana landsberg
gcaggccttgtatgggtatgatcctgttctaacagaggaagatcttgagcctaatataattgtaaagagctgttttggctcgaggaagaaaggaaagagtagaaaaatacctaactatgaagataacagaagcattaagagaagtgactccaacgttccacttttcaatatggaagacattgacgaggacgttgaaggtctggctgtcacatcctctatgtgatcacattattgcgcatgtaaagaaaatttcactgaatgttcttgttcttgcaggctatgaggatgagatgtctcttctagtatcccagaaaaggctagaaaagcgttttggccagtcgccagtgtttattgcagctaccttcatggaacaaggaggtcttccatcaacaaccaaccccttgactcttctcaaggaggcgattcatgtcataagctgtggttatgaggccaagactgattggggcaaagaggtcagaggttttagtagactgtccaaacaacaatgccattcttttgttttctatttgataatcttttcatattttggacttttagatcgggtggatctacggttctgtgacagaagatattcttactggattcaagatgcatgcaaggggttggatatcaatctactgtgttccttcacgccctgcgttcaagggatccgcacccatcaatctctctgatcgtttgaaccaagttcttcgatgggctttggggtctatcgagattcttctgagtagacattgccctatatggtatggctataatgggaggttgaaacttttggagagaattgcctacatcaataccatagtctatccaattacatccatcccgctcctcgcctattgtatgcttacagctttttgcctgataaccaacacgttcatcataccaaag

SEQ ID NO: 187626 - DNA, 212 bp, Arabidopsis thaliana landsberg
ataaccagatcggatggtgcacgtttagagagaagcgaagatcggacggtgtgtcctagctggcaacggacaaggatgcttgatgtcctcaggtggcactagtgaaacccactttgacggacaccggatctataggttgtcggttaatatggacacgtgccaaaatctcccccattacctacataatatctccttcacttaattatgtttaa

SEQ ID NO: 187627 - DNA, 470 bp, Arabidopsis thaliana landsberg
atgacgaacccaaacttaatcattgaagtgaacctgatgctttacgagatgtttctccttgagactaaggtatggatctgttactagtgcaatttttttttttcgattttgcttacattatagtataactcctttattttggattttttttcaattgttttgttttcgttcgatttaggtttggacataaaaaccgtacccgaatacccgaactggaaccgaaccgaaaaaattggttcggggcgggtacgtgtatatcgattttacactgatgggtcttatattagtgtacatgtgggtatcagttcgtgttcgggtattacccgatacccgaaagggttaaccgaaaacccgaaccaaatctcaatattcttaatcccttatacacagtcgattttaagttctttaggcttttaaatcgacaaagatcaaaactaattcttatgtatattcgcctagatttcgaataa

SEQ ID NO: 187628 - DNA, 198 bp, Arabidopsis thaliana landsberg
ccgctattcgatcgcgcgcgacgctccggtgtgtctgacaattgggccggcttcgtcagctccatccgcaaccgaaatcccgagcatggcggagcttgccgtcgatcgcggattccgttgttgaccaaccgactgcgcataaaaatgggtcgcgcctcgctcctcctatcctttaacccaactcgcgttcaccgaagg

SEQ ID NO: 187629 - DNA, 407 bp, Arabidopsis thaliana landsberg
attgcgatttgttcgcatcgaccgcacctgccgccagccattccggccgcgggcatcgcatctgcatcatgcgtcgacacaacccgcccatgtaagagcacttggccgcgcgcgtacagcgccaaaagtcacagatcggcaaaaccgggcgccctgccggtcgccacgatccagatcaaacactggaaagcctccatgcatggttgtataacacacgttataacgtaaacaggaagagcaccatgaaactgaagatcaccggcatcggcaattccgccggcgtcatcctgcccaaggaactgctggcccgcttgcgcctggaaaaaggcgacgagctgtacgcgctggaaaccccggacggcatccgcctgaccgcgttcgatcccgaattcgcggcgcagatggag

SEQ ID NO: 187630 - DNA, 349 bp, Arabidopsis thaliana landsberg
ccgctcatcgctttatgcagcctgacaaccattgtttgcagcagctactgcggccgtaaatgtgcaacttgtcccaccacgaagttcttggaacacatcaactcgtgcttccgtcgggttggcagagcgtcaaactgcatccgacggggcgtactcgcaactgacggattgacggtaaaataaacctttgcatgctttgtaaaacttaggcacgctggttgtgtacacacggcctgtgaaatatgttgagcggcgcaccgacgggtaccgggagcctgaggtcgtgtacctggttgggacagcgcatgtgtccaccaagtccgctcaggacgtgcagcgtgtattactg

SEQ ID NO: 187631 - DNA, 384 bp, Arabidopsis thaliana landsberg
atccggctactcttggatacaacttctaatggtaactttctcaacaaagatgttgcctctggatgggaactcgtggaaaacttggctcaatctgatgggaactattgtgatgaatttgatcgatccgttcgaggtgccactgataacgaggatggccacataaaggtattacaggctttgtatgacaagatcgataagttggtcattgctctacctagaccaattgttgagagacctattcactacatcaccgacgaggagcaacagcagattcaggaagggcagtcctactcatatgaggacgtgagctacatacagaatcaaggtggctacaacaaaggatacaacaactacaggccacctccttctaacaacccctactga

SEQ ID NO: 187632 - DNA, 366 bp, Arabidopsis thaliana landsberg
gcaaagtgtgacataattagacacagaccaaacagaccctcggccagtaaggatttagaggacaggaatggagacaatcctttcacttatagtgatgatgaggctgatgccaaaattcaagacggggagcagctggtgaccagtcatagtgataaggcagaggtgctccggtccttttattcagatctgattggtacagggcagcaaagatccagaactgtcaaccttgacaccttagaactgcagcacactgaccttcaggggctcgagcagccaatctcagaggaggaggcgtggaataccatcaagcagctttctccggacaaggcctccgggcctgatgggttcacaggctcgttctataag

SEQ ID NO: 187633 - DNA, 219 bp, Arabidopsis thaliana landsberg
gtttatgttgctttcaccatgagaaaatatcttcatcagagattgaaccattttactcagatcattcaaacatcccgtgctaaaaatctcggtctagacgaggcagtttttggtgaagtcaaggatataactttctcaacatacctggatggcaaagttcctgattctgatttggaattggcaccagcgccaactccttgcttatcttctctgtgttga

SEQ ID NO: 187634 - DNA, 108 bp, Arabidopsis thaliana landsberg
acagaaactcgaagatccaacttgaactgtcagatcactagagacatcggatatcggcctgcgaaaacagataaaaaaaccatcaagattaagcgaaaggatttctga

SEQ ID NO: 187635 - DNA, 257 bp, Arabidopsis thaliana landsberg
atggaaagtgccaaacattgggaacgacccggggaggagttaggaacaggaacaagaagaagcgagaaccacttaaatggaggaatcgattgtatttcgtcctttgttctccatagcaactggggatcaaaaagcaccaaatttgataacttattaaaggaaagacgaaataagagcatgctattgaagacgttgcaacaaatgtcgaaaaggcctccgttaattgtgtacaaacaaaatacgagtcaaaaggcagg

SEQ ID NO: 187636 - DNA, 381 bp, Arabidopsis thaliana landsberg
atgtgctcgtctaaattattgagtccctttgtgcagctttcgctgaccattgtatacatcgctggaggtgttttcatatctggttggattggtaagttcacctttgctaaaatccttacatatattataatctagttgtgtccttctttcctctaatgcaatgatgctattatccgtcaccataattagttgtccttttttatagaggtgtcttgctggatactgactggagagaggcagactgctgtgatcaggtcaaagtacgtccaagtgctactaaatcaggatatgagtttctttgatacatatgggaataacggggatatagtaagccaagtactgagtgatgttctacttattcagtcggctctaagtgaaaaa

SEQ ID NO: 187637 - DNA, 135 bp, Arabidopsis thaliana landsberg
agcaaagaaaaaacagaggaggttgattctctttggcatctccgaatcgaatctgagaagagaagaggaagaaaaacgaagatcgatgttcgagagggaattagatgcatgaagttggattatttgtggatctga

SEQ ID NO: 187638 - DNA, 437 bp, Arabidopsis thaliana landsberg
gattgcctgccgtattcaacagtagaagcgataaatccgtatgttgacccttttgcattgatacccgtctctacaatagacgaaactaacctcttgttatcctctcatcaatcgaatctagtcacatatcaagagacatcagctctggtaccaaaaccacttgaaatggtatattacttacactttgatatagagcaagatatctaaaccaactaggcaaatactgatagtatactaatgatataatttgttgtattttgtgttaacagcaccagaatcagaaccagaatcagaaccagaaccagcaccgacagtcagaaccagaaacaacaccagcaccaacaccaacaccaaaaccagaaccaacaccaaaaccagcaccaacaccgggtcgtacaacaacaacaacaacaacaacaacaaatcaatccgcatga

SEQ ID NO: 187639 - DNA, 445 bp, Arabidopsis thaliana landsberg
atgcggcggtacgcacggtctgggattcacctcccaagcaccgagtggtccacctttcagcgggtgcgggtaactgttcagcgggtgcgggcaacttgacgattcaccttcccacctacaacactatataaacagacgggtaggtgtgaagttaccacaacattcattgccattgcacagttgtgctgttgaaaaatttaaccatagccgaagctttttcactaaattctcgagcgaaccatcatcttgaattagcttcgtcaaaaaactgtaaagacatcagctttgtaaaaactacaagaaaatcatcattagatggctcgagtacgctcgaccgcaagggtgacccgtgaaggagaggaggccgaagccaccgagacagccccgatcttcgaagtcatgagacaatcaggattggttgtgatggaggaagctattgacgaag

SEQ ID NO: 187640 - DNA, 116 bp, Arabidopsis thaliana landsberg
ttagtcgtatattagtcgctaaacagcgactacatgtacgacccgccgtagtagtcgcaaaaaagcgactattttacgactattacggcgtgtcattaaccatagtcgcaaaatag

SEQ ID NO: 187641 - DNA, 362 bp, Arabidopsis thaliana landsberg
atgataccaaatttaacactgaaagcaatacgaaagaaagaactcatatttgatagaaagtgtttaccaatgcgcagactccagataatgtcacgccggtggtgcaatgacttactcgatcatcgactgaatctgaatttggtattcatctccgtcgggtttccgcggcgggacgcggcgggacacggcgtagatcgatgtaggggattggtctcgagaaatcggtgactaggcaaatagtgttatgggcttagtttgggctttaataaatgatgggttatctggtaataggcccttatttgaggaatccacgggttttcgggttttaccgacccggacgggatcaatatgtggtgtcatga

SEQ ID NO: 187642 - DNA, 104 bp, Arabidopsis thaliana landsberg
atgctacaggctcgcgtcatcaacaaaccacggctgggcctcgggtacagtgtcgaagggtccctgtcgaacatcaaacgatacatcgttacgtactgtcccag

SEQ ID NO: 187643 - DNA, 705 bp, Arabidopsis thaliana landsberg
  unsure (1)..(705): unsure at all n locations
taaaatctcattacctcgaggtttacgctatgatgctgttcgtaatactaaatttggtgcacctttccgttcaatcacggtgagagacacaattggcgatcttccaccagtagaaaacggagaatccaagataaacaaagaggtattgtttaataattacaccactagaagaaagtatctatacatttacattaaataaaataacatgaactcatgtttcttgtgtcttgtatgtagtatggaactactccagtctcgtggttccaaaagaagataagaggaaacatgagtgttctcactgatcatatctgcaaagggctgaacgaactaaacctcattcgatgtaagaaaatcccaaagaggnnnnnnnnnnnnnnnnnnnnnnnnnnngacgaaaatgtcagtcttactcttatacattccactacaagaattcttactaaatcgatctatatgtcaccttcatgcaatgttttaatactacaggtcacattatcaaatggactcgtggaaaaactgcgtcctttagctctatcaaagacagctaaaaaccacaacgaatggaagggactctatggtagattggactggcaaggaaacttacccatttccatcaccgatccgcagcccatgggtaaggtgggaatgtgcttccatccagaacaggacagaattatcactgtccgtgaatgcgcccgatctcag

SEQ ID NO: 187644 - DNA, 1153 bp, Arabidopsis thaliana landsberg
atggaaaagtgggttgcaaaagctgttgattgtttggtgatgacgctaacaatcaagctcctctggtccgcaggtccaaccagcttgcccaagagcctttactcttgcacctctctttctgaactgactctctctgaccagattctcgtgaatgttccttcttccgcctatctcccatcccttacagagctcgaactaatctgtgttgtgtataaagacgaggattctcttgttagcttcttatcgagctgccctgttcttgagttcttgttcgtgctaaggaaaatagatgacaatgtgaaaacgtttactgtcaaagtgccttctttattggagttaacgtataagaatctctgctctgatgtagtagacaataccgataggtgtttggttgtaaatgctcctgcagtgaacacctgtcaaatcactgattattcactagaatctttctccatcgaggatatgccctgtctccaggatgcaactatcgatgtagatgaggcttatcatccggatgataaatttctaacatctttttcttcagtcttgtctcttcgaatgcatttgtctgatgcaatggtattaagctctctaacttcatctcattgaaactccattgctgcatcaaacgacttacttaagttgtgactgttttccttccaggttatgcgttgtaccaccatcaacttctgtcgactaataaagttaagcatatatccctatggcccagacatgttggaaacactcctacgtttacgtgcaaatgctccaaaactaaaaaagtttttggtaaattatgtaagtatcatcctcctcctcctcttcttgctttaatggactctctatcctctatactattcaaatttttgcttctcaaaaatttgtctataatcccgaggatctcccatggtcatgaaaacaaccgagtcatgttcccgaatgcttgtcatcacagctcgagatattcgagtggagagactatggggatagaataatagaggaagaattcttgacatacgttttggccaactctaagcgtttaaaaaccgcaacaatctccctgagattaaatcttgaagatccagagttgatcatcgaggatataaaagaccttcctagggtttcaacaacatctcaccttttgttcaaatga

SEQ ID NO: 187645 - DNA, 663 bp, Arabidopsis thaliana landsberg
ctcaccggaatcaaatcggtggtgttggtggcttatccaccgttaaaagaactcaaaacgtagccaccaaagcggcggctcaacggttagcgaaggttatggctttacagaacaaatacaatgaggaagacgatgatgatgatgatgacgacgatcacgaattcaaattcgcacctccttcttctggacctatcaacggttccttcgctcgccgtaatcgatcgcattcacctgcggtaaaatttcgtaattgagatcttaagaagcagatttggcttctgtgatttttctcatttttgtgtttgtttttatgatttttattagataggtaggaacatcactgagcaagtgacttcagtgcgttcgtcgtcgacaggaaggccatcaacgtttagtagatcatcaactccgaatgcgtctcccttttggatgccacctaaggcatcgttgaaacctccggtgattattcctccaattgatcattcatttaaggatagagatcaaaggtgaagaaaactattcactttctttagtggaatttgtcaaaaccagttcctattatctcatagatttagcgttttcagatactttggtgatgtaccacgcttagtaaattcgagagataaggggtatcagcgagaagcttcagctcttcgtgatgaa

SEQ ID NO: 187646 - DNA, 73 bp, Arabidopsis thaliana landsberg
atgattattgctgagtccatttcacctggcgcaaaggaattactgcgaagcgagcgcgtggggtactacgaca

SEQ ID NO: 187647 - DNA, 420 bp, Arabidopsis thaliana landsberg
gtaccgagaaagggatatttcgaaaaggatccttctcagtgaaggaaacggcctccaagccctcctactgatcaggggtttgaaggctggcccctcggaagggttcgacagccgccccagagcactcgggctccgagcccattactcatcaggggttcgaaggctagccccttggaagggttcgacagccgccctagagcacccggcgtccgcgcccattactgatcaagggttcgaaggctggcccctcggaagggttcgacagccgccccagagcactcaatgtccgcgcccactactgatcatggtatcgaaggctggcccctcggagtggttcgacagccgccccagagcacgcagagcgagggatgactctgggtacgttcgatacacaaccaaggctcggactacgctcccgag

SEQ ID NO: 187648 - DNA, 92 bp, Arabidopsis thaliana landsberg
gaacaaaagaacaacgtggagatagagtaaaaattcaaaacttttaccctaaagaaggcctggagatcgagtgtatagcccaatggagttga

SEQ ID NO: 187649 - DNA, 56 bp, Arabidopsis thaliana landsberg
atggtgaagaacgacgacatttcaaaggaatgtgttgcagatgaatctaatgtagg

SEQ ID NO: 187650 - DNA, 222 bp, Arabidopsis thaliana landsberg
atgcactcagaagccgtcgaagcaccggccgtcatggagcgccagttgcggccaatcacgagatctccctccatgctggtggccgagctgcgcgcgcgtccgccgcgcttattggtgacatgcgcgctcggcagttccgaccacgcctgctcgtttgcaaaatacgccaaacaaacgcatctgggtctggtcacggcatcggcctcgccgtcggtcgggaag

SEQ ID NO: 187651 - DNA, 462 bp, Arabidopsis thaliana landsberg
tttagggtccccttgcaacggtggattgagagcaaaacctttcagagttacatcttttaaaggtggcatccaaaataatgaatcaggaggaagtgagggtgggaagaaagttactaataactctgtcaaactatcttaccgttcagatgatgacgaaaataatgtgaatggctccccaaaggcacagaacacttcgttttcatatacctcggaaacagaggattccatgacagggcaacccgctattcagaaactattcaagaaatggttgacattgttgcgcacacagtcacctattcaagtgattgacgagactttaggaggagaacaggttccacaaacgacgaagcaagaaactgaaacagaaattcggaaagcagaaagtctccagagtaccaaaaatacagtttggtcctggttttggagtctagacgcagctatcaagattccgttgctgttatt

SEQ ID NO: 187652 - DNA, 371 bp, Arabidopsis thaliana landsberg
atccttacaacgattttgagccggtagacagttctgccgcagctattgcatcccagggacttctgcggctgggaaggcttttacagcagaaaggagatgcacaaaacggcgatcgctactggcaggtggggctaacggtgctggatactctctttgatgagccttatcttagcactgatcccaatcatgagggactgatattgcactctatctatcatcgccccaatggctgggaccatattcctcaaggaagcctcatccctaatggcgaatcttcgatgtggggagattaccatgcacgggaagcggcgctttacatgcagcgtatcatcaataatgaaaactattatactttcttcaatatacaatag

SEQ ID NO: 187653 - DNA, 417 bp, Arabidopsis thaliana landsberg
agtcctaagaagtcgaaacaagagctagatgatgctagatgcaaagctataattgataagcagattgtagagatacctcttagtgatgttgtgaagactttccctatgatcaaacattatataaagaggatagttactaaggatttgaataatgaccatggtgtgacgatgatctctgcacatgtaagcgacattattcagaataggattccagagaaactacgtgatcgaggaagctttgtgttagattgctctatatctacaagaaggtttccttgttctctttgtgaccttggctcttgcatcaacttgatgccccgtgcagttgctttgagacgtgagatgacagatttcaaagctacaaggattactcttctcctggttgatcgcttagagagaatccctaaaggtatctga

SEQ ID NO: 187654 - DNA, 273 bp, Arabidopsis thaliana landsberg
tgcttgatgatactaacattggtggccgtcccatccacgttgattctaaaacgggccgtcaatctagcggagctttccacccgatggcggcacatattcaagctgcttccattgacaaagactgtatgcaagatccattggatcctaattttgtggatcaaatttggaatcgggctgcgcgcaataacacggtgctctaccgcagagtattccgctgcatgcctgattccaaagttggtccctgggctgaataccgtgaaaaaatggattacg

SEQ ID NO: 187655 - DNA, 300 bp, Arabidopsis thaliana landsberg
atggtgatctatgtggtcctacaacgccaagcacaactgcaggaaataggtatgtatttgtgctcattgatgatcattctaggtacatgtggactattctgttaaaagaaaagagtgaagcttttaacaagtttagaaagttcaagagtctcgtggaacaagagtcaggagcaagaatacaaactttcagaacagatagaggaggagagttcgtttcacaagagttcaacaatttctgtcaagaatcaagaataaagcgacaccttacagctccatacacccctcaacagaacgaagtag

SEQ ID NO: 187656 - DNA, 250 bp, Arabidopsis thaliana landsberg
gagaggcctctggcacgagggcggacaggcctttgccctcagccggctgatgcacgtctacgggcagcggtaccgccgggaggtgcgcaaggagctgcgcatgtcgacactgtacaaggacagcggagatagtccgcccactaccagcgtacctcgaagcctggacggcaaatgggcctgggaggtgctgcgccacatctgccggtcggaaagtggtgccggtggtcctgcacatcgaagttcacactga

SEQ ID NO: 187657 - DNA, 75 bp, Arabidopsis thaliana landsberg
atggaacacacgtggcgtctcctacaagctcggatcaaaccttatcatgcaaacaagactcacgacgtggtaaag

SEQ ID NO: 187658 - DNA, 1142 bp, Arabidopsis thaliana landsberg
atgtttttttgtaatcgaaggcattcaacagagaatccttatttcctcacggacattaactcggatggatcgtgccggagctggattcccctccaggaatccacctgcgaaaataccaagccagcccacaaaagcccaccaagcccaccaagtagaggacctacgcagctgatgagcccacatacgcgaatgggtatttgggccagataagcccggtcacctaatgaagggagataagcgaataacaacctaggaactgatgaggagatattcgcggagcggacctgatatctcggaactgacctgcccaatattcaggaggatctccgcagatcccgaacggagctaccacgtgcgtagacccatataaggaagcaaggacgacttggaagggacattcaattcagcttacattcacacacatacttttacacttgtaatctcctttcacattgtaaaagctttgtcattatcaatacaaaaattccattcgttcttagcaatataactctcaaggtttctgtgaagatctagccctcctttctcataatctcaattacaaatctctagtgtggatttcagaacccacaatttctgagcttccaatgacaaatcattctcgccaggaaggaacgatacctgttatacaaggtgaaaatcaaggaaattctcatgagaatactgtcgaacacttgttgggcgttttaccactagaagaacctttcggtcctttggctcctgtgttaaaaatcatcaatcaatctcgcaacaaaggtcgtatccctattatacaaagccatcacaaggtcataaaaaagagaacactaaggagacatcacgtgatcccacttggaactgaaaacgtcaaaggtacgaggaagagacgtggaaaacagactcgaacttttttgcttgattctagattgcgatccaaacagttgctaggaaggaaaatacttactccattagtgaacgattcacatggtgaagaggaacaggtggaagatagagtatcaaggccctcagatgaaaacctaagaagatgtctaagcaactttgagagttattatggtgagaataacattccggagcatgagaggttacaaattgtttattcaaacttggatggagagactggttaa

SEQ ID NO: 187659 - DNA, 532 bp, Arabidopsis thaliana landsberg
atggcagttaagacagatatgagtaaggcatacgatagaattgagtggtccttcttagaggcagttctccggaggttaggctttcaggagacttagatttcttggatcatggcttgtgtaagctcagtatcttattcattccttattaaagggtctccgaagggtcgagtaattccttctcgtggattacggcaaggtgatcccctatccccttaccttttcatcttatgtaccgaagtgctttcgggtttgtgccaaagggctcaagagtgtggtcatcttcccgatattaaagtggctaatggtagtccaccaatcaatcacttgctcttggccgatgatacaatgttcttttgccgctccaaccaaaagagttgtaatagattaatggaaatcatcacaagatacggagaagcttcgggtcaggttattaacttcaacaaatctacaattaccttctccaacaaatctcctttggcaatgaagttggctgcaaaactcactttgggaatttcgaaagaaggaggagtgg

SEQ ID NO: 187660 - DNA, 520 bp, Arabidopsis thaliana landsberg
atggacagccaagtcactccaacaacaacaaccatatcctccagaaaacctgtaaaaaattatgccacaagcaaggctgagtatactaatactcagctagaattacccgatgtgaggagtctactcctcttcctctagacatgtagttgtttggctgaggggtttggtttgccaaaaagcactagctaagtctaaatcaagttttagcttttcaagttttagtgtgattctcttaagactaaatgcgttcctagctaatcatacatggtatcaaacatttagcaatcaacatcttttgccacatcatcacatttccacttgttactcaatgcagtacaatggatcaagcagtctcattagctgcgagaagcaaacgattcgaatcgagttttcatccttgcaaggtaaacctaaacacacgacgtggcgagacactccgtccccacacacatcaaccgtccccatcgatcccctggcaacagatgagcgctcaccgccttggcgtacaatgcctcactga

SEQ ID NO: 187661 - DNA, 806 bp, Arabidopsis thaliana landsberg
gagttgggattccgttgtgatcaaaatcaaggtgaatgtcgagctaagtttgtgtgccatttggattgtttttcttgggtgaaacgtgatagctatcttcctcagggaagccagggtctgaaggttcattctgtttctttcttttcgccattatttttcttttgtggaggaattcatattatgattctgagtggtgcttgcctcttaactaaatgccaggctgttacaaaggcaaaactgggttacgatccactggaagtgaatcctgaggacatggttcggtttgcaatggaaaagccacaggtattgctgattaattcataaaatgctatttctgtgtgacaaagttttttagaatcagagctagttgtttgatggcgctggaatgagctagagtaacatattttatcaagtaatttaactaatagttgtgcaagatactgcatggaatttggagcttatatgttatttctgtttcatgttgggaatcttgttgcagacaatggcctcctactctgtctctgatgctgttgcaacttactacctatacatgacatatgtccatccgttcgttttttctctcgcaactatcattccaatggtccctgatgaggttttacgcaaagggagtggcaccctttgtgaaatgcttttgatggttgaggtgacttcctatctactacaaagatgttctgctgtgtggctcattctattaattggaaatatttcattcccagcacaggcttacaaggcaaatgttgtatgtcccaacaaaaatcaagctgaccctgagaagttctaccaag

SEQ ID NO: 187662 - DNA, 391 bp, Arabidopsis thaliana landsberg
gaagttgtatggtggcatcaaagatgtcttggttccaaagatgtacacagagtacagtaccagcaaagttcttgtaatggaatgggtggaggtatgaagtcaaacattcgcaatcgacaaatcatttttttggtttgcgtcaaagagttgtatatgttttctcagtcaaaggaattttatatatcttaagcacactataattttgtgtgttctactttctgtatggcagggtcagaagcttaatgaagttaatgacctttatttagttgaggttggcgtttactgttcgtttaatcaacttctggagtatggattttaccatgccgatccccaccctgggaattttcttcgcacgtatgatgggcaacttgcatacttaggtattcgttga

SEQ ID NO: 187663 - DNA, 295 bp, Arabidopsis thaliana landsberg
ttttcaacaaaagacaaagtttttcaaaaattcattagaaaatcaagttcaatggttagaagaagtattagacaaagtagctgaagtggaggctaatggagtggtgcctaatccggtgtcttctggggtacatgtggtggttgaaaatgtgcttggagctggcttgtttagctgggtgcctatggtggttggtcggaggggtggttctggttctgtagaatcagtagacaaaaacgcagccaactcaggatctttttccttcatgaagaggagaagcttctccatccgagattga

SEQ ID NO: 187664 - DNA, 224 bp, Arabidopsis thaliana landsberg
atccaatattgatttggtccgcaaatcacggatcggtccacactaaagtagaagaaaaaacagctaatagcattcgtgtgacaagtgaatatacaaatgatcacttgattagtgtatattttgctagactaagtaattatgcattttggtttatagacgtgtgggagataaacacacgtcaaaagaagaatgaccgtagttatactcgcaccttcgttaactag

SEQ ID NO: 187665 - DNA, 182 bp, Arabidopsis thaliana landsberg
gccgattcttgttctaccccctgctgatgcacgggtcatttactgtgaactttcggagtctgagagggatttctacgacgcgctatttaaaagatccaaggtattgttttccttaggattatttactcggacttttgttattaagatgccttatactgaagatgctgacggatctttttcag

SEQ ID NO: 187666 - DNA, 431 bp, Arabidopsis thaliana landsberg
atgaatcttgatggagagactaacttacagcttaagcacgcgttggagataacatcggacgaagagttgatcaagaacttcaggggaatgatcaaatgtgaggatcctaatgagcatctttattcctttgtgggaacactttactttgaaggaaagcaatatcctttatctcctcagcagatactattgagagattccaaactcaaaaatacggattatgtatatggcgtggttgtttttaccggtcatgacacgaaagtgatgcagaatgctactgatcctccttctaagaggagtaagattgagaaaaaaatggatcagattatttacattctcttcagtatcttgattgttatagcgtttactggatctgtgttcttcggtattgcaacgagaagggatatgagtgataatgggaagctaagaagatg

SEQ ID NO: 187667 - DNA, 52 bp, Arabidopsis thaliana landsberg
ggagaccaaatgcaaattttcacatgatacaataccagaaaccaaatgttcg

SEQ ID NO: 187668 - DNA, 72 bp, Arabidopsis thaliana landsberg
atattcgattcttaagcggaaaagaaccaaatttaagaaagccatccagtctcctcgaataagaaaggccag

SEQ ID NO: 187669 - DNA, 153 bp, Arabidopsis thaliana landsberg
atgtacgacatccttgtgatgaacatgctctccccgcactttagaccactacgaacggctctacatgtggaattctggacctccgataagctttgtaccattaatctgcaagaaatcgtgttctctgaaactcgagccctagacatagtgtag

SEQ ID NO: 187670 - DNA, 225 bp, Arabidopsis thaliana landsberg
aatactgttgtcttcttcgatttcgtcatcactcgtgtcctcaactacagcctgctcagctttggcagttccacctttggcaatagtttcttccgcacaagtagacctgatcgcctcatcacttccgatattggcgctgtttctatcactttagcctcatctccctcatgggacaccctagtagtggatcttactcgggccatttcaagtgttttggttccttaa

SEQ ID NO: 187671 - DNA, 81 bp, Arabidopsis thaliana landsberg
gatttggctttcgatttgtcactatcagctctacttggggagaacatctataactttggggaactgttagcccatcccatt

SEQ ID NO: 187672 - DNA, 165 bp, Arabidopsis thaliana landsberg
atgaagacaaaagctgggaaacaaaagaagagaagtgttgactcggatgatgatgtctctagggaaaggagaccaaagcgagcaacatcaggcacaaacttcaaggagaaatctctccgtttctctgaaaaatatgaaactgttgaagccaagaaagagcagatc

SEQ ID NO: 187673 - DNA, 549 bp, Arabidopsis thaliana landsberg
atgttaagtaacactaacgtagtaggcagtgacggttccggcggagtttccagggacgagtttgagctgcatgtcgattttcccgaacaaatactctttcttggtttgaaaaccagagccggaggctctgtcgagggagagagtgagaagctctccgttgttaagaaccttgccacgaccatcaccccaagtgatatcgaattctgtgtcgaacgttcctgcgaaaaccggagagaagagggtcgtagtcgagacggtgagtgtgaagagtagagataagatgaaagtggaccggtccatgtttatgtgtcaataagatagagaattgaaatcattcattgggaccttatgtgttggggggttttatataagggaggcaagtcttagtctttttgtagtatagttcgccgtttgtgactcttgtgtagttttagctgtgaacagctggtttttgttttgaagtaaagcaagcatgtgcttaattttgcctcatgctacgtgtgcttgttctttgttttggtttaagtctgcctgatccggttcagttga

SEQ ID NO: 187674 - DNA, 190 bp, Arabidopsis thaliana landsberg
aaaaaacaaaacatcaaatacaaatataggaggaaaacagagtaggagaatcaatggagacctgaagaagcagatgattcatttacttggagggggaaaatctaatccaaaatgggtaaagacatttatacaaagaaaagagaaaatggcggagaaagaagataaagatgaggttataccgagagaatag

SEQ ID NO: 187675 - DNA, 219 bp, Arabidopsis thaliana landsberg
tcggcagttgacgaatactacacaatattaattgacctgcgagctcggttaaccgaaccaagccagtcacttcggttctcggtttttcgtattactactgaaactaacagaataaataaacggtttgttcggttctcatttcggttaatggaattctacccaattgaactggtttttttggttttctcagttaaaatcgggcaaaatccggttaaataa

SEQ ID NO: 187676 - DNA, 437 bp, Arabidopsis thaliana landsberg
aagtatccagtgatgattttaatgagcttacctcaacagctaccggcctgaaacattacctggatagcctacaaatacccggggtagaagaattgaaaatggatgtggacctcaccaatcctgaaataacactgactgtaaatcgagaacgtgcaatgatcgaaggaatatctactgcacaaattggccaacagataaggactgcattattcggacgcgaggtatctaagatcaaggatggggaagacgaatataaaattcagcttcgcaatcttgaagtacaaaggaaaagccttactgatttgctgaatatgaagatcgtgtttcgcgatatgggaagtggtggccagataaaacagatccccattagctctgtggtagatgttgattataccagcacttatggaagtatcaaaagaaagaatgtaaaagagtga

SEQ ID NO: 187677 - DNA, 3461 bp, Arabidopsis thaliana landsberg
atggagaaatcagctttgatattcatcggtattctacttttttcaacatgtgagtttcacggcaaaaattatgtaccaattgtattcatcatccttatcatgtcatgagcgtttctataaatcatttcggtgatttttagcaggtacatcgattatggcacgaactggatatgtatcttgcaagacgaattctgactgtgttaaactcaaatgtccaacgccatttggtggccccaaatgtattagcagtagttgtgaatgcccccttaaaagactcgtgacattacccaatgataccaattatggtgtggctgcctgcattgactattgcaaggcaaaaggtgaaaatgtttatgcatgtatcttaaaccattgttactctcacaaacttcccatgtaattttattaagtttttgcgcataaggttttcaaatatctaattttattactattaatatcttttgaatatcgataatatcatttaattactctagtttatgtttggacatttgactgaaaattaaacttatagtttgaatgtttttctttcacttatttgttagattcatttgtatattttgtgtacttaatcgtttatgaacataagacaagttaaattgatattttatcaggtttgttagtgtcctaaattagacttgttttacataaatattagaaaaaaattaaaaatatatttgtctatggaaattacagagacaacaatatttgtagctcagcccagataataatcagttcaacgaaaatatcatgacaatccggcaaaaatttagtaaaaaaattggaataaatccgtaaagccttagttcaaagttcttcgtcaatgatttgcttatcaagatattataaaattgtttagcgagatttttggtaactatttgagtaacgaatcgattaaatacacgccctctcaaaatgttaatatagaagatcaaatgttatcgctggcaaaaagataaatattttatttccaatttactaccttgattagaaacatcaaactaggtaatttttcactcattctaaaacaaattaggtataaaatcttattacatgaagtaagtaacgtatttaccaaaacattaaccagtaaattagcaaaacaattgcttgctggggaagaaaaccaaattataaatactctccaaatcctccagttttagtcacacaaacaactcaaaacacaagagaaagatacaaacttattcaataaaaatggagaaagcagctttgatatttatcggtcttctacttttctcaacatgtacgtaatttttttggataatatgtttaattacattcatcgccatcttcttcttcctcatctatattatatatcatcatgaattcatgatcaataacatatttaatctcataggcacacaaattctggcacaatcttgcaacaatgactctgattgtactaatctaaaatgtgcaacgaagaatatcaagtgtgagcagaacaagtgtcaatgccttgatgaaagatacatccgtgcgatatcgcttaacacgaggtcaccgaggtgtaatgttcaatcttgcattgatcattgcaaagcaataggcgaagtaatttatgtttgttttacgtaccattgttattgtcgcaaacctacaatgtaataacaaagttatcataatcatagtatctttaacttcttttactgcggcaaatttcaacatatattgttttatcataactataaaatctgtctttaataaaagaaattaaaacaataataatatatcttacaaaatactaattatttacgagttattgtggttttggttttattttacaagtatagattggcgtttttgttataatgggcttttgggtacgcgattgtaatacacggacttggatcgcgcgttaaagaataaagtttgacggatccaaaattttgacttttttttttgtatcgactgagcaaagatttgatttgactctctgcttccttcgaggaaaacaaagtagagtgttggacaagctttttgtccatctgttattccgttaattatcgccgttaaacagggacggacgccgtttacacttcctggcccggtaactatttttgagtgcatatatctctttcttaccttttttatcttctctagcttatccgaagccaaaacaacaaggtaaggtaaagtaaaaagaattttgagagtaaagtgaaaacgaaccctttaaactcagtcttctctttgtctgatttaaaatggaaacgaaagacaagaaagaaaaaggacatatggttttaaattccgacaacgttttcggttcggtgtcttcgtctccgacaacaacaatccaaaaccctaattactttacctccttcgagaaccctaatttcccttacatttttccggtttgtcttcgtctccaaaaaccctaacttttttacatatttttcttaaaaaattaataactttattgtttttgtgggtttagaaagaagagtatgaggtgatgagcaagatcgaaagcgggtcgggtaagtcaaccgggtcgggtcatgacccactggagaatactgcaatcgaacaagagcctcctgcggcgaagaagaaacgttaccatagacatactgctagtcagattcaacaaatggaagcgtacgtcttcttgcccttttagtttacaagtttattatgtcaaaaaaaattataacgatggtttatgaaatgatgtttaaaatatgaaattttgcccttttattgtagattgtttaaggaaaatgctcatccggataccaaaacaagattgagattaagtaaaaaacttggtctctcgccgatacaagtcaagttttggtttcaaaacaaacgtacccaaatcaaggtaactaatcactctttagtttggtttgattttaacaaggttagttagaccatataaaccggtttaaaattggggttagaaactctggctaagaccattcatgttaagaaattaagcttttgttgttgctaatactgagattaacaggcacaacaaagtagaagcgataatgcaaagctaaaagcagagaatgagactctaaagacagagagtcgaaatattcagtccaattttcaatgccttttttgctctacttgtggccacaatctccgcctcgaaaacgctcgcctccgccaagaggtatgtatattcgaatgaatcaaatcttggctgttgttgtttatctactgaatcatatggttatcatatgttgcagcttgatcgtttacgcagcattgtttccatgaggaatccttctccttcacaagagattaccccggagactaataagaacaacaacgataatatgttgattgcggaagaagaaaaggcgattgatatggaacttgcagtttcttgtgctcgagaattagcaaagatgtgtgacataaatgagcccttgtggaataagaagagactagacaatgagagt

SEQ ID NO: 187678 - DNA, 179 bp, Arabidopsis thaliana landsberg
gcctgcagccacgttgtgccctgctgctgcacaccgaggaggtctcagtggataagcagacactggacagcggcgccagcaagcagaacaccaaagccttggcgaaattcatcttgagtctgtggttcatcaccgggtcgcggcaagctgtggtcaacatcgtggtgagcccatcgtcg

SEQ ID NO: 187679 - DNA, 136 bp, Arabidopsis thaliana landsberg
cttgcatgatgatcctaacgatgatgttgtgaatgtgaatgcaaaagtagttgttaacgttggtgcccctgctgaattggtcttgcacgctgctgcccatgcaaggattccaattccacaatggggacttctatga

SEQ ID NO: 187680 - DNA, 407 bp, Arabidopsis thaliana landsberg
agattgggatcatcgtgttttctcccgcgaaaaagcctttctcattcggacatccaagtgtcgaatctgtattggatcgctacgtgtctcgaaacaatatgtccttagctcagtcgcagcaactgcaaggaagccctgcagcgagctgcgaactgaatatgcagttaacgcatattttgagcgaggtagaggaagagaagaagaagggtcaagcgatggaagagatgagaaaggagagtgtgaggcggtcgatgatcaattggtgggaaaagccagtagaggagatgaatatggttcagttacaggaaatgaagtatgcattggaggagttgaggaagacggttgtgacaaatatggcgtcgtttaatgaggccaaagacgatgtgtttggtttcttggacaacaaa

SEQ ID NO: 187681 - DNA, 116 bp, Arabidopsis thaliana landsberg
acaagtcacgggggccccgaagacgccacattgagattgatcatcaacatttagtcgaggttcgggaaccaatcccaacccttagccggcgtattgatgaccactctcccacttag

SEQ ID NO: 187682 - DNA, 142 bp, Arabidopsis thaliana landsberg
atgggtgaagtggtgaatgcgctttccaatcaaactgaaggaaaagctgttgtggtaactgatgttggacaacatcaaatggtgacatcccgctattacagattcagagatccaagaacatctgtcacctcaggtggtgcag

SEQ ID NO: 187683 - DNA, 567 bp, Arabidopsis thaliana landsberg
gctttacaagtttgatgtgccttgtgagtctgatgtcggtgttgtattagtaagttatggaggtactaatggttggcacacatgtgaacggtttcgattgacgcgatacacaggacaaggacgaggaagaggttcaaaagctggattgtccaaagcattcgtagatttggtcggttggtctttcatgatgcaacgcgagtccaacataagtaatcagatcttcgactatattgtctccaatttttcattcaaggatcttgatatcgtacctcccgcgtgtcctgtcctcgtctttcactttcaaattagagggtttggtcaagatcgtacagacctgtaccaattgctccaccaacgacggagatcgtagattgttaccaaagttcggaatcttgttgtctctgtcaaaaagggtatccgaaagaagacgagattgttcataaaacaaaacgcaatcatattttttacggaacttgtatctctcgttacttgttgcacactcctcgatgccctgtttgctccgttgagttgccacctgtcgacatccgaacttttctcttcatctaa

SEQ ID NO: 187684 - DNA, 1297 bp, Arabidopsis thaliana landsberg
atggatgctgttggcttgcggatagacgcacacataccagttgactgctgttctagacagctaaagtcattgattctgcttggtctgctaaatatcgaagggctgaaacagagactagggataaagctgtcggagaccataaacgggggtgggtccacacttgaggttggaacattcgccgcttgtatccagtgctcggtgtagatagatcgtttgctgtgattatgcaataggctttatgtaagtataaccatcgacgatggaacagatcgcccacgtgatgacgttgttgccatcactgaacgtctccaaagttgcagaaaggctatgtccaaactgaaacatcgttcaaatttaaattcggatgtgcgtatcaaaacatttcaggcgagattaaacaaagcaatggagagtgtgaatagagctcaaagacaacacatacctcaattacaagaatcgttggccaaagcgtttagtgacgaagaaaagttttggaaacagaaaagtcgtaaccaatggatgaaggaaggcgatcataacactgatttttttcatgcttgcgtaaaaaccagaatttcccaaaacagaataaattcaatcgtagatgatcaaggacatatgtacatgggtgatggagagattggttgtcatgctcaaaaattcttcacggacatattcaccactaacggaatacaagtatccccaattgactttgcagatttcccttcatctgtcacaaacataattaactcggagcttacgcaagattttcgtgacagtgaaatttttgaagcaatttgtcagattggtgacgataaggctccgggtccagatggtctaacagcacgtttttacaaacaatgttgggatattgttggtaacgatgtaattaaagaggtgaaactttttttcgaatcatcacatatgaagaccaacatcaatcacactaacatatgtatgattccaaaaattcaaaatcctcaaacgctgtccgattacagacctatagctttgtgtaatgtcttatacaaagtcatttcaaaatgcatggtgaaccgtcttaaaacacacctaaactcaatcgtctcggattcgcaagctgcgtttattccagggagaattatcaatgataatgttatgatcgctcatgaaattatgcactccctaaaagtccggaagcgagtctcgaaaacatatatggcagtgaaaacagatgttagcaaagcatataaccgagtagagtgggattttctggaaacgacgatgcgacttttcggtttttgcgataaatggatag

SEQ ID NO: 187685 - DNA, 361 bp, Arabidopsis thaliana landsberg
atgggtgttacaggaggattagtcagaagcattttcttcaggaacaaatcatttggagctcatgactacaacaatgtatgtggttgtcattttcatcaaaaacccatcatcgttctggtttttgttttatctactacttcaaatgttgtaatgttttcagggaagaggcaatctaggagagaagaaacgatggagctcggttagatcatacctttgcggagatgaatttaactctgttcgcgctgtgaatgattcagaatcgataaaggattctgaggctcttcttacaatgtctcagcaattgagttcagagttcggtatgccttttggttcggttatcgcaatcgaagattcagcttct

SEQ ID NO: 187686 - DNA, 881 bp, Arabidopsis thaliana landsberg
atggctaatgtgctagatattctggaaacaattaaatcttcaagcacacctccgaagaaaactgttgccattcccgaagtgaaaactaatatttctgatattaaatttccagagcaagaaactggagccgaagctgggtcctcagagcccacgaagataaaatccttgggaaccaaggaagaaaaaataacagagccaacttttattgaagaaatcagtgtcattgcccccgaagcatcccccaaagtccttgattatattgttcgtcatgcttcggggaaaaaattatcagaaaaagaggagcaagaggcccagcgctacgcccaaaaactgaagtatccaaaaggggcgttaatatttaatggcagtggagaagaagactttttgtattgcctctccgacagcaaggagatttctgtctgtcgggagatgagcagaagcttcgattcccaactttagaagacggactttcggtgctgtcaaagaacgatctggctgacagcctagcttacaacagcttaaaggtgcgacaaatgaaattcttgtattttttgttgagttcaaaatttttcgtttgtgtaaacctattgacacagacatattcccgtttgcagggcctgatactcagcaagtccctcagggcacagaaagatgctgaggacgaaggatgtactatagccctgagcaaccttcgttccgaagtaattgaactgaggaacgaaggtcttgaaaaagataaaatattatactcattgataaataaaataaaggaagacgaagctgcttctaaaagtcaagctgaagctcagaagcgtgaaattgaagacttcggaaacaactggcccgagccaaggaagaacgcgtacttggggatcctctag

SEQ ID NO: 187687 - DNA, 1000 bp, Arabidopsis thaliana landsberg
aacccaacagttttcggcggtgaatgggaagaaccctaaaccatcggacacgaacgcccaccgctgttcaccgccgcaggtcaaaccggagaagaggcgaactcctcaatgccgtttgtgcagccgaaacccacagcgcagtcaccaccggagaagaagtatccctcgcttgagagagaagaagcagcaacgccaccgccggagaagagatatcttctagacgagcagcgaccaccggagaaaggagccgaagaaccctaaaccatcggacacgaacgcccaccgctgttcacagccgcaggtgaaaccggagaagaggcaaactcctcactgccgtttgtgcatccgaaacccacagcgcagtcaccaccggagaagaagtatccgtcatttgagagagaagaagcagcaacgccaccaccggagaagagatatctcctagtcgagcagcgaccaccggagaaaggagccactaccggagaagagaagtcggcgttacgaagagccaccaccggagatttgttagggtttcgatttgaaatcaaagaagaagaagagacatgcaatttttgggtttcgatttcgagagtcggggaaaacactttcgctttttgtttttttatattctttatttctttatttaatccattcttttattaatgattttatttatttttaatcaaagtcacattttaagtataattctggttataaaactgatgagggttaaaatgtcttttgattaaaaatgtgagtcattctagtcagccatcaattacaagagtcatttaagttattaatcctaagttatgagtcaatctgagcaaaattcagtttaaaaaatgtgtaaatatttttgtagcttcttgcacagcagaatgttcagcttcttgcgcagcaacttctcgttcagtttcttatgcagcttcttgttcaacttcttttcactataagaaatgttgacattattagtgcggaatatctgctatcatacatataa

SEQ ID NO: 187688 - DNA, 621 bp, Arabidopsis thaliana landsberg
actcactacaagtctacaccacaaacttaccaaatcatccaaaaatggcaaccaaaacttttctctactgttctctcttagccgacagcttcttctttgcttccaattcttcagctaaccgagagaacttaaccgtcgagctaatccaccgtgactctcctcattctccactctacaaccctcaccacactatctcggaccgtctcaacgctgctttcctccgatcaatctcacgttctcgccgtttcacaaccaaaaccgatctccaatccggtttaatctcaaatggcggcgaatacttcatgtccatctcaatcggtactccaccgtcgaaagttttcgccattgctgacacgggaagtgacctaacttgggtccaatgtaagccatgtcaacaatgttacaaacaaaacagtccactcttcgacaagaagaaatcttccacctacaaaacagaatcttgcgattcaaaaacctgtcaagccttgtccgaacacgaagaaggatgcgacgaatctaaagacatctgcaaataccgttactcttatggagataattcgtttaccaaaggagatgttgcgaccgaaacaatctccattgattcttcctctggctcctctg

SEQ ID NO: 187689 - DNA, 136 bp, Arabidopsis thaliana landsberg
atggacgaagaactgcgaagattcagcatggcagaagagataaagaaggatcggatcaagtctatgatcaccaacttggataaagtagatgtagcggttgaaaatctggaggagtcgctcgaaagattgtacagac

SEQ ID NO: 187690 - DNA, 241 bp, Arabidopsis thaliana landsberg
tatcctgagcaatcccgatcaggacccgcatctgttcgagaccacgccgggcgtcgtgcgccagatcgccgacgcggcgctcgtgatcgtcatcggcgccgactgcgatccatgcatggacaagctgatggcggcggcaccgcggccggcacgaaccgtcatcagcgcggcgcaactccccaacgcccccagcgggcggcaatccgcatctatgagaacgcgccataacaccatgcctgcg

SEQ ID NO: 187691 - DNA, 131 bp, Arabidopsis thaliana landsberg
aaacacgaacctggacctggggagcaccaaccctggaatatatgggtgtgccgtaaacatcaaccagctccacagtgacataggctacggcatcaacatccgcctcgatatgcggattgttagcgtgaccg

SEQ ID NO: 187692 - DNA, 164 bp, Arabidopsis thaliana landsberg
atgggcgcagtatttgacgcctttggggggaagtggcgctattgggtgggtgcggaaagcagcgatagcaccgtctccgcatctatggaagagatgggctggatcgcagacagcgaggaagaggctaaagctctctgcattgccgagatgcagcgcctgcgacg

SEQ ID NO: 187693 - DNA, 107 bp, Arabidopsis thaliana landsberg
gagagctgatgaaaataacactttagatcttaataacttacctgatgatccttctagagacattttcccattctttgaagaaggcttctcttcctcttcttcttctg

SEQ ID NO: 187694 - DNA, 1099 bp, Arabidopsis thaliana landsberg
tgttgtttattcttccaataagatgtcacaagacgatgagattgtgatgcgtgatgtgacgagcgcgggaatttgtattggtgaccgcattggccgagaagccgcatcgcagctcgatctagaagaagctcttgaagcttctagatacgctagtcatccatattctactcatcccagagaggttagcttcaggaacgattctacctccttcaattagctacttttctttcgattgttgctattgggttctcgatttgatgggagattttagctcaattatagttagggttagagcagctcgagctttgtcttataggtgttttggctttgttgcagtggccgccgttgattgaggttggtgagacttgggaattgccttctgtactcattgagaggtataatacagccggcggggaagggacggccttatgtggaatctttccagagattcgacgggcttgggcatccgtcgataattctttgtttctgtggcgttttgacaaaaggtaaccttttccttttagttaagaggggaatgtagaacttagaagcttgagattgccttactttcgtagttgtcctttcttttgataaatgtgatgtcaaattagggatgggcagtgtcctgagtatagtggggaggaacaggcaatttgtgcggttggtctagcgaaatgtagacctggagtttttgttgaagctattcaatatcttctggtgctggcaactcctgttgaggtgactctttttcaatgatgcaatctgatcacaactttctttagtttttttttgtgtgtactgtatctgatttcttataaaactttacttctcatcagttggttcttgttggagtgtgctgcactgaaggacctgatggtagagatccttatgctgaaatttcagtacaacctctgcccgactatacaatatcatcagatggagtgacaatgacatgcgttacatgtaccaataaagggcgtattttcatggctggacgtgatggtcacatatatgagctgctatatacaactggctctggctggaataaacgttgtcgtaaagtgtgccttactgcaggcgtaggtagtatgatctcaag

SEQ ID NO: 187695 - DNA, 125 bp, Arabidopsis thaliana landsberg
ataagcgaattcgcgaggaagaagaagaagggaacgttaaaaaaaaaaaaaactttattcgaaaaaaactttgcccgttgaacgagagagaagagagaaaggagaaggagactaattgggattaa

SEQ ID NO: 187696 - DNA, 609 bp, Arabidopsis thaliana landsberg
atgctagttaagcaagccctggatattctaatgccagcgttgcctaaaaggctacctcttggagattcacgcatgccaatttggataagatacacaaagaaaattttggtggaggaaggtcattcaattccaaatttgatccacatcttcctacttgttgttcggcattcagatctcttttacagctgtagagcacaatttgtccctcaaatggtgaattcgttaagtcgtctaggtttgccatataatactactgcagagaataggaggctcgcaattgaacttgctggattggttgtcagctgggaaaggcaaagacagaatgaaatgaaaatggtcactgatactgatggaaccagtcagattactgatgaaatgcatacttcatctggtgctgatcctaagcgttcaactgatgggtctgccacatcagaagatccaagtaaacgagtcaaaatcgaacctggtctccaatcaatctgtgtaatgtcgcctggcggtgcatcatcaatccccaatgtagaaactcctggatctgctacccagcctgacgaggaattcaagccaaatgctgccatggaagaaatgatcattaattttctcataaga

SEQ ID NO: 187697 - DNA, 481 bp, Arabidopsis thaliana landsberg
atgggtaagagcagcaaaacgggaaagagtaagaagaacaagggcattgtcgaggagactttggttgaggaggaaacgatgatcaacgagaaaaccagagtcgggacgatgctcgatgggacagactcggccggacctgaggccgggaagaagtccataaatgaggaagcactggaaagtagtggtgcaagggacaacacggataatcggaacaatactccaacggcccaagaacagtgggatttgatgaagggaatgatggcgcaactagccacattgaccaaggccgttgtagcggatccggtggtccaaagaggggataaccaaaaggacgatgactcggaagttgtggaagtgaatccgcaaccgaatcatgggcggaaaaggggagactatttgagtcttctcgaacatgtctcaaggctgggcacgagacacttcatgggcagtacggacccgattgtggccgatgagtggagga

SEQ ID NO: 187698 - DNA, 287 bp, Arabidopsis thaliana landsberg
caacctcgccgtctctcccgatgggctgactgccgtcgtgctcgacgagtcggcgacgcacaagttctatctccacacgcgcaacacgacgttgtcaccgtggggcaccggcacgcgcatccccgagctcgagatcaccgacgacatcgcatcgcccacgatcacgaatggggccgcgaccatctacttccacgcgaagccatcgcgcgacatctacgtcgcacatcgcaatcccaacggctcgttcacgacgccgacgcccgtctccgagctcaacacggcgtcgc

SEQ ID NO: 187699 - DNA, 622 bp, Arabidopsis thaliana landsberg
atgggtctctgtttctcctccgccgccaaatcctccggccacaaccgcagtagccggaatccccacccacatcctcctctcacggttgttaaatccagaccaccgcgatctccatgttccttcatggccgttacgatccaaaaggatcatagaacgcaaccgcgacgcaatgcaacggctaagaaaacgccgacgcggcatacgccaccgcacgggaaagtgagagagaaagttataagcaataacggtaggagacatggagaaacgatcccctacggtaagcgtgtagattttgggtacgctaaagattttgatcaccgttacaccattggaaaattgcttggacatggtcaatttggttatacatatgtcgctaccgataaaaaaaccggtgatcgtgtcgccgtcaagaagatcgataaggccaaggtatgatgatgaatcaatcatttttgctgtctttttctaatcattgagttttattttatttaagattcttcagattttggagcacaaagattattttatatatttaaaatatattcggattcttgcgtttcttgatttgatttttgttgggtagatgacaattccgatagctgtggaagatgtaaagagagag

SEQ ID NO: 187700 - DNA, 101 bp, Arabidopsis thaliana landsberg
atgaactcacaggttctcttctacattgctgctgaagatgaagccttcttggctattatccgagagagggatgttcagtcactccctcaccccgagggaaa

SEQ ID NO: 187701 - DNA, 437 bp, Arabidopsis thaliana landsberg
atgagcctagatgtcgaagcattttgccgagtgcatgagttgcactaccagacgaaggccagggcagacggtctgcatgaaaattttggctgctataatttcgtgtatcgcaaggatacgaaggctcttgtttttagctaccacacaaaatggccaaccgtctggaaaggtgaatggttttatattaaggctgatgagaagaagagggggaaactgatgacgatggtcatgtgcccgctgtctttatactttgaaatgaccaggcccctatgcaacatgcaactagggtcgccatgccagctggtcaaagtggagtttagagtggtggctgagcaaatcagtaccagggacctagtgtaggaatatctggccaaccagacatatccaacgtcaagcggctgggggatgccgaagatgaaagaaatgaagaagcatga

SEQ ID NO: 187702 - DNA, 349 bp, Arabidopsis thaliana landsberg
atgggtgcgataaaccaaggaataagcttgtttgatgaatcacaaaccgtcataaaccctattaataccaaccatctaggtttcttcttctctttccctagtcacagcaccttatcttcatcatcttcgtcgtcttcgtcttctccttcttctcttgtgtctccatttcttggtcataactccctaaactccttccttcataataacccgtcttcattcataagtcatcctcaagattccatcaatctcatgaccaatctccccgaaaccctaatctcgtctttgtcctcatcaaagcaaagggacgatcatgatggttttcttaatctcgatcatcatcgtcttaccg

SEQ ID NO: 187703 - DNA, 263 bp, Arabidopsis thaliana landsberg
gatcatcggataagcaacgaatacgccaggctcttgacgatctgacaacatgtttctcggtcgccggagagagcaatcgcgttttcgcgggagattcgaatttgcatttgaatttgaaagatgaaaacgagtcgcaccgaaacagaaaagtcttaaccagagaagcagtcgtcgtcgtcatctttaacggtgggacgagagtctccgagaccctagctcaaatttatgaaccgggagtttcattgtctacccacaagcgtaca

SEQ ID NO: 187704 - DNA, 238 bp, Arabidopsis thaliana landsberg
gtgataatgagtaataaccatcacacattcatacattttgattatgggggcaattatttaaagagtggagatgaagtacaatggatttcaagtgaagaagttcgtcaagctcttttgatgaaggcacctattgaggagatcaattatttagcattggttgataaaataggcagaaagatgatgctcgatacaactacgagtgagatgagattcagtgacatggcgatctctgtgaatc

SEQ ID NO: 187705 - DNA, 1475 bp, Arabidopsis thaliana landsberg
atggaaggaatgctagtgaggataaacatatctctttgaacaaagagaatggtgtagatgatggaaaaaccgggaaggagaaaagtaataacggtgttgggcatttggattctcatgctcaactgggagaacaagcccaaatagagtggctcaataatcagaagcttgctagtgaatgcaaaaagaaggagtcacctttcgctaatagacgagaaagattcaaaaacgagttcttacggagaatccaaccttgggaaaaaatacagctttcttgggagaccttcccttactacatccagtaataatctacaacatgtttttttttctctcttgttgtgtttctttctccatttctgcttatggattctgctcattatcttttcacagcgaccacacgaaagatattttggtggaatgtgttacctcacatataagacaaaagaatgccgcttccatatatggtgcccgtttagattcttcaagtggaagaatattgctccagagtgttccaggtttgttattgactatagaataaaaatggcagaccaggatttgatgttgctcttctgttatcaagtaaaaatattgaggaaatgttagatgaccaataagaaatttgaattttattcaggtactgagctttaccgggagaggttggtacgagcacttgctcgagatgtacaagttcccctgttggttcttgacagcagcgttcttgccccatatgtgagattcttatgagtaatttgcctataacatgccaccatttttctttcgttctttttggtgtttatgtaatattttttaattctggatcaggattttgctgatgactacaatgaagaatctgaatctgatggtgagaacgcagaagcggaagcagatgaatccacgacagagtctgatgctgaggaagattctagtgctcagagcgaagaggattctgaagcgaaagcagatgggagtgacagtgaggaagcttgtctcgaggtttctgaggaagctatcaagaaaattgtgccaaaacttgaagagttcgaaaaggtatgattgcattaattgagattcagaaattttagtctgtactgattgttcttttcctaatttagttggtaataccatggtatttctttttctttttgcgataccccgtggacaatgtgatcttggggccctgtcatataagttttctgattcttgatttatcttatttgtatgaacttgttattagagttactatgcatgaattagaaggtttcaccattcctgccgtttgaatgctgtttcttggttctacatgcgactctttgcattgttccttttttgaacttccaattaaattgagtttcagaaattgctgaaatttgcttacctcctctaaattgtggcagctagtagcagaagaactacatggtgaagcttgcgaagcagcagctgttgagcattctgataaagccaggcgaccggcaaagtag

SEQ ID NO: 187706 - DNA, 470 bp, Arabidopsis thaliana landsberg
atggctaacgacctctggagtgaatactcaagttttctctctttgactcacaaggtaatatgcttattagcgttattataggtacatttgagatagtataatgtgttggttgtttattaatgtgctcattcaatgcatttgctcgatatctctaggctatctatcagaactatcttttcctttacttgatcttattgtgttttagacgtatgagatatggttcccttgaaagaatgcaatctacaagtttacaatggtacgtcaaaactgtgttaagtttctttcatcattgaaaaattcagaatcttgtttcaacttggactttagctaacacttttggcaatcgagtttcttatatattcaaggaaaattacatattgaactatgtttgttcgttctagataggaactcgagaacttttggcaattgagtttctttacaaagggtctcccgacatcactcttcaatga

SEQ ID NO: 187707 - DNA, 900 bp, Arabidopsis thaliana landsberg
atggacataatcatgcaattaaagaaattagaagctgtgaaacttttggatttggagcgtgagtgaacgcaccatagagaggtgcgtgggggaagcatttaagtgagagagaaagtggtcaaagggggcagagagagcagtcaaaggaaggggaagagtgtggaggccattctattgagtattattggttcccttctcattcttctctctctctctctcttcaatgcatcaaatgcttagtgacaaaaactttctaattgttaatcaaaagtttaagatggtatagtagaaatttaagaataatgtagttaatagtgaagtgagtaagtttgcggcataccgttttataaaagaaaaagatatggtctgtaacatattaacgtactttaactttaaccctagcttatagttaacaatcctaccttggtggggtttatgtagaacaacttaagccctatttcagtttcgagttttccctataactagatttcaacaactaagaatgtagttaaagaaaagtggaaaccttatgtaacaaataaaatactaagtggaacttgaataaccatgcttcatatagatacatagtcaatgcagatcctataaacacacgtaaggtccatcttatgaacacgatagttcaatattttatttgttagtgaaaaaggggaaataaaaggaacccatgaggggtcacaacaataaatcacaatgggccaatttggggaagcaaatataatatgatataatataatgtttttcatatatacaaatgtttatagaaagaaaaaagaagtgatgtatgtaatgtgtatagtgtttgtactctatggccaaaagtgcttctctttttcttcccccacacccttcacagatgcagcttttctacagagaaagtga

SEQ ID NO: 187708 - DNA, 3393 bp, Arabidopsis thaliana landsberg
  unsure (1)..(3393): unsure at all n locations
atcagatcttgcaaaaagagttagatgcgttgacatacagagttttggcgtatcttcttcttggtgttgtaaggatatattccaagaaggtcgactttttgttcgatgactgcaataaagcgttgatcggtgtaaaggagtttgtggctaaggagaggaacagagaaaagacaggtgtatcattgcctgcatctatcgagtgtttttccattgctttacctgagagatttgaactagatgcttttgatcttggggttctggaggattttcatgggtatgcttgttattcctaatatagaatgtatttcgcagagattatttcatagtctcaaactcttttgtttcttctttctcaggggaaatgttaagccgcatgaagatattacacttaaaggtattttatcactaaagtcgtttaaagggaatctcatcactgttcattaactaataccactgcactgcgataaaacagatggaagtcaggaaacagagcgcatggacatgtattcgatggaaagggtatggtttctcaccttatagattactgagtgtgtaactgtgaggttctaagctactacagcgtatattgacattgtttcttcgttccattccttttcattctggtaatttcgtgaatctacattgtggagttgcagtttgacatggaagaggaccttctgtttacgtttcatgagactttctctgcccttcataatgaaaataaacagtgagtgtgatatttttttggttccatacatgtaatcggcaaacacaatcctaactttctgtgtctataattgttgttgcagtgagagttttgctcatgatatggacatggatgcagaaaacgtcagagatactactgaagaagcatccatcaaagtcgttgaacccggaacccctggattctaatgaaccatccaaagatcatcaaaatgcatcaaggcatagagaggatcnnnnnnnnnnnnnnnnnnnnnnnnnnnnncaaatgtccgaaaatatcctaagagctcaagaagaagacacagttagagaaaccatatgtaccattgtgcagagactagtggattctcatgaatcctcaggagataatctacacagagatggtcacacagagaatttagtatcggagaaaaccttgaaggaaacaagttgcgaagagatagagcatgataggtccctcccatctgaatgtggtatacctgaagcgattcatgggattgaggatcaaccttctggtgccaccagaattaatggggagaaggatatccctgagatgagtactccagaagaaccagaaccagtatctggttccagagacttgccagaaggcgtagagaaatgtcgagaccataatgaagcggaaatgacggactttgaattgtttcatgggtctcctaaagagcaatctgaaacttttgaagtgaatctccatggttccgagaaaggttttctctctgacatgactgtttcaaaagaccctagtagagggtttaatgcaacagatactccagttgctgtcactcctaaaacaccttcccggttgaaaatttctgaaggtgcacactttattgaattatgagcttaaaatatacttacttacgtttttagcctgttaacctacactttgaattacaggtggaacaagtccacaattctcgatcatccctacgccggctgcaaaggagtcttctcgagtttcacggaaaagaaaatgtctgatagatgatgaagtgataattccgaacaagtaagagaacaatttgtaacctggattatattcgtctgcagagttccgtacaagtatgtaatatttggttcttctgttattgtagagttatgaaggaaatgatagaggactcaagtaaattgcttgcaaaacggagaaacgtacctcatactgactgtcctgagaggagaaccaaacgttttgccaaaccttttcgaagtttcttggaacctttgattcattgtaagtaaaacctcgtaatccgctgtttatcgaattgtattgttgtgtttgctgattgttgtcatcccgcagatggttcttcggacctccaatcgcttttttgtcaacccatcaagcttaaaaactgggcaaccacagaaactcctaaagatgctaaagtcggtagatgtaaggaaaattcttctcttgacaccgtcagaactcctggggttattttatcttcagatcagactgagaatactcaagaaattatggagactcctcaggctgcagctcttgctgggctgaaagtgacagccggaaatagtaacgtggtttcggttgagatgggagcaagttctacaacttctggaactgctcatcaaacagaaaatgccgcagagacacctgtgaagccttcagttattgctccagaaacacccgtgaggacatcagagcaaacagcgattgctccagaaacaccagtagtctctgagcatgtagagattgcacctgaaacgccggtgagggaatcaatgtcgaaaagatttttcaaggaccctgggacctgttataaaaaatccagacctgcaagtcccttcacttcctttgaggagcacccgtctgtgtattatgtggaaaatagagatcttgatacgattttaatgaacgatgaggtactgctgtgttgcatccttctgatagtagttaaaaaagtttttacagttcttttagcctatcttttaattacaagactgagcatttatttttttgtgtttctgcttcagcaggtgaatgcagatgaaagacaggacttacaacaaggtaaaacgcattctgaattttcataggtctcatgagtgctcaggcttttattgatttagtagacaagaatctattaagattttctgaaattatatgtagctttgagtgaaagtttcaaccatcgaaatatacacaacttatttggaatccaaatcttatcaaattgttctttgttgcatgacgatcatcgtgctgcgtccttaccatgtatattttgatttgcagagacatggtcctcaagaacaaggtaacaggctcacactttcggtatcaacagcttcgattcgcttacattcagatgattatcctggttttctgacgctggattgtacaggaatgtggcgaaattcttggaaaatacttttttggaacagagggaaagagaagaagaagagaaggtgagtttgttgcaactgtgtagaggaagaactcagaaggaaagcgcaagactcttctacgagactttggtatgtcttaattttttcacaagcacatgtcttcaccgttttatcggtctccatgaaagacttaagatggagaaactctctgaatttgattttgcaggtgttgaagaccaaaggatacttggaagtgaagcaaaatcatccatatag

SEQ ID NO: 187709 - DNA, 339 bp, Arabidopsis thaliana landsberg
gaccaaacgcattcgctggaaactctcatctctgtggcttcccattgcaaacgccgtgtgaaaaaatcaaaaccccaaatttcgtcgctgcaaagccggaaggtactcaagaactccagaaaccaaaccctagtgtaatcagcaatgacgacgcaaaggagaagaagcagcagatcaccggttcagtaaccgtttctctgatttctggagtttcggttgtaatcggagctgtttctctctctgtatggctgatccggagaaaacgaagctccgatgggtacaattcggagacaaagacgacgacggtggtttcagagttcgacgaagaagggcaagaag

SEQ ID NO: 187710 - DNA, 1072 bp, Arabidopsis thaliana landsberg
atgtttgctggcaataacttggatatcaaacacggattgaaaatcctactcaacagatctctcatatatatatctaacgatggagaaatagtgatgcacaagctactacaacaaatgggtagaaaagtcgttcaaagagaagaaccttggaaactccggatcttagtcaatgctcaagagatttgtgatgttcttgaacgtgccaaagtaagtatgtcctcctgtatatgttatattttttgttcattaaattagtatcttgaacaagtcatttaggtgcaaatcctacagacaccgtgctaacaatttcctattatttggaatattggtttagggtaatagagaagtttctggcatatcatttgatacttcaggaatcaacgaagtgtttataaaaaagggagctttacaaaaattgcacaatcttcaattccttagagtttacaaaagtaaaattaatgatggaaatgatgtcgtgtatataccaaaggagatggagtttccaagttttctaaagttattagattgggaggcatatccaagcaagagtctgcctgctaaatttaatccaaatgatcttgtggaactcaacttgcaaaatagcaagctcaagaggctttgggaaggaccccaggttagttttagtttatatgtaacttttttactttaattatagtaaaaatgattgtcagctacctaactgttacggaatgcattgctacacatgccaaataaactaaatgactctcagctacctcacataggactgtctagccatgcattccgcaacaattcttaatttacttggcatgtgtagctatgtattatcttataaatgtgttgatgttctttttcggttgtgtctgtttttacattcagcaccttccaaatctcaagaagatgaatttgagatggtcctatgatctaaagcaactcccagacctatcaaatgctacaaatctcgagagcttggatatgcatcgttgcgagagtttggtagaggttccttcctgtattggagatcttcacatagtagagcaattggatatgggcttctgtataaatctacaag

SEQ ID NO: 187711 - DNA, 278 bp, Arabidopsis thaliana landsberg
aatttattgtggtcgtgtatgatgtactttacattttggcatactatgcacaaaaacaagtgtcttctatgaccatcataatttatacattttctaacaaaatttatacttatttacgatgttttggttcacgatttacgcttaaatccgctcgagccagaacctgcgcacgattttcacgttgtaatttggttctcattcgtcgttacgaaacaaaacgacaatttacgctaaaattcatacccatttatactgttttggttcacattttacgctga

SEQ ID NO: 187712 - DNA, 413 bp, Arabidopsis thaliana landsberg
atgacagatctcgggccaaagcaaagatatgagatccgacatccacagttagctacatcaacaacaaccagggtggctacaaaggatacaacaacttcaaaaccaacaaccccaacctctcttaccgcagcaccaacgttgctaatcctcaggatcaagtatatcctcaacaacaacaacaaggtcagaacaaaccttttgtttcttacaatcaaggttttgttcccaagcagcaatttcaggggaactaccagcagcaactaccacctgggtttgcacctcaacaacaccaaggttatgctgctcctgatgctgacatgaaacaaatactacaacaactgctacagggacaagcatctacctccatggagattgccaagaagatatcagaattgcatcataagctagactga

SEQ ID NO: 187713 - DNA, 135 bp, Arabidopsis thaliana landsberg
agtcatgtaatgatacacatctatagaaagagcctcattagtgtaatagaatcaatccacaacctcacagaaactaaggacttcaacaacccctttcttatggagctggcgaagcaagtcattgagctcaactag

SEQ ID NO: 187714 - DNA, 61 bp, Arabidopsis thaliana landsberg
atggagaccaaagaattcgactcttacagtgagcgcaaagctttcgacgagacgaaaacag

SEQ ID NO: 187715 - DNA, 404 bp, Arabidopsis thaliana landsberg
cagtgactcagcaggatcagacaaagagcagcgaattcatagttggatcgtggagtgtatcaatccgagacagtggcgaacataaccaaaccaaatgcagtgaaggggagagaagaacaaagcctgttgaggtgaaacccgcatctgagcaatcaactgtaaaaatatggagaccagtgagcagtcagggaagaaaaacctcaacagtcaatggaaacacagacaaagaagataagagatcaaacccaactacacccgaagtgaaaaacgctcatcacataagcttgcagtttaacaaccacgaagcaaaggcgtttcttgcaaagagtaaaccttcttttaccctttctttttatcttaatctccctatcgtttatattttggaagttgtttactcaatctga

SEQ ID NO: 187716 - DNA, 275 bp, Arabidopsis thaliana landsberg
gaagaatagagtttatcagacgatttggatacaaggaaataatcaaagcaacagaaggtttccgtaaggttatttacaccaactatcacgggtctgcatacagagctaaattcaaaggtggtgaggttgctttggtcaaagaactcactgctcttgatcttggacgagaaaggtttgatgaggaagttcagcttttgggtcgcttacgtcacagtcatctcattacacttagtgggttttgcattggacgaaagaggtttccttttacttgttga

SEQ ID NO: 187717 - DNA, 192 bp, Arabidopsis thaliana landsberg
gacccggtcttcaagaaggccacaccggaggcagatgtggaccgtctcatccgaaacacgtacaaggtccttctgacccgcggcatgatcggcacggtcgtctactccaccgatgcgcagactcgcgcaaagctgctcgaactgatcgagcagcgcggggaacttgtggtcgccggtcgcgttgacggctga

SEQ ID NO: 187718 - DNA, 74 bp, Arabidopsis thaliana landsberg
atgatggttaactgcatatcatcatctgtcagcaaaacttaccttaaaactcagaatctttccctgcttcacca

SEQ ID NO: 187719 - DNA, 177 bp, Arabidopsis thaliana landsberg
atgtcaagatctctggtgaaacgcgttgctccttatttggctggtcggattagagaaaatcatcgattgcttaatttttcttctgcttctgctatcaaagaagcatcttcttcttcttcgtcccaacctgaatcgtcttctaatgatgtagtccatctcagcgacaattgtatccgg

SEQ ID NO: 187720 - DNA, 306 bp, Arabidopsis thaliana landsberg
ccgtatacgtcgatgagaaccccaggcaggcgcaggatggcgtggcgacggcggtccgacggaggcccggcgtccggaaggagtgcttcggggtcttctgcaccacctacgacctcaaggcggtgagtccgtcagcctcacgtggtcactcccccttgcggctccctgtgttcgctgaaatgctccgtcgctttagcttcttcttcagcctcaaaagtagaatcctttttccacctaaagctagcagcgttgttggtgcggactgtggaccgtggacgtgtggtatgggaagtggtatatgctacg

SEQ ID NO: 187721 - DNA, 204 bp, Arabidopsis thaliana landsberg
tcgatcatcggcattaacgagctcggcatgagcgacggtgcctattcggcgctggtgttcttctcggcgcttgcgaatgtggcgaccagcctgacgctggggatatggtcggaccggctgggagaccggcggccgctggtgctgatgctttcggtctgcggcatgatcggcttcggctcggtcttcatctttcacacggcgccg

SEQ ID NO: 187722 - DNA, 245 bp, Arabidopsis thaliana landsberg
atggcttcttatgaactaataagtgaggatgttatagcgaaggtaaatcaaccaagacatgacctctgtgagctcgcagtagttattaagaaaggtagacacctatctactggtcagaaagtgatgatatgttggcggtgcttgctggttcacaaagaaagatagaccgcatagagaacaatattaaggaagcaaacaaatattatctttatttgaataaggaaatagaagcagatgatacttta

SEQ ID NO: 187723 - DNA, 434 bp, Arabidopsis thaliana landsberg
atgtcttggtctcctactgaaccaatcctttcactgttgaaaggggatgtcaagaaccagcctaaaaaggttgtttttctgcaaatacctggctatgtggagctgatgcacaaggatattctcagcgttagcgactgtaagatgtactggcagagcaaaggaaagtatcttgctgtccaagttactcgacatacgtgctctctgtttgagcttttccgcttcaataaggtacaaggcattaccaccgaggctcttgaagtggatgagaaaatccttgctttcgcgtgggagccgagcggtcacaggtttgccgtgattcacggagatcaatcaaagccaaatgtcagtttctattctatggagacaccccaaaaccctggaaaagtttcaaagctagctacctttgacgacaaggaagctgatgctctcttctg

SEQ ID NO: 187724 - DNA, 830 bp, Arabidopsis thaliana landsberg
gttgtctcagcagtcttggaaaattacggtcaccccaaaatattaacaaatgctaatgatagtggcagaaaatgggtggatgaagtattgaaaaacgaaggtcatgtagcttatgaagattccctcataaatgttccttcttggagaacggttgtgaatgacaagggtgaactaaatgtgaaaatgtaatctcttctctcgtaagttgtgtttacggttggccttttgggttcttttcttctttaatatatctttgttttacagggaagattccttggaccctagcttttggtctaaggtttgcctacacaacatggccaagctaggtgaagaggccacaacaatgagacgtatacttgagtctttgttccgtaactttgacgagggatgtctatggtcaacagaaaattcgattgcattccctgttttaagggatctgcagtttttaatggaaatatctggtattacgctcccgacagttttcattcagtccttccctcatgatcagtgttctaagatagttctgtatttttgcagggcaaagaacacactttctactttctatgttgattaaacaccttgaccataaaagtgtgcttaaacacccaagcatgcagctcaacattttagaggttacctcctccctttctgaaactgcaaaagttgagcactctgcaacgatagtcagcgcaataagcgatatcatgaggcacttgagaaaatgcatgcattcttctctagatgaagcaaatcttggaactgacgcagcaaactgtatcagaatggtcagtgtagctgttgataagtgcctcgtccaactaacgaaaaag

SEQ ID NO: 187725 - DNA, 192 bp, Arabidopsis thaliana landsberg
gtacagtttttaagctttagagacggaaatatcgaaagggaccgaatccccagaaccaaagaccgattggaaatcgaagaaaagcaaaggaaacgaaacaacaacttacgagaactaaagtcgagcaatcttcattcactagctttccttcttcaacaacaaactccatttatgaaggcaaaacactggtga

SEQ ID NO: 187726 - DNA, 426 bp, Arabidopsis thaliana landsberg
ctcgacgtcgacgtcgccaacgacgacggtcccgacgtccagcgcttcaccggcacgatcgaccagctgccgacgtcgaccagcgtcgcgttcacgcccaccgacgacgggcagcgcacgctcaccttcggctcgagcgcgcccatcgcctcgctcaccggcacgtacgtcgcagggacgacgcagctcgacggcacgctcgacgaggcccagcgcgcgcaggccaccgtcaccggcctgccgacgaagctcgtggtcgcccagacgggcgaccgctcggccagcctcaccacgcagggcaccggcccgatcggcgccatccgcttcggcatcgccgagggcaccgcgctgaaaaacccccccaccgaagaggcgtacttccggctaatgagtacgcctccggccgctccatcgcgggagccgtga

SEQ ID NO: 187727 - DNA, 520 bp, Arabidopsis thaliana landsberg
gaccttgcagatatgctagatgatagagccaaatcaatggcagctgttcaagctacggagcttgccaaagagcgtgaaaaattaagagattttcagctatctctacagggtatataatatcacttgtagcttggtgcttcttttgtatccatgttagctagtattctcacttaccttacttccatcagaggagcggaaaaggagtgaatctttcaaggaagaactcgagtctatgaggttagataaaaacaaagtaagtcttggagttagaaaagacacatttattattttcttaggaatcaccatctctaagttacaattttcttattttctgtattgaatctgtttgcagacctccatggagattagcaaaatgcgtagtgaattggatgcaaaattacttgaaatcaaacacctgcagatgaagttgactggtcaggaaagccatgctattggacctggcatggaacatctgaaagaagttaacaaagctctggagaaggaaaacaacgagcttaag

SEQ ID NO: 187728 - DNA, 704 bp, Arabidopsis thaliana landsberg
caagctgtcgaatatgaacttgacgggaaatataccttctgacctggtgaaattgagtggtttggttgagttgtaagttacttatttcttagacttttgaatttgggattatacagagatattctctttactgatgttgcaacttttgtcaatggcagatggcttgatgggaattcttttacgggtccaataccggatttctctcggtgtccaaacctggagataatgtaaaatcactttctttggagtttatatatcttttcttgccttcatctaactataaatatataatggactgtggcagacacctcgagaacaaccgactaaccggaaagatcccttcctcgttgacgaaactcccaaacctgaaggaactgtatgctttttttaggatagtttgatatattaatttgtgtggtggggatgaccttttaatctacattcttatgcacccaacctgctttatgattgcaggtacctgcagaacaatgtgttatcaggaaccataccatcagacctgaccaaagatgtgatctcaaagtaagtatattgtcggatttaaactgcttttgcatgaatagttcctagctcgacggtctcagtaagactcatgtattcttccttcagcttctctgggaaccttaatcttgaaaatggtggagataaaggcaagaagctcggtgtcatcatcggtgcatcagttg

SEQ ID NO: 187729 - DNA, 423 bp, Arabidopsis thaliana landsberg
atggcaggtaccgatggacgaaggagtaatgatattggtcggtggctgggaaagcaaaaaagtggagagtggcgattcaaaatgtcggcaaagaaatatgcaaagtgtgtagatgtaagcgaagaagatacgatttctgatgttgatcggaaaattgccacaacgcttggagtagaagggaaaaggacaaaattagagctgagtttttggttcgaaagaggaaataatgtctacatatagcaaaagatgccgcttgtttctgttgacaacagttcattttcaaaattcaaaaagataaggctagaaaaaagaggattgaacatgtatatatctttagaagaagacaatgaagatgtgtcaaagacaaagggacaatgcgagagtcgtggaccagatgtgattgttgttagagtcgtagcaaag

SEQ ID NO: 187730 - DNA, 764 bp, Arabidopsis thaliana landsberg
  unsure (1)..(764): unsure at all n locations
atggaaatcaaggaatctagaaaggtgaagtaaaggattcgacactaaggnnnnnnnnnnnnnnnnnnnnnnnnnnnnnnagtgtgtaagagtatctaacccaagtagaaggtttcagcaaaaggaacaaaagaaaggtcaggaggagctcacgtgacgctatgcaattcaacagaggacaaaggagtaattaacctatgtctagagctcaatctcatttgtctccttcctctgtacggaacagagcatgcgagaaagaagaagagagagagagagccagagaggttgtcttgtataaaagggagtaagctgggatcttttagggttaagagagcaagtgagaggcggctaagtttatagcttatctctagggtttgtgtaaccaaagaacagagctttctagtggatttccgagtaaatctcggcgagacgtagcgttctggtttggaacgtgaactcgttaaacttgtgtgtcttttcctttcagttcttgtttttcatagttaacaaacgagagaaaaacattccgcgagcgaaagtgagttaagagacaaagattcaaatctttcttgcaaagcttcaagaaaaccttcaaagatcctcaacacacatgttttttagtatgtatagtaagaaatgcgtctcatcatgactttgcaatttcacttaaggttttacaagcaatagaaaagtcacttgatgatcgaaaacggagagttcgggaagaagcgattagatgtagacaggcttggttagtcacatga

SEQ ID NO: 187731 - DNA, 684 bp, Arabidopsis thaliana landsberg
atgtactggttctgtcctcatcaagatggttctaatcaaaacataggttttgatgtttgcgttgcgaggctgcatcttcttggttttgatgtacatagcttacaaggggaagatcattctacggatgcctctgaacaacttatgggaccactacaattagctaaaggaggaaagttactcacccgaaaatttgccaacattcttcatgctcttcaggtacttttctctttgacattcacatgagtttcttcgaggtcgttagtgattagttgatatagtaaatgtcttgttaaacgggcttcctttcatcatatataatcaaatgcttatttcttctcttttgctggataataggttgttcagttctaccattggaaagcttctgaactcgtaacttctaatgtcgaaaatgacacattagaagaggtgaaagctatgtcccactctcagttggaaactatcaatgccctgaaatcagttttcctgctagatgagaacctcgtagccacaacttttggatattcgtgctctggtgaggatcgaaaggattcactcgacttgacgggtatagctctcgcggttacctcttgggaagagtatagctgtaagttactcaaggagctattatcatccttgcctcaatggaaaacttatcaaactatacacaaagtggaatctgattag

SEQ ID NO: 187732 - DNA, 151 bp, Arabidopsis thaliana landsberg
atggtgaaagcaacatcaacctttgacgactggaaatcaaaaagagatccactttttgaagatggtaagacatcaagacaaatcgttcggatgagtcgtggcgagtttgtgatttatgtatgggaaaagttctttggccccccatcggagc

SEQ ID NO: 187733 - DNA, 616 bp, Arabidopsis thaliana landsberg
atgggttcttcgtcgaacggaggagtgccacctggtttccggtttcatccgacggacgaagagcttctccattactacttgaagaagaaaatttcttaccaaaagtttgagatggaagtcatcagagaggttgacttaaacaagcttgagccttgggatttgcaaggtactcttttacttaaacatatcacaattcattcattgcttattaattggtatcattttttgagactttgataggtcttcttgacttcttaattattggatatatatatacatgaacagttcattgttatacaattctctaatttgtatgttatctttttattttttggaagagagatgcaagataggatcaacaccacaaaacgaatggtacttcttcagccacaaggacaggaaatatccgacggggtcaaggaccaaccgtgctactcatgcagggttctggaaggcgacgggacgtgacaagtgcataaggaactcttacaaaaagataggaatgaggaagacacttgtgttctacaaaggtagagctcctcatggccaaaagactgattggatcatgcatgagtaccgtcttgaagacgctgatgatcctcaagccaaccctagt

SEQ ID NO: 187734 - DNA, 370 bp, Arabidopsis thaliana landsberg
acaacactggtggtgctggaacttacgtatctaaattgggaacaacaactagtcggtatcggaggtgagtaccacttcaaaggaactgagaaattgtctccttatgcaggtttggatatcaacttcggtatgggtaaagctactgctgagggtgaccaaacagatggtactacttgggttgctgcagattactctgagaagcatgagcgtaaaactgctggtttcggtgttggtttgatcgctggtactgattactacttcgtagagaacttctacttaggagttgagttaggattaggatttaactcttacacagctaaagaaggaactgattctttcacagttgctggtgtaactactgaaaacaaag

SEQ ID NO: 187735 - DNA, 172 bp, Arabidopsis thaliana landsberg
gggcatcgagaccacccgcctgagggattttgaatcgaccacagtcaaaatggctttgctcatagcggctctttctcagaaaaaagtaatgccgtcgtctgcgggtttggccacgggtgccgcggcctatggcatcggcttggccgcccaaccgtggttgccgcgatcttga

SEQ ID NO: 187736 - DNA, 113 bp, Arabidopsis thaliana landsberg
agtttgtggggtttctgcgagaggactttcctcgccatcatgttcaagccaacgggacatatgtgagggatgacatcgacgtggaaacctaccttgaaccgccgattccgtga

SEQ ID NO: 187737 - DNA, 512 bp, Arabidopsis thaliana landsberg
atgatcaagagagaaaaagtggaaccaaagatcaaacaggtatagctttttatttttctgatcaccaattagtctttttttctttttcttaatccttgtttcactaaaagctgattctattgcaggaagacatagcaacagctgcaggaaaatttgcagattgtcagaaaacaatagcatcacttgggaaacagctacaatctcttgcaacactagaagaattcttgatcgatacagctagcattccaggttctgcaaggtcagttcacaacaaggaagctttgttaggaaaagatcctcatgagtgcatcaaaacaatcaatggaagatcacttgagtttcttgcaatccagaacagcaataacaagacctcacctccttgttcatcttcttcggactcaacaacagtgtcattaattatgtcatcaaaccgagggagttctgagaagaatcgcaacggatttgccacggttttcactcgaagtagaaactcagtaaatttggggatttag

SEQ ID NO: 187738 - DNA, 28 bp, Arabidopsis thaliana landsberg
atgcacgattggccttgccccggagcgg

SEQ ID NO: 187739 - DNA, 303 bp, Arabidopsis thaliana landsberg
atgaaatatctatcagagaaaataccaaaagaaacttcaagtaaagtcaggataaaccgtgatctatactcttatgaaaagtgagtttcagtttaaagctttgtcgagttttatctcttcttttgctatgatattttaagctcaatctttccatttatgccgaattataggatcatggagacagcaccaacgcttcctgattttgccttggcattgaaacccgatgagtaccaacttccgtctgtcgatgcgtcatggtctgaagccagtctacggactaaaaacacatcaaatcacatatag

SEQ ID NO: 187740 - DNA, 1596 bp, Arabidopsis thaliana landsberg
atgggaaggtaagctgaagatgaacttctatcacaatagctgccctggagccgaggatatcgtgaggcagatagtgtggaagaaagtcgaagcaaaccgtagcctggctcccaagttactgagggttcattaccatgactgctttgttagggtatgatgtgcatgtagggttttttctttatgtgaacatctttcttataaagataagtctgatgtggatgatttttaggggtgcgacgcatcgctgcttttagattcggttgctggaaaagcagcgtccgagaaggaagcgagacctaatctctcgctatccgggtttgaaatcatcgatgagatcaagtctattctcgaaaaacgatgccctaacaccgtctcttgcgctgacattctcactttagccgcccgagatgccgtctcttatgaagtaatacatatgaacaaactcgtctaaaaaatttcatgattagaaatcaaaaatttagtattttactagtcgcatatgttagttttagatgtctttcttatcaaatgaaaccaataatcaattctaactccctgagtttctatgtttgatgtgttatagtttgaacggccgctatggaatgtgtttaccggacgtgttgatggaagagtttcattggcaacggaggcggccagagacttaccatccgctggggcaaacttcaccactctacagaaactctttgccgagagcgatttggacgtcgttgacctcgtcgctttatcaggtttaccatatttgatatttcatatatcattttttggtaatcacatttgcatatacgttactgataagaaaccaagtgaattaaaagctaaccaatgaaaattgggaacaaataataaaactaaagaacgcataaaactataagaaaatcgcgggaatatcagaccacgtgcatgtccatgttaggaagtgtatgggatgctacaaattaatttcctccaatcttcaagaaaaagtataatatccgatcgtatatataccatcaaatatttgaggataatcttggaaaaggcgttgcacgtgataattattcaaaagtcaattaatcttcttaggaatgatacactaatattttcatataaatcattcatttaatcacctaatttttcgattatatattaaaaagaaacgaaattgtatgaaaaataggagcacacacgataggaatagcacattgcggtgtgtttggcagaaggctcttgaacttcaccggaaaaggggacacagatccttccctaaaccctagttacgcctccttcctcaaatccgaatgctccgacaaatctttaagactcaacccttccgcagtggtcggaatggaccctactggtcctctcgcctttgacagtggctacttcgtctctctactcaagaacaaaggactcttcacctccgacgccgccttgttgactgatccctccgccgctcacattgctagtgttttccaaaactccggcgcttttcttgctcagtttggtcggtccatgataaagatgagttccatcaaagtccttactcttggagatcaaggtggtgagattcgtaaaaattgtcgcctcgtcaactga

SEQ ID NO: 187741 - DNA, 556 bp, Arabidopsis thaliana landsberg
atgaacagaggatacatgtctcctgagtatgcatggacaggaatgttctcagagaagtccgacatatatgcttttggagttctcctgttagaaatcataagtgggaagaagatttcaagcttttgctgtggagaggaaggcaaaacccttcttggacatgtaagacatttgctctatcctcctagtgtttcaaatcgcaaattcttaaactggtgtcaatttttaaactgtatatcaggcatgggaatgttggctcgagaccggtggagtggatctattggatgaagatattagcagctcgtgttctccagttgaagttgaagtcgctcgatgtggatatactaatccactcataatgcaacatgaagccattgacagaccactcatatcacaagtagtgaccatgatgacaagtgcaacagatcttccgagaccaaaacaaccactctttgcattgcagattcaagatcaagagagtgttgtgtcagtctcaaaggctgcgagaaatagtacacaaactgtggaatatgggcgaaatcatatgctttatctatga

SEQ ID NO: 187742 - DNA, 225 bp, Arabidopsis thaliana landsberg
atggaaaagatcaggaaagcggtaccggggtttgccgcgctttttgtggggctgttactggtagcagcaggcatttatgcgatggccaacagcagcgcaaacgacggctcccctgcggccggcatcgttgtatttgccatactttgttttgttatagcagtattcatccgtgtgggggatgaacctccctcgagcccaactgtgcgctggttcttaccttttttg

SEQ ID NO: 187743 - DNA, 586 bp, Arabidopsis thaliana landsberg
  unsure (1)..(586): unsure at all n locations
atgacttacttaagcccgggcatggacgtggctgccggtcatgccccgtacgagttcaagaacatcaagccggtgccgcggatggcctggctcaacgacaccggcgccggcggcatctactccagcgtgcacgacctggccaagtggatgaacgtgcaactggccggcggcgccttgccgaccgtgggcgccgacggcaagccgcggcgggtgttctccgagaagagccaccacgagatgnnnnnnnnnnnnnnnnnnnnnnnnnnnaggaaggcgtcgatccccgagctggagccgctgacaccggactactacggctatggcgaaggctggttcctcggccaataccagggccgcaagctggtctggcataccggcggctggcccggcttcgtgtcccgggtgacgatggtgccttcactcaagctggggggtggtcgtgctgaccaaccagcagtccggcgccgcattcaacgcggtgacgtatcgcgtgctcgatgcctacctcaacccctcgcacaagaccgactgggtggccgtgtaccaaaaggccgaacagcacgcccaggccaaggccgacgacagc

SEQ ID NO: 187744 - DNA, 295 bp, Arabidopsis thaliana landsberg
atgtttgccacttccaccaattctggagatactaacgaaatcctcttcagtgaaaacagcatcattgtaagccaatagagaaggaccttgccactgagccaaagagtccgaaagcaaagaacccgacccgtgaacccgccggtcaagacagagacggactttagtagctccggcgtcatcagcgttctgtataagctccttaagcacagtggttccttccggatagttcaataaaacctcccgacattcgtcgggtcaaatcaaccttctgcccaaaatcttcgagaagaagtga

SEQ ID NO: 187745 - DNA, 44 bp, Arabidopsis thaliana landsberg
gtttttcggatctagttcggattcggatattataccaagaataa

SEQ ID NO: 187746 - DNA, 1219 bp, Arabidopsis thaliana landsberg
atggcttcttgcgtcaccggaacagaggcagcaatcagagcagcggcatgtagagacggcgaagaagcctctcatctaaagatagtcgccgtcttcgccatctttctcacaagcgttttcggagtttggggaccagttttactcgctaaatactttcatggtaaacctctgtacgataaagcaattcttgtgataaagtgtttcgccgccggcgtgattctctcgacgtctttagtccacgttttaccggaagcgtttgagtcactcgctgattgccaagtgtcgtcacgtcatccatggaaagattttccgtttgctggtttagttacgatgatcggagctataacggctttgttggttgatttaacggcgagtgaacatatgggacacggtggtggtggtggtggtgacggagggatggagtatatgccggtgggtaaggcggttggagggttagaaatgaaagaaggaaagtgtggggctgatttggaaatacaagaaaatagtgaggaggaaattgtgaagatgaaacaaagattagtgtcacaagttcttgaaatagggattatatttcattcggtgataattggagtaacaatgggaatgtcacaaaataagtgtaccattagacctttgattgctgcactttcttttcatcagatttttgaaggtttgggtcttggtggttgcattgctcaggtttgtttctttcttcatttctttttattttcggtaaactagttctcacaaatttaattagtgttgaattagttaggagagaataataaatactatgagaaaaaactagttggttctgactttagacataataatattttaagaaacctagaagaagtaatagtaatatgtagatgttgacatttttgcatatcatagaatgtgacattctaatttagagcagctcatggaccatatcaaaaccataccaataatccaaaaaaccgaaccaatataacattttgtgagtttcattgatagttttttggtccttaggataaaacttaggattgatgagtggtattgtttgatggtcaggctgggtttaaggcagggacagtggtgtatatgtgcttaatgttcgcggtaacaacgccactcgggattgtactagggatggtgatatttgcagcgaccgggtacgatgatcagaacccgaacgcattgataatggagggtttattgggatcattctcttcag

SEQ ID NO: 187747 - DNA, 124 bp, Arabidopsis thaliana landsberg
atttgtaaaaccaatttacgtctacaacgctacatctcagacttatatcaatggagagcaagcttcagcacggctacaaaaggattccaataccgggacaagaatttgtgtgcagattttttag

SEQ ID NO: 187748 - DNA, 606 bp, Arabidopsis thaliana landsberg
ctgtatccactatcgagctgccggccgaaacaccgcgggcctcgttccctacggtacacggtggcggccgtgacacaaacgcggttgtcacggtctcgcaagactctcgccccactcggtacaattacaatggcccacgcaagagccgaggggttatgtggtttgtctaaactcactcaacaaactaggattcacctagagcaagcgctaatgcggtctaactaacctaagcacttcgcaaagcacctacgctaatcaccgagtgattctattaagcacttgggtgtttgagcacttggaaatgtctacaatatgccttggtatgttgcttgggctcccacaccttcaaattcccggttgggagggtatttatagtctcccccacacttctagtcgttggacagaaagcaacagctttctgtcaatgagcacaccggacagtccggtgcacacctgacaaacaccgttcattgtctagtgccctgccacatcagccgactgttagggtctgtagcaatcgaccgttggatccgaccgttacccacactgtctgatgctacagccccagagcacccgttgtgggcctctctgcgcaaaactatctag

SEQ ID NO: 187749 - DNA, 1223 bp, Arabidopsis thaliana landsberg
atgaagactttagggttttcacctaaacaaaagttttgtgctagacggcaaacgcaaaggtggctgccagagggagatcgatcgtcatctttcacgccctccaccatggaaacacagagaaagaagtttacaaaggtaagtgtaaactcagagttgcttccagttgatctgattatggagattcttaaaaaattgtctctcaaacccctaatcagattcctttgtgtatctaagctatgggcttctataatccgtgatccgtatttcatgaagttgttcctcaatgagtccttgaaaagacccaaaagtcttgtatttgtattcagagcacaatctttgggttcaatcttctcatccgttcaccttaccatgtgacttgctacactcaacaacgcatgaccatttctccttccgtccacggtttgatatgctatggaccaccttctagcctcgtcatatataacccctgcactagacgatcaattaccttgcccaagatcaaagcagggaggagagccataaaccaatacataggctatgatccccttgacggtaattataaagtggtgtgcattacgagaggcatgcctatgcttaggaatagacgcggtttagctgaggagatacaggttttgacattgggaactcgggattcatcatggaggatgattcatgatattattcctcctcactctcctgtaagtgaagaactttgcatcaacggtgttttgtattatcgagcttttattggcacaaaactaaatgagtctgcaatcatgagttttgatgttaggtctgaaaaatttgatcttatcaaagtaccttgcaactttcgtagtttttcaaagttggcaaaatatgagggaaaactggctgtcatcttctatgaaaagaaaacgagtggtattattggtttgtggattctggaagatgcttctaatggggaatggtcgaagaagacttttgcattgcctaatctagctgcctcatcaacaaactcgcgtattcttaagcttcaaaagttccgtacaactgacgctgacacatgtgagattattttcacaccatcttatgcgcattcatcactatctagtgctatttattgtgatctgaaggaaaataaagtgagaaaatttgtaaaagaaggatggacagagaactatctaccatgtaatgcagactcagtttcctctactcaggttgagaatgtcatgtttctatga

SEQ ID NO: 187750 - DNA, 129 bp, Arabidopsis thaliana landsberg
tcccagagttggcaagttttaagacatgtagatataccggtaacaacgcgtaagaactctcgtctgtcccctacgcagtcactactgccaattctttcgccttccacgctttccagtatgaaactctga

SEQ ID NO: 187751 - DNA, 53 bp, Arabidopsis thaliana landsberg
atggaattcgtgggagaaagagacccaaacagtggagtatctagcagcaaacg

SEQ ID NO: 187752 - DNA, 207 bp, Arabidopsis thaliana landsberg
atgctcaagagttacattgctcgtcttaaaagtatcgtaggagacaagaaagctatggagatcataaacaatgctttggtggttataagtgcagggcctaacgattttatcttgaactattacgatattccttcaaggcgtcttgagtttcctcacatttctggttaccaagactttgttcttcaaaggcttaacaatttcgtgcgg

SEQ ID NO: 187753 - DNA, 52 bp, Arabidopsis thaliana landsberg
atgcatatacaaattcttaaatcgattgagttaatggcgtttagatatacag

SEQ ID NO: 187754 - DNA, 394 bp, Arabidopsis thaliana landsberg
atgacaagaaagaaagtaaaacttgtatggatcgagaatgacaagtcaagagcaacaagtttgcaaaaaatgagggtaggattacttaaaaaggtgaaagagctaaccatattgtgtgctgtaagggctattgtaatcattttcagccccgataaggttggaccattggtgtggccatctcctcaggcgactcatggtctcctagacgaatttttcgctttaccgaagtccgtgcagaagaagaaagagtcaaatgtcgaatcctacctaaaagagaagacacataagtttcaagaacaattgaagaagagtaaaaagaagaacaaggagcatgtcattgatgagctgatgatgcaactccaaagcggtcgtgaaattgctgatcttaaccaaa

SEQ ID NO: 187755 - DNA, 182 bp, Arabidopsis thaliana landsberg
agacctttgagaagtatggctctgtcaatgtgcaagtgtttggatggctcttggaggacgacgagctgtcgcgcctgatggacctcgaattcgcatgctacaagtggcacctgcgggaggtgaatggaaacggcaattacggctggtgcagggccatgatacacacgctcacacagcagctg

SEQ ID NO: 187756 - DNA, 65 bp, Arabidopsis thaliana landsberg
atgaccgcgggtatcgggaagaacacaagcgttcacggcaacccagggtggtctagctcaattag

SEQ ID NO: 187757 - DNA, 1096 bp, Arabidopsis thaliana landsberg
ttccgcctctcaaacaagggaataaacccattgttgatccgcctcgggaacctattgttattaaaaaacctatcgatgaccctagtctagtgtcagaaccaatcagcattcctatttcagtgccaaatccaaaggaaatgtggaaatatatcgtggttctagttcaaaaccacttaccaatgtggaaatatatcgtggttctagttcaaaaccacttaccaagagagctagacatcttgaagagtattgtgtacggaggtcttatcgagtccatcacaagcctcggtgtcgtatcctccgctgtcgcttccggagcttcaactcgtaagtagacataaacacggcattgagtttcttcatacatttcaattaaaactaatataatcttacttgcagtcaacgttatctctttggggctagcgagtttatccagtggccttattattatctgtcacaacgtaagtcgttttgtttcctttcttttttttgcctgcaaaaagttttaagacgttagtaagataatttagtaaacagagcacatactctgttttcccatgagaaaccgaacacctaactctgttttctcatgtgtctctaaacacttgtgattaaaaaccttatcattcgatacacacttacaaaagaggatatattttggcagctgcgtgggctaaaaacgaatcaaccacgacctcaaagtactaacactgatcatatgacgagtgtggaagtagaagatccgtaccaaacactgctgggaaacagaaggaacttcatactccactgcgtcgttgttgtgctttccttcttcttcttcggtgtgatacctcctctctgctacgccttctcttacagaataaccgacaagggacactacaaagctgcggttgttctcgccgcatctctggtctgcgtcatctctctctcctttgccaaagcctacgctttccgcatgcaaaaactcaggacaatggctgaatacaccggaatggcgtttggggcatctgccctttcattcattgctagccgaatcgccagcgatatctttgaaaagttaggctttcatgagcttgcagctgagtaccgaaaagactga

SEQ ID NO: 187758 - DNA, 54 bp, Arabidopsis thaliana landsberg
atggttcttgcttcagtggctcgtccggactcgactctccagggcaaatcaacg

SEQ ID NO: 187759 - DNA, 79 bp, Arabidopsis thaliana landsberg
atgaagcggtgcacctaccgcggggcagtaacacgctccttgcgcgacgattcgccttcttcgccccggcgagccagct

SEQ ID NO: 187760 - DNA, 549 bp, Arabidopsis thaliana landsberg
atggggtttcgcaccagaaacctctcctttctcattctcctccttcttaacttctttgctgccacatacgctcgtgaatgtagccctccaaaaccatcacctaagcctcacaaaccaccaaaacattctgtcgtcccacctaaaccaccggcggttaaacctcatccccacccgaaacctcccactataaaacctcctccgcctaaacgacacccccaccctaaaccacccaccgtcaaaccacaccctcaccctaaaccccctaccaaacctcatccccaccctaaaccacctaccaaacctcatccccaccctaaaccacccaccatcaaaccacctcctcaccctaaacctcgtccccaccctaaaccacccaacgtcaaaccacaccctcaccctaaacccccgacaaaacctcatccccaccctaaaccccccaccaaacatcatccccacccaaaaccttccaccataaaacctcctccgaaaccaccctccgtcaaacctccaccatcaactcctaaacctcctacgaccaagcctctctcc

SEQ ID NO: 187761 - DNA, 235 bp, Arabidopsis thaliana landsberg
gctgtacctgatagagagtctgctcccttacatcgttcccacccacgatacctgttcctctttacctatgaactgcatcgattttatcaacgaccactatgcaagcagcattctcctaggccttcttaaaaggatcacgaacgcgggaggcaccatcaccaactcacatctcggcgaattcagaatacaaccgaaagcgtgggtcaacccggaaattccggaccggtaccggcag

SEQ ID NO: 187762 - DNA, 110 bp, Arabidopsis thaliana landsberg
tcaccgtcataatcaacaaaactgaaagtgtcgataattttgctttcaccattaacaaagtggtgctgaaacctccccaccaatccctcttcgatggacgaatgaattaa

SEQ ID NO: 187763 - DNA, 179 bp, Arabidopsis thaliana landsberg
ccaggtgggcgcgtccggtgacaccgtcgtcgcggtgggggcgcgggattcgacgaccccgtccttccgcgtgtcggccaatggggggcgcacctggacgacggcggtcacccgcagccaggccggtcccgttgcgcggccagccggcgaccgttgtaacaggcccaccccgcggctgg

SEQ ID NO: 187764 - DNA, 382 bp, Arabidopsis thaliana landsberg
atgcgcgcttcggcgctgctccgattgtcgaatggcgacatggatacgcgtttttcctccaaacacaacgcttgccggtcgcagacagacaaattggagaacggaaatatattacgtttacgtgaacgtcaatattgtggtcgcgggcttatggcgtgccgtcttcggtcgccacagtgcgccggattgccggggtgctgcgaacggcgcggggcgtgacgatctcccggtcgaaaagcggaacgccgcgccgccggaagaggacgatgaggatggcgccggcgatgatgccgccgacatgggcaccccaggagacatcgccgtcgcggttgatgacgagcatcaaaaattgttgcgccgatccacaatagcagcgatatga

SEQ ID NO: 187765 - DNA, 79 bp, Arabidopsis thaliana landsberg
atggcagaagatgacattcctcaaagagcaatcagagtacatggctgcttacaacgtacaggcccaacaagcaatgaac

SEQ ID NO: 187766 - DNA, 304 bp, Arabidopsis thaliana landsberg
atgcatccacaaatgagtaagtaagaaaaaaaagtaagtgaaagattatgcacatttttaattagtttttctcctttatttatttttttcttttttagaagagcctttgcttatatcatcgaaatttccaaaacaattagaagaatgcataagaaggaaaaggaaaagagaaagaacaaaagttgtaatttcttcttcacacgcttttcataaagtggagaaatttgttttcaagattttgttttatgcccatatattcatcgcgtattcgtgtcagtgcttctattgttttcaagcacattaa

SEQ ID NO: 187767 - DNA, 31 bp, Arabidopsis thaliana landsberg
aaaaattattcatcgtcatcgcgttaattag

SEQ ID NO: 187768 - DNA, 1366 bp, Arabidopsis thaliana landsberg
atgtcttgctcggccaccgatctcgccgtcatgttgggtcataatgccacggcggcggccaactacatatgtggccagctaggcgacgtcaacaacaaattcatcgacaccgctttcgctatagacaacacttacctcctcttctccgcctaccttgtcttctctatgcagcttggcttcgctatgctctgtgccggttccgtgagagccaagaatactatgaacatcatgcttaccaacgtccttgacgctgcagccggtggtctcttctattatctgtttggctacgcctttgcctttggatctccgtccaatggtttcatcggtaaacactactttggtctcaaagacatccccacggcctctgctgactactccaactttctctaccaatgggcctttgcaatcgctgcggctggaatcacaagtggctcgatcgctgaacggacacagttcgtggcttacctaatctattcctctttcttaaccgggtttgtttacccggtcgtctctcactggttctggtcagttgatggatgggccagcccgttccgtaccgatggagatttgcttttcagcaccggagcgatagatttcgctgggtccggtgttgttcatatggtcggaggtatcgctggactctggggtgcgctcatcgaaggtccacgacttggccggttcgataacggaggccgtgccatcgctcttcgtggccactcggcgtcacttgttgtccttggaacattcctcctctggtttggatggtacggatttaaccccgcctccttcaacaagatcctagtcacgtacgagacaggcacatacaacggccagtggagcgcggtcggacggacagctgtcacaacaacgttagctggctgcaccgcggcgctgacaaccctatttgggaaacgtctactctcgggacattggaacgtcactgatgtatgcagcggcctcctcggagggtttgcagccataactggtggctgctctgtcgttgagccatgggctgcgatcatctgcgggttcgtggcggccctagtcctcctcggatgcaacaagctcgctgagaagctcaaatacgacgaccctcttgaggcagcacaactacacggtggttgcggtgcgtggggactaatattcacggctctcttcgctcaagaaaagtacttgaaccagatttacggcaacaaacccggaaggccacacggtttgtttatgggcggtggaggaaaactacttggagctcagctgattcagatcattgtgatcacgggttgggtaagtgcgaccatgggaacacttttcttcatcctcaagaaaatgaaattgttgcggatatcgtccgaggatgagatggccg

SEQ ID NO: 187769 - DNA, 287 bp, Arabidopsis thaliana landsberg
atgaaaaagaccttatggattgcaggattgatgagttttcatatgattgtgagttcatgtcttcaaagaagctcagggttgttgaaagcagggacttaaactctaggaggttgagggttctgtgaggaaattattgagcttttcccttttccgcataggggagacgactcaccattttcttagatgctgaagaaaaatctttacttgatgtaagaaggtttagagggagatttaaatcggagaaggagagaaaaacggcgacaccaagggaaccagaggagatctag

SEQ ID NO: 187770 - DNA, 308 bp, Arabidopsis thaliana landsberg
atgaatataggagtgggtgcaaggggatctttgaatggagtagcatatggttattgtactcatctgtatattggaggcatcagtagccagtgggagagggatgaaattgtccatgagtcgcggcaagccctttataaggggcctcgcatggtgactgacctgtactatgaacatgcccttctgatggagtttgatacacctgatgatgctgcaattgtaatggcccatctcaggttttttcggggagaaaagagtaaatttcatttggcatcaatcaatcgtcctttgcctcatgaagatggaggaag

SEQ ID NO: 187771 - DNA, 2045 bp, Arabidopsis thaliana landsberg
  unsure (1)..(2045): unsure at all n locations
atggcttctcagttccctggtccatccgagatccaagactctaacgctcccctcacatcttctggtcccaccaatccagtcaatacttcacctccgatgggacagaccgaggaaagaccccacacgtacctcgccgctctcctcaagaacatcaacacttgtcgtcccagcgtcccaaaggtctcaaacgtcaagaaatcaactaaagtcaacgtcaatcctgttagacctgttcgacctattagaccggttagacctgttagacgacgaagagtagatttaaacaaatcttcacctgcgatgggctacactgagaatagatccgccacctacctctcctcaggcaacccctgcctcgacttcttctttcacattgttccttccacgcccaagaaatctctggagcagcggctagaggaggcttgggaccatgattctttaaccactctcaagcttatctgtaaccttcgtggagtccgtggcactggaatatctgacaaggaagggttttcacggcggcgttgtggctccatggtcaccatcccaaaaccctagcttgtaacctcgagtccctctccaaattttgctattttaaagattttccggaggttctttaccggattctacaaggacctgaaatccgcagtatacataaaacgcaaaggtacgatacaatagctgcagcatctctacgtagaagatcccgtttctctagaggtggtcggggtaggggtcgtcattttttaaaaaggtcggcagccacgagggagctaagggtagcgaacgcggagaggaagaaccaagaagagaaagccagagcaaccttgaatcgcaagcaaaagaaggtttcaatggggaaggttgcatctacaaggtattctaacgatcaaaactataggtttctccacgaacgtgtctctgaactattcgcaaatcaactaaagagagaccttgagtttttgacatccggccaaccaaacaaaatctctttagcggctaaatggtgtccatcccttgattcttcgttcgacaaagcaactcttatctgcgagagcatagctaggaacatctttccccaagaatcattcccggaatatgaaggcgtggaagatgctcactatgcgtatagagttcgtgaccggctaaggaaacacgtccttgttcctctccggaagactctgcaactccctgaagtatacatgggagctagagcttggacatctctcccttacaaccgtgttgcatcagtggccatgaagtcatacaaggagattttcttgtaccgtgacgcagagaggtttcaacaatatcttaacgatgccaagacggggaaaacgaagatagccgccggtgctgtgttacctcacgagataatcagagagttaaacggcggagacggtggacaannnnnnnnnnnnnnnnnnnnnnnaatggttgacgaccttaaagagaaaggttctttgaccaattgcatggctatatgtgacgtttcgggatctatgtatggtgagccaatggaggtttcagtcgcccttggattgctagtctctgagctatcagaagagccatggagaggaaagcttataacattcagcgcaaaccctgaactgcatttggtgcaaggagacgatttgagatcaaaaacagagtttgtggagagaatgcaatgggatatgaacactgattttcagaaagtgtttgatttgattcttgaagtggccgtggaaagcaagcttaagccgcaagccatgatcaagagggtgtttgtgttcagtgacatggagtttgatgaagcgtcgacttcgacttcttcgtataataaatggagaagttcgcctccgactccgagtaatagatgggatacgctatcatattcagaggatgatgaagatgaagagaatgatgcttggcaaacggattacaaggtgattgtgagaaagtatagagagaaagggtacggagaggctgtgccggagattgtgttttggaatctgagggattcgaggtcaacgcctgtgcttggaaacaagaaaggagtggctttg

SEQ ID NO: 187772 - DNA, 424 bp, Arabidopsis thaliana landsberg
atgaaggagatgcctgggatcatcagccggatgccgcctctgcctgtctcaattaataatgatcttgcaagcagtttaatgacaagtgccacacaggtaagcaatcttgcattttctctgaacgtggatattcctgaatatgtaagggattaaaaacctcaaatgcttcccctaccaaatttgcctttgtttcatgaaaaattgtctaatcgcttcaaataataggacttccataacccctaaaaatcggcttctagtattttagggaactatgatcttgtacaagaacattgctttaaatctggtgaatgatggaaacacaatgtttgatgttaaaatataatgtttttatctgtctgtctctcagccgagatcttataccattccctcgagcatctatctgaagcaggagccaagaaactga

SEQ ID NO: 187773 - DNA, 822 bp, Arabidopsis thaliana landsberg
tgaatatcttgaactttgatgtaggtgatgataaaaaatctagaccaagtggtgtcaatggttttgagccagtttcaaagtcctcatcctcgcgtaaggtgggctgctataaatgcgattggacagttgtctacagatttgggtccagatttgcaaaaccaacatcatgagagagtgctccccgcacttgctgctgctatggatgatttccagaatccacgagtgcaggtaagatcccctgtttctctgtgaatataatcttctaacactttctaaagcagtaccttgtgaccttttcatgtaggctcatgctgcttcagcagtactcaacttcagtgaaaattgtactcctgaaatattgtcaccttatttagacggagtagtgagcaagttacttgtgctactacaagtaagtccattgtgtaaattatttcttaagataaatagctaaaaaagagcaaatattttgcactctattgattttaaatgattaactttggattataatggtgtttcgtacagaatggtaaacaaatggtgcaagaaggagctttaactgctcttgcttcagtggctgattcatcacaggtatttgtaaagaagttgtgttgcatctattgttttccctacatgcaactcttgatctaagtctaacataatctaaatttgtaggaacactttcaaaagtactatgatactgtcatgccttatctcaaaactattttgatgaatgcaactgacaagtctaagcggatgcttcgtgccaaatccatggagtgcatcagtcttgttggaatggcagttggaaaggacagattctag

SEQ ID NO: 187774 - DNA, 174 bp, Arabidopsis thaliana landsberg
cccaaccaataagcaacacgacaaggcccagctgcagagcaacgacaggaccaagattgtccccctcgaccaggccatgcccaggcagacagtcattatcagcgaagaccttacttcgcatgaagaagagaagctcctctgctgcctggccaagaacaaagatgtcttcgcctg

SEQ ID NO: 187775 - DNA, 537 bp, Arabidopsis thaliana landsberg
gaaagagaagtggcattgaaagccttcaagagtgggagaacaccgattttggttgcaactgatgtagcagcacgtggccttgacattccccacgtggctcatgtggtcaacttcgatctgccaaatgacattgatgactatgtccaccgtattggacgaacaggacgtgctggcaaatcaggactagcaactgccttcttcaacgatggcaacacctcactggccagaccgctcgctgagctgatgcaagaagctaaccaagaagtccctgagtggctcactcggtatgcgtcacggtcctcttttggtggtggtaagaaccggcgttctggtggtcgatttggtggccgtgactttagaagggaagggtctttcggtagcagtagaggaggctatggcggtggaggaggagggtatggcggcggaggagggtatggtggtggaggaggctatggcggcggaggaggatatggtggtggatatggtggtgcttcaagtggtggatatggtggagaacctccaagtgcttgggactaa

SEQ ID NO: 187776 - DNA, 72 bp, Arabidopsis thaliana landsberg
ggtcgaaatcgaatcagtgataggttcaagggtgaaatagggaattcagaaaagaagacgtgggatgattga

SEQ ID NO: 187777 - DNA, 701 bp, Arabidopsis thaliana landsberg
atgtggggactgcaaagtggatttggtaaagttccctggcttgaggattttagctatgcgaatgatactgctgctttgcaggaacatggcagggtaaatctgggtcttggacagacatgtaaccatgaagagttcaagcgatttagttcattcctcttgaaattgattgccaccacaaaagagttttctctgcctccggaaaggcaaaaatttggtctgatcacagaagaatcattggcttcatcatttaattttggaaaatctgattcgtgggcagcggtccttcagctggcaggatgtccacattgttctaagattttcaaggccggggatgacattcagagatttttaaagatggaaaatccgatagttacagaggtatggttctttctgtctgtatgcttagttgattttgcatattcacgtatctttatttaactgattttgtattactccagtgacaataagcggctttttgccgtcaaagcaaaatctctatgttgtgtgagtcaatacaatttgaatctgtcgttacatgtctattaggcttatatagttatgtccatccaaaattttctatcttgcctgacatacatcaattttctttgtttttcttatgtagctggaggacgactggcaggaccatgagtcatctctacctgcaagtaaaccgtcagttattctttttgtggatagatcaa

SEQ ID NO: 187778 - DNA, 320 bp, Arabidopsis thaliana landsberg
agaagttcagttcaaatgcgactgcgacagggatgtgacttcacgataccagaaatgcgactccggcgtaagaatttcggccgtaacagacgagagaagagaaaacggcgaaggaattagggtaaagagttcgttccgtcgagagagaaagaaagcgacagtttttttttccgttgatgaatagtaaaatgccaaaagaagggaaaccgaaacgttatgcggtttcagatgagtaatgatgtggattatgttaatgatatggattgatgacatgtataatcagtgtttttttatttaatttttagttacaaacaaattaa

SEQ ID NO: 187779 - DNA, 125 bp, Arabidopsis thaliana landsberg
aacaaggactcggtacgaccggttcgagatggattgtagagaagagatcggagcagttcaattcccaaggagtgaatccggtctggaaatccgataattggttaaccaaacccggttcagtaaag

SEQ ID NO: 187780 - DNA, 71 bp, Arabidopsis thaliana landsberg
gtgttcaagttgttcacgcgagatatggtttaacaatcgtgaagccgatcaaactggctcgactgggatag

SEQ ID NO: 187781 - DNA, 423 bp, Arabidopsis thaliana landsberg
atgaatgacaaccgggcaaattcagatcggaccgacatctcgcgcgaggcacctgattgcgagagcgatcgtgctttcgcggaggggaacgagaaggccgcaattgcttcggttccgcagagtatcatcgccctcgaggaagctgctccccagcggatcagcgcgttgaacgccagcctgcacgccaagcttcggcgtctgcatatgatggccgacgaagttatgactcacttcaatgcatattcgccctgccgtgcaggttgcacaggatgctgccactacgaggtaaagatatatccggttgaggcctcctacatcgctcgtaatagcgatcgtccattgcgcaaggagccatccggaaaggacacgtttcatggcaagccgtgcgtgtttctgcacgacgagcgctgcagcatctacgac

SEQ ID NO: 187782 - DNA, 1365 bp, Arabidopsis thaliana landsberg
gttgcgccgagagtggagtttgcccaacagagagtcgataatgcctacaaaacggtggagctgccactgtacgaaggagggaacccggatgactggttgttccagatagagaagtgttttgaacgcaacggtactccggagtatgcaaagctcgaggaagctctaacctgtctcagaggttcggcgatccggtggtggagacaggccaagtttcgagaaaggataaccaactgggtggaatttcaggaacgtgttctgataaggttcaaaccctgtagaggtgagacagctttggacctattgttgaacatcacccagacaggaactgtggaggagtacagagagcgttttgaagagataaccgttgagttaccacatgtttctgatgctgttttggagtcggcttttctgaagggcctgaagaagaagattagagatcaggtgaagttgagtaggccgaaggatatatatgacatgatagagatagccaagctcgtcgagtctcaagagaaggaggggttccaaaggccgttcaccaagccatcttataactctccttatgttccaagctctaagcctttgtctccagggtttgctaagggcaacgatactaacactctaaggagaccagcgagtggaggaccgaatccttgtcgtttctgtggggataagtggtttcccgggcataggtgcaaacaaaagctgaaatgtatggcgattgaagaggagaatgagttggaagctatgatggaggaggaacctaatgagcagaatgagacggcagagaccgctgaagaaaaagaagatctagtgggtcttgagctacactctatggctggcttgacaggagagaagtcaatgaagatccgagggaggataattgggaaggaagtggtggtgttggtggattccggagccacaaggaatttcatttcagagagggtggttcaggaattgcaactgcatattactgagaataatgggttcggggtagtagttgctggtggagagataagaaggggaagaggcaaatgcgaaggagttattctggaagtccaaggagtagagatcatggaagacttcttagtgtttgatcttggagaaagtactgatgtggtgatgggttattcttggttagccacgctgggggacacaagggttaactgggacttaaggaggctgagttggaagattggctctcggtgggttactataacaggggaccctgcactaagcaagagccagatatccctgcagtcgatggagagagtgattagaaggcagggagatgtttacttactggagctaacatcccttttcgagcaggagagtggtcagaaaaagggagtttatgaaaggaggtga

SEQ ID NO: 187783 - DNA, 566 bp, Arabidopsis thaliana landsberg
atgtcacgctaccgtggaactcaatatgatctctccgtacttatatggaaggtaataacgtaattatatttcacctcaacaatatcagattcaaatattcaacgtaacttcagtggcaagttccataccttttcgctcaagttacctctccatctatcttgaaatggataatttgcaatcatcaggaccaaaaaacaggaaactggtggcttagagtcaatgaagaagacgttattgggtactggccaggctcgttgttcaattctctaggaagaaaagctacgagagttgaatggggaggtgaaatcattaactcaaagagcggtgggagacacactaccacagatatgggaagtgggcattttgcagatgaaggttttaagaaagcaagctatttcaggaatcttaagatagttgatggaaccaatactcttagagaaccacaaggactttacttctttgctgataaacataactgttacaatgttaagacaggaaatggtggaacttcttggggggctcatttcttctatggtggtcctggtcgaaacgttaaatgtccttga

SEQ ID NO: 187784 - DNA, 398 bp, Arabidopsis thaliana landsberg
caaattcagaatacccggaagcgaatttatcggcggaggattcagagtcgagtgaggaagattcaggatccaacgccgtgaatcgccatctgagtctccgatttcgccctagtgaagaagacagcttatactgtgaaaaccgccaagtgtacggatccggtgggtaggaaacagacaaaatcctacccaaagatgacatcttttcgatatcttcagcacaagatcgatcatacagattagttttgcctgctcttaaatggtcggtattgtatagtgagaattgagaaatcgagaccgaaagagagcaactctgctcaactgtatgtacgtggcgagttcgtattggtgcttattattttttaatttcacacttgtcttgttgtttaggtttgttttga

SEQ ID NO: 187785 - DNA, 231 bp, Arabidopsis thaliana landsberg
aataatgtttttgtcatgtcaaacaagaaatctaagtatccgatacttcaagtagatttgaggttagtctctctcagatttcctctgtattggagcatcttgttaaatgcactgtttcagacttgtgatggataggttcttcacattgttttcagattaatatcagatttggtggtcattattgtttttgctgcaattggtggcatcgtcttctcttgtcttggacaaccg

SEQ ID NO: 187786 - DNA, 494 bp, Arabidopsis thaliana landsberg
gatatggaaacaaggatggattatattctattcttctaagagattacaactcccatgctgctgcagactgcatgaatcggctagcataattgaggtgagttcatctcttttgactaatttttccttgatctcgcagcaattgcaatttcttgtcttgctcattcgtttttctgcttcatgtctataagaattgcaaaagctctccgttcgagctttgtatgcactgagtttcctatgacctttctctgctatctgacattgctgcatcgagtaaatgcatagatgtcttgactaacaggcagctttttatcttatttagcgcagtgctcggtggattggtatccatggcttctttattggaattgatgacgatcaacctggtgaagagctgagtaaggaaagaaaaaacagcatccagtttggatatgaccattgccatcgcaaaaatgaggaatttaatcaaagaaatttgcaacttaaagctggcctaaatg

SEQ ID NO: 187787 - DNA, 189 bp, Arabidopsis thaliana landsberg
atggctcagaacgctagtctaagagcattgtgtcgatccatgcaggtacgctcatttttcaccttaaggttaacttcagctacgtaccgcggtcctgtcataagaacagtttctatctgtggtgtgttgcagaccgatatgcgtcatctcgtaaatgcaccaaatgggtcagataatccttcattgcct

SEQ ID NO: 187788 - DNA, 339 bp, Arabidopsis thaliana landsberg
ctccgaactactccttcatgcgggaccgacaggaagtcctacaacgtcgtactacgactatatcatcatcggtggtgggactgccgggtgccctctagccgcaacgctgtctcaaaacgccagcgttttgctgctcgaacgcggtgactcaccgtacaataaccccaacatcacgaggctctcggctttcggagccgctctctctgacctgtctgagtcctcaccatctcagcgttttgtatcagaagatggtgtcattaatgcacgtgctcgggttctcggtggcggaagcgctctcaacgccggcttctatacacgtgccggcactaaatacgttag

SEQ ID NO: 187789 - DNA, 670 bp, Arabidopsis thaliana landsberg
ttgaaactagcgaagaagagtatgtataatttgtctgatggtgaagaagatgtttatgaagatggtgctcttggtggttcttctgtaaaggatgattttgattctggacttttgtctgatgaagatcttcaagatgatgatttagaagcttctgcatcaaagagtatgttttcttgataacattttaacagcttgctcaactttgattgtgtctgttaaacttggcaaagctaattttgtctaaccatcacaggactgaagcatctaaacagaaacagagaggttgatgcatctggagaggaagaggtaagaacccgtcttgtagatgtttgtgtgtaatttaccgtgatggttgagaaatatggtcttgaagatatttttttggacttttatctgcagaggcgtaagagtaagaaggaagtcatggaagagatcatcatgaagagcaaattttttagggtgagtattccgctgttttccttgtatcgtcttttgcatggcgtgtcaatttgcagttggtaattttttttttttgggtggtctacagatggagaaagctaagcaaaaggaggaaaagggaaagctaatggatgagcttgataaaaacttcaagtccttagtgaattctgaggcgatggagagtttaactaagccttttgtagccgaagag

SEQ ID NO: 187790 - DNA, 527 bp, Arabidopsis thaliana landsberg
atgagacccaacgatgataggctagtggatataggtgagtgctttggtatggaatctaacatgttgtgtgggctagtggagaattacatggtggtcaggatttgattagaactgtttagtgcatggatttggtttgtatgatcaaggtaattagctagagagattgggagattctatgtttttcaaacctctttcacagattcaaccttttgttttgcttgagggcaagcaaaagctaagtctgggggagttgttatgtcctggcttttactgatttctaacatagtttcataatggtttctagagtgtttctagtctttttcataggttttgagtcatttcaggtacacttacacatttgggaactatggagcacaataaggaattttgaaagcttttcagcaacgaagatcttgaaggacgtttttcagaagctggtgtcgatcgacaccacacttgtgttgattgacactcttattgctgtcaagggaattctcgttttctaccaagtctttgagaagccctga

SEQ ID NO: 187791 - DNA, 757 bp, Arabidopsis thaliana landsberg
atgtccgcaagctcacagaatgttatattactacaggtacccgaggatgtgagagaggaacatgacaaggggagagataaatacggaagagagaaggacagagtgcgagaaagagacagtgacgatcatcataagaaaggtgcagctggtaaatacaaccatgatatgaatgaaccccatggaaaagaacgtaggagatcaggaagagatagccataacagacatagagaaagacatactagtgtgaaggaaaatgacacagaccatttcaaagaatcccataaagctggcggtgggcataagaaatcaagacatcaggtatactaaattccttttcttaagggattatagcataaagtaatatttgtgtttaggttttaagtcgagaaaaccatagagtagactgtgttatagtattattcgatccatgacaatgaattcagtatttggatttggttgcagaaatgctgcttctactgaaaagagtcttcactcagttaggtccaaaaccatttgatgtgttgatatcttttactgttaacacattgtcgatctctagcctagttctagacacacaagtggtttagctccatatggtttatgtcaagctttttaatctcggagctttctaaaattgcagcgaggctgggtctccgaagcagaggttgagggcaaggaaaagcggcgtagaaaagaagaagcgagggagcacacaaaggaagaggagcttgaagatggagaatgtggtcggtattga

SEQ ID NO: 187792 - DNA, 132 bp, Arabidopsis thaliana landsberg
atcaagctccgacaaaaaaggattgcatcttccatgagagatcccgacctatttcttagagctacaaagctaaggctatccgactatgagagtcttccgaatccttatccctcgctcaatgagaaaccatga

SEQ ID NO: 187793 - DNA, 1161 bp, Arabidopsis thaliana landsberg
atggaggcttggaaaatcaacaagagagaaaaggaaaatgaacctcgccggcaaacattccgagccccatgctatccatcatatttttcacacttttatcgcccgtctgacgttttatctcgtccttcattatctcaggtgtgatctgtttcaacatgagaagaaaactcagcaacatatgtaaggtatcccggagtttgcagagacaagtagttttttaatcacctcaagagcaagaagtggagaatcaacaccttgaacgggctttaggactcctcctgacaagtcctggatttcaaaacaagagattagctgatgcctgaaaacacaatccaagcgaaaacatagagaaccaaataaaaaattgatacctgggaaaaagaatcgctcaaggagtgagcagggtcagtagaaaccacaatggtaggatgaccgtggctagcaaacttaaccgcaagagaagcagcacagctcgttttcccaacacctcctttaccacccagaagataatacttccgctgattcacagataccatctcattaaaatgagaagctccttcagcaagagtagctaatgatctcactacacaaacaaacaagaaaccaaatatcaaatgacagaactttctatatgcagaatcacttgcttccgtggataaaatcacagttcaacaggctacagagcaaggtgaacatagcttactcttcattatgtgatccaaacagcaatttctttacatattcaactacatgtttctcatgataaaccacaactcatctattcaccaatcagtaaagttctcatctttcaactccacagagaatcttgaagtcatgtcatcactccaagaggacacaaagatcagatatttgcaattaataacgttcccaattaacgagagttcttacaatagtaagagtcaagtccaaaactcaaaccaaaaatggatctgaaaaccatagtcaactctgcggagaaaattctagctaaacaaaagagaagagacggtgatgaagaaatgtcataaagtttgaatttttttgcagagagagcaacaaggggctacctcgaaagagtgttccggagattctgtcaccgtgaatttgagcattgaaggaattgaaacccagagttcctgcgacccggtggagagagattga

SEQ ID NO: 187794 - DNA, 111 bp, Arabidopsis thaliana landsberg
cttggaccttctttgctacctctaccatgtgagaaccaaacaacagttagaacaaggcgcaacatcaatttcatgtcatctccctctgccctgaacatcaacatcgaaggg

SEQ ID NO: 187795 - DNA, 63 bp, Arabidopsis thaliana landsberg
aagttggatcttcgatgtcgagataaaacggtcgggatcgatgaatcctcatctactgattga

SEQ ID NO: 187796 - DNA, 87 bp, Arabidopsis thaliana landsberg
gagtgtcgatcgtagctgtagatatcatctgtcagtatcatccaatgtggttagctctggtatccagcaatgattctcgtatgcgcg

SEQ ID NO: 187797 - DNA, 190 bp, Arabidopsis thaliana landsberg
atactcccccgaccataaggggtatcggtgtctcgacctcaactcccacagagtcctcatctttcgtcacgtcgttttcgacgagtcagatttccccttttcctcctcttccgttgcctctctcaccgaactcgacgtgttcctcgaccccgactctgtgtcccccactgtcgtgcccccttccgtgcag

SEQ ID NO: 187798 - DNA, 347 bp, Arabidopsis thaliana landsberg
atgatacatcggccagatattgagcctgtgaggctcaacctgaacaccatgggtgatgccgccaccgaagaaaagatcgaacaaacagatgaacttttaggaaaggccatcaaggacctgcgcgacctgagccataacctgcagaacaaccgtctgcatgatataggtattatcgaatctatcaggcagctcctgttttccctgaaaaaagcgggcggtataccacgcatttcactgcctcggaccatttttatattgtggatgccaataacgataccatcctgtatcgcatcatccaggagatcatcaacaacatcatcaaacatgccagcgcccgcaccattaac

SEQ ID NO: 187799 - DNA, 395 bp, Arabidopsis thaliana landsberg
atgattttggaaactatgaatatgtgccttatgaaaaccagatctacggccctcgttacgatggcagcacacaggaaatcggtccgcacctcgaggatggttccgttcagacaggtccgtacagcccgatccacaaaaaagataaaaccaacttctggaacacaggttcaaccttccagaataacgtatcgattgcaggaagtgattattacatctctctccaggatgcgcagatcaagggtttgatgccgaaagatcagaaccgtagaacgacactccgcgttaatggggataagaagatcaacaaattctcaatcaactacggattgggttacacgctgcaacattctaacgttgtaaatgaaaaccaactccaaaacctgaatcagggataa

SEQ ID NO: 187800 - DNA, 283 bp, Arabidopsis thaliana landsberg
atgggtccttcatccaagagtgccgaggttcaaatgtggattgtgggcccccttgcccagctgctaaggtgcctgctaaaccctggcagcattttctgactgtgtatgatcaagtaggaggctatttaaggcagcaccttcaacagtgaacaccatcagcaggaggtcagcgagaggcccaggtcaccggggctgaccctcctgatttgggcagctcacacataacagggagccaacctggaaagtacacggtgatgtcctacaagtctttcttgccatcctg

SEQ ID NO: 187801 - DNA, 359 bp, Arabidopsis thaliana landsberg
atgaagaagggaatcaaacaaaatctgagattttttatatcaaatcgttcaacgaggagacctaaaaagagacgaactttgtctttaattacagagaatcgaaatgacccagaaggagaaaatgaatcggagaggagaagatacttgccttgtgtgaatcaaactcgaaacaagactgcatttgcttgcacggaagtgagaatttttgtaagaaatcgactgtttaatagagagagggagagagcataattgagattgaagtaaacaggtcgcgtgagagggaaagtgggagagagagagagacccgttttattcggatctgtgacccgatccgacaaatacggatctacgtggcttga

SEQ ID NO: 187802 - DNA, 785 bp, Arabidopsis thaliana landsberg
atgatatcaagttacaaatgtacctttggcttgaaagaaggaaaaagtacaagcatgacgcaaaagcaaatgccaagtcagcgtgaacagtacgggagcactgttcatctatttataggcacgtgacacaacccatgtaaaattacactcatgccctttacatttgctaatgactctatagtaacccatcgaggtctaaatagccttttcccttttaagtcggttcccctttctgctatcatgccgaagcttccctgcgcacagcttcggctctgcgcgaaccttcgtattctttgtacttcttcacattgtggttctgatccgagtccaaaggtacctgttcatgtattatactccaaaaacattgttaaatcatgtttttgaggacctttggaagacgaaggccccaacaactgcaatgatgaaggtatgtcctcatgaccttcgtctgaagatcattatgtcctaaaggaaataatgtttcgaaggacgaagggatttaacctttaacattttgtgttgcctttttcttaactaatagcatttgagaacaagtccccaacagtgttgtcattaatttttgcaagaactttataaggcacaacagcacgtggcatgagtttagactttctcaaatggcgaccacagtccgccttgtggggccgaacccaatgtattgcttcactaccggactcgcgttctttgctgagtgtctcaaacactcggcaaagaccattttacactcacttggcaaagaatactcggcaaacattttatcggcaaag

SEQ ID NO: 187803 - DNA, 229 bp, Arabidopsis thaliana landsberg
atgcataaggactacagctacaccatcacagctttgagaagtaagaagaagcttgcttggtgttttggaatcaaatatgactaaatgtcgtgcgtatgactcagtataagaactagaaccgtaacaggatcccaaaatttaaattagtgttttcttgttaacagatccaaaaccaaaacttcatagggactttggctacaccatcaaaactttgagaagcaagaagaag

SEQ ID NO: 187804 - DNA, 199 bp, Arabidopsis thaliana landsberg
atgagtatgaccaatagctcaaaagatccttttataattgttgttgtgtatgtagttaaggttttggttatgacggcaatcgccttcacaacattaacttttgttcaatcattcattggccatgagaaccttgttcgtgtgaattttgtgctgcctcgttacaatcacaatctaagcacatcatctctttacctttgtg

SEQ ID NO: 187805 - DNA, 270 bp, Arabidopsis thaliana landsberg
tcttccacggttcgagaggctgtggtgtgtgtgtggatttttcaacggacataatacgagagaacgggtactattgacttctcacaagccgtccttgtcaacgtgctcggaggcttcttaactttccaaaaataggctattctttcttcttcctccagctttcatcttctcttcaaacatttctccgaggaatttgagaatctgaatccaacattttcgatctttcaaaagaagaagaatggcgtcggtgtcaccattagcgaaatataa

SEQ ID NO: 187806 - DNA, 617 bp, Arabidopsis thaliana landsberg
cgtagtagatgacgtgaagtttgccattaatattttggcctacgacagccccaactgcataatcggatgcatcacacatgatctcaaatgggtggtcccagttgagtgcttgaacgataggtgtagacaccaatgcttcctttatcaaatggaaagctttaagacaatcttcatcaaagttgaactcagtttccttgcacagcaatctagtgaggggtcgagcaatctttgaaaaatcttttatgaatctccagtaaaaccctgcatgcccaaggaagctcctgatatccctaactgtcttagggggttgcagctgaatcatgacatcacacttagccttatcaacctctattccctcttaggcaattgtgtgccccaaaacttttgccttttctaaccatgaaatgacatttctcccagttcagaaccatgtttgtctcttcacatcttttgagtaccctgcacaagttcaacatatacgaggagaaggaagaggcatacacataaaaatcatccatgaatacctctaccatctcctatatcaaatccgagaaaatggaagtcatacgccactgaaaggtagcaggtgcattaccgagaccgaaaggcatacgctt

SEQ ID NO: 187807 - DNA, 472 bp, Arabidopsis thaliana landsberg
atggatatgactagttgtgttgctagaagaactcgttcgaggactgaatcttacttgaactcgattctcaataaatcaaaggggatttctggagaagaagaagatcagtctctgggttgtgtaaattcgaggactgagaagaggagagttaacatgcgtgatgcttgttcaccttctccgaggaagaagaaacgacggcggaggaaggatgatgacgacgatgttgtatttgttagaactgaatatcctgaaggtaagcgagatgatgagaatgttggttctacttctgggaatttacaatcgaaatcgtttgattttggtgatagggtttgtgattttgatgctgatgatcgtaatttgggatgtgaagagaaagcttctaattttaaccctatagatgatgatgatgatgttgttttcgttggaactgttcagagagagaatgatcatgtagaggatgatgacaatgttg

SEQ ID NO: 187808 - DNA, 1145 bp, Arabidopsis thaliana landsberg
ataaacattagcaaagagattggtaagtcaatggaggtgagaaagctgaacctggtttcttcgtcgacaatgtcgtaacacgcttcttccttttccgagaccgaaagaaacgggaaaaggaagaggttttacgagagtgggcgattcgggtcgggtaagaaaaggttaatcgggtcagagcattgggatgatgtagaagtacggtattcgtcacccacatgatcggagagctagactagacggaagagagagaaatacgtcggcgaagccgaaaataataaatttgaggcgacggaaaataataaacttgtaatcacgtgacactcacgtgctcaaataatgagtgatttcccttttatttttgcgttctcagaatttcctttttgttttctttttaaaataaatttcctttttcaaagttaaatttcctttttgtcggtgataacgttccttatagatactatactaatctctgattctcttcttacggatcaaagttctcaacctccgaagagcaaaaccctaaagtgctatttcttcttcttctgcttttaaaaacttgagtttcttcttgagcaagttatgtcgaagagccgttatgaatctcattctcgcttcttcgtcgaaggttatttaggatgatgccatacaacggctattttggatgatgctgaatgatcgttacgaatctcatgaacaagtgagtgtcaattcgttgttcgcccaaattagtttgtctgggttcattcgatgacgatccatgtggaatcttttctccggcgtcgtggcggttagtttgtggtgtcacacggttgcagtctctctctcatcgccatgtcaacgacgccaccgccaagtcatcgaaaccctagggtcctacaaggcccaacaaaaaacagaggaaattttcaacccatcaagcccatgaagattattggccaggtaattcttggagattatttgtgatgatgtcacacaacggctattttggatgatgtcatacactgcctgttttggaatttggttcagcatagagaacagaggactacagtgaagatttgtgagatgactgagagacgacgacttggagaggtatcagataaggaaaagagtctcgcattacatcgatttcagtacgatttcag

SEQ ID NO: 187809 - DNA, 105 bp, Arabidopsis thaliana landsberg
ctttgtgttctgtcttctgtattgcagacggaagtgaaccggagcgactatgacaacgtgatcggagctctgccctacttgaaagtcaatcgaaaggcgacttaa

SEQ ID NO: 187810 - DNA, 328 bp, Arabidopsis thaliana landsberg
aatctaaaggtgattgttttgatttcactctaaaggtccctggaagtaagccggagctgaatgctgttgagatagctgctgcttactcgtcactttctttcggcgtgggatactatgggaactctatagagaagccaaaggtatggccttcctcttagatacacacagaaaaacttgtcgtcgttaatggtggagcttaagtttaggatcattgggtctcttgtttatccttggacagatttcgattctcaggacgaggagacagatgagtgaggctggggtagaccattttgaagcccggattgatctccgcccaacctgttgctga

SEQ ID NO: 187811 - DNA, 2714 bp, Arabidopsis thaliana landsberg
gtaacattagctgctatagatgagatgtttcaagctgcacgcgccatcatgcgttggtttggtgaatgtgcgaaggtgtgtagacttttttccagcgtcaattaaatatgcttttggacttttaataatccttaataattttcatgagcagattattgcttcagaaaatgaaacagttcgatggacaaccccattgggtcttcctgttgtacaaccttaccaccaaatgggaacaaaactcgtaagtcttcctaaaagttatcactgacaccattactctcgtctgttgaatctgaatgtgactgttttcactttctatcaaaatgaatgcaggtaaagacatccctccagaccctatcgcttcatcatgaaactgatcaggtctgcttccactttaccttggttttacatagaaacaaaagataagttaggaaacagagtacgatgcagaggcctattcctaaaagagtttcgtgggcttttgtaggtcattgtgaggcgacaaaggacagcttttcctccaaatttattcactccctggatgggtctcatatgatgatgactgcggttgcctgtaaaagagcaggcgtgtgttttgcaggttctgtcctttttttcacaagttaaatcttttggacctccatcttcttcttaaccttggtctttgtgtcaattaacacatggcatgtaaaaattattctaacaggagttcatgactctttttggacgcatgcgtgtgatgtggataaactaaacataatactacgggaaaagtttgttgagctgtattcacaaccgatactagagaatgtaagtgtcatatgttcaaatggttcagtatatatggcatgtagaagactgcttcatgaactgagtttgttttttgttccctttttaacagttgctggagagctttgagcaatcgtttcctcatttagactttcctcctctgccagaacgaggagatttggatttaaaagtggtgttagattcaccttatttcttcaactgataaagaaagtaatgtcttccactaagattctcagacatctctgaagctctcaagaaacaatattctttcagaacatagtatcaaccccaaggcttgagctgtacgtgttagatggacgagaagaaagacaaacttcttgcaagggccagaacaaaagaaaagctgctgggttttgtatacagagacgcagacagagagaaggagtagaagaaatcctttgaatttacttgtgctgacgaagcttaatgaaacctcctgagatgagagttgtagcttctgatctgagagaaatcccggtttgggagtaccggaagttggttagaaactatttgatgtcatgtgtaaacccgtcggtacactgtagaatagcaagaactgtaccacaagccttgactggtgttcactatacgaaatggattactactattaactgagaaactgaattggtggaagccattttttcacagaaaatatagattgaaaatatatatgtaacacgtctgtttttttttttgttttttttcccataagtgtaatatattgtattaaacaaaccaaacatacaaaatggacttcaaaagcccgattacagatgttaacaagatctatcagacccaaaagagaaatgtcgatgcaagaagaaaacttcaatttgactccatccttaagaacgtgtcaacaacataacacgtgttagatgagtaaccaaagtattccgataacatccttcgccgtcagagcaacaattccggtaaaagatcaccaccgataataaaatcggacatgtattttcttggaattttagctggaaaaactaatcgaagctccacaaagaaataacagcttaaggctatggtaataaacgtcggaaaccacttcatttcttcaacacaaattgcaaatctctaaaatcaaaatctgtaatcatcagctcaacggaaacgtaccggctcataagcattaaagcgacaaatcgcttaaaccaattttgccaacacatccacagacttattaaaagaaaatgggttggctgattttcgagccataaactatttcgattctcagttttcaccttcggacttttggatccttaaatttccaccatcaactttcatattcctaaaattacatcatctactttcggattcatgcttaaacatacatttccaattgaaccattcatttaaccgagattaaccacaaatccgcgtttactgtaccgcgattgcgattaacccgactaatactcagacctgttaagaaaacgacgtcgttttcatttcgtttaactcatcaaaaagagaaagaaaacgacgtcgttttcattcttcttcttctgcaaaatcgatttagtcgattagggttcttcattcgacaattttataagaaaatgagcaccaacagctactactcatccgcttccagttcaggatttcgtgtgtgtcctcctggtgtcccctcgaaatggttggtgtggagaagagatcattacattcacatcgaaaacaaaggagaatccataccggagattctaccgttgtgcgatagcaatgaaggtacacctttcgattttgtgatatatttgattgattgaaggagtaaatgattggaaattctgttttatagagagaaaatgaagagcacttgttcaaatgggttgatgaagctctcttgtacgaaattaagatggtaaatgagaagt

SEQ ID NO: 187812 - DNA, 541 bp, Arabidopsis thaliana landsberg
taatattttcggcgctagatacaccagtgaaaaacatagtttctaattactcacttgagcatgctggcacagatgatctctttacctcaattttccactggctacatgttcttgaagaagaaataggaagtagaagtgatgtacttcgtgaagttattttatgcataggcaccatccagtcatctatatgccaacatatgcttaaagaagagcggcaggtatatagtcttgttatacttcaactctgttttgacaactacaatactttttaatggaaaacaacatttcagttacagatactctatcacttttcatagtggtgcctaacgagtcatgcttcatgtaggtgtttcctttgttaatagagaagttttctttccgagaacaagcatcacttgtgtggcaattcatttgtagtgttccagtgatggtgcttgaagactttttgccatggatgatctctcatctctctcacgaggagaaaattgaagttgagaattgtatcaaagatgttgccccaaatgaagactcattgcaacag

SEQ ID NO: 187813 - DNA, 855 bp, Arabidopsis thaliana landsberg
atggacaaaggagttgtggtagagctgattagagggtcgaccagttgggccaaagttgtggaagatatcgtgaagctggagaagaaaacgttccctaaacacgaatctctcgctcaaactttcgatgcagagctgcgtaagaaaaacgccggtttgctatacgtggatgctgaaggagacacagtaggctatgccatgtattcttggccatcttcgctttccgcttcaatcaccaagctcgcaggtatagacaaacgtccgccaactgttcgatgaaattactcagtgataaaattcagaaaatataatttcgttagagaagaagtggaattattctgccaaacttctactgaaaaatctttcaaccatttgataaattaacctgtagattattatatagtcaaggaccaatgattctggtaaattcgagagctttcaatagaaattctgactagacaaagcccttgttctagctttggttttgcatgcttaaagattaatggagatagctcataagtcaagaacacgtatggaatttttcttattaggcaagttaagagcaaaaacattaggaagaatgtatcccaagtttactttcttctgttgttttggaatcatgtagtgaaggagaattgcagaagacaaggtcatggagaagcattgttgagagcggctatcgacaagtgcagaagcagaaaggtgcaacgggtttcacttcatgtcgaccccacgagaacttctgcggtgaatctgtacaaaaagcttgggttccaagtagactgtctagtgaaaagctactactcggctgatagagatgcttacagaatgtacctagattttgatgactctatttag

SEQ ID NO: 187814 - DNA, 139 bp, Arabidopsis thaliana landsberg
atgagggctttgagagaggagcaaaagtttgagattgatatgcttgtggcaaagacggtttcgagaattggtaatctcgttgacgttgagaaagttcaaacgactacgattccttggcgtaaaaaaattgttaggaagt

SEQ ID NO: 187815 - DNA, 1771 bp, Arabidopsis thaliana landsberg
atggccaaaacgattcggtctttcattctccctttcctcctcatagtcgccggcgtgatctttcaactctcagccgtgacttccgccattggtatcaactatggaacactagggaaccttcaacctccacaacaagtggttgacttcatcaagacaaagaccacttttgacagtgtcaagatctatgatgctaatcccgacatcctccgagccttcgcgggctctgaaatcaacatcaccatcatggtccctaacggtaacattcctgccatggtcaacgttgcaaatgctcgtcaatgggtcgctgccaatgtcttaccgtttcagcagcagatcaagttcaaatacgtttgtgtcggaaacgagattcttgctagtaacgacaataacttgatatcaaatcttgtaccagcgatgcaaagtcttaacgaagctttaaaagcttccaatctcacttatatcaaggttagtttcaagtcatgatgataaaaaaaaaaaaaaaacttgcgtttacgaaaacactaatactaatacatgaatgttttttttttttgtttttttacatatgaatcatatttcataaatgttttttgaatacgttgttatttgatactactatcaacaaaatgtaattaatccaccattatttggcttcaggtgacaactccacatgcatttaccataagctataaccgtaatacaccaagtgagagcagatttactaacgatcaaaaagatatttttacaaagatcttggaatttcatcgtcaggctaagtccccattcatgatcaacgcctacacttttttcacgatggacacgaacaatgtcaattacgcaatatttggtccatcaaatgcaataacggataccaatacacaacaaacctacaccaacatgtttgacgcagtcatggatgcaacatattctgctatgaaagctcttggctatggcgacgtagatatcgcggtaggggagaccggttggcccacggcttgtgacgcttcatggtgctcacctcaaaacgctgaaaactacaacctcaatatcatcaagcgtgcacaagttatagggacacctctaatgcccaaccgccacatcgatatcttcatatttgcattgttcaatgaagatggaaaacccggtccaacacgtgagagaaattgggggatatttaaaccggacttttcaccgatgtatgatgttggagttctaaaaggcggtggaagcccgcttccgtttccaccgataaacaacaatggaaaatggtgtgtgggaaaaccagaagcgacgttaatgcaactacaagcaaatattgattgggtatgcagccatggtattgattgtacaccaatctcacctggtggcatatgttttgacaacaacaacatgacgactcggtcctcgtttattatgaacgcttattaccaaagcaagggatgcgttgatgttgtctgtgattttagcggtactggcatcgttaccagtactaacccaagcactagcacatgccctataccgataggggaaggtggcggcggcaatggcgcaaaaagcaaaagtgcaaattggtgtatggcgaaacaagaagtgacagagacacaactacaagctaatattgattgggtgtgtagccaaggtattgattgtaaaccaatatcacctggtggcatatgttttgataacaacaacatgaagactcgatccacgttcataatgaacgcttattacgagagcaaaggatactccaaagacgcttgtgacttccgtg

SEQ ID NO: 187816 - DNA, 241 bp, Arabidopsis thaliana landsberg
atgaatcgaagaagaagacgacatcgagcagacaatttaaatgtgatagaagaagtactgcagtcacaaagagaaaaaagaaacgatcaagaggacactgttttgtggcgaggaaggaatgatatttttgtaccaagcttctctacaaaggatacttggaatcacatccgaacaacaacaaccacagtctcttggcacaagggagtttggtttacacatgccacaccgaagttttcttttt

SEQ ID NO: 187817 - DNA, 331 bp, Arabidopsis thaliana landsberg
atggataggcggcgtactcgacagcacacgcacggcatggccgtcggcgtcgatttccacctgctggaagcccgtggtgccgtgcaggctgcgctcgtagtattgctagagaccgctcttgccgatatggtcggagcccttgtagttggacagttcgtccgccttgtccagcgcctgcaggtcgcgatcgttgatgcggccgatataaccgaccagatgtgcgccgagcttgccttgcgggtagtggcggaacaggcgcgacttgatctccacgcccggaaagcgaaaacggttgactgcgaagcgcgccgcctcctcctcgttcagatgc

SEQ ID NO: 187818 - DNA, 387 bp, Arabidopsis thaliana landsberg
atgggttcttctttgccatttgatttaatcttagagatacttcagagaactccggcagaatctttgctccgattcaagtctacgtgcaagaaatggtacgaactcatcagcaacgacaagagattcatgtacaagcacttggataaatctacgaaacggttcttaagaatcgagaatcgtgagagggttcaaatcttggatcccgtgaccgaaatcctcgccgtttcaacaatcccaaacgagcttcgccacaagtattttactctgattcactgtgatggtctaatgttgggcatgtgttacgaagaactaggtagtgaccccaatcttgcagtttggaatccggttatgagaaaaatcaaatggatcaaaccgtcaccatcgttg

SEQ ID NO: 187819 - DNA, 720 bp, Arabidopsis thaliana landsberg
gtgtggggggtactaaagccaggttttctcgccttattggaagatccatttgatgcgaagctattagatataattgtttttgatgtcctaccagtttctaatggaaatgatggtgtggatatatcactagcagtagaactgaaggatcataatcctttgcggcatgcattcaaggtcagcaattactgtcctacttatcttttaatcaattatatgtgtgcttactccatctaaataagctttcttgatcatctttttatacaatcctccttgtttgataatctacgatgttgttcttttatgcttcattgcttcttagagaaattaaaataaattgtccaagttatatatccgaattttatttctattacgcatggacactaatgcgccgtggagaactgataaccaagaaaattagaatattccttttgttgtaaattaaaatgggagcctactgaatccttcttttattagctaaaagttgaatcatcctcatttttcttgcccctcttctgctgcacaaatatttctggggttatatgtcaagaaagctagggataatccatgtatataacttttgttaaaatatcccaggtaacatctggaaaccggagtataagaataagggcaaagaatagtgcaaaagttaaagattgggtggcttctattaacgatgctgctcttagacctcctgagggttggtgccaccccatcgctctg

SEQ ID NO: 187820 - DNA, 225 bp, Arabidopsis thaliana landsberg
atgaaaccggtggtccacggtgtcgtatctccggaaaaatcatcggcggagagcttagagaaagggttaatagtaagaagagaagagacagtgacgagtcgagataagagagaagcgaagaaaccaccggtaatggatgaaacgacatcgtcagatgccgcagaagttgcggcagctgaggatgaaacggaggcggaggaggaagcggcagctgcagcggcggag

SEQ ID NO: 187821 - DNA, 218 bp, Arabidopsis thaliana landsberg
tgaattctgcggcaatggaggtcgtcaacgtgaagaataaaattagagagaaaattttaggcccacttccaggttcagtaaaggactcaaataaatcaaaaggcggagacgacatatgggtgaaacctgtcgttgatagaggaaaagacgttgttagaaccataaataattcatacaatttggagaagctgacggaacatacctgtgcaattcattag

SEQ ID NO: 187822 - DNA, 495 bp, Arabidopsis thaliana landsberg
atgacccgtgttttgtctagtgtccccaaaatcagacataatgcaagtgttatggccgcgcgtccttcacaagatagttgcaaaagtgaggtagcgtctcccctagagtgttttctccattcgtctgtgtacctggctcgtacaggccgtctctgggggtggcaaggtaggcaaatgcccaaggttactaatcaatttcaaaaaaattgttaagactaaaaggccccaatttttccaaaaaaaaaaaatttaccgagagattttattttattttgagttttgccataggtctcataatgaattgagccgggatctaaagcatacactgcaagagtaaatattaatttctattctagaggacgtcttcgatgttgacgaaaagaaaagtatcccatgcaaatccagcaactctgtcctatttcggacagtccacaaatcgaacttacgaaacaattgatctaaaaatcatgagcgttccaaatactcctcataatg

SEQ ID NO: 187823 - DNA, 229 bp, Arabidopsis thaliana landsberg
ttcatcgatggaagagcatgtacaacatcttcagcaagtttttgaggtcatgagatctaataaactgtttgccaagcttagtaaatgtgcatttgctgtttctaaggtggagtacttgggacattttattagtggaaagggaattgagacagatcctacaaagattaaggcagtcttggaatggccaaaaccaacaacactcaaacagttaagagtatttgtgggctag

SEQ ID NO: 187824 - DNA, 51 bp, Arabidopsis thaliana landsberg
aaccggaccctgcagaatcttgttctatcagagaccagtcaagcttcctag

SEQ ID NO: 187825 - DNA, 315 bp, Arabidopsis thaliana landsberg
gttccgacgtttggcatgcgcaagcaacccctactgatgatgttaattttgtggcggacgcgaatgcgatgcctgttaatgaaaatttgtctggttcgggaactgggtcttggtcgtctgatgggggtgattttgagagtccgttatcgtggactgaagagtcttcggatgaggatttggattattttgctgtgttggatgtggccgcggtggagtctgtgccgcgactcgaagggcatgaagcgttcgatcctccgactggggcgaggaccgaggagcaccgccggcgcaaagtggtgtcaaagcatagtgtcg

SEQ ID NO: 187826 - DNA, 855 bp, Arabidopsis thaliana landsberg
atgaacagaggaagaaggaatctgaaacaagcggcgtcggaccaggatttcacgcttgaggaatgtcagagcattgcccaagtcgtctctctcagaggttccaatcaaattgaggtaaaagataaacgctattttcttaggtttcatacaatctcgccaattcatagcattttcttcggaattttctttggatgggttggcttgtttgtatgtatgtatgtactgaattaaagtttgtgttttaactgctgtagttgttttgttgtctctttgaagataatggatgcaaaaggagagaactcattagctttgtttccagccaagtttcgtgagagcatgtggatcagacgaggtactttttcttgttagtcttctctggtttgttctttcttgaatggttagatttactgcatgatttggtgtggattggaggagtttgagatgtgctacactgatttgcaggaagctttgtagtgattgaccatacaggaaaggaaaaggctcaagagtctggtagcaaagttacatctattgtatgtaaagttctattctttgagcaagtccgtcttcttcaaaagtctccggaatggtatagcttctatcttttgttctgtatggatggcttctcatattgagtaattatagctcatgttagtttggacatggtgaatgcaggccagaaatcttcaaagatactagaccgattccagctgagaaaagctcacccattgaacagcatgaagatgacggtgaagttgattcgagtgatgatgatgatggtatgcctccattgcaagcaaacacaaacagattgagaccgtttggggtgaagtgtgatgcagaaactgattcagg

SEQ ID NO: 187827 - DNA, 444 bp, Arabidopsis thaliana landsberg
aagaagccagcaatattgctaaccttcaaatcagatttgtgatgagagattataagaccaatgtagctgatccaaaccctccgggaagtgccaagccaagttttgctattgataacttatcagctaaagctgtagatccacttcctatcaaactttcttccttcactggaaaaagcatcttaaacggcgtacagttaagctggaaaactgcttccgaaaaaaacaacagccattttgaagtgctacgttctacagatggacaaacttttactaaggttggagaagtagctggcaacggaaattctaatgcaactttaaattacactttcttggatagaagcgcagttgcgggtgcaaaccactataaattaaaccagatagattacaaaggcaaaactgaagaatttggaccagtggcagtaactgttaatggccaacgttctg

SEQ ID NO: 187828 - DNA, 629 bp, Arabidopsis thaliana landsberg
atgattctttgtaaacgttatattaacgaatggaaaacaaaccaaagtcatcgaaaaaaggaaacaaccaatcgaaatttccttattggttagattgagattagtaaatggaaataggatctaatttagatctcttttgattacaaatagtgaaaaatcccaacggctagattaatatcaaatcatcattaagtgaagcaaagatactctgcttaagaaaaaaaggaaataacccaagagaaccttgtttgcttataaaaatatgtcacgctcttcttcttcttcttcatcattcttgagaaatcaaaattctctattcatcctctttcttcttcgagaaacgacaacaaaaatctctttttaatagctgatcgccgatgaatgatgattcgtgattaattgaattacttctcccacatcttctcctcgcacctaacaaggtttttgagattccgatctcgacctaggaggaactctaacatgaggaagatatcccaatcaaagaatccatctacgagaaagaaaacccccaatcaaagaatccaactacgagagacaaagagatgagagacgatcaacttttgatcaaagaatccaactacgagagacaaagagatgagagacgataa

SEQ ID NO: 187829 - DNA, 331 bp, Arabidopsis thaliana landsberg
atgactggctccaagaattccgactcgacgaagaaagaagacgcgcaaaaagatggagagatcatcggaatatgcgaccaatatacccccgaggaggagaaggcagttcttcgcaaaatcgaccgagtcattttaccatttgtgagagcaaactcctccctaatatccacagtctgtgagcctaatgcgaccgccatgtagatgtgttttgtcttctttctgcagtatcttgacaaacaaagcctgagctatgctgctgtattcggccttacccaggaccttaacatgaccaacccgcaatattcttgttccagttccatcttttaccgtg

SEQ ID NO: 187830 - DNA, 326 bp, Arabidopsis thaliana landsberg
aattatccatagtgaattttgatcaggctctcgaggatgttgttcttgaggatctgttgtctgagccaactgatggtgatatgatggacgtttgttctgatattccagatgtgggattagagttatcccgagcagcgactcgtgcctcgtcgaccttggaaggcggtcttcggagccaagaggttggtcaaggttgttcaattcccatggaggtgactgagagtccttcagccttagaggtggctgttgcagagaacccagtcctcaaggatggtgccagcggttgcctagcccccgagggtgttgccggtaatgatccggctcag

SEQ ID NO: 187831 - DNA, 73 bp, Arabidopsis thaliana landsberg
tctttttagtgattatgaacaccgtttccgagatgccaagaagcttgagtgtgatatcaaagatgctaaataa

SEQ ID NO: 187832 - DNA, 647 bp, Arabidopsis thaliana landsberg
atggcaatgcttaagcgcacgattagcatcgtaagaatcggaagaggtctgagttatcgttcactttcttccgggaaccatgtcgacaaattaggaatggttaaggctctagaggcgatcaacgtaccctcaacacaagcggaggcattaaccggcgcaatcaccagtggctttgagtcggtgatggggaaggttaaagccgacatcgccaaatccgaggcaattcttcttttccaaactttcgttaattattagtactggtattctcactattactacaggaagtcaggaacatatgatggatcgtgtgtagagatctgttttctagtatatcttgtgttgtgaacttaattatccttagaaacggttaaggtatcttgtgttgatgacaagtgtccagaagtatagatgtctttgttaatatcttgtgttgttatctccatggcgtacgtgataaatactcatttagttttctcacttaaggaatgctagaagatctgtttcttttttcaacctaattagtgttcttcattgtctttttttgtgtataggagtataaatcaactcgtgttgcagaagagtttcgaaaaatgcgccccgatattgaaaagatgcgagcggatattaaacaatacagcagaggagag

SEQ ID NO: 187833 - DNA, 137 bp, Arabidopsis thaliana landsberg
atgaatggtaagcaggaagagttgatgaaagatccggattcgtacggtcgagatagggctaactatgctcaagccggtttaaagccgatcgttcaggcctatcttggtcctgacctaactcataagctcttcaaacg

SEQ ID NO: 187834 - DNA, 790 bp, Arabidopsis thaliana landsberg
aatttttcttagtttctcagctgttgttctggttccaaatcttatgttttccctcatgcaggacaattcagttgaatgcttcagaagagcatgcaagatattcagtttggattctgagcaggtaaagtgtttcatgcatgttcttttacgtactgtgtacacgatatgcatgtcagtttatgcaatactatatgttacatgatttattcatgcaattacaacttatacgtgtgcttttgattctgtagttgcgcatttgggatatttctggccaaacaaccttgtttttcgaaagtgatgtgagcaattccaaggattgtcaacaacaagcagatcaggaagtaagtgtgatgctttttgagttgaatgcggatattgctccatagttttacaattaaactgcattcgccttatttcagacttgccttccattttccattttttccctcatatctttgatgctgtatttcttattaatcttttcttttggtccaacagatcctcctagagctgcagatttatggattatcagactccatcaaattgaaggaatcaaaaaaagaagatggttccacacagcaaaccaatgggattaccaatggcatgaatggtggcacagtgttcagatttggacgaagtaattctttgagctttttgggtaaagctggagaagctggaactttggggttgacaggcttgcagaatctaggaaacacttgtttcatgaacagttcccttcagtgcttggctcacacaccgaagcttgtcgacttctttcttggcgagtaca

SEQ ID NO: 187835 - DNA, 107 bp, Arabidopsis thaliana landsberg
tcagttccccttttctgctgtcatgccgaagcttttctgcgcatagcttcgtgatcatcttatccttcgtcatgatcgtcttccgtcccactcaagcttcgtcttga

SEQ ID NO: 187836 - DNA, 102 bp, Arabidopsis thaliana landsberg
gtaattgtgacgggactggatggttttgagctttttggagtagagaaagggcgagaaaatctgaagcagggagaagactgtgtagaccaatcggtccagtag

SEQ ID NO: 187837 - DNA, 819 bp, Arabidopsis thaliana landsberg
ctacaataataggaagaaaacgatttggaaactggtgaatatggttatgctagcgttttttgcaatcaggtagaaatagtaaacaattatctttgctatgtaagagaaggaaagagatttgctagtctactaaacctggttctatagtgcagggtgcacggttgtaacattcatggcatcttactacaattatcctagcggctatgctttaaagcgcttgcatcagattggtgagtgacttattctgttattggggtttgttattaatgcagcagcattgacttggctatcaaacaagaaacatctgctggtcagcgtttgttttgtggtgtctatctacctctggttgataatttgcctacaatatgattaattgacttggtgccttccatggttctcaggccatcctgcaaatgtagctggggaagagtgggttcacatagacacttttggtgcgatgaatggaatatctcgcttttgtgaagatgattttccgtggaggtatgttagctgtactacctcgttttagggttggtaaaagtaaaggaaatatcaatgtacatggaaaaaagttgccactcggaagcacccatttgtgcgagatgaggcatctgtgtgttctttcatgttcattttcttggatacgaatatcactttgttggaaaagggatcattctacattgccgctgaatacatagaagaggtatctgctgatctatttaggaggatataaaattttgttgtgcaatgcagatattccctagatgaggagatagtagtgcaggagttgcgaaaccgatatttcacgtacctggtgaa

SEQ ID NO: 187838 - DNA, 77 bp, Arabidopsis thaliana landsberg
aaaccaagaagaagaatgagaagaagaagaatggttctagtgaagaaggagacgaagaaactagaggtgattcttga

SEQ ID NO: 187839 - DNA, 523 bp, Arabidopsis thaliana landsberg
aggtgtcatttacactcgttgtcgccgaataatgggtctataacggcgcaaatgagaacgtcggccacagagaaatcaggctttacattcttgggatgcaagttaactggatcaggttccacatttttgggaagaccatggggagcttattctagggttgtctttgcttattccttcttctccaatgtcgtcgcacctcaaggatggaaccaatggggagattcaaccaaagaaaagtactttttaaccttttggtttgtggttaatgttcttatgaatatttttgactgatgtatactaattttgacaaaatttgttcagtactgtatattatggtgaatacaaatgttatggtcccggagcagacagggaacaaagagtagaatggtcaaaacagttatcggatgaagaagctaccgtcttcttgagcaaggactttatcggcggcaaagactggctccgacctgccccttctcacttcaagaatgctcccaaacaaacccaaaataaagaaattaattaa

SEQ ID NO: 187840 - DNA, 123 bp, Arabidopsis thaliana landsberg
gggttttggagttaggcccttccatcctaatcgcgcttccgtcgccgacgccattttactcgccgtcgtcatctccggccacgcttgtcatcgttcgcaattaatcgaaatcgaaattttccg

SEQ ID NO: 187841 - DNA, 164 bp, Arabidopsis thaliana landsberg
atgtctaatgtattagacaagactaatcttcatgagctctcgattgctccaaaaatttccactcatgatgagaagctttacgaatggctaaatgcggcatcttcttccacagggatctcgtcgagtccgcaacagagattaaccctcacgaaaacctatgagag

SEQ ID NO: 187842 - DNA, 919 bp, Arabidopsis thaliana landsberg
atgccacttatcgagcttgtgtccgttaatgtcaacaatactcatggaagtgagttccaaaccagagagtttaccgaggtgtctaacagtaccagtgaactgagccataggacgggatgatttggatatcaacttagcacctatttccccatacttaagcttatacaagatcccaatctaacaccaataacgagtaaaagagtaagcaagcaagcaaaatcgtgaaaattttcgtcaatgttacttataacacgcacgcacgcacctctttattgaaacaagtggatttgatagagttgaagtcatattcctgaagacgctctgatgtcagctctagttccagaccctgaatgtttttagctttgatattactgacctcatttctttcaaagtagccatactctgcaaaatacaaaatcgaatccagattttaacaatcaatcaaatctctttgtttcgagacaagacaaattccaaaggaaacataaaggtgacaactttcgagacttgccttcacagatcttcacaatcttatcgcctacagaggataagaatgaaaacatcgccgatgatcgaaattttgcgagtttagggtttcgagcgaagaagaagaagaagaccaacgtaacaaacaaattgctactaattttgcgattctctagacccgtcgttatgtgttgcaatatgggcctatctgtaaaagacggactaaggcccatttgttgttgtaactcaaaaggttttaaaattcgaaaaagagttacaaataaataattacgataatgtcatattgcgtatatatgttgtccgaaggaaagtgacaacaacatcatggaataggaatcggagaagatagatgaagagatcggagaacattatcggaatcggagatatttagcggcggaagtgagaatgcact

SEQ ID NO: 187843 - DNA, 201 bp, Arabidopsis thaliana landsberg
atgacagaacaagaactgcaagacaaactggacgccctgtacaaggacattcatgcacgactgctggaggtggaaaatctctgccatctgcagaaagccaagcagcttgaaacgctgatggccttgggcaaactggtcaccgaccttgaatcagcccccttcggccacctgatgcaacaggacactgccgtcaccagacaa

SEQ ID NO: 187844 - DNA, 208 bp, Arabidopsis thaliana landsberg
gccaaatcacaaccaccaccgggaatccacccctgatgccaaggacatcccaatagccatgggatacatgcaaattcacatcacaactaaatggaaaggggaacatgcccttggaaatttctccaaatatcgacaatatatacttatagaaccccggtttataaggaatccttataaacttatagaggaagcgaaaagaaaaatctaa

SEQ ID NO: 187845 - DNA, 296 bp, Arabidopsis thaliana landsberg
tcggggtaccagcggtaggaatcgcggcaggagtcgcacttctcgctgcggccgcgtacgcattcttacttcgaaatgcccgcgtgccgttcgcgagcgtggtagtcggagctgtgctcattggcggagtgctcttcggtgtggcaagtcccaagatccctgtcccggtcgagatcaagccgtcctatctggtaacgtcgaggatcgttggcacgcagtaccagaactctttgctgcacgcgcttagcggcagcggtccgaacggattctcgtttgcatggaaccagtatcgtccg

SEQ ID NO: 187846 - DNA, 73 bp, Arabidopsis thaliana landsberg
atgacgggacacagcaacaacggtggctcaactgtgtctctcacggtggttgttgaatttaagtttagactag

SEQ ID NO: 187847 - DNA, 646 bp, Arabidopsis thaliana landsberg
atgaggaggcttaaactggagctgaaacaaacgatggaaatgtacagtacagcctgtaaggaagctctcacagcaaaacataaggtatgactctcgcaaaaatgattagtgttgcttcatttttgtttctcactagttcctactaagcgaattgttgaacctgcaggcaacagagcttcaacgttggaagttagcagaagaacggaaattcgaagaagcaaagcttgcagaggaagctgcattagccattgcggagaaggagaaagcaaagtccaaagcagcaatggaagcagctgaggcagctcaaaggattgctgatatcgagtcccgaaagagagtcgatgcagaaatgaaagctctgaaggaatcagaggcgagaacaaaagccgtgaatgctttagcaaaggatgtcagatacaggaagtactccattgaggagattgaggatgcaacagagttctttgatgataaatacaagatcggagaaggcggttatggacctgtctacaagtgttatctggatcacacacctgtggctgtcaaagctttgcgcccagatgcagctcaaggcaggtcacagtttcagaaagaggtgaagtctcgtaacaatgtctatgaaatacaccttggactctttcttggctaa

SEQ ID NO: 187848 - DNA, 47 bp, Arabidopsis thaliana landsberg
gtttgatctccacaagaagatctctattgctagttgcccacttgaag

SEQ ID NO: 187849 - DNA, 55 bp, Arabidopsis thaliana landsberg
atggcggcgacaacaatgaccactaccacagtgtgtgaccgtcacatcgccactg

SEQ ID NO: 187850 - DNA, 253 bp, Arabidopsis thaliana landsberg
aagaagctgctctcgaagaaccccccgggaaagatgcgcgcaaaacgggggacgagccgcgaaggctagagataaaggccaacgcaatcgcgcgcgaggtgattgaaagaaccttgagcaaagaaaccggagctcggagcagagagccgaagttgcgacctggagacaggccccggagaggcacgctcggaacaacaacgggcaatcacgcccgggcagtggcaaaggacggcgcggacctcgcgcgagcaag

SEQ ID NO: 187851 - DNA, 187 bp, Arabidopsis thaliana landsberg
cccggtgcgggtgaagcgcgccctcgaaacgttccgctcgcacggcatccgcatcgtgctggacgacttcggcaccggatactcgtcgttgagctacatgcaccagtatccgatcgaagtgctcaagatcgaccagtcgttcgtggtcaatctggacgaatcggaaagcaaccaggccaacgtcgtg

SEQ ID NO: 187852 - DNA, 186 bp, Arabidopsis thaliana landsberg
gcgaccgaagaagagaattttggtttcgaatctggtccagaatttactcttgagaagtttgagaaatacgctcaagatttcaaagactcctactttgaaagaaaagacaatgttggagatccatctgttgaggagatcgaaggagagtactggagaatcattgagaaagaaacaaatgaagttaag

SEQ ID NO: 187853 - DNA, 111 bp, Arabidopsis thaliana landsberg
cagcaaaaagataaaccgggggagagaagaagactaacggtgatgattttccggcgacgcggcggcgaacaaaaaaagttgtacggctttgaattaagtcaaaaggtttaa

SEQ ID NO: 187854 - DNA, 387 bp, Arabidopsis thaliana landsberg
ataaatccctctctaagggatggaagaaccgtgagcaaaagcaagacgtgcacaaaaaaagactcctaagaaaccaccagaagctggtaatggaagctcctatttttgacaagtgtgattggtatgtctctgttctaatatcatgtattccgttttggatttaggcaactgttttttattcagttatatttcaagatattgtggttgtatatttgtagaagtatgaacaccatcatgcactttctatgtatgcccattatcatctctactttagttagtctcattttctctcctttatgggtatgcaggcagtgtgtttgggatcttgcatattctattggaagctatgtgttcagcaatggtttggaccccaagtcacaggcctga

SEQ ID NO: 187855 - DNA, 438 bp, Arabidopsis thaliana landsberg
atgccgcaagaccgaatgcactatgacgacgcattgctcgccgacgacgagccacccgggacgggcccgcacggtgcggcgggcgaacagcccgagtagcttccgccacgggccaggccgagttgttggctcagcatctggccatttcatgaactgtcttgccgtcaattcgccccaaagtggcattaccccgttgaggtagtaccctgaaggggttctggtggctgagcgagggcttggagccgatgacagcagacatcatcgagttggacgaccgaggcagggcaccgctgcggaagtacgcccgtccaaaggggcgctacctggtggaggtcgacgaagaaggcgtcatccatctgtatccagcgacggtgatgactgaggtggaagtggcgatgtggcgccaccgcccgccggacgcagcccggatcgacgcaa

SEQ ID NO: 187856 - DNA, 770 bp, Arabidopsis thaliana landsberg
  unsure (1)..(770): unsure at all n locations
atggtaggcaaagccatacaagagccaacacatattgtgaaagagctgaaggataaaatcaaggagctcaatggaaaagtcaaccaagtaccactcaacatcaaggacgcccctaacaatggagccactattctggtcagcaaagaaggatgtgaattcacatcagaatggtatagaggagaagactatcttgataaaaaaagaagcttactgtgaggacatggccactgagtacccaattgcagacttgtcaagaaatcctaatgagtatgatgatcactctactcaagaaggagaggagacctcatttcctctctgcaatccaccctgagcctaatgagtatgggaagtcaagcttagagacataaaagaggctcacttgggaggaaatcccatgtctatctttgtacatatctttatttttccttgttgtttttgatgcatttggttagtgtcttcaggagaaaagtataaagagctgagtgaagtagattctggctctgagagtacagaagtatactcgaccacagagcaatgaaaaatactagaccatgttttagcttatccacgccaggaggtcactcgaccgcgggcgtggccgcagcagaagaagggaggtctagtatactcaggcggntgctggccgccatagagctgatgaggtcgagtacccacctgctggagctgatacagaacagggcggctcatctatggcctgggatcaatcacaggcagccattgacgaccaactccgttcattcttcggctga

SEQ ID NO: 187857 - DNA, 427 bp, Arabidopsis thaliana landsberg
gtacatcaggcttataaagaaacacggtctagagatatcgcagcctgctgttgagtctaagaaaaagatcacatgggagataacaaagagaaaaaccaaaggagaagttcacaagtaagtaactttacaaattccaaacatcaaaaggagaaaactttaaggaactaatcattttctgtctgcaaaatctaatcaccagagatgcgaaggagaaaccaggtcgatgcaatgaccctcacttgcctccctgtgcagcgtacgtagtctcaaatgttcattacaaaaacatagatctatacagtactcttgattccatgtaatattcttacaggtttatagagattatggctccagtattctcaagagatgcatggcgttgcgtgtggcatatgattcagaacgatttggttcacggttggggtcttga

SEQ ID NO: 187858 - DNA, 99 bp, Arabidopsis thaliana landsberg
atggcggctgagaagttaagggacttgagccagccgattgacgtcggtgtgctcgatgccactgttgcggccttctttgttaccggatctaaagaagag

SEQ ID NO: 187859 - DNA, 411 bp, Arabidopsis thaliana landsberg
aaataccttcttgagcaacgagcagttgtggataatgatggaggaaaactgcttaatgaagacaacgatcttagatctgtaagtggggaatcgttttttttccagtacttatgtatgtattaaaactattttggggaataatttcctgttttgcaggtactccagtacttaatggatgatgtagctgagtttatttccactcattgcactacaacagaagaagaggatgcaatcaaagaaaaaaaaggctgcaatcaacttcattcatttatcaactatatctctgagcgggaaactgaaaattttcgttcaagaagacgtgacaatgaaaattctgtcacattgaccaccattcatcaggtgtttttcatccactcgagcagttcacagtttgttatcaattggtgttag

SEQ ID NO: 187860 - DNA, 879 bp, Arabidopsis thaliana landsberg
atgaacagagctattgcccccgagcacgtaaccctgttgtcaccaccgttcacccttgttggcctccttaccgctgagagcaagttccaacatttggcgcccaccgttcgtgctacgacaagaccacccgcgatggcacccaagagagctaacccgaaggctgacgaggctgcgaaggcagcactgctggccgcaagaaagggcaaggccctcgccctcacccaatccacccaccaagagcccactgaagacaatattccccacacctgcgaagacgacaccttccacacctgcgggcccgaaggacaatcgcagccgcccccaggattcgccccactggagggcgcggatctcaccgaggacggcgaggtcctcggcgtctcaacagaagaacagctgcagctgcgcgccctgcgcctcaggaaccgcaatctccagaggcagaaagagatactggaggccaagcgccagcgtgtttccgcattagccaaagtgcggcaaatgatacgtgacgaggagcagaaagcccaagacctcgacggcgagatcgcgctgatgcagcgcgaaggccacctcggtttacagcaagagccacccctccaacaacgcgctcagccggaggacatgcgcgaaggctacctcggccggcagcatggccaacccctgcagcaccgggcgcagccggagaacccgcgtttcccccagcatgactacgcccccgagcacggcgcgccattccaaggggtcaactacctcgacgagcgaagtcccctggcgccacacctgcaagtgacgccttggccagccaactttcgagcgggggcataccccaagtacaacggcagcactgacccggcgcaatacatcatgagttaccaa

SEQ ID NO: 187861 - DNA, 10 bp, Arabidopsis thaliana landsberg
atgacgaaag

SEQ ID NO: 187862 - DNA, 216 bp, Arabidopsis thaliana landsberg
gaaacggggagtccgagtagtcggaccaagaccgcttatgattatcatttagggtctgagacaggtgctattgcgcatggattgtttgctgcgctgcgggcgttggatgaattggatgtggatgttatttatgtggaggggatttcggatcgagatggggatttggcggctgcggtgatgaatcggttaaggaaggctgctggggcggagatgaag

SEQ ID NO: 187863 - DNA, 52 bp, Arabidopsis thaliana landsberg
atgagacgtttctttggcagaaaacagcagacccaaattgctactcatctcg

SEQ ID NO: 187864 - DNA, 1006 bp, Arabidopsis thaliana landsberg
atggtttcttggttcactttaccgccaaattcatttttttctggagcctcgggagctgttttcgggttatttgtgatcagtgtccttgtcaaggtagtactctagttctcttctctccttgtttcaagtgcttgtaaatctatcatcaggacttcttttaaaactgttttgttagatgtctcggggttggagcaaatttcttgaagttcttatattgggtcagtttgttatgaagagggtaagagtctctcaacatttacacacatcatcattgtggttatagtcttatttcttactgggaattatgtaacaagtggtgatgtgtttcagttcattgattctcataggtatctgaagcagttcagacttcaactggattattagaaactaaattttgtggatttatatttggtggcaatgaattcctgacaattattcagactgttagacccgttgcgcagttctcgggtgctcttcttggtgttctcttagtttggcttctcagcaaatttcccttagagcaataattgaatgcaaagacaggctctaaacctatctgtgagtattacttctttcgaagcagaattgtgtcactggtttgtgtatgtttactgcttattaagagttttatttctttctccaaatctatgagtctgcagttattgaaaacagcaactgtacaatactttttcttatatacaagactattctgttgtaatttacacatagtgagagttctcaaagtattgactctcaaatttcaacagaagaatagaaaaaccaaatctctggcttcagttttgtcctttcagctcaagaacactgtacaagaatgtacaaactgtccactgatcccaaactgtgcttgggactgcttctggcatatgattggcactcgagctccgagtttacaagcagaaagattcatcgcttttgcggttggaagctcccgtttcccgactggaatctgcaataggttaaaactactaccagaggactgtttttg

SEQ ID NO: 187865 - DNA, 146 bp, Arabidopsis thaliana landsberg
ggagcttcgcggatctcgttttgtataggtggagcttatggacatggaacgcaagtgaggaagcgagctaatgtgaccattagactttcctccatggtcctgaatcatcagatagctcttgtggtgctcatggaacagctttacag

SEQ ID NO: 187866 - DNA, 1306 bp, Arabidopsis thaliana landsberg
atggaaaacgaaagagcttccaccgtttgtcctctcgaccccggcagcccactgttcctgttcggcgacggcttcgagccagccgacgttctcttttcctcacgcctgcttccacgtcccctcgaaagacaaaaaggaggcgtatgactttatggataaggtaaatcctctttccttctctttttcgggacgaactttactcgcttttaactagttcatattctaggtcgtcgacaagcatcaccgcttatgcgatgaaaggcaacgtttgggccttaagaggcaaacactcgaggcccgaattgcccgtatcgagaggaaggtaagggcaatggagagctaccctttttaatgggagtagaggaactttgacagtgtggcgaagatcctgcacatgctctggatgtatctccgtgctcgaggccaagtccctggtcctgtaaacgctccggtccaagtgatcccgtctgccagtgaagacgttgacgacgaagaggaggacagcaacccttggaagcgcgtgaagaatgaaccacacgtggatgttaaaaacgaggcgtccacttcgaaccccgaaccggcgatgaaggagcatgttcctgagccccttccctaaatgttttctgagactcaaaactctctttttttattttcgcatggacctacctaattttccttgattcatcaaatattcgttttggagatactctttgaatgcagggcgaccaaagcgacgtgaatgcttccgcgaatcactccggctttaaatggagtcgcatctctgaaagctaagagacctccctataaatttcctctctagggttcttttcattccttactaacaataccgctcttttctttcgcagttatggccttcaacctccgatgctcggaatccatgccagacttttcgaggatcgggatgatcgatgaggacatcccgaacgtaccagacagaggacgctccccactttgcaactttaaatcccagatccgagctccgtgtgtgttaattaaggacctttcgagcagagatcaagacatcgcgatgtccttcatcaaagttctcgcggctcaacacaaaaaacgctccgcggaaaaaaagaaaattcgaaagaagatcaaccaaatgctgcgaagagtcactgtgatatcaagggagttacacaccctcaactctctccccgaagattggatcgaactcggaatcgcagaatttgctcgcatcccggattgtatgatgcccattcttgacatcgccagtcaaggggtcgaggtgttctgcaagatgaggaggatttcctag

SEQ ID NO: 187867 - DNA, 376 bp, Arabidopsis thaliana landsberg
  unsure (1)..(376): unsure at all n locations
atgcgaatgagaaattttgtagtgaagatcaacgcagaagagggactgcttttatggggagagaaatttggcggtgaggtgaaaaaaacatgggagggagttttgtttttgaagggaaagttgtattcttgtccgttggattaannnnnnnnnnnnnnnnnnnnnnnnntcaggtataaatccgtgtgagaccttatcaccgaattaaaataatctaaaattccggccatccgtgtcatttactatcaaccaatttatatcatccttttcagtccacgtaggcttttgcgctacttccccatcttttaattttaggcgccaaatcgaaaattttggctatcaagggtctcaaaaaaattcaatcgtagcaaaataa

SEQ ID NO: 187868 - DNA, 306 bp, Arabidopsis thaliana landsberg
tgttatcgttcatatccggcagaacgagaggaatcatcttcttcttcttcaaccgcgattgattctcacgcgcgcatgaagacgacgatctctccaagtgttaaccgccgcgcgccgcgtttttccggagcggagaaggatcgacggaacccaacggtggcggccgtctcttctgccatttccgaagacgcatccaccaccgtattcgccggagaaactcatcgctcttttggtaaatttgtagccagagaaacgacgtcgttttcccgcagatatacgacactgaagagcgcctggtataattaa

SEQ ID NO: 187869 - DNA, 238 bp, Arabidopsis thaliana landsberg
catgcgatctttcatcggctcgtggaagatcgtgtgttcaatcacattccttgcgtgttcatcacagcgaaagggtatccggatattgccacaaggtcaattcttcaactcagttacaaaaccatattgcaatgtagtcactggtattaagtagcttggaagttaaatcttttaggtttttcctccaccggatgagcacaacttttcctgatctgccaattcttgctctagttgattg

SEQ ID NO: 187870 - DNA, 1083 bp, Arabidopsis thaliana landsberg
atgatccaaaagattgttacagatgtttcagacaaactgaatctcacaccgtcgagggattttgaggggatggtagggatggaagctcacttgaaaagattgaactctttgttatgcctggaaagtgatgaagtcaagatgattggaatttggggtcctgcagggattggtaagactaccattgctagaactttattcaacaaactctctagtatttttccgtttaaatgttttatggagaacctcaagggaagtattaagggtggtgctgaacattattccaagttgagcttgcaaaagcaacttctgtctgagattttgaagcaagagaatatgaagatacatcatttaggcacaatcaaacaatggctacacgatcaaaaagtgctcatcattcttgacgatgtagatgatcttgagcaattagaggtattggctgaagatccttcttggtttggttctggcagtcggatcatcgttaccacagaagataagaatattttgaaggcacataggattcaggatatctaccatgtggattttccatccgaggaagaagctcttgagatcttatgtctctctgctttcaaacaaagctctgtaccagatggttttgaagagcttgccaagaaagtagtacatctttgcggtaatcttccgttaggcctttctattgtgggttcatctttgcgtggggagagcaagcacgagtgggaacttcaattacctaggatcgaagcaagtcttgatggaaaaattgaaagcatattaaaagtgggatatgagagattgtcgaagaaaaatcaatcactattccttcacattgcatgcttcttcaactacaaaagtgttgattacgtcacagttatgcttgctgacagtaacttggatgttagaaatgggttgaagacactagccgataaatgtttcgtgcatatatctattaatggatggatagtgatgcaccatcatctactacaacaattcggtagacagatagttcttgaacagtctgacgagcccgggaaacgtcaatttttaattgaggctgaagagattcgtgcagtactgacagatgaaaca

SEQ ID NO: 187871 - DNA, 77 bp, Arabidopsis thaliana landsberg
gacaaaagacatgggaaacagtaccagcttacgcgggtccacatcacactcgcctagagacactcctgtcttcataa

SEQ ID NO: 187872 - DNA, 73 bp, Arabidopsis thaliana landsberg
atggcccacatatcagatattaaactgataagaacagatactacacttgatcttagccaaaaggccgagaaag

SEQ ID NO: 187873 - DNA, 401 bp, Arabidopsis thaliana landsberg
agactacagaaccgagtcttgaggttcgaagtgcgaacttcgactgtgggtacaatgccatcatcgggaggccaggattggccaaattcatggccattcctcattacacgtacatgatactgaagatgccaggaccacaaggaatcataactgtgcgcgccgacttccaaggcaccgcagagtgtttccgagtggccatccaagcggccctcaccaccaagccgtcgacaatttcttcaacacaggcgaactctaagcctgaggaggaccttgcagtaccggcaaacgaagctcaggccgcgacctctatgcggtcaactgaagaaactaaaaggatcaacctggggttcgctgatgaacgcaagactgccatcatcagctccagcctggacgacaaatag

SEQ ID NO: 187874 - DNA, 62 bp, Arabidopsis thaliana landsberg
atgaaatcatcatcatcatcgtcatcatcatcgacgactttcttcttctttctcgcatctaa

SEQ ID NO: 187875 - DNA, 303 bp, Arabidopsis thaliana landsberg
atgcagctcaacaagaacaatctttcgaaccctgtcttgatgtatacaccactgcaaaaaaccgctcaggtaacttgtaactacaaaacacacgtagttgtcagtttctcaatttcccacttgagcttaaaccagaaaactaaaccgttttctttgcttgtctgaggcacccattgatcccgagcttctccctgcaacttcattttagctcatgaagagaaaaccataaacttcacttcactttagatcaatgattctacaccggcattacttggagctgtttcttcaatgattctacaccag

SEQ ID NO: 187876 - DNA, 301 bp, Arabidopsis thaliana landsberg
atgaatccccatgccaatggcggcgagttgctcgcgcccttgtccctacctcagtttcgcgattttgcggtgaccgtgaaggcgccgggccaaagcgaaggggaagcgacacgcatccttggtgaatatctgcgccaagtctttgtgctgaatgcggacactcagaattttcgccttttcggtcctgacgagacagcttccaacagattggatgccgtctccaaagcgtcgaagaaagagtggatggcagccacaaaatccactgatacagatctcgccgccgatggacggggtgatggag

SEQ ID NO: 187877 - DNA, 319 bp, Arabidopsis thaliana landsberg
atgggttcatcaaaagatagtgctagtgtcaccaacatctccgtggaggagcactttagcgtctctcagtctagccccggtggacaggtatagattttgggttctttctttgtactacgtttatatttaatgcataataaccaactaacaagcgtgtggtagtggtagactagtggcggtagatttgatcattttgaaaggatgtttcttctagtacacgcttaaagtggattattttacattcaaaatgagtatcatcaagagttggcttggacgaagaaagattgtgaatattaacttggcccaactttgtagttaa

SEQ ID NO: 187878 - DNA, 114 bp, Arabidopsis thaliana landsberg
atgctatgtttggtgacgctacatgtatgggatgacattccgtcgaatctccttgctcgaatgctcaaagactctcctaagttacaagaactagtgtacgtctctgacaaagat

SEQ ID NO: 187879 - DNA, 163 bp, Arabidopsis thaliana landsberg
gtatgggccatgccagacacctactcttgggttttgtgtgcaacgctacatgcatattaatactttcaagccagaaaagttttgggctctgcgaccttatataagaaaggatggttatgagctccaactagagtgggagagacgaagattgttcgacctggaa

SEQ ID NO: 187880 - DNA, 269 bp, Arabidopsis thaliana landsberg
atggaggggtttgttggatggattcaggcaaatgttttcagtgtggtgaagtgggtcatatcagggagaattgtccggaaggtaataataattgtaggaagtgtgggcagccaggccattatgcacgggagtgcactacgtttatagcggaagggaatcaacggaacataaatgacggaaaccaaacacttcctaagaggcaagccataggacctcgtgtgtacgccgtagaacgaaaggggcttgatgttgagcaagataaagtttga

SEQ ID NO: 187881 - DNA, 693 bp, Arabidopsis thaliana landsberg
  unsure (1)..(693): unsure at all n locations
atggctaatgaagagattatttgtgagttgccaggcaacattggtgctggagatgcaccaagatatcaccatcaacgagctggtattgtcccacnnnnnnnnnnnnnnnnnaattttgagatcaagagtagtcttatctccatgattcaaggtaacaagtttcatggactgccaatggaggacccattggatcatcttgacaactttgatagactctgtagtctcaccaagatcaacggagttagcgaggacagtttcaagctccggttattccctttctcacttggagataaagcacatctttgggaaaagactttgcctacttcttctataagcacttgggctgattgtaaggcagctttcctagctaagtttttctctaactcaagaacagctagattgcggaatgagatttcaagattcacacagaagaattctgattcattctctgaagcatgggaacgcttcaagggctacattactcaatgccctcaccaccatggttttaagaaagcttcacttcttagtactctctacagaggagcattacccaagataaggatgttattggatactgcttctaatgctacaagaaaacacggtttttacgactgcaatattagccgcaaagtagtcattaaaggagtagttacaactatgttacgactaattcccgatgtcgggaatccatag

SEQ ID NO: 187882 - DNA, 508 bp, Arabidopsis thaliana landsberg
acgatactatcgagaaacaacttcgaaattttttctccggcgccggtggaattcttactcgtcggcgtcgggaactctctgcttctcgattcatttgcaaactctttcgatccctttgtaaccttttcatccttctagcttctctttttcaaaattttttttctcttgaactcttcttctccatgcctaccttctacggaacttcagagatccttgatagaacattgtggtggttccccgtgagccatctgttagatctgctcaggtcgttggtattgaagtcggcaatagagaagcctctcgaatccaaatgttctctagccttgaaactcgagcttagtctcaaattctcatctaaatccttggaatttagatgcttcgcgaccctcgtcgttcactgccctcaccggaactctctgactgccacgtcggaactggcgatgaagatggcggcggaagggttatccctaaacctaatccagatgttgctcttctcttatgggcttag

SEQ ID NO: 187883 - DNA, 468 bp, Arabidopsis thaliana landsberg
actggggcagaaaagaccaccacggcctaccagcagcagttccgcgaattgttcatggcgctcaacagcaatcccgatcacaacgaatggatggagttgtacaagaagcttgtatactgggaactggaaatggaaaaaagcgatagccccgaaatgcgggaagtgttccaggcgcagaagcaggaggccaatactgaattttgtaagtacatcacaaagaactatgcttcctggatagatccgaaagctgctgatgcacccatcatgagccaccagcttttccggttcaaggtattgccgcatgtggaaaaaggaacgccggtgttttttatcctgatagataacctgcggtacgaccagtggaaagccatccagcccatctttgccgacagctttcgcatactggaagaagaaactttttattccatactgccccctgccacgcagtattgccgcaaagccatctaa

SEQ ID NO: 187884 - DNA, 328 bp, Arabidopsis thaliana landsberg
ggaagtcggattcaggagatcagagaccagccagttatgggaggcttcagttggaggtcccattggagcctggggaacggtcagagataaccaagggcatcgccacaccggtgttgagagaccagctccaatcagacgtcccaagtgaggcttaaggagatctctgccaagacagatactgcgccaactgtgcgacgccgaattagggacagagcagtcagtgaagctagagaacttgcaatacttcccaagtagcacccgtgcaagcagacaagaaggattcttgagaagtctccagctgattttggcaagtaaagcattattaaag

SEQ ID NO: 187885 - DNA, 947 bp, Arabidopsis thaliana landsberg
acggatttgaaaattcagcatagagctctcgcacaagttgtctgcaatgttcttggctgggacgttaacaatccagttgtttctagccaaaaagattctcaggttagtttcgatgccttgaaagaagttagctttcaactattgtagtctatggtttcgaaaaagatgattgatttgcttgtgggaattcaattaagggccgggttatagtttgatagttcaggttactatctggttataatgatcaaagacaagcttatcagtttatttatgttgttctgagggaaggttttgatctgattaaagatgaatttgctggatcattgtgattcttgggaggtttcttgaataattctggtcattcagaaatacttaacttttttttttgttattgctcttgatagacggttgtggaaggtgcatctgagccgccttcagactcgaagattcctcaggagaaacaacaggtcatgtcggttgaagaacacgcaaaggctgcggtgttacaaatgcaacagaatgcatcagaagctttgaaagacatttttgtcaaggatggtactggtgcagctgatggaactgaggagaacggtgatgagaatctgtctgaggagttggagttaatatctaaagtcttctccgagaatgttgagctcaagagttactatgagaaaaactatgaaggtggagcttttatctgtctggtgtgttgtgctgcgactgataagaagatgttaaaaagattcaaacactgttatggagttgttcaacattgtactaaagtaccaaaaatgaaaatacgagctcacaaggttttcgctcagtttgtctgtgaactacttggctgggattttgagcttctaccacgtagagtaatgaaaggcgttgcttctcttgctatatctaatgctaacgagaacaatgagaacacatcatccatggtcgag

SEQ ID NO: 187886 - DNA, 782 bp, Arabidopsis thaliana landsberg
atgagagccaataacaaggttattaatctttcgatgccgctgcctgatatgatggtaagctacaaaacctacattaattacctgggtaagaagtcattacgcttcatagcttaatgataatagtccacatttttttctttgcatcgtccagactgcagtcctggcaatggatgagtctgtagtagatgttgatcaaatagagaaacttataaatttttgcccaacaaatgaggagatggagcttcttaaggctacctcttgacttttgagtagttgcattatttactttatatttatttatttattttgtctattcttgggtaatcatcattattcactttttcttgacaagagttcttgttctttgtcgtgattgactgatttgttgtagacctacactggtgacaaggcagccttgggaaagtatgaacaggtctgttgaagttatcaatctcgcactgtttttggttcctactataaataaatatggttagtaattagcttacttagctaactcattgtcttctgccatcaattttgtttatcgcagtacttactagagctaatgaaggtgccacgaattgaggcaaagcttagagtattttccttcaagactcaatttggcactaaggtccggcggttctgttgtatctgattctttggaggaaaacgttttggtttcaccagcgtctatgtaactttatattcttggttctgttgttactgtgcagataacagaactcaaagaaaggttaaatgtggtaacttctgcgtgtgaggag

SEQ ID NO: 187887 - DNA, 170 bp, Arabidopsis thaliana landsberg
atggtatatgaaggcatagcagaaaggacgaatttgagattggtgagctttccagcagtagagctttccagcagtagaaaggaacctagtagaccaactgagagttcgttgcttaatacgatccacaatcgagctgaagaggtctttctttttcctgccaaagagcttag

SEQ ID NO: 187888 - DNA, 270 bp, Arabidopsis thaliana landsberg
atgtggaggtacgttctcaatgcatctcaaagctagatcttcgattcctggctcttcctttgaagcgaattctgcgagaatcactgttcctttcgcaatgcaggagtagaacaacatacgttgattcgaagtcattctatatcgaggaaaaaaacaaaatccgattcgaatcaatcggaaaaaaagaattctcaatcgaacagtgtagcgagatacaaaattcaaaattcgatacgatctgaatcggaagaagagcagagatttgagtga

SEQ ID NO: 187889 - DNA, 647 bp, Arabidopsis thaliana landsberg
atggcaatggtcattgatgaccgtatgaaggtttgggaggacaaggatcaaccacgggttcatgttgtttctgcatatcttccttattatgctccacaagcagaggcatgtggttgctcttgcatttagttgtgaattaaattctgtatcacttaattttccaagtgggtatctaaccattttcgtatgcccatttatcagacagcccttgtcgttccacatctctgcgtagcaagaaatgttgcatgcaatgtcagaggttactttttcaagtaagttggaaaaaaaaattatgtttttttttttttttatgtaatgaattcatgctggttgttcttactgtttctagacttttatggcagggaatttgatgagagtttaatgagtagtatatctttggtttactatgaagatgatgtggaaaatttacctccatcaccggatgtgagcaactacgtcgttatagaggtaactgtagttagaactttatcattgttaacatattgctaatttgccccaactacaatatgtaatctagctatatctgtctgcaggatcctggctttgcttcaaatggaaacataaatgctcctccaattaacgaaggaatgtgtgggggtgaagtggaacgaagactaaaccaagcg

SEQ ID NO: 187890 - DNA, 384 bp, Arabidopsis thaliana landsberg
tgcacaatttattagtgcttacgtgcaattggaatgataataaattgattaaaaaatcaggtggcagagctactggcgaccaaggcaataccattgacagttttagtggtgagaatagttttgagaatactcacattcagactggggacgttactgctttgcgggttagtctgtcttgacaagaagcattggccttttcttctcaagttctctgaaatgtccctggagaagagggaaaaggttcttcagagatggaacacacagtggtataacccactagcgagaatcggctttatgatgatcaaagccatcttcttgttctactacttcacatgggtaagtcttccatcttcctctgcataacaggtcattcgctttcgttag

SEQ ID NO: 187891 - DNA, 88 bp, Arabidopsis thaliana landsberg
atggatatcacaaagagcatcgtgactttacttcttgtagtattgtttccaattttgttttatgacaacaatgttttggcatttccgg

SEQ ID NO: 187892 - DNA, 166 bp, Arabidopsis thaliana landsberg
tttgccagcaggtagtgaccgccctgagaccgacgtttacgaagagatcaacgaccgcgacggcgtgtcctccaccgaggacggactcaggcatattaagttatggagtgcggacatccttgtcaggagcccccgatacctacggggagcggcggactacgtctga

SEQ ID NO: 187893 - DNA, 763 bp, Arabidopsis thaliana landsberg
atgatcgatttgtctctttcttctttcaatattaaaaatgaagatgatgtagagaggaagggtagaagtagaaccaacatttatcaatacagaatgattttttttggtaaaggatatcaatacagaatataataccgttcatatatggggaacgtccatgcctattttacgattattaattcatatttctaatttgatggtaccttttttctttttttttttggatgaatggaaaatttaatcattaaaaaaacccatgggtacctgccatatatgcttttctgagccaaattttaaaaattaaaaccggagaattagtttaaggatcgaaaatgccaaccgaccttatgccctcgtcctaaaccattcacgcaggcaatcattgaacttgccctgacgttgtaacgttgataggcgattccaaacagtactgtcaatgtccttagatggtagctaaaattagatctttatctgtattctgcttttaaactacgtggagaaataattgaatgaaatcgttgaaacatttgttttgattatacgaatttttaatgtgatttttgttttgaaatctgataactcgaaaatatgagttagatagttctactgctacatgatttcagaatgtaaactcatagtccgaatggtgacggcgtatttgaaaagtggtttgatagtgcggtatggtccaactgcggtacatgtgggaaaaatatatttgcgggacaaatacggtttgtacaaaataagcggtacaaaataa

SEQ ID NO: 187894 - DNA, 168 bp, Arabidopsis thaliana landsberg
agagatatgtacgtaaccacctttgctttgtcgtcgactcgtcgtacttgtacatgcactgatgcgcacacacatggaaggttttttaatcgcactgatttaaggctcccaagtcaaaaacatatgatcattgccaaattggcaagattatcgaatcaaccaatatag

SEQ ID NO: 187895 - DNA, 113 bp, Arabidopsis thaliana landsberg
gtgaaaaatcaccaaatgaaaaacctgagaaacatcaaatcctcaatcatgagaaaaatcgagaaagtgaaaaactacctcaaattcgccaaacgcatgtatcctgtccataa

SEQ ID NO: 187896 - DNA, 160 bp, Arabidopsis thaliana landsberg
agatgtcccatttggtttaatctgaccaagctgtatccaaaaagtgattcaagttttatttcggtttatcaccagttacatttttttcgatatatacgaaaagtatcggaaaataagaagacacaatcaaacttgaaattggtaccaaaactagaacagt

SEQ ID NO: 187897 - DNA, 399 bp, Arabidopsis thaliana landsberg
atggcagagtttgattccaaggttcctgtttccggaatgaacaatcatgtctttgaggcatgtcaccatgttgttaaggcactgagggcatctgataacaacctggatgccaatttgagaaagctcctaagtgacctagagatgcatttgtcaacatttgggattgctgataccaaagttgaagatgcaggattctctgagatcaagaagagattcaaagaagctgtgaagagaatccgcagttgggagacaaaccagtcgacgatgtttgaagctggtctgtctgaagctgatcagttctttcaagccctgtatgacgttcaaacagttcttgtgggttacaaagctttgcccatgaaaactaaccagatggagaaagatgtttacaaccaagctacg

SEQ ID NO: 187898 - DNA, 93 bp, Arabidopsis thaliana landsberg
attaggacacgaaccatcgtgaagagttccggtgtcgccgatacgatcggatacgtgtggtcagcgacttgtttcccactagataatgcttga

SEQ ID NO: 187899 - DNA, 561 bp, Arabidopsis thaliana landsberg
atgacaggatgctatatgttggaatggattccctttaggctagctttgttaaaaaacttagaggttctcaagggctttgtggttagtgatgaagtctatgagggtgctgcgtgcaaacttaattatttgaagggtttgaagaagctacgaaagcttagcatcgaaataaaccgagatgatattggtgtagaacagataatggaggatcttgttgaactcaaagcattgacaagcttgaaggtgacatggaggagggatttaagaatcaaccgtgaagatgtggagctcaaatcatcgagaatctcgtttctggaacggacggcaacaattaaagcatattccaaatatattggaagttttcttgatcagttgaagaaactggacctgcagcgttacccgcatgaggaacttcccacttggctgcattccaagaatctgcgtcacttgaaaaagctccacattggaggaggaagacgactcatgggttttggtaaatttccgaaggaggcaacagaatgtgctgttgaagtcttgcgtctcacgtcactccccaagttaaag

SEQ ID NO: 187900 - DNA, 511 bp, Arabidopsis thaliana landsberg
atgatacagatcatagaatgtagaagggtcctggaatggacttatgtttatggatattaccttagagaggatgaggtcgggaagcaaaatttattgaaggatacgcaaggtatgtaacttttgtatatgtatatgcataaaacacagagagattaattttaaggtaacatatttttgttaatcagagaggttgaagaagtttgtgaaaaatctcaaacactgtttggagactaatctgcagccgtttcgttacgaggaggaaccgtcaaaggatttcaatgccttccgcatcaagttaaccgaactaactaggtttgatattccattgtttcttgtaattttaacaagatccaacaattaaaccctaaaaccaatcaacttttttatttatttatttctttctaacagcctaacgcggaaccactatgagaatgtggtaaaagatgtagagaatggcttagctagtgttgtctctgagggggaagcaagtggttcaggccgtaatcaataa

SEQ ID NO: 187901 - DNA, 227 bp, Arabidopsis thaliana landsberg
ttcccttcttcatcaatgtatttgatacaatcaccaaacgtaagatgattgtctttcaccacattagctggaatcaactattcacaaaacaaatcattttcttgaggagtcataggagtttggttattcggatcagtttaatcgggttttcggttgaaaactattccaaattaactgatatagatgtcgcggttcggttcggttctgactctagaattcgaaaataa

SEQ ID NO: 187902 - DNA, 141 bp, Arabidopsis thaliana landsberg
gagtataggtttgaccgtttgacaatacgagaggaagaggaagttgggaaaaaacgacgccgcatggatagtctcgctcgttgcacgaatagttcaaaaggtgacgttaggcgcgtgcgggtcagcgaaacttgtgcctag

SEQ ID NO: 187903 - DNA, 470 bp, Arabidopsis thaliana landsberg
  unsure (1)..(470): unsure at all n locations
attcataatcctgcgaaaaacggttttgcagaaaacatacgattaagagtaaaagccaagcgaatcccaccgtgtgcaagtctcttctctacaacgggtaaccgagaaaggaaatactcatctgcagagaaagcagaagatcaagtcatgtccatgattaaagaaaacaaaaagccacgatctggtttcatagagtaagtatacctcctaaagtagtccccggagtagcgttcctgtaannnnnnnnnnnnnnnnnnnnnnnnnnnnnngaagcatacctttaacacatcaaagaacaaagagaatcaacaatgatatggtaacgaaaactaagttttctctgctattaagcaacttaacnnnnnnnnnnnnnnnnnnnnnnnnntttggacaggccttttggtgaaagtgacatgacttccacgacggaacatcattcgaccagccgttctatattaagacagacgtaa

SEQ ID NO: 187904 - DNA, 48 bp, Arabidopsis thaliana landsberg
ccaattaaagagaaatccgaaaataacgacattaataatgagccatga

SEQ ID NO: 187905 - DNA, 1250 bp, Arabidopsis thaliana landsberg
gttcttgaccaaactgctgactgtggatttgcctcgattatttgtccgaccgaagaaaattgtcttggactttcagaaaggaaaagctgttggacctgttttagaagacctgaaatcaggagaaatgcaggaaggcaataaggattttgtcggggaactatctgttactcttgttgacgcccagaaacttcgatacatgttttttggtaagctatagttcctttacatgtcagtgtttccttcatagttggaaaagtggaatagacagacaatctattgctgaagtatcagcctctttgtgcaagttcagtcgactttcttgggaataaagtagctatactaattgagtctattggtgagatgttttgttttcctcggtaattggtaacaggtaaaacggatccatatgcaattctcagattaggggatcaagttatccgtagtaaaagaaacagtccaactactgtcattggggctcctggtcagccaatttggaatcaggtgaactgctttggatggttcattcacaatctggtggtgaattatgattagttaaggattgaaatgtaaatagataagtgtgtattctttaactttgcaggactttcaattccttgtttcaaatcctagagagcaagtattacaaattgaggtcaatgatcgtcttgggtttgctgatatggctattggtactggagaggtaaataatatttccttgggtacatatttttttttgtaatctgtagaataataggcgttgagtacgtattctgtggatctctgtaatgattgcttgaggaatgttgcttaatatttatgttactgtctgcatagccttattatttagttatatgtccaggttgatctcagatttctgcaagatacggttcctacagacaggattgtggttttgcgtggtggttggagtttgtttggaaagggatctgcgggtgagatactgctacggcttacatacaaatcatatgtggaggaggaagaagatgacaagaccaatgtcaaagccattgatacttctgacgatgaaatgtctgattcagaagaacttggctcatttgtgcggaagggaaagctttcgtcagatgatattgatcaagagtcatttatgaacgtgttgtctgcattgattgtgagtgaggagtttcaaggcatagtttcatctgaagctagagacggtataattgatggtggtgactcacttggggcaccagtaccttctaagccagatacta

SEQ ID NO: 187906 - DNA, 34 bp, Arabidopsis thaliana landsberg
atgagcggatcgaagataactaaaagtaacccac

SEQ ID NO: 187907 - DNA, 323 bp, Arabidopsis thaliana landsberg
agaagggcgatgcccgtgagagtgagatgatggattcgcttcaggagtacgtgggagctgcagcacagtatttcgagtccgtcggccatgaggaggaggaggaggaccacgacgccgcctgtaaagcagacgaagtttggaagccctacaacctgggcgtggacctggcgcccccctactccggccggatgagctgcctgaaacacctggcgcgcagcccagcggacgaagcccatcgcctggggaaatccagcctctgcgcgacgttccaccagctctacaccaaggaatccctgaagctgcacgacatgtcgcacaattga

SEQ ID NO: 187908 - DNA, 364 bp, Arabidopsis thaliana landsberg
tgctgggagcagatggtggataggtggtgctcgcgtgagtgggatgaagcgcacaacgctagccaggaacggtgtgtgatgatgcaaggtccctcccaccaccaaggcagccgcagcctcggcaaatatgcagaagcatgggtacaccctcttttttattttggtatataacactggattagatattatttctaactatctcgttggttttcttgcagtccgcgtcacatggtggccagccttgctccatcttctcagcttatgctatggcccacaagggcaaggcgacgtccgatgtcacctacaacccggatgatgggcccgaggcgtatagcaacctcgccgtctacacccaccttcatga

SEQ ID NO: 187909 - DNA, 159 bp, Arabidopsis thaliana landsberg
ttcggtacgaatttttcgataaagaatccgcttttacgtttgcactgcaagaaactaataataaagaaaaagtcgagaattcttcccatcgctttgaaaatccgtcaaatatgctgaaaaagtcgaccaatcagttggggaaaacaccatattcaccag

SEQ ID NO: 187910 - DNA, 204 bp, Arabidopsis thaliana landsberg
gcctcgaagtacgaccacggcgaggtcctcgacgtccgcgtggactccccgacgtacgacaccgcgaagtacggcgaggccgacctcctgcacgccacctccgtgcgcgccgagaacggctcggtcaccgtcttcgccgtcaaccgctcccgcaccgagaacctacagctggaggtcaccctcagtggcctgcacctgacggag

SEQ ID NO: 187911 - DNA, 469 bp, Arabidopsis thaliana landsberg
atgaagctaagtctatctgaagagaaaaacctggggtttcttgaagccatgtcgaatacaaatacagaaaagatcaccaaggagattttagaaggtttatctgaagatactgatgatagtgaaagttatgatgtggatagtggtggtgaagactccgaagatcgcccttggcgaccaagccatgcggttttcggcaaatcaagtatcaaagaaaatcatcttgtcagcatgaggggaagatatttccgggacttgtccgttgtgagggccgacgaaggagaaaagacttgtccgactcctgaggaaaatgaagtcgtagtgttccgaagctttttgaaagctggactacgatttcccctgagcagctttgtcgtagaagtactgaaaacatttgaaatctatctacaccaacttatccccgaagcaatcataaggatgaatatcttcgtgtgggccgtgagaagccaag

SEQ ID NO: 187912 - DNA, 188 bp, Arabidopsis thaliana landsberg
gaataacttttcatttgtccgtcttgatggcacgctaagtcagcagcaacgagagaaggtccttaaagaattttccgaagatggcagtatcctggttggtgcagtcgcattacattgcaatgttcaatacttatactttctagattcgaaattgaagttaaaaagtctccttttcaattgttggatag

SEQ ID NO: 187913 - DNA, 176 bp, Arabidopsis thaliana landsberg
accccagccgccagccgacgcctcccccgccggcctcctccaccgccgccaatcgccccgaccgcgtctccgagcaccgccgcagccccaagtgcgccgtcgcctccgatcgcctcctcgagtgccgctgccggtcccgaccgcctccccgagcgccgttgccgccttgtcgttga

SEQ ID NO: 187914 - DNA, 78 bp, Arabidopsis thaliana landsberg
atggcgaccccatgggtatgtgagaaagaagtcaacatcttttaccatctcaacaacttcagccgatgccttaacaag

SEQ ID NO: 187915 - DNA, 285 bp, Arabidopsis thaliana landsberg
tcggacaaccgtatccatatcccggtgacgtcggcggcggataaccatacccgtgctgattctgcggagacgaaggcgcgaacccgtgaaacgactgtgacggttgcgtttggtggaacgaatggccgggaggcggcggataggattgatgctgcggcggagaagtactgtaatacggcggaggatataaattcgatgcagagggtggcggaggtggataaacagcgactggctgttccgggtaatgagaatggtactgatacgggttcgggtacgggtacggcg

SEQ ID NO: 187916 - DNA, 118 bp, Arabidopsis thaliana landsberg
gtacttctcagtggcagtgatgcatttgccatgctatggagcctttgccttattggtgaaactaaaacatcgactgctacgaagagggtttcctgagtcgtaccatagtcctcggtag

SEQ ID NO: 187917 - DNA, 42 bp, Arabidopsis thaliana landsberg
aacaaaaaagaagaagaagaagaagaagaagaaaatatctag

SEQ ID NO: 187918 - DNA, 762 bp, Arabidopsis thaliana landsberg
atggcgatcagcatatcaattcgaagccccgaggctcagctttctagaaagaccaacctacaccttaacgtcgaattcgacaaagagttatcacagtatttctctctgctgcaaggtaatcactagttgataagaacgactcttcatagacgaacaatgcaactttacctttggaacagcaattctgagctcagcctctcgccatttcttctcccatcaagattaagtattcgtgctttacattttttgattgttgaagtcaagctctaaattgagtcccgactcaaaaagcttagttcacctagcatcgagctacattcaaaagataaaaataattcttgcagttaatccgagctcaacgctcgcagtcacacttataaattgagccgagctcgacgcttgctattatgtgaaaatgtttcacaaaaaccaagacctcgtcttgctttaagtcttcaaaacaggataagccgagagttcctcgcaccttaaagaaaaaaagagctcaaaagctcacgtatcttgctaaccaaatgataatggcatgtttgcagctcatcgcaacttatgttttttttagctcatctgcccggctatctcgcagatcgcaagacaaaccatctagcaacctatatcctagatcgctcatcagatcatctgatagcttgccttgcagcttgttagcaagatcatttggtaacctatctcactgctcggctcatcagtcaggtcatttctctgttaggcattcagatcatctag

SEQ ID NO: 187919 - DNA, 223 bp, Arabidopsis thaliana landsberg
tcaactcgacgaaaaaccaaggaaatcgaaaacttacgccaatcggagcatgataggagcacagttcttgttcgcgatgagagaacggagctcacggcgagccttagtgatctctttcaagtactccgcatcaacaatcggtgcagccatagctcctactcgtttaggatttgtgaagaagaaagagagcgatgaacaagaaaatggtcaaggatgtgtgtga

SEQ ID NO: 187920 - DNA, 358 bp, Arabidopsis thaliana landsberg
atgaaatggattaatagatttttccgaaaacaggttaatcttacgatcatgaagagtgataaggtttaacattatcttccactccgatcaatcttacggaagaagagatgaatttggggattagcattctctcaggtggttgttgataaaaaagagatgaaagtactctagggttacttgtagtatatataaacgcaagctcaatatgttggtctgctttatacaggagcgggacttaaaaaaaggaaacactgaaaaccgacatacgaaagagacgttgatattataccgaacaaaaccaaaaggaaacattggttggtttgctttgatttctcaaggaagaagagagaatgagtga

SEQ ID NO: 187921 - DNA, 338 bp, Arabidopsis thaliana landsberg
cgccccacccacttttcgtcgccccagatggacgcagccctggacaccaccaagatattagcgggtggtcatcacctccttttctcggttagccctggacacgacagagattttatcagctcctcctgtgcgcccctggagctctcaacctctggatgaaccgtcagaccttgaacgtgcaattttggaatgaacccctcccccttcaggtggacgccgccctagacagcaccaacgtgtcgcgcgtggcgcactacatccgctccaagacgcggcgcgacgccggcggcgtcgagcaggacgacaggagcttccagagcatcgtcatcagcctcaag

SEQ ID NO: 187922 - DNA, 2012 bp, Arabidopsis thaliana landsberg
gttaaattctccaagcacctgtactgttaccattgaggttttggggcacgaattagactttgctcaggtatgtgtgactcttatattctccttgaattcttacatttaaggtcaatgatgctacaattttctacatgataggatccaaattcgaagcatttaggaacgaccgtgtgggatgcgtccatggtgtttgccaaatatctggtataaatagatctttcgtatcccgcttaaattctaggattctcctcagagattatcttctttatactgtgtaatttagattggtaacttagggctgttactcattaataatagatcttcggtgaggctttagttggttatgaaccagtgaactccttctttattttatttaccaaagaactacaacatagaagagacttgattaactaggaaagtgtctaactcttgaccaaagcaaagatcctagagacctagaccaatacagaatgatttcaatgcactctccttgctcccctttaacccttccacaactaaccgtgtaaggtctgttgttagtctggcaaagctagacctcctgctcaaaccctagattagttacaaatagtcatttactagacttaacaagaaagccttgtctgacttcctgacgcttaaaatatttacaggggaaaaatagcaggaagggaaggtttagttcatctaaactgaaagggaaacgtgctattgaactaggagcaggttgtggcgttgcaggatttggtacgtaatacatgtatgtattgatatctggagtattcccctttcttatccatgactatatctttgcttgaaactggaactttggcatcttcaattggagtttgtgttcatgtgtcagctttggcgatgctggggtgtgatgtggttacaactgaccaaaaggaggtattaccactgctaaagaggaatgtagaatggaatacgtccagaatcgtacagatgaatcctggttcaggtttgtgtcaatactttattctctagtagctagctcgcttcttttactgcttctatctacagctttcttcattttcttatgccaaggaaaagtttgtagaactaactctcgatgtgatgcttactttatccaggtacaagaaaatcttgacttgttataattactggctaatgaagttttcattccttgtggcagcatttggatcgctccgggttgcagaactcgactggggaaacgaagatcatataacggccgttgagcctccctttgactatgtcatcggtactgatgttgtaagttcatcggaatcttcaaatgattcactctaatcatgtaatctagaaagactgaattcagctcaagggagactgacctcaccttaaatttggttttaaggtatattctgagcagcttctggaaccgctattgcgtacgatacttgcattatcagggccaaagacaacagttatggtatgaattaagatacttgggatatttgcttttaagatatcattggaactacaagatcattcgttgttgttgttttatagttgggatatgagatacgttcgacggttgttcatgagaaaatgcttcagatgtggaaagacaactttgaagtcaaaaccatactcgagatccaaggtacgttgatggcacagttactgtttaagtttcatgaaatatacaaccgcttattctggaacgcaatctgcagatggatggtgaataccaagacccgagcattcatctgtacatcatggcacagaaatctcctgccgagagctctggaaacgtaagccgagatgaagttgttatagacacagacgaaccaaagtgtgagacgaaagtcccaaccggagaatgccataagagggtggaagaggaagctgttgttacacatggtcctcgtcttaatgaagatagtttgttgatgagactacgggatggaaagctaagtgaatgggagatgacaaggtatggtacagttgctgcacagcttctccgtgacgttaagatagatgttcag

SEQ ID NO: 187923 - DNA, 329 bp, Arabidopsis thaliana landsberg
agtagtaggaacaggtaaggtgaagccaaacagctccttttacagttggaccactagagctgatctggcatacaaagtatgcttattgggctgtcacggcccatccgcaaaatgtcgttggttacgaagcatccacgacatagacggtgccacatgtagaaaagtgtttcggcgatcaagattgtgtccacatcattagacgtctgaactgtccacgtgtctatcaaagctggcgtcaaacattacgttttcgtcgtttgcgcctcctagttcacacgtgcaacgaacgcgtgcgacgtatcaaaattgttaattttagccatgtataa

SEQ ID NO: 187924 - DNA, 154 bp, Arabidopsis thaliana landsberg
atgcagcttggagccgagttcgtgggaacattcatcttgatattcaccgcgacagccggtccaatcgtgaaccagaaatacgatggagcagaaaccctaatcggtaacgctgcatgcgcaggactcgcagtgatgatcataatactctcaacag

SEQ ID NO: 187925 - DNA, 1137 bp, Arabidopsis thaliana landsberg
atggtgactgggtccagaactagcggtaatcgtggggtaggactcgatgatgaagcgaaaaagatgattcaatcgattaaggaagttgtggatagtcactccgatgctgatatttacactgccttaaaagaagctaacatggatgctaacgaggctgtggagaagctgattcatcaaggtttcttctctcttcatctctttttctgctttcctagtttgacggaagttagggttttactgattgttctctggtccgcattatcttgatcacgatgaatgctacaacatcttgtttgaggcgtatgtagaatgctgtagataggttatgcaaatttcgtttgatggagttctgttgataattcgatagatggataactcttgttttcatttcgataatttgtcaattctcttcagaatacttcaattactatatacttgaaatattattggtcttcttttcttggctctcgtttcgttgggtgactaatatgtgtgttattgttgccatcatagttttggttcgctaaaaagcttttgttttgttcagatccatttcacgaggtgaagagaaaaagagacaggaaaaaagaggtgaggttacatataattgttatggtatcttgttcccagttcttctcctttttaacatttttgccaatgcaaccacattgtagtatttttgtttgactctccttagtcttttcgaaactgcatttgaagaaggtgactagatttttcataatgttagttgtgcttgtgtgactattatatctcatcggatgtctgctgtggcaagctatatttttttttttttttgtttagtattttgtgtgccttctaatttaattgatcgtcaaaaaaaatttcaacttttctagccattcaaatagtttgatgaatttgtagagatcatcaagacacctcttgtataacctctgatttttagggcgttcctttggtttcaggatacagtatttgttgagcctgccaacataaagaaacctcttgaaaatgttaccagtgaagtgaaagttcgtacacagcctgaacataatgttcggagaggaggctacagtaggaatttcttccccaggaacgctgctcaacgaaatgcatctcctagaaatcctgctactg

SEQ ID NO: 187926 - DNA, 130 bp, Arabidopsis thaliana landsberg
agttcattagtttggattgcgggttacccgcaaatgaactgtctccttatactgatctggaaagtggattacagttctcatcagactcaagtttcatccaaattaaagaggaaaaattggtagaatcgtt

SEQ ID NO: 187927 - DNA, 423 bp, Arabidopsis thaliana landsberg
atgagcaaaagtagtaagcaacaaaaggaaaagtagaaacttaacaaattgagcaaaactaaaagaatctaagctcgtggccttgaagacaacatcccaataatatccattatcttcgcctttgttacatctccacccttcttttcttcccattaaatatccctttttactctctttcagtttattattcgatgtagcgtacatattttatatacaatatctcgatccactaagatacggttacatctccaccattagcttccaaatactaaaataattaattacttctaattagaaggacgtaatctctatcttcagtagtaaaccaaatgttcgtcatcatacgaagtggatttagaacatatagtcgtttttgaagcagatcccaagaatagtcttcgatcggtcgaggtgcccaagtag

SEQ ID NO: 187928 - DNA, 284 bp, Arabidopsis thaliana landsberg
ggatcaagatcgagggagctgaagacgaggatgaagagactctacaagaaaacagtcgttttgcgagggaagaattactcgctaatccctcgcaaacagctatacgcaagggatttgcgaggaaaacgagttcctcgcaaatcgcttctcgcaaatggttatatgtagcaattccctcgcaatttttgcgaggaactgttttcctcgcaaatcacacgcaattgttgcctagtacttccctcgcaataactgcgacggatttgcgattcttttttaccgcctag

SEQ ID NO: 187929 - DNA, 51 bp, Arabidopsis thaliana landsberg
atgtactatgttgtcaacgatgataattcccaagtgtgtgaaagttatagt

SEQ ID NO: 187930 - DNA, 217 bp, Arabidopsis thaliana landsberg
atggcacaacgccagcgtaaaggagcaggcctgctaccagtgaaatcgccgttaccacaggaatcagatacgcgaagggccccaggcgacacaaagatgaaaccgtccagtcaggggggccaaggcaacaccaaggatataaccaggagtcgaagggccagcgaacagcggagacaacagaaagacgccagacttcaaacacacagaacggagccgg

SEQ ID NO: 187931 - DNA, 232 bp, Arabidopsis thaliana landsberg
gtggctggacttagaactgaaactggtcgcagacgtaggtattgtgggtgctccaaatgcaggaaaaagcacattgttgagcgtgataagtgccgcacagccaaccatagcaaattacccattcaccacattacttcccaatctaggtgtggtttcatttgattacgattcaacaatggtggtcgcagatctttctggtttgctcgaaggagcgcacagaggcttcggttaa

SEQ ID NO: 187932 - DNA, 220 bp, Arabidopsis thaliana landsberg
atgcaattgtatggcaatgatcctcgcatcaataccctatgtgacgagttgagtaaaatgaggattgaagtaattccctctagtaccttgaactacatctccatcgaaccaaccttgttagaccaaattattatggcccaattcggtgataagggagtgcaaatcgtcaaggaaaatcttaaccaaaaaattgagaagtataagtatttccgccaggata

SEQ ID NO: 187933 - DNA, 379 bp, Arabidopsis thaliana landsberg
atgggcatcaagcagcgccaggacgaattcccgatgcccgaaaagaaaaagaaagagcgcagtaatttcacgcccgcgcagggtccagcggcggcttttcgccgagaatcgcctcgcagcgacgaccagagaccgcgtcctccaatcgaccgtatacagcaggagcgcgcgccagtgaagcgcaccgaagcggacgagcgaaattcattgaaagcggctatcgagaaggctcgtatggaaggcgtgagcagcgcgccagtgcgttcacctgcagagatgatgcgagaaaagaaggggaatcgtccgcagtcgcagcaggcaccgcggccaccgcagcagcctcagcggcagcatcaggagcggccgcgagatgagcatc

SEQ ID NO: 187934 - DNA, 968 bp, Arabidopsis thaliana landsberg
gtcccttagttttgcaggctacattgattcacaagaacccggtcaagctaatgacattaaacaagcgtttcgcgggaggcaacccacaaggtattgtatatactttcttttccttctttcattttctttgattttggtttgattcacttcgctgtggagttcagacttatcgactcaggtgttgagtcgatagagtctctgtatttgacggtgctgtgagattcgtttttgagtttagaaatccgccaggttgggatcaatcgatcccagaaatggatcgatcaatccagtcctgacgtaaggctctcaaaaacatccgcaagaaggggatttatcgatcccagcactggatcgatcgatccaataatgaggcgttgggactagtggcaacagatcgaccgatctaaagagccgatcgatcgatccaggcagcaacttcgcgatttgaatcttacgccaccaatgaaccgagctagaccagattgaaccggagtcgccacttaaaaataaacggaatcgacccaacaccacttcttcttcttcgttgaagaccatgaagaacacttagagagaaatccataactttctcaattgttgctcgattttcacaattttggtgtctattccactcgatttttagctctctttctatatctagtgttggttttcccgatctccaaaggtatgagttcgaaattcctctttttgattccgtttttacaaggtgaaaattttccaaagcattagttcgttgccggggaccaattgcgttacgtaaagatttaggattagtttttagtctagagcatttttattttattttgctaactttcattttttttttctttttgtttagtaacatagaagaagatgatgagccatatttggagcacccatttgacgagagtgttcttacaccggaacaaaaagtgaagttggatgaacttcacaacgaacatccgacattg

SEQ ID NO: 187935 - DNA, 242 bp, Arabidopsis thaliana landsberg
atgaagacgcaacatcaatggtgggaagttcttgatccattcttgacacaacacgaagctcttattgcattcttgacttttgcagcggttgtaattgtgatttacttgtaccgaccctcctggtccgtatgcaatgttcccggtccaaccgctatgcctctagttggtcacttgcccttgatggctaagtatggtcctgatgtcttctccgttcttgctaagcaatatggccctattttcag

SEQ ID NO: 187936 - DNA, 222 bp, Arabidopsis thaliana landsberg
ttgcttgtggggctcgtgagtgcttatagatacgaaggaaataaggtgaaggatgattctgccaaatccgatgctaagattctagccgaagcagtggcttcttcaggcgaagaagccgtggagaaggatgaggttgttaggattttgaccacaagaagcaaacttcatctccaacatctctacaaacactttaacgaaatcaaaggctctgatcttcttggg

SEQ ID NO: 187937 - DNA, 812 bp, Arabidopsis thaliana landsberg
aacacttgcttctcctccaagccacccttcacattcaatcccaaggaggaagaattgttttgaatttctcgaagaagtcttcaaactcgaatcagtttcagaacaaatatccagaattgacgaacgaattcaggaactcgaagtgaagcagatgaaaagagatgcaggtaaaaatttatatattttttgatatctctatttgatcaattctttctattgcatgagaatcatgtctatttttttattttattttgcagtcattgccaatgtgtctaggatgataacggagttacaaatgagaaccatggaggagcgtaggaatatcgacgaggatgagaggattaccaccgaggtacttaggaatatggaagcgatgagaaaataagtctaacaactgattttacatcaatagactgtttcttatactagctacattggtatatatattaatgattacttttgctattttatataggtcattattaatggagactcaactcctgaacaagatgtgaggatcaaacaagggtttaaaccggatttatgttttttttacttgatcaagttttatttaagaaaaaaaatagtgatttgcattaattttatcatatgcaatttttcagttatgaaaaaataaagaaagattcgtttagagtaattcagattattagagacaaaaagctcaaaaaagacaaagttggacggaaaaatctatatatgattaaagcaacgaaaaacaaagaaaaaatcaaacacacacattgtgtaattttttgtgtatatggaagaataaagtgaggcgatcggaatga

SEQ ID NO: 187938 - DNA, 58 bp, Arabidopsis thaliana landsberg
atgcaagaagaagaaaccttcagctctccagctggaaatactcgatcccgaaagtcga

SEQ ID NO: 187939 - DNA, 171 bp, Arabidopsis thaliana landsberg
aaagcccatgttcaacaatttttggctactgaagatgcactaaacaaagcagctgaagctcgtgatttatgccacaagtttattaaccgtttgcatggaagtgctgatacagctactcattcgtttgttggaggcacaacacagagtggtagcaatcttaggcaatttgag

SEQ ID NO: 187940 - DNA, 939 bp, Arabidopsis thaliana landsberg
cttctctaaaacggtatgtggtaagaatacttgactttatttctaacgaaaaaatttcggagttgcatcaagattttatggcagcaataacatccgacacggaaccaacaagctaccatcaggcttctcaaattaaagaatggtgtgattctatggggttagaaatcacagctcttgaagaaaatcacacttgggatatcactacattgcctccaagaaagaaagccactgacagcaagtgggtctataaactcaaatacaattccgatgatacgctggaacatcataaggtccgtctcgttgctctcgagaattgtcaagtttaaggctccgattttactgagactttagcacatgttgctaagatgacaacggtacgctttcttttagttgttgatgctgctaaaaaatgggaagtccatcaaatggatgttcataacgcgtttcttcacggtgatctagacgaagaggtttatatgaaactacctcttggtttcactctaacgattctactaaggtttgtcggcttcaaaaatcactcgataagctttgacaggctcctcgttgctggttttgagaaacttgctaagaccctacgcgcatttggattcaagcaaagttatcctgattattcgcccttttcctttcttcaaaatggtataattctacatgttcttgtctacgtcgatgattttgttgtggctggtaatgacttatcggagatagaacgttttaagacgtatatgcataagtgctttcacatgaaagatcttggcaagctgaagtacttattgggtattgaagtttctcgtggtcctgatggtatattccttactcaacgcaaatatgctaatgacattatcaccgaagctggtcttcttgatgccaagacgtattctactcctatggaacctaatcacaagctcgcatctgccaagg

SEQ ID NO: 187941 - DNA, 375 bp, Arabidopsis thaliana landsberg
atgggcttatccatacctcaatacttttaccagtactcaattttggaaacctatggacccgttcggacatccgcaacatgggtaaaacactaaaaccacgtcttttgatatcgtcaaattaaactaatgctcaaattgttctgtttctttttgcagttcaacaacattataaacgttcctttctcatctaaagcatttgtttccgggattttggccttctttctagacacgacattgcctccaaaggacaagacgacaaagaaagatcgaggactagtttggtggaagcgatttaaatcgttccaatctgataacagaagcgaagagttctactctttgcctctcaatctcagcaagtactttccttctcactga

SEQ ID NO: 187942 - DNA, 475 bp, Arabidopsis thaliana landsberg
cagcgaccgatctgcgcgagaaatcgtgcccttcgcgttgctggacactggcctgcgctggcatgtgcgcgcttttgatcgcaaaagcctgcagttccgggatttcgtgctgacccgcatccagaacccccaaatctgcactgatcggccgccggcgagtgatgagttgtttgaccaggacatccaatggacacgcatcgtggagttggagctggtccctcaccctgatcagccccatcccgaaatcacacagatggattacggaatgacggacggcatgctacgcctcaggctgcgcgctgccatcgccggctatgccttgcgcaaatatagtgtggactgttcgccagaccacagtctgcgcggccctgaataccgactgtggctcaaagattcactcgcgaaaaatggcgtgaacaatgcaattgtggcgcctggctaccaagctcccaccttcaccaagacgccaagctga

SEQ ID NO: 187943 - DNA, 1784 bp, Arabidopsis thaliana landsberg
  unsure (1)..(1784): unsure at all n locations
atgagctcgaaggttgttcttccaccacgcggggaagacgtcgtcgattccgccgccagcggcgggctgtcggccgccgttgcctctaccgcccggcgtgagaatgagtttcatgtcgtagctgccgtcgagggacatgaactcgagactcccgaaacggagcaccgtcccgggttggagaggtcgctggagactgcccatctggagcttgacgggaagctgttcgtcaacacacagcaggcccctacctggcgcgccaactgtcggcgtttcgagaccggggggtccctaagccgacgagtgaatgtgccgcgtgccccagcccagatgggtcgagcgcgtgggcgagcgcgaaggggggagaggcgaggtggccggagacgggcgtgagagaggtggaaatctcgcggccttcgtgttcgtcccgcgcccaggtcgggtgcgcttgcagtagggggttacaagcgtccacgcgggtgagggaagcgagcggccccaagagagcgcctgtcccgtcctcggtcccgcgcggccaacctcttctgagaaggccctggtccttccttttatagttgtaaggaaaggatccatgtgtacaatggggatgtagcagagtgctaacgtgtctagcggggggagagctagcgccctaagtacatgccgatgtggcagccggagagatctgggcacccggttcgtgtgatgtcgtggctatcggaggtgcgcggagcctgatggagggacagctgttggggcggtcgagtccctgctgacgttgtcctgcttccgtaagagagctgagagccgccgtcgtcatagagctnnnnnnnnnnnnnnnnnnnctctctggcggagctggccggatgagacgtcggtcttgttctccgtgacccgagtcgattcggggtaggatgatgatggcgcctcctgttgacgtggcggtctgtccctaggcagggcgacgtggggtttcctccgaagccgaggttgagtctgccttctgttgccgtggccgagcccgagccaaggggtcgggcgaggcggaagtcgttcggccgaggccagggcggagtccgagccctggggtcgggcgaggcggagtttcgtcgtcttccgggtcttagcccgagtccgagccctggggtcgggcggagcggagttcgccgtcttccgggtcttagcccgagtccgagccctggggtcgggcggagcggagttcgccgtcttccgggtcttagcccgagtccgagccctggggttgggcggagcggagttcgccgtcttccgggtcttagcccgagtccgagccctggggtcgggcggagcggagttcgccgtcttccgggtcctagcccgagttcgagccctggggtcgggcggagcggagttcgccgtcttccgggtcctagcccgagtccgagccctggggtcgggcggagcggagttcgccgtcttctgggtcctagcccgagtccgagccctggggtcgggcggagcggagttcgccgtcttccgggtcctagcccgagtccgagccctggggtcgggcggagttcgccgtcttccgggacttagcccgagtccgagccttgggtcgggcggagttcgccgtctttcgggacttagcccgagtccgagccctgggtcgggcggagttcgccgtcttccaggacttagcccaagtccgagccctgggtcgggcggagttcgccgtcttccgggacttagcccgagtccgagccctgggtcgggcggagttcgccgtcttccggcacttagcctga

SEQ ID NO: 187944 - DNA, 1061 bp, Arabidopsis thaliana landsberg
atgatagacttggttgagaaggctgcaaggataaagagtggacttgttctggaagctaagcacttgagaaatactcaagccaagacaacaaaaggagtggagtctcagaagcgcacttgggataaccgtgaaggaggaccagctcagacacgattttcattgtgtaccacttgcggtaagaagcatgggggagcttgttgggctaatacaggcaagtgttacaagtgtggacagataggacataaccagcagaattgttcagagggatttaacaactgtaggaggtgtggtcatcgaggtcactttgctcgggattgcacaatgcacctcggaggaggacaacaaggaattcagaacatgggaattttgccaccaccaccaaagaggcaagcagtgggacctcgagtgtatgcactagaaggtcaagatggtgcagaaccgatcgctggtgagttttttttcatgaaagcttttaagatattattccctccttgttgtaagtagttgcatgtgtcttttttctatgtgtgagttgcttagttaatgatctatgtaggatcgattttcattggaggagttgcagcctatacaatgtttgatagtggagctacacattgttttgtgagccccgctttagcgaggaattgggattccaggataagctttgcagagaagcgaaggaaagttgagactgcaggaccacaattaataggatcatcaaggacctatttagacgtccctgtagtgatagaaggagttgagttgttgagaaattttcttaaaatggaattgaagcgctacgagacttggcatcgggttatcatcagattgctgttgcggagaaggatgtcagtaaaacaacatttaggacacgttatgggcattatgaatttgtggttatgtctttcggattaacaaatgcccctgcaggatttatgaagcttatgaataaagtgttccgagagtttttggacaagtttgtcattgtgtttatcgacgatattttgatctattccaaaagtgaagaagagcacgctaagcacttaagaatagtcttgtag

SEQ ID NO: 187945 - DNA, 378 bp, Arabidopsis thaliana landsberg
attccgatgatgacatcgaggagggaattaagcatgtcactgcgccgattctaataaactcggcgagtcatggttacgagacgacgtttttgatggcgtcggaggaaggaggagagtacgagacggtgtttttccggcgactagacgatgagttcaataaagttgagaagttttataaagagaaagttgaagaagttatgaaagaagctgtgatgcttgagaagcaaatggatgctttaattgcgtttagggttaaagttgaacatcctgatggttggccttgggaggaacgtacggtggagatgactcaattagcttctgatgttgctaattctgcggcggccgtcgctgcttctactcccgccggtgctagatcta

SEQ ID NO: 187946 - DNA, 377 bp, Arabidopsis thaliana landsberg
atggccttgaatggctatctattagaacaaggtttgagctaatgaagcgatctcgttgatcaaaagcacgtattgttgttgcaccagcaagcgattcagcgaaatggtggagaattggagctctttctactcctgacatgcgtgacagttctcttgctgttggtgtgtaatatctctaaagacaacacgagtaaacaaaaaagtaagcaagatttgttgtatcattgtcaagaaattggatttgttttctctcttgcctggtaaaacacgcaggctactgctactggaatgaagatgacacaaacttgccaagcaacttgcgacatgacgaagatggttccaacaatctgaatgatcgaaaaagcacaccaacctag

SEQ ID NO: 187947 - DNA, 156 bp, Arabidopsis thaliana landsberg
ctatgcattgcacagagtttggtatgtaaagaaggtcatcttatagtgttagctaatgagcaagaagaagccgcagaagcagaagaaacgaagaaaaaatcttcacaaagagacgagaggatcttagctgttgctccaaactatgttattgagtga

SEQ ID NO: 187948 - DNA, 146 bp, Arabidopsis thaliana landsberg
ctaaagagtggttgggcggatggaccgtcctatgtgacacaatgtccaattcggatgggacaaagatatgtttacaacttcacggtgaccggacaaagaggaaccttgtggaggcatgctcatatgcagcggatgagagctactga

SEQ ID NO: 187949 - DNA, 110 bp, Arabidopsis thaliana landsberg
atgccccgccagggccgggttcccgtcatcatgaacatgaaatgggtccaggtaatgagctccccttcccacgtcacgtcagttccgagcagacattgcatggtctatcg

SEQ ID NO: 187950 - DNA, 123 bp, Arabidopsis thaliana landsberg
agtttcggtcgactagaagttggaatgctcgatcaaaaatttatccggtcgaggaatcctcaatctggacagctggatggtcgtgggaaaaagaacgtaccgaatcactttcaaaagttatag

SEQ ID NO: 187951 - DNA, 65 bp, Arabidopsis thaliana landsberg
atgcttgaacaaatagacgatcggtccgttagacaatcatacgaaaagacgatcgtgcaaataac

SEQ ID NO: 187952 - DNA, 272 bp, Arabidopsis thaliana landsberg
agcaaagggacaaccgaaggcatctctggtctggcgaccggactgtccggtgcaccaccggacagtgtccggtgcaccagaggactccaactcaaactcgtcacttcgggaaaatccagaggtgactccgctataattcaccggactgccggtgtacacgacagtgtccggtgctccaatgaacggcgcctcaggaacttgccagcttcgggaattcgcaacggtagtccgctataattcatcggacatgtcggtgtacaccggactgtccg

SEQ ID NO: 187953 - DNA, 467 bp, Arabidopsis thaliana landsberg
ccggtgaccgaaaagggcttcgtcttcatggacacgcccggcttcgatccggtctctgccacggggcaggtcgccggtggcgccaatatcctggctttcaccaccgggcgcggctcggcctatggctgcaagccggtgccctcgatcaagctcgccaccaattcggacatgtatgcccgcatgaccgaggatatggacatcaattgcggcgatatcgtcgagggcgtttccatcgaggccaagggccaggaaatcttcgacctgctgctgcgcatcgcctcgggtgagcgcaccaagtcggaaaatctgggctatggcgacaatgaattcgtgccgtggcaggtcggggcggtgatgtgagcagccagcagaagaccgtcgcctacatcctcgaacagagcgccgctgcaggcacgatgacggccaagaagatgttcggcgaatatggcctttattgggatggcaag

SEQ ID NO: 187954 - DNA, 412 bp, Arabidopsis thaliana landsberg
tcctctagacaaagaagagaagagataattaacgagggaagggatgatgttgacatacaaggttactcaaatcttgatggtactaatatgcctcaaactcatgtaccagagacccaagaaaatgaaaaagtctattgtgttaatgtagatgatgatacacacccatcgaatgagttcactcatgatacatgtcgagtctccgctggaagaggtgagcaacgaagcaggctaagttctcactctactgttagacgtgggagtagttcacatagatctggcggaaactaaagcgctaatgttgcaagtggttcaagagttagtcgtagacgacaatcttttgagaccactatacaagactcaattgctggttatacagagtttcaacgacaaagtttacaacaacttcgatccg

SEQ ID NO: 187955 - DNA, 126 bp, Arabidopsis thaliana landsberg
aacaaattggggggaaaaaaaaacctgctgagaagagatttcggcggtacggggcttgatatggaggtgaagatgaggaggatacgaatccagtataacgcagtcttcgctgtaaactgcttctag

SEQ ID NO: 187956 - DNA, 286 bp, Arabidopsis thaliana landsberg
atggaggctccaacgcctctcctcctactcttcctcctctcaaacaccaccttcttcaccaaatctggaggtgaagacggaagaacaatgctgaatttagctaaatcattcaatccttgtcgtcagattgatcttccaccaccgatttctgcaaatcatgtggcgtataccgtcgtttttgtcttccaaaaatgtaagtcatggccagcgaatttcgaatcacaaacgactgttcaagttccaatgattttgtttttaaatcttttcagatacaatgggtgcatga

SEQ ID NO: 187957 - DNA, 302 bp, Arabidopsis thaliana landsberg
atgatcaaggtggaaattgatcgtaagcaggtacattggataaaagattaagcacaaactctctaaatatctatgcagttctaatgcaatttcactttgtatttcaagtgtgaaccctaaatcattatgtttccaaaatcaaaatttcactcctctagcagaagaaagaagaagaagttgttgaatccgtccccatcgccaatggtaggatcgagtccgccactgcggttcttccacgagcaactcaacgcccttctaatgaaaagagtcgagaatgtgtttttctctatgatatcttataa

SEQ ID NO: 187958 - DNA, 278 bp, Arabidopsis thaliana landsberg
atggagataagaagagctcggagagaggattttaccagttggagaagaagaagagaaataatcaaagtgatgatgggaacgagaaaaacgattcaaggagaagagacaagacgccggtggtgttgctgtgaccggaaagagggttaggcttattattgccatttccaattttctgtctctctctttaatttgtttccctttttttatttttttattttatcttcttttttttttttaattgttcaggtaattttaaagttgggccgaaaaaatattag

SEQ ID NO: 187959 - DNA, 575 bp, Arabidopsis thaliana landsberg
cccgaatccatataaatatccttttctcatttgcttttgaagatgtttatagcttcttcatggcaggggtgttcttgttttatggtttcggggaattgctgcccatcggatcagattccgatgttggtgaggcaagttgggtcgtaaaccctgctacaggggcgagcggtagtggggggaacggctggactgagtctgctgcaaatgatccggcaagggaagtttccctcgccccctttcctccgcaacttacacatcccgtgccctttcctgccgaacctggctctccggacccggtttctccccctccccccatagcctcgttctactcccgaatagaaagggctgagtccttacacgccggaaatatagaattggcggaggatctacaacggatccaggaaatggaacgtaacctggagaacgagaggtctccctaccgtgggcgggaactagccgcccgcatcgattgggaggtgcgcgagctggagggaaaagtggcgcgcaatcgcgcctgggatatggaacataatgctcaactcgacatatggaggcaggggcttgatcaggaatta

SEQ ID NO: 187960 - DNA, 16 bp, Arabidopsis thaliana landsberg
atgttccgcgactccg

SEQ ID NO: 187961 - DNA, 455 bp, Arabidopsis thaliana landsberg
atgaaaacgcttatcacgctcctgaaaggctacctgcacgcggtcgatgagcgttgcgcgcattggttcgagcgcgtgcacacgtatacgtggagccatttccccgaccccgaatacggcgaatggttcggctacctcaaccgccaaggggaaccgttgctgacattgaagggcggtaaatggaagggctgcttccatgtgccgcgcggattgtatcaatgctggaaaacgctggaagccattcaatcaaaagtatccttaaacgtctgactatggcccaggtaccagttgctaccacccagcctgcgggcgttgccaacgggcagagttacgggcccgcgctggtcacgctcgcggtattgtattttatgatggggcttattacctgcctcaacgatacccttgtgccgttttttaaaagcagttttcaagtgaactacacgcaatcggcgaag

SEQ ID NO: 187962 - DNA, 55 bp, Arabidopsis thaliana landsberg
atgcactccaatatttatggtttcagcgaggacccgcctggcatcatgagcaccg

SEQ ID NO: 187963 - DNA, 61 bp, Arabidopsis thaliana landsberg
gtcaacaaaatactttgacaccggaatcggagtccgtggaaagtcagaaaacctgatgtaa

SEQ ID NO: 187964 - DNA, 364 bp, Arabidopsis thaliana landsberg
atggtgtacaccaggtaaattctagttgtaagagataaacacacatcctttaagtcaacacatttcgaatccgagaccaaatcaaaaacacatttattttacatgtatctaaacaaagaaatccaaatatttcagagacacaccagaaaataaaaacacattcaagttcaaattttatatccaaaaagtacaacaaatccaaatccgaaaatcaatccgtttcacagaacaaaacccaacacaatccatcacaaatatgaatcaaacaaacaaacgactgggaatagagaatttgtaccttacaaagagagggcacatacgaacgtcgatttggggtgaatttctcacaaatgattttaaatga

SEQ ID NO: 187965 - DNA, 142 bp, Arabidopsis thaliana landsberg
attgatcaaagatgaaagatgtggtcagcttgttgaaaaaaaacacagaaaaagatgtggtcggattttggatcgattgtttttgttccgttctatcgaattggatcggattgatcggattaacgctactttaaccaaataa

SEQ ID NO: 187966 - DNA, 447 bp, Arabidopsis thaliana landsberg
atctttcaatttggttttatagggtgcagcaggtgtcgtttgatgatgctgaccgaaatcgatttctggtcacctatgttgattattcttttgatgattttggaggcaatcaaccaccggtttatcctggattagcaactgtgtggggaagtttagctagaagcaaggtacaaattgcacacgttgtctggatgaaactactagcttatctttgttctaatgtgatatatatttgtattatacttataaacaaagttgagcaatctccgtgttactgttcagctatctgctttgaattttcttaattatttctcttttgttgatgaacactattactggccttgcaggccaaaggttaccgggttggacctgtatatgacgatgtattatcaatggcgtggtttttcctcgagttgattgttaaatcaatggcattggagcaagcag

SEQ ID NO: 187967 - DNA, 108 bp, Arabidopsis thaliana landsberg
caagaacgaacaaaattcagagatcaaagaaaaggtttgaaggtggaaacttacatgcatattcttggaaacttctactttgcactcttcgtcaactcgattccataa

SEQ ID NO: 187968 - DNA, 553 bp, Arabidopsis thaliana landsberg
gctactaatccctttttcccacctgggctattatccgaggatgtcgaatccgacttcgatggagaccttgccttggatggtgatcttgacactgatcttgctttccccgtcccaatgggagattttgaatatgactttgatcttgatcttgacctcgatggactcaggctgtggctagcggatggtgaccttctctttctgtaaggtggagatcggctacggatagggctgcggctgtaccgccggttgcgataacagagaccaggcgatactgagcggcttcttcttctatacctgagcatactttcgagttgtgaaatcaagaataattcttttggatcaccaattttagttccatattcatgaaacttttagatgtaaagaatcagttgaaacaatgtactaaagaggataagtaagtaccttggaggtgttcttcctcttagtgggcttctgaaccgacttggcgagaaccttctgcgacttctaaatctacagagaagacgttataaaaaagacggttcagtacgagagtgtgtaacagaaagggggc

SEQ ID NO: 187969 - DNA, 1007 bp, Arabidopsis thaliana landsberg
atggacgaagatgggatgatgttctggtcaacaaatatttccatgatgtcagggaagcaagaaagcaaggtaggaaagagcaaagaaacaaacaagcccaggctgttctagctgctgctactgctgcagcggcgacatcttctaggaatacatcgcttaggaaagatatgtcagaagaacctgcacaacaagaggttgttgttgctacattttgattttttgcctccatgtatttattttagttgtgccatatttcttatccattattcttactggttataaatcggacagatgagcacttctagacgtaaagttgttggcagctctcacctagttccacagacaaaggaatcacttttaaagatggctgtttctgggccaccatccaaaaagcggtctgatcatcacacaccagactttttagtagaaaatccacgaacttgtgacatctgcaggcgctccgaaactatatggaacctgattgtagtgtgctctagttgcaaggtgaaagacatttcctgtgatttatttctaatgtttgatcaaggcatgatcatctcttttagggaccacttttatgcactgtacggtatataatatggctccaattacaggttgctgttcacattgattgctacaaatgtgctaaagaatctactggtccctggtactgtgagctatgtgcggagtcatcttcagaaccttctttcaattttggggaaaaaccgaattcttctacagaatgtactctgtgtggtggcacaactggggcttttaggaaaaccacaaatgggcaatgggtacatgcgttttgtgctgaggtgaagtttcctttacggcagcagttattagcaggatctggagtactatattcagtattgaacattgcaaataacttggtgtataatttctggcagtggtccttggagtcaacgttcagaaggggacaaataaatcctgtgcagggaatggcgggcttatataattattatacccgattactgtga

SEQ ID NO: 187970 - DNA, 308 bp, Arabidopsis thaliana landsberg
atgggcaaggtaggaactgattacaaaccactgataccaaactcatagaacgataacgtgtggataaaatatccagtttttagaatatctgtcaacaaaaaaaaaaagaaaaaaaaaaaccaactacaaattcgttgaactttcaaagactgctcatagatatgggaaacaagtgttccctctctctctttttttttcctttaggtaaattcctcaaagatcaacgtacatagacgtgatgtagttcttcagattaccattgagtcgggtaaatccatcttcattgtcgtagcaaatgttaattgcac

SEQ ID NO: 187971 - DNA, 3124 bp, Arabidopsis thaliana landsberg
tacagagttatggagttgctgaatggagtagaaactctagtttcgggaattcatcatcaccatcgtactaacgcgaagagaaacagattagttagatctgtcaagatcttaaactccgggaatcatgaaatccccagaaagtaaagtttccttttttgtgctctctattttctgtttgaggcattttaacgaacaccttccgtgcaatcactatcaattttgcaggtgcctgtgttttgatctttacgacaaattggttccatacaagaaagcttggtcatggcagaagagcattgtcgaggagaaaaagacattgattgatagaaaccaagactgcgctgatacagtgattttgttacaacactctcctgtttacacaatgggaactgctagtacagaggattatctcaatttcgatataaaggatgctcctttcgatgtttatcgaactgaacgtggtggcgaagtcacttaccatggccctggtcaggtaataatgtcaacaatgcattggaagtttctgtgtgttttctaatgagctcttcaagctgattataggaatttttgaaaatgtagctagttatgtatcctataatcaatcttcgaaatcacgagatggatcttcattggtacctcaggatgcttgaagagattgtcatccgtgtgctttcctcaactttctccattaaagcttctcgtcttgacggtttaactggagtttgggttggtatgtctcatatttcaaatggatgattttgtaagtcatctaatatatattccgagattgatttctttttgtttgcaaatggtatatataggcaaccaaaaagtggcggcgataggtattcgtgtgtcgaaatggataacatatcatggtttagctcttaatgtcactacagatctaacaccattcaactggatagttccatgtgggattagagaccggaaagttggaaacataaagggcttgcttgaagatggagaacacggaatggttgatgatttgaggttgatcgatatagttcacgagtctttactaaaggaattctctgaagctttccagcttcagatcgaaaagcaaacagtttcagatcctaatattctgtaagctgagtcttttaaacgattggagtgctaaaaggaaggtggtattggtagaacaaaatccttgcaatctctatagcattcttgttaagttttgaacataatgatcttatctacatagaaggttttattggatgttttgtgacattgtctgcttcttgttgatgtttatatgagattggtctatttacttctcttttgttctgtaaagatttgtgacttaagggttttggaagaagggtttaagacattgttagtttctgaatacattcttcccacttttgggcctctttggtagtgaagagtcgtagtagctgggaaaccaaatagtaactcacaggattccgttcttcgagcacctagaagaggcataccaatcagtttgtatacgaaattttccaataagcatattcttgtgcgtgctgcatttagtcatttgctgtaattgaaggccaagccattgcgttaaagagagaaaggtagcaattacagtagtctgatgagttcaaatctggatgttttgtattaaatgcgtttgctctgtagagaaatttccataactacctgatatttacttagatgagtacctgtctctttgcagtttccacatttaaccagtttgctgatggagattcatgtgctaagtatgacgatcatcaaatgatccctttgcagttcatttaggtgataatagaagattctacaactgtagtacaagattatgttctagacttctagtgcattgtgcagttaagtatataattatgtaactgagaatatatgatcctagttaatgtttctgatatcagaagatctgcagaccattttacctttctttcccctctttcccttttctccagtttgattcattctttccatttcaatgttgttaggcttggttcctcggattacaggaatacgacaagaagctccggttccaaatgtttccagcaagtgatgtcgatcaaacttaatgctttgcttttctggttaacatatggacaacaagattagaacttttgctagctttggattgatcgaatggtatcttcagaaactgcggtggttcgtacgcgtgtctcaacttgggggaaaaaacggtcatctgactttaaataaatcgtaagttcttcctctcctttttactttctttttgcggtgcctctcctttaagaaatgtatgcttgacaaataaattggcttttaccttattagtcgatccccgcggatgcaactctcgaggactctactacgctggcacaatcgcagtttctacattgccacgtgctgttggtaaacatcgcgtgcctctccatttcatcaccacttgctccatagttcaacacaaaagttctttctgctttcgatacccttacttttcagtttccacagtccctgtacttgtgcataaaactgtaaaacactactctgaaaattttgcttctgttaggatataatgccaccctctcctcctaaatctccttttattagctcttcactcaaaggagctcatgaagatcgcaaatttaaatgctataggggtgtccgaaagaggtcgtggggcaaatgggtgtctgaaatcagagttccaaagactggacgacgaatatggctaggttcatacgatgctccagagaaggcagctagagcctatgatgctgctttgttctgtattaggggtgagaagggagtttacaattttcccaccgataaaaagccgcagcttccagaaggttctgtccggcctctgtccaagctcgacatacagacaatagcaacaaactatgcttcatcagttgtgcatgtaccttcccatgccaccacactcccggcaacaacccaggttccctctgaagttcctgcttcctctgatgtttctgcttctactgagattacagagatggtcgatgaatattatctcccaaccgatgcaactgcagaatcaatattctcagttgaagacttacaactggacagtttcctcatgatggacattgattggataaacaatctaatctga

SEQ ID NO: 187972 - DNA, 108 bp, Arabidopsis thaliana landsberg
atgtccaccaatgaaaaacggattttttgcctgccggattcaatgcggctgaaatcaagcagcgaattcaccaatctcaacagtcgaacagcattgcggtgcgcaacg

SEQ ID NO: 187973 - DNA, 2431 bp, Arabidopsis thaliana landsberg
  unsure (1)..(2431): unsure at all n locations
ccccttctccgccggacattcactgtccctgcaacgccggaccttgcaacactgtgacttctaaaactgagaaaaacccaaacaggagattctacacatgcccaagctgtggatatttcaagtggtgtgatcaagtaagtatcaaatctgagccactctctgttcttcctacttgtccttgtggcgcagggccttgtaaaagagtaacattcattcatggaccaaacactcaacgttcttactttgcttgctgcgttaagaaggtaacaaaagaaaacgaaactctttttcattacaataagagtctgatttgaaaagttgttttgttttagggtttaggagattgtggattctttaaatgggaggatggtgagagtttgctacatgaaactgagttggactctgatggtaatgtgaaaaggaacagacttggagttgtggttgaattagaattgaatccagcttcatctagtgagtctaatactcttggaaacagannnnnnnnnnnnnnnnnnnnnnntccagtcactgtgggaaaggaatcgattccggttttcgcaggtttcaacgatcaaggatcggtctccaacagtgagttgttttacattttggcagtcactaattttggaatgcagcaaacaaagttgttgtgtgtgcattatccggtgttcttgatgctaggcaatttttcatttcatttgagtgcttatattcctttatgttgtttttttgctaggcattgtcccttcatttgatttgattacactgtatgacgatgcggttcgccttgagacgaaagagccagtactcccttcagttgcccctaaacatcttgatactcaagtggagactttgtgtggtaatgcattggaggccgtagagagtagttctcagaacacaagcgatctagttttgaatgctaacaacaaacctgagcatatacatcaacgagctgcgacatctggtgaaaccgaggcctcatattcaggtagctcctccatgatggtacttattgagcaatataagtcagagaagctctatctcgagagtatatctatgaaacatgttgaggcgttgactgcctatacgggttcgtacaagcagttagagtcgcttcgtgatagagcacatagtcttaagaagcagttacttgaggtagagaaacaggtgaagctttgtgaggctgagacctcagagtttgcagcaagtgttcaagaagtttctggtgaaatggcgaaatcgcagaagaaaatggtggagatagctgggaaagtagctaaggaagtgagagttgacaagcaaagggattaagcagctccgtagagaagaagaagtagaagaagaagcagaagaagaagctgagaatggacttatcttccacatgaatgtttctataatctgtatattgaagatgatcgacgttttgtaaaacttgtattatttagggctaagcattttgtgatattcctaaataacagccacaatattatttagcttgtagtctttgtcctttccttgaatcagataatgaagttaactatagtcaccctccatgttgatccacatttgctgcattgtacgtaacaaggctttagcttctgcttccagcggtgatagtacagttccaatttttgcaaaactcgacaagcagcaggtttgtaacgcccgtgtcccgagttagggagtaaccaagatcttacacacgccgaattcgaggacgaattcagtttaaggggggtagacttgtaacgaccgcgtcccgcgttcataaagaggcaggtttgttttaggagaaaactagatcatggtcgaggaacggaccaaaatactaagtaggaagaacgagaaagtataagctaaaccagctaggtgagctggacaagctgtatgaactagctaggtaagctatgtaaactaaactagctggaagactagctagctcagctaggtgagctgaccgagagctcgactgagctcggtgagctgatcgggtactgacccagctgggtggtcattctaagtaagatcttgcttactccattcgttaaacgactcgtcatcggtcgtgaattgatgaaccaatccctatcgttacttcaccatacagccaaccaaccccactggtctaagtacaacgatagagattggggatcgtacgattcccttggttcacgatgaccaaataaagctcttggcttattggtccatccgtcctctaaacgtactccccttcgttccatggtggacgattgagcccttggcttatcgaaccatccatgtttccgatccggtcatttactacgaccgcccacggtttactaaccgtttatccgtccggtctatggtggtcgataaagctttcggcttatttgaaaggccccgatccggactgcctaaagtccgggcgagttctctcgacccaagccactaa

SEQ ID NO: 187974 - DNA, 234 bp, Arabidopsis thaliana landsberg
atggaattagaagacccactagagcgagttttggtctctttcatagaggatagtgcagatttggactgcgaaacttcaacatatactaagctgctagatgagaccgaaaatgtgatgcaacttacagttgaagaagctcttccatctgtgacttcaacaccgactcctactttagattgggatccagcaaaggctcctaaaatcgaaattgaaaccacttccaccagggctaag

SEQ ID NO: 187975 - DNA, 140 bp, Arabidopsis thaliana landsberg
caaaaccaaacacaaaaaaaaaaaggaatcggacaaaaaccaagtgaaaccagaaaccctcagactgaaattggtattggccggtggaggatgggagcagacacaaccggagttgcagagaaagtcgacgaaatgcgaag

SEQ ID NO: 187976 - DNA, 138 bp, Arabidopsis thaliana landsberg
atggccaaggttgcttcacaacgaagcctgcccgagccggcctcgggagagccgagggggcgcccgctgtctgaggaggccctcgggcgaggcgtgaattcgtctgggaccactgttccaacccgaggctgggctcgg

SEQ ID NO: 187977 - DNA, 261 bp, Arabidopsis thaliana landsberg
cggcgccagctgaccgacgagatcgacgccgccgcgcgcgcgctgaaggcgctgttccgccccgacaagctcaacgtggcggcgctcggcaacctggtgccgcagctgcacgtgcacgtgattgcgcgcttccgcgacgacatcgcctggccgcggccggtctggggcgccgccaacgcccgcccctacgcgccggaggagctcatcgcccgggtgaccccgctgcgcgcggcgccgcaggccccgggcgcaaaaacgtag

SEQ ID NO: 187978 - DNA, 169 bp, Arabidopsis thaliana landsberg
atgatcaatggaggtggagagggtggaagtcagcggagagaactacaagggaaaagaagtatgtctcgtggcaatgattttgcgtacgccctagctagaatggccacggcgcagatatgcgagagcgttgagattaacagttaccaggaatcatcacagtcacgcgaag

SEQ ID NO: 187979 - DNA, 399 bp, Arabidopsis thaliana landsberg
tttggttgcttggttgaaacgagagtaaaggagagtaaggtttcgcagcttgttggtaagcttttcaaggattggtcgcttctcactaactatgagcacaatagacggggtcgtatttgggttctatggcgtaagaatgtgcgacttagtcctatttataagagtggtcaattgctgacttgttcggtgaagctagaagatcgacaggatgaatttttctgttcctttgtctatgcttcaaactacgtggaggagcgaaaagttttatggtcagaactgaaggatcattatgattctcccatcatcatcagatttaatccctttggcataatagtcttgccagcttcaagaccaaagggattagatgttcgcataatagtcttgaacctaagcatatga

SEQ ID NO: 187980 - DNA, 177 bp, Arabidopsis thaliana landsberg
gcaaccagtggttcgcctaaccttacttttaccgagtcgcacaaaaccacggctacttccagtacttacaggaatgccatcccgggtaatttcacgctggtgctgcaatatgccaataaggagaatttcttcagttcgcatacccaattgatcagcgagggatcggaccaggccaat

SEQ ID NO: 187981 - DNA, 456 bp, Arabidopsis thaliana landsberg
taatagaagtgtttgaagagagtgaagggcgtaaacatggagaatgttcgctactcgatcttgccagagtcttggaaatcaaaaagcaactctgtgaggcaaacgtaagtgtgtttagttgttttatcattatttagaaatgtcactgccaggttcactgaataactgaatattgtctctcagtctgtgagcgagagccatataccagatattctcttggagagacttatcactggtactactgaattcccgccagtttgtgccattgtgggaggaatattagcacaggttctctctctctcactttcactctcttatcgcattcgaatcttctcactagaaacttgtaatttgacaagaaagattttttgatgtggcaggaggtgatcaaagcagtatcaggcaaaggagacccgttgaaaaacttcttctactatgatggtgaagatgggaaag

SEQ ID NO: 187982 - DNA, 344 bp, Arabidopsis thaliana landsberg
atgaacatcaaactcaaagggtaagattaatacatttagaaaacaatagccgaatatttaataagtttaaaacatagaggagttttatgtaatttaggaaccgatccatcgttggctgtataaaaaggttacatctccggctaacatatcggcaaaaaaggaacatggccaaggctcgaaagccgaagaacgaggaagctcctggcgcgaagacttcagagaacactggagctaaagttcttcaccagaaactctttctctctattgacttcaaaaaacgccaaatctacgggtccgttttcctctctttctttcgatttttcattcgcgaaacaagtccgtga

SEQ ID NO: 187983 - DNA, 1195 bp, Arabidopsis thaliana landsberg
atggataactggattttcgatgataaacctagaagaccagaaagtctgcagattatggttgatattcaattgaaagtgagtcaacttattgatcctttttctaggaattggaatttgaatatgcttagagacttatttccttggaaagagatacagataatttgtcaacaaagacctatggcttctagacaggattctttctgctggtttggtaccaatcatggtctttacacggttaaatcagaatatgatttgtgtagtagacaagttcataaacagatgtttaaagaagcagaagaacaaccatctttaaatccgctttttggaaaaatctggaatctaaactctgcaccgaaaatcaaggtattcttatggaaggtgctaaaaggtgcagttgcagtagaagacaggttaagaacaagaggggttttaattgaggatggatgctcaatgtgtcctgaaaagaatgaaaccttgaatcacattttatttcagtgtcctcttgctcgtcaggtttgggctcttactcctatgcaatcacctaatcatggttttggggattctatttttaccaatgttaatcatgtcattggtaattgccataatacagagctttctcctcatttgagatatgttagcccttggatcatttggatactatggaagaatcgaaataaaaggttgtttgaaggtataggttctgtttccttaagcattgttgggaaagcacttgaggattgcaaagaatggttaaaagctcatgaactaatcttctctaaggaacctacaaaggacttgacatggattcctcctttgatgaatgagctcaagtgtaacattggaatagcttggtctaaaaagcatcaaatggcgggagtttcgtgggtggttcgaaattggaaagggagagttttacttcatagcagatgttcgttctctcagataagttctcactttgatgcaaaaattaaaggttggaattatgctgtggagtctatggatcaattcaagtttgatagagttacatttggagcatctactcatgatattattaaagccatgcataaaccaaatcaatggccagcattaagagctcagatagatgacttgttgatgagagctaaggataaagaattatggttcatggcaatggaaccgcatcattgtaatgagggagcttctgagatagccaaga

SEQ ID NO: 187984 - DNA, 134 bp, Arabidopsis thaliana landsberg
aggccgaatatctccaaacactctttcttcttcgacatgttacacatgatgttgaaatggacataaagcccgctggcctgaaaggatacggtcttatttttgtggacccgaacccgtttaaagacactatataa

SEQ ID NO: 187985 - DNA, 1371 bp, Arabidopsis thaliana landsberg
  unsure (1)..(1371): unsure at all n locations
atgtctcttgtcctcgcttgtatgcgatatacttcatatcccgatgagcttcctagtctttcgtaccagtaccggtcgtcatcaaggtcatccctgttgacaaccggttcaagaagtgattcccggttgttgtggttggttaaggttatttggacggcggttatcttgggtttaaacacggtttgtgatgctttggagtttattgttacgacattgttcgttaaggacaccgagacacccatcaaaggtgatttcctgtcaacgaagagtaaacagctgcgtttggttcatcgtactgtgagccttgacgatatcaagctaaccaagaacgcaatgaacatggttagatttctccttagactctcttcgtttacatatttatatatacagtacatattaaaaacagaagattatgagtatcttatatattttggttcgatagactatcaacgatgttgtacttggagtaacccaagctggtctctcgcgataccttgcgagaagatacggtaattaaaattatactctcctatctattttcatgtatatatgttaataaaatattgcacattatgaacgtgtacaattcaataatttcatgataaactaataggagaagaagaaactaaaaataggaagcaaaaaaagctgcctaagagaataaggctaagatcagctattcttgtaaacttacgaccaacaactggaatccaggtaaattcacataaggttaatgactaatttgattacaagttaagtgtacttaatcatcagtgaaatttaaatttatttttgttttaaaacaggatctagcagatatgatggagaaagggtctaaatgtaggtggggaaattggttcggctatgtagtatttccgttttctatnnnnnnnnnnnnnnnnnnnnnnnaacatcttgaaatagctcagaagaccatcaatcgaaagaagaattcatacggggcaatgctaacatacatattctgtagaatcattgtcaaattgcttggaatcaaggtcatttcaaacaagaactaaaccatcctatatatgtttagtatagacaagaaagcttgatttggtaaaagaattaatttattatatataagaagaggtaaattacatattgtcattttcattaaaattaaaagcaacaagaaaaaagtttttagttgatatagttgacactactttggttatgatgattattgactaatttgtaattaatttgcaggtggcggctagtataataaacagaatggtgtcaaacacaacgatgacgttttcgaacatggttggtcccgttgaagaagttagcttctatggacatcccatcacttactttgcctcaagtgcttatggccatccccat

SEQ ID NO: 187986 - DNA, 86 bp, Arabidopsis thaliana landsberg
gcagggattgttttggccagttcccttcaactgattcttatgagctgatctatgaagtaccgaaagccaaaagaatcggggataag

SEQ ID NO: 187987 - DNA, 149 bp, Arabidopsis thaliana landsberg
gaacctgcggcagttgccgcgtgagcgtcatcgaagctccgcccgaactcgaaccgccgggcgaggtcgaacgcgaaacgcgcgaagaacgcggctttcgccccgaggagagactcggttgtcaaatgacggcctgcccggggctcaag

SEQ ID NO: 187988 - DNA, 69 bp, Arabidopsis thaliana landsberg
atgatccacctctggaaccatcatgttgacggcaacgaaaagatgcagacaattgacaaggaacgcaag

SEQ ID NO: 187989 - DNA, 252 bp, Arabidopsis thaliana landsberg
gccggccttgtacttcattgcatgttacttttcacgtatgggttgccaggtaagaaggttctcactgtaattgtctggttttggtacattctatgttgactatttctcaacctttaaagtcttgaagagttgttgcatcgtcatggttttatcctatcactgatggttgaatttgtgcagggaaacctgcaagatgatttacatcttcgacgaaatcttcttagagcagtttgtgcccctctaagttggaag

SEQ ID NO: 187990 - DNA, 374 bp, Arabidopsis thaliana landsberg
  unsure (1)..(374): unsure at all n locations
gccagagggctagttgcagctgcatcagacactctccaggttacgtcggcgtgaaccgaaagcacgatgcgaagccaaccatggctccggtgatagatcccgccatgggtcagtgaaggagcagaggcgcggtatgcggttgggagcaaatctggcggccgatgacgaggagaagcgatggaggtccaagcattaataggcccgaggtnnnnnnnnnnnnnnnnnnnnnnnnnnnnnnnnnnnnnnntccaggtttgttgagcttcgtcaacgacgaacgaagaggacgaccagcgagcactggcccacctggcggtgataggcaaggaggatgcacgcagctgagcagcagggcccacccgccagtgcactag

SEQ ID NO: 187991 - DNA, 186 bp, Arabidopsis thaliana landsberg
ttctccgctctcttggctgaactcgcggccaacccgagcacccagatcctcgactcgttgcgcggactggaacggaaaaccagtcttgtgttcacgttactgaaagcgagcgtgtacagcatcgtattgcagcagcaaattctcggtgacgaggtggatggggagctgacgaccaacccggaatga

SEQ ID NO: 187992 - DNA, 236 bp, Arabidopsis thaliana landsberg
aacaagaaaaaaccgagaacctgaaccccagcgacgaggcccagagagaacccaaggacgacaagatctcagcaaaacaaaaggagaacaacgctgagccaacagaggacctgcaaaataaactccacattaaccagagacaggtgaacgctgaaacactccaaaccacgaggcaagaagagaagagcctggctgagagacgacgcgggaagaccgagacagagggtccaacctag

SEQ ID NO: 187993 - DNA, 78 bp, Arabidopsis thaliana landsberg
gcaaatatcgaacagcgcgaaaggctaaatgtatcagagatatgcgaagaacatagatccatcatcgatttcatgtaa

SEQ ID NO: 187994 - DNA, 89 bp, Arabidopsis thaliana landsberg
aaggacttacattggaatcagtacactatcaaggctgcggagccttcaacagcgccgccgtgagcgagcggactcgccgacccacgtag

SEQ ID NO: 187995 - DNA, 210 bp, Arabidopsis thaliana landsberg
atgcgtcgcggtgtagcgcgtcgatgccgtcgggccttcgccctccgactggaacgtcgtcacgccatcctcaacgacgatgccctccgcaacggggcgaatggagatgatttcgatgctgagcgttcctggcggttcgacctcgagggacgcggcaaattccgcttcgatcgcctcgcgaccgtgaaacacaagaccggtcgcgtcgac

SEQ ID NO: 187996 - DNA, 81 bp, Arabidopsis thaliana landsberg
atgtatgtgtacgtattcaatacgcgtacttgtttaccatgtagacatgaacatttacagatgcgcacagcgcacggacat

SEQ ID NO: 187997 - DNA, 572 bp, Arabidopsis thaliana landsberg
atgagtttcgcggcctataagatgatgcattggcctaccggcgtcgagaactgtgcttccggctatatcacccactctctctccgattcaacgctacagattccgattgtttccggtcatgatgatattgaagctgagtggcctaatcctaaacgaggtattggtcctttgcccaacgtcgttataaccgccgcaaatatccttgaggtgtacatcgttagggctcaagaggaagggaatactcaagagctgaggaatccgaagcttgctaagcgtggtggagttatggatggtgtctctggtgtttctctcgagctcgtgtgccattataggtacgtgtttgttgacaactacctcctaaattactccaattttggtactttgactttgaagtgatgatgtgcttggtattggattgtaggttgcacggtaatgttgagtcaattgcggttcttcctatgggaggtggtaattcttctaagggaagagattcgattatattgacatttcgcgacgccaaaatttcagttcttgagtttgatgattcaattcacagccttaggatgacgtaa

SEQ ID NO: 187998 - DNA, 259 bp, Arabidopsis thaliana landsberg
atgaacactaagctatcactttctcagaccaaaatcctcacttccacaattgggttcaacgatattcgaagtggcttagatagacgctcaagcatttccccgactctctgttcaaagcccgtctactccggaaaactcaaggctgcaaaagagacagcaagaatcgagacatcgaatacgaagaatgcgagtattgaggacagcttcttctcgaaaattgcaattaattatctatcagagaatcttcaagacgcagctg

SEQ ID NO: 187999 - DNA, 494 bp, Arabidopsis thaliana landsberg
agcaagagaaagatgtagataagttgataacaaggcttgtgtctagagatgaggcacacattgcgttgatggaactaatgaaatggagaaccgaagggcttgatcctatgtatgcaagggcggtccaaatgaaagagcgtgatccggtttccggaaagatgaggatagcgaatcctcaaagcagtagacttgtttgggagacgtatcttagcgagttcaggtcactaggaaaagttgcagtaaggctcattttcctccacgctacgactggagggttcaaatgcaactcctctcttttgaaatgggtaaactcgaacgggcggtcacatgcagccgttgatcgagctcaaaagctgatcttcatatccgctaactcgaaattcgaaaggagagatttctcaaacgaggaggatagggatgcagagcttctcgctatggctaatggtgacgaccatatgctaaacgatgttcttgtcgatacatcctcagtgtga

SEQ ID NO: 188000 - DNA, 287 bp, Arabidopsis thaliana landsberg
agggcaattttagagcaagtgttgatttgcagcgcactcatcgtattaaaggaatgattaaaatggtggccacagttggtattcctgagaatacaggtatagcattagcctgtgctatgaatagctcctttagggggcgtgccagttctgatatttacaccatctgctctcaagactgtgaattatggaatcctgcttgcacaaaagcaatgactatgtcatttaatccaaacccgtgttctgatgcatggagtttggaatttctgaagcgtaccggatttcattga

SEQ ID NO: 188001 - DNA, 365 bp, Arabidopsis thaliana landsberg
ttcgaggcttgcgacattcgacaggcgaaggccgataccaaacggctcaaccggcgatatgcgttgtttgatgacaggaatattttcctgcagttttgcaaagtgatcgggccaggtgtcgccagcgtgtatgttggtgcaataagtaagatgtcctcttgttgtttgcatggtcgctgttttagcggaaggctttcaaccattcgccagccttgtacaaagttgcggtatccagttggttcacctctgcgcctttgccaatggcgtcgagcagcatgatggtaagccttccgccaaggtgctcgcgaaattcgttgagtccttttatacggcgctgttctcgtcttttatctccatcaatgggt

SEQ ID NO: 188002 - DNA, 1287 bp, Arabidopsis thaliana landsberg
ggggaatttaactctggaaaatcaacggttatcaatgcacttcttgggaagagatacctgaaagaaggggtagtccccactaccaatgaaatcacgtttctgtgctactctgacttggaatccgaagagcaacaacgttgccaaacacatccagatggccaatatgtatgctatcttcctgcaccaatacttaaggatgtgagtaattcaaaattctaccatcgcagtcctgaatttttactaattatttggaggaattgatttgggttgttctcctttcgagcagataaatattgttgacacacctgggaccaatgtgatccttcaaaggcaacagcgtcttacagaagaatttgttccacgtgcagatttgcttgtttttgttctttctgctgaccgccctttaactgaaagtgaggtagaagttatcgttttacttggcatgttagttgttgttgtttttgctcaatatgtatctgcctaagtagcttgttagatctatttttcacgaaagtagttagttaagtcatgtatagaccatcaagaccttgtgtaggaagggaaagttgtcactaggttgaatgcatatatcaaggttttgttgattataaatttaaactagactaatttattttcaaagtaatgagtgttatagctattgctggaaccagtatgtcttgttggtccatattttggtaaagcttaggccaatacatttgagaggtgagttgttattggtacagcaaaactgattttacgtccatggcaaattgtatgtaaatgatcatctacgaagtactaaccttatgaatatttggttcttattttgaaaatctgaaaaagtttcaaaagaaggaataagcttctcaatgtcatcatacccatgtcatttctatctctacctctggagcttcctgctgtcttgattttactgtaggctgatttacatctcattgcgtttgtcaggttgcgtttctccggtacacacagcagtggaaaaagaaatttgtgtttattctgaataaatctgatatctatcgtgatgctcgtgaggtttatcagaaacaatatttatgtcttttccttgatagtctctgtaattactggatttttcttgactaaagattaattttactgctgcagcttgaggaagctatttcatttgttaaagagaatacacggaagttgcttaatacagaaaatgtgatattgtatccggtgtccgcacggtctgctcttgaggcgaagctttcaacagcttctttggttggcacagatgatcttgag

SEQ ID NO: 188003 - DNA, 27 bp, Arabidopsis thaliana landsberg
ccagacaagagccacgaagagcacaaa

SEQ ID NO: 188004 - DNA, 91 bp, Arabidopsis thaliana landsberg
atggtaaagagacgcatcaacagcagcagcagaagccaggacataggagatggtactaccgtctacagtcagacatttcaacgaacacata

SEQ ID NO: 188005 - DNA, 284 bp, Arabidopsis thaliana landsberg
cggttttacagaaaaaggagagtttctgtgatatccacgggttccctcaaccttgatctagctcttggagttggaggattgccaaaggttgttgttaatttagagtctcagataggactagccaagctaaaggtattgcaattaatgaggtctctaaatgtgtgtttacaagagaactttgttggtttttgtgtagggaagaatggttgaggtttacggaaaagaagcatcttggaagacaactctagctctgcatatcatcaaggaagctcaaaagcttggag

SEQ ID NO: 188006 - DNA, 204 bp, Arabidopsis thaliana landsberg
atgcttccggatgaaatgttacaaaagatcctttcgacactatcaactaaagatgccgtgataacaagcaccttgtcgaaaagatgggtggatcagtggaagcgcataccacatctctgcgtggacatgagaaatattatgagaacaaacccgaccagctatgttcatgaattatctttccgctttgctgaatcaatgacgaag

SEQ ID NO: 188007 - DNA, 190 bp, Arabidopsis thaliana landsberg
tctcttcttatctccctctcttctcaatcgtttggtctctttgagaattgagattctttctggtttgtcccgagaagaaaaagaagagaaatgggtttctttttctcgacccggaaaggtcttcttctcatcatcttcatttgcttggatattttcggatcaaatgctcaacttttgccagaagatgaag

SEQ ID NO: 188008 - DNA, 361 bp, Arabidopsis thaliana landsberg
atgtcttctctgatctcgctcatgttcctgatcgttatctcattcctcactagcgtcagtgctgctgctcaaagaccttattacctaagtgggggatgtctaactacgacatattactcaggtaacagcacttacttcaccaatctcagaacacttctgtcttctctctcttcacgtaacgcctcttactccaccggattccaaaacgccacgtcaggaaaagcccccgaccgggtcaccggacttttcctttgtcggggttttcttctcgccagaagtttgccgtagctgtgttacttttgccgtcaacgacacatttaatcggtgttctgataagagagaagccgtgttctattactag

SEQ ID NO: 188009 - DNA, 285 bp, Arabidopsis thaliana landsberg
ttctaccagaactacgcgggctcggacacgtttgcctataaccgaaactcgtcggactcgaaggtcacttacaatcccagcgacaagaccagcattttcggtcactacagcgtcgagccgttctccatcctggatccgcagtcactcggtgcggcaggcggcgcgccgttcgacggcgggcaatcgggacaggcgtccggacggctgcagaatgtcggtatcgacttcagccacgtgattacgccgaacctcgtgatcgacgcgcccgcccgttacacgcggcag

SEQ ID NO: 188010 - DNA, 1319 bp, Arabidopsis thaliana landsberg
atgagaaggtttaaggttaatgtcacaaaaggcgacatatcaaaaaaagccatgaaatccaactttgaatcatctagcaacatcaacccacaatgctcgtataattatctcggtctaactaaggaaaatttgtttaagtcccaaattggtgatactcttggtcaatctagcctccttttgaataacaatgactctatccactccatgtacgatggatccatctatggtttgaacgaacccgaatctaacttgtcgcctatgagagaaagcgtcggattttcgaggggtgtattgcctttaaatgaagaaagtgaatgcgcttttgaaacatctcaaatgtctcaagttcctaggcgtggacaatatggtacaccaagcgacatttcgggtataaactctaatcttggtactggttatatgtgtaatagttatgctggaataagtatagataaaaatggtcacatgcttggacttggtggagcaatagttgatagtaatggtaacgggcattttggtgaaagtctaggcgccatgaactggaatctcaacaacaatgatgtgaggaactatgagagttcaacttcgaggttttcctctccattttcatcgttcttacacaacaaggttcagccacatcacaatttaatttcacaaacggatggtctgcttcctacaagcatccttgatacatctcaagttccttcttttggacaatatggtataccaaatgatgttgtcggcatggaacctgaatttggtactagttacatgcatagtaactacaatggtatcaatactgatcaagttggaaatctggttggacttggtagagaaagagttaatgttaatggtaatgtctctcttggtcaaaatttgggtagtatgaattggaatttcgatgaaaacaacatgagtaatcatggaagttcaacttcgaggttttcttctccattttcatcattcgaggatcagtcactaagtcatttaaacgaggaaacaaatgagttggttcctggattagagaatctaagcctatacaatgatcatcaaagcatcaacccatttcttggcaatacgattaattcccattttgttgagaatcaggtaaattaccttataactgatattaattaattcaaccttctttattattttttcatatatgaagctaatgttgtgatttttatgtgataattgagcaggatcaaggtttagtgaataatgaaaatcttgaatttgctaacgatgatcaactggaaaggaatgaaattcttactacttattctgttgaggatattaataatttgagcattaataac

SEQ ID NO: 188011 - DNA, 106 bp, Arabidopsis thaliana landsberg
cagaagaagaagtagaagaagaagaagaagaagaagaagaagaagagctctcaaaatccttggaagaagaagacgattgtgtagaagcgtttttttgttggttttg

SEQ ID NO: 188012 - DNA, 421 bp, Arabidopsis thaliana landsberg
atggaggtgacagaggagccctcatccttagaggtggctactgcagaagacccagcccccgagggtggtgctggcagttacccaggcccaatggttgttgccggtagtgatccggctctggtgggtagcgcaactgcaacccagcccccgagggtgttaagtgtagcgcaagtgcaacccagcccctgagggtgttcaggtgggctctccttcccacacctccatggacgtccatgttgggtcgtctccacctcagtccgattgggcgacggcgatgcatgcttctacagctttgaataaacaagtcgccttagaggtcagcgagctagatgcaagaagtctgttatctgctggtggggctgagatcaccctgacaatgcccttcaaattgttcctactgatctcccccgtcaagccatga

SEQ ID NO: 188013 - DNA, 336 bp, Arabidopsis thaliana landsberg
aatacgaagcctccgtacgaaagaccagaagaagagccaaagccggagctgtgagctgatacggcaacgacgaggatcgaagaattggaaaaataccaggaagccaatccaaagccacggcggagttgtagctagcgatcacaaccgcgacgcttgtgaagaagaaaacaggtggaatcagggagagtataactcgtgaagaaaagctcgagagtagatgacgcacatggcgaagagagcttctatgttcaacccatttctcgtgtgtgtagagagagcgtttctgctgcatcccacgctcttttatctcgtctgcccaatctggaacagctctga

SEQ ID NO: 188014 - DNA, 122 bp, Arabidopsis thaliana landsberg
gcgaaaccgtctacatagatgaagatcagtgccgcggtgacattggcgtcgcttttccctatgtttcctgctacagcccctccaaatttgacaccaatcatggcaccaatagcgaaatgtaa

SEQ ID NO: 188015 - DNA, 1516 bp, Arabidopsis thaliana landsberg
atgtttgagaacagattgaattactatggtggtggtggtagtggtagtagtggtggtggttgtgtcgtgactctattagatgggcaaactgttcatcataatgggttcaattttggtgagttaaggcataggaatgttaatggtagtgttgatggcagtaatgatgagcggtggtctgatactttgagttctgataagaagttatatatggaggagactagtgtggagctaagcccttctgagaatccaccgtttcaagaagtgcagcatcagtttccaagaagtgagattaatgggaatgtggttaggagattagatacagaagcttctttggattggaaacagcttgtggctgatgaccctgattgtaagtttcaaacttttctactttggattggtttttgtggtggtctgaggcttggataatgaatgtttatgtacaatgatgttttgttatcagttctttctgctgagacgaggtcacctatgaaatactttatggaggaaatttatggtgggatctcattacggagcacaacgactcctgggaatgatatcgagcgcgaaagaatatatgatacaatcttccgtttgccatggcgatgtgaagtggtaaaactggctttcctcttctttgacagaatgaacatttgttgtttagctaggtgtgttatttgtgtacctctgctgataagtttgtatggatggcgatggaaatctacctgttatgtgattgtgaagggctacctaaatgagaagtcaatgtatatatatgtatgcttctgttttgtgatttacacagaggtttttcacattgtaaagaattttaatgcagcttatagatactggcttttttgtctgcgtcaactcatttctgtcattgttgacagtcatgccaataagagtcctgctgatatttatggatgcatttaagaacaggtgagtcttttttagattcttcgttgataataacacacttaatatattgctataaactggactttcacaccaaattgtgcatctttgaagcaagtgtaacatgccttgatcatactattcgctatacacatgatcctgctattccctttgttagaaagtatcttaataatatttgtggcaggcagttcaggaggccctctgcatcggagctgtctgatctggcttgttttctagttttggccactggtaccattcttctcgggagaacaggtgtggtaaaaagctcctcatttgcttaagctagtaatatatgtcatgtctactctatcaaaatctctgcagtggtacatgggttgcatagggcattacttaatctgtttattattatatggacaagcttagcacttctgttaaaaaaatggatttgtcttttcagctcatcaaagtgatgggaaaatggattctcaaacagttcccttgtgtgtttttgtttgtttccacagatatcagcctaatttaccacatgattcgtggtcaaagtaccataaaactctatgtggtttataatatcttagag

SEQ ID NO: 188016 - DNA, 60 bp, Arabidopsis thaliana landsberg
atggagttcagtcggatttataccttgccagaattagagatggagtatacagccttcaag

SEQ ID NO: 188017 - DNA, 464 bp, Arabidopsis thaliana landsberg
atgcttcttgcccttatggatgaagcatatactggttcaaccatcggggatggaggggatgactctgaatctgaagataacaatacaatagatgtagctgatcctctgtttctggagcttctgaaggacgaaaatgatggtctagcggtatgcatccttcctctggctttgctttattccaaaaactcaacagaaacagttttatataataattgtctattagtaaaaatttagggcctatgtgaaagttggtagttttttaaactgtctgatatattagacaaactgaaagtattttgtcaaatttgtgctgcaggaaagacaccgcgcttctcctacattgaatgcagcgctgcaggctgctgcaagtggtcctcggtcagagaggatgaagcagactcttaagattgctccccgacttcttgatgtctactttagtgttacattgcgagatgcaaatgact

SEQ ID NO: 188018 - DNA, 286 bp, Arabidopsis thaliana landsberg
atgcctactgcacctagtatgccaaatttactggaagataccttacgacgatattccgagggtgacctcttcaccgcctatagctacctccgagacaaaaagttcctggttggtggaagtgatggacaaccatttgtgttatctcagaatttcttgcatagtatttcaaagtcaccattcccggttaatactgggaaaagagctgccaagttctcaagttggcttgtcgaacacgaaagagaccatatggataagggagtcactcttacttcacttttgcaatgtg

SEQ ID NO: 188019 - DNA, 749 bp, Arabidopsis thaliana landsberg
gcttgaacaaatactatccaccaaactttgatccgaagcagattcctcggatccgaaaacttaagaatcagcaaaggaagattcgttcgatggttccattacgtattcgatgcaacacctgtggaaattacatgtcggaaggtaccaaaatcaattgccgtgaagaaaacgtaatcggagaaacctacttagggatcaaaatccataggttttacttcaagtgcagtaagtgttgcaccgagctgatattgaagactgatccaaagaattcgagttatgtagccgaatcaggtgcaacttgtgtttatgatcaacacgaggaggaggagcaagccgaggacggtggggataggatgagttctttagagaagagaactttggtttcgaaaagagaggttgatgtaatggctgcacttgatgagatgaaatctatgaaatctagacgcgtatcggtgagtgtagactctatgcttgaggatttgagtaaaagacacaaagaagaagaagaagttgcaaaggaggaagatgcagcgttgataaagtctaccaaatttggtaagcagaggaggattgtcgacgaagaaactgatgagatggagaagacgaagaaagtaagaatggaggcagtagatgagaagaaacctaagactaagaaacttgcttgcattgtaaccttgaagaagaagaagacaacaagtttgggactcgcatcactatgccacaactatggtgctgatgaagaagagtaa

SEQ ID NO: 188020 - DNA, 466 bp, Arabidopsis thaliana landsberg
  unsure (1)..(466): unsure at all n locations
atggccctcgacaagcgcaactacaagcagctggttgagaccacggtcgagctggccagcaaggtcggctcggcgctcatcatcagccgcattgtggaggacctgaaggacgagtcggagccctaccgcaagatggtgctcgagaccatcgaccgcattgtggccacgatgggcgcggccgacattgaccagcggctcgaggcnnnnnnnnnnnnnnnnnngctgtacgccttccagnnnnnnnnnnnnnnnnnnaacgccgccatcctgaacggcttcggcaccatggtcaccgcgctcaacaaccggggtcaagctgtacctgccgctgatctcgggcaccatcaagtggcgcctcaacaacaagtcggccaaggtgcgccagcaggccgccgacctgatctcgcgcatcgcggtggtgatgaagacgtgcggcgaggagaagctgatgggccatctgggcgtg

SEQ ID NO: 188021 - DNA, 567 bp, Arabidopsis thaliana landsberg
atgagtcctagtcagttgccttcagattcgatcaaagtagttcctggcaggagtaagctgagagttgaatcttcaaatccagttgccagagggaatccaacacctagagcttcaaaggtgaagctgctttcgccggaggaagctatgaaacttacatctggaggcaatggagtggcggtttctccagttaagcctgctcgtgcaacttctcaagtaccaaaacgtgtcccgccgagtcgaactcctgaagcaccaagacctgtcccggcttgtccaattcctgaaataccaagacctgtcccagctcgtccaacccctgaaacaccaagacctgtcacagctcgtccaacccctgaaataccaagacctgtcccagctcgtccaatttctgaagtacaaacacttgtcccgactcgtcctacttctacagcacccagccctgtctcggctcatccaacttctgtagcacaagccctgtctcggttcatcaacttctgtagcccaagccctgtctcggcttgtctaacttctgaagcatcaaaacctgtgttggctaacctgcagcag

SEQ ID NO: 188022 - DNA, 341 bp, Arabidopsis thaliana landsberg
ttcatctggacctccgaacccctttgcaagctttactcaacaatcaaataatcaacaaactgcattctccaataccaacgctggtggtctcaggtatcaacttttgtgggctttctccattttccaaattccgtaaaggggtgccttcatgaaaactctgtttccatatttctctctggccaatgattcctctacatagttcatctggacctccgaatgcctttgcaagctttaataaacaaccaaatgctttcagcgtcaacactcctcaacctgttccttcaggtactacttctaatgttaaactttgcttaaaggccaagagactcgccatcatctga

SEQ ID NO: 188023 - DNA, 447 bp, Arabidopsis thaliana landsberg
atgagaaccattagaactcagcaaatggaaaacgatagaatttatattttatcagcagcagaaaaaggttggtttatagattttattgacaaacatttacattaatttggaaaacaaaaatatgtccatctttgattattatcattttctgttaacaatgatcaaataattggaaagacaacttcaaaatctaaatcaagtcatccaaagtatcggaacttagaggaagaatttgatgatgcaatatagacataatattctgaaggcaagtataatttaaacattaatgattttttcattctgaaaatttgtgataagttattgttttcaaaaccattgtagatgatgtcgagcaaacgtatttatacaataacagtgatgaggaagatcttactaagtctgaatctgatgaagaaccgcctactatcaaccaagatccatttacag

SEQ ID NO: 188024 - DNA, 276 bp, Arabidopsis thaliana landsberg
gccaaagagaaacaaatggtgacagatgttctcagcttcagggacgatagtagtctcgaggactggcatgactttgaggttctaggtggtggagacgagcccaagattcttatcaagaagacgagtatgcaatccgtatccgagaggcggatctcggttgatccgcaatcgctattgtcgaggaatgggagcttcgatatgatagtctcacgtccgagagacatcgatgacacggtgtcgtctcagcaattggatcatcaaatgaagacgaagttt

SEQ ID NO: 188025 - DNA, 188 bp, Arabidopsis thaliana landsberg
gtttcctcgattctcgttctgtcactgacgccgatcgtgatttcattggtcccattcgtcgtgaagttgcctctaagattgatttagctttggaaggcctcgtttcagattcggatcggtacctgagcttttcccctttgagcctgtttaatttcgaagaagagagggttcgaattttacttgcttag

SEQ ID NO: 188026 - DNA, 187 bp, Arabidopsis thaliana landsberg
agtcttggtgttgtttatggtgatttagggacatctcctctatatgttttctacaatacatttcctcatgggatcaaagatccagaagatatcattggagctctatctctcattatttattcactcacactcatccctctcctcaaatacgttttcgttgtatgtaaagcaaatgataatggtcaag

SEQ ID NO: 188027 - DNA, 766 bp, Arabidopsis thaliana landsberg
atgttctatgaaccagcaaagatactgaagaaagattcacatttttgggcgctgatttatatcgctctcggtttaaccaatttcgtcatgatcccggtccaaaactatttctttggaatcgctggagggaaattgattaaacgcatccgatcaatgtgttttgataaagtggttcatcaagaaatcagttggttcgatgacacagccaattccaggtactataactttatatatataactaaacgtgtattttgtatgttttgattctaatatttatttgcgttttgttacagcggtgcgattggagcgagattgtccacggatgcttcaacagtgaggagtttggtaggagatgcattggcgttaatagtacaaaacatagctactgtaaccactgggttgataatagcgtttacagcgaattggatcctagctctcatagttcttgctctctcaccatttattgtcatccaaggatatgctcaaaccaagttcttgactggtttcagcgctgatgctaaggttttaatatagtggttacaacatttttttgaatatatcccggtttagtcgcgatttcgggtttactgatcgattttttttctggtttaggcgatgtatgaagaagcgagtcaagtggcgaatgatgcagtgagcagcataagaacggttgcatctttctgtgcagaggagaaagtgatggatttataccaacaaaaatgcgatggaccgaagaagaacggtgtccggttaggtcttttgagcg

SEQ ID NO: 188028 - DNA, 240 bp, Arabidopsis thaliana landsberg
gctgaacaatatccgtatccaattgtagatccagatccatcgatgcagcatccagatcggattcatcgagtgaattacgcgcatcgacgtcatcgaacgataaagctcggcgtaagtgagtgaaggtctgtcgcgatgacggcgccgctgttaaagataagacagtagaacgggaagaagatgcggcggcggagatgcagctcactggctcagaagcgatcggagtagtgggaatatcag

SEQ ID NO: 188029 - DNA, 63 bp, Arabidopsis thaliana landsberg
atttttcgcaacagagagagaagtcgaagcttcacgatcgtataataatggcgacggcttcag

SEQ ID NO: 188030 - DNA, 25 bp, Arabidopsis thaliana landsberg
gttatataggtctagacgattttga

SEQ ID NO: 188031 - DNA, 470 bp, Arabidopsis thaliana landsberg
atgatgaggatacaaaaaatgccaaaggatgggaatgaaaatggagacaaaagtgaaaatggtcttactactcatgaaaagcttatttggggagacgttaaggatcttgtatcttgcaagaacaaggagattgaagagtatttgtttgtcaaacatgtcatgaaacctttgttgggtcacaaatatgttactcctggagtaagtctcccttgccatgattgtaacacgttataacggttacaagaatctccaagttgcattaatttaggatgttttaaaggttttttgaccttttagttttgatgatttgggaatgttgtagatttgccttcctgtagaaaaggagtttcttgagtctgttaagaagatagtaacgtctcagcgtcattcttggcgagctaatacactcagtgtggatactaaccgcagtttcgcgcttctcatggatgatttgaccattttctcccatg

SEQ ID NO: 188032 - DNA, 459 bp, Arabidopsis thaliana landsberg
atgggggaacgccaaccaatattcatggtggtgcattacctatggaagataaacggttatcatcatcttcatcatcacgagatagtaaatcagctcactcgtcgacccaagcatcatattatcatggccagcatcaacaacaatcgcatcctcattatacgccaattcaatatcaacaacatcattcctcgtcatcaggaggaggacaatattatcatcaacatccatcctcaatcgttcctcctcaatatcatcactcgggtggtcaagttggtcatcaacatcaacctcatcaacattctcaggcaggcattccatatcaaggctatctccctcctgtacctcatactcatccatctcaacaaggatatcatcaacatcaatctcatcaacaacattctcatcatcatcaatcctcaacaggttcaatatcgggtggtgttcctcggccatcttcag

SEQ ID NO: 188033 - DNA, 327 bp, Arabidopsis thaliana landsberg
atggctcaagaaattatacggagaagcgaaaaaggtattcatgacgctagaaaagtagcagaggccgttgagaaaagtgcggatcttgaagggcaaataggtatcgactactagttgttggcttattattgtaactttttgatttcgagcttgtttacactttgtaacacagccgcactctctcctccctcagagcccgccgagccattagcggaccccaacgtaaagggggatgacgaaatcagaaaaatggccaaagctatcatggacaaagttgttgatcaactactaaatgaaggtgcagaagtagttctaagggaagattag

SEQ ID NO: 188034 - DNA, 382 bp, Arabidopsis thaliana landsberg
cttttctaatttacaaacgaaaaaaatagaaatcaggaacgatcggggtcctacacaaaggacacgtcatcttatcgtcttggatccaacggtcaatacacgtcttgtgataaacatgtacgcaattcctcaaacacccggacttcgtcaccgccgtcgaactcatccttggcatatccggcagctctccggcggattaacccttgatgatatatcctcgaactttgttgccggaagcatatcgtccatcggaatcttgtcggtgatagtgctccctgaagatgccgaaccaaacaaacgacgaatatcaagaaaagaacgaactgatttgataaaatcattcaagataactccggcgataataactccggcgccgctataa

SEQ ID NO: 188035 - DNA, 1498 bp, Arabidopsis thaliana landsberg
atggtggtgaagatgatgaagtggcggccatggccgccgttagttacgaggaaatacgaggtgaagctttccgtgaagaagcttgagggttgggatctggtgagggaaggtgtaccggagaaagatagattaacggtggagattcgttggaaaggtcctaaggcgacattgggatctttgagaaggtcggtgaagaggaatttcaccaaggaagctgtgggagaaagcgatgtcgtttcatgggaagatgaagagtttcagagcttatgttcactcacttcttacaaggacagtttgttttatccttgggagataactttctctgtcttcaccaatgtaagttttaatcagtatccgaagatttaaaatttaagttttagattcaaatgttgaaactttggaaatggtgaattaggttgtagatgaaaccctagctggataatcatcaaatcatgagactctttgaatttattggttgtaagattttgataccaattaatgtctcaacctgtttgattcagctgattctaaagactttaaactagaccttgataagattccttctattgtagaggttgagagtataggtaattggttctgtttgttagtgtcatcctcaaagataaagaagattgatatttgattttgtttctagggaatgaagcaagggcagaagaataaagctcctgttgttggaacggcatttttgaatcttgctaagtacgcgtgtgtgaccgataaaaaagaattcgatataaacataccacttacgctctctgcttgtgtggcctctgagacacatcctttgctctttgtatggttacttctctctttagacacttctctactttgttggctggatattggttttttgacctttgagaatctcttgttcctttaggtatcattgagcctgcttgagcttagaactactccagaaacatcagactcggcagcacaaaccgcggttgtgcctttgcctctcccatctccatcgccacaacagcctactgaaactcactcagttgagaaggaggatgtctctgcaatcaaagctggtctcagaaaagtcaagattttcacagagtttgtttctacaaggaaagccaagaaggcttgcagggaagaagaaggcagattctcaagctttgaatcatcagaatcgcttgatgatttcgagacagattttgatgaaggcaaagaagaattgatgagtatgagaaaatctttctcttatggacctttgtcttatgcaaatggtgtgggaacttcattaaactgtggcgcgaaagttagcgatgaagacgaagattgggtttattatagccacaggaaatcagacgttggagcaagttgctctgatgctgaagattccgctgcgggtttggtgtatgaggcatcactgcttccacggcgtagcatattgccatggagaaagaggaagttgagctttaggtctccgaaattccaaaggagagcctttgttaaagaaggataa

SEQ ID NO: 188036 - DNA, 164 bp, Arabidopsis thaliana landsberg
ttccaatttttaaactaattagcaattcttacaatcaaatggattcactcgaaatcaagggatcaccaaaaattatctacaaattgaattcgctagagtaccgtggtggaaacagcgacgaagctctcgtgcccgtggtgattgcgaaggaaccatggatttag

SEQ ID NO: 188037 - DNA, 65 bp, Arabidopsis thaliana landsberg
gcaccattcgatcaaccgattacgacgtggatgtggaacatcttaaagtatctcgttgtcaataa

SEQ ID NO: 188038 - DNA, 1728 bp, Arabidopsis thaliana landsberg
  unsure (1)..(1728): unsure at all n locations
atgacaaaatcaagaataaccggagctctgtctcagcttcttttaacggctgtgatctctccgattttggcggttgcaagtttatcagacggtggagatcatgagaggtttaagagacgcgatcctctcaacagctttagatattacgacggaggtttcaatgttcgaaacaaacattattgggcagttagtctctcttcttctttcattttgtgatattataacgttaatgtggtaactaagtgttaacggaatctcaggctactgcatttacgggaatccacggttacgccgtcgccggagtgttgattattgtcggtatatgtttgggactttacgtagcattctccgacaaaagaagacgtgtttcttccactcgccgacgatatctcgaccgttattatcttcctctgttcttacttctcctccttttcatgtttctctctgtgtaagcttatgaagttttaaacactctctcttaaacataatccacgtagattttttatatgcgtctatcaaatacagggtaacgacagggatagtgatagcagcgaaccagaggtcgaagaacagaacagaggagatgaaagaaacgatagacaaagcaggagaagatgttaatcaaaacattcgtacagtgatagtgtcgttaacgaagatacagtacttgttgcttccatacgatcagaacacgactcatcttctcaacgtcaccactcatcgactcggcaaaggttctcgccttatccaaagcttccttcatcataagggtcgttccattgatctcgccatcaaaatctcgtacgatctaacaacaactcatctttttgtttttcctttgaaatcgtctttgattgttctgctctgttttttgtctcaggtatgtatctcatcttatgattgcatcgaccaacttgttccttctgcttctagccttttgtgagattatttaacattcactaaaactttcaaaatgttatgatcttagcctaattgtaatggtcttttttgcccttgtctttgtctcagtacctctattgcttcactggcaccctggattcatcatgtaagcaatgcacaatcacttcaaacattgttcttgttcaattttgttttttaaacttgaaagattaaaaattcttcgtccttcttcttacaaagggtgatattcttgtgttggatcataacaactctttgttgggttctaactggattcgatttctttatacacacgtaagtaaagcaagtcctaaaattaaattcatctacatgtttccaaaccctaaactcctcaattttccactcacgcagcttcgcagaagacctttgttcagctttcaatggtttcgtacaaaacccacgaaatagcacactgactaatcttttcccttgtatggatcctcttcattctgataaaaccctaatcgagataagcctgatgattcataactttattacccaggtattttgattaatccatacaattctttcattcaaatagaagttcaagaactctggtaaactctaacatcctctgcttcttgttctcagttaaactcaaaagtagcagagtcaatgcgttctaatgcgttgactgatcggagcaatactgtctcgtggnnnnnnnnnnnnnnnnncatatgcgatccgtttgtcggacaacagattaacagctacacaccacaaagctgctccaatggcgccattccaatcggcgaattcccaaat

SEQ ID NO: 188039 - DNA, 73 bp, Arabidopsis thaliana landsberg
attttccgggttcgtgaaactggatgtggaagaggctgatcaagggctcatcgtgctttgtgggctgacatag

SEQ ID NO: 188040 - DNA, 346 bp, Arabidopsis thaliana landsberg
atgaatatggatataggaacgagttacaccgataggacgtattttagtgagaatcatgaagaagtgggtaatgttgtagaagatccatatgtggatatggtgaacgatgcatttaattttaacgtggggtatgatgataactatcatcatgatgatagttagccctgtaacggagccggatatccggctttttcagcgtatccggatccgtatccggctccgttggatccgtaattttgttatccgtatccggatccgtcaataccggatattcggatttcggatatccataaaaaaaaatcgaatatccgtggatatccggatccggattcatattaaaagttga

SEQ ID NO: 188041 - DNA, 444 bp, Arabidopsis thaliana landsberg
atggctgatgaccatacgagaatccgcttggcgccgacgcgccggcaattcctgaagacggctgccgcggttggcggagcagcgcatgcttcgacgacggcccggttcggagaagcgttcgcgcaggatgccaacagcacgctggtgatcgcagcgccggcgaccccgcagggcctcgacatcgagttcgacgtgagcctcggctccatcgattcgcttggcgctctctgcgaatacatgctcggctacgagaagatggaagatccaaacgctcccggcgtgctgcgcgaggatacgggcgtccacgccgacaagccgaacggcctcgccctgcgcggtcgcctggccgagagctgggaagtggcgcccgacggccgcaaggcgaccttcaagctgcgcgagggcgtcgtaaccaactggggcaacaagttcacggccaaggac

SEQ ID NO: 188042 - DNA, 675 bp, Arabidopsis thaliana landsberg
atgctgagaacttatgcggatcttgttgctggggaagatggttctgtcttatgggctaaagacattgttgagggacttgagtctatgaatgttgcaaaaatggatgattttccgagtatgaaaacttctagtagaaaggttttgattgttaatgaaggctcaggagatgctcttgcattacttggtaaagattgattttggatatacagtttaggtagtgaaccaaatcaatgtggaagaactgaccaagattatcgtttacgcaggtatgtttcgattagtgcagcatttgtcacaggatcatttactcgggaagaagaggccggttaaatttgtagtggatgctggtactggaacaactgctgtgggtttaggagttgcagctatgtctttagggttaggctctgatcacaagatttaccaatactctttgtgtatgcattttatctgattttcgagtctttaagcatcttggttaccagcttacgtatacattcttctcaggcttccatgggaaatcaattcagcgatgctagctgacacactcaaaaattacaagagacatgaagatcgcttgatagcagaatttacgaggcagttccctagctcagtcttctgcagcggcttggatatgaatcaaatgatcaagtggatagatcgtcaacacccgaggaa

SEQ ID NO: 188043 - DNA, 356 bp, Arabidopsis thaliana landsberg
tgaacgacctgaatggcgttggcagcctcaaagccctgctgtcggaagcggcttttgccggtaaaactcaggcgctgaaaaacaagctgcgcaaattcagggtacgcgtagtgcttaccgctcatcctacacagttctatcccggcacagtgctcggcatcatccacgatatgggcgaagccattgcccgcaacgattttcataccatcaatcaatacatcgaacaactgggcatcacacccttcttcaacaagaaacaacctacgccttatgatgaagcgctgaacctgatgtggtatctcgagaacatcctttaccagtcaattggtaatatctacaacttcatcaacagggaa

SEQ ID NO: 188044 - DNA, 327 bp, Arabidopsis thaliana landsberg
aacattgcaaagaagcgaaaaggcggtagtaatagtagtaatagcaataatggtgtaagagaagtgttggaagagtttatgagacatcaagtgagaatggagagcgagtggagagaaggatgggaggctagggagaaggaaagagcagagaaagaagaagaatggagaaggaagatggaggagcttgagaaggagaggttggcaatggagcggatgtggcgggatagagaggagcaacggcggtcgagggaggagatgagagcagagaagagggattcacttatcaatgcattgcttgctaagcttactagagatggttccctctaa

SEQ ID NO: 188045 - DNA, 167 bp, Arabidopsis thaliana landsberg
attttcttcttcatctctctcacacaaaccccaaaaacgacagcgttttcaaaacccaaacaccagtcgacgcttttggaccttcctttcttcctccttgtctctctctgattaaccgatttcgatttccccacaatgccaaaagggttttgattctctcttcctaa

SEQ ID NO: 188046 - DNA, 210 bp, Arabidopsis thaliana landsberg
atgatggatctaaacacaagaatccaagaagaaccaagacattggaattcctatggccatgcaactctaattgacctcaatggatcagtataccaagattcaagggatcagttcacttcatatcaagtccataatgggaaagcagaattgcacaagatgacctcatctgatcctcctgaattatccactgatgatctgcagaaaattcag

SEQ ID NO: 188047 - DNA, 482 bp, Arabidopsis thaliana landsberg
  unsure (1)..(482): unsure at all n locations
atggagcaggcgggctgggcttcgtcgcgcatcgagaaggtgctgggcctgaactgnatgcgtttctacgacgacgtctggagcgtctgaccgaccctattgaaacccactgcatgccaccccccggagccttctcgttccggggtttgcacgcatgcgcccaggagccgaaactcatgcaacccctagtgcccatcgaggtcgacgaacacaccggcgtgtggaccaccgacacgctgcccatgctgtacgtgccgcgccacttcttcgtcaacaaccacaccgccgtggaagccgcgctggggcgggacaaataccaggaaatcctgtaccccgccgggcacaagtcggcctactactggtgcgacaaggaaagccgccggcacggcctggcaggcatggacgtgttcgaacactacctcaagcgcctgtcgcagcggggctggaagcagttccgctttgaatcgcacgatgcgccggcc

SEQ ID NO: 188048 - DNA, 489 bp, Arabidopsis thaliana landsberg
ttccagcagcagcagtgaaggcgcgtctacaagaggtgtacgccagattctcatccaatggcaaggtcagcccccgttagcagcaacatgggaagacatcgacgacttcgtccagcgttatccaaagttccagctcgaggacgacctgttaatcgagggggggagagatgtcatgtggggcaaacggtattcatgtaagcctgggataagggatcgatcaggccagcgcaccagggtcgatcgtcagggataagtcatagagtttagtaggagtcggtttggataagtacaggagaataagattagatgagagtatttaggagacttgtttagcatgagggctatatgtaagtcgcatggcaacagagatgaattaggcaataaatcatattatcttcctcacctcctctccagcaaaaatagttagtcgaggggcaaaacctcgcgttgccaatgtcgggggttacgcttcacagcaagggtcacagt

SEQ ID NO: 188049 - DNA, 366 bp, Arabidopsis thaliana landsberg
atgatttcgagatcatcgacggggaacagtgcctcaatgccatccacgaattttcgcagggtgcctttcctctctttgacccaaaaagggacgaggcagtcgctcgatttccggcgttcattcgcgacgccccttgcccttgggccggaaagcggatctctgaactgtctgaggaactgcaacaccagtttaagtcgacgaagctatctgtcgcacatgttgagacggaccaagtcaacgaagtcagggacctttttgtcaggcttcagagcggcctgacgctaaaccatcaagagacgcgggacgcctggcccggcaacttcaccgatttcatcttctgttggggggcaaaccagaactacctcg

SEQ ID NO: 188050 - DNA, 193 bp, Arabidopsis thaliana landsberg
cgccaagtgccatggagaaatgcaagaacagaagctgaggagaagacggacggacggaagcttgcatctcagcaccaccagggctggatggatgcaagaagaacaaatctccatggcttttgcagctctgctcgtctctgtatcatactcgtcgtccctgcccttcaggcctctgtatctccctgatcaatga

SEQ ID NO: 188051 - DNA, 345 bp, Arabidopsis thaliana landsberg
attcagaagaagcggacgggaaggataccggaactggaatctacgatatctcagcttcaagaagagcttaagaaggcaaaagaagagctaaacagatcagaagcattgaaaagagaagctcaagaagaagctgaagatgccaagcatcagttaatggatatcaatgcctcggaagattcaagaattgaggagctgcgtaaactctcgcaggagcgagacaagacatggcagtctgaacttgaagctatgcagagacaacacggaatggattctaccgctctgtcttctgccattaacgaagttcagaaactgaaatcgaagctctttgagtccgagtctgagtag

SEQ ID NO: 188052 - DNA, 151 bp, Arabidopsis thaliana landsberg
cttctggtttgggagatgcatcaatgaggcaattatatggtttggatgatccttgggaagacaacaaaagatttttcctcgaaaaattttcgacgtgcaagtttgaaaaatgttatgtgactagtcggacagtatttacgataggagaagg

SEQ ID NO: 188053 - DNA, 169 bp, Arabidopsis thaliana landsberg
gtacaagatcattggaggtattgctaaagcgattatatatcttcatcattcacgactctcaatcagacattgtgacttcaaagcaggtaatatcctcatagacgctgaaatgaaatccaaagctacagattttggattggccaaatttttagaatggaccaaactttaa

SEQ ID NO: 188054 - DNA, 595 bp, Arabidopsis thaliana landsberg
  unsure (1)..(595): unsure at all n locations
atgcactatgagcccaaatccatgccatcgtcagctaccacggctccgtccttaggagaaggtgaccaagcagcaagcctgaaccatgtcgttgactagggactagtacctacaggtaaagtcatgcatgtttggtaccagtactccatgcatgaatttaattttatcttctggtatgcagtgtacgtgtttactttgnnnnnnnnnnnnnnnnnnnnnnnnnnnnnnnnnnnnnnnnnnnnnnnnnnagtggataggtggtgctcgcctgagtggaacgaggcgcacaacactagccgggaacggcgtctgatgatacaaggtccctcccaccaccaaggctgccgtagcctaggacaatatgcagaagcatgggtacaccctcttttttatttaagtatataacattggattagatattatttctaactatctcgttggttttcttgcagtcggcatcacatggtggccagccttgctccatcttctcggcctatgctatggccataagggcaaggcgacgttcgacgtcacctacaacccggatgacggcctgagcgtacagcaaccctgccgtctacagccgccatcatga

SEQ ID NO: 188055 - DNA, 104 bp, Arabidopsis thaliana landsberg
tacaggatattgccgatatgaccggtgttccgcggatggtcctgaatgataatgacggggtggccacctacaaggagaggcttcgacctactgcgaagagctaa

SEQ ID NO: 188056 - DNA, 450 bp, Arabidopsis thaliana landsberg
gtggtattcagtgatgtctacatgttggatgaggaaatgaaatggaaagttatgccgccgatgccaaaaccggactcccatatcgaatttgcttggaaagtcgttaataactccattgtaatcgttggaggcacaacagagaaacatcctgaaaccaaaaagatggttctcgttggtgaaatcttccagttcaacttaaatacactggtaaaatcctaaagccttcttactcaaacctgtccaagagacaaagctaatgattttgcctttcctctacagaaatggtatgtgattgggaaattaccataccgtgtgaagacaacgctggctgggtattgggatggacagttatacttcacctcaggacaaagagacaaaggtccagatgatcccgccccgaggaaggtcatggcagagatgtggagaaccaaattgatactcaacccatga

SEQ ID NO: 188057 - DNA, 466 bp, Arabidopsis thaliana landsberg
atggctaacacaaaatataaacttgacgagctcgaaaagggcatgggtttggtcatgtacgttttccacaaaatgcaaaccaggttgggtaacaaactttgttgtaacatccccaattccataattagtaattggaccattttgtttagttaaaagaaaacaaccccaataagcccaatatcttattccttaaacgacataggtcatggtcgtttgtgtgtagagtatatatatacatgtatattacgagccgtcaaagagaaacacaaacctaattcgtgtatgaacagaccagcacattgatctttgagtcttgaaaagctatattagtgttcttgatgttgatgtcgttcgctcatacgaaggaagagatggcggctgcgaagttgttgtactgttaagttgtcattacggttatgtgttgcgttgtcgtcggactcgtgaggaggagaaacaagagtcttga

SEQ ID NO: 188058 - DNA, 322 bp, Arabidopsis thaliana landsberg
aagggcggggctcttagcgccggagcaggtgtcggccctcgcggctgtcagggatgaggcgggcactgtgtcccgccggctgaaggaggtgaaggaggcactaagtcaggtccgttgagctagacttcggtgtttttttcggctttgctggggccgcggtcttacgtgtgttttgcaggcggctgacttcgtcgaccgcacagcatcgggggcgctcacggcagttgtgtctgccgaagtcgagagacttcggacgcaacatgctgacgccgtccgtgaaaaatcagccaccgacagtaagtgccgcaaggtggcggacaag

SEQ ID NO: 188059 - DNA, 220 bp, Arabidopsis thaliana landsberg
gtgaaaaaaggaagatactagaagaggagaaggggattatcatccggtttgtcattggtcacaggtgaagttttgttttctttagattctgatgtgagtttcattttggttctctgtatactgaagatgtgtgtcattgttctatagcgccacgaccgggggaattctagatcgagctatagaagctgaggacaggaagcatggagatttcttgaaactg

SEQ ID NO: 188060 - DNA, 337 bp, Arabidopsis thaliana landsberg
atggaggcactgactcagactgttaaagggttgaacaacgatgcctgtatacagaagtgagtgaaaagacaagcgcatgttttattgacattccaaagactagaggtgtgtcgattataggatcagattcgtgcgttgatacacaaaagtagagcgacacggttgggagatggccaatactgtgagcttgaccttaatgcagaactgggtctcaacttacagaacgcataagtctcttgctctcttgtcaatcacacatattgggacatcatgtgaggaatgcgacactaacgtgagtgtttgtggaagatcagactatgtcgagacaacaacacta

SEQ ID NO: 188061 - DNA, 1168 bp, Arabidopsis thaliana landsberg
atgcccgaagcacctgccggcatgcatgattacatcatacgacatgcttcggggaaaaagctatctgaggaagaaactcatgaggccaaccattatgcaaaggagctgaaatatccgaagggggcagtaatattcaatgggacaaatgaagatgacttcttatacttgcctgcctgataacaaagagctatctgtctgccgagagatgggaagaagcataggctttccgacgttagaagacgggctctcagtgttatcaaaagatgaattggccgacagcttagcatacaacaacttaaaggtgaaagaataagatttttgtacttaaaaacaaaaaaaatcgtttgcttatacttaataccacacccctttgcagggccttattcttagcaacgccctcaaggcgcaaaaaagcgctgaagacgagggatataccatggccttgaataaccttcgttctgaagtaattgaactaagaaacgaaggtcttgaaaaagacaaaatattaaactcattgttgaacaaaataaaagaagacgaggctatttccaaaggtcaagctgaaacgcagatatgtgaaattgaaaaccttcaaaagcaattggccaaagctaaattgaaatgtgctattgccgaagctgaccaagatgccagtgattactggaaaaattattgggaaaaaacagttgtagaacttcgctcctcaaaagaaagatgttatgaaaaatctgtagaatgtgtgaaaaagataaaaactagcttcgccaatgttggcgcatattcaagtgaagacaacttcgtacggggcgatcccgaagcccaattgaatggatcagcggcgaggccgaagcctttgaggagattttaaatgaccgtggagacgtctgtgccttctctggtgcaagaggagtcgcagctattttggagaaagcagggtgcgaacatgtgaaaattctggcccaagccgaagatgctttctctgttaacgatacaaaagacccctcggccgaagcaagcttaactggtggaaaattcttcactgacatttgggaaaacggcggccgagggatggcccacgaaataataaagaagagcgaaaaagatactcatgatgctagggaagcaacaaaagcggctgaaaaagctgcggaacttgagagacagatag

SEQ ID NO: 188062 - DNA, 511 bp, Arabidopsis thaliana landsberg
tgaacttacgctgacattgaactcgaaccatctggcgggagcaatctacgattgctttgtcgcgctcaatagcggctctccaattcttgtcacggggcctgcgtggaactccgcggtggcgggttctggcgctcgcggcgctggtgccggtacgaccgaacttgagcgtgtgaacgggttgctcgtcaacaagtatgctcttgcccaagcccgcaacggcgcgacgacctatagcatccttgcgcgtcaggcgacctacgttggctcgatctatattgatggcaccaacggtcagatttcggcgcaccgcacggcgggccagtcgcgtaaattcggcgtgtggaattgctacaaccggcgcaagattgtcctgaaggtcacagattccacttcgacatggacctacgacacagtgacggttcggcaatcgaatgccgcgactggttacaaagcaacgccgttcatgggcttgcaggaccggccgatcccggcattctttgccagctattga

SEQ ID NO: 188063 - DNA, 231 bp, Arabidopsis thaliana landsberg
agagagaagatcgagctgctcgagttgaaggtggttatggtgatggaccatctgatcgtgaaggtgacagcagcgaggagtctgattttggagatgacctttacaagaatgaggaagacaggcagaagcttgctggaatgactgagtttcagagagagatgattctctctgaacgtgctgataagaaaggtgataagaacttcactgagaaacttaggtccaagagagaaa

SEQ ID NO: 188064 - DNA, 1200 bp, Arabidopsis thaliana landsberg
gacagaacgggagcgtcacgttgacgcccaaagtcagccaaccaaggctcccggaacgaatccgttcgcccaagtcatccgaccgcgagtgtcgttcctcacgaacgcggcctaaggctttgcaacccgtactgcgatacgtgagttgtgatagtccggacaggactaattataccatgggagacacgtggttttataaaatcagagctttattactattaataaaaatatcgagtcttacatactatacgcaaaactatatcttgcaaaggcaaaacaaatctacaccggttggcctaacgtcctttgccccctaaggtctccctactaaaggttgcctgcaaaagagagtaagggatgagcgctaatcgctcagtgaattcaggttcccctaaacatgcaataattccccacccaaacccaaaataacaagcaacaagcaaccaagcaatgcaacaatcaaagttgtatatactccacggagtatacacaaataatgcgcaacgaaagtaaatatgcatgcaactaactacttaaccactaaacctagggccccgcgtattgatcttcccttcccttagtcgtgaacacctatacacgtagccacaaaggctaaacgagtatagaacatcactaagttccgagtcccatattgtggtggaaactcaggctacatcgtcatgcagcagcactcggccataggttgcgagcccgtcatctccgagtcttcgtaccattcatgtgtagggaactagccactatgcacacactactaggatacggccttagggaagcatcacatacgcaaactagactaacatgcatgaaactaattcatgcaacaatcaatcatgcacaagcaaatataaaccatggagacttaacctcacatagtttatcaacaatcaaccacaataaatcaagcaatcacacaagcaagatttaacgataacccgattatatgacttaacgtataaccgaggatccaagcaatcaatgtagaattagcacctaatccattctagttatcaaacaattaaataaacaagttggtttacatgcgttcattgaacaacatgcaaccacatgcaacacgcataacctgaactcaccttggcttagctctcaggaaaacgactactctcgactccctatacggactacgatcagaccaagctttctccgacggaatggatgtaa

SEQ ID NO: 188065 - DNA, 75 bp, Arabidopsis thaliana landsberg
gtcaagattcaagaagatcaatttaaaaaagaaagtaaaaagcgtgcagctcttcttgcagaccctggagttgag

SEQ ID NO: 188066 - DNA, 81 bp, Arabidopsis thaliana landsberg
gctttgactttaaaaatccgagctatagagaatttggttgtaaagacttcggctgtagaaactttggctattaaaatctaa

SEQ ID NO: 188067 - DNA, 285 bp, Arabidopsis thaliana landsberg
atgcacgagatcttacccctaaccggcgtgccagagtcgcagcccaacgataagacttggtccgccgtgaagaagaagctccgacgagaaattaaccggacctcccagccaccagagcacaatctccggccaccgagagcttcacagcgaagcgcccgccgcccccaactccaatttcaggcgacgacggaccgctggtggcggcgcgatggattccgccgcgcccacacccgcgacgaaatcgcccacgataccgccaacagtgttccaggggtttgggggtgg

SEQ ID NO: 188068 - DNA, 31 bp, Arabidopsis thaliana landsberg
atgcagggtcgggtgggaatgcgtttccaag

SEQ ID NO: 188069 - DNA, 117 bp, Arabidopsis thaliana landsberg
atggatgctcaacaacggagaactgatattcctcgagcaccaccggtcggagaacccggtggcgatatatcttcgattctcattgctttcggtgttttcgctacaatcgccgccttg

SEQ ID NO: 188070 - DNA, 336 bp, Arabidopsis thaliana landsberg
aagaaatccaagactgatctcaagattcttcgattggttatacttctctatatgctctggatgcctcttggccgtaaccgttgtgttgtggatcgaggaaaagaaagggtggatatggagcttcaatatatccgttgggattctagcgacggcgctgtgtatttttgcggtagggctaccgttttatcggttcaagcgtcctaatgggagtccgttgaaaaagattgcaattgtgattatttctgccgcaagaaacggaaataaatctgatttggatgaagagatgatgcgaggtcttatctctatctacaagaacaatagtcacaacaagttaaa

SEQ ID NO: 188071 - DNA, 369 bp, Arabidopsis thaliana landsberg
atgaaacgcaagagatatgcatgggccgtcatggccgctgcagtgcatgccgcgaccggccatgcgcaagtcaacaataccaatgcagcaccggcgacactgccggaagtggtcgtcaccggcaatccgctgggcagtgaactgttcgaactcgcggtgccggtttcggcgctgggcaggcagcagttgttcctgcagcgcaaatcgactctgggcgaaacactgcatgaactgcccggcgtgagttccaccagcttcggccccaatgccagccgtgcggtgatccgcagcctcgatggcgaccgcgtacgcatcctgcagaacggcgcatgcacactcgatgcatcggcgctgagttatgaccatgcg

SEQ ID NO: 188072 - DNA, 376 bp, Arabidopsis thaliana landsberg
cgttttaacctggcagagaaaagaggcgtcaagccggagtggaactggttcaaaaataaagaggggatgatcaccttctggcgggacggcgtatgggaaaataaagacctggattgtatctggccggtaggattgagaggtacggatgattatggttatcccttcccgaaagggatgtcagagaaagatcagaccaaggtattcaatcatgtgatcgaaacgcatgtaaagatagccaaagaccttttgccctgcagcgagccgccggtttacacgtttacactctggagcgaaatgataaaaaaatatgaatcggataaaggggatttcagcctgcctgaagatgttatgattatatggtcggataatatgaatg

SEQ ID NO: 188073 - DNA, 85 bp, Arabidopsis thaliana landsberg
atgagttatatgcatcttatggaggagtattgtaagggacatatcagaggtatcacgtgcgagtccatgaagaagatcatgacaa

SEQ ID NO: 188074 - DNA, 1392 bp, Arabidopsis thaliana landsberg
atgcatcaactggtggcctgtaagttctgaaggttcgagtgatccttccacaaaagtatttttccttttattattttgttttgttgtattgaacctctaaaatctttatggttggtttatttcaaagtactccaaagctttactgtcaacgccaagattgccctgttgaactactccacccaccggaggattgcaatgtcaattcatcccttccattcactcttcaggtgcttgtttgcggaaacaaaacattacgaagaaggtttttacatgttctaactggtctctgttgcagatctgccgagttgaagatattactgttgaaggtctcattaaaggatctgtaatccaattccatctggcaagaacggtacttgtccgctcttctggaacaatatccgcggacgggatgggtaagccacatactcttttaagatgattctcctgatttgtgttcactttttgtccttcatacatgtaatgtgaaccagttttgagagatttaaatatgcacacaggctgcaaaggtggagttgggacaggtaggtttctgagaagcggtattgggagtggtggtggacatggtggtaaaggcggaagcggatgttacaatcatacttgcattgagggtggcgagtcttatggaaatgcagacctaccatgtgaacttggcagcggaagtggaaatgaagagtcaacggattcagttgctgggggaggaatcattggtaagttttaaatttcagatagtatcaacttaatcctcgttctaacatgattaattttgaactctaaaaagagaaaactgaagtaatttattgaccgcatgtaaagcttactatttctaatctggtttcagcatcttttcactatctctgtacagaagtgactggtttaacttcgacctgtttcctaccaatataccaactgtttctgaaatttatctctttagaataatatttttttctacaaacttgtgtagtgattagttcactttgacctgtttcctgcaacatactgactgtctctcaaatgtaactcttcctaataatttgttttctaccaatttgtgaagtgcttggttcacttgagcacccactttcaagcttgtcactggaaggctcaataacaactgatggcgaaagtcccaggaagacgctgaaaggcctaagtaattcaagtctaggacctggtggtggttcaggtggaaccgtacttttattcttgcgcacacttgagatagggaggtctgcgattctctctagtattggaggaaatggtagcctgaagggaggtggaggaggaagtggtggaaggattcattttcattggtcagacattcccactggtgatgtctatcatcccgttgccatagttaagggaagagtttat

SEQ ID NO: 188075 - DNA, 218 bp, Arabidopsis thaliana landsberg
cacccaagcaggaggatgatttggaagataataggaaggggaaaaggccacgtgaacgtgacgagaagagaggggagaaggagcggaaacgagacaggcatggtgatggaaaggagaggaggcgggacaagcacgagaggaggcacgacttggaggacagatcaaagcggcaccgcaaagacaagcagaagaggaggcacgattccgattctgattga

SEQ ID NO: 188076 - DNA, 285 bp, Arabidopsis thaliana landsberg
atgactggaaacccgatcccagtcaatctctctaaggagggttcttcgtctccaggtatttataaaattccttcttgagctaggattttgtttgattcatcgctttctgtgtttgattttttacatatttcctgctctctatagctttatttcatcatcggtctctggtgtcgaatttgtttccggctcttgtcaagtagtttgggaccttaataccttcaaatccgttatctcgtagggattacaaagaaatcacaacgagctgatttagaagaattcgattga

SEQ ID NO: 188077 - DNA, 1741 bp, Arabidopsis thaliana landsberg
atgcaggacttggtggatgtagatactggaacagaaagcgtaagtcgcgtcacttgatggatgtttcttattttatgtttatcccttttgtctccatacctgtgatcttggagttatgatgtaactaagcattcacaaagagaagtttatggagaatttcagattgtgagagaggttaaagctggagacattataggggagataggggtgttatgctacagaccacaactgtttactgtgaggaccaaacgtttgtgccaactgttgcgtatgaaccgtacaactttcttgaatattattcaggccaatgttggtgatggtaccataatcatgaataatctacttcaggtgaataaacagatccttctgaggttttcaaatattgaaaacagaaaagtatctatgaactattacttacttgttctcactctctttctttgtggagagcagcatttgaaagaaatgaatgatccggtgatgacgaatgttctgctggagatagaaaacatgcttgcacggggtaaaatggatcttcctctcaatttatgctttgctgcaataagagaagacgatttacttttacatcagttactaaagagaggacttgatccaaatgaatcggataacaatggcagaacacctctggtccgtcaagttcacattcttgttctgttattttcttctcatccaagctcttggagactataacttatgatctcttttttttttctggaaacagcatatagcagcatcaaaaggaactctaaattgtgttcttcttctgttggagtaccacgcagaccccaattgcagaggtacttgcttgttcagttctggtacttcccttttgatttcaggatttcttctgaagtattgagctttttggtttcttcgaaatgtaaacgcagacgcggaagggagtgtaccactgtgggaagcaatggtggaagggcatgagaaagttgtaaaggtactgttagaacatggcagtaccatagacgcaggggatgtgggtcattttgcttgcacggcggctgagcaaggaaacttgaaactactaaaagaaattgttcttcatggtggagacgttactcgtcctagagccacaggcacctctgcgctccataccgctgtatgcgaagagaacattgagatggtaaagtatcttctggagcaaggtgcggatgttaacaagcaggatatgcatggttggacgccgagggatcttgctgagcaacaagggcatgaggatattaaagccttattccgagaaaagttacatgagaggagagtgcatatcgagacaagttcttcggtacctatactcaaaaccgggatccggttcctcggaagattcactagtgaacccaacatccgtcctgcatcaagagaagtgtctttcaggattcgagaaacaagagcaagacgtaaaactaacaacttcgataactcgttgtttggtatattagcaaatcaaagcgtacccaagaacgggctagctacggtagatgaaggcagaactggaaacccggtgagagtgacgattagttgtgcagagaaagatgacatagccgggaagctggtactgcttcctgggagtttcaaggagttgctagaattgggttccaacaagtttggtattgttgctaccaaagttatgaacaaagacaacaatgcagagattgatgatgtagatgttataagagatggagatcatctcatctttgcaactgattcttaa

SEQ ID NO: 188078 - DNA, 288 bp, Arabidopsis thaliana landsberg
gtttgtccagtcaacgactctcagaactcagatttgaagcaaaacatcaatcgtagaaggaaggaagaaagaaaagatgggagctttagggaagctaatcgacgtagctctcttcgtatactttgtttcaatggcgataattgcgccgctcatcgacgggcaaacctcacttccttcaggaatatatccagcgtttctcaccgatctgaaaagcaagtacattgccgattttggagattacttgctcatggagaagccgcatttcctagttggactcgtttggcatga

SEQ ID NO: 188079 - DNA, 472 bp, Arabidopsis thaliana landsberg
tacggttattcgaaggaaaaataaacttattgaaagtttaaagaatgacgatgatacatgggttacgtatcctaacgagttggagagcttggcggttgtttattacacaaatctctactctttggataatgtttaccagtcctccgacaggttgcctcatgttgggtttgagaaagtgacacgggaggaggtgttgaatctcaaggaacctttctcagcaagtgaggtggaaatttcgattagaagcatgggacaatacaaagccccagggcccgatggatatcagccggttttctatcaaaattgttgggatacggtggggagttcggttatccgttttgtgctaaacttcttcgagtcgagtattctacctcctgaaacgaatgatgctttgcttgttctaattgaaaaaattgccaaactttctctaggttatgaacccacgatacgcgtggatatttttaaactctag

SEQ ID NO: 188080 - DNA, 356 bp, Arabidopsis thaliana landsberg
  unsure (1)..(356): unsure at all n locations
atgtctcaattgcagcgaagcttatcgatcgaattgccttcactggttcctctgcaacttccatctcggatgtacgttcctaatgttgtgcaatgatccaaattgnnnnnnnnnnnnnnnnnnacattcttatctgtttattatcttctacattgtgttatcttttgacatgtagggagactcatctatggtttattcgaccagatgaagtgaagagtacatctcttctaaaacactactctcaacttctgtcaccaaccgagaaagagaaagttcttcagatgcgaggcgatgagcttaagaagaatgctttgcttgctcgaaccttggttcgggccaccattgctagatgtatg

SEQ ID NO: 188081 - DNA, 304 bp, Arabidopsis thaliana landsberg
atgccccggaggcggtccttgcagatcccgcacttggtgcaggcgcccgtgaccctggccaccgccgcgaccgtggcggcaccgccatcgatcgccgtggtcacctcgtcgcccgtgacggcccggcagatacacgcgaacacgccctcgtcgccccttccggccagttgatgataggtaaggctaacctaactttcactgccgcgtccacagtgacgcgagtcacgttgacggccggcgtccgccggtcgccttcggcggccggttagccgcagttggcgcagcggccggtgactgcgaagcg

SEQ ID NO: 188082 - DNA, 327 bp, Arabidopsis thaliana landsberg
ggacaccagacggtgcttaccggaattatagaagattatctttataaatgccaaatttcacggatcgtctttgacaaaatcaaaaggtttggtcggtgttcctttgagtttttggttaaatgatttttttttttctgtttatcgtttacacacgaatattgtccaattagatggtcaagactcaaaacctctagctcactattagactatatttcttttaggttattttccactcgatttcaacatgtcataaccctcacatcttggaagtcccgaaaaactccaagatattcgaatttaaaatttgatatagacactgctgtgggg

SEQ ID NO: 188083 - DNA, 466 bp, Arabidopsis thaliana landsberg
atggcagatgacaccagcacagtacagatacctggagacgacggtgatccagatgaaaacatgaatgcaacggagtcagcttccggagcacttgcggattctcagaaggatgaggcaaattcaatggagtatgataataggaagagcacaggcaggaggcgcagaagcaaaaagggcaaggataagaataaccagtgagaattaaatgaaaagagcagtgaagcggatgatactcaatatgtaaatcgagacatggagtcccaggattacaagaagggctcccagatcaaagaaatccaccagaggaatgaaaaccaaggtaaaatctttctccccttgtagcataactaaatcacatatttggtgtgataattcttgaaatcatatattatgtcaaaatgcagggcacaacgaagaaaaacagtagcaatgaatgtgatagatgtggagaggagtttgagtccag

SEQ ID NO: 188084 - DNA, 162 bp, Arabidopsis thaliana landsberg
  unsure (1)..(162): unsure at all n locations
atgggtttatcagctgagtccaaaaaaccaacttcgtcatcggagtccgaagcaggtgaggtgacaggcaacgaacgttccctccccccccactagatctgcaacggcaccgcaacgtgcacgtgtggtcatggcagcgagtatgccatcggccttcacgtn

SEQ ID NO: 188085 - DNA, 203 bp, Arabidopsis thaliana landsberg
gctgcttctcagtatcagtcactttatgactacttaagaattatggacgcatatgtggatcttatgttgcagaacaagatggtgagaccgatgtgatttttttatttgtactcatgagaattctctgatctcgtttctttagatttatttatcagttttaatggtttcaggaaaatcatctggatgctctcttggatgatatt

SEQ ID NO: 188086 - DNA, 222 bp, Arabidopsis thaliana landsberg
ttctctagatgcttggatttttcctcaagatccactaattttctctccatctttttcgtggtattgccaaatgtctctcagtctctgcttccagtttctccaaatgtgttcaattcagacctactgtcaaagcttgacaactacatactatcagatttaatcgatgctatgcgcctagattcatcaatccgggaagctttaccaaatggaccttacctatga

SEQ ID NO: 188087 - DNA, 739 bp, Arabidopsis thaliana landsberg
gtattatcatccttctaatggtggccgttggacttattccttggaacggtttttgcttcacctggtgatagctttccaaaagcgtttacagcgtgagcagcagtaagaaaagagcaatatcaccattattttaatgcattcaatcaaattggcggtctcttgattagatcctattgctacagagatccagatagtctgccagcaacctgtttaggaaagccggaaagggtagcttttgttggcgtggtgttgaagttgattgatcgtggtcaatatagcaagaacgaacatctttccgaaacagttgctgcagcgacatccatgttgtcttatgtggagccttctttggtccttccttttgtggcttctcggttccatttggctttggaaacggtttgtaatttgtgttcccttctttatcatacaaacttttgtatccttttactttatctgtttccattaagatgaaagttctcatctatatttgtttatgtatagtcagacaactgccacccaccagttgaaaactgctatgatgtccgtagcatttgctggccggtcaatcctgcagtcttccatgtcaactgctaaatcacaagatcttggtggtgatgtggacgataggatgtttcttgatcttattgggatttctctatcaaatgcattgcttggtatggatgccaatgacccccctaaaaccttggccactatgcaactaattggctccatattttccaat

SEQ ID NO: 188088 - DNA, 56 bp, Arabidopsis thaliana landsberg
atgcgcagtaagggttggcgcatcagggtatcgcgggaaggcgcccccagcccccg

SEQ ID NO: 188089 - DNA, 167 bp, Arabidopsis thaliana landsberg
atggaggagattggcacttccggaattcctttgagtgttgtggcaaaggctgcagagattcagctcctatatgccgttgacagagtacttttaggtagtagatggtttcgaaaagccacgggtatccagccaaagttaccttatttggtcgattcttttgaaagaag

SEQ ID NO: 188090 - DNA, 636 bp, Arabidopsis thaliana landsberg
gggatgacaacagcaggaggatgcagatacggacaatccattccaaaaggtcgtatacaaaagattgactccaattatggatttcgtaaacattttcttcctcaggtatcttattttcaactattatcaagaggaatttatcacacacaaaaataaatgaaatttttatcaaaatcaattaagtctagaggtctcttttatttagtttctttaaaaattgtttagttaggccacacattggtggagacaaaacaagtattgatcttcagacatatttctatgtcaaagatgtttgttagtccagtggtttatcctatgttttgccattttcatcaaaaaaatgatcaataagtagaatatgatatgtcaacaaataaatttacgtaagcaaaatttgtagataaaaacatcaaaaaaaatgtttttctgatttgttctcttttggtgggaaaacaggggaaccgaagatacactcctctcgagcaaccaacggcacaaaaagtaatcgtcgacaaagtttctgaaggtccaatcagcatcttcgtgatcggttctcacaccaatctagctctcttcatgatgtcaaatcctcacctcaaacataacatccaacacatttacgttatgggtggtagt

SEQ ID NO: 188091 - DNA, 72 bp, Arabidopsis thaliana landsberg
atgaaagactcgtggatgaaacatcaagaatcattagaaagtttgaaagatggcgacttggaactgaaaaag

SEQ ID NO: 188092 - DNA, 2433 bp, Arabidopsis thaliana landsberg
atgctgttcattcttgaaatgttagtgaattctactcctacactgttgttgacgacaggtaatctgcctttaagttttaggactcccccggtcagcccccctataacaaactacgtgagtggattgaggagagtttgttcattagagttcaggcctcatctattgggttcacccgactcaggattggctgatccgcttttaggcgccagtggatctgaacggagtttgcttccactatcaactatctacggctggagttgtgggcacttttctaagccacttcttggtggtgcggatgctagtcaagagattgcagccaaaagagaagagaaagaaaaattcgcacttgagcatattgcaaaatgccagcactcttgtaaatagttttgtctgttatctctggtttgttctatacctatactagtcgcctgaattgacttcctacattttaccttgaccagctattagcaagctcaacaataatcctattgccaactgggatacaaggtttgaaacgggaacaaagacagccctccttcacccattctctcctattgtagttgctgcagacgagaatgaacggatcaggtatgcgagtttcatcagagcatcgttaaaattgaatgttagaacaacttcttgcattcaggttaaccctctgttaggaaaagtacagggtagttcccaatctattggattaggtctcggtttagtttagtcatttagaaaaagcttccctttgaaacttatcttaaactttgatgttctctcttgggacctctttttatcgagaagccttaactgcactaagtatttcactttatttctcttagagtgtggaactatgaggaagcaactcttctcaatggctttgacaatcatgattttcctgacaaaggaatttcaaagctctgcctcatcaatgaacttgacgactctctgctacttgttgcatcatgtaatgttcacaactcttgccaccaagtctttcagatgtttgcaagttgattgaatatgggtgttgagtaatggtatctatgtcttacacatgcttttgggatttgggtaggcgatgggtcggtccggatatggaaaaactatgcaactaagggtaaacaaaagcttgttactgggttttcttcaatccagggtcacaagcccggtgcccgtgacttgaacgctgtcgtggactggcaacaacagtccggttacctggtttgtgatttcttcaatcatgctatgcacgatatttcttcttagttttccaagttacgaagcttgatttattgttatttacgggttactggtatttaacagtatgcttctggggagacgtcaacagtcacactttgggacctggagaaagaacagcttgtcagatctgttccctctgaatcagaatgtggagttacagcacttgtaagtctgcatgaacaaccttctgtttaaaacatagaaatgctctaggatgtcatcatttgctacaatctgatgaatcgaagagatagtatgcataagctatcgtcttatagttctttttgttgttttgtaagttcatggttatcatgcttttccttgatcaaaacatttttgaattacaaaacatgtgaatattgcttactttatgttatctttgtagtctgcttctcaagtgcacggaggccaactcgctgctggttttgctgatggatctttgagactctatgatgttcggtcacctgaaccgtaagttggtttaaactttaatgttcattctttaacagaactcctcaaaataatctaaaatgagagcaccaaaaaatatttttgaatacatcacttaatatcatttcttctattgaaggcttgtctgcgcgactcggcctcatcagaaagttgaaagggtggttggcctcagttttcaacctggacttgaccccgcaaaggttgcaaaccaaaattgatctatgaactgtcagctttcatacctttttttatagcatatattggttcgggtttgaagaatttcgtcttggtttggtttttaattctcaagagtttctcaactctttgtcgttttcctggggccaatatctattctgttcttatcttcaggtggtgagtgcatcacaggcgggtgacatacagtttcttgaccttagaacaacaagggacacatacctgacgattgatgcacacaggggttcactcacggccttagctgttcacagacacgctccaataatcgcgagtggatctgcaaaacagctcattaaagtattcagtcttcaaggggaacaactagggataatccgctactacccatccttcatggctcaaaagattggatcagtgagttgcctcacatttcatccgtaccaggttctgctagcagctggagctgctgactcatttgtctccatatacacccacgacaactcgcaagcaagatga

SEQ ID NO: 188093 - DNA, 292 bp, Arabidopsis thaliana landsberg
ctactggcccgccgggccggacggcgccctgcagcccgcctattcgggcatcaggccgaaaataacaggccccggcacaccggcggctgatttcgtcattgccgggccggctgcgcacggggtcgcgggcctggtcaacctgttcggcatcgaatcaccggggctgacatcgtgcatggccattgcgggacaggtcgaacaggcgttggccggccaattctagcccgtcatgtcgcgcaaccatgactcgaacgccagcagcgcatccgacggcccgctgtcgtcgggatag

SEQ ID NO: 188094 - DNA, 111 bp, Arabidopsis thaliana landsberg
atggagaatctggtgggacttcttagaatcagagtgaaaagagggattaatcttgttagtcgtgattctaataccagcgaccctttcgtcgtcgtaaccatgggttctcag

SEQ ID NO: 188095 - DNA, 387 bp, Arabidopsis thaliana landsberg
atgcggaacgcaacacatttccttcaaacactggtcacttccaattggttcaacctaaacactctacttgcctttggccctcgagttttggccgcaatgcgatgggtgcgcatttggacttttattcgcccggcacagcttgattcactcaggcagctcctcccacagtgcccaaatattgaaggcatggaagttaccctttcagaggtgtcactggcgcaactggccgaggcggtggccccttttaattcactgttttacctgaagatcgatcttaactttgatgaagctaatccgctgtttgtaccggagaatggcctgcccgtagatcaactgccagtgctgccaaatgtgaagatgcttaagttaacaacaactgtttcttaa

SEQ ID NO: 188096 - DNA, 33 bp, Arabidopsis thaliana landsberg
aatcaacaagaatacatacatgatattgattga

SEQ ID NO: 188097 - DNA, 190 bp, Arabidopsis thaliana landsberg
gtaacaatagcacaaaaatcaaagaccccgagaggtcagatcccaagctcctattcacgctgaagcacaagctgcttcctaatgaagaacacaagagaaagatgttccggagtgtagctgtggggacagagaagactccagggagcaatgctcttacactctgctcactccacatccatcctctcagact

SEQ ID NO: 188098 - DNA, 324 bp, Arabidopsis thaliana landsberg
gtgaatctgaactttgagatagagaaactgagagcggacgtgaagcatgttcaggagatgtatgccatggctcaaaccgagactgttggtgcttcaaaaaaggtttaataaaggtcttgaaccacatagaccgtggcgtttttatttttgttaacatttgtttgttcttgcttttgttttttgttgcagctgactgagctaaaccagaggcggttcgaggaatccgagaagcttgtggaactgaaggaaaaagaagaagtagcaaaagatacagcttcaaaggagaagcaaaggtacgaagaggcgatgaaggaagcagagaag

SEQ ID NO: 188099 - DNA, 848 bp, Arabidopsis thaliana landsberg
aattctccgaccaagaatcaccaacatatcaaaccgaatcgatgaaaccgatcctcgaccatcatcctcggccggtaggatccaaaggttagtacttaacaacgaaggtcggaccaaactaaacgccgatcctgaccgtgaattctattcatatccacggttcgtgaaccacgtagatgatagtttcatatcctccttacccggactatacagaaaccggttgagaaaaggaaagactgtacttgacttgatgagctcatgggtcagccatcttccagaagaagtgaagtacgagaaagtagtagggcatggtcttaacgcacaggagcttgctcgtaaccctagactcgattacttcttcgtcaaggatcttaatgaagatcagaagttcgagttcgaagacaagtatttcgacgctgttttgtgttctgttggtgtacagtatctacaacaacccgaaaaggtacgttaccgtaaaccaaaaccgatttcggttatgtcaagaagattcctaaaccgggtctttattatataaaccgcaggtgtttgcagaagtgtatagagtgttgaaaccgggaggagtgttgatagtgagttttagcaaccggatgttttatgagaaagcaattagggtttggcgtgatggaaccgaatacagtcggatccaattggtggttcagtactttcagtctattgaagggtttactcagccggagatcatccggcaacagcctggagctcagatatcggttttgactcggcttatgggttttatcggtttagcttctacgcccgatccttttaatgctgtcattgcttataagaatttcaaacctatttatgagtaa

SEQ ID NO: 188100 - DNA, 390 bp, Arabidopsis thaliana landsberg
atggatgctgatttactagcggatgaaaataatgaagtggaggctgagttaggagataaagagaatgaatatgctgacaatgtagtgaatagagaaagtgaagaaccagttgatgatgctgctgctactgacgctgaagatcctactctgaatgttgctaaaacagctgctgaaccaaagcgtaaaaggaaatgaggaccaacgaagatgaaacacatcgccaaggacccaaatgaaaaggttcacgttgattatactatcatgggagaaccttgtggtccagggtcaataccttttgcatcctatttaggaacaatagtacgagaacatgttccttacacaattcttgattggaggaaagttagtgaaaatatcaaaactgttttgtga

SEQ ID NO: 188101 - DNA, 179 bp, Arabidopsis thaliana landsberg
atgaaggaagaacaatgggcaccagtgatagtaatgttaatatcaagtgttgcaatgggatcagtgaacgctctcgttaagaaagcacttgatgttggtgttaaccatatgatctttggtgcttatagaatggctatttctgctctaatcttggttccgttttcttatatttgggagag

SEQ ID NO: 188102 - DNA, 112 bp, Arabidopsis thaliana landsberg
atgaggctatatcctccagtttcgtgggactctaaacatgctgcaaacgacgacgttttgcctgatgggacacgtgtcaagagaggagacaaagtgacctatttcccatacg

SEQ ID NO: 188103 - DNA, 574 bp, Arabidopsis thaliana landsberg
acttaaagatttcaccggtcaaagtcacgagaacaagtcaaagtcaaacgttcaattacaacccataaccttcgacggtaacctcaccggcttactcgacgtcgccgggaataatcaccggtctcggcctccacgaagattccgcgacgttctgtgagaggcgagggtaaaaaccttctcgcttcacattcctactcgaagcctaatcgtgttccttcgactagattcgccggaatgaaacaagaaccctttatttcaatttcaaacggtgatttaacgcagatatcggaatttacggagcatagtgttgattatacacttggaatctgagtcattaataacttgtcttattgaaatcctggtgtttggttttggtcctatgatacagtttttaaaggagaagaaattcgagcaagttatacctccggcgaaggttgaagatgccaataatatcacgagcgaaatagctacaaatgcgttaaggaaaggggttaatttcttatcagcattgcaggccagtgatggccattggcctgctgaaaatgctggtcctttattcttccttcctccattg

SEQ ID NO: 188104 - DNA, 2020 bp, Arabidopsis thaliana landsberg
aaacaaagaagaaaaactgaaaagctcgagaaaagtttgaaaaattttgagagaagtttcggaaaaggttccagatcgaatccaagaaaaaagcttaatagaaggttactaaaagagatcgagatatcccgacaccgacaaaccggagctttgccggcgtcgaaaggcatggttgaggtttggttctcgattacagtgcttgggaaagaaaagaacatagttttaatgcctgacatataatgattgaagagttaaacaacgattataaaggtttttcttttacaaggtgagttctctctttgctagatcgagattgtattagagaagtttgtcaaatctgataaggtgatttttgtggttgcacatgaagaagttgttattgaaaaccagagcaaagttaaagatttggatgttctcataatctcattatttaggataaattaatatttatactaaagttttaccgatcacaaaaaaaagttttaccgatcaaaaattcttgttagtagtgatgtcaaaaataaaattaaaatcttgtcggtagtacaaattttgtccagatgatggaattcaaaataatctagaaaatgttagttgtaaatataacattcacaaattttttggtgaagattaatgatctaaattttcacccaaattaaattgattatattattaaactattttatatgaaaatgacatgaccttaaatattcaaaatttatagtattttttccactattcttaatgttcatgataaagtgagaactcatagtcaaaaactaattaatttaaaacaatacaattatttttgatgaaattctttagagatgagctccatcgaaaagctaattttaagaaaacttataaaaaatattggaaactaaattttagtagctcatattgtcatactgaaattgtgatcagcggctatgatcattcttttctaaggtagcatcaaattgagtgttctaccaaacattaacgaacgcaacctttaaacataacacaacctttaaacacgaagaatatctaaaccatataaatcaggtttattgagtagattgcattccggtttgtttgtaccctaaatcagccaaaactaaagattgtttaattgtagaatcactaccagacattcttagcatacctataaccacagtagcatgtaaatcttcatttatagcattggatctcatttgattaacaaatgatggagtcgacttcttcctagtaacgtcgaagcgttactatgtactcgatcttgaatacatggtttacaaaaatttatgatgaaggtaaaaaatactaatgttaatcaatgaatttgctttacttgggttagtttatattactaatatcttcgcttatgaattatagataacaatggcgatataattactattcagttctatacaaattctgtggaagaacaatctgttggtgaagaacaccaactaaattaggtgtgcaaaaatgtgctcttcctcccaaaattaaaatcggaatcattgacattgctttttatgttacttatgtctgtttgtgaaatattagatgtgtaatttggtcttttaatgttacttctatatgtttgtgaaaaattatgtatgtagtttggttgctggagatggctcaagaaggaactgattgcaagataagattagtactaattgaaaaatgtgaaatgtgaacactatttttgcttctgcagtctcgttgctatgtgttgttgatgtctcatggatgcttacctctaattggagtctttcaaagcataaaacttcgatgatcctctgtcgtttttatgttgtatgtgtttcggttcgcaacattaactattgtctatggaccttttaacttagtttgcatttgattatcatagttttatattgccggagagactctattttatgccataattttgaatatattcttttttgatgatgatgatgatgataatgatgatgatagtatgatgatcataatgatgatgatgatgattatagattgcaattattaa

SEQ ID NO: 188105 - DNA, 546 bp, Arabidopsis thaliana landsberg
gcctttctttagtgttcagctgagggtgagcatggctcaagaaatctcgcagtggtgatgaagaaaagggtgaaatacagaggacctcgcaacacaacaacatcctctgcagcctcaactattatgttcccaggctccttccatattggtgctgcttcctctttactccttgctcttcttttataagctcccttgtagtgatcattattgtactgtttgacaatgattcatgtaatttgcttttctcgattgattttgtagaaatttctcaaatggtctaaaactctgtttgtaaattatttgctctgtttcaaaagtatatggtcacttgtcccacatctctacgtatttgtttcaccttatcacaatcctataaccaagtcacatagatcttactacacatgcaaacaattcatcacagaaccaagctgcatgattctaaaagcatctcttgacaacctggttgctacagctgtgttgatcaaaccatcactccaggtcacgatcgccccagagatccgcagtatccgttcatgtgatgcgtga

SEQ ID NO: 188106 - DNA, 181 bp, Arabidopsis thaliana landsberg
aaattacttagcggaaagaaaagtacagattagtgattcttggatgcatactttggcacgaaaagctgcctttagctcggaagatgagcagcttggctctacgccaagtatagagtacggtgaagagctggagagaggatcctctctgttttttcctctgcaactgggaatgaatcgctga

SEQ ID NO: 188107 - DNA, 1605 bp, Arabidopsis thaliana landsberg
atggaagaaacaaaggtaaaaaagaaaatgaacaataacttaacgtgctaatccatatttttgctaaccacttacgatgttattactgtgatttctcatttgattttacgtttcgggttttatttagtttggttggtccttacaatctcataaaacagagccaagaaatatggctaacgtttcgtttacttttgattctcaggaacaaaataaggaattgaggccgagtagattagtgggtagatctgatgagagaaatggtaggagacagggaacagagcaaaagaagaaggtaaagaaactgaacaaaaacttactctgttatctactctgtattttgtgatgaaacaagagtcgacacgatttttttcaggagaaagaagactcgggttttagtgtaagcgaagagggtgagattcctttgcaacaagggtcaaatactgactcagacgcgcgggatgatctgacacaacaacagagagtgagtgatgttgtgatgcagaggagaagccatgaaacagagtcgagattatggcaaagggtaaagaaactaaagtcttgctcttacacaatatgctttgtttgatttaacgttttcttttgaatatttgatacattaggctagaactcaggataggagaggaagtgaatccagaatgatgtttgatgggagaactcagtggagtcacgcaccggtgctatcgagtgcgtatccagttcgccccggtgaagatgattgtctgttttatatgaaaaaccatctgtgtgaatggggaagcgagtgttgttacaatcatcctcctctacaagtgagaaagaaaacattatctcaattaatttggctaagtataatttgcagttttcctcatttcttatacctttgttactacaaacaggagattccgtgcaggattggtaagaagctggattgcaaggtacatttcttggatgtcttgttattatctcaaaacctgattaattcgattggttgttgtggtatgagcggattataaagagtaaaaaaaacctagattttcttctgctttaatgcgttcgacttgagcgtcaagtaacaagaattccaaacttctatatgcattttgttgcagttttttaaggcaggagcttgtaagagaggctcaaattgtccatttaatcacccaaaggaaagggatggtgatagtttacctatgcctcaggtaatttcaccgcggatattatattagtcttagcaacgttttattgtcaaatgtgataacttaaaccgagtttattctccagggttagaagccatgactatattagtttgatgtaacgtgttttaagtttggctctcagggtagaactccggatttgagaaggaatgattcagggaggaggtacaatacagagtcaagatcatggccagagaataaggtaaggaaacagaacaagaacttattctcttcgttactttggattatgctgagacaagggtttatacgaatttctcaggagaaagaagtgggccagtttcgtgatcaccaagactctaaagaagacgcgcaagaggttctgctacaacagagacctagagatgttgagatgcggaagagggtaaagaaa

SEQ ID NO: 188108 - DNA, 399 bp, Arabidopsis thaliana landsberg
ttgatattcaaaccaccaattcagaacacaaaattttcccaaatcttgccggaaaccaagagaaaaaaataggattgaaattggtgctttttaggaaaagtgagtcatcttctaagatcagaagcagtttctggaagattttgtttttgaatctctaaatagactttaaagtgagtgaaagagaaagataatacaaacagtgaaagttaagatgatgtttttacttcttcttaaaagcaaaagacgagaagagtaataagattcttgatccctttgaagacgttgtgatttgtgaaaaagaagttttgaatctgggcaattgtgttttattttcttgggagaagagagatgttgaagaagaggaaagaaagatggagacagtgtggtgtttttgtgttt

SEQ ID NO: 188109 - DNA, 206 bp, Arabidopsis thaliana landsberg
atggacggctacgccacggttgctcgtggtttgccggctcgtccgatccgagtgaatcaggccagcgggtgcgcttgcccgcgcggcttcagttttcccagcagccaggaaagccccagacagccggcgaaggccagtggccagcggatggcctgtggatccagcgccggcagcgcgatgcgcagggtggccagccagtccaggtg

SEQ ID NO: 188110 - DNA, 208 bp, Arabidopsis thaliana landsberg
gctaacaagtggtatcgaagacaagggttctcgggcatattattcatcgctggtgttcgatctggagcagccggtgaatcactcgtacctcacgtgttcgcggctacagcgagtggtgatgaatcctaatactcagatcatccttgatgagattgcatggaggttcgttgatcatgacgacaaatgggatcgtcgttttgtcgattag

SEQ ID NO: 188111 - DNA, 501 bp, Arabidopsis thaliana landsberg
tcacagcaagatagagctaaggttttacagagacaagaggcacggctacagaagagaggtttggttcaccgaaacggtaacgttttgaaggaatctgtaggaaccggcgtttttcaccctcttcagcgtccaactttcaagacttttgaccctgtgaagaagcatagtaagctacttcacttgtcttcttccaaaaccttcttttatgtttaaaataaggtttggtttggttttgttttcttgtcttgaaattctctttagttactgagactagctctttgcatgttttaggttagtacacaaaatggaaaaaaaatctgacctttttttgtttacttgtcgaaagcagatcaaaggaatcggaatcaaagtgagaaggagtttatgaccaaagaaaaaagaggagtgatgacttctacaacgcaggagcagcaacagaaagaggagtgtcattatcatttgccttcagacatggatttctccaaggactggactttctga

SEQ ID NO: 188112 - DNA, 357 bp, Arabidopsis thaliana landsberg
atggtacgagtgcatttctccattggtatgtattctgattatgcggattgcgatgtagtacctatggaagcttgttctcttttgttgggtagaccttgggaatatgatactgatgcatgtcaccatggtaggagtaatacatacacttttaggcataaagataaaaacattaccttgctacctttgactcttgctgaaattatacaagctgataaagataaagctgcaagtacccataaggaaccaactaatgagacagaaattcagcaacaaattaaattgaaagctcctgtcatgcttgctactaaatctgatcttcttgaaactcatgctactgatgcttgttgctatgccttg

SEQ ID NO: 188113 - DNA, 162 bp, Arabidopsis thaliana landsberg
atggtacttcatgcgcatgagcgatacccgctcttaaaatttcttttggaagagttatcaggtagctttttcgaaaatgagctaacttggttaaacaggttagtgattttgtatcaccccagaaaccctttgtcggttcgtgatgaccacgacaggttctag

SEQ ID NO: 188114 - DNA, 10 bp, Arabidopsis thaliana landsberg
atgggcaaag

SEQ ID NO: 188115 - DNA, 328 bp, Arabidopsis thaliana landsberg
tgttgaaataaacactcggaaaagaagcactttgtcgagtatcaaaaataaaacatctagcaaagaaactatttgtccagtgtcaaaaataaaacattcggcaagcaaaccctttattgagtgtttttttgttttacacttaataaaaaacttctttatcaagtactcgaaaaaagataaagtaaattatttggtactcgacaaagagtcgaattacgatactatcccagtcttccacggtagacgtcggacggacacgtgcaccattgtgatcaaggttgccaccgtgcatgaaagtgatgccggcagattgattaaattcgattaa

SEQ ID NO: 188116 - DNA, 445 bp, Arabidopsis thaliana landsberg
  unsure (1)..(445): unsure at all n locations
atgcgtgcgtanctggaacaggtgggctcgaaacggcactgtttgcccagcagggggctcagcagccacttgtagcaagccagcaggaacaggatcaggcgcgtcatgggtcacgtaaagcggtccgtgacaaatggcacgggacgttgcatgcaggggttgccggtgtttaagtaacaggctataacagctggccgccggccgacaatgcttgctgcgtcgcggtgctggcaccaaaccattgccgtcgggcgaggagggagaatccgtggccaacaccaaagctgccaagaccaaaaagtccacagtcgccatgccgcgagccaagagcgcgggcaaggcagccacgaaaaagacgaccctcgcccagcgtggtggtacgacaggcaaggttgaaacaagcggcaagtcggcaaccgcaaaaacgccgaccggcaagaaggcg

SEQ ID NO: 188117 - DNA, 1198 bp, Arabidopsis thaliana landsberg
atggctgataatctgagacgggctgttcaagacatcaatctgggtgttgatgatgcatcagtaacgattccggcggcgatggtggctcaggcagcggtggacaatcgattcattttgttgggcaggcctgtgatgccaagaagacaaaacttgcgctccattgttgcctcaatgcctcgtgtatggggtcaatcgagacttgttcatggccgcctaattcctggaaatcaattccaattcatcttcccctctgaagaatccttggagatggtggttcgtcgaggcccgtgggctttcaatgatcgtatgttgatcttacaacgatggactccaatggcaaatgctcctccgctcaacaccattcctttctggatccaaatcaggggcataccataccaatttctcagtcgtgatgtaattgaagcgattgggcgtgcgataggtgatgtcatggatgtggattacgatgttgaggcagtagcaagagtggaatttgtgcgggttcagatcaattggaatgttgacaatcctctttgatttcaacgcaacttccaatttcaggaaggcgtcaatactctgttaaggttccgttatgaaaggctttggggcttctgtgaggtatgcggcatgctaactcatgattcaggcgcttgcctaatcctcaatggtggaggtgatcatgactcgggggatgaagatgatgatgacatgccacagcagggtcctccaaaccaagctatggtcattcgtgaaataggccctgaagagaagaatagtgatgcagaggaaattattccagtcgtgaatgcaccagaggatgctgaagttcttagtgacattgatcgggatcacaacgccatggatgattatgctgattatcaagaggtggggggtgcatacagcatgtaccgtggagagatggatactaatgagttgttcaatcccatccccatttttgagaatgctacgggcgacataccagacaatgaaagttaccagaggtactcggatgtacttcatccaagtgatgaaattatggagcagactgttcgcaatcaggaagcgttggcaataaagaggggaaaaaggaagcgggaggatgagttatgtcaagaggattctccgacaacacatgagcagatgatccgcgagaaaggtgaaggaagcagctctcaggctgagagcgaccagtggggag

SEQ ID NO: 188118 - DNA, 255 bp, Arabidopsis thaliana landsberg
  unsure (1)..(255): unsure at all n locations
atgactgactggcatgccctctnnnnnnnnnnnnnnnnnnnnnnnnnnnnnggtggttgggtagagtcgtgcgaggctacggtccgtctgctcagtgacgatggccctgacgaactagagcctgtcttgaaagtttgcgacaagatgtgcaaaaaaggtggcagggcccttggccgtcccttttttgtaggcaagctacaggtggaagggcttaaagaggctggttttgtcgacattaagacggtggattacaag

SEQ ID NO: 188119 - DNA, 144 bp, Arabidopsis thaliana landsberg
agagcaacagcgtgaactatgttgcgacttttgccgagtgtacagttgttgaaaccaccgatggtgacgactttattaggacgagtactgaagagatcgccgcgattctgagcgctgctgctattaccgtggaagaagcttccg

SEQ ID NO: 188120 - DNA, 550 bp, Arabidopsis thaliana landsberg
atgatcaggtaggttcttgaatcattacagtgatctctttgtacataatttcagtgatgtatggttcctaattttgagtctagattcatatgaaactgttgtgaatctttagactggggtatcatgcacgagtcaatagagtctcacagatgcgtaacatagtatagattttgtattacaagacaagagtgtgttttattcaagttgcaaatcatacatactacagactacagttgttgttgtcaaaatgctcgaggtgatgaatttaaatagtcatgaaagaaaaaatacagtacacagtatagacacacacactcatacgagattcttgttctgtttccagagaaagaacaataatccagttcggccaagatttacaaggaagacgctgcgggtgcgaacttaagcgaaacgctgttcacgcaatggcgttcatcggttggagtatcgaaaccttctcctttgaaaacatgaccaagatgtccaccacatgttgcacagttgatctctattcttctcccatctgggtctgtctgataaaccaacaaat

SEQ ID NO: 188121 - DNA, 176 bp, Arabidopsis thaliana landsberg
atggatcttcgaaagctgttgtacttgtacgaacgtgaggagatcatatacttgtggcgaaaatcacccggcgccgtgaaattttaggtgattctccggtcacaggtgaaagtgagatcaaaacaggtgtccagatagagcacgatctcgccatctcttttctccggcgtcagtag

SEQ ID NO: 188122 - DNA, 395 bp, Arabidopsis thaliana landsberg
atgatgcgttgctctgtttgctcgcatgcagacaaaactcttgtaggagcatctttaacaacagaacgtagtcctggtagcaagatatcaacaactaaactgcgaaactccccaggtagatagcccagacaatcaagaagaaacttagaggcagcatagtcacgtttagccactttagttttctctcctacaactatcactttgtcaaaagaagtgctgagcttttctggcccatgcatttgcacaagagaattcctatcatttagctcaatctcctcggaatagttataaaaaaaaacttcaaatgcacgttttgcatagcattttagaagggaaaatggtagatgtgttcttccattcaatgatatcaatgacaacaactgtgcagcagtacg

SEQ ID NO: 188123 - DNA, 289 bp, Arabidopsis thaliana landsberg
atgagcacgcccctctcttcaacttcgcgaaaaggagcgtcggcgacaatcactctattcgtggaaacagcggtgatcattacccaaatgggtaatgacacggtcgcgggcatggaccggcgttcaatcctggcgcccgtgatgacggaagccgcggttcgttctcgaacgaaaagagcgcgggcggaaacagatccatggctacgcgagctctgtttttatgcgcgtgacgatcacggccggcccggtgcagacggcgctgtctgcattacccccgaatcatccgtga

SEQ ID NO: 188124 - DNA, 359 bp, Arabidopsis thaliana landsberg
cgctggaggaggagttggaggaggcagcagctagcatcgaccagttggagacagagctggagcgccatctccaggagaaactagaggctgaaattcagtgtctgttgatgttgaaagcgaggcagaattggcaggtccgagcggtggaccaggtggccttggaggagcacagggcgctgtctgccggggacaagaccagaatgctgctcaagctacgagagacggagagcaagatcgtgatgctgaaagagcaggtggacaagctggaggtccgggagaaggagctcaaccggacgaccgaggtcctgaagatgcagagcaggaccttcagagcgtccctctttggcctcgtccagctg

SEQ ID NO: 188125 - DNA, 114 bp, Arabidopsis thaliana landsberg
agaaagagtgaatgtgcgttgccgagaggggaaaacgatgaagatagtgcagtaggaaaacgaggaagaggcttcataatcggagaattcgagatccttgagaagttcaaatga

SEQ ID NO: 188126 - DNA, 531 bp, Arabidopsis thaliana landsberg
atgaagaatataaaatgcggaagaaaaaaactcaaaataataaaccatgcggtaaataaaaagttacttaaatttgacgatgccgacacgaacgagttctatggtcaccgaagtggttccaaagaagtaaagctataaagagcgcgctttgccaaacagaggtgaaaaaaaaacggtagcaaaattctctaatagtcttgtcccacaaccttcttctggttgctgagacctatatcaacatttccagcacattcaaaatcagttacttggtatcaatttgatgtatcatccccttataaaaccgagtttgaacatcgagaatgagcatcgaatgtatcgttgatcataactctgtccagcatgtttgataacaccaccatagtccataggtataatgatagaaaatcgtcctagcagactctttttctccataaataatatccaaataacttcacctagatcatagttgctacgatattcatatccagaatccgatatcaagaatttgggaaacaaaatccgaacctatga

SEQ ID NO: 188127 - DNA, 189 bp, Arabidopsis thaliana landsberg
acggtggatttctctgctcttgttggtcgagccgcagaggaatcgttcctttcttttaaggaacttgtggataagtctaagtcgacggagctttctgatactgagaagaaggttagcctccttaagtatgtcgctaagactcagcaacggatgctccgcctcaatgccctcgccaagtggtgtaaacag

SEQ ID NO: 188128 - DNA, 123 bp, Arabidopsis thaliana landsberg
atgaagggcgattatagtcctgagattacgcctgagatgattcaggcgggtattgaggtttttgtcgaattggagggcgaggtttccaaagcaactctggttcgggcaatttttgaggccatg

SEQ ID NO: 188129 - DNA, 105 bp, Arabidopsis thaliana landsberg
atccgctgcgggggccgtcgcataagcagagcctagcaattattcgagcatggacatgtccaaaccaaagagaacaagtcttgacatcatcccgcgccgcgcatg

SEQ ID NO: 188130 - DNA, 475 bp, Arabidopsis thaliana landsberg
  unsure (1)..(475): unsure at all n locations
gcgccaactggcaatggtacagcggatcgtgcggtggaactgccgtaggcagcggaagctctataaccgttagtccgaccgctaccaccacctattttgttcgggccgagggtacctgtaacaatacagcctgtgtctcggttaccattaccatcgatccgctcaacgtagcgccaacttccatcaatgcctcgagtaccaacctgtgttcgggcagcattaccatgaaccctgtgggcggaacattgggaacaggcgccagttatacctggtaccagggcagctgtggcggaacagtagtgnnnnnnnnnnnnnnnnnnnnngttagtcccacttcacccaccacgtatttcgtggccattacaggcggttgcaataccacggcctgcgcttcggtgaacattaccgcttcgcccgttgcagcagcctggacaccaccaacacccggtgtttgcgaatcggcctcaccgcttga

SEQ ID NO: 188131 - DNA, 318 bp, Arabidopsis thaliana landsberg
atgacgagcgccaacccgaacgcggtcaataattccccgttcgcggtcgcgatcccggcgttcagcaccaacgttatgtgtaccaccgtagactttctgttctccggcaagtcacagtatttcccgaaattacagttctcactgtccaaaggtgggatcgactgggtgccttacatcttgtagcgcagcgactatgtctgggaccggcaccggtactgccagccgatcgacttccacacccggccgtcggatctgttccgtgcgcacttaaagggctgcttcatcgacgacgtccacggacggcagaacaggcatacg

SEQ ID NO: 188132 - DNA, 114 bp, Arabidopsis thaliana landsberg
cctcaaagcccatatgataactcttctattgttttagcagcagattttcatatgaagttcggtagagttgaggatgaatgggtttatcatattctgacattaggaactgaaaat

SEQ ID NO: 188133 - DNA, 1886 bp, Arabidopsis thaliana landsberg
agagtacacggagaaggtaaggagtgataatgaacgaaaatgctggccgttcgccggagatcttattcagtcttttcttcctcccattactgtctccaagttccggtggtggtcgcatgagcttgcttctctgcttacgaaatctccggtctctgttgatgattctgatccgtcctttcgtcggaaggccaaagcaaagactagacagtgtaaaaagcgctccatcgtcgaaatttgtgcgacggcgccgaagatccagttagcagaagattatgtggtgcacaagaagaagatcaaaaccacgaaatccaaagattccggtgatcgggaattcactaacaaggttcttatacaaataacttttaaatctatgaaacttattacagatgatgtcaaatctctggagacgtttgtgtaggattaaactcgatagtcaatacttaaggagagcaaattataaaatcttcttatgttgcaattttctaaatcaattggtgcttctctatgttccattggctttgcattagttcattagtatgttatgtgaagcatccgtgtatactaacactagtgaatcggtgtcattgtatcttcaggttaaccaatgcaaagaacaaaaagtggatgatattggaaaatgcagtcttggaattaaagaaagctctggtgttatgtctcttagtagcaagaaggctggattagtcagtaaagatcatgattctgagtttcagattcctgcaattttcaaggcaaaacggaaagtatgctttgcgaggagtcctgataagtcaaaaactcatgtgaggttctctgatcaaagtgggaatctttctcagctggagaaaagtaccgtctctttacaactctgctgtttggaaatgaataggttgagtctctctgaaaatctttctcaaaggaagaatcaggcatctgtaaatgacatgcaactgatggttatgtcgactgatcagtctagaacagtaatgcattcggaaacaaggcatcattacaagtgtccccctgcgggatcaaactctcacttgtattgtttccttggaccacatcttagttcacaggaaagagtgacggatgcatcggatttggagagaaaggaatatgtggctcaagctatacaaacgtttatctctacttcgagtgagactccgtacagagcatgtacttttttttctcaacctgtgtcagctgatatgcaccgggggacattggtgttccaatcaccttttgatccacttcctaccgaatggatgcaaaaatcagttttaaatagacaaaggcatgtgggagaggcgatcttagggttccctctagatctacagggtgacctagttgatgcgaatggagagacttgtagaagttttgatcggtcaggtttatgtactagtttctctaaatctgcatctacaggtaatgatcttttacttggaaatttagtggaattttccagtgaaaagaagcatttaattgaggcagcacttgccaaagacaatgcaccgcttaatgagaaacgccacaagtactttcctgctaggttaggccttgatgagaccttcacagagaaagcatatttaacaaacactaatgatggagagtgcggctacacaccgctttctgaagtcaatccgaggagccacgcaatcaatatgtcaaagcgtaatggtgtcaagcagatcctcaatagcggcaaggtaattttaaagagttataatttgagttttcaaaacactcaagcatcaagcagattgatgggtgaggatgtctctgtcagcacgagttactcaggtatgcttagatcgggttacaggagcataggcccgtatgcttccagacagtattcctctccgggaacctatactcatccaagctgg

SEQ ID NO: 188134 - DNA, 768 bp, Arabidopsis thaliana landsberg
atcgccggtcacttcgcactctcattagcctttgatccttcaagatctcctcactataaagtcttttgcctcagaggaagaagcaccaactctttttcttctgcctctgactctgaactttaccacatagaggtttattcctctaatgaaggactttggagaagagttgttccagttccaacctctccttcaacctttatagagttcagctactcagtcttctggaatggcgcggttaactggtacggtttcagctctagagattgcctctctttcgatatcaatacacaggaaatcaagattcttccactccctgatcatgaacatgaagacgaaccgctacctgatcccaggacactgatgtttctggatgaatcccagggaaatctttactatattgaggtaaataatcagagctcttcaaatttacgggtttacgaaatggaaagcaacagctcaagctggtccgtgaagtataatgttgatttagagcctcttgcagccgctttccccgagatgatcagaaccgaatactataccgataggcggatttacgcgttctctgtcatcggttttgtaaaggaagagacagatgcagcatcatacattttgctccacattccaaaccaagctgtaaagtacaacttcatagacaagactttcaagaaactttgtgatttcaagtcattggtcaatgatgctcctgaggatcatttttacagattccaaagaactttccagttcatcaagtctcttgctaatgtctaa

SEQ ID NO: 188135 - DNA, 382 bp, Arabidopsis thaliana landsberg
atggaacaaaacgccaaccgcatggttgaaaagctcaataccgaagggcaccagggcaataacctgggattgcgcggaggtttctacatggtggaagcgggaagtttttctaccatggaagaggcaaaatctaaactggaagccattaaaagtgtttaccctaaagcctggatctacacaggttcctgaacagtgagaacaaaaatcatcataggtggcgtggacgaggcctttaatgtgcctttcaaacgtgtatgccatcgccagcccttgctggataaagggctggaagtggagtggcaggattttggcggaggcaccggccagatcatgagcgccctaaataccaacgagatccaggcggctacggtactgaccgaag

SEQ ID NO: 188136 - DNA, 1818 bp, Arabidopsis thaliana landsberg
atcttgctctacgtaccacagcggctgcagcagatcctcgccacgaagacttgacttgttgtgtggtgagcagttaatttgtcttttcctggatgtgatgaatttacagagtttgtacattatatgttctcactttgtattcatatcttaggatcgagcttcattgcttacgactttgggaatgcacaaggacactgatagcaatagtattgaggacccaatgagcatcactggtctagagacattttccttgagctacaaggtctgctcctttcttgccttgtctgcaactacctgtttgtatctggattcgaactattttgttcgtcgagatatatataagtaataacacagcttaatggctattaatggttgttatatataactactaatgcatttctagagtcatcattcatacttatataagtaatcgacaaatgcatattcgattggctactcaattgtttgattgttggttgtggctttgtgtttcaggttcaatggccactatctattgtcatatcaaagaaagcattgtcaaagtaccagttaattttccgctttctttttcattgcaaacatgtggaacgccagctttgtggtgcttggcagatacatcaagtaaggactgatataatattgtgtagcttgtaatttgtttcagttttggtttcttctaaaaccattttaatcattttgcttcgctaacaaactgctgtgaaaattctacaggggattcggtctatgaactctaagggtacagcaattcttagatcatcgcttctctgccgtagcatgcttaaattcatcagtagccttctacattatcttacattcgaggcaagtctgaatgttctttttgttttgttttgtttgttttttaaaacatttttttttgctaatagaatggaatctgaatatttttttgttttttaaagattctgattgtctattcatagatcctgttttccattgtgattttgcggtgtaagtctctggaaaactaacttctagaattgctgacatacactctgtatattgaatccagatatctctgtagtcgtaaaaaccatacttacaaatgtaggcacttcttgcaactgtgtttttcgagaaatacattcttgaaaacgtgattctggagaaataagtacactatcaatgaacagaggagagaaatcacaccagaagtatataaagacataattctttatgagatgatttggtgtttattttagcaactattgcctctctaagtttttctaatgttgtttttgcttgtctttatgtgggatgtctcttcaggttctcgaaccaaattggcatgtaatgcacgatagactacaatccacaaggagtgtagatgaggtaagtgtagagacctgctttgttttggtttgcagggaaaacattcttcattgaacaatgtgccatcatcttgcaggtgatacaacatcacgacttttttcttgataaatgtctgagaggatgcttgcttcttttacctgacgtccttaaggtttgtcgctgttccactaaatgttatgttttctcaggacagatgtaacagtgtgatgtgcttctctttcgtgcaacaagagcaaaaattctgaacgcactaataatagtgtaatgtttatcaatattttacactcatatttactgatggtgcagaaaatggagaagttgaaatcagtgtgtctgcaatatgctgcagccacacagtggttgatatcatcgtctatcgacatcaatagccagtctcatccacagaagacaatgataagagacacaaccgttacagagtccatattgtaa

SEQ ID NO: 188137 - DNA, 353 bp, Arabidopsis thaliana landsberg
tccttgaagttgctctcagtaatggctgccattcgattgggggatgaacctgataacatcgagaagacactagctgtagctctgttggatccaacaaagaatgatacttctaagaagagcatcacaacatctgatccactggcttcaagcacttggaatgaggtgtgtataactctgctgcgatgtgtttcaacttcagttgattctcgatcttaacagatatgaactcattacttttataggttccatcatcaagaactttgatcaccccggtgcaatgtaaatctatatggagacagttcaagacagaaacagagtatacagtgactcaagccatatccgcacaggcatga

SEQ ID NO: 188138 - DNA, 133 bp, Arabidopsis thaliana landsberg
attggaaccgaggcgagaactggagaaactcgccagcgtacttcttggaaaaccatttaagatctttcacgaggaaactacaaaaaggttccttttagatgcacaagaaacattgaagaagataacattgtaa

SEQ ID NO: 188139 - DNA, 1002 bp, Arabidopsis thaliana landsberg
cttctcgtagctcggtcgatgttgttgttgtaggtggtgggatcattgggttaaccatagcccgccaattccttaccgggtcggatcaatctgttgctgttgtcgataaagccgtaccttgctccggcgccaccggtgccggtaattctcaacccttctcttacaaattggatctgacgattgacattagtacattacctatggattctgcaaataaagctggactcttgaagtgaatgaagttgacttaacttgaaatttgtggtttttggatttcagggcagggatatatatggatgacacacaagaaaccaggcagtgatgtgtgggacttgaccttgaggagccatgaactctggcacaagcttgcagagagcttgactgatgatggtcttgatcctgaagagttgcttggctggaaaaagacaggtttttactgactacccactttacaattgtatagaatttggagctctttgagcgactttgttgatcatgatcttgtgttgattctttcttcactttagtctattgggttctatacactaaagtgaagaaagaaaagtgtcagatgatacattcaactatcaaacaaagttgaagtgtcaggttcttttggcaatgtcattttcgtcgtgttcaacaaaaataatagttcagtgtattgttgtcaacgaaaatagatgatatatacaccattagttacgttccatttctcaacgaaaatagatgatatagctcagtgtattgttgtcacctgtaggaagcttgctcattggtaggaccactgaggaatgtgttgctctgaagcaaaaggttcatgagctatctgaagctgggttaagaactgaatatttgtctagtggtgagttgttgttaaaggagcctgcgatacttgtagatgataatactggggctgcatttcttcctgatgattcacagttggacgcccatcgtgcggttgcttatatcgaaaaggttgctttttatgtatttgattga

SEQ ID NO: 188140 - DNA, 473 bp, Arabidopsis thaliana landsberg
atgatgaattcttttcaaggggcaaatgtttctacaacggtaagtccgatttcaaatttttccaatgatcagtcacttttaattattgtttgatacttagacagtcataagccatatgaaattgtttttgttttttgttttttttttgctaagcagcaacaacaacaattgttgtgcaactcacatgggcatgtacaaggaaacttatcaaacatacaatcagatcagcaatacttatcgaatcaaaatgcgacggatttatttcaagaaccaaataattctacaatggtaaataaattttttgttttaatattaattttcttgctcaaggattcagttaagtttttgataaatatattttgcatgaaccagatagatattggtcaacagatcgaggaaggaaacaatggaaatgcacatcaaccattgattgatccttttgagttaccaaatcatcatcaggagcagtttcc

SEQ ID NO: 188141 - DNA, 404 bp, Arabidopsis thaliana landsberg
atgaggttccggaggtatcgcgtgccgaccgtcgccgccgtcgtggtgtcgggcgtgtcggctcttgtcgcgggctgcatggcggccagcgccggttccactgggtccggcgccctggagaagacgaacatcgtggtggaggactaccccacggttgactcggcgggcctgtacattgccgagcaggaggggctgttccagcagcagggactgaacgtcaagatccagttcgcgccggccagcgagctgacggtcaacagcgcggtcaacgggaccgccgacatcgcgatctccgactacgtcacctacatcgacgacgaactggagaacgacgacaagctgcgcatcgttgccgaggcgtccaccctgcagccgaatgacatggtcctgctgaccccggccgg

SEQ ID NO: 188142 - DNA, 291 bp, Arabidopsis thaliana landsberg
gcataccaagatacacaagatgaaatctggttagaatatgccgtcagttgctttcttcagggtataagatttggagtttccaattccagaagtcacatggctcgtgttctttatctacttagtttcgatccaacaaatgagcctgttggtagaatatttgataaacacttggaccaagtacctcactgggtatggctttcttggataccacagctcttgatttcattgcagcgaactgaagcaccccattgcaaattggttctaatgaaaattgctgcagtgttcccgcag

SEQ ID NO: 188143 - DNA, 1952 bp, Arabidopsis thaliana landsberg
ggatctctactatcctttgaggattgtgagatctcaggggttcaggtgccatggctctatgtgggcatgtgcttttcaacgttttgttgggtaagtttacatatatcactatctaatcatttttgtcattttgtttcctatttctcatctaaatgtttgatgttttgattgtaacagcatgttgaggacaatcatctatattcactgaactatcatcactttggcgagccaaaagtatggtacggagttccgggaagccatgcaactgggctagagaaggcaatgagaaaacatctaccagatttgttcgatgaacaatctgatctacttcatgaactggttactcagttttctccaacgactttgaaaaatgagggagtcccggtttatcgagctgttcagaatgcaggggagtatgttctaacattccctagagcatatcattcgggtttcaactgcggattcaactgtgcagaagcggtgaatgtggctccggttgattggctggctcatggacagaatgctgtggaaatatatagccaagagactcggaaaacgtctctatctcatgacaaaattctccttggagcagcttttgaagctgttaagtccctctcagcacatggggaagataatacaaaaaggttcagctggaagagattctgtgggaaggacggtatcataactaaggccatcgaggcacggttacggatggaagaaaaaagaattgaggctcttggaaatggtttcagcttggtaaagatggataaagactttgattcaaattgtgaaagggaatgcatctcttgctttagtgacttgcatctctctgctactggctgcaagaattgctcatctctcgaagaatatggttgcacgaaacacgatatttgttcatgtgaagggaaagaccgtttcatttttcttcgttacaccatagatgagttaagctcattggtaagagcattggaaggtgaatcagatgatctaaaagcttggctttccaaagtcatggaaggttgttcagagactcagaagggagaatctagtgggattatcgttaaggaaaagcaggtacaagaagaatgttttgatctgaatggtgagtgtaataaatcttctgagatatgtgaggatgcatccatcatggacttagctgcttatcatgttgaacctataaatcttgggttcttggtcgtgggaaagctttggtgtaacaagcatgctatatttccaaaaggtgcatctccctaaacccttttattagcttaaagaatataattgattcatgtgtcgaaagagcttaagagtcggtttgtttttttacagggtttaagagtcgtgttaagttctataacgtgcaagatccaatgagaataagctattacgtctctgagattgtagatgcaggacttctgggtccactcttcaaggtaataaacctttttaaggttcttattattagttggtgctacgcttggaaaaactaaaacctgccttacattgttgtttatcatttcaggttactttggaagaatctcaagacgagagcttctcttatgcctcacctcagaagtgctgggaaatggtgttgcttagagttaaggaagagatcatgagacgcagcaaccaaaaacaagatgtccatatgttggaaagcatcgatgggttaaaaatgtttggctttcgctctccgtttattgttcaggtaattttaagtaatcgagtcaacctaggtcttgtttgataccccgggtccatgatatttttcttacacagcttatgatcatcttcatctacaggccactgaggctcttgacccgaaccatggccaagtggagtattggaaccataagaatgagaaggattcgctggaaatgaaagattgcttcatgtcaaattcttcccagagcttaagcaaagcaagactttttggggttgatttgaattga

SEQ ID NO: 188144 - DNA, 1247 bp, Arabidopsis thaliana landsberg
atgcatcgtcatcacaagcatcatcaccacaggcatcgccatcaccgagataagaagcgcgaaaatgaaattccatccgccggcgatgagacagagatattggatgttactccggcggctccaattgttgttagtaacggctgtgaggaggaggatgtggaggaaggagagattttagaagaagatgggattggtgatgttttgatgaagacggacgattccgacggcgaatcaggcgaaatcaaatttgaagataataatctggtctgttctaatccctctaatacgtctttttcttcctaaattctgtttggattgtgggatcagaggggtggatttgggtttgattgattttttcatattacaaacagcatttacgcctgaattaatgataaagctttggtcttttgagagttttctttagataacctgagtgttgcactaggcgttcaatggagactgatggctttcgcttgatttgtaagaactggttttatgtagatgttctttttcccttggtttaattgtatgttcttgcgtttttagtgtcatgtatttctcttctggtaagtattctgaatatcttttgcgatgctttcagcctccacttggggaaaaagggcgtcaaggagaagaaaagagttctaatggtgttctaactcgtgaatctgaaagggaggataagaggtgggataaagaagctggaggtccttcagagagagttagtaaattaagttatgataatggcagaagtttgttttctccgtcaaacagcaggcagtctaacgaaggccgtgcccggagtagatctaagtcacatgatcgggagagagaaacttctaggtcaaggtttgcggaggatgagttttcggacagaggaagacatcatgattctagtagggattatcatcatgacagagttgactcagttaggactgaggaaagatatcatcgacgtgggcgatatgaggaaaatgacaggcaatatagtcgagaagtcttggaaagagatagaagtaaggagagagatatggacagggagggaagcataagagatagggattcggaaggaagtaagcggagagataaagatagtgatcggaggagggaaagagaacgagagaagagaagggagatagagtctgaccgtgaaagacgaaaagagaaggaacgagagcgcagcattgatagggataggagaaaggagagggaaggagattatttacgggatagagccaatgagagag

SEQ ID NO: 188145 - DNA, 44 bp, Arabidopsis thaliana landsberg
aaacctttaatgttgcaaaacgaaaggaacacaaaaacacataa

SEQ ID NO: 188146 - DNA, 110 bp, Arabidopsis thaliana landsberg
atggacctatcaccaaaaaccaacatcttggttatccaaaaaaatggaaaacacaagagactctggattgactcagagtccgaacaagttcttgaagtctcagatgttat

SEQ ID NO: 188147 - DNA, 84 bp, Arabidopsis thaliana landsberg
atggagcatggtattggctatgtggaagtcgacctttgcattgtacgcatcatcgcactctttgttctgcgctgccgcatacag

SEQ ID NO: 188148 - DNA, 144 bp, Arabidopsis thaliana landsberg
atggcaagtgaagcaccgagttgggcagatcaatggggaaccggagggatcggggagatgccggaggaagacaacaccaaaagcaagaaagatgccggcggtaagaactctggccaaaccaaatcagccaagattgttgatttc

SEQ ID NO: 188149 - DNA, 192 bp, Arabidopsis thaliana landsberg
cacaacgcgaaacatgttctcgatgctgcgttgtcgcagatcgtagaaaatatggataaacttactaaaagagaggaatatatggagctcgtggagaaggatcctcgtcttatcgttgaaatttatgaagcctatctctcgaaacaggttaatacggcagctggaggaactagtacgagcaaaactagttga

SEQ ID NO: 188150 - DNA, 187 bp, Arabidopsis thaliana landsberg
atgtgcatcggctcccggggtaacattgaccgctaccggggcatcaacttatacctggtcgcctgctacgggattgagcgccacaacaggtgcaagcgtaaccgccaatccttcctcgacaacgacctataccatcaccggaacttccgctgcaggttgtacctcgactacaacggccactgtaacc

SEQ ID NO: 188151 - DNA, 276 bp, Arabidopsis thaliana landsberg
aaatgctacattgttaggtcggtgagcgaggagccgctgacaaggtacgtgaggttcgcgagtgagagctgcatccaagagctcttatcttcctctgaggccggacgctttgggaacgcttccaatgggtggaagatggtgaggcatgactctaacggtgtcgagatttcaaaacgcgactcgggatcgctacacgcgtttcgaagccgcaggatcctcacatcagtctccccagagcagttcatcacggttgcaaatgcgatagacgcggccaag

SEQ ID NO: 188152 - DNA, 635 bp, Arabidopsis thaliana landsberg
atgcaaaactcctcgatcacggtcgacgatcccttactgacggtaaagttctctcgaccacaggcgtcgattctccaggcatggacagagtttcctcgaccacgtgcaagatttactgaatttgggcaagttttctcggttgcggacgagttatctgtcaggcagccttacagtctctctctcgccttcaaaaatgaaaacgggcagaggtgagcatcatttatagtccgcccaaggtcggccatgcagcatcgccccctgccacatgtccggacagctgtcgtgcccacatgcgacaggtgtgtctcagacgatggcgtggcgacaggtggcgacgtgatatgatcatggaaaacattaaggatatggagcatgaaccggagcttgaacgtgagcttgtagccgaggaaggagctaagcttgtagccaaggatgagcttgtagcggaggagaagcttgaggcagaggatgttcttgtcacaccggacgttccaatgactcgttctagagttaagctattcaaccaagccattggatggatgcttaaccacatttgggaccaaccaaatgacttgagccaagtcactacctccttggttttgattcaagctcaaggacctcatcaagatggataa

SEQ ID NO: 188153 - DNA, 285 bp, Arabidopsis thaliana landsberg
tgtacattattccatctgccaatcgttcgccactttgccaatctttcgcctcttcacgtttcatcactcatcggttcaccggaaatttctccgggttctctttgcctatgtcagatatttcttcggtaggctcagtctgctactggtttagcactacttttgctggttcgatttctgcctaaattcggtaaagtttgctcaccggatacttctccggcgtcactatgcctgtgtttaaggccagtccaagttgtttccaatctagaaccacgtttgttggtttga

SEQ ID NO: 188154 - DNA, 274 bp, Arabidopsis thaliana landsberg
atggatgggcccgatgctggggacgtcacgataaaatgggacggcaatgataatggcaatacgtcatcaactacgagattcggtagcggtaggtcactttccggtacatggggtgtatataaggtactttcatctcccgtgacaacgtgcattctagggtttgctacgaaggggagtgctggtggtaataattatgccgccctctgtagtgatgccgggacgaccacgcatcttagtcttggcatgagtggaacaagtctaacgatacgtcgag

SEQ ID NO: 188155 - DNA, 223 bp, Arabidopsis thaliana landsberg
atgaaagtagcgcgggcatttttaagcccaacgcccacgctcaggggcggacccgccgaaggcgggtacgtcccgctgcagcccattgttagagcctgacgctctacggaccatacggcgtgccctcaatcaggaactgaagcaaaagaatgagcagataaagcgctacgcccgcgccagcaaccatcaaggctgccgccgaccgcgctacccaaggctttag

SEQ ID NO: 188156 - DNA, 120 bp, Arabidopsis thaliana landsberg
gaaagtcagaactttagagaagtaaaccggtggcggttacccataattgccggttcggcgaatggcgtctcggtctccatttgccggttcccattgactaacgcgttagagagtgactga

SEQ ID NO: 188157 - DNA, 10 bp, Arabidopsis thaliana landsberg
atggaggagg

SEQ ID NO: 188158 - DNA, 691 bp, Arabidopsis thaliana landsberg
atggagcaagaagaatatactaaagaagagattgactggagttacatagagttcattgataatcaggatgtccttgatcttattgaaaaggttagtagcacacaatgtgcaatcttggaacttatgttcatcacacctagtgttactatatagagtttgagtatctgatgtgtagttttgtcatgtcagaaacctggtggtatcattgcccttctagacgaggcttggtaatgttagaaggtcatgtttgttcgttgcttctttcttttgttttcagaaaaaaatgataaggtttctatttgcttctgcagcatgtttccaagatcaacacatgatacattcgctcaaaagctgtaccagacttttaaaaaccacaagcgctttggcaagccaaaattggctcaaacagactttacaatttgtcactatgctggtgatgttagtgatcctcataacctgaaaatgcttgtcttgatgtcagttacgttggtccaatgactgtattattgtttaattccaggtcacttatcagacagaactgtttttggacaagaacaaagattatgttgttggagaacatcaagctctcctgagctcttcagactgttcttttgtctcatcgttgtttccaccattgccagaggaatcatccaagacatcaaagttctcatcaataggttctcagtttaag

SEQ ID NO: 188159 - DNA, 422 bp, Arabidopsis thaliana landsberg
atggaatctcaaaataaggatataacctttttagtaacttttggtaagttcaataacttatacagtacgtctcaacatgtcttgtttaagcttgaaaaaaatacacacacacaaagtcattccaattgattactttacgaattaatcttttatctattgcctgctttacctaactagtacattataattaaacaggattattaggttttcttatcataagatgttaccactatctctgatggcagcgacccactaaattcttaaatacttataattttctctaagaaaaattcgaaaaattagataaacaatcatattgtcgaaataagataatccagtgggtcacagacgtattcaccacctattcatcgaggtcaaaagccagtgccttagctcgaggaataagctcacatgttttgtga

SEQ ID NO: 188160 - DNA, 337 bp, Arabidopsis thaliana landsberg
atgaggagaaatttgcagaccaaaaaacgagggaatggacttgagacgctttctagaagagctccaacaatggatttatggatgaaccttcagagcttgataaaggaagtgttagggaatgcagatgagaaatatgtctcagaggttacaatgatatatcaaatgctgaacaggaaagaaggattcaagtatagcatgctaaaagatgtcattctggatcagctgtttacggctatttctagttccgaggagaagaccgtgattaaggcgtcgatgacggcacttaccaagatcatatcagttaatagaacagctcttgaggaggtcgcaaggaagg

SEQ ID NO: 188161 - DNA, 1072 bp, Arabidopsis thaliana landsberg
caagtggacgacgccagtgcgctcgtggagagcttgcaggacgtcgccctcgtacctgggacggcggtgcaatcagtccccgacgtgactatgtcgctgctcgccgaccgaaaggtaccaaccgattcccatcctacgtcatttcgactcagcctcaacccgcctagcgaccttggtttggcgggcgctctcgtagaggcgagatcaaaccctccggggtttcgcatgcggtcaccctgggaccggctgacagccgtgtcgacctacgggccctcgggttccgaggaagatgatgagcccaatttttgttgggatttctccggacttggtaaccccagtgccatgcgggacttcatgaccgcatgcgactactgcctctccgattgttccgacggtagccgcaggttcggcgacgaggactgcggcccaagtcgtgaatgtttccacgtcgatctagggggtcccggcgaaggcaaccatcttggtatactggagaacggtgatccccctaggcctgtgcctcgcgttgacatccttcgggagctagctgtggtcccagtccctgcgaggggtcaggactcacagctcgagcaaatccgcgagatgtaggccaggctcgacgagggagcaggaacacttgagcagttccggcggaacatcgggcaggaatgggcagaccactccggccggagaagtgcgtcacctaccccagggtatccagcaccgcatcgccgacgatgtcagggtaaggccgccaccgacttccagtggagtcggccagaacctggctgcagcggcaatgcttctccgcgcgatgccggagccatcaaccaccgaggggcggcgtatccagagagagctcaagaatctcctggaggacgccgcggtccgacgggccgaaagtccgcctcccgaaggcaggggtacccctcggaacatcgcgccgtgacttcccgattcatgcgggaagcctcggtccacacctggcgcacgcgcaacaccagctgcggccccaggtcgcctcggcaacgggcaccaccaccgcaaccgtcgggcccacctcgacaagagc

SEQ ID NO: 188162 - DNA, 3793 bp, Arabidopsis thaliana landsberg
atggctttggtggcggctttagaggcggatcttcgcgctctctccgccgaagcgcggcggaggtatcccgccgtgaaagacggagccgagcacgcaatcctaaaggttaggatttctccacagtaatgtacaagtgtgttgttcgagcttgaattcactgtaatcattgagattcaaattggtgtttgttttagttaattcgcattataattttccactttagactctaaaattgaattgttgaactcagtgagcttggagaatggatagcatttacattgttggaatctttgttggaatgtttctggtgaattgaattgttaaatgtggagtcattcttgctttttcagcttcggtcgtcatcgagtgccagtgatctttcaagcaatgaagacattcttcggatatttctgatggcgtgtggagtcaggaatacaaagcttagtgttataggactttcctgcttgcagaagcttatatctcatgatgcagttgaaccatcatctctaaaggagatactttatacattgaaagatgtaagttggggtttctgtacctctctgcattatattagatagtaatataaagctatccttcgtcttcttctttatttatacgagttaaggcaaaacagctatctgacgccatgtttccttacttgcagcattcagaaatggcagaagaaaatattcaactaaagactctacaaactattctaataatatttcagtctcgactacatccagaaacagaggtgaatacaccaagcttgatctagtaagaatggaagtctaacacaaaactgctggtagtcgaagttggaaatttaacaaaacatcaatcctgatcctggtctttgacgtaaacaaaacttaaaatagttttatgcatataacaatagaatgcagatgtcaggattttttttttttttttggagtgacccatcaaataagaccactaaaccaaactgtcctgtactaatgtaaaatcattagttctccattgatctgcttgcttgttgctttgataactttagcttctttcttaattccaggataatatggtcctaggactaagcatctgtctcacgcttcttgataataaccgtcctcctagtgtttacaagtacgttgcttttataaaaaccttacctcatttctcctatattattattttcttttacttttttgttttactttgtcaaaaataaaatttatggttttgttttttttggtctcctagtactgctgcagctaccttcaggcaagcagttgcattgatttttgatcaagtggtttcggctgagtcccttcctatgcctaaatttggttctagcagtcaaacagcaaggactggatcagttactggagatttgagtcagaatatcaataattcagagtacgtcagtcctgatcaattctgtctgttgtactcttttatcttaaactttgtactgtctttactgggtaaatatagtattagagctttgtggaattatggttatttttatacacactgggggatgaaatgattacatgccggttgatttgagcttttcctgatgaagtgaaagacataggctctcctttttgaacttacgctttagtcaattggaaccttggcatttggtgttatttatttgatagactaatagaattatgaaagcaggcccttggagaaggatgttatcggtagtcgattgacaataagagacaccctgagtgaaaccggtaaacttggtctgcggttgcttgaggacctgacagcctcagctgcaggtggatctgtatgtgttacactatattgattttggtgctgtatcttttctccagctaagtatcgttaaagggatatcaccgaattaattgttatattcatgctttacaggcagcttggttgcatgttacttctcttccaaggacgttttccctcgaactaattgagtgagttggcaaggctttttaaactctagttgcatatgttgaagtgaaagttgaaaaatcatgtttaaaatgcacgagttctcaatttacttggcaggtttgttttgtcgaactatatatcagtttttaagatactacttccctacgaacaggtaatgctaggatatttcctggtgggcacttgtttttcatccttccattagcgtgatgacctaactgtaaaagtttgcctatttattcatcaggttttgcgtcaccaaatctgttcccttctgatgacatcgcttcggaccagttcagaggtaaaatcatgcctcattaccttttgtattgtatgcgtccatgtgatctaaaatataatttggattagcattaaagtatatcgaatgcgcttacttataagattttgttactgctcagctcgagggagaaatggttgaaccttattttcgccggttagtgctgcggtcggttgcgcatattataagactgtatagttcgtctctcatcacagaatgcgaggtacagtatgcaaaactttacttgttcattttaaactttgtgctattgaccacaaaggaacaagcacatgaaatgtgttctgcggatgactatgatctctgcaagttctctttactgatgtgcgtccatcccatttctgtctgtgcacaggtgttcctaagtatgctcgtgaaagctacatttttagatttgccattgtggcatcgcattcttgttcttgagattttgcgggtaatcgttacattctattattactatttgcacatgtatgtatcacagaataggaatttgtgctcaattcttttcagttcacatttctaaggtatcttgtgtgtctgtgcattaataggggttctgtgttgaggcaagaacattacggattcttttccagaactttgatatgtaaggctaaatacttctctttgtccttgtgatgtactcaatgatgcatgtttaggaaactcccgtctcgttctttcttcacactgcagttgaaaaagtttctaaatcttattggtttttcttgtgattctactaacttttactatggacttttggtaaagattgtaatgttatgtctggtgttatagaattctctgttcgtcctttttttctttccctaattatgtctctcgtgtgatctaatattaactttgtctttcaaggcaccccaaaaacacgaatgttgtggagagcatggtcaaagcacttgctcgagttgtttctagcatacaggtgggtgtgtagggcaggacgcccgttatgtttcctgtagtctcaatttgcattagttctagtagtcgctaattttgatttgtttattagttggttttagatgtgcatttagttttacttattatgtgtacctgaaaagattctatggaagaatttcaggaactgtatagtggcttgtttattatagctcaagaattgaaatcgcataataggagtaaaacttggaacatagcttaattctagagttggtttccttggaagtagtttcaggagacgagtgaggaaagtctagcagctgttgctgggatgtttagtagcaaagctaaaggtaaccaattatttgatgctatgatgattattcattacctctaaggacctcagaattcgattaatgttacttcattctaagaaagatgtcattaaatatattccctattgctgtaggaattgagtggattcttgataatgatgcatccagtgctgctgttctcgttgcgagtgaagctcatgcaataacgttggcaattgaaggcttacttggagttgtttttacagttgccacattaacagatgaagcagtagatgttggggag

SEQ ID NO: 188163 - DNA, 146 bp, Arabidopsis thaliana landsberg
ctgaaatgcatatttatgtaataaatgtcagcaatgacaatgactatctaccaatggacatcgtggagctatcttccgatcatttgatagaggtacgacttatcatcctactcgtaaatatggttgatggtcatcctgtttattga

SEQ ID NO: 188164 - DNA, 478 bp, Arabidopsis thaliana landsberg
tgatagtgacaggggcgacgataagaagggaaagagaagagaagagaagaagtatgacaagaagaagggcgacgatgcccatgtttgctgggagtgggactccgacgagagctccaccgactcctcctccaacgaggacgccgccaacatcgccgtcaccaaggactcctcttcccaaacgtcggccacaagtgcctcatggcaaaggacggcaaaaagaaggtaaaatcaagatcctccactaaatatgaaacctctagtgatgataatgctagtgatgaggaagataatttgcgtaccctttttgccaaccttaacatggaacaaaaagaaaaattaaatgaattaattagtgctattcatgaaaaggatgaccttttggattcccaagaggattgtctaattaaagaaaataagaaacatgttaaggttaaaaatgcttatgctctagaaattgagaaatgtgagaaattatcca

SEQ ID NO: 188165 - DNA, 73 bp, Arabidopsis thaliana landsberg
atggcggcgtatagagctgacgatgattacgatttcctctacaaggtggtattaatcggtgattcccgcgtcg

SEQ ID NO: 188166 - DNA, 151 bp, Arabidopsis thaliana landsberg
atgacctattggtgtgaagcttgcgagggagaaatagatccaaagaaaaggttttatatgtgtgatgagtattgttgtgtcaccctacacattaactgtatgcttggggcggacaaatacatggatcccggttcatggtggttatacaaag

SEQ ID NO: 188167 - DNA, 45 bp, Arabidopsis thaliana landsberg
ggaatcaagtgtgtggatttggatctggaaaacgtggacagttag

SEQ ID NO: 188168 - DNA, 2011 bp, Arabidopsis thaliana landsberg
atggagaaagtaaatggatttactaatcttgttaaggaaacggaatttgtaaatggagagttagatctaggcactagaaccgaaaatgtaggtggagagagtaaccaaagtgacaagaaggttctagtagatagcgaagaggtcatgatggtagagaaaagggggcttcttgttgagaaggaagtggaacctgacatggtctgttctcatggcgctgatctcagtgatgtgaaggtttctgatggcagactggatagtgaagaccttgttcaggatagaaaacccgatggcttagcaaaagcaaggaacaaaagttgaggacttggatgttgtatgttttatgggtttagaaccgcatgagagcaaggatgagagtattttggatgatgaaattgcccatgtagctgcgaaggtgaagatctctgactcagatttggtttgggctaaagtaaggagccatccgtggtggcctggacaggtgtttgatgcctcggctgcaacagacaaggcgaagaagcatttcaagaaaggaagtttcttagtaacttattttggagattgcacctttgcttggaatgaggcgtcacggattaagccttttcgacagcatttctcccaaatggcaaagcagagtagtctacctgattttattgatgctattgattttgcgttagaagaggtatcaagaaggatagagtttggtttagcttgttcttgtatctcagaggaagtctatcagaagatcaagactcagaatgtaatcaatcctggaatccgagaagattcaagctcaatacacggtggagacaaggtctcaagtgcagtcttctttgaacctgcaaaccttgtgggatatgtgaagcgtttagcatgctctcctagctatgatgctactgatgcgctgcagcttgtaagtcagagagcacagttattagcttttaatcgctggaaaggctatactgacctccccgagtttatgacactccaggggtcagtagagtctgcacccaagatttctcctgcagaagagcaaagtagcttagtggaagtttctgatcctgaaccaacaaagagtaaacaagtttatactaaaagaagaaagacaaacctgcaaacagagcaaagtagcttagttgaagtttctgatcctgataaaggtgactgtaaacacgatggagtgtttgaatatgaagaaactattgttccaaagaaaaaggagaaaactttggcagagttcattgctgagaaacgcttaagcagacataatgggaacacatcacatgaaaagtctggtaatgttccgcattgcgaaaagaaacgcaaggttgtgcagtcaaaagttcccaagtccacgaaaaagattaaggcaaacctgcaaacagaggatccaggatctccagtttctcccaaaaatgatcgaaaaaataatttgtctgctggtgataagattacaccacagaaagctagaaaaagtttcggaattggggcaagcatattgaaagtggcaaaccagatgcattgttcaacaccaaccagactcttaccttgcagtgattcgacctccaaaaaggcagccaagagcaatggcagtggaaagagtcttcaggagaaacctaaagccgaagcattatcagcaagagaaatttctccttcaactacactttcaagccctcacgctgcttctgttaccaaaaccacaagtgggaaatccaattctgtcagcctagaccacaacctatccggagaacttgatcaggtcagaaaggaagctcctagtactaaccttgtggaggacccgatgttggagtctagagacttgaaagactcttctaaggagcaggtcgtacatgaggataagaaagaagctgcaaatgtagcggatgagaaatctattatggacagcaatctaaccggggagaaaatcagtggcttggacttgagagagcagccgagtaacaagaactgctctggtggatctgatagttgcaaggaagatgtttctgcagagtag

SEQ ID NO: 188169 - DNA, 264 bp, Arabidopsis thaliana landsberg
agaacgcttggagtagaaagggcaaaagcggcaagtgacgaagtggacaaactcttgaaaattggttctataagagaagtacaatatccggagtgggtggccaacattgtcgttgtgaaaaaaaagaatggaaaagatagggtgtgcatcgactttacggatttgaacaaagcgtgcccaaaggatagcttttccgcttccacttgtggagtccagtgcgagaaacgagctggtgaccttcatggatgggttctctggttgtaa

SEQ ID NO: 188170 - DNA, 2072 bp, Arabidopsis thaliana landsberg
atgttgtcatgccgaagttccctggaaggtagcttcgtcgttatttctgtgctgatcttccgaaggtgtttcttcttacaggaccttcggctatgaagcagacccccaacagtagccccttcgcggtgctagatcgtttttcgtaacgagcttgatccgtgaaaaattgtcttaggcttcggaatgccgaaggtccgaaaaacaccttccctgagctcgttgccgagaaacgattaaaataatccgaacgcgaggtggcctcccatgcggcgggtatgcgcgatctggcgattcatctcccacgcaccgtggtccaccgttcagtgggtgcgggtaactattgagcgggtgcgggcaacttgacgattcaccttcccacctgcggcactatataaacagacgggtaggtgtgaagttaccacaacattcattgctattgcactgttttgctgccaaaattttagtcatagccgaagcttaatcatcgtgctcagacgaaactttgcttttgattctacttcgtcacaagagaaagagcttcgggaaaatcaaaaaagtcaacaacaaaaatttcaagaaagtcataatcaaatggccagagttcgctccactgctagggttgatcgtgagggagatgagaccgaagctagtgagacttttccgatttccgaagcaatgaagcggtctgggctggtaacatcggaggacgtccctgtcgctgaagcagagcaagctgatgttgaggagactgaatctgaagatgattatagcagccggtgccgagcaaacccagccatctggatttcgaaaaatccaccatctccgaaggtgacctacctaagatgttcaaattgggctattttaatgaagaaaagaaagagttggtcgcttcggtggggaagaaactaccccgaagccaggaaaggatgaaatagtcattttcaagagcttcctaaaagctgggttgagattccccttaaataggatgatctctgatgtgctgcaaagatttggcatctattttcaccaacttactcccaacacgattgtcaggctcagcgtctatatctgggctctccgaagccaggcggtggagccgtttgccgacagcttatgtcgagttcatgagctgcattaccaaactaaggccagaaaagatggattacatgaaaattttggttgctataattttgcttatcggaaaaccacaaagtttcctgtgattagctaccgaagcaaatggccggcaggctggaagtcagaatggttttatgtgaaagttgacgaagacaaagagaagctagtacaaagccctcttgaattgatcttcggagaaacaagaccgcgatgccaaatgtcattagaaggtcccacttgggctgcactggctgagtttaaaattatttcagagcatatcggcacaagagacctggttcaagagttcttggccttcagggtttttcctactttaaaagaatgggaaatgccgaagctagaggtggagaagaaagaaggggaacttgtgcggttaccttatcatttaaagtttaaaaaacattttaaaacaccttgccaagagtggttggatacaattgaggttatgtgcaacgagatcctcggcaactattctaaaaaagaagatcaattaatgattgcggctttcggcactcgtccgaagcaaagaatgaatcgggtgatggatgctttgaattttgattatcctgactatgggcagttgggcaaagttgctgaaaggcagaaaagaaaaagagttgccagcgctcttgacaaagaaggtaccaaattggctaaaaaaggacaaagaaatttctgagaaaagaaaactgagccctgagtcgaagatagctgctccaaagaaaagaaaagctgcaaccccgaaaccaaagacgtcgggccaagaggaggaagctcctgcgacaccttctgctaccgaagtggaagagattctaaaggtaatgactgaacctttgcctatcaagctaagcccgtggcgccagaactgacgaagttttttcagaaggacaaggagcccgcgaaaacgaagaaggcgg

SEQ ID NO: 188171 - DNA, 109 bp, Arabidopsis thaliana landsberg
gaatttggttggattcatttacccgcggaaactcgtgtttgaactccagaagagcattcctttggtcatggcggcaatggcgaagcgtaggagaagcaagagtgtgtag

SEQ ID NO: 188172 - DNA, 489 bp, Arabidopsis thaliana landsberg
caccgccacaagacccgggaggcagccctgcaacgtgaagcggcagagcgcctgcgcggcgatgtcgggctcgccaacgcggccaccgcccgtgcagaaggggccaaggggttgttgcaggagcagctcgagatgcttggcgcccaggtcgctgacctgcgtgccgcacatgcagctggtcaggcacgggaggcgacgttgctggcacaattgcagacccttcaaactgcccctacggagacgactcgatgatcgatcatcttgaccacctggtactgaccaccgtcgatgtacaagcctgcaaagacttttatgtgcgggtgttgggtatgcaggcggagacctttggttcagggcgcctggcctttcgttttggcaaccagaagatcaacgtgcatgagcgcggccgggagttcgaacccaaggcgcacctgccggtacccagcgcaaatggacctgtgcttcatcgccagcagcggattggagcag

SEQ ID NO: 188173 - DNA, 1552 bp, Arabidopsis thaliana landsberg
atgttggttatttacattgctgcaccaattgcgatcatagcgattctaatcgctcttttctggatttccatattactgtgtggcaaaaactccctcaagagttcaaccggtaagtctaatcttgacattataaccacacttagtgtttttaatacatttgatgtaataaaaagacaaagaaaagttttttacaagtcttttaaatgtgtcttttctatatacaaatattaagttttattgggtttattatttaatttaaacatattagttaatgtgctgatcatgaaagtaattacatcttttgattctcttgtaattcacgtctacaagtgacgccacaacccctgatcgagtactcgatggaggaattaaggcaagcaacgaacaattttgacatggataatactattgggcatggaagtcacggaacagtttacactgggctgatcaaggacatgcccgttgtgatcaaaagggagtggtgtagtccccaacctagattcttggatgaggtacacacaaacaaaaaattggtgatttcattgaaaataatttatgtatttgtgacatattgttgtatgtgtctcaggtttcttacatccaacataaaaatttggttaatctgctcggttattgttgcgactacgataaccaatcgctcgactttgagtatatggtcaacggtagcgtccgagattatctaggtggtaagtaatgcattatagtaaactcttgaaatttgatccatacatcatttttatgtgatcatctctctttttggttattgagtagagtctagcgacttaacgttcaagaaaagaatatctatagctcttgatgcagccaaaggtaaatcaaaatggatgatccaaaactcacattgattgttctaaaaactaatattaaagtctctctgtttttcaattcagggttactacacttgcacaacttagatcctccagtacaacacaagagatttacggcgagtaaagttttgctcgatgccaacctcaatgccaaggtatcagatggggcaatgttgggactgcttcaagcaagtgatattcatctcgctaatccaaggtattaattaattcacttatgatcatataagttacatcattccttcaaagtcctaacaaatatgttcttatgaatattttctatagaggtggttcagaggagaccattgatgtgtatagcttcgggttgttccttctagagcttatcacctgtcaaaaccctggactgttacaatcagactatgaagttttacaatgggtacgtaatagaaaaaaaaaacctctctttctccatttacaacttttttttgtttgttaattgtatgtacttaaaaatatattgtttggaaatgtatttgtgatttgtagataagtccgagactttttacaaacacattttgggataagaatatacctgcagaaacattcacgagaccatcgttccaagcttatctgataattacgtcggaatgcttggagtatcccccgataaatcgcccaaagatggatgtggtcgtgaccgagcttga

SEQ ID NO: 188174 - DNA, 656 bp, Arabidopsis thaliana landsberg
atggcgattttctttacatctcccctcttctttctcatcatcctttgtttctctatctccgtggttcacttgtcagcatcaccaactcttgttctcaatctcgttcattcctaccacatatactctcgaaaaccaccacatgtctctcatatcaaggaagcgtcggtcgaacgtctagagtacttgaaagccaagacaactggagatatcattgcacacctttcccctaacgtccctatcatcccacaagctttcttagtgaacatatcaataggtagcccaccaatcacacaacttctccacatggacacggctagtgatcttctatggatacaatgtcttccttgcatcaattgctatgctcaaagtcttcctattttcgatccttctcgatcttatactcaccgcaacgaaacatgtagaacatctcaatactctatgcctagcttaaaattcaatgcaaacacaagatcttgcgagtattccatgagatacgtggatgatacagggagcaaaggcatactagctaaagaaatgttgctgtttaatacaatctacgatgagtcttcgtcagctgctttacatgacgttgtttttggttgtggccatgataactacggtgagcctctagttggaaccggcattctcggtttagg

SEQ ID NO: 188175 - DNA, 168 bp, Arabidopsis thaliana landsberg
tcaatagctacgacactcactacacactcgaattttaaaatcaaacagcgaaaacgcgattctcttctccgaggaagaagaagaaatggcggagaaacagagatggattgcgatgtatacgaagcacctcaagcagaagcgaaaggtctatcacgatggcttccttga

SEQ ID NO: 188176 - DNA, 188 bp, Arabidopsis thaliana landsberg
atgcctcatggaactcttgaagttgttcttgtcagcgccaaaggtctcgaggacgcagattttctgagtaagctttcgatcatttttccccctaatcatctaacttttttcagaaatccttagaacccatttgagtttcgttgatgggtattgtccaaaatgtgttgaaaatctgcgaatgtatatat

SEQ ID NO: 188177 - DNA, 155 bp, Arabidopsis thaliana landsberg
aaatagaatcatattctcactttgataattttaatcaagaagaatttcaacgtgaaaatttggtgggcattattattgttcacgaatataataacaatcttctgaatatccgctgttctaatcttttccaaatattccgagataaagagcagtag

SEQ ID NO: 188178 - DNA, 2550 bp, Arabidopsis thaliana landsberg
atggccaaagacgtggaaggacctgagggatttcagacaagagactacgaagatccgccaccaactccgtttttcgatgcggacgagcttaccaagtggtctttatacagagccgtcattgccgagttcgtagccactctcctcttcttgtacatcaccgttttgactgttatcggttacaagattcagtccgacacaaaagttggtggagttgactgtggcggtgtcggaatccttggcatcgcgtgggcttttggtggcatgatcttcattcttgtctactgcaccgccggtatctcaggtacaatatatcgaaccggtccggtttaaacctggtttcagaatttttaaaaattgttgactttcaaatttgtccttcgtttttcttgcttatttgaaattgactccgaaacttatgtaggtggtcacataaacccggcggtgacatttggtttgttcttagcccggaagtgtcgctgattagggcggtgctttacatggtggctcagtgtttgggtgctatttgtggagttggtttcgtcaaagcctttcaaagctcttactatgatcgttacggtggaggagccaactctctagcagacggctacaacacaggcaccggactagccgcagagatcattggaacattcgttctcgtctacacagtcttctccgctactgatcccaaacgtaacgctagagactcccacgttccggttagtatttatttctatcagttataagatcgttctggtaacatacgataacattaattaatacttagtgttatgaattatgaaacgaaaggttttggcgccacttccgattgggtttgcggtgtttatggtacatttggccactattccgatcaccggaaccggcatcaacccggctaggagtttcggagctgccgtaatctataacaagagcaagccatgggatgaccacgtacgtttctatttcttaattatttaaaattaatcaaattatggactattgtttgatgggaaaataatgaactgtttttttggtctatctaaatacagtggatattctgggtgggaccattcattggagctgcgatagctgcattttatcaccaatttgtcctaagggcttcaggttccaagtcacttggatccttcagaagtgcagccaacgtttgagtttttgccacacaaaaaaaaacctatcataataacaacaattacaaaatggttgtgttattatgtatgtacaaaaattggcaactttgcttgtaaaactatgcactatatttcttcttgtttttctgttttcattgtggtgtaatactttgatatgtgccaatgccaatgtttgtgtactcgggaaaacaattaatgaaaaccaaattgttttgccttctcctccctctttttattttatacagatgatattaccagctaaaagcatatctacatagactacattaatagttataatttataagttcatgtgatttaaattatcctccactgaagaggattaagacagaacaaaaacttatgtgtttggcacttttttgtcagcttgtcgccatcacctaattaaacaacaactaaagcacaagtcaattggtaagatcgtctcaaattcaattaatctacaccaaaaacgaattttgttgaacacttagttttgagttgacattccactcactagtttaagctcatagaatttgtaatgagagcttacgcaggaaagctgttggttcaacaactaatttgcgtcactttacttaaagtatacaaacgtcattttcagaaataacaatatcaagaagagcgtgaacaaaatattaaaaacctatagatggtcatacagacaaaaacttcgaaatttctttaatccaatgtagattatccaaaaaatgtgcctcaagaccaaaatcagggttttacataaatcgaaacaataataggaaaactttaaaaatttcgtaacagttttgcaactgcaagaaaatacacttttgcgtcttcttccgaagcaccaatcttgaattattagtttttggttagcttttgttggatataaaccctaaaatccaaaagatctgttttctcttaattacatctgaaaactctctttatctcctttcatctccatcaatccccagaaatgtctcagcctctctcccacacatcgatagagtcagattcagtaccgaggagagatattcacagggtttcctttcgaaaccacgacctgaaacaatatgatttaaatggtgactgaattaactggaaccaccaaccttgctggtcagcgagggtttgcttgtggttggatttgttgcttctgagctgctgctgggctgggtgtcaggtcgtgtccagatctttaaatggccttctctgcaagctgttatcaatgattcttgggtgaagatcaagcccgagagggctcggtgtgaacacggtgagccactactggtgagagctttgggacatcgcgcatgcacggcgctggctgaagagtgcccattggaacaatgttgtcccagtgagcggactgactccctgtgct

SEQ ID NO: 188179 - DNA, 74 bp, Arabidopsis thaliana landsberg
aaattgctgacagccgtaaggcgataaagaggcagttacggctaagttacgctatgttgcagctgacaaaatga

SEQ ID NO: 188180 - DNA, 144 bp, Arabidopsis thaliana landsberg
gtttatgcatccgggggctcaagctggattatcgacagtggatgcataaaccacatgacggggaagaagaagatgttcacctcctacgtcaagaacaaggattcccaggatacgatcatctttggagatgggaaccaaggcaag

SEQ ID NO: 188181 - DNA, 535 bp, Arabidopsis thaliana landsberg
gcacaactaacgcgctgacttcatcccccgacgccggagtcgttgaggctaccggtagggccgaggatgcttcggtatcgctcggggtgaatgccggtacggctgctgcaacgggtgtcgctcttgatccaaccgtaaccgaggcgtcaacccctccggccggtgcggcatctgttgcggcaggcgccttcgctccaagtattgccgccacactgggcgctgatgtcggagtggcaagcgtcgccgccgatggccacggccccagcgctgatctggatctggcctctcccgcagacagcgcggaggccacggcggcggcttacgggccgaccgtaagtacggaagcgttcactgacgcatcagccggtagggccgaggtcgctgctgatgtcagcggcacttcgttcgcgtacgtagcgaccggatcggccgaattgacggcaacggtgttgagtccgaatgttggtctaacgatctctcctgcaaccgggtctgcggcggcgacgaccacgggcaatgtgccgactcttactga

SEQ ID NO: 188182 - DNA, 111 bp, Arabidopsis thaliana landsberg
gcgtatcccgatggccggattgcccggtttgttctttgtttagctcccccccaagcagtgcaccttgtgtcccttgttattgtgcccattcctgtttctgtaaaaacccgg

SEQ ID NO: 188183 - DNA, 63 bp, Arabidopsis thaliana landsberg
gtgtcgatgaaaattgagcaagtccagaaatggtcagagcctcacattgaaacactgaactca

SEQ ID NO: 188184 - DNA, 717 bp, Arabidopsis thaliana landsberg
atggtgtattttgttcaaggtgttttaggactcgctaggctcgctgttagtttctatttaaaagatgacttgcatcttgatcctgctgaggtatgctttttgtagttccttgttggactttcatgggaatatctctttataggctgacaaatatatacctcttgactagacagctgtgataacgggtctttcttcattgccgtggcttgttaagcctctctatggttttatcaggtatgagttctttatcacctctatacctcttgactgtgataactgtttaaggaagttggtctgttttgcagtgattcagtgcctctatttggttatcgaaagaggtcatatctagttctctcgggacttcttggtgcattttcttggagtttgatggctgggttttgttgacagtaaatatagtgctgctttttgtatacttcttggttccctctctgtcgccttttctgatgttgtaagttttcaaatccattctggttaacttagcttggttaagttgcaagatagagttggatatattgaaatattaattaagtggttaacgttttaataggtagtagactcaatggtagtggaacgggctcgtggtgagtcacaaagcgtgtcaggatcgctgcagtctttgtgctggggatcctcagcttttggtggaattgtgagttcctactttagcggctccctggtggagtcatatggtgtgag

SEQ ID NO: 188185 - DNA, 1313 bp, Arabidopsis thaliana landsberg
atggacaggtcttataaagagatggttaatgaaattagggttactgatcctaaagatgagttagatatctatctgaaggcagaggtagaaaatcctaagactcttcctggaatggagtgggatgtcttgtcttggtggagactcaatagtcagaagtatccagttttatcagaaattgcaagagatgtacttgcaatgcaagtgtcatctgtcgcatctgaaagtgcttttagcaccagtggtcgtcttttggagccaagtagaagctgccttactcattatatggtagagactttggtttgccttgagcagtggttgaaaagtgaaatcaagctgagtgaaaacacttttctaacaaatgcacaacttcttgctgatatagaattacttgataagcttgagaaaggtaactttatctatgtagtttactagttttagttttagatgttgtttgaaaactctcttatgttctaacacaacttgggtgttgattgaatctttttcagagtttcaaaatgaagtgaacttggactaaaagactaatcaacgaaacgactacaaggtaacctcatcactccattttgttttcttttacttctgaacttggtttatggctcaatgttaatatactagacttatgaatcaatgatcatttcgtaattcatttttacttggtttatggtttaatatttattatggtttttcatttttcaactgagcttatttggttttgatgtaacaggaacaagtcatggagaatctatcatgtatggatgttgctttggattttaacttctttctttactttgaatgctttggattcgattctgaacgatgtttttatgtcttgcttttgatttgaacttctttcttctatttgaatggtttatttggatgttttgaatcttgctttttggcttgaacgtatgaaacttttattatgtcatgctttattgattttactttaagtttttttttattacaaatttacaggttttatggtatatgtggttagtatcaagtatgttcgggtatattatagtagttataaactagtatcgaataatattcggttactttttggattttcaatggaagtaccaatacctacccaaacccaaaatgtaccggatcgaacctgaaccgaagttttcaaatacccgaacggggtcaaaaattatagttccgaaaaatccgaacccgaaaaaactgatccaaacccgaaccaaatacccaaacgcccagaactaggagaaaaatactcctatcaaccaaatgagtgtatatcagacgatgtgtacggactagcttga

SEQ ID NO: 188186 - DNA, 467 bp, Arabidopsis thaliana landsberg
tagtgatggacgtacagatctaccattattgaatctgatgtatattttcggcagcgaagacaaggtaaatgtagtggcatgttttgtttggtcacttatgcatgactttgagtggcaagatggtgttatatgcgtatttggattgtatgacattgattacaaaaagaacctcacacgtcatgagtaagtttcgggcaagtattatagagaattccttagtgaaggagttcgtccatccgctctcaaaaaggatgagctttgagctatgtttggaggatttggtttcgtttcgatgtttatttcttaagcttagaatgtgactgaccaagattcattaggtcttggttatattaataaatgtttgtccttccgcgatcaagataagctttgccctatgttagtaggatatgttttcggctcaatgtttttttcgtatgttttagtatgtggctaaacaagattcatga

SEQ ID NO: 188187 - DNA, 2263 bp, Arabidopsis thaliana landsberg
atgctacgtagtttatgcaacatttgtggtaaggcaactaattgtggagacactgaatatgaggtgcaaaaacttatggctgagaatgctaacttggagcgggagatagaccagttcaattccagatacctttcccatcccaaacaaaggatggtcagtacatccgaacaggcgccttcttcttcctctaatccaggaataaatgcaacaccagtacttgattttagtggtggaactaggacgtctgagaaggagacatcaatttttctgaatcttgccattacggctttgagagagttgattacattgggagaagtggactgtccattttggatgatagatccaatcgttagatccaaaggagtatcaaagatctatgagaagtatagaagttctttcaacaatgtcacaaaacctcccgggcaaattgtggaggcttcaagagctaaaggtttagttcccatgacttgcgtgactctggtcaagactcttatggacacagtaataacctttaaaccaccacccattttttagtgaaatgttgttacatgaaatgttaacaagttttttttttttttttttaaacagggcaaatgggtcaacgtgtttgcacctatagtccctgtggcatcaacccataaagtgatatctaccggttctggtggaaccaaaagtggctcactccaacaggtatatatatagttttctgagtcgtctatattggttgataatccaagagaagtagaaacatttcaaatttgtgatcatataattttggcagattcaagcagaatttcaagtaatttctccgctggtaccaaagagaaaagtaacgtttattagatactgcaaagagatcagacagggcttatgggtggtcgtcgacgttactcctactcaaaatccgactttgctgccctatggttgttctaagaggctacctcaggccttatcatagacgacctgtccaatgggtactcccaggttacttcatgaatacatgaactttgaacaatatatgttggttcacttttggtcgcatggtatagatttgataacggctttctatagcctagctcaattctcacatgcttatgagatttttttttttaaaaactcaaaacgtgttattactcgcaatcataattaatgatctatcagagcatcttggacttgtactgtggagacataaataaatgtgtaatggttattattatattcaccacatgtataacacatagagatttgatttcacaggttacatggattgaacaagcggaatataatgagagtcacatccaccaactctaccagcctttgattggctatgggatcgggctaggtgcaaagagatggctcgcgacgctgcagagacactgcgaaaccgtctcgaccctttcatctaccaacttgactgaaattagtccaggtgaaagctatttaaattatagaataaatctcattacaactactttttaggtcattttcggttctccactaaatttggacaggccttgattgtgatatatgttttcgatataggattgtctgcaaaaggtgcaactgacatagtgaagctagcacagcgaatgactctcaactactacagaggtattacgagtccttcggtggacaagtggcagaaaattcaggtggagaatgtggcacaaaacatgagtttcatgatccgaaagaacgtgaatgagcctggtgagctaactgggattgtgctgagtgcatccacttctgtttggctcccagtgaaccagcatacactctttgctttcattagccacctgagtttcagacacgagtgggatatcttgaccaatgatactaccatggaagaaacaatccggattcaaaaagcaaaacgccatggaaacatcatctctcttctgaaaatcgttgtgagtttcaaaacatttatttttggtttaatgagtgtcgttttgtctatgtttccattgattttcgtgagttttgcaatgcaaacagaataatggtatgctggttctgcaagagatttggaatgatgcatcaggtgcaatggtggtgtatgcaccagtggaaaccaattctattgagctggtcaagagaggtgaaaattcagattctgtgaagtttcttccttcgggattttcgatagtgccagatggagtaaatgggtcatatcatagaggcaatactggtggaggatgtctactgacatttggacttcagatcttggtgggcatcaatccaactgctgcactcattcaag

SEQ ID NO: 188188 - DNA, 684 bp, Arabidopsis thaliana landsberg
atggattatgacttgtgtgacgggaccatgaatgagagtattgtggaatggggaacagacagcctgcgcctaggtgaccctttatctccatatctgtttatgctgtgttttgagcggttgtgtcaccagatcgaaactgcggtagggaggaaggaatggaaaccgattagtatctctcaaggaggtcctaagctgtcgcatgtatgtttcaaaaatgaccttatcctctttgcagattcttcacttgctcaggtgagagtcttagaaaagttttggagaagttctatttgacgtgaaaaagaaacaaaatttgatttcgtggaagagagtgtgtaaaccgaaatcagaaggaggtttgggttaaaggacaacaagagtcatgaaccgagccttaatatcaaaggtaggctggagactaatgaataatgtggatagcctacaagcgagagttctccgcatcaagtataaagtgggaagaatacaaaatggtacatggttgaccttgaaaggtacttggtcctcgacgtggaggagtatatgtgttgggttaagagaggtggtctcgacgtggaggagtatatgtgttgggttaagaagccaagcgagagctgggtcaagctttcgacggatggagcttcacacggcaacccgggccagccacgtcgggtggtgtcttacgggtaa

SEQ ID NO: 188189 - DNA, 693 bp, Arabidopsis thaliana landsberg
gccttttcttttctcttctcttgcaccgaatccgacatacgagtgaatacgacaacgtttggctcgtggctttcttttgtgaattttgtttcttcttggtatgtctgcttattacttgcctaaaatggagtcctgctgatactaaaccctttcctgatagacttgatgaaaggtatcattttcgttttacacataaatcatatatacaaatattatttttagcatatatacaatcattattgttattaactttgtatatagtctgagctagtttgctacctagccttagtttaatcatcaagataatattcagttctatgttatcttttatgtatttcattaacctggcatataaaatattgtaatttcagggttcatgaccttccttcggtggatatgttcgtgcccacagcagatccggttcgagagccaccgattatggttgtggacaccgtgctttcgctgttagctgtaaattatccggcaaataaactagcttgttatgtgtcggacgatggatgctcacctctcacttatttctctctcaaggaagcttctaagttcgccaagatttgggtaccgttctgcaagaagtacaacactagagttagagctccttctagatattttctgaaacctataagcgtcgcaacagaggattctgaattcaatagagactgggaaaagacgaag

SEQ ID NO: 188190 - DNA, 604 bp, Arabidopsis thaliana landsberg
atgtcggatatggctggctacggggaacacaaactctcatccgtagttatcaccggttctcttctttgcaacacccctgtttcaggtattctctacactgcgtcttgtgagaaatcataaacttctaattcaaaatcaattgaaaatgagtgaagagaactatattttatgctttttattattacaaaaaacaataaagacctacgaattttgtacatgatcatataggtgcaactgttgccatcaagtgtcacactggactaaaacagagatcaaaatggataaagagtgttactaatgactttggagaatttgtcatccatcttccttctcatcttcacagcaattccgcaactcgaaaaagcatgtttcgtcaaaccaatacatgtgcctaagcactatcacagatgttaccacactttttccaaatccaatatacacaaagacatcaaacttgtttcctcgagaaatggcttccgtgtctacacctcagggactatcaagttacatggaggacacagttcaagaacatcccaacctcataaagccaaccatgtaaacacaagtttaaagaaaaacaaaacagaacacttgaagattcatc

SEQ ID NO: 188191 - DNA, 370 bp, Arabidopsis thaliana landsberg
atgaaagcaaagttgtgggtgattgcttctcttttggctctctctttgttgttttcactcaagacgatctcagctgatcaaccatataaatttcgaaaaatcagtgagtatcatcaatatttgtcatccggtttgtttcatctatattaacgtatgctaaagccaaattaaggaatctgtcttcgattttaacaactacatataaactcaatggaaggacctcatgttccgtactttattttttgtagaagacgaaataagagaaatgatccatattcacaagacaaggaagattcaaacaccagggagtgtgacaacgcctgcgggccaaggttcaccatccagtgtaggttccccgcacgccggttga

SEQ ID NO: 188192 - DNA, 712 bp, Arabidopsis thaliana landsberg
  unsure (1)..(712): unsure at all n locations
tctgagagaaagagcccaagtggaacagttattacgttttattgttgaagaatctcctgaagatgctgacagcaagcgcgctttcaagtatgtgcctccttgcttttgctgattagctttatcaagacgtacagttgacctgattttttggaatatttctgggaactttcatgaactttaaagcatatttttctattaggtttcctttcatctcctctgaagtcttgacctgtgaaattgatgtaattnnnnnnnnnnnnnnnnnnnnggaggaggtattgtactagttttcttcttcctttattatgatgaatgcagaaccttgttattttgagttagatgtgtcttttactctggtctcacttaatggttcatacttcttgttgcagctaatgaacctacttttctcctttttggaacccaaccgttcccacagtgtaatgctagctgggtatttcagcaaggtaatgttttcattggtcactttcaatagttcattttagaattttagttcttactttttagatattatgtctccacatgtttgttacttaccaccaatgtatcttgtctcttctgggaataggttgtcatatgcctcatgttgaggaagacggtcccgctgatgaactatgtaaaagtgagttctctatttggatgttcatttgaaaatcttgcaaatagcacaacgatcatgcgaagctctgattga

SEQ ID NO: 188193 - DNA, 626 bp, Arabidopsis thaliana landsberg
atggaaggtatgtatcctgaatttgaagctagctatttgatagaaaagataacatcaactttggacatattatttgcacactataagtatctgctatcacaagatctagtgttatctttgcatggaaaaggagaatcttctaaggacaatgggaagagacaagattggatggatggaatgtatgatgatgtttaggaaagtgaagaagctgttgttataaaatctgagtacatggagaaagagttctaacatctcgttgtacactcccttctttctacccgttgacgggaactcctagagtagttgcacaaaaagagggattcgcattattgacccaatgataaaccactaacacgctacagtcttatttagatgatgttcgggaggatcatacaaatccagattttaaaatttaacattggtggaagataacatgttctacatataaggtattgacattgattgcaagagatttattggctatatgaatcataacagttgcatcagaatctacatttagtgcgggaagtacagttcttgattgtttttatagttcattgacaccaagaaccgtgcagactcttatatgcattcaagattggtatcgtgatgatgaagaagattaa

SEQ ID NO: 188194 - DNA, 982 bp, Arabidopsis thaliana landsberg
atggcgggaaactataattatccgagtagcggttgttttaatcgagattggatgtacaagaggttcgatgaaatgacggtgaatttgtcagaagaatacgtcgcaggagtggaggagttcttgacatttgctaatagccagcctataatacaaagttgtcgaggtaaattccactgtccttgtgctgtgtgaaagaataaaaaacatatcgtctcgggtaaaaaagttagtagtcatttgtttagtcaaggatttatgccagattattatgtttggtatatgcatggggaagagcaattgggcaaaattgtcagtattggtgacgttttcatcaaaacacatacaaaacctgatgggacgtatgttgatcgaaagacagagaagatttgcagagttatatcagaagaatttgcagttgaggcagtctgagctcgaggctgaagcttctgctgtttcagatggcacttcgcgggcacgagagcttacagctgaggaatgtacaaccatatttcttcaggtaacgttttatgtttcccaatttagtgtttttgagttgtctttttcattctctaatctcagcttttatcatactatgcagtccactgagaaggattcgataggcgttccttatggagtaggaagcctcaaagattctcttgtcaatggcaagcggaagcaagcaggtgactcaacttcttttgtggctttgcaagaacaattacttgaagctcaacgcaagatagaagagcaggtctcttacaatcagaggcgtgaatctgagattgctttgcctgaagctgagaattcccgagctgcagatgagcagaagaagaagcttgagcacttgtccttagtggagaagtttttgcgcgaaaatgatcctcggttcctcaatttcctcgaatctcattcagctaaggagacaaccacagatcctatctcaccctctccagctgcctctccctcttcatctgcttcatag

SEQ ID NO: 188195 - DNA, 109 bp, Arabidopsis thaliana landsberg
atgtttttcaacggagttatcgagtgccacgtcatcgatataccggaaggttgtattgcgggtgactttagagatggtgggattgacttatataattcggacttggagg

SEQ ID NO: 188196 - DNA, 63 bp, Arabidopsis thaliana landsberg
atggatgctgctcagcggtctggaaaaaatcagcaacagaatgcatatgcagcccttcgccag

SEQ ID NO: 188197 - DNA, 1509 bp, Arabidopsis thaliana landsberg
atgctaaagagtagtagtcatgaagtgcggtgtaaggctctacaaactcttcaagtagtcgttgaaggagatgaagagagcaaggttatctctctgtttgtgtttttgtttgtctctctgtttgtctttgattcctttgtaagtgatttttagtgtgtttcaggcaatagtagctgaaggagacactgtgcgtactatagttaagttcttgtctcaagagccatcaaaggggagggaagcagctgtttccgtgttgtttgagctctctaaatctgaagcattatgcgagaagattggatcaatccatggagcaatcatcttattggttggtctgacaagcagcaaatcagagaatgtttcaactgttgagaaagctgataaaactttgacaaatttggagaggtcagaggaaaatgttcgacagatggctatcaatggtagactgcagcctcttcttgctaaacttcttgaaggtgattatttcaccaaaccactaacctttcattaccaataaactgattttcactgattggtttgaatgaaactataactatgtaacatgatctgcatctacaggttcaccggaaacaaaagtttccatggctttctatcttggggttcttgctttaaataacgatgtgaaagttattgtggctcagactgtgggttcttctcttatcgatcttatgagaactcgcgacatgagccaacgggaagctgctttgggagctcttaacaacatctcatcctttgaagggagtgctaaactcttaatcaacaccggaattctcccaccgcttatcaaagacttgttctatgttgggccaaaccagcttccaatccgacttaaagaagtctctgcaactattcttgccaatatagtgaacattgggtacgacttcgacaaagttcctgttggacctcatcaccaaactcttgtttcagaggaaatagtggagaaccttctccaactaacaagcaacactggtccagaaatccaaggaaagctgttggcggttcttgttggactcactagctgtccaaactcggttattaatgtcgtttctgccatcagaaactcagctgccatcataagcttggttcagtttgttgagatacatgagaacgatgatttgcggttagcttctatcaagcttcttcataacatttccccacacatgagtgaagaactagccaatgcgttgcgtagcactgttggacagctcggaagccttgtttcgatcatatcagagaatacaccaacaatcactgaggaacaagctgcagctgctggacttttagctgaacttcctgagagagatttggttctgacaatgagattgttaagagaaggtgcttttgagaaaatcatctccaagatagttggtattcgccaaggagaaatcagaggaatccggttcgagagaacatttctcgaaggacttgttagtattctcgctcggatcaccttcgcactcaccaaggagactgacgccactttggtctgct

SEQ ID NO: 188198 - DNA, 1464 bp, Arabidopsis thaliana landsberg
atggtcgccacatgtcgatcccggggtcgtgtttatgctcgagattcgcggagtcagatacgaacacaagaattcaaaacacccaacgtgtcctcgtcaaagccagcaggatctcagtgtacacgtgttaactgtttccatgcacgtgttacacgtggcgtctcggtacttttcgtcaaaatttttacttgatttttacaaccaatggaaatagaaaccaacaaaataaatggaaagcgtttatcgataatccgaaattgtagcgctaataaagtttcttaacctttctcttagtgaattttgaaaccgcccatgtccactatccttatcggacatgtgtcatgttccgaagcctttaccattctctttttaattatctccgccccttataatattcctttctcatacaacaaagttggcgaagcttcaaaacccttcaagaggaaaattttgcggaagacaagagaccatctttttgacattatatgtttgttgaatctttatcaatggcagaaaagtttgtagaagatgagaatgtggaggtcgagctcgagctcgagctatgtctttccctgggaggtcctttcaagaaaacggagaaatctaaaacatttggacaatctaacgccgtcggattcgagaaggataacggcgttaatcttgacggcagaacgacgaatgtgacgaggataaaggaaacacggaagaagcgggaggcgaagcagcagcagagaagcgaagaagaaggagactgcaagaggatcagaacagaatataacggagttagtaacggcgatgatatggatttgagctctagcaacatgtgtaacggttacgggtcgggtcaactcaaggaaagcagtaaagacgttacgattgggtcacccatttgcacctcctccgacgtatccgatcctagcagctcttctcgccaagaaggtataaaacaaccttctttttaaaataaaataaaattggtttgtatatgtatatagtttttttttagtatataattcgatgtgttgattctgttaaagaatcacgaaaattatgctatttgcatgtagatgattttgaattatggttaatgttcaggtggaagtggcgacattggggcacaatctggccaaaccaaacaggttagatctccggttaacaactttctgaccggtacagagcaaaccgtgcataacacagacggttcaaaagacgcggagacccaagaatggtccaactcttctgtaaccaaagagagtgggaagccgccaaaaccgcataccaacagtaacggtaacggcagtttgcttccgtttgctcagatgccttgcgtgactagcaccggtaacggtcccgagggcaaaaccgtaaatggttttctataccgttactcaaaatcagagatcagtataatctgcgtctgccatggaacgtctttctcgccggctgagttcatcgttcacgccg

SEQ ID NO: 188199 - DNA, 492 bp, Arabidopsis thaliana landsberg
tcaacacgatctcggaatcctgtgaagtacagtgcaaaagaagatgatgaattggacgagtcaagaagcaatgaaggatctccgagtgagaatttcgaagaggttgacgaaggcagaataggaaatgatgattctgtagatgcatcaatcaacgactgtccttccgaagactacattcaaacgggaggtgggttctgtgcagatgaagctgatgagattggagatgctcatttggaagataaagctaccgatgattacagagtgatcggtggcggattctgtgttgatgaagatgaaacagctgaggaaaacacaatggatgatgatgcagagattttaaagatggagagtgaagaacaacgaaagaaaggtaaacgtcgaaatgaagaagatgcatcattggatgagaatgttgacattgattttgaaaattcttcagctggaggattaagtgcgaggcctttcttgaagagaaagaagagaaaaaactga

SEQ ID NO: 188200 - DNA, 77 bp, Arabidopsis thaliana landsberg
tcggtgaccggaagagtgagaatcgagaaaatgacgatgagaggaagaagaagaagaaggaacgagtacgggaataa

SEQ ID NO: 188201 - DNA, 8 bp, Arabidopsis thaliana landsberg
atggcaag

SEQ ID NO: 188202 - DNA, 424 bp, Arabidopsis thaliana landsberg
cagttcgggcgatttgcgcgcggttgtgtttgcatcgatcgacggcgtagaagtttatgccgacagccataaaatgaaacccatgtatatgagcgatattgaaagcaagcgtggcgttaaatttcgccgtggcgctgcaatgcttaaatccaatggtgtaggcggtattaatgacccttcccggatgccgaagcttggcggcagcgatatcaatttcggttccggctcctctgcgcctgcaaataaaatgcaggagcaagagctgccacagcaaccaaagagtgacggcacggtcgacaccagcgcgggcgccaatgactacgatacgaactacgatcacgcgccaaatgaaagcaagccgaagcctgaagagcctgcgccggattcttcaccccgacagcagccggcaaattggattatctga

SEQ ID NO: 188203 - DNA, 1442 bp, Arabidopsis thaliana landsberg
  unsure (1)..(1442): unsure at all n locations
atgaagatactagagtcttacatggaaggataccgccaagactggaaactctcgtttatgaaagatacagtagaaagaggcggttggtaagttaaagagtatatgaatcattcattccttctggttagagatcgatgagattactttccgtttttcttaacaactattgtcacggaccttgtgcaggcaacaaggcggaatcttagttgctggccctgggaaagataacatctcttatatacgcaaggtaatctctttcgtctaatcttgattgtgaaactagcctcatatttgggaacctagtataccgatatatcttttcaaacacattgttgttttcaacaatttgtttgcggatttcaggacaannnnnnnnnnnnnnnnnnnnnnnnnnnnnnnnnnnttaaagcgtgttgtgcttgaagagttgaaagaatcgcaatcgaaaaatagatatttaaaaaacagtaacgacactgctatgcccggatactcaactaaatccatgaggcaccattaccacaatcacaccgaccccctttgatatataggtagggaaagaaaaaaagaaaagtcgtagaccgaaagtaatgatcattgtttcttgatttttgatgatcattatgacttatgagtcgagatcagcgaaggataagtgtggcccttgctagaagatatatatttttatttccaaataaagatgtacatcaaattcacataatccagttatcgaaacaattttgtctctattgatatgataacatagttgatcaaaggtaagactatagattactatcttgaagtcccacaaaatatgtcagcttaggcatctcctatcaccatccaacatttgtttaaggttacatttcaaattactttatacatgtttgttattcctcataagaactttaaacattaataaaaacaaataaattatagataacagtgtggaaattacatgttggtcaacactagatacgattctaggcccatctgttatgcacgaaaccgggctggatagtaacacttaacaggccgggttcaagttcagaaaatacccgacccggaacaagatttggatccaggactccatttcttccctaaactaaaaccctactcatcactaaaaactcttgcttcctttgtccttccatgtcgaattgaaaattttcagaaaaactcagagacaaaggttccatttcctgtaatggctttcatttccagatctaaacgctaccaatcaaaagctagggtttatctctcgcttcccagatcatcaaactcatctctcttctcactccctcgtctattcagcaccatcgaagaaacccaaactccagcaaacgcaaacccagaaacccaatctccagatgcaaaatccgagacgaagaagaatctgacttctacagagacgagaccactcagagagaggttccaacgag

SEQ ID NO: 188204 - DNA, 109 bp, Arabidopsis thaliana landsberg
atgggtgcgagcattaccatgagaaaagactttgccatatttgcttttggttttggatgtaagattagtgacatgaaacgagaaaacaagagatgttatagggcaatgg

SEQ ID NO: 188205 - DNA, 321 bp, Arabidopsis thaliana landsberg
atgactcaatataaaggtgcttccctcggtgagctgagtccacatccttttgccgttgcagatgctgcatataggtaatttagcgcagactcttcgaataattgctttccgatgttattattaatgtagttggactgtttgcttggtgtattctattgcagacagatggttaatgaaggagttagtcagtctatcttggttagcggtgaaagtggtgctggtaaaactgaaagcacaaagttgcttatgagatatcttgccttcatgggagggcgaggtgctgctaccgaaggaaggactgtcgagcagaaagtgttagag

SEQ ID NO: 188206 - DNA, 63 bp, Arabidopsis thaliana landsberg
atgcaccgaagaaaaacattcgtctccatttttctttatacgaaatttgaccccaaagaaaag

SEQ ID NO: 188207 - DNA, 1609 bp, Arabidopsis thaliana landsberg
atgattgtaatgcggtttagggttttgcagtttggagcgtacccggtttttgtggttgatggaacaccatcacctttgaaatctcaggcgagaatctccaggtttttccgttcttctggaattgatacttgtaatctacctgtgattaaagatggtgtctcggttgagagaaacaagctgttttctgaatgggttagggaatgtgtggtaagatggctttcccttcaaacctttatgcttgttttgtttcacattgttttcttatgactttttttggttctctaggagctactcgaattgctcggtattccggtgctgaaagctaatggtgaggctgaagctctctgtgcacagttaaacagccaaggttttgtggatgcttgcattactcctgatagtgatgctttcctttttggtgctatgtgcgtgatcaaagacatcaagcctaattcaagagtaagtattcatttgtaactgagtattaccctgactcacttatcgtctctttaccatcttaatttccttgtgtgcaggaaccttttgaatgctaccatatgtcacatatcgagtctggcctcggtttgaagcggaaacacttgattgctatttctctattggtgggaaacgattatgattcaggcggtgttcttgggattggtgtggataaagcactgcgcattgttcgtgagttttctgaagaccaagtacttgaaaggttataatccataagctttttgtctctgctttttggtgacttgtcattttcttgaatgtgttgggatatatattttcgtgcagactacaggacattggaaatgggttgcaacctgcagttcctggtggaatcaaatccggggatgatggtgaagaattccgctcagagatgaaaaaaagatctcctcactgttcccgttgtggacacctgggcagcaagagaactcattttaagtcctcttgtgagcactgcggttgtgatagtggttgcattaaaaaaccattagggtttagatgtgaatgctccttttgttccaaggatcgagatttaagggaacaaaagaaaaccaatgattggtggatcaaagtctgcgataagattgctctagcgccagagtttcccaacagaaagattattgaactttatctatccgatggtttgatgacaggtttgcactgactttatgacttcgtgtccgtattgcatgatcattgttctgaatcctaatgtttatgcacctctgaagcaggagatggatcgtcaatgtcttggggaactcctgatactggaatgctagtggatctcatggttttcaaactgcactgggacccatcttatgttagaaaaatgttgcttccgatgctgtcgaccatttatctgagagaaaaggcaagaaacaacacaggatacgctttgttgtgtgatcaatacgaatttcattcaatcaagtgcataaaaactagatatgggcatcagtcctttgtaataaggtggagaaaacccaaatctacaagtggttatagtcatagtcacagcgagccagaagaatcaattgttgtattggaagaagaagaagagtctgttgatccgttggatggtttaaatgaacctcag

SEQ ID NO: 188208 - DNA, 370 bp, Arabidopsis thaliana landsberg
atgatctgcttggcccccaccttcaggacccgggtctgggcgaggcgttccccaacctggccgccgtcgccgacggtaccctccccctcaggaactgcgcgagaagtcgctcctcgggtcggtcggcatgctccgcatcctcgccgccgtctaccgcaacctgacggaaaggggctccgacagccaggaagtcactgacttcttccactccctctcccccaagatggctgcaccggcgacggatgcgttcgtgtggcggaagggccccaagacgtccggatcgttcgagcccggtgccaacgcgccggtcatacggcagcagaacctctcgtacatcgttgacgccatcaccagctggtacaagaagtag

SEQ ID NO: 188209 - DNA, 461 bp, Arabidopsis thaliana landsberg
atggcccgtttcctgatcagcacgatgcccgcgagcggacacgtcaacccggcgctgcccctggcccggcgcctggtcgagcgcgggcacgaggttcactggcacaccggcgaggggttccgggagcaggtggaggcgaccggtgcccggctcgccccccgcgttcacgcgccgagcttcgaggagcttcgccccgcgggcgggcgccggggtcctggtgccctcagcgacttcgcccgccggctcttcgtcgatccctctccgggacagctccgcgactaccgctcgatcctcgagaccttgcccgccgacgccctcatccacgacgggatcggccagggcccggcgctgctcgccgacggcggcggacccccctgggccaccctcggcatcagcacgctgatgctcggcggacccgacgtcgcccccgccggcaccggctggagcccggcgcgttcggg

SEQ ID NO: 188210 - DNA, 920 bp, Arabidopsis thaliana landsberg
atggacatcaacaagacaataatagctaactacaaatgtatgaaaatggacgtaattgtttttgtcggtaagcctataaaacttccactagaaaatgttcgacaatatcaacttacttgaggagtaaattatctctttctaaaagatgcaagagatacaagaaaggaattgaagaaagaaaattcaagagtaaagaaaatacaaataatatcaagttgaacaaaagttgtaagtgttgaaacttttttgacaaaacttttccggtgactttccggccaaatttcgaccaaacggctgaacggaattgtcaggtcattagtgcattggaaagctggtaaagagtgctacaaaatggtatactcatacgtcaaaaacggagttgtattgaataagaaataagggtgtaaagtgggatacttgggccaaacctgatcgaaccgaaccgaactaggatgagccgggctgcgggttgtcgggacgtcccatagtcgactcaagggctgtcgggcttgcggaccgtcatgcttgtgagttattgggcttgctgagttgaatcttatggaaatattctcagaatagtctcaaaatattcttaggatagtctcaaaatatgtcatgcatatcctgagaatattctcacaaaatcctattttcctctactatataaagagacccagcctctcattatttctcaagctctcaaagacaaaacactctaaattctaaagtctctcctctctcttgcttcttagaagtaagttcttagtttaaaaacatcatactgcttaacatagataattatataggttaaacaaaagctcgataaacgcatcaatggcatcaacttccgattcgggctacatctctatggggctcactctaaagatcgcgaatcaagatctaaacctcgacgattttaa

SEQ ID NO: 188211 - DNA, 864 bp, Arabidopsis thaliana landsberg
gtactccgaatccaaatgttgctttagatgagctggtgaagatcaaagagctggtggacaaaggccaactcgtgaccattcccatctcctacaagctagagacatccgatgtgagattgcttaaacaagagtttggtactaacttcaaggttctagctgatgaaagtgagcaaccccgagactaaaattgggagactctaaatctttccttttacgtagagtccatcaaatgcatatgcctatgacgttaacatgatcttagacgtgaggaacttgcttcaagagttcagtgcaggctgtggaaccatgttaaaattgttcgcatgttcggtaagagaaattgattacaagagttcacaaatattgaaaccaaacctcgattattgttttactaattgcttgtctttaattggttaaacagaccagtgagaggtggcattttaagatacactctcaattgcaacgaattcaaataaatcagatcggatcgccgttagattccgacggaggagagagttattggcgatgttgaggtcacggcgttcacgttcccgtcacggtgcacaagcttgcgccgttatgtctgccgttcttcttctcgcttccgtctcacttctctacactcgtctctcactcttctcatctcactcgccgaatcacctccgctctggctccagcgaagacacagttttgttccctgattctgtcctcgtctcagattccgacgttgaaaccaccggcggaggaggaagaggatccactacctcaaccgaagacagaatcgacgagcacgacgatgcgatcgaagacgacggcgtttcgaatgaggaagatgagaatcaagacgcagagcaagagcaagaa

SEQ ID NO: 188212 - DNA, 224 bp, Arabidopsis thaliana landsberg
atggatgagtttgtggtagtggacccgaaggaagaagataagtttgaggatagtcgtctggaagattcagaagtataagaagtccaagaaggacaagaaggatcatcagcatgaagcatcttcttcctctaagccgcagccgatcaagaaaaagaagtccaagaaggatcatcatgacgaagcttctacttcttacttggagcagcagcctatcaatattgagt

SEQ ID NO: 188213 - DNA, 46 bp, Arabidopsis thaliana landsberg
atgagatctacacatgggaagtgtttgatagaaaaagatgggacag

SEQ ID NO: 188214 - DNA, 681 bp, Arabidopsis thaliana landsberg
atggtgatgagtccactaagattaaacttcgacatgactcgggccctgtgcaatatgcaattggggtctccctgccagctagctgaggtggagttcagggttgtggctgagcatatcagcaccagatatttagttcaagaatatctggcgaactggacattctcaacctctagtggttgggggaatgttgaagaagaaggatgagggaaaaaagtatgagcttgtgcatctgccctaccgtttcaaattttagaaaaggtttaaagaaccatgcaatgaatggttagaattgatagaaaccttgtgcaatgaaattcttggaaattatacaaagaaagaagatcagttaatgactgctgccttcggacccaccaaagcgaagtctgaactatgtgatggacgctcttaacttcgaatacccagattacgaaaggcttgatgaaggagacagaggagcaaagaaaaagagggttgtaagtattttaaaaaggcaagccatgtggtccattgaaaaagatcagaggtctgctaaaaacaaaaaatttcagcgaaaccgaaggattcggctcccaaaaacgaaagtcctcaatcttggcccttgccaagatggtacaagatgtaccagagaagactgtcggcacctcttcgtcctcctctgctagtgttacagaaatattgaag

SEQ ID NO: 188215 - DNA, 764 bp, Arabidopsis thaliana landsberg
atgacactgatcttgaaacatttcctgtttgtagttgtaatttcatcatcgtgctctacggatgagacagtggtagcggattctgaagccgaagaggaagaaacaacatcgtctgttcatatgattgatgctactgaaaaggcagaaacgccagagaagcctgctgctattgtaatagaggatagccctgttacgatattggaagaaacttcgaatttgaatgagtttaaaagcgtgaacttattagcggatacagaaagtaaaggccacatggatgaaaagaactcaagtgatagtgtgacaatccgaagggatcggaacgatgaggctgaaactgggaaatcggagattatatacactcaagatcttattgttagggacttgcgatcgactagaaaagttcaatcgacagtaggggaaggagttgtggacttcaagcgattcagaaaggtaaaacagaacctttggattctggacaaatgttgtgtttgcgagatgatgattttgcttgttttgttagggacatgttacatgcggaaacagcttcagtaacaaaataccttttgcgaaggatccatacaagtaatccccggtcttatctcttgcttattggctcataatgttttctcctctatgttttcttgaccgtttacttcggtgatgccagagaatacgatagcggggacgtgacagattttatgaaagaagagaagaaaaggaagcagatggaagccattgcagaggacttgtttaaaactgaaaag

SEQ ID NO: 188216 - DNA, 138 bp, Arabidopsis thaliana landsberg
gtcacgcgcttgaaatgcggcggttttatcttcgccgttcgtatcaaccacgcaatgttcgatgccggcggtctcacgctgttcctcaaaacgatgtgcgagttcgtgcgtggttatcatgcacctacggttgctccg

SEQ ID NO: 188217 - DNA, 886 bp, Arabidopsis thaliana landsberg
gtgaggccaacttatacaatgggagagcagaagaaaagtactaagacagccatgcacatgaaaaaatttatgtcttggaaagtagatcgaagagtatcagagcttgttcaagctacctacttcaagaactttttgaagtttgaagaatctaaacataagctaaatttgccgcttcttacagcggtcatgtcattctttgatgacaaacaaaaggctttttcctttccagcagaaaattccatggttgattttggcctggaagacattctctacattacaggacttccaattgatgggaagcaggtatatctttttaattttacttcttactagatttgtcatcagcgaattccatgcttgattgtatgcttgcttggtacatgtatcaggataccagagctctaaaaaataagtaaagaaaaggctcagagattgtcaaaggagagaccaaccagtaaggccttcggcatttctcctcacctgttgcaaatccaatttgaagatgtcccaaagaacattgaagaacagaatttagagccatactttatggcctatctccttttcttgttggtaactttggtcatgtcaaacaagacctaagctatatctccaatgtttcttccactgctacgaaaagacaaggtcaacaaatatgcttagggggcagcaatgttggctatcctaaacgaatctttatgcgaatagaaggaggcttttactaaaggttccaccacaaaactctgcggttttgcctttgctctgcaggtaaagttttcaagtgaaacaaaaactaattatgttgatgttgattatgtgtataatgttaactactctttattatttcgtgtaggtatttgcattagagcgatttactgtctttcaataa

SEQ ID NO: 188218 - DNA, 125 bp, Arabidopsis thaliana landsberg
gtttctcttgttctgattggtttaggcaaatctaaaaccaaaaagggggaaaacacacggaaacacagcgattggcgaatgcgaaattcggatggtcagggctcactagagagagagaaaataag

SEQ ID NO: 188219 - DNA, 286 bp, Arabidopsis thaliana landsberg
atgaacaccttcgcatttggcaatgagcgcttccagttctactacacgttttcggtgcggcacgggagcgggacccatgcgcatcttacgcgacggggccgcgcgaagagggattcaacggcacctcggtcgtgcaggcgcacatgaccaattcgcgcctgtccgatcccgaagtgctggagctgcgctttccggtgcggttgtattcgtacacgatcctcgaggtctcggacggcgcaggccgctaccgaggcggcaacgtcggcatacgccgcatccgcttcct

SEQ ID NO: 188220 - DNA, 188 bp, Arabidopsis thaliana landsberg
gtcagagaatcattaaggtggcaaaatctcctatgtcgcctcctttagccttcccgttccatataacatcagctgggatttcattgctgagcgacaacgggactgaactgaaaggtccaggaatcaacaccattcatgctcgaggtatagttgatcccgattatgtcgctttatttcgcacattttag

SEQ ID NO: 188221 - DNA, 125 bp, Arabidopsis thaliana landsberg
acaatttttacgaaccgttgataaagattcttgtacttgtcaatcaaacattgaagagacttactaagcccattactcgaattaactattgggcctctagaaatttacaaattcggttcctatag

SEQ ID NO: 188222 - DNA, 664 bp, Arabidopsis thaliana landsberg
atggcgcaccggaaaatccggtgtgcaccggacaacccatgctcgcttgtcgtattttggccataacttttagctccgaactccaatttcgatgaccttgttcttttttgaaagcttataaaattctctacatcacagagttgaagtcataccattttgattaaatatggcacaccgaacagtccggtatgcactggacatcccatatgttgctgcagttttttcaacaattccaactttgtattgtgggcataacttttagcttcgaactatgattttgatgatcttggactttttggaaagcttatataaaactttacatctcagagttgaagtcatgtcagtttgagtagatttgattttatgaaacacttctaattcaatcatcactttctgtcaactttgtcaacttcacttttgttttgtcactttgcatcccacttctacttcttgatgtgttgaactcttagcatgtataaggtgccttcaatatgaatttgtaatgtcttctatgggtcttataatgccttctttgaggtgttgcatcctcagagcctcaatccaatctacttcgcatcatgtgaactacaacgcacaaacacttgggaacattagtccacaaggttatgttgatcatcaaacaccaaaaccacttagccaaatg

SEQ ID NO: 188223 - DNA, 358 bp, Arabidopsis thaliana landsberg
atgaaagagatcagcggctgcgactggatcattgaagtagtggtagagcggctggatatcaagaaagctgtttatgaaaaagtggagcaataccgcaagccgggcacgctggtatcatccaatacttcgggcattcccattcacctgatggcggaaggcaggagtgatgatttcaaaaaacatttctgcggcacccacttttttaatccgcccagatacctgcggctgctcgagatcatacctaccccttataccgataccgatgtggtggatttcctgatgcattatggtgatgtataccttggtaagaccaccgtactctgcaaagacacgcccgcattcattgccaaccgcattg

SEQ ID NO: 188224 - DNA, 4 bp, Arabidopsis thaliana landsberg
atgg

SEQ ID NO: 188225 - DNA, 75 bp, Arabidopsis thaliana landsberg
atcttgtccccgatttcatcatctttcaaaattatcatgaatccaacatcttatccaccaattgttatcatttaa

SEQ ID NO: 188226 - DNA, 101 bp, Arabidopsis thaliana landsberg
tgttacggcgatttctggggatgatcatttaccattttttccgactgaatcgatcggagaattccaatcctatatataccgagcttttgcggttttcgaag

SEQ ID NO: 188227 - DNA, 76 bp, Arabidopsis thaliana landsberg
gcaaacagctacaactgtgccagaattcccgtctaaactcgactggctaaacactgcccctctccagtttcgccgg

SEQ ID NO: 188228 - DNA, 235 bp, Arabidopsis thaliana landsberg
atgtacgagtacggcgtcttcagcagacagcgcttctttcctgaaaaggtttgtgcgagtagtactaattactgagtcacttacgcaatagccccatgaggaaagaggaatggatatggttgttgtttattataaagaggcccgagggcccggatcgcgacccgggaaactttggaccctgtgcagacccgggaagacggtcaaggctactccaaaccgcggccacgaaacatga

SEQ ID NO: 188229 - DNA, 59 bp, Arabidopsis thaliana landsberg
caatcctgcagatcggaaagaacaccaacggcgaaagcactctgctgggccgacactga

SEQ ID NO: 188230 - DNA, 143 bp, Arabidopsis thaliana landsberg
gtttaagcaacggtgagagattccgtgaaagcggaagaagcgaaatcgttgaagtggctgactctgaatctccaatgactcgagttagaaggaaacacttggaagcaagtcaaaaccaaaaccaaaatcagaaccagagcatt

SEQ ID NO: 188231 - DNA, 491 bp, Arabidopsis thaliana landsberg
atggttttcaccacggcccctacatccttggtgctggcgctcttggtactggcttccggtgcggtttcgttgtttttcatattcagtattcaggttgacattcagcggagtgaatatatgctggcttcacggagcgcacaaccgctgccctgaagtcgccggttggtgcgtccacgtcactgcactttgcagcaaaggtcgaacaagaataaaggaggacctacgtggcagatctccccgagtgcgtcgttccgggccccgaggcccaatacctcgccttcctggcccagggccgcttcatgctgcagcgcagccgtgccaccgggcgctacgttttctacccgcgcaacctggtgccgggcagcggcgagacggacctggaatggatgccggccagcggcctgggcaccctctacgcgatcaccgtgaaccgcgcccgtggcggcgactacaacgtcgcccttgtcgactggacgaaagcgtgcgcatga

SEQ ID NO: 188232 - DNA, 590 bp, Arabidopsis thaliana landsberg
acaagtcaacaatgtggagtgctccaaagaagtttacaaagactccaaaattccagatctcaacttgagcagcatcgcatgtctccctccttcgttaaaagttctgaagcagcacaaagtaacctttgctttcgtcgtcatgaattctgatcgccaatggagcaacaaaacaactcggaaaattacgatattttctggaataatcagcaacagtcacacgaagccacagaaaaaagcggatcacgatttgaggttatggtttgagagttatgatcgtttttccaagacaattcagactgacaccacttgcaaacgaccaacttcgtgagcaattttccaacatcgtacgacgaaccaagagacgggaaacatatccacagattgcccagacagacagctctccatatagtccaatattgttccaatcgaagcgctgtgccgaaagttacatgcgcttctctccagcagatacagcaagacgaaacactgatcaaaagttacaaaaccagtcgactttgaaatcaatttccaggaagattccgacgaactgcgtggcgtgtaacctatccacggaatgccccgaaaagtag

SEQ ID NO: 188233 - DNA, 232 bp, Arabidopsis thaliana landsberg
acggcgacctcgacagcgctggtcgccgggctggatgcggcggtcgagacctatcgcgaggcttaccgcgcctattacgatcgtgccgccacgacgacagcccggcgatccgcgaccccaacgccgtgatctatctcgtgccgtgcgtcggaatgatgtcctttgccaaggacaaggcgacggcgcgcatcgcggcggagttctacgtcaacgccatcaacgtcatgcgcgc

SEQ ID NO: 188234 - DNA, 115 bp, Arabidopsis thaliana landsberg
atgtctgtaggaagttccgaccagcagccagaaatacgagtctccatgcttccaaactttaatcaaagtagcaatccagtgaactatgtaaaagagattttggacgtagtagatg

SEQ ID NO: 188235 - DNA, 452 bp, Arabidopsis thaliana landsberg
atgggattgggatttgggagcaagagtattccgggcatagatgggtaggtaacttgattgtttttctttgttcttttttcagacctctattttctagtggtttcctaaggacggtgcaagctcttttggatcaaactcgacaagatgaaatgcaaatagttggatgtcagtctcttttcgaatttgtaattaatcaggtcagcttcttacatattcgatagaattctcttatagccacatgtcagggtgctatctgatagaatggttaaagacatatgaaataatgaaatagcctgattgattcatgtgaccaaatttttcagaaggatggcagttccctatttaacttggaaggctttctcccaaagctgtgccaattaggactggaaggtggggatgatgacaggtcgcggagcctgcgtgcagcgggacttcaagccctttcacccctg

SEQ ID NO: 188236 - DNA, 568 bp, Arabidopsis thaliana landsberg
atgatcgaccggccgagttcgctgaagtgagccgaacgcccgggtcggggcggtcgcggcgggtgcgcggggttgccgactacgcgctcggagggcgaacccgtaggatcgctggcgttggtttttcgtgcgctgacagtagctgcggaaactcctgccgcgactacccggccgaagtttcctcaggcgggccgcgcaccacgtcgttattacggaggattcagtgattcgcacccatcaggccggaacgttgcgcgcaacggacgccggacagactgtcaccctcgccggctgggtcggccggcggcgtgatcatggtggggtcgcgttcctggacctgcgagacgccagcggcatcgcccaggttgtcgtccgtgacgagctgctggaagcctccggcgcgcacgagttgcgcaacgagtactgcatcaaggtgaccggcgtggtcgaggcgcgaccggagggcaatgccaacctcgacctgccgaccggtgagatcgaggtcgtgacctccgagctcgaggtgctcaatccgtccgccccgttgccgttccagatgtacgaacgg

SEQ ID NO: 188237 - DNA, 263 bp, Arabidopsis thaliana landsberg
gacacgtttttattctaccggaacaagaatttcctccttaccctatagcgaaaacccgaattttgatgataatttggttgttctgggtattgaaacgagctgcgacgacactgccgcagctgttgtaagtccgtttaatcacctttcttcttcttgtcgtgttaacttatagtattagtttactgaacctttctgatgttggaatgtgtggcttttaggtgagaggtaatggtgaaattctcagtcaagtcatttcttctcag

SEQ ID NO: 188238 - DNA, 258 bp, Arabidopsis thaliana landsberg
atggatgcgatgaaggagatgcagtacatgatcgccgtcatgcagcccgtagacatcgaccctgccacggtccttaagccgaaccgccgtaacgtaaggataagcgacgatcctcagacggtggttgctcgtcggcgtcgggaaaggatcagcgagaagatccgaattctcaagaggatcgtgcctggtggtgcgaagatggacacagcttccatgctcgacgaagccatccgttacaccaagttcttgaaacggcag

SEQ ID NO: 188239 - DNA, 73 bp, Arabidopsis thaliana landsberg
atgaatgccgcgcggttgaatccgtcgttgcatgtgtcggtggtcgaaaaaacgggcaagtttgttgtcgaag

SEQ ID NO: 188240 - DNA, 109 bp, Arabidopsis thaliana landsberg
aacttgaccttgacttcctagattcgtctttgtcactacttgaagattcagaagatgagcttgagtctgatgatcgccttttcgaatgctgcaaatcaataaacacaat

SEQ ID NO: 188241 - DNA, 401 bp, Arabidopsis thaliana landsberg
tttctacctgatacaatctcaggacttgagaaactggaggagctagatttatcttcaaaccgtctcgtgtttcttcccgactctattggactgttacttaatttgaggatcttaaatgtgacggggaacaagctaactttactcccagaaagcattgcgcaatgcaggttttgtgcttttacgtttgttcatctttcgtttcagcttagcctattacctaattctgaagagagatatgttcttgtgattaggtcactggtagagttagatgccagcttcaacaacttgacttctttgcctgcaaacttcggatacggattactcaatctcgaaaggctatcgatccagctgaacaaaatccgtttcttccccaattccatatgtgagatgcgttctctaag

SEQ ID NO: 188242 - DNA, 750 bp, Arabidopsis thaliana landsberg
atgtcactagatggtcaccctggctttgattctgtaagttgagactgcataagaatgacttgtattttttgaccttcttgattgtgatgaggaaagaatccttctttgggatcaagtcaaactcttctcttcccctttcctcgtgggggtttcgttggtcgagttagcatatctgggcatctaagttagctagttgcaattgatgaataataccagtctacatggctgcaatctatgttgacaagggtaggctagttcgacgttttaaggactattatattgaagctagaccttagttgtagaattaaatttaacacctgtatactatgaaaactggtgagcctcgagcatatttgacctgagtctgtcctgtcatatttccttgctgttgcctctgagactgagctgcttcctatctttgcagggtggtgtcttatggttccagaacttgagtgatcttcctggtggctcttttggaccagtcttcccaattttaattgctaccttccattacattaatatacaggttcttgcgaatacttggagcttaaaatatatgttgatgggatcgatattatacttgttactcttacaatttatttgtttttgcagtattgtttccgttgagtattcaaattgcaggtgacagtattatatatgtatgcttctaacttttaaccctttttccagatttcttttgatacatccacaattcgtcaaactactggcttgactgggctgctcatgaga

SEQ ID NO: 188243 - DNA, 267 bp, Arabidopsis thaliana landsberg
tatgtgtccgtatttattaccagacagtcgatatgtagtaaaatattatataaggaaaaaaataaaaataaatggaggtgagcataaattcgctaaaaaagaaaagaaagaaaggtgtttgaatggaacttggtgcaatgggggcaacaacacaaattcaaagaataaattctcagcagcaatagcttctcaacgcaacaaagcaaagcttttgctctatcaatcttcagccttttcttcttcgatttcacaagtttcatcatctcg

SEQ ID NO: 188244 - DNA, 79 bp, Arabidopsis thaliana landsberg
atggaaaaaaaacctggacttggcttgggagcaaggggtcagtggatgatgatgccgtttggtcgaagcaacgctccaa

SEQ ID NO: 188245 - DNA, 57 bp, Arabidopsis thaliana landsberg
atgcatatggtgtatgcgtttagagcactgatcgacgggcgcagtctaagacgtcga

SEQ ID NO: 188246 - DNA, 554 bp, Arabidopsis thaliana landsberg
ggagctgtttaggatcaccgaccagtacacatcgcgcagcaccaagagcaaggggaggaagaactccaacctcactagcttgggcagcctcgtcaatgacaaccatatcgaagccatgggtaagacgagaaaacagtttacgaccactgcttgatacagtggtaaaaacaatttcagcctcatttgcaaaacttgcctcaagactcgctcgtgcttcctcaagattaaaattgttaccagcacgaaactttccctccacaataagaaggcgagatatttcaacaagtactttatctctggcttcaaccaccgcagcaaggtgctgtaacaatgcatctcttttctggtctcttgaaataaggacttcaggatcaactccaacagatccctgagaacgtgtagcaaaagctgcagcattaagttcccttttaagtccagctatattttgagaaatctgtgtttcttgtagtctgaggttacgcatgtgtcgtagaatctcgtcgcgggatatagctaatagctgatcacttcttcgctccacagaaactgcttga

SEQ ID NO: 188247 - DNA, 198 bp, Arabidopsis thaliana landsberg
atgagacggccattactcactgtagctgtgaaaaaactgtggagatcaccatcaccacaaaatgatatcgaagatcatcatcaagaagaagatgaagaggacgacatactcagagaagtgaacctacttggtggtctacgacatagaaacattgtgaagattctaggttacgttcacaacgagagagaagtgatgatg

SEQ ID NO: 188248 - DNA, 590 bp, Arabidopsis thaliana landsberg
atggttcttctgatggatggggaaaataatcttatggaagaaacaacagctgttatcgaagaagactcctatgatgacgagtttccctgcggagatccacaagttgagcctcgtgttggagatgaatttcaggtcgacattcctcttatgatgtctgcatccaagcgcgctgtgtttctttccaatcctgttgctttggatgattctacatgttcttttctcgtcggtctacctgtccaagtaatgtggatagacaaagttggaataggacaaggaaatggagatggcaatgttgacatgaaccaatctttgaaatctttaagagctaaaaaaggccgttgctctgccaagatcagaggaaagagtgacaagaattcggaaaccaagaagcaaagactgaatcttgaggctgttcctgcgataccttccagttcttgggacgatttggaggttgctagctttgttcttggtctgtacacatttgggaagaactttactcagatgaataatttcatggagaacaacccaataggagagatcatgttgttttactatgggaagttctacaattctgcaaagaaccacacttg

SEQ ID NO: 188249 - DNA, 2294 bp, Arabidopsis thaliana landsberg
atgcaaacttcaaaccctaaatttatagctatttctaccgtcaactggaaactaaatcatgaatctaataagcaattcttgcagaaccaaacagaaaagagaagaaatagcagaaaaagcaaagccatagatgcacataccacggcaggccaagcaggaaatcctttgactttggcaagaacgagatcgccaaccttccactctcggcgagcggatgatgccgccgcagccctaccaccccctctcttgcggctcggagccatcggaattcagaagaaaaaaaaacaacgaaaatcagaaaaggaaaaggtaaggattctaactctcgaagttaagccagaaccacaggcgaaaattagcagctcggcagtgcctagggttttcggagacagattccgctaaagaactcgcaggcattgaaaattcccaacccaatcgacggatgtaggcacgcatgacagaagaaaatcggtcccgtaaaccctaattgagatgagggagagagacaatcgaagatttctggtggattctatcgcttttgtggaagagaaacattcacacacgaaacccaggagagggagaagaaaatgaaaaggaagctgctctcgatatgaggagtatgtatatttttgttaatcgtttgttcggtcggtgtagggtttgccaatttccaaaggcgatgtctaacgtgcgccttacacgcgtaggttaactttatttcctttaaaaggttaaaagagcgaatctgactggtatgtacaaaacgtcgatcagagttaaaaaaaaagaaaaaacaaatccacgtgattcaaccactcctctaagcccattctatttgaaacggaatgtatgggctttaataaggtccattcagcccattattagcttaacctcgttatccaatccatcaaacattttcgtagtagtttgtagttgtcatgtgttgaccactacaaaaagcaaaaagcatcagttcccgatcttgaaaaactcgaccaagacgttgaccactaaaaaattcttcctgttggacggaccttttgggagcttatgctgcctttcatgcgactgctttgtgtctcttcttagtttggaagattacttcgtatttgccacgtttctcgactgcaattgaacgtgacacgtgttccgggagatatttttggttccagaaaagtacgtttcggattcgcgtttccgtctctcgctcgacacgtggcactcccattccttaattttttcctttaataccaatcgagacgtcagtttatacctccgattctctgttgcagcgcacgcaatcaccaatggacacgcgtcacaataaaccaatgatagctcgacacatttagcgtcggggagctccatggatcttttattctagcataaagccacgtgtgttattctcgagcaccggaccaactgatataaatacgatagatcacgacgcgcgtgtttagaccgcaaaaactcaaatgcttctagagggaagattctccgtcgtccagatgaacacgaatagacggctcaaatttaaccaaccgagtcgattacccaactcgggtaagtcaggtatagagaatgagcgagtcctggttcttgtcttcgagtccattagctgggacatccacacgctatgcacaatcgcctccctcagccgcagattctgcgcaatcgccagacgaattctgtggcggcggctctgtgtgaaccgtgcgccagggatggtggctgcactgtccggcgaagatcccagcggtcgaatcgacggcggctggcacgcgttagcgaaactcatgttcttctgcggcgggggtgagtcgactcggtatttcaatctgagtcaaccgacgtcgggtcacttcgcctgcgagtccagattctccaagacatccgggagattcttcctgccaaagaattgccgccgtgatctcctatacatgagcgatccgtgcgagcatcaggcggtgggtggagatgagcatttaggggttttcagaggggtatttcgggaatttatgaggtcaaagacgagggagtgtctcgtgagaagacaagcggcgctggaggagaaggttaggtgtccgtattgcggagggcgcgtgtggagcatgacggcggcgcgtctcgtcccgaagagtgcggcgcggcggctgggatcacgtgaaggtgggttagagttcttcgtgtgcgtgaacggtcacttgcacggcccttgctggctgattccgcattcatcggaggaagaagacaatggagaagacgacgacaacagtgacggaagtgtgatctaa

SEQ ID NO: 188250 - DNA, 356 bp, Arabidopsis thaliana landsberg
atgacgtcgattaaatatcaaaataaaattagtgaacgagtcaataatcgtcaagaacgttccgagtcaaaaatagttcatgtacttacactaatgtttatcatgtgtcaatcgcaactcaaccaaactcaaataacctacactatccgtccgatgaacatgaataagcgactggagttccaatccaacggtcaaaattaagactagtgtttgcagtttcctgcatcgtaccagatcacttcaagtggcagtttgcaaataataaaaatctcaagacgccgacaaaaacgaaaatgacggttaacgagaatcttggtgtaataattgcagaaaccgacactttatgtcaaagttag

SEQ ID NO: 188251 - DNA, 198 bp, Arabidopsis thaliana landsberg
gaacatgagcagccccccggcgtaggcgagcgcgaggagcagggcggcgaccgcgacgcgccgtccgcgccgacccctgcggtccgcctcgggctgccgctactgtggcggtcttccgcaacgcgtccgtacccgcacccgcgaggactatccgtcagcgtcacgtcggggctcgagcgggaccatgtgatatggcct

SEQ ID NO: 188252 - DNA, 319 bp, Arabidopsis thaliana landsberg
atggagattagttcagaggataacaatcttatggagaaggttttgcctcctgttgagcaggtactaacttggttggttttgaattcttaacagtttattatttgtgggttttggcaaagttgaggactttgattcaaatttgtatgcaggagagtgatgttgagctggagactaaagttaagaaatatcttagaggagaaggtgctaatcttgaggtatatatatgtttatatagcttttgatgattgtgtcttttggttgtgaaatgcagtggttgagtgttttctttgtgttccacagacattgaaagataagaagc

SEQ ID NO: 188253 - DNA, 113 bp, Arabidopsis thaliana landsberg
accagcttgaatcctttggacaggaaatcatccctgagaataaaaacgaacgagatactgaacatatcgatacaaaaacgaatgaaaatgatattaaagtaaattggacttag

SEQ ID NO: 188254 - DNA, 344 bp, Arabidopsis thaliana landsberg
agaagatcaagatctataaaggctttgaagagcagggaaggagggttctgatgtgtgagaaaaaacacctacgggaagagagtgatatttcttcttcgaattcgacagtgaaatcgggagagagcaagtttggaagaaggtctttggagaccaccttggtcctctatcacagatctgttcgaatcccatcgaaaaattggattttagggatgattgaagagttagccagaagaaagaagaagagagatttgtgtggtgcatctgagaagaaggagagatgttccgacgccggcaagacggagcttcaccggcgtcataaaagaaaatcggaggagaagctttga

SEQ ID NO: 188255 - DNA, 603 bp, Arabidopsis thaliana landsberg
agcttcgtgctgccagcatttgacacgctcgttagcatgattgtgctagggttgctagcgttttgcgcagaggtgaggcattcggtaacattctgcttctacacatttgtgtaggtaactcgcatagctcgactgctgagaatatttttcctttgtcttaaggtacttttggcacgtggtcttcagcttgagaaaatcagcaaagctgctaacgtattgtacatcgaggtagacttccacttccatagaagacagtttttttatcggtttatttctctttttactcttaagctatgcaataaaaacactcttttttgtttagtaagttcatttctctctttgatttttttggtttgggtttggttaagattaaagatggtttgaacaggattagagcatagtgataaatcagaaagacctagtttttaattagtgtctttctcgtattaggtggttttatcgcagttatggttagtcagcacgggaaaaacaggatcgccaggtttgtttagccggcttgttgggtgtttgctcattctcctatcggtaggctacacagtttacatcggacctgccaaagatactgagtcatcaataccatag

SEQ ID NO: 188256 - DNA, 1459 bp, Arabidopsis thaliana landsberg
  unsure (1)..(1459): unsure at all n locations
acgttccttcgttcatttccccaaaaccattcctttgccggagctcattaatgacactctcaagcgtcggatcgagagagtccaagattcgtcagtctccatcactccgttgctccgagaatggtgccaacgcggaaatcaaacgggactttcagaactcaggagcatcattacctctcttcacagatccaatcgcttctctcacgctctccaggttagagatttcaaaaacaagcaaaattgggacttgtacaaatttgttaatcttagggttttttttttgtgctattaggtatcggattggatgattgaacaaaaagcctataagctgagttcaatggattttgagcgacgacttttcttggctgctaaagttggtggtgtggaagaagcggctaagttcttcgagactgttcctgtagaaaagagagatatttatttgtacaacgctctcttgagctgctgcaaaacacacagctctttgggcatagctgagactacttttcagaagannnnnnnnnnnnnnnnnnnnnnnnnnaatcctcaattctatagcaccatgctctgtctctaccatcaggctgaagatcacgacatggtggtgaagcttcttggcgagatggacgagaaaaagatgcaaccccaaggactatgctttgtcaagctcttgacttcttactctatggcatctgttgtagatgtacaaggtgtggagaagtttttgagcaagtgggaggtgatgattcaggacaaatggaccacattctactttccaggattggtctacatacgagcagcatttatggaaaagggtttagctttgcttcgtaggtcagagacatttgttgatgacggctgtagagaattcatatatggatgtctcatgactgtttattgtaacgagaatctaacagaggatgttcaccgtctctggaacttggctaaggactatgggatatcctttgacagttccagatgttctgatatcgtcaaggcgtttacgaagaagggtgatctcgatggggttatgaaagagtggaatgagtgtcccaatcttgatctgatggactttggtctccaccatagatgcgtgaagtaggaggctgagaaggttgttgatatgcttgggaagaaggagagcaaatgggagagtttggctcacaaggttaatactttggtggaggatgaagatgctaaagaagaggagaggaggaagagagtggcagaggccatggaagggaggctgcatgaccgctggaacccaaagaacagcatggctctctccgcttttgcctgcgtgcaatatgtggagggtcggagagacatggagagtacagccgacattctgagacttctgaataagcgagagcaagtgtcgcatgcaatggacaaaaaccgattgagcctgaagatggtggaggcaatgagaggaggaggatacgttggtggagatgattaa

SEQ ID NO: 188257 - DNA, 371 bp, Arabidopsis thaliana landsberg
atgtttggccgcatcgtcttgcgtccacctaacgaacatgcacatgcacatcgcggctgtgactgtcgcaagtagctgcggcgaccaaacgaacaacctaaacttaataaaacatagattagatacatttagttggtgaaacttaatagagaagcatgaaattttatggattaatatgtaattgcctaattaaataaagcaacttataaataggaagccattgatctcaagtatacctattttcactacactttctcgatacctaacttatatacttgcctaatctactcgtctgcttacagatttgttttggtagacggacaaccatagatgaagatacgcgtaaacactcattgttcgtcttggtctag

SEQ ID NO: 188258 - DNA, 806 bp, Arabidopsis thaliana landsberg
atggccaaggtaagttatgactatttcactaaagaaaacatatcactatcttatgtggcaagaaacaaacataacacaaagttttgcaaatgcagcttgcacttgaacggaaagtagggagcaatggaaagatcgcagagtacaagagtatggcagagcagtttatctgcaactgtgctcaaaaaggttccaacaacgttaagaaaacccctggcggtttgctctacttcttgccgtggaacaacctccaatacaccacaaccgcttctttcgtcctctcagcatattctaagtatctcacaaaggcaaaagcctccatccaatgtcccaaaggtgctcttcaagcttctgatcttctccaaatcgctcgttcccaggtagttaataaaacctaatatagtaccaactataaaacatgttgttgaaaatatatcaagacttttttcaatataatatatactaatttgcgatttcctcatgttatataggttgactatatacttgggtcgaacccccagaaaataagctacatggttggagttgggaccaattatcctaaaagaccacaccatagagcagcctgtattgtgataatcaaaaatgatcctaaaccggtgacatgtaatggcgggtttgatgcttggtacaacaatccaaaaccgaatgctaatcttttggttggagcaattgtgggtggaccggacgagtacgatgcatacggagatgaacgatctgattttcagcacggcgagcctgataccgtcacggttgctcctttgcttggtgttctggctgccattgcatga

SEQ ID NO: 188259 - DNA, 531 bp, Arabidopsis thaliana landsberg
atgattattgatctgagagagattgtacaactactacaatcaatttggttaatcgtatgtaagtaactagagctggttttctggtatcatcaataagcgaaggaaaaaatcgtacaactagaaataaccaattactttcatcggaattgaaaaaagacatcaataaatttcatatgcaatataatttggcaatttgcaaaatctacattttttatactagagtagtaacatggtttaacttcagtagtttatagaacggggacaaaatcggatcttgggggtctcggaggaacaatcttcacctttaggggtttattcgagactttctttaactgttggggcttttgtgaaataaccttcaatttccgtggcttcgttggaatatctttcgatatcggcggaggttttctgagcctcaacaccatccccgtcctctctccaccggcgacggaagaacccttcttctcatctccggtcaaaaacggatgcaacagcaactccgaagctgatcactctcctcaggtttcttga

SEQ ID NO: 188260 - DNA, 180 bp, Arabidopsis thaliana landsberg
ttcagttgcgtcaagcatatatgaaagagatgatgaagtaccaacgacaacagctgttgcagctagtcgaatgagctcacaaccactgtcacgtagaacacggacactgaaaggtgatagtcagtttggtgttagagggctcacaaatggttcatatagaaccgcttctaatgatgaaag

SEQ ID NO: 188261 - DNA, 143 bp, Arabidopsis thaliana landsberg
accttaccatgatcacgctgaggactctccaagattcaagtaaaaaccggattttctacggtgaaagcggagagcatcctcgtttgcttatagcttcatcaaaccggatccaccttcttcagaatcttctagtggaaatgtga

SEQ ID NO: 188262 - DNA, 403 bp, Arabidopsis thaliana landsberg
atggggcgcactttgatcctgcaaacaagaaccctgcgggtggtgtgcttccgaataatttcttccggccctatccgggttatgggagcatcggctaccagacggactttttgacgtcgagctaccatgcacttcaggcccagttgacccggcgttttagaaatgggcttgaattcggagtggcttatacctggtcgaagtcgatggactacgctgacagctacaacggcaaagtttcgatgtaccgcgacataaggacctgggattacggcccgggaggggatgaccgtcggaataatttcattgcgaactatctctatagcctacccaagggcagccgcatctggagcaactttgcgacgaaggcggtgctggacaactggcagatctcgggcatcgtttc

SEQ ID NO: 188263 - DNA, 376 bp, Arabidopsis thaliana landsberg
acactgatgggtttgtgattccgagcttggagattgaagaagacaaggttaataataataatgattcagaagttgaaacatcaaaaccttcttctcctaaggttagtgattgatttcttacgtacaagacaagtttcaaaaaaatgttgttaactctttatctctcattgtatgattttgtagagtaaagctgaagaaaacatctacttaggaccacatggagctcctccttcgcagctacaagatggtggtagtaacacatcgagccgcaagcagcggtttaagcagatgctcaaggaagcagatcagaaaatgagcggctctggtcgagaaaacaaaatggctaacttaagagagcttgtaggcgggggtgcag

SEQ ID NO: 188264 - DNA, 280 bp, Arabidopsis thaliana landsberg
atgggcttgttcaagaccctggctgccaacgtgggtaagagcctgactgccgaggacttgtcgaagactactgggtataatgttagcctcattggtacgtatcaggactcgttgctaaagaggtttccatgtggtctttggactaatgtattctagctcgagtgatgcgcgtgatcacctccatcggttttgcaaatgagactggatatcaaacttacactgcaaatggttgtaccttggcccaaaacaaccccggaaatatcggaggcctgattatctc

SEQ ID NO: 188265 - DNA, 591 bp, Arabidopsis thaliana landsberg
atggacttcagtaaaatgtttttcatgcgtaataattggttcatgaaggtatacatcttagaacactcaattgctttcgagtaaatgtgtttatacttttgtttaaacgatgtctctagcaaaacaagggtaacctgttgaaatttatacataagccaaaacaaggttctagagtagacaatgaacagccttcaatggtgagtagatgtaaaacttgtcaactttcatccctaatatatactctgaattaaatgccacacacgatacaatgtattaatcactctaatttcttataaattagtagatggtttataatccttccaaaactaaaattttgtcttttcctttttgaataaatacggtgattagcacgagacattagtttaatcgttgtgttattcgttgtcgcatttatacacatagcacattgcccaagccgctgacagccgccactaaaatgtttacgtttctactcgattaattttcttaacattttttaaaatattaagttttcattgattttagcatctcaagaagtgtgacaagacgaggactgataacagccgtaaatatttaacaatcggagagtga

SEQ ID NO: 188266 - DNA, 78 bp, Arabidopsis thaliana landsberg
attttccttacaccaattaatatcacaaaactcttctcggtcaagatatatcttaccgttgatcatcacgtgttttag

SEQ ID NO: 188267 - DNA, 229 bp, Arabidopsis thaliana landsberg
tgttgtcagattacaatttgacaacgcttgatgtcaacattgcccgaatgaagactgcaaaaactcctgttttcacccgccgcttacgcggactcgatggtgaagaacgccagcgacagcgccgtgagcaactgatcgaagccggcctcgatgcctttggcggcaagggctatcacaacgctggcgtgcgcgaaatttgcgccgaagccaagctcacggaacgctattt

SEQ ID NO: 188268 - DNA, 102 bp, Arabidopsis thaliana landsberg
atgggcattattcgcattgataaagctgccttcggtggtgactgtcagtttcagagtctccagggtcgctatggtctgaaaatcgccggccgtcgcagcagg

SEQ ID NO: 188269 - DNA, 64 bp, Arabidopsis thaliana landsberg
atgacttcagtatccaatattcttcgtctttcagagttatttgagctggacacaagcaaacctg

SEQ ID NO: 188270 - DNA, 102 bp, Arabidopsis thaliana landsberg
gagaggctaaagcgcgaaatcgccctgatcgaggaacgccaccgccttgatccggtaacgagccacaagctgcgccttcacacgcaccaagccgcgcagtga

SEQ ID NO: 188271 - DNA, 320 bp, Arabidopsis thaliana landsberg
atgatgctccataagaagattaatgctcaagcctcctcgaaaccaacatcattgacaacaaagagatacttgcaagacaagaaacagctctcactgaagagtgaggaagaagaaactagcgaaagaagaagtagtagcgatggatataaatgggtcaaaacagattctgattgtgagttttcatcagatcctcattatttttttagtaaaactcaaaaacaaacgactgattctattttcttttgattacagtcatagttctcgagatatgatccaaccttcatcattcaagctcttgcaaaatcttcttccaagtatag

SEQ ID NO: 188272 - DNA, 623 bp, Arabidopsis thaliana landsberg
atgacgggctctgatgagtctttgcttggtgataaattcgctgggtatgattcttagcctggatagaagtgagaagagcgacaatgtggtgcatattgagccagtgcttgagaagatgaatcttggcgagcctatatatttaaagtcggctaaagagacacactgcaataaaggtgtttccccagatatatcctccttgacgtggatgggcccaatcgtgtcggatgttatcaagagtaggtttactctcttagcttcatcttgcttgagtcgtataattatgaggccgcacacacgaacatatatatctgataacatagattttgcttaacctttgttcttttatgtattagcttttgttatagcatgtgttctagttgcatatcacatgtctttgaagcaattttttgacctcaactaaaattgcttgataatgttcatatatggttgatcttaacctgcgtcttttaatgcatctggagaatgtttatgaacggatctgttcctaaagccaacaatgctattatgcaggaatgaccgtgttgttgtctcctgcagctggaatgtggtttagcaagttcaagattccatcacctggacatattctcatatatgggcctcct

SEQ ID NO: 188273 - DNA, 824 bp, Arabidopsis thaliana landsberg
atgccgaggctatcgagaaaggtttcaagaaaggtatgtatatcttttagaattagtcagaaattaccatattcctttatgaggattgattgcttaagaatagagctagaactttgcttcttcaagttagctagcatttattctgcctaacctttttcatcacactcatggcagctttgctgttggatccgcataacgaatctgtgaaagaaaatatcagggttggtatttttttatacatttctcctatttaaaggatcgttctgtaacttacatgagagtctgatattgacatggtgtgtatcacaggtggctgaacagaaaataagagaagaacaacaacgacagagacgtagccaggtattgaaatgtctgaccagtcatctcatgtagcgtaaataagtcgagagacgaaaggaactaatgttttgtggtgttgtgaacagcagaacacgagcacgttttacactcaagagccagaaatgggaggaggccagggaataccatctcagttctcaatgcctgtaaaccctgatttgatgagcatgttcatgaacatggcgggaaacacattcccgggaaatcattctcgcaataacgagggaggagcaggtggagatggtaccagaaatggtgcagatgagcctgagatacatgtaggcggaaatatcaacatagatctcggaggcacagagcaaatgccggaagatttatcgggtgcattacgatcaatgatgcagatgtttggaggatcaatgggaggcactggtaacaataatcctcaagattctaatggtgcacaaggcagaccatctgtgaattaa

SEQ ID NO: 188274 - DNA, 464 bp, Arabidopsis thaliana landsberg
atggccacagaacaagaattcacacgcgcatcacgcttctcacgtgactcaagcagcgttggatattactcagaagaagataacacggaggaggaagatgaagaagaagaagagatggaagaaatcgaagaagaggaggaagaagaggaagaagaagacccacgtatagggctcacgtgcggaggaagaagaaacgggtcaagtaataacaacaaatggatgatgttgggtcgaatacttgacccgagatccaaatgggttcgagaatggaacaaagtctttctccttgtatgcgcaacgggtctattcgtagacccactttttctctataccctatcagtgagcgacacgtgtatgtgtctcctcgtcgacggttggcttgctcttaccgtcactgccttacgctccatgaccgatcttttgcacctttggaacatttggattcagttcaaaattgctcgccg

SEQ ID NO: 188275 - DNA, 387 bp, Arabidopsis thaliana landsberg
atgcctacttgtcatggagctggtggtttagccgggcagtataagtttggtgggaggagtggtgggtgtgtggcactgttgggagtagctaaactggtgctagggttggtcttgggaggttcattggtgggtatattggagaagtttccggttggtgtgctcggggcattgctactatttgcaggggtagagcttgcaatggcggctagagatatgaatacaaagggagatgcatttgtaatgcttatgtgcacatcagtctctttgggatcaaatgctgccataggctttgttgctggtgttcttttgtatgtggttttgtggatgcggaactacgggcgagcgaagccgagcagccttcccccgcaatccggtgaacatgcttga

SEQ ID NO: 188276 - DNA, 1817 bp, Arabidopsis thaliana landsberg
ttatgctatcgtaagacacaagcagaagcagcatcaaatctttctagacaagaagaatcagcagcaacagcagcgtgttgatgatgccacgcaacgtgctctcttagagaagcaggatcaacagtgtattgcggcaacaagaatgattgaggaagaactcctcaagtcttctcgatcatttgaggagtacttcgatttaagaacttttgacgcccgtgtacgaactatattgcaacagcttggaacaatgctttctcagcggcgtgctgctgctgctgccatgaataatggagaggctcaatgtattacatctacccgagcggtccatacttccataagcgttagtaactctttccaatgcggaagaagccttgtgccaattaattgcaccactgcaacagctggaggtacacatctttgatctctcctgattctttttcaaattatactgacatgctgttctttattttgactctataccttatcatctgcagcattttctattgggcctgacatgcagacacaccattctactggtgctaatcaccagatggttgaagttaataggccgaatatgaaccaaattacttgtgggatctctagtcctctgattactggatttaacggcaactgtgtaccagtttctgctaatatacccatgacttctcaagacctcttcaatgctacacatttttcaactttacctcaaccttttctgcaaccaccacctgatcagtcacacatgcatagtaatctctctccctatctcttactatctatttcttttcgctttcacttttcttttatgcaattcatgtaatggtacgtttctgacaagttgctttctcccatgagaaggatactcaatgagcaacgttgcttcttttggtcaaagtaatccatatccctgtggagttgttatgtcatctggctcaatggcagttgctcagaattcaattccatggaacaaccccaatcctatgcagggacttgaccctaccgtcacaagttatcactcaaacctgcaaccaatgcaacaaaccccataacctaaacgtcaactacatcatcccctgtggaataccaatttccaatctgctcccaataacagagacaatttgcctcaggtcagtcaacaactctcaaatcatgggtctcgccagcaccgaggacaacactcccaaaatctttatcctggccaactccagaaccaagatcgtttacttcccaatctgactcagcgagctatggctttagctgctcctgtcatgcatgtaccaagtaaacaggttaatgaagattgtggtcaaacgtcttcgaacaccgttctgcggtggattccgtttatgttccatgcacgtcattgcaaggctaagaaagataagtgtgcgagcaagttttgctttcaagccagaaagatagtgaaacatatagactgctgcaaggtccctaactgcaaatatagatattgtcttggtactcggatgtggttagatcatttcaagcaatgcaaaagcatatcgtgccgtacctgtgtagctgtcagagaatacatggaaaagaataaatacacaattgtacctctccgtagagctaagtgtagctcagctagttcaaaatgtcaacccaagaaatcctcaaaatccaggcaagcatataaaaaaggaggtgctgaagctccatctgttgatgctgatctgcaacgctcaatcaagcgcccgaaactacatcgaccctcccaaaatatcactcccgagacaaagagcattttcggtgacaggatgtgctgtttgtctgtaaaccctattccttattga

SEQ ID NO: 188277 - DNA, 308 bp, Arabidopsis thaliana landsberg
atgactccaaacaggtacgcgataacagctgtccgatcagatcaaacggtcaggagtgccccacgccaaagcggtatgatcaaactaatctggactgcccattacttgatctacggccaccatcgtagcaagctcagatctaatctttgttgtctacaaccgatcggacggttgtgggcttcttccccaaccagcgctgggccggccggctagtgcgccccatggcgagagttcgccgacgcggacccagatcaagcggccagacacccattgcatggattcacccggcgcaacacagggctgggact

SEQ ID NO: 188278 - DNA, 1332 bp, Arabidopsis thaliana landsberg
gtggcagtctctttggatgttagtttcggaacttgagtacgatgatagctaccacactggtgattataagagcttctctcagtttgtttacaggtctttgctatcaaacaatgcacctgttataaaacatttgcatctgaatcttggccctgactgtcccgctatagatattggactatggattggttttgctcttactcgccgtctgcgccagctgaaaattaatattcgtacttcttccaacgatgcgtctttcagtttgccgagtagcctatatacctctgatacattagagaccttgagactcatcaatttcgttctattggatgttccttcttcagtttgtctcccgtctctcaaagttctacaccttaagactgttgattacgaagacgacgcatctcttccaagtcttttatttggttgtccaaatcttgaagagttgtttgtggagcgacatgatcaagacttagaaatggatgtcactttcgtggtgccttccttacgacggttatccatgatcgacaaaaattatggacaatgtgatcgatatgtgatagatgtcccttctttgaagtaccttaacattacagatgacgcagtttacgacgtccgtcaaattgagaacatgcctgagttggtcgaggcacatgttgacattactcaaggagttactcacaagtttctgagggctcttacttctgtccgacaactttctctatgtttatcactctcagaggtaatattattgaatctgttttacatattattattcctctcaatatttactttgtgttgttgttgtgtatattaaaaaaaacaggttatgtgtccttctggtataatcttcagtcagcttgttcatctgaacttgtctacagttgttaaaggttggtgggatcttcttacttctatgctccaagattcccccaaactccaatctctcaaactcatcgatgtatgtgatctctataatatgcttttatctggtttagtttcccaatataatttgacttataactctgtctgatatgttggtcttagaaacaacatgagtcgggtctttgtgggatagaaaccccaattggttggaagctgccgagttctgttcccgagtgtttgttgtttagtctagaggcatttgagtggattggatacaaagggaggcgaggagatagagaggtggcaacatatgtcctaaagaatgctgcttgtttgaggacagcaaagttctctccagagtctactgatgtgggagagaagtatcatatgctcaaggagttggcatcagtacctacagcttcaacttcgtctaagcttctattcgactga

SEQ ID NO: 188279 - DNA, 219 bp, Arabidopsis thaliana landsberg
tatctccttcagattgggtttcataattctcttgctgatgcttcactattcgttaactcacatggttccaaagttacttacatcttggtctacgtggatgacattattgtcaccgggaatgatccctcttatgttgcaaagttctacattcctttgcagctaggttctcgattaagaatccagtggatcttcatactttctcggtatagaagcccaaag

SEQ ID NO: 188280 - DNA, 30 bp, Arabidopsis thaliana landsberg
atggctttgaaggatgagaaacagttaatg

SEQ ID NO: 188281 - DNA, 1887 bp, Arabidopsis thaliana landsberg
atgagaaaagatattagcagaaaggatataattgaggagattccatattctggttcttcgagaatggaattaaagcggagtcatcatcagtggttgacagaagagtctagctcagaactattcagtaataagagacaacaagtggtagagattgatgctcatatgaatttatctccatgggacacttctcttgtgccctcacacttcactgattgcttattcgatgatcctgccattgcgcatacatcacatcttctccgtaatggtcgaaattatactgaggagcaatgcaatcctgtttcatcttttggtttgccactggctcatcacgggagctcttttaatcttgacaccattagaaaagttagcaacgtgcccgagttcatggttcagctttatggtcagggaatttcaacatcatttgaaacggctccttctttgaatagtggtcaagagagtactacgctatcctttggccaaaccttcagtaatactgacaggagcttcatcttgccagggcagttcgctagcaaaacagatggaaatttcattcgaaacttcaataatgaaggtgttggtgtcgtaccgattggtgattattatgacaaaggagatgaaaatgtcctgtcaacatttcatccgttggagaaaggagtagaaaactttctatcgatgggtcagtctcttcaaaaggctgattgtaatatcttctcagtgagttcctcctataataagggacaggagaactttatgcctcttctctcttgtgaacaagtacctgaatacgatttcatgaccgaatctaactatcacaatgaaaatgccaatgcgttgtcagcgggacagtccttatttacggaaggcggtgagatgacatttatggtttctagccaagagagagcaggtcaaagcaatgatcaaatcaggcgcgaggatgatagaagcgagaccctatcttttggagatcgtcagaaagaaaccgcaatgggatcatcagtccgtgttagtaacaattatgagaacttcagccatgaccctgcaattactaaagatcctcttcatatcgaagcagaggaaaatatgtcttttgaatgtagaaatcccccttatgctagtcctagagttgataccttgctggtgcccaaaattaaagatacaaagacagctaagaagggttctacaaacacatttccttcaaatgttaagtccttgttgtcaacaggaatctttgatggagttactgtgaagtactattcgtggtcacgtgaggtcagtttgtttgttttttacctgtcctgagaaggaacctttcacctttactcttctgtgtgctgaaacattatttagcagagaaatctcaaagggatgataaaggggactgggtatctatgtggttgcggcaactgtaaacttaataaagtaagcaacctgatataaatggttttagtaattcactggcaggtctgtttgatacaaatctatgtcatctgtttgttttccaactgaattctgcaacaggttctcaatgcgtatgaattcgagcagcatgctaattgcaagacaaagcacccaaataaccacatatactttgaaaatggaaagaccatttatggcgttgttcaagaactgaagaatacacctcaggagaagttgtttgatgctattcaaaatgttacaggatctgacatcaaccataagaatttcaacacatggaaaggtagtagagcaacatagacacttttataggatatagccgcttagagcatgacaacaaaatacaaaagccaatcattgttctaattttgtctcttttcagcttcatatcacgttgctagacttgaacttcagcgtatctatgggaaggatgatgtcactttggcatcttga

SEQ ID NO: 188282 - DNA, 247 bp, Arabidopsis thaliana landsberg
atgaaaacaaatcttgttggtttgattgtcatcgattggtcttaccaaagaatcatccatataggcgaagtaggaatgtgttcagaaaaagcaaaatggtgagtgatgactcgcctccgatgttatcaatagtgtcctgactcgccttcctgatatatgcgagcgtcctgagctatatgttatggacaatggaaaaagtccaattccaatcttcaaattagatgcaaagggaaaaagcactatttga

SEQ ID NO: 188283 - DNA, 1024 bp, Arabidopsis thaliana landsberg
atgcccccttcttctagatccgccgctaatcaaaactcctcctcttctctccatctctgcaaacattcaccgtcggcgactctcgacctcttaatcctaatcctcgtcctcttctccggcacattcctcctctcctcttacttctcataccttatccactccttatctctcctctcctctcatttcccttcaatcaccatctccctctcctctctcctccctcctctaatcatcttcttctcctccgatcacagcaccgaagatgaagatcatcatcatccctcaggaaaaatccctcctccggcttcgttcttcttcgcattcgcagtttttttcgcggcttcaattgcgtttctcgacctgtgttgtggttcaagatcaaggaaatgtcgtaaccctaagtgtaaaggaatgaagaaagctatggagtttgatttgcagttacagacagaggaatgtgttaaatccggttcggttaaagagattgatcggttaccgtggaaaggaggtagtgagagtaatcctgattatgagtgtttgagagctgagctgaggaagatggctccggttaatggtcgagctgttttgattttccgatcaaaatgtggttgccctattgctaagcttgaaggttggggacctaagagaagtcggcgtcataaaaagtaagttcctttcgaactcaaaatgttgtagttttaagccttgaatgattcatgttattgcattggtttgtgaatcttggccacattggttagatggaacttggtgactagtgaatttgtaggttctgtttatcctgttcttgcgacgtatttattgccattgatcattttgagaccagtttgtagtgaagatttatgtttatgtaatcctcctcactggctatggattttagacaagtctttaggctttgatactcgtttcttatcgataatggtgattcggctttgttattcctcgtggtcggttggcttattccagttgtaatgatgaatggacttgtcaatttgtggacatatga

SEQ ID NO: 188284 - DNA, 169 bp, Arabidopsis thaliana landsberg
atggtggtggtgcttaatgctcggtggagaaggagagaaacgggcgtggaagtgaactctccactgagtcaaggcgagcataaatgcgggcaattactgaatgcgtggaggcaagtggacgtgggggcacgggcgcacgacgacatgaggaagaagaaagctctcacag

SEQ ID NO: 188285 - DNA, 197 bp, Arabidopsis thaliana landsberg
actctgcggttgcttatcgagttgtttgggctacgaacgatgcgaacggaattcttattcaaggaactccttctcagcgtgaagaagtctataatcctatgacggatctccttgttcgggatctaaatcatattctcctcggacttgactatgtttcgaatgctcctgatgcgagcatgattaatgatggggactac

SEQ ID NO: 188286 - DNA, 1508 bp, Arabidopsis thaliana landsberg
  unsure (1)..(1508): unsure at all n locations
atggcggctccgcgtgacgcgacaacgaagggacaggcgctcgctctcctcgccgctgccaaaaaccacggcgatttggcggtgaagctctcgtctcttaaagaggtgaaggagattttgctgtcattggaggagccgtctttgtctgctgagattttcccttatcttagagaactctgcttgtcccctgaagttttagttcgcagatcccttatcgagtgagttactcagaaattttacggtttcgtacctggttttactttcttctttcactacggatgatgttttcccttgctctacacgaactcgtaaagacttttgttttgttgcgtgtttagggttcttctctatttttcccaaacgtttgatctttccaaacccagctgctatgttgtagaaattatgcaaacgatgcctccagtctgcatgattgtttgtttttggtgggattaatttgaaacttccacagcaatatggtggatattactcgtccgcttactttttttttagttcacctcgcatagttttcataagttatgttaaatagttacttctgtagctattcatggtgattaaatttgtctgacaagttaagagacatgttgatcgatttcttctggatggcaggatcattgaagaggttggtttgcggatgctggaacattcttatgttctagtgagtgtcttaatacacttagtaggtgacaatgatccaactgttgcagagaaatctatttctactggcacaactttctttcgcagcatcttggagaagatggaaacgcaggtccatactgtttctcaagttggatatcttgtcgtatgcatatgttgttttgaaattccttcttgagatcttttcaaaaatcctacatttggagtcagtatttaccagcaaaagtatattttacatgctcgtagctgctgatgagattgaactattgttaacccatggaaactttcctcttgttttcattttcgaaacttcggttggtttttatgttggtgctacttatttgatgtttaaggctactgtcataaggctgtagggtaatatgaaatagtgaataaaataaagcactgcaagcattggtaattttctgtttaagtttttgttggatatcttatatgatactctcgctgatatgtattattcttgatgatctctgcagttccatcaccgtggaaagttgnatcgttggtgtggggaactgtggacatggatggttaagttcaaagatactgtctttgccactgcattggaggtatgctggctgtttatggcctctctttttttttgtctgtctgttcctctcgcgaggtatgatctttggttgagtatttgttctgcttctctctcaatttaaggttttctaacccaagtccgttgtttctttcacaatagcctggttgtgtaggggtgaaagttcttgctctaaagtttatggagacttttattttactctttactcctgatgcatctgatcctgagaaagcttccagcgaag

SEQ ID NO: 188287 - DNA, 134 bp, Arabidopsis thaliana landsberg
atggacttatcaggagagttacaggaagtgaaaatgcatgaagatgtcgaaggtgatggacttaacccagaggacatccaggaggaggatactgttgaggatacggattcaatatcacacgagagagagataaa

SEQ ID NO: 188288 - DNA, 570 bp, Arabidopsis thaliana landsberg
ctccgacacgccgtccgtaacttctaagcgccatgagcacgagaagtatagtaagattcccctacgctaccctcgcattcctagacatactccattactttcggtcccattaggaaaccaccaacgtttgaaggtgaacattattctaggtggagtgatatgatgagatatcacctaacctcactccacaaaagcatatgggatgttgttgagtttggagtacatgtaccatccgtaggggatgaagattatgatgaggacgaggtggcccaaatcgagcacttcaactctcaagcaactactatactcctcacctctctaagtcgagaggagtataataaggtgcaagggttgaaaagcgccaaagagatttgggacgtactaaagaccgcgcacgaaggagatgaggtgaccaaaattaccaagcgggaaacgatcgagggggagctcagtcgttttatgctcaaccaaggagaagacccgcaagccatgtacaaccggctaaaaaccttggtgaatcaagtgcgcaacctcgggagctctaagtgggatgaccatgaaatggtcaag

SEQ ID NO: 188289 - DNA, 164 bp, Arabidopsis thaliana landsberg
aatagcaggtacggtccaggagtcaacattcattgccagcttccgcagtccaagaagccctaacatagttgactcttctctccagtgcattgcatttcaaaatggtacttacgctggtacctcaggggcttcccggcctgcaaccagtagcatcgtctcggcag

SEQ ID NO: 188290 - DNA, 79 bp, Arabidopsis thaliana landsberg
aaacccgagagcgcaggtttcagagttgaattatagtggtgcaccggacagcgcaccggacatcgcaccggactgtccg

SEQ ID NO: 188291 - DNA, 284 bp, Arabidopsis thaliana landsberg
tgttcttagcccaaaccttgcaccaccgggaaaacatgttctacacgcttactgtcctggaaccgaacctttcggtctgtgggaaggtcttgatagaagaagtgccgagtacaagaatctcaaatcccaacggtccgaggtacctattcatttttgtaatcttcagttctctgaatacgaaaaaacaaatcttaaccaaaatgtactggtaccgtttggtgaaggtgatgtggagagcggttaagcgggcattagggccagggttcaaaagagaaaagtgcgag

SEQ ID NO: 188292 - DNA, 109 bp, Arabidopsis thaliana landsberg
tatcggaagcttaggtcgatatggaaccaaggaaacggtcgaaaatgttgttgttcgagattgtacttttagagaaacaactaatggggttagaatcaagacatggcag

SEQ ID NO: 188293 - DNA, 386 bp, Arabidopsis thaliana landsberg
aaaataataatttagaaaaacgcggtagacaatccgccctaatattactcaaacgagaaatagaagatatcgaaaaagaggaaaaatattacggagcgatccaaactcatctagaagattggagaaagcgtgtcattcttcaagagactgcaccatcgagactagctctgtgcaatctgattcaaatgtgtggcagtcgatccttcgtgaaaggatattcttcataccccaaattaaagcttccagctccgagtgaaggggagaagggctcctccagaggcactttgcacataagagtactgtttgatcaattccttgaaaacaccaccatcctaatcccatggttagatccgaagatttccatgatccatcaaccctacatctaa

SEQ ID NO: 188294 - DNA, 1184 bp, Arabidopsis thaliana landsberg
atgttgggaggcaacaatgagaaccctgtgccgcaggttctaatgaacaacagccagtttcactatcaatcaaacacatcgttgaatcagcttcacttgcttgggacgagtaagtttctgaattctgttcatcatttggtttgaatgtttttagaacttaatagagctaaagcttgttcctttgtatgtggttgcagtgagagctggttgtactattgatcctgtaaactactttgctaatgataaccttgctcctatgattcggcataatagcacacgcggaagggaaactgaaaacaacaatattatgcagagacaggagaagctacagatctctttgaattataactacaacaacaatagtgttgttcaagatgaagtcccaaaacagaacttagtgtcaactggtctgagactatcttatgatgatgatgagcgcaactcttctgtaacttcagcaaatggaagcataacaactccagtctatcagtcactaggtgacaatatcagattggacctcaatagacagagagacgagcttgatcagtttatcaaattccgggtactaattctatctccaaagcttatgtttttgcttacatatcccatgtcgttgagattgttttctcttggaacaggcagatcaaatggcgaaaggtgtgagagatattaaccagagacatgtcacgtcttttgtcacggccttagagaaggatgtgagtaaaaagcttcaagaaaaagaccaagagattgaaagcatgaacaagaagacccgggaactggtggataagataaaacaagtggcagtgaaagctcagaactggcattacaaagcaaaatacaatgaatctgtggttaatgccttaaaggtaaatttgcaacaagtgatgtcacatggaaacgacaacaatgcagtaggaggaggagttgctgatcatcatcaaatgaaagaagggtttggggatagtgagattgatgacgaagcagcttcttacaattacttgaacatcccggggatgccaagtactgggatgagatgtaagttgtgtaacgtaaagaatgtttcggtcttgctcgtgccatgtaggcacttgagtttgtgtaaagattgtgatgtgtttactggtgtttgtcctgtttgccagtctttgaaaacttctagcgttcaggtcttcttcttctga

SEQ ID NO: 188295 - DNA, 518 bp, Arabidopsis thaliana landsberg
atgccaggtcctgagatcatcaaagaagtgagttactagcaaaaagctaaactctcattgactcgttccatatgtaataaacaaagttcatgagtttctaactcaaaaatcaagtgtgaagtagcacgatatctttttatacgttacttcatgtcatctaatacatacatgtaaagctgcagcttttgcagttggtgatgaattgatgacacaaacggttccaaaaatgattcaattagaccaaactgtgtctgaatcgtttatgcctcatctcgcaagtcgcaacaattgaccaacaagcacttaccatggaggacaaacaacacagaccttaacatgaacgaagaatttgatattaacgagcttttgttcaatggtgactaggcgtttgattttaccgacttgatgctttttgacagcaagtacttttgatttataaagccttttatgctccttcttttcaggtccatgttagtaatttagattcttatacgttacttattctgcttcaagtttag

SEQ ID NO: 188296 - DNA, 116 bp, Arabidopsis thaliana landsberg
agcttttatgcgacgttcgtgaaagcgaaggataccttttgttgagtgagcgaagacacgacgagggcatgcggtcgatgacgtggcggtcgtatttttctgatctgatcaactaa

SEQ ID NO: 188297 - DNA, 483 bp, Arabidopsis thaliana landsberg
atgaggctgcaaacagtgcgcctgcgggcccgtttatcagtgaatcctttgctccgcgatacagaatccggcccccagcctatccgtatcctttctgaaaaaccgctgctgcagttgcataacacgtatatcatagcttccgcgaataatggttttatattggtacaccagcagctggcacatgagcgggtattgtatgaaaggtatggagtggcagcgcatggaaaaaaaatgaccacacaacagaccatgttccccgcaacgctggaactgggccatgcagatgccgccctgcttaccgatatgctgcccgacctgcaggccatcggctaccaggtagagcctttcgggaataacagttttgtaatacagggcattcccgctgatatggaagcgggcaatgaaaaacattctatagaactgctgatagagcagttcaaacatttcagcagtgatatcaaattcagcaaacgcgaaaagctg

SEQ ID NO: 188298 - DNA, 504 bp, Arabidopsis thaliana landsberg
gcatctttaacaagagaaggattctctatcgtgcctgatgtcaagtgggatgatgttggtggacttgagcatctacgacttgaattcaaccgctatatagtcagacctatcaaaaagcctgatatttataaggtaactgataagtcacttagaactgttatatagtcaagattacttgctttttctcttgaggtctgaatgtgccactttggatctttttaggcttttggggtagacttagaggttggatttttactctatggaccaccgggttgtggcaagacattgattgcaaaggcagttgctaacgaggcaggagctaatttcatgcacatcaagggtgcagaacttctaaacaagtacgttggagagagcgagcttgctattcggacattgtttcagcgtgcccggacatgttcgccatgtgtgatcttctttgatgaggtggatgctttgacaacaagccgtggcaaagaaggtgcatgggttgttgacggcttttga

SEQ ID NO: 188299 - DNA, 379 bp, Arabidopsis thaliana landsberg
gtaaacaaaagtcaaagaacatcaacgatcgtccgtgcttaattagtgacatccctattaggtaaaggccctaaacccacccaagagtgtaggctgatgcttgtgatttatgacgtgtagcctacgattgtcgctaaatttcggcagcataaccccgctgctctccaagcacacgcctgaacatggtgtgttggagaacaactggttacacaaccgaaattccgcgtcaatcgtaaggcacatgtcacaaatcacaagcatcggcttacactctcaggctgtccaaaatacgtggacaattccggaacggcgaacctcacaagccaatgtgacgttcgccgttcccgaacgggtgacgcatacggttcgctacggttaa

SEQ ID NO: 188300 - DNA, 122 bp, Arabidopsis thaliana landsberg
accccaaacctaactatgaccctctttcgttcgttgccgtgaagtctccatcttccacactgcatcgcaactccgccggtaaagctcttatcgtcaaagtgataacgaaaacaacatgttga

SEQ ID NO: 188301 - DNA, 466 bp, Arabidopsis thaliana landsberg
  unsure (1)..(466): unsure at all n locations
atgttctcggagctgcgatgccctancctgcttcgcttcaccgagccgtgggttggggatactaactggactgcgacaacccatctctacaaccagagtcgcggctacggctggtactcgcgcaaggcgactggaggcgcactgacgatcggccgcccgctctcggaccacgtgcgtgcattcctgacgtaccgcctggaggacgtgggcgtgtccggcagttccagcggcacagacacggcaaacctgttccgcggcggattgacgtcctcggttcgaggcacgatctcctactacacgcgaaacaattgcctgttgccgaccgaaggaaactacgcgacggcgttcgccgagtacgcgggtcgcgcgaccggctccgagaacgaatacgttcgctggggtggcttttcgcggcactaccaacacatcggcggaccgttcgtgctccggcttaatgccgaacttg

SEQ ID NO: 188302 - DNA, 18 bp, Arabidopsis thaliana landsberg
ctaattgacgtgctttaa

SEQ ID NO: 188303 - DNA, 121 bp, Arabidopsis thaliana landsberg
atggtagaagaagcagaaaaagtgacaggtggcaagagaatagatactttgcttgagaggagcgagcgagtggagccattaacaggcccacctaagttatcaaaactcgtccttctttatc

SEQ ID NO: 188304 - DNA, 333 bp, Arabidopsis thaliana landsberg
agtgtttccatcatcgccttgatcggcctggcctctaccgagctgttcagcgggcattacctggcgcctttcattgccgggtttttctatatggtccgccagccgctcatgaatatggcagcacccatgacctcggaagtgaccatgaattacgtgggcaaaaagaaccaggaaatgatgagcgccctaacggcttcgatctggaacgggggctggttcctgagctcctgggtatacgaggaaatgcgcagggtggaattcgctttttccactattttcctgatcaccgcggccttttatgccctgggggtcattgccaatcacccgctcacg

SEQ ID NO: 188305 - DNA, 336 bp, Arabidopsis thaliana landsberg
atgatgataggttacctgtttggtgtaactgccatcccggtatggatctcccagcaaaaagcttttttctactcaactctcggggggctggtggttaccttactggtagtgtttgcacccggcatcggttcactggtagcgcttgcattactgggcttatgcaatgcattgttatggcccgcgatctggccacaggcgctcgatgggttaacaggcaaacaactggctaaaggatcagctatactgatcatgggcattgccggcggcgccctgctgccgctgatctatggcgctataggcaaatacagcaataaccagcttgcgtatcttttactg

SEQ ID NO: 188306 - DNA, 1355 bp, Arabidopsis thaliana landsberg
atgatgggaatcttcgacatccaagagatggaagtgcttggaaggcatttgatcaaaacatatcatgaatatgcatatgacccaagaaatgttaaactaggtttagcaactgacggttttaacccatttggtaccatgagtgttaattatagcatatggccagtgatactatttccttataattttccaccatggatggcaatgaagaaaacatcaatgatcctctctatggttatccttggaaagcatatgcctggtaatgatatcgacgtctacttgcagccacttatcaaagagttgaaagaattgtggtttgttgggattaaaacgctagatgcttccacaaagcaaacattcgacatgcgagcagctatcatgtggacaattagtgattttcccggtctgggaaatttgtcgggttggaatacgtatacgaccgcggcttgtccaagctgtaattttgatggcagcggagaacgtttacgccatggaaaaaaaaattgttttatgggtcatcgtcgttttcttcctcaagatcatggttatcgccaagataaaattaattttgacggaaagatagaaacaagatctccaccgaccacattgtcaggttctacagtcatccatcaactagaaaaagttaatattacttttggtaagaaccatggtgtagttggagttggaaaaaaaagagatcgaagtggtgcttcggtaagtgattctactagtagtactcaacaatggaagaaaaaaagtatattgtttgagttgtcttattgggagtttgttatgataaggcataatttggatgtcatgcacatagagaaaatgtgtttgacaatttagtctacacatttttggatgacaaaaaaaaatcaaaccatcccctgagtgctagaaaagatcttcgtgaatgaaataacgttctgacttgtggcctgatgataatgagaaatatcaagcaacatatttttctttgaacaatcaagcgaaagacacttttccaagtgtcttccagaatgtaaaactccggatgattatgcttctaatttatcaagttgtgttgatgtcaatggtcgaaagctatcatgcttaaaaagccacgattttcatgtaataataagaaatctattttcacttgcgatttgaaatatgttaccaacaaacatgacatcaacaattgttgagctttgtcgtttttgagagatatatctgcaaaggtgcttgataccgatgagatagataaattacaatacattattttagtaactttatgtcgtatggaggtttttttccttacctaggttatcggaagcatgcttgcattaattgtccgctgcatattaggaatttga

SEQ ID NO: 188307 - DNA, 167 bp, Arabidopsis thaliana landsberg
cttcaagaatccacgtcgaaagacgacgcttctcatccaaaccttctggtgaaaccagagagtttctcccttcacaacctacttttccggtcgtcgacgccggtgaaatcctaccggataaacggaaggttaagacgggatcaaatcctttgcacaacaaacgatga

SEQ ID NO: 188308 - DNA, 190 bp, Arabidopsis thaliana landsberg
atgcaagccaaacacctgcgcctgctgatgatcctgctggcgatgggcaccctgctggccggatgcacccgcggcaccgcggacctgcaccagtgggtggcccagcaaaaagccaagaagggcgcgccattgccgacgctgccggtcatcaagacgatcgagacgttcgcctacaccgaccaggacaagc

SEQ ID NO: 188309 - DNA, 388 bp, Arabidopsis thaliana landsberg
atggctagtcagttgaagttgcaaggtgcttctattccagaaagagcttcgtctctggcacgttggaatccggtgctgcttcaacagcgtgtttctgacttagaggcggcgaatgctggttagtgcttttatgcttcctttcttctatcttattaaactgcttcttaatctaaactttttgcttgaccgtttctcgctagatatggctcggcagttttatgttcttgaagagaaacattctcaaaatcaggctgaattggtccggtggtgctctgattttgaagaaaagtattcccaaagtcagactgagctggcccaagtttctgctactctgaacgatgccaacgtgttgaactctactctgcgcgctcagcttgattatgaaaag

SEQ ID NO: 188310 - DNA, 532 bp, Arabidopsis thaliana landsberg
atgggttggtccttatttacacagaaactagctatggaactccaatgcattacgttggtaatcctctgtttcaagaatggtgtccaataccctctcccttcttacttctatttgcaaagtgttgagagaatacgtaatcaccagcgtttcaacgacagtgcattggttataaagatgcagagtggtgccgttgtgagttacaaggttgtgtggttgttccctcgcaatagtacaaccatcgactttttgatttactcatctgatactggcatgtgggaagctcgaattgcgacttgtcttcattcttccttctggtttagtcatcacaagccgattgctttgaatgggattcttcattggctttgcaatttcagcacttcttttgtagcttacgatttctatggaggtcatgatgattatgcatgtcatatcatatctctccctgattgtgaaaaagatgatgatcagttacggcgttttaggagaacattgtcgacctcggatgggtctattgtctacttcaacgagtttg

SEQ ID NO: 188311 - DNA, 649 bp, Arabidopsis thaliana landsberg
atgcttgaagaaggacttgaaccaactgttgaactgtacactgctcttctcgctgcttacactcgcagcaatctcatcgacgatgctttttcaattcttgataaaatgaaaagctttcctcaatgccaacctgatgttttcacgtacagcactctgctcaaggcttgtgtggatgcttctcagtttgacttggtggattcgttatacaaggaaatggacgagcgtttgataactccaaacactgtgacccagaacatagttttaagtgggtacggtagggtcggaaggtttgatcagatggagaaagttttgtctgatatgttggtgagtactgcttgcaaacccgatgtgtggactatgaatatcatccttagtgtgtttggaaacatgggtaagatagacatgatggagagctggtacgaaaagttcaggaactttgggattgagccagagactcggactttcaatattttgattggttcttatgggaagaagagaatgtatgataagatgtcgtctgtcatggaatacatgcgaaagctagagtttccgtggacaacatcaacctacaacaatatcatcgaggcgtttgcggatgttggtgatgcaaagaacatggagttgacatttgatcagatgcgtagcgaag

SEQ ID NO: 188312 - DNA, 253 bp, Arabidopsis thaliana landsberg
atgaagccatggaagctcttgtccacatatgtcgtgaaggttgtgggacaattggacctcgcgataaggcccttaaaggaagccataccgtgtgtaaattcccggcgtgtaaagggcttgaaggtgcgctcagacatttcttgggatgcaagtctagggcttcatgttctcattgcaaaaggatgtggcagcttcttcagcttcactcttgtatctgtgatgattctaattcttgcaaagtttctctctgctg

SEQ ID NO: 188313 - DNA, 45 bp, Arabidopsis thaliana landsberg
atggccatgatgggttcaacatcagaaaagatgtacctctgccag

SEQ ID NO: 188314 - DNA, 55 bp, Arabidopsis thaliana landsberg
gtttagctccggctatgaggatattgcgcacaacacaaagcctcgtatcaagtag

SEQ ID NO: 188315 - DNA, 2583 bp, Arabidopsis thaliana landsberg
attcttgtaccgtgtttcaaacacatgatgctcgatgctggtaaatcgttgtgctccttgctgaagatggtgttcaccgcattcccattggatgcggctaatacacccttctgacataaagctattgtaccagaaagtcaatgagctgataaacaaacatgtgaatactgttactgctccacaaacttcaggagatgataactcttttggttcgattagctttgtacttcttgtcatcaaaaccttggccaatgtacataaaaactttgtcgattcatatgtgttggtgcgtatccttcagcgccttgcacgagacctgggatcagcagtgggttctcatcctagacaagtacgtcattcttacttaaatttttttctgctaagaggtcaatactgcttgctttcgtttgtatgggaagtttaaatgagatttaaaaatttacttggcattttccacgttagtgagtattggaatctcctatgcatcttttcagctttgcaccagtgactttcattaatgtcttgtaaagatcttaggagttagactggttcctctcttacatcacctttctactcagactcatgctttatgttattagctgacatctttctggtcttttcatacatcaagatatcatttatatccctgttttcctgtaatttaccctttttccatctgactagtggatggagactagataacctagtcgttacccaatcacggcttactctggatctttttctctccatttccagggccagcgaacagattcagattctgcagtaacttcttctcgtcaaactgctgatgttggagcagtcatatgtaatataaagtcggtcttggaacttattgatgaaacggtcatgcttatagcagattgcaaaagatctgttactcaaattttgaacaccttgctttccgaaaagggtactgatgctagtgtgcttctctgcatactagacatgataaaaaggtgggttgaggatgatttcagcaaaacaggcgcatctggtttgtctggttctttccttacccaaaaggacgtagttacttttctcaataagctttcttatattgataagcaacacttctcatctgaggctttggaagagtgggatcagaagtatcttcagctgttatatggactatgtgctgattcaacaaagtacgttcgttgctttttcatttttcctcccttttgtcacatctttcttttaggagatggataatatatcttcatctatttaatgaacaggtatcctctaggcctacggcaagaagtctctctgaaagttgaaagacattttatgcttggtttacgggcaagtgatcctgggatgagaaggaagttcttcttgttatatcacgagtctcttggaaaaactttgttcgcgcggttgcagtatattattcaaattcaggactgggaagctttaagtgatgttttttggcttaaacaaggtcttgatctccttctagctatcttagtcgaggacaagccaattagcctggcgccaaattctgcaagggtactaccacttttgccttcagataatcctggaatacaacaccaagctcctgctaacttagagggtcccgaagaagttacttcaatgtttgacagcattgttatgaagcatgcacaatttctgagcgcgaccagcaaacttcaggtgattacaaatcatttaaaactttctttagtgttgtcatgggtctttctctttgttattcctgatcgaaaatgttgactagattaccgtaagtccttaagcgctatatccacctgatccatatgggttatctgaataatacgttattcatatactgattactgaagtttataactttttgaaatttccactataggtgggctgatgtggtcattccttttaagggagctggctcacacggatgccaatgttgcatatcatctgtgggttttggtatttccaattgtatgggtaaccctgctcaaggaagaacaagtagcattggctaaacctatgatttctctactatcgaaggactaccataagaagcagcaaggacaccggccaaatgttgtccaagcacttctggaagggcttcaattgagccaccctcaacctaggatgcctagtgagcttatcaaatatattggaaaaacgtacaatgcatggcatctcgcattggcattgctagagagccatgtgatgttgttcatgaatgactcaaaatgtgctgagtctcttgctgagctttatcgtttgttaaatgaagaagatatgagatttgggttgtggaagaagaggtccatcaccgctgaaacaagagctggactttcattagttcagcatggtttttggcagcgtgctcagagcctcttttaccaggcaatggttaaggcaacccaaggcacgtataacaacacagtccctaaagctgaaatgtgtctgtgggaggagcagtggcttcactgtgccagtcagcttagtcaatgggatgccctggtagattttggcaaaagcattgagaattatgaaatactgcttgatagtctttggaaattacccgattgggcatatttgaaagatcac

SEQ ID NO: 188316 - DNA, 141 bp, Arabidopsis thaliana landsberg
atgccgccaatcaccgcccctgttatgccggttatcatcgcggtggtcatcatggagacggtgcttgtggtgtcggtcgtgttggacaccatggtggtcgagaaggagcatgcgctggttgtggtgaagaagcatgtggtg

SEQ ID NO: 188317 - DNA, 658 bp, Arabidopsis thaliana landsberg
atggaggtgagatatttgatccttactcttacttagttccggttaaagcatatgaaagactcaaatttttttacttttgacacagaggcataaagaagaagataacggtggagacatgatcgacaagtgggagtgacatacaaggggaataggttctaagttgatgtcaaggattggttatcgaaaattatctcgtttgggcgccttgggaaatggcatcttagagcctatcctagtagtcgttcttccaccgagggtctccctagacattgctctttatcttattacgagggacaaagaggaacgcaagaaagaaaaggaggaaagaatcagaagtgggaaaaggaaggacgaggcaatgagcatacacaacgagattgtttagcagctccatgagcaaaacgtcctttcatcggaatcatttgacaagggacaagacatgcatgtggaagccaatccatcccaagctgtcttcctctccaacaaccctgatggtgcaaaagaagcactgaactctctgacacaggagaaaagcatggaacaaaatgcatctacagaggattttgagcttattaacaaggaagaatataatagcaagaataagaggaagagaaggagccgaggttggaaaagaaagcgtgagaagaagtttgtgtaa

SEQ ID NO: 188318 - DNA, 678 bp, Arabidopsis thaliana landsberg
aattgcatccgaagggagcttttttaattggctacaatgaacaccctatagatgttgtggatcttgttgggctggacgttgaaaacctaaatatcctagaaacttttggcgggaatagtgaaagaagcagctcatacgtcatcagacgaggtctcccccaagcaccatctaaaacagaagacaggcttcctcaaaaggccatcataaaagcaggtatgtggatgaattcttgtgtattttatcaggagattgtaaatttagtgcaatcttgaattatcgattctattactccacaggtggaccaagcagcaaaaccgcaaaatccctcttgcacgaaacatgtgttgctaactgttggaagccaccacacttcgaatgttgtgaagaggaaggaccaggccacctgaaatcgtaagtaacttgatcaaacacactgctaaatctctgaacttgagcgcgctagaaacttaataaacaaaatatcggtaattggaatttaatgtcatcaattgtgtgcatgaatacagattcgtctacaaggtaatcctggaagttgaagatgcgcccaatatgacattggaatgttatggtgaggctagagtaacgaagaaaggtgcagcagagcacgctgcccaagctgctatatggtgcctcaagcattctggattcctttgctga

SEQ ID NO: 188319 - DNA, 601 bp, Arabidopsis thaliana landsberg
  unsure (1)..(601): unsure at all n locations
atggctgaattgaaaaagctgcaggagacagatgggatagttgattatcatcagaggtttgaagagattaagattcgggtcaatttatcagaggagtacttggtgagtgtttacttggcagggttgcgtgtggatactcagatgcatgtgcggatgtttcaacctcagacggtgcgccattgttttcgtttggggaagttgtatgagaaggcacaccctaggaagccttactcaacaccgtggcaacctaagactgtgggacacacgaaagcnnnnnnnnnnnnnnnnnnnnngatggagagtcacagtaacaaggagaatcactactccaaaccagatttcaaggcaggtaacacaagacgactctctcagcaggagatgagtgagagacgagctaagggtttgtgctatttgtgtgatgagaaatttactccggaacactacttgtcacataagaagcagcaacttttttgtatggatgtggaagatgaattcgaggatgcgttggatgagattcatggtgaagatgacaaaatcatgcctcagatttcagtcaatgcagtgtctggaattgcaggatacaggactatgcgtgttaagg

SEQ ID NO: 188320 - DNA, 245 bp, Arabidopsis thaliana landsberg
atgccatttgcaccacttcgagaaatcggtttgggcaagagcttattgagttacctttcttcgttgatacggtcggtccaagaagaaaaggagaagatgataaaagcgaaaaaggtttaggagatgaagaaaagaaaaatatgaggatacttcaaaaggctttatctcaaagtgcagacgtgatagatcttgagctccgtctaggattagatccttataaaaaaacaacaagtacaagtacgtaa

SEQ ID NO: 188321 - DNA, 309 bp, Arabidopsis thaliana landsberg
atggtgaatttaagaaagaagtttgagatgaaacaggcgaatcagccgggtcgcgtcccaaattatttcaggaatcaatatcatggatatgatgacgatatgccgaatttgctacctacgttcatcaaattgttggatactgagaaggacgaagacggtgccggcttgaacgctgcagagcaaatcgatagggagttaaaaagccgaaaatgtgatatttttaagttccgcaacttgacgattctcgagcttcctcacttgaacgagtttctgttttctacggagctcaatcccccgatcagtgaccag

SEQ ID NO: 188322 - DNA, 239 bp, Arabidopsis thaliana landsberg
aaataatacaaggtgtgggtcaaacggtcaaagataagagacgaaggttgaaacaagtgggccgtagggtgaggcccaaacggtcacgagcattagccttaccatcaccgacaccgtccacaaacggagcatctgacgtcgaccagaaccgacacgtgcaacacacgcgcattcgtacggaacggctcgtctctcaacttgaccttcaagctcaccgtttagacaaaatgcaaaaataa

SEQ ID NO: 188323 - DNA, 119 bp, Arabidopsis thaliana landsberg
gactgatatccttaaccgggctaacggcgggatgaaaatgatacaaaaacactacactgacaactggcgtaactacctaccatgccgtagaacctgccacatacaaacagataatgacg

SEQ ID NO: 188324 - DNA, 272 bp, Arabidopsis thaliana landsberg
atgaagcggcgaagatgttactccgatcaaagagaggaggcaagccgacggtaggacgaagagatccagagatcgcaagaggataatggattgaaagccttgtagaaagaggaaacaaaaaaaacttgatccaatcttaagtaaccaaattggatcttattagatccggattaaccggagattggtccgacgaagcggaaaaacaacaatctgactgcagtcggaaaactttaaatgtaaaaatggtgattcgaactggaaacccgttgtaa

SEQ ID NO: 188325 - DNA, 90 bp, Arabidopsis thaliana landsberg
gaagaagagaacctcatagtattcaacaaacaacttggagaagatagaagaattgtgatgtcacggagcaatttaaatgagctacttaag

SEQ ID NO: 188326 - DNA, 501 bp, Arabidopsis thaliana landsberg
atgaaaccgttaagaggaagagatgatgatgaagttaaagacttcttgcaatatttgatgaaattaaaggatcaagaaggtgactcggaggttcccatcaccattaatcatgtcaaagccttactcacggtaattaattaatgcttttagtttcataattttaggatttaagtatttgtataaatagagattgtagatatttatttgtttatgaaaagtgatttgatcattaatgttattgttttacatatgaaggatatggtggttggtggcactgacacatcgacaaacacgatagagtttgcgatggcagagctaatgagcaacccggagctgatcaaaagagcacaagaagagctagatgaagttgtaggcaaagacaacattgttgaagaatcacacatcactagacttccttacattttagccattatgaaagaaacaaataggcttcacccaacccttcctttgttagtccctcaccgtccggctgaaaacacc

SEQ ID NO: 188327 - DNA, 514 bp, Arabidopsis thaliana landsberg
atgtcttctaaaccagaagaattgtgttcaaagattgatgcttttggaaatgttgttgaagaatctgtggaagcaattgtcactaatgtcgccactatagatgagtgtactgctacaactgagagtgttttttcccctgagggattcgtgcagtatgtgattaatggaatccacgagctcactggcttcaattggtaacattgattatattggttggactttgtgtttgttattgcttgttggtttcttaaggtttttgttcagtgattagtttctaatcttgtatgtattataggtggatgtcaattgttcttacagcttttcttgttactgtactgatgtcaccagtctctatgcgggttcagaatctagctctggagctacaagttagtttcttttgcaggtttatccttttgttcctaaatcttgttgctttttgaacttttacataattctacattttgtatactagagtctgattaggtccatggagaacgtgaagagaattaaaaag

SEQ ID NO: 188328 - DNA, 45 bp, Arabidopsis thaliana landsberg
ggctcaaccgtggacagtcggtggaaactgccacgcttgagtacg

SEQ ID NO: 188329 - DNA, 92 bp, Arabidopsis thaliana landsberg
tcaccgtgagagtcaccgccggagtcaccgccgtctacaccgccggagtcaccgccgtctacaccgccggagtcaccgccgtcttcaccgcc

SEQ ID NO: 188330 - DNA, 265 bp, Arabidopsis thaliana landsberg
aaacatattcatgttcattgaggttaaagagctctcctgaagatgatcaaattaagacgcaacctggatctggcgaaacgtttattttgtatgtacccttgtttattgacatgatctttaatgatcattctttctatccctttctttgtggatcttagtattcttttctcttgtagcttaccagatagtcttggcgatgatttgattattgaagttcgagatttgaaggcgcaacttcttggccgtgtcgctacttatctagcag

SEQ ID NO: 188331 - DNA, 106 bp, Arabidopsis thaliana landsberg
tggtcttgcatgtcgggttatgatatccttggttctcgagagattggctctcaacgtgataggaggtggtaaatgttattttggatttgatcaatcgtacttgcag

SEQ ID NO: 188332 - DNA, 91 bp, Arabidopsis thaliana landsberg
atggctgacactgaaaaggttgacataaaccaaggaagtttaccaactcagaactacccacaagaacactcgactccaccaagcaagatct

SEQ ID NO: 188333 - DNA, 318 bp, Arabidopsis thaliana landsberg
atgtcgcttagcatccgactccaaaggacttttgagaaacgacaattcagtgattacgactatgatgagataacaaaaagtgaagcgttcgaatctgttgaggatgcgacatattttttggactctgtaatccgatatttaaaggaaaacaaccatttacagtgaattcagtaaaagcttttgcgccggcgacagtcgctaatgtgtcgtgtgggtttgatattttcgggtttgccattcaggagccgggggataccgttgagttatacaagcgggatgagccgggcgttgtcattacggaaattacgggcgatgaag

SEQ ID NO: 188334 - DNA, 340 bp, Arabidopsis thaliana landsberg
atgatgagaattcatagaagaaaagccatggaggctgttagacggaatggagagctggaacttgttaagttatggacgtggggtattctcttggtccaactccaggctttttgtcttctgggtgctatcttccttgctggttgaaaatgtgacacattgcatcgtgatgtcgattgtacaggagttccaaaattacacagttgcacgcgatactttccttgcacatttaggtgctactctctggggatccatgagacatataatatccccatcagttgctgatggtgcatttcatcattatgagaagatctcttttcagcttgtcttcatcacccaagag

SEQ ID NO: 188335 - DNA, 59 bp, Arabidopsis thaliana landsberg
atggagtgtctagaaaatgaaatcttcggaagtaccgaagcgaagaggagacaggggag

SEQ ID NO: 188336 - DNA, 276 bp, Arabidopsis thaliana landsberg
atgagcaaaattggaaagctttcaagtttcaacagttttggacgattctatggtcccttcattcttggaagaaaaaagaatttcggaaataatcaaaatcagaattcaaaaatgaaatttatttggacaaaacttttgtctctgagatttgaggtcggtgagcaaaaaatatctgcctcaaatcttccatggacagctggagtctccattattgttcgtggaccactcaaaactgtttccgacatatatgacacacaaaaaacaccagtcaaataa

SEQ ID NO: 188337 - DNA, 292 bp, Arabidopsis thaliana landsberg
atggcagatgacttggcgaatctctgccgatttctcttcgacgacaccgcctttccctctttgtcgtcttcggcatcttcagatctcttttctcgccgtttacgctccgatgattcgatcaagcgcggtctccgatctttctatctcctgcttcgctggggtgtcgctccgatcggcggagacgatgctgattcctctggcaagctacgctttgagacatggtccgattcgcagcttcaagctcttgtttcgatatctcaggcgatccttctactatctcgatctctattag

SEQ ID NO: 188338 - DNA, 333 bp, Arabidopsis thaliana landsberg
  unsure (1)..(333): unsure at all n locations
atggctctggtacgccaccggagaatctattcgatggaatgttgatgaaaggaaggtcagtggtggtggaannnnnnnnnnnnnnnnnnnnnnnnnnnnnnnnnnntcagagtttgaatgttggttgaaccatgctcctcagactattgtggcttgttgtgtgttgcataatctttgtcagattgctagagaacctgaaccggagatttggaaggatccagatgaagctggaccgcctgcaagagttttggagagtgagaggcagttttactattacggggagagtttgaggcaagcattggcagaagatttacaccagagactctcctcgag

SEQ ID NO: 188339 - DNA, 417 bp, Arabidopsis thaliana landsberg
aagcaaaatgtcgtagccttatcatcatgcgaagctgagtttatggcgggaactgaagcggcgaaacaagcgatatggcttcaagaacttattgaggagatcaaaggaagtacatgcgagagagtgatgattctaatcgacaacaaatcagcgatagcactctccaaaaatccggtgttccacggacgttcgaaacatattcacaagaggtatcatttcattcgagaatgcgttgagaatgaactaatacaagtggaacatgttccgggagagaaacaaaaggcggatattttaactaaggcacttggaaggatcaagttcaaggagatgagagatcttgttggagttcaagatgtggtacaagaagacttcaagcttaaaggggagaatgttggattaagcttgaaggagaagtaa

SEQ ID NO: 188340 - DNA, 304 bp, Arabidopsis thaliana landsberg
atgagacagtggtatgcattcagaattctcgagagggaagatgagtctcatactctgctccaatcaaaaaggttgtttcaacagtttctatgtgatgcatatacaactattgaatcaaacagacttgcttatatcaaattcaatcaatctaagctgagatgtgagaacttcaactctattaaagaatctgcatcatctggatctacaactatgagtgaagaaggaaatcaagtccttattccatcttctttcactggtggccctaggtatatgcttcaaacctattacgatgctatggccattt

SEQ ID NO: 188341 - DNA, 738 bp, Arabidopsis thaliana landsberg
atgctcaagtctagtggagctcccctcttctattggaaacatcacaaatctccaaacgttgaacctttgcaactgctcaaatctggtgaagcttccctcttctattggaaaccttcatctattgttcactttgaggttggcaagatgccaaaagttagaggctcttccgagcaatatcaacttgaaatctcttgaacgacttgatctcaccgattgctcgcagtttaaaagttttcctgagatttccacaaacattgaatgcctctatcttgatggaaccgcagtagaagaagtgccttcatcaatcaagtcttggtctggactcactgagttgcacatgtcatacttcgaaaaactcaaggaattctcgcatgttctagacatcataacgtggctagaaatcggagaagatatacaagaagttgctccatggatcaaagaaatctctcgtctacatggacttagactctacaaatgcagaaagcttttatcactcccacagcttccagaatctctctctatcataattgctgaaggttgtgagtccttggagacactagattgctcttacaacaatcccttgagtcttcttaattttgctaagtgcttcaaactgaatcaagaagcgagagacttcatcatccagataccgaccagtaatgatgcggtcttacccggtgcagaagtgcctgcatacttcactcaccgagctactactggagcttccttgaccatcaa

SEQ ID NO: 188342 - DNA, 369 bp, Arabidopsis thaliana landsberg
gcttctgatcttctcagacagccactacttcagccctacgttcaaaaggttcttctcaagctgagcttcagggaacacgatacattgccatctgaatccgaaaggagaagtagctatcctcagcagagaaagcgtacttctggcaaaagtgtgagcttcggtccaagcaggttcggtgttgaccaagaagattctgtttcttctgttaaacccgtgcacacgtatttacaccgtcacaggccagtggatttgtctgcaaatgacactagtagagtggttgttcgtagacccgctgtttcttcagtggtttctaacagttcaaaatatgtgccagtgagatcaaaccagcctaagagtggtggtctgctg

SEQ ID NO: 188343 - DNA, 445 bp, Arabidopsis thaliana landsberg
atgaaaaccgaaatccttctcaagatcctcggccgagatcaaaccctcaacgattttaaccaagccaatagaactgtgcctcggtttgtttgataacggcttggtgaaatgagaagagtaaaaccctaacccatcagccaccatcccaacaataggcatgctaggtttgttccgtttggggagaacgcaccgagcggtattgtgtgtttccttgcgacaaatctcacaccacaaagatttgaaacactccctagcatgatggccatccataccacatttttggcagaaaaccctacgcaccaattcattctcaactttcagaatgggaggcggaggggttttgaggatacactggctgcccgccttgcagattgaagccagccggtatgggatgtcatcctgtgccatcaaggctttccagatccagtcttcaaccgccagctga

SEQ ID NO: 188344 - DNA, 487 bp, Arabidopsis thaliana landsberg
atgggttcaacatcaaaaaagatgtacctctgccaggtaccaaactttgggtttaaaatgataaagctgagaccgagcgggtgacttgcacgagaagaaagtctcggtgtagtgtctccgtctgagtcgattaaggaccttatcgatgtgggtctgctgaccgaggaccttttaactggtcacatgcctcatcatgggtaagctttgcctcaggaagactaataccagaataagataacacgcaatgggagtggagagatggcgagagtagcgtgtaccctccgtggcaagaggctggacggtggtgtatctgtgctctcggttggcgtgaacctgatctggtcttaagaaccccggtggcgagttgacatatgcaagggttaagtgctacatatgtcgtgtgattggagatcctcagctgagtataatcgattcggatcgccgtaccttcgcggttatgaagacttggtcactgacttacacgtag

SEQ ID NO: 188345 - DNA, 362 bp, Arabidopsis thaliana landsberg
cacttacgagttacggcagttcggacccggtctcggattcctgaatggcacaccgggtatcgacctggacgtagccggagaattcggtaagctccgcgttaataaacttgatctcgattttaaaggacgaggatcgatcgatatcagtggttacttgtacaatctccatcaacctgaagatctatcgatggatcttaccgttgcagcccgaggcttaagcaatgcaacactccgatcctatgtaccaggtttgggtattcctgatctaagcaggctcggcattgttaatattcctaacttacgttataccggtgaaccgcttaatttcaagaccgttcttgatgtgcggacaacaggggccg

SEQ ID NO: 188346 - DNA, 110 bp, Arabidopsis thaliana landsberg
gtccacgtcatgccttcgacgggtgtcatagccatccaccaacgaccgttgtagtcagtaagacgggccttacattccttgaaaatatcgaacggcggctcttcgtcaaa

SEQ ID NO: 188347 - DNA, 63 bp, Arabidopsis thaliana landsberg
atgaaccggaagcttgtagttccagagatatatgacattgcaattcaggtttcaaagctgatg

SEQ ID NO: 188348 - DNA, 346 bp, Arabidopsis thaliana landsberg
atggactacgtcacggtgaattctcgttgcgcgtggaacaaggcagtgtaccagacatacctagtgtgtcggcagagcccttgcccccctggtcaagccgagcatcaagtgcggcacgtatcgtggaatgcggatggctccatcttggctgtgcagttgcagcgcgccggcgaacatgtgctgcagttgtggacgagtggtaattaccattggtatttgaaatacgaatctacgtacgagcatttgcatgccatgacatggcacccggaacagccccttacgtggtacgtgtcgcatgcgcgcgtcgaaaaaatgaccatgtgcctggagacagcatgctcccgtg

SEQ ID NO: 188349 - DNA, 254 bp, Arabidopsis thaliana landsberg
atggagatctcattggagtcacaaggaaacgtggatgacttaaacccactgattcttgcgtatgtgttctctgttggagatgagctacatttctctgttcattcctctaaatctatatccattgatgagcaatattcgtttcgttcgggtttttttcttatatacttaaccacaaacactcgtatctggaaggctttgcacaacggagatggaaacttgagtctcataagagtgtccttcaagcaaataccgcg

SEQ ID NO: 188350 - DNA, 107 bp, Arabidopsis thaliana landsberg
ttttccacaacattgcacagatggttggcttccggcttccaccgccggcagacatactcgaagatctgtcactatgcacaccactttctcctcctcctcgactctaa

SEQ ID NO: 188351 - DNA, 1886 bp, Arabidopsis thaliana landsberg
atgagagagcaaggaacagaagttctgaggggcaaagctcttctctttgttgcatttctctgcaaaaacagtaggcgttggctgacaaatttcttctgcaatgcaagatttcttcctgtggtggacagattagctaaagaaaaagacagttacctgcaacaatgtcttgaggcatttgtgaatgtaatcgcctccataataccgggcatgctggatacaataaccaatgatatccaacaactgatgacaggaagacgccatggacctgtctctccccttaatagtcgagctcctgtaaagactaatgcacacctgttccctgtggttcttcaccttctgggaagctcttcgtttaagaacaagatggtcactccacaagtcctaaggcagttggcaaatcttacaaaacttgtggaagcatcgtttcaggtcagtagttacaacattgacatccccttttacattaatgaaatgctatcttttattttattttgcactaatgggcttggtcaattgctcatcaacatttgaattccttaccttcactatgacaaatgataattactcgtttattttattgttaatattgcttcttataggattggattaagattttcatacaactgtatcagaattttcaactaaattacctctttcctctgttcactatagatatgtgtgtaagatgttttaagaatctgttccgtttgctctcttgtttaaaccatggtttatgtaaacaattttgcagggaagagatgacttccgtgtaacccttcttcaagttctagagtgcataacaggagatgcgcctctggttacacaaaatggtgagattattatccgtgagattctcccatctctggctgcaatttacaatggaaacaaagacggtgatgctcggtttctctgtttgaaaatctggttcgattcattgaccattctcttaactgagtgcaccgaaatcgagcaacaaatatcggaggatttgaaatcaatatccaactctcatttcctcccactctaccctgcactgatccaagacgaagatcccaatcccagcttacgctcaaaagctccttgtcatgctcgttgagtttgattacatcaaaatctccaacttattgcgtcacaatacggtttcacaatgcttcgagtttcttctcggagacttatcaagcgcaaatgtgaacaatgtcaagctctgtctcgccttggcttcagctccagagatggaaagtaaactactctctcagctcaaagtagtgaggagactcggaaatctgctggaattcgtgaatgccaaagatatggaagatttcctagaacccactttaagtctctgcagagcttttctgctacggtcacttgggaacaagaaaggtctcatttccaactacacaaaagagccaacgcttttatcagaggcatcttttacgttcgaggttgatccacaggaatgcataagagacattgcagatttcggtagcaacattggcctattcttgcactttgcaggcttagacgatgacacaagcatcgcagtcgcagatattgcctctgaatgtgttgtgttgctactcaaagcggcttcgagagaagccacgacgggattcttaaccaatcttcataagatcacacccattctggactcgtggcgcaggaggaagagcacagagctacacttgttggttctgaagagagtcttgcattgtttgggttatgcttgcaagcagtatctatcgcaggcgatgattttgtcgatatcgggacacgatgtctcaaagatcaacgcaattgtctctgagatgaagaactcagacgccgctggtcttaacagcatcgcttcactcgttgccatggagttgcagagattacctcgttga

SEQ ID NO: 188352 - DNA, 913 bp, Arabidopsis thaliana landsberg
atggatgtcctaggcgttgatgccatagttgtccatccacaagtaaggatccaagaaagtttgcagaattgatggatggtgcaatgtgatcattcaatgcatgagtatgcgtctaccaatcatcaagccccgagtatggtcctgaatataacaagaatcatgataaaaatgagttgagcaatactaaagatatcatgaatgagtaatgaactaacactaagcagattaaatttgaaagtatagacatatataacattatgaaatactaaagatgatgaaagatgcacagtgccaatgtgacttatgggtactctagtgtcattggtgggctgagtaactagttaatatatcgagtgattcacattgttaacattccttgaactaatttaataagctgcttgtattatatgcagggtggatcagagctttattttctccttatctgtcaaaagattgtcgaattagtacgggtatgttcttaattccttgtatatttgttacacatatccatggtgtgtttctctaactaaatgcaatgcagaaaggagcaatcgcagaggctaagtcatttcgaaatcaagattttaaagactttaaagattcaagcctactaaaaaatattttcgatgtatgtagtgattctctaactgttagattaggcttctcatattttactcactaatagttttgtatttctctatttcatgattgctctgctttgctcgagtgtgaaactgttgaagaatcaggtgctgcatatcttctaggagaaacacagaaacacatagtagcagcttcagttagtgaagcgattctatctacaaatccggccaccagagaccagcaatctgcttcacttgagcgagtgctcggacagtttggagccacctgctcactctatgctcgtgaatga

SEQ ID NO: 188353 - DNA, 1333 bp, Arabidopsis thaliana landsberg
aaaatcgagattctccgttctctcttcttcggcgtcgggtttttcttcttgcgtcgacgttcatcttcttcgtcggccaccatcgattccggccgccgccgacttgaaatccgtcgtaaaaggcaacgaattaggtcagtttcttctgatatttcctttgacattggtgcattgcgatattagattgggattttgaattatatataactcccagattcaaattgatagtttgatgattggtttgcaaagtaaagagtaatcgattagaggttgccgaaacgttatttgaggtgatgagcaaaggaatgtaggttgaatgtgagttgaatttgaattccgagatttcatattaaagatttggggggtttgtgttgcaaagtactagattaaccaattagtttaacgaataggtatgtattaacattgtgaatcaattgaaaggtaacgaattaggttcagttgaatcgagtgcgaagagagattgatttcaacgtatgagtacatgtgggataactattaaaatgtatgattggagttgaactggttgtattttcaggagtgatgaagaagaagatccacactatggtacattttgattttggagggtactattttgaagtgaatgagtggattggtaaaaattcactatatgctatatcgtttaagacgaatagtttggagaagataacatattcgatgttagttgacaagatcatgaagaaggttgcgattgatgaagcttctgtgaagttgaaactgagttacaatctgtctaaagttcggagagagacgtatattgtagatgatgaggacgtcttcatatttttaacagaatctgatgaagagagtcgtattcctgttttgcatgtgaggaattaaatggtataggagttgagagggtggaaatttctgtaccggagcgtcaaagttcagttggtgtaaatgtaagagaggatgatgttttaaatgaagtatgtgagatggtgcatgatggatatgagaatgatgtgaatgattgtgagaatgtagtaggtatggagattgtggctgtccaaaggccaatggaaaggccggtgaattttgatgaggaagaagatgaggatgttaggattgattatgatgatattcacgatattccacgaagtgtagaagttactctgcatgttaaagaatgggatgatggtacgggtattgaaattgatcaagaattttgttctagggaggctgtgtgggaattggttaacaaagctgtaaagcaagaagtttttggggtctatactattaagtcagacccgttgagacttatgctacgatgccgccaagcttctaaagg

SEQ ID NO: 188354 - DNA, 214 bp, Arabidopsis thaliana landsberg
atgggtgcaagcttcgagcttggtccttgtgaatttagagcagaagccaaaccagacaagtggccgttccttgtaggacttaagccaaaaacaggtgacttgctaagtacactttgaagcggactaccttccacgggactgttcagcggccagttaccttgcactaaatcaaacagtttcagtctttgaggatattataaacaaatttgtttga

SEQ ID NO: 188355 - DNA, 495 bp, Arabidopsis thaliana landsberg
atgagtggtcattctcaaggtgttgataagaaggcagtgaatgatacagtagataagccattgagcaggtttactaggtcattggtcaaagaagaaagtgattcagacaatcctaatttgggaaatactaccgaaccagcagacttggtcgatgtagatatgcatgccaatgatgttgaaatggatggttttcaaagtccttcagttactactcccaacaagcgtggcagacccaagaaatttctaaggaatttcccagcaaagctgaaagatatttttgattgtggaatacttgagggactaattgtgtactatgttcgaggagcaaaggtatatggtgacttcttattctattcatgtaaaaacaaattttatttagctgatatgtatgtcaccatcctctcgtaggtgagagaggcggggactagagggcttaaaggagtgataaaaggatcaggcgttttgtgcttttgtagtgcctgcaaaggaatacag

SEQ ID NO: 188356 - DNA, 1396 bp, Arabidopsis thaliana landsberg
atgccaaaaaaacttgatagccgcattgatttagtgtttgaaatgacacatcatgtatttaaaatgcaggacacaaacccggaaaacaaattacggcttttgatgatttatgcaacagtgtaccccgagaagtttgaaggtgacaagggtgtgaagctaatgcaggtagcttttcgtgtgatagagaccccttgtaatgcatggaacaacttgctaaacaaatactgcatttatgttatcagcttgctagattatcacctgtggatatgaaggttataagcaacatgcaattgatagctggatccccagaaaacaaagctaagtccggtagtttctccctcaaatttgacgctggaaaggtaacagattcagtttaattatgaaaaatcaacactagttaccgagaataagaagaagaatctgacggatatgtatactcttttgctatagacaaaacaagcaaacaggaaagatcgatctggtgaagaagaaacatggcaactgttccggttttatcccatgatcgaggtagatgaacaccccggcttataagctacatatccactatgtaaacatgaagtggctgagatacatctttgttatgttgcaggagctgcttgagaaactcgtgaaaggcgatctatctaaaagcgactatctatgtatgaaccaatcaagtcataaggaggagagtgaagcaagaacaggatctgtcaggaagagttctgctcctacagcggttccagagagaaaagccacccctcattctatgagatcaagacgaactgcaacttgggcgcgtcctcattcttctgacgatggatattccaggcattctattttacataatgatttcttattttttggtccatttgagaggagcttggattttttctaagagtagttcatatctttcttcacacccagtgactcagtgttgaaaagtgcttctacggagttcaagaagctggggcaacgcatctttgtattcataattggtggggcaactcgatccgaggtatacattcaaacaaatccgaccttaaatgaatgctatatatgtttctttttgtcaaagcttgtgtcaacattggcataactttttgacagctccgagtttgccacaagttgacaagcagtttgaggagagaagtggtactaggctccactagtttcgatgatcccccacagtacatcacggtaacacaacatatcccttttaagagttgctgattgctaaatacaaaaaaaaataccatggaacctcaaagactggtgactgatttaaattcttaatccaactgtgttttaaatgttgtcgcagaagctgaaattgctgtcggaaaaagacatacaaggggctcctgctcagcccttcaaaccacaatactggtga

SEQ ID NO: 188357 - DNA, 960 bp, Arabidopsis thaliana landsberg
atgattctttgctgttatgtagaacatctgaagaggaatgttcatctctactcactattctccaacagtatgaacaagcttcaggtcagtccatcaactttcaaaagtccgctatcacttatggtaaaggagttagtgaagaggagcaaaaaaaacttggacacattctcggaatccacaaagtgggtggttttggaagatacttgggacttcctgagtttattgggcgaaacagaactaatgcgttttcttatcttgctcagcgaataaatcaaaaaatggataattggtacaatgcattcctttcacctgcaggtagagaggtcctccttaaagcggtggtaactgccattccctcctacagcatgtcttgtttcttgttgccatcccggttacttaatcgaattactagtgctatgagaagattttggtggtctagcactaaggatagacataaaattccatgggtggcatggaagaagataacaaatccaaaaaaaataggagtattgctgctgtgtagatgcttcatggctttcaatgactgactgtgcaggaataggttgggtactctatgataaacaggaaaacattattcttaaaggaatggcatccataccaccaaccagcacaccagaagaagctgaagcagaggcactcagatcagcactctttcaagttggacgcctaggctatacaaatgtactgttctgtggtgatgcatcaaacttatatcacaatatcgccgcattggagtccaatgagagtctgccaaaaggaaccaccacaaacaatgatctagcatcatatattcaggatatcaagaaccttgctaagacttatatttcttctcagttctgtaaaattcctcgtactcttaacaatgtagctgataagctagcaaaaatagcaaggtctaagaagatgacttatgtaatatcctggactgatgtaagttga

SEQ ID NO: 188358 - DNA, 265 bp, Arabidopsis thaliana landsberg
atgtttgagtttgcaaagcgaagcgagtcggcacctaaagtcatcgtggggccagagcaggtgtgtagagcgtgaaccgtgaacgccaaaatgacccacgtgaattaggtggcaggtggctcattaacctccgagacacgttgctgtttcacactttcagattatttcgtgtttttccaaccagatccgaccggcttatcagttgagcaaaccgggttttggatctcttttggaaattatgccacgaccacatttagaaaaaagg

SEQ ID NO: 188359 - DNA, 472 bp, Arabidopsis thaliana landsberg
atgatgttcaacgttacaaataacagctccttcaggaatagatctgagaggaagaacatttccgacgacgagagtagctttcttcccacagtacagaaactgaccggtgtacataccttcagcagcaacgaaaagctccttctgcttcttgaatcggaaaggatgacggaaagctacacgagccaacggagcaccacgtcctggatcgtgaatgatctccgtcacaacacctttcagataaccatttctctcgccgaaatcgaggcttctgaatttcgctggccctttacggtggtgagtgtgggatttgaagactgatccagctcccttacgttgtgctctgataacacgacccatggatgattctttgtgggaggatttgcttcgtcttcttcagattacggcgaatgacaacaaagaacaaaatctgtttttatatcctcagtctctcaaaaaccctagtggactgtga

SEQ ID NO: 188360 - DNA, 751 bp, Arabidopsis thaliana landsberg
atggatcctccggcgaatccttttgcatctcgagagcaaggtacagtaactattttaagaaacctgattaagcaagctactttggaggaagaagtctctgaagcttcagagacacattctgttccgaacaaaatcagaattttagagtcagtgtcggacgaaatgaggaaatcgcaggaggacggtagtgatcagaaacagttgagtgaggaagacgagattgatactctggattcaaaagccatgagcttttcttttagttgtcacggtggtgggccaaagcggaagaaatgtaacgataagaaacgtaagcagcaagaagagaagtctaagaagaagctcaaggtacttgttgaaacattaaagcttgtacctttcaagccattaaaaaccctagattttgcttgttatgagagtctcttaaagactctcggattgtgggattttgtgcatttggaatttgatcaggatatggattatgatcttgtggctcaacttatagcttcctatagtgctggaggtaagtgcagctatataaacgggtctaggattaaacttagtcgtgcggatttggctcgatctttgaagttgcctaataagaaagaacgtgttgtcattcttgatgaggataaggaatttctggaatcagatgaatcaatcagtgttgttgtagatgttatctctaattggatgctactgcattgtgatgatgcgtggatgatgccagatgaagtggtggaatggatgaaag

SEQ ID NO: 188361 - DNA, 225 bp, Arabidopsis thaliana landsberg
atggtgacagcgttggtttctcaacagagtggcgaacaagtcaaccgagctccagactccaacttggtagcttccggtgagctcacctcatcatcatcgttaacaccgagacccctagatcctcctgatttaaacgaatatggtcagctttatatgggtatatgtccgatggattaagacaaagctacggtgcatccaaatgggttgattaccagactttcaaag

SEQ ID NO: 188362 - DNA, 114 bp, Arabidopsis thaliana landsberg
atgactttgagtggttgtggattgcctattccaaatgagagaagagctgcttctataaaatttgtcaaattgttgatcaaagtacatgatgttgcttcgtcaatgtcatggaag

SEQ ID NO: 188363 - DNA, 89 bp, Arabidopsis thaliana landsberg
atggcagaatctaagaatatcggatccgaggcgatcttggataaaaatctcctagctgccttgtcgaggcgagatcatgaagcaaaaac

SEQ ID NO: 188364 - DNA, 348 bp, Arabidopsis thaliana landsberg
gccacgtcaccgttttagtgacgttaatgaatattcgagatgtgaccccacttaaacaagatcccttggacgacgtcgtttcgaccacttcacgaaaccctacggtcgatttatttacacaaagtaccccttcattgtatagcgccgtcctttgctgtaactcttaccgtcaaaggttatatccgtctttccaaaatgtctcccaaagacacgtttttaaaaaataaaaataaaacgaagaaaatcagaaaatgggtcgccaagaatagaggaagaagcaaagaagaagaaaaaaaaaaaacagagcgtttcaaatatttgcggagatacaaagctgagaagagataa

SEQ ID NO: 188365 - DNA, 54 bp, Arabidopsis thaliana landsberg
ggcatcgacgaccggtataatcagaaccaggacgcctccgatacactgggctag

SEQ ID NO: 188366 - DNA, 407 bp, Arabidopsis thaliana landsberg
  unsure (1)..(407): unsure at all n locations
cgccgacaaaggatttttcggctgcaggcatttcagcaagaccaatgatctggtgcgcaaacaaaccctcggcgctattgactggaaccgttatccgcagtaagaacatgccagaagagcattctccatccggtaacnnnnnnnnnnnnnnnnnnnnnnnnnnnnnggcgctttgggctttgctgctgttcctgtgtaccatgctcatggcttttgtgttgtatattccctgctttttcctcgatgatcctgccaggtctgtatggcacaggaaagtatcgagggtatgtatgtttgtatacctgcacctgatcgggtgcccgttggtagtgcggggcaaagaaaatttttcatcgcataccaactacgtggtggtatgcaaccatagcagcctgatggatgtgccc

SEQ ID NO: 188367 - DNA, 451 bp, Arabidopsis thaliana landsberg
atgaatctccacccaccacggccgcatccggctccgcgaccgcgccgcgctctagtcggccctgaacggccaccaatgaccgcccgggccatgcgagacgacgacccgatgcgtcgctcgggcgccacctggtgcaccaagcacagaccgctgggagtgcgctcgggactccaagcgttcgcagtctcggtgccacggggtgtcggtccgtgggctggatcggtgccggatgcacctcgcccagtcgcgggacctggcgcggacccagggcgaggcgaacctgctggcctggtcggccgaggccggccgggacgcggcgccgctgaacccgggccgggtggtcatggaccagctgcgggtcgcggtgacccgggcggacatctacggcgagctgctgcggctgcaggtcgccgacgaggaggtcgacgggctggtcggcccgacgtacgcg

SEQ ID NO: 188368 - DNA, 48 bp, Arabidopsis thaliana landsberg
gtcgatgatgtttccacaatacggtccctgatccagagtctgtcacag

SEQ ID NO: 188369 - DNA, 276 bp, Arabidopsis thaliana landsberg
  unsure (1)..(276): unsure at all n locations
atgagcgctcctgatcagagccacccattacgaaccggaacgagcatggcaaactcggatcaagatctgacggcccgggtnaatgactcctaaagcgacgaccaccagccgatccgaaatcaacggcgcgcaatgactcnacgcgatgccccgacccaagccgttggtattctaatcaagggcccacgcgtcatcaccgtcctccaccagaccgcgatgccggtgcgaccgacctgtgcgcggcaatactgccggtgctgtaataccggttacccc

SEQ ID NO: 188370 - DNA, 97 bp, Arabidopsis thaliana landsberg
atggtttttattggtaaccgggggatacgtcatctaggaaatttcgatatggtggttgggttaaggcatgacaaagtggttgattttgaaaccaaag

SEQ ID NO: 188371 - DNA, 115 bp, Arabidopsis thaliana landsberg
catgtgtcgaaaaaagaccgcgacaacggtcttcggcattcgaccaattcgaagtcaccgcgagctaagcgctagccaccctcgcgtgcgaccaatccgcgcagaagtcgcctaa

SEQ ID NO: 188372 - DNA, 310 bp, Arabidopsis thaliana landsberg
atcctgctacacactccacaatcgaaactttcagacaaagaactgctttttttttccttcaatcaaactcttttctcacgaatcttcacatcgatcctggtcgaaccaattgacgaaattaccatcgttaagctctctctaccgtcgccggcgccacaccggcatctttctggcgaacttgacggaggctgaattcaaactgtacaacgtaatttccccggagaccatcaattcccgatttcgactaaaacccagaatttgtttttttcccggcgaaccggatacgaattctccggctaaccggagatga

SEQ ID NO: 188373 - DNA, 317 bp, Arabidopsis thaliana landsberg
atgacacgtggaaggggaaactttggctccaatcctcataaatttggctccaagaaactttgcttgggctccaagtaagccagcccacgtgtccatggcgtggtcaaacggtcaacgcccggcggggcaaacttcacgcccagcatgcctatgttgcccaaacttgcccattcttgcccatctttgcccattcttgcccaaataggtatttattttgccctttgatgattgaacatcttttggacacatacagtcaattggccgtgtattcgggacaactttctctcgtcttcgtcgccaagatgaccccattttga

SEQ ID NO: 188374 - DNA, 145 bp, Arabidopsis thaliana landsberg
atgcacaacgaggaagagcaaagcctggggctactgcatcacaagcaagagatgaagcgggtccagagtgcggggtgggggaacagacggaaccgcgcacaggagcctaagactgaagatgacgcaagcggagacaagcgcgcag

SEQ ID NO: 188375 - DNA, 63 bp, Arabidopsis thaliana landsberg
aataatatacccgatatacccgtacccgaccgggtattacccgaatccgacctgcatacctga

SEQ ID NO: 188376 - DNA, 224 bp, Arabidopsis thaliana landsberg
atgatgaagaagacggcgaaagaagggaagagtctgtttgggtctccgacgttcgttgatcttggaaacggacggctcagatgtgtcgagactggtcacgaggttttagccggagacgtagaatcatacgctcgtaacaaacggtgtcgtttaggactcattgatcacgctttgtctcaaggaaagtctcctctcaacatgttctcgcaatgcccactttctcg

SEQ ID NO: 188377 - DNA, 1821 bp, Arabidopsis thaliana landsberg
gtggtacgaaagtttcacgttgaagttaatatcaggttttcgtcaggtgagcgcttctcacgactaaattgttgccaattgttcttgtcgtagactagtcataatagtttgtttcaacctgggatttattcctgcaggatatcaccaagccacttgtggatgaagtctgcaaaacactcaaacgttggcgatattctttctctgcactaaagtcgcttcaggagatattatactgtgagatattaattgacttttaatgatgcttatataccttttcatttcgactttattgtagtttttaaactgaaatatcaattcctcacaatcgttaggacaaatggtttgttagtaagacgagtagattgtggttcttattatgctttagaggaagcagtagttaactaagaagtctacttgcgggtaaaatgtggtattgcctaatgatgcttgaaatatggatgatcaggtctatttgatcaaataatatattcggacgatgatgctgacttactccagctaatcaggagtcttcatccaaaggtaaaagcataaactctcaaagcaatctggtctgtttacggcaaagaaattttcttatagtagtgtctttctatatataggtaatgatagggctaccagtggtggaaggaaccaaccctgcttcatgtttcccacgtgctgtaattggctctgaagcaacatgttacagtcgtttatggagtgaggtatgattgatttgcactatggtgatccgtaccttccatgactttagtctgagaatccacctatttccacaggtgtatgctgctgatatatttgcttcaaaatttggagatgggcatccgaatctatatgccggcttgcagttcagagacaaagtgagaagcgtatttgtttgtctttcctttgatttagtagtgtgtgagtgtaaaaggactaaacaagtaacaactactctcttattaggtgttggccccaggaggaggcaaagaaccaatggaacttctcaccaattttcttggaagggaaccatcaacacaagctttcattgctagccggacaaactatagtttgtagtatcttgcacctaacattaggatcttccagtgaatctggtagctggtgaaaataaacatttctttggttgttagagacatcgttcattaatgtttgttaatgtgttgagaggacctagcggtttaggtggaaactgtaatcattcattcttagtttcttacctttctctgcatcgcaatctcaaattacgaagagttatataacatagtgatcatcattgagcatgtacggtgttgaagataaggagacttatctcgatcaatttacaagacagattctaatattatggttttcttctcttattaagacaagaatagtattgtctttttggtttagtttggaaataggattgtctcaggccttaaaggtaactagtttcagacatacgtaaaagaaaagagtttcagattaccttatgaagtacggttctggttcggtttaaactggtttgaacacgtggcaggtacaagtagataaggtacgaatccacgaaatcatcatcttccccaaaccaaataatctctcgtttctaaacaaactagtggtgagtgaatcttctctggtgagtaatggaagtgagtatgtctttgaatgcgttaactcggcttcctctgaagaacacaggaagattcgaagaggttggtttagcgagacactctctgtttagctcaagaacggcatgccgagagacggcggtacagcagcggcggatggtttttgtggtggaagctaagggaaagaaag

SEQ ID NO: 188378 - DNA, 326 bp, Arabidopsis thaliana landsberg
gcggtttctgattttggaacatgaagctgatgtgaatgcaaagtcatatgtgagtgatgcttgaatgattgaattgtgttcccgactctctcacacacaccaacaacattcaacgtgtgaaatgggactgtctgttgttgcagcgtggcttcacgtctctccactttgcatcatctcatggacatttggcttggtagaatatctggttgagaaatgcggagctgatttgcatgtcaaggctatccttaaccctaatcgtcgcgtttcgccttatggacttgtctgtttgtggcgaacttgccatttgtttgctgcccacaaagtag

SEQ ID NO: 188379 - DNA, 689 bp, Arabidopsis thaliana landsberg
  unsure (1)..(689): unsure at all n locations
atcttgatgtacagacaatgttggaggaagcaaaaagcaggtggctacggccaaacgagatccatgcaatcctgtataacccgaaatacttcactannnnnnnnnnnnnnnnnnnnnnnnnnnntagtaatcattatgttctacacctaacaatagccactcggtgttttatgatgtttcttcaagtttccatgtaatcctatgtttccgttattttgaaggtggcagaattatattattcgaccgtaagatgttgaggaacttcagaaaggatggtcataactggaaaaagaaaaaggatggaaggacagtcaaagaggctcatgaacacctgaaagtgagttctttttgtaggttttatctttaaaggttacatcatgagttttgttttttttggtcagctaatttatgtcctctgaatgatgtaaggttggtaacgaggaaaggattcatgtatactatgcgcatggtgaagataacactacctttgttcgaagatgttattggttactggataagtatgtagtaagcaaagatcactgacttgtctactttatgttctttgaaaacttgactagaggcctctttcttctatgtttcttctgagggttatgtaagtaaaccatctcttcttttatgtcagggctcgagagaacatcgtccttgtacattaccgtgatacacaggag

SEQ ID NO: 188380 - DNA, 132 bp, Arabidopsis thaliana landsberg
atgtatagagaaaaagtactagaagatgcgaaatccagaaggtaaggggacaatggcatgagttccttcgtgggatttgctttcttaatttcactctttctttctgtctctttccctcttagaggtctctga

SEQ ID NO: 188381 - DNA, 448 bp, Arabidopsis thaliana landsberg
ggctatgtgatcggaaacccggtagcatactatgatcatgataaagactttcgcattccatttgctcatggagtagcactcatctctgatgaactctttgaggtacaattacatatatgacttaggatatattgtatattttgtctcctttcagcacaacaaagtagttgaaaaaccagttcaaatctctttttactttgtagtcgttgaaggcaagttgtggaggaagctacagtgttgtagatcctcttaacacagaatgcttgaaactcatcgaagattatgacaaggtttacacacaatctgcaatttagtcggcgtgaatgatataaaaaaagaaaataactaacttagaatttgtggttatatttatttacagtgtgtttctggaaaatatgaagaacttattctaaaatcaaaatgcgagcacacatctcctgattgttat

SEQ ID NO: 188382 - DNA, 357 bp, Arabidopsis thaliana landsberg
tgttagaagagagcactatagacgtgatccttggtatgtcatggttaagaaaggcaaagacagtttatacactgtgctaaaggaaccatagaactcaccagttccaaaggagaaagatttgaagttggaattgcagtagctaccgccaccagactagcggcattcttagtagatgggaagtttgttggtgtcaacatccgtgtggttagagattttccggatgtcttccagaagagttccagggatgccccagatacggaagttgagtttgtcatagatctcttacctggaactgctcctatttctaaacggccatacaggatgtccgtagaggagttaaaggaacttaagaaatag

SEQ ID NO: 188383 - DNA, 415 bp, Arabidopsis thaliana landsberg
atgagcaaaggccgtagcgccaaggcagaacaggtgatcattgtggaatatggcaatgacttttccctgcgcaacgtgcacctttcagggcaccgagcaccccacccagcacaaagtgaacatctggagcctgctgtatgccggttacggcaagcgcatgctgttcgtcatcgtgttctggacctgctgcatcatcccgctgttctcggtctatgcgtctgcgcccaaggtgctggcggcgctgaatgtgaaaggtgacagcgcctcgatcggttcggtactgatcactctgtttttcgtggtcggctgcatggtcgccacccgcctgaatcaacgtcatcggccgccgcaacctgttgctctacagcttcctggtgttggggctggccttgctgtgcctgggcgcgtttcatag

SEQ ID NO: 188384 - DNA, 723 bp, Arabidopsis thaliana landsberg
atgcaggatctaaacgctattatatgcattgtggctagttcggtacctctccagaagaaagacgtgaaaacaattcttcgtactttccgtcaaactatggagtacactggagatattatagtatctactgttcatgagcctgatctggagcctaaagtgcgtgtcacaacgttttttattctaaggtgtgtcttcatgtttagtgacagctaacaatttcaagctcatgcatatggtatcatatttagctgaaaatcaacaaagaaaagtaaatatatggtttcagcatttataccatatatttttatgtgtttgattaagatctatgatgcttttgaccaagactcagattctatttctcgtgaccacttttaagcattaatgctagtctcaaatgtcatcacagttcttcagaagaggaaacatccaacaaaggcaacattttttctggtcttgttccttttgttttaaatatcttcacgagatatcgttcacagctccaaaaagaaacaaatattggacttggagagacgccagtttcaattaaagattcagcagactctactgacataaaaacttccaatcagaatgttgaggaatttgaaattgactctgaggacctcctggaagtttctgagaacggtgatgatagtgaatacccattaaaagagggggaaccatccagaaacagtcgtctggatcttaaagatgaaaatgtagaag

SEQ ID NO: 188385 - DNA, 1978 bp, Arabidopsis thaliana landsberg
tgagaccaacgcaattggcaacgacaatgaatttcgacatccgtccgagtcatggtccaactatagggaccacatccgccacgtggaatgcacagtcacgttgacgtggggaattcaaaagtttaggggtgtttattggtttgtaatttaaataattttatatgtgattgaaaaatctgtggttattcattaagattttatcaaaattctgctaaaatttaatgtttttgttttgtaaaaaatcttcataaatttggagttatcatatttaaaattttataaaatcaagaaaaattctgtgtttatccaactaaaataaaagaatttataattgttaataaattaaattattttgttattgatttatgattttttacacttttattctcaaaataaagtaataataagtatcattaaaatagaaaaattgttttctaccaaaataataataatagaaagattgtttgataaactttacaagattatggagtaactaatcaacaagattatagaaaactctctagcaatagtttattatctttcatttatttattttgtttatttcttatttttctttttattaaagttatcaaaatttcttttaaaatagaacttcataacatttaaagttattaaattttaaaaacactatttaagtcacaatccttcttctcttggtttaaactttcaaaacgttttctctttactatctctttgtattgttcttctcttccttagcgttctctgttaagaatctccaatggctgagagtacaaagtcaaaaaagctaagtgtgagacttctcatagatgaactgaagaacaaggttgtcttggctgaatctggtaaggattttgttgatgttctctttagttttcttgctcttcccatgggaactattgtcagattgcttgagaaacatcaaaaatcgcctcaagtggccatagcatgtttcaacaatctttacaaaagtgttaaagagatggatcttgagagttttcagacagaagcatgtaagcaagttctactgtatcctaggagtgtgaatcttgagaagttcagaaatatgaagttgaaaattgatgacactagggctgttaagtactttgtttgctcaggctttaaagaatcctgcagacatcattatagcatttcgaacacggaggaatgtgaatgtggagaaattgttgactcgaaggttgtcaaaagagtgatgaatcgggagattaagggacttgaagaagagcaagttcaaggaaggattttgagaaaggataatgatggagtttttttcagctgtaaagcttcttctttcattataacagatgatctgaaagtggaggcgagctctatggataatgttttgaatactctcagaggcttaggctacgcagatacttccaagctcagtgaaatacttcttcatgtcggtttcagtgaggtattttttactgtatcatcttacgttggtcttcgtagtttgaatatatatgttttgttgagtgtttgtttgtgtcatcaacaggtactgactttgctggaatgtttctttacttcggaccttcctttaaccgacacttttctgaagaagcaaagctcattgcaaatgatcagatctcgtatacctctaagtccaactttgcaaggatctggagatggagcagtaccaggccaaaccataacttttaaagcatttgttagaaaaccgaacatcaagattctctgtgttgaatgtggagcagacttcattgatcttcttttcacttttctagctttgccacttgaatctgtctggaacatctctgcagggaatatcagtttaggttgtattggaaacttattcagaagcttcaagagaattatggcttcatcctcttccaaaaccaagcttccttcgttttatagttgccctaaacagttacttgatgtcgtcgctgagcaacaagagatctattgcagtttcaagtgtgtcggttga

SEQ ID NO: 188386 - DNA, 257 bp, Arabidopsis thaliana landsberg
attgtgttagagctgaacctgtgatttacaagactctagaggaatttccagaggaggtgaatctaattcgtgcttacgccggagaccgaccgacgtggcggactccggcgcatccttggagagttgactctcggtttaagctaaccggagtaccaactcttgttcgttgggatggtgactctgttaaaggacgtcttgaagatcatcaagctcaccttcctcacttgattcttccccttcttgcaccatccacttga

SEQ ID NO: 188387 - DNA, 1773 bp, Arabidopsis thaliana landsberg
acttgccccacctggcagaccgggcaacagcttgcccacctgtccggccgaatgcaaactcatccgggcaagacttggccaactcgggcaaacacgtgaatggacaaggggagtttcaccaccacggccgatcggtccgccaatggatttgtttaacacatgaccattctgcccatcgcaacgcccggcgaccccatccaacacccggacgttacttgcccacccactccaccctttcggccaagcccgcaactgcccaccatccattcacaccatccgtcaccacgaatttgatcttatttgttgtcgtattgacaacaacaagatcaatctatcttaggtatgtttttatttttttgttttgttaaagctattggtggttttaggtttttgtttcaaggaagatgcgaatagagattaatatcatggaatttgaccatactaagccgagtaaggccaagttaagcaaggagagaaataatccggttagtcaccacaaacaatgttacattgttcttaacctatctttttcacggattcatccctatgcttattctgacacaggggacggggtgaagtaagtctggggggttaatgaatctgttactactaatgctactctctactttgttgacttgaaacatgtttccactttttacaccgatatgttctaacaaagcaaaaagtttttctttattatcgagtaatgttttattgagtcaaaactagtagggaaccgagaccttgttatatgatgattattgaccattatgtgttgagaattgtttcttgaggaacacttacagggtcgcaaggaacgggcaaccttgaacactacgcccggaccgtcccccagaagcttaaccttgcagaaatttctgttggatccgacgtcaactctcccctatattggacgattaacttgaacttaattctttctcatgaatgggtgttagatcggggaaacgagcatatacattcaggacttcttttcccttcttaccactctttgctgatcctgaatggccactcacttttagtggttcgtacccttaaactatatcctctttccaagcctcatgcattctcttttcctttttcatttagcagatatgtgcaaaaacgtcagagagaaaggaacaacacagtttcccgccacaaagacagaagaaggaagcaaaagaagagattgcaacaagcggcctaagagtttattctcccttgaaaccaattcaaaggtatgcccattagactcggtgtttagaagttctgtttccccttccataaaaaaaaagatacaaaagaatattaaaaaaaaaagaagaaaaagaaaagaaaaggaaggaaaggaaacattacaaccaagagagtctagtacctagttccaaggaaatacatgggaacctaaaggagagatgagccaattacagaagagagtcccctcaaaaaaacctaactctagggaaccgaaagtaagaaagaagtaaaggagaagaaggtgtttaaaagaagaagtagttgaaaactgtggacctcaaccggtccgttctctcttgcgtttttgcaacttatcttgcattcgagactatatggtaaccctaaacactttaactccaccacttaaacaccaaaatcccctttcataccaagcgccgtctaccccaaatgacaccttctaatgagaaagtccatgccaaaacatttacagaatgtaaagagttgattaacgtgaattcagagttctgcaggatcaaagcggatggacaaggatga

SEQ ID NO: 188388 - DNA, 77 bp, Arabidopsis thaliana landsberg
ggattctgacttctcatacccggtactcggtagtgcgcagcgctcgtacagatttgatgtcgctttattcatggcag

SEQ ID NO: 188389 - DNA, 306 bp, Arabidopsis thaliana landsberg
atgaagtacgataggtacaaccccgttgaggtgcacagcagtaggcgtgaggcagatagccgcgcacttcacatctacgggaagcacgctaagcgtctcggttacagcgtgaccgtagccaggacccctagccgtagggcttacggcatctaccttgtaaggaaatgaacccgtgactacgaacaccgcccgcgcgtacagggacgctactgcgccctatcgggacacagtgaatcaactcctgttgaccccgcgcgtgttcaagcgtcgccgcccccaacgccgggtgctcgtattcgggttcgg

SEQ ID NO: 188390 - DNA, 977 bp, Arabidopsis thaliana landsberg
ggtattggaactaaaatcagagttcttccggatcggaaaaagagaatctccattcttaacgatgttagtggaatcatcaagcctggcaggttcattaactatccctagctatctgtttttcatttttgttttcgactccaaattgtagcactgcaaaaactaggtaggggaataaaattaattgtatgtagctgataaattttatgatattttgatattagtccattggagattttgtgtgtctctgaaaaataatactccctttgttctttattatttgacattctagaaaaaaaattgtttttaaaagattgattttttaggttttatatgtaaaattaattggcaattattgatgaatatcaaactttcaagataaataattaaatatcattgcttgagagttataaaaaaatgtaaatcacaaaaaataatatatttataatcaatttttaatgtgtttttccatatatgtatttttctagaaaatcgattattaaggaacagagagtagtattttgcaccaaattaaagctaccacattaagaacaatgtagttgaccagaaaaagaaaaaaaaaagatttacaacaatgaaaaaattctcagtttgcttcttcttattacagattgactctactattgggaccaccgggctctggaaaatcgacactactaaaagcattgtctggaaagacagaaactggactaagagtaaatacacttcaatctttgaaagacatcaaaaaatgctttgattcgttatatagaatatattattcgagctaactgataaaattgtgttgttgaatggttagtctacaggcaaagtgacatacaatggtcatgaactgcatgagtttgtgcatgaaagaactgcgggatacatcgaccaatatgatgttcacttgccggacctaacagttcgagaaacattaaagttttccgcaaaatgccaaggagttggcacaggattcg

SEQ ID NO: 188391 - DNA, 234 bp, Arabidopsis thaliana landsberg
atgaggactagtgaagctaggtttcttcttgaggcttttgttttctatgaagcgattttgaaaaggagctactttgatgaagctcaggggaaagatcttggtgctcgatttaaggagttacgcttctatgccaggtttctgcttgtttcgttgattgttgatcggaaacaaatgcttttgcacttagctgacaagcttaggcttttggttgatcacagcatatccaattttagg

SEQ ID NO: 188392 - DNA, 282 bp, Arabidopsis thaliana landsberg
cgatacgctcggcaccgtcgcgcgcgcggcggtgatcctgcgttcgcttgccgaggccgaggacgatgtctccatcaaatccttgtccgatcagctgcagttggcgccgagcaccgtccatcgcctgcttcatttgctgatggagcaaggcctggtggagcgcggcgagaacgggcatcgctatcacgctggcaccgagttcttccgcctcggcgcgctcgtcctcaacaccacgcgcatcccgaaactggcgcttcaatacatgcgcgctgtcgtggacaa

SEQ ID NO: 188393 - DNA, 226 bp, Arabidopsis thaliana landsberg
agccagcttggagcgctcaaacgcccttcggcttttacaacattgaagaagtgtcggccagcgacagccctgcctacgtggtgcgccttcatgcccatcattttatcgcagataaggatagcctcgaagaagccaaggccgcagcgcaggccgattatgagcagcgcattagatccgccctcgaagaccggcgcggcttagagccgagaggatgccaaacgccgaa

SEQ ID NO: 188394 - DNA, 962 bp, Arabidopsis thaliana landsberg
atgaacggtgggagtgttcttgaatacacacttgcattcacaagtgcgtcgctcgacaaatattgcagtaaatggagtgctcctccaaagacgggcttcgttgatattacaacttcaaaggatttttaccgtatatacggtggtcttcagattgtaagccatccaaaaccgcaaaccttatcaaaacatcttttttgaatcgcagcaacatttctctcttttcaattcttatataaagtttgcaatgaactcagggatatctagaggagataacagctccacagtcagctcaacatgaagtcctcggtgattcaatagcttggggtggttgcaccattatttacttgctcggccagcaacttcactttgagttgtttgatttctcgtaccaagtactcaatgtctctgaggttgaaactgtctctgcttcacatacccataggaatccacaaatccatcaggtagattttcactaaattgttttcatgtacatatctttttttaaatcctctcattctccatttgaatatcttttttctttatgtgtacgaaagggatgggaaggtttgttggaagggatgaagaaagctcggaggctgaacaaccatgtcttctccatgcttaaagctcgttgtcctctagaagacaaaacggcatgtgccatcaaacagagcggcgcaccgctgccacgtgtcaggtttgagaataccgtgtctgctttcgagactttaattacctcagagaggcatttcatgacgattgttgatttgtttctttatattttgatatatggaagatgtgtccttttgtttcattataagaccaaaaaactgctaattttgttttctcctatcaaacgttaattaaaacaaaactgttttattagttgcgaaatccgaagtatttctacaagtaatcacagtttttttttttttttttttggcgcaaacagtgaattttaa

SEQ ID NO: 188395 - DNA, 1316 bp, Arabidopsis thaliana landsberg
atgcttaaagatgaggatgaaatcgggtttgaccgtgagaaacttgtcaaggttcttgaagagcttcaagcacaagccgaagtagctctctgttttgtaggtatcaagcaataaacttaaacagaaagccaaattttttcccttgtataccatatgagcaacaagaaactcacaattcagtattgtattttttggtaatattggtttgtagcatctattaatggcgattttcatatagtaaaaagagttgacatttcaagtttgtttacagtaataaaaaggtaaaaaaaacggccaattccagcatgaatttacagaaaataaatccaaaacaaatataaaatttaaattcggaaaaaccttaaccggtcggttatcataaaccaaggaaaaaaaaaaacaataccaccgcacgtgtaaaacactcggagtctctctcctttagcgccaaattccgctcgtatcctctaaaaacctagatcgatcttaatcaaacgatctaaaccgtcgattaaccccttttcatctcaaccgttagaattttgttgatcaaactctcatcaaaattcaattttttgatttttaaaaagatctttagagactacgacgaagcaaaagaagaagaagaagaagagagagctattcaagcttaaagcataaaacaatctctgctccttatatagttcttcactatggaagatttgagtaatcagaatctcctcccgcgtcaatcagatatctccatccctgcggagaagatggattcgtttcaaaagtcgctagaacctccgccgtgttctccggtgaaatcttctcaacaatcagaaacggaagtcacaccgcctcagaaaccaccgcttcaccaatttggtcacaaccaagttcagaagaatcgagtgaggtaaaaattggttaatttctctgttccatcaaatctatttcaatcttaaggaattagcatttttgattgtttgattatgtagcaatcaagatccatcgacctcacgaagacataatgaagttgaatcgaaagagaatactccaaataaacaacaaaaacattgcaattgcaaaaactcaaagtgtttgaaactgtaagtatctatttttgttaatagagtttaaaaacatatttttgtttatacagagtcttgttgatctatataggtattgtgaatgctttgcttctggatcttattgtaatggttgtaactgtgtgaattgtcacaacaaattggagaatgagtcttcgagacaagtagctatctcaaggataatagagcgtaaccctgatgcgtttaagcccaagattgctg

SEQ ID NO: 188396 - DNA, 1138 bp, Arabidopsis thaliana landsberg
atggatatggttctctccgttgatctgtcttccaacgaactctcagggaagattccgcctcagctcggaagctgcattgcattagagcatctgaatctttcaagaaacggtttctccagtacgcttccttcatcattaggccaacttccatatctgaaagagctagatgtgtcttttaacagattaaccggagctataccgccttcttttcaacagtcttcgactctcaagcacttgaatttctccttcaacttgctctctggtaatgtatctgacaaaggatcattctctaagctgactattgagtcttttcttggagattctctcttgtgtggctctataaaaggcatgcaagcctgcaagaagaaacacaagtacccttctgttcttctaccggttctgttatcgttgatcgcaactcctgttctgtgtgtgttcgggtaccctttggtccaaagatcaagatttggaaagaatctaacagtgtatgccaaagaagaggtggaagacgaggaaaaacagaaccaaaatgacccgaagtacccgagaatatcgtatgagcagctcatagcagctactggaggtttcaatgcttctagcttgattggttcagggagatttggtcatgtttataagggagttctcagaaacaacacgaaggtcgcggtaaaagtacttgatccaaagaccgcactggagttctcggggagtttcaaaagagaatgtcagatcttgaagagaacaagacacaggaacttgatcaggatcatcactacgtgcagcaaacctggtttcaacgctcttgttctgccactgatgccaaatggaagcttggagaggcacttatacccgggagagtactcgagcaagaacttagatttgattcagttggtgaatatatgcagcgatgttgctgaaggaatagcttacttgcatcactattcacctgtaaaagttgttcactgtgatctcaaaccgagccatatcctttttgatgatgaaatgaccgctctggttacggattttgggatttcaagattggttcaaggtgttgaagaaacagtttctacagatgattcagtgtcatttggctcaacagatggattgttatgtggatcagtcggttacattgcaccag

SEQ ID NO: 188397 - DNA, 714 bp, Arabidopsis thaliana landsberg
agaatctggttatgtattggtttctacggtagatggatcaatatctttggtggatatgtcttctcagaagctagattggacattccacaccaatgagcctatatattcgtcttaccaagctcctcattatcattacactactgatgaagaacgtgcctcggtgcttggtgatgacttttacatggattgtgataaagattggcgtctttacaattcctctgtacgaaaaggaaaacgcgttaatgaggtaacactgtctctcacatatgagtctttaagatattgaagtgcttctttatccatttgaagtgtgtagctttttctctgttttagatagtggatgcttcggagtttattggtacgttgccatatacatcaacggataggattgttttaggtaagaaagacacatctgtgtttctcttggattggaagactgggaagttagttaagaggtatagaatggacgagctgtattctaatactgttgttgaaaatgataaagagaaggctattgttttgtctaaagaagctccgttactatttggatcggggtttaacaaatcggaagattttcctgagctggtttatattgagagaaaagattttaaaatccaatgtatatcaaagttcggagatgttttgtggagtgtttcttatgcaaagatgcgagctcaactacagaatcatgcagagcgcacagttcatcagtag

SEQ ID NO: 188398 - DNA, 9 bp, Arabidopsis thaliana landsberg
atgcagccg

SEQ ID NO: 188399 - DNA, 450 bp, Arabidopsis thaliana landsberg
atgtttagagagctagttcgcaacgacggagaacggttcttgaagtatcccttgcctgacatcctcaaaggtacgtaacgtatcaacggttagatattcgattcagacctaatgctttttatagattttgacataggtggtcgtctattgctacagagagcagatcggcttgtaggactgacgaatagtctgctcgagaaatgctggccggtcttaatccggtggtgattagccaggttcaggtttgattttcggcatatcacaaactttgttcttatgaatatttgaaattatcaaaatttatgattacaaataatttgaatacacaaaccaaaaatgcaggaatttccaccaaagagctgtctggactctgcaaagtatggaaaccaacactcttccatacgaacagagcacatagaatcaaacatgaacggcctcaatgtccaagaa

SEQ ID NO: 188400 - DNA, 153 bp, Arabidopsis thaliana landsberg
tttattcttacgtttaacttgacgggttcaaataaacgttgcgttgtacacctatctctctctttatctattaagcttgacgcgtacgtggcttacttaagaggacatgttattcggaagttccagggaaagatccaatttactagtagttga

SEQ ID NO: 188401 - DNA, 388 bp, Arabidopsis thaliana landsberg
atgcagcgtgctggactatttccaacatttgacctcctatctgggtattcccaagcacaccctgacacacgggtgtgtacccagatattaggtaagatatattttcttccttcgttattctcgccttcggtccttatgaatggatctgaaatcatggctcattaactttggcaggaacattttgttgaaaatgctaagctgtcttcaaactacttcatctctaatgttgaagacatgatggtaaagctcagctatgatgtagttttgttcagatatcagaaagagaatgttttcttaacacatatgttggtcttgattttcagaaagttgctgccattgttgatgaattacccctcggattgcaagagaagtatcttttcgtggtcag

SEQ ID NO: 188402 - DNA, 139 bp, Arabidopsis thaliana landsberg
tgagagtttcacaatgaaagatagagaaaacgatggaaatcttgagagcagaatcttcgtgggagggttatcgtgggatgtcacagagagacagcttgagagtacctttgaccgctacgggaaaatcactgagtgtcag

SEQ ID NO: 188403 - DNA, 348 bp, Arabidopsis thaliana landsberg
gtaagattgtcgatgaaacgcacgttaaggtgatccgcaccgagggcgacgttgagacggtcttgacgctcaatactgattacacggtcacgggcgttgacaacgacaacggcggccaaatcctaaccaccgtcgcgccgaccgatgagcagtcgattacgaacgagcgaaccgtgccgttcacccaagagatcgaccttgaaaatcagggggcctattacgccgagacggtcgaagaaggcttcgaccttgcggtgatgcgcgatcaggcactgaaagacgacgcggaccgctcgctcaaaagcaacggaacatattatgatgcgggcgggcaacgcatcagaaacg

SEQ ID NO: 188404 - DNA, 395 bp, Arabidopsis thaliana landsberg
aaatttcagttgctgatgccttagctgctttggcttctacatccgaagtaactgtcacaaggataatccctgttgaaacgatagctcagcccaattttcgacttgaggaaataaactttgttactactcgggcaatgcgtaacgaactcgaggcgcaacgaaacaatctcgagctgcagcaactcgacgacgaggaaaaaattccagaagctgccccgcctgcggctgacgaagatttagctggtctcaacaatcccgaggttcctgacaatcagatacctcacgacttaggggcagactggagagaaccaattcggaactatatcctcaacggagtacttcccgccgataaatgggaggctcgaaagttgaaggccacttgtgcgcgtttctgc

SEQ ID NO: 188405 - DNA, 240 bp, Arabidopsis thaliana landsberg
gaggctgctaagcgtttagagtcaaatggtgagcttaatctttttttgttaagcatttttcatggaccacaacctctttttttcttttattgggaaaacattcctcacaaaatctacttttttgtctaggtgtatctggctcagaagtggaatacgtgcctcttcccgcagccccgagcacgaaccctggaaaccaaaagaaagaagaagtaaatgctattctcgttacactagtgcttg

SEQ ID NO: 188406 - DNA, 161 bp, Arabidopsis thaliana landsberg
ttagtggtccgaagttttatgagtccgaggatttagatacaaaaacttacattggatttgtcgtgtctgaattacttgtcggcgatgcaattattgtcttttgtcggcgatgtaatagcattggaatacaatttaagtcaacgattgatatcaaagattaa

SEQ ID NO: 188407 - DNA, 180 bp, Arabidopsis thaliana landsberg
tttccacctccgttgtacgaattctctactgggacttctgccgctgatgaacctccaccggagatcgttaagtttctggctgtcgcacgcctctcctctttcttgaatcggattccacacgcgttacataacgactgcaccaagttaacattgtatatgttacatccaaaatatctttga

SEQ ID NO: 188408 - DNA, 279 bp, Arabidopsis thaliana landsberg
gttcagctggtgctccacatgttgctcttcgttcgccggctcgccttgaggctgtttgaagtcgcccttgcgtttgtttttcccattcttgggatattaggccgcctctacttctccagatttatacttcccgaggaggatgttcaagagatgtttgcactcttccgtggaatgtcctccgaactgattgaattcgagttgtttgacttggccggctgctgggagtccgtatccactgcggcgaagatcgttcctcgtttgttcgcctttgggtcatag

SEQ ID NO: 188409 - DNA, 350 bp, Arabidopsis thaliana landsberg
atgacgatcaagagtagatcttcaagggacaacaacttcaaccttggaggttgtgtgaagaaggtaatgaaaacaagctctaaaagatcatagggttttcatcttatgtttcactatttataggctccaactaggtttaagggtaaaagtgtcaattctctttaattaagttcagtattgtggcaagatttatgactgtttacaagggtgagaggctaagtgactgtagcaggcagcctagacacgaccttcttgaccgatgtggtcataaagttcctgaatattttatttgttttattgaatcttttattcaagaacaaatcattcttactataaatacgactttttag

SEQ ID NO: 188410 - DNA, 205 bp, Arabidopsis thaliana landsberg
cggttgcggcgccgtctaccaggggtctgagcgccggaccggatgccagctatccttcacccgcgacggctctcaggaacgccggccgccggaagacgaccagcgcgaagaagccgagaccgtcgcccgccgcgacattgccggcctcgaggtgccggaggggggctcagcgacccactatcacaccgactatgaccatccttaa

SEQ ID NO: 188411 - DNA, 353 bp, Arabidopsis thaliana landsberg
atggtggagaacaaatcactgtcgcatgaggagctgcaggcgctgcaacagctcctggaccgccagctctcgccgcccggtcgggccaacgacggtgcggatacgcctcccgtggaggatcagccatgatcgcggtctggatggcgtacacgctcgtatcgggggcgctcatcgcgttcgtgtgctggctcctcgagcgcatcgccggggccgcgcggatctcgacgcgcagcgtctgggcgagcggcatggtgatgatgctcgtgatcgccgccgccgccgcggttccggagcgtcccgcgcctccggccgcctcaccggcggcgatggcgggatctcccgccggggtgatg

SEQ ID NO: 188412 - DNA, 512 bp, Arabidopsis thaliana landsberg
atgattgccagcaacaatgatgaggcagtgcaacaattgaaggctttgttgagatttgaattcaagattaaggacttaggtccaactcgtttctttctcgggttagagatatcaaggtcttcaaaaggaatttcagtctgtcaaaggaagtatgctcagaatttgttgacagattcaggtcttttggactgcaaaccgagctctatacctatggatcctacaatacactttacaaaggacatgggagtaccattacagaatccaacgtcttatcgtgatcttattggcagattactttacttgacgattacaagacctgacattacttttgcggttcatcaactcagccagtttatatctgcaccatctgatgttcatttacaagctgcacataaggttctcaggtatattaaatcaaaccctggtcaaggcttaatgtactctacagactctgaattgtgtctcaatgctttctcggatgtggattgggctgcatgtaaggataccagaag

SEQ ID NO: 188413 - DNA, 521 bp, Arabidopsis thaliana landsberg
atgagctggactcacctggggatgtacgactacaacctcatcgagttcatcgccctggcggtcgccgtcgtctccgggctgctggtcctgcgctccaccaccgctcccgcgcacgagcgtgtcggcttcgtgtgcttcgtcctcatcgaggtcgtgatggcctcgtggcagttctggggcagcgtcttcggcgacggaagaacctacatcgagtcgttcctgatggccatcgtcctcctcctggccactcccgcggtgcgccccgacggcgcgaagtggtggcaggccgtcacgaacaggcgcctgggcgggatagcggccgtcgccgtcgtcgtcctgctcctggtcgcgaggcgccgcgtcctgttccagtaacgaggaccacctcgccccgcgaaagagaagacgtaagtacacttgtgacatacatacaagtgactaacgtatttgtgacttctaggggtgacggtggcacaacttcctgtcaagcccgcctgggtgtacgaccgcgacttcgaatg

SEQ ID NO: 188414 - DNA, 234 bp, Arabidopsis thaliana landsberg
atgacaggaggtcaaccagtaaatcaagttttacaaatctccagagttagatttcttactatagttgagatcgagatattaatgataaactttgaagatttttctggtgggggagaacaacatgtgccagagttacacacaggactataccgaagggactgcgatgaatacattgaccaaaacaattgggatatagtcatcgcaccaggcactcgagttagaagtcgtaccatg

SEQ ID NO: 188415 - DNA, 63 bp, Arabidopsis thaliana landsberg
atgaaagaagatagtgatgaagtcacaaccaagacccgtatattgtctcttgagcttcttcag

SEQ ID NO: 188416 - DNA, 464 bp, Arabidopsis thaliana landsberg
atgtggcaacgcccgcagatggtcgggtggccatttaagaacgtcgacgacctcagccgatgttcgtatgtccacgtggctcgcccatggagccccgaaacctgccacatggctcgtcgttaagtacgccggttttggaccggctggcgtacttaatttaagaatgccggcctcgacgttcttagtcggttaaatacgtcaaataatgtacgtcggttaagaatgttggtatacagacgttcttaacctaaacacgtcggcctattagagtaaaaacgtcggttcctgaccgacgttttttttggttttcttgtagtgggacacgcatgaggccaggaattcacagagcctgtcgacgaaggtgtggagggcagcgagacgtaggtggaggggtcatgctggacttggcatccagcaacattgacgacgcggagacgactacaacgacgagggaagacacataa

SEQ ID NO: 188417 - DNA, 1039 bp, Arabidopsis thaliana landsberg
atggaggaatgcactaagctagagagtattccaactcatgtcagattgaaatctctggagtacctcaatctcagaggatgcatccacttgagaaatgtccctcagatttcattctacaattcatccggtttcttttggtcggaattaacatcaaccatcacttatcttgagcagtaagacttctgaggaaaggaacgtaaagtctctctacactctctctatgtttttactgattgactatagcgtgcttcctgttgagaattgttatcacttctctctaccgtctctcagggcgtcttcttcttctcctagtccaaaatacgatgctatgacgagcttccatggaccagatgtccccaaaacattcgacagccatctttataaggagcttaatcgcaaatcgatcactttattctatgatcaagaaatcgagagatcccagacaatcagccctttacttgcatcggctataagtacatcgacggtctcaatagtcgtcttctctaaaaactatgctgcttccatgtggtgcttggatgaattggtgcagatccacaaacgttctaagaacatgggtctaaacgtgttcgcgatttactatgacgtgtctccttgggaagttcgaaaacagacggggagatttggcaagatctttaagaaaacctgcgagcgcgcaacagaagatgaaaaagaaaggtggatgcatgctctctcagaagtagcaggtctaactggagaacatcttcagaactggtaatcttgtttttaaattccagatgtgtgtgtgctgggtttttccttgtcattagttatttcagaacttgaatttctttgagtagacttcgattgtgcattcagtgatgctctttaatgacactattgactaattgttattaggcataatgaacaagccttggttggaaaggtagttgacaatatttcgagaaaacttatagcaccatccaatcgttttggcgaattggtccgacttgaagctcatataggcaatgaatttgatatcaggaagagagggtggtag

SEQ ID NO: 188418 - DNA, 84 bp, Arabidopsis thaliana landsberg
atgtacgtacaaacccggttctcttggattccacgacgcggtccgtacgtacaaaccgggtttcagtttcgcacgggcattttg

SEQ ID NO: 188419 - DNA, 451 bp, Arabidopsis thaliana landsberg
atggtgaagttcaagaacttggagttgtatgggatctacccggctaatgattctgttatctctcagattagctcccagagatgcaagaagttgtgtttagagaattctgcttgtactgcagtcacttacacgaacgatggagagcctcaatgtcgcatgaagctgacccgatatatcagcggttactctgacccgtctctgagttcgatatcatatgttaaaacatgtttggacccaattgctgttgatccaaataatgtttctaaagagtcaccagtgactgtaacaaagtctcacagtatctgtattccttgtcttgtcggtgcaacttccactacacttgttctgtttcttggatttcagctcggtatcgttgtgtacatttaccggaggaagaagaagctagctaagaagaaagctgaacgattctccaaagcgacaaatccgaaag

SEQ ID NO: 188420 - DNA, 133 bp, Arabidopsis thaliana landsberg
gtatttatactattcatatctggtacctgaccggtatacccgacccgttttcactcctagctcggctggtagtggtattgggccgtggataagtgaccacctcaaagatggttacgctgtgtattcgatgtga

SEQ ID NO: 188421 - DNA, 386 bp, Arabidopsis thaliana landsberg
atggttagaacctctatcaaaagcataggctcggggatagataggttaagcggtttaccagagcatttgttgtgtcgtatactctctgaactctccaccaaggattcggttcgcacgagtgttttgtctaagcattggagaaatctttggttacatgttcctgttttggaattggaaaccagtgattttccagataatctggtctttagggagttcattgatagatttgtcggatttgacaaagagatagacttaaagagtttcgatatattttatgatgttaatgtccactggtatgatgattttctgtggatgatcgatgatgtggttaagcgtagagtttgtgatctaatggttaccaataacccgtatgttgttaatgaaaa

SEQ ID NO: 188422 - DNA, 425 bp, Arabidopsis thaliana landsberg
atggctgaaatcattaaagggcacccgaggctgcttcttgttttaagtgtcttctttcccaagtctaagcaatacgaagaggctgccagatccatctcctccgaggctagtagaaccatccctccaaaggcaaccacacctcccaagtctagcagaaccatttctcccaaggctaacagaaccatccctcccaagtcgaagaaaaccttccctcgagaggctaagagaactatccctcgagaggctaatagaaacagaatcatgccttctgaagcgaagaaaaccatccatccagaggataagagaaccacccgtcctgtggatcatttagccttcttcattccaaaggctaagagaaccatccctccagctgagtctaataaaaacaaaaaaaacgttccgccaattttatggagaatcttgag

SEQ ID NO: 188423 - DNA, 332 bp, Arabidopsis thaliana landsberg
atgcggagggtcacacatggattgttgtgtctcctcctgtttacccaatttgctgttgcgcagtcaacaggttttccagccaccattacaggtaaagtaaatgacgcaaagaatgctcccatggagggtgttagtgtcatgatcaaaggaaccaaacgcggtgttaccaccaacagcgcgggcagctttaccattaccaatgttccggccaatgccagactggtattcagctacacaggttatgccgaccaggaagtatctgtaaagaacacttcccccctcagcatttcactggctgaaagaccattgggactgatgatgtggtgtgatcg

SEQ ID NO: 188424 - DNA, 111 bp, Arabidopsis thaliana landsberg
atcctcgctatggttgcactgtttgagattcgggtcctcggattcgcacccgaaatacggaactcagctgcgtgcttcgtcagccctgtacaggagggcaggccttgttga

SEQ ID NO: 188425 - DNA, 125 bp, Arabidopsis thaliana landsberg
ataaagacaacttaaaaatggttataaatgatgacaattttaaagatctcaacgtcgtctatttaaataaaaggaaagaaaatattgtcaacacctatgctgcatcggttaaggtttacgtgtaa

SEQ ID NO: 188426 - DNA, 695 bp, Arabidopsis thaliana landsberg
  unsure (1)..(695): unsure at all n locations
atggagagatctagatccaagagaaactaccactatgaccaagactatgacggagattccatgcctaggtctaaacctcgctacaacaataattaccactttggtggtggcggcggaggaaataacagataccgtgacgncgncggtggtgaaggtggaaatggccggccatcgaagtctcatcctgaaacgatgcaacaacgacttatcgaatcctctgtcacgacgctaaagcaggaggtgttattggtaaatccgggacaattatcaaatctataaggcaacacaccggcgcgtggattaacgtgcacgagctagttcctggagatgcagagcgtatcattgagatttctgataatcgtaggcgtgaccctgatgggagaatgccgtctttctctcctgctcaagaggctttgtttagtgttcatgacaggattttggagagtgaagctcagtttggttatggtggacctccgccggaagaggaggaggattacggtggagttagacctggtggagggagagttgtgactagattagtggtttctaggatgcatgttggttgtttgttgggtaaaggtgggaagattattgagcagatgaggattgaaactaagactcatattcggattctaccaagagaaagtaacttacctcgttgtgtttcactctctgaagagattgttcaggtctga

SEQ ID NO: 188427 - DNA, 1981 bp, Arabidopsis thaliana landsberg
gtgttgttgtttttgttgctgttgtgatattagtcagcttgtttagcgtacagcattatggaacagaccgggttggttggctttttgcgcccattgttttcctctggtttctctctatcgcaagtattggtatgtacaatatctggaaacatgatactagtgtcttgaaagctttctctccggtttatatatatcggtattttaagagaggaggtcgggatcgttggacctctcttggaggcattatgcttagtataacaggtaaggaaacaaaaatctagttcattctgctcttcaacagttcttattttcttgatcttgatatatttcgttttcttgccatgcctatgaaaatgttaggaatcgaagcactcttcgctgatctatcgcattttccggtctcagctgtgcaaatcgcttttacggtaatcgtgtttccttgccttcttttggcttatagtggacaagctgcgtacattaggaggtatccggatcatgtagctgatgcgttttaccgttccattccaggttttttcttcggttaagttcgtctttcgtatacaaatctgtgtagacaaacgttaagatttaagtacacatttgtgttttgcaggaagtgtgtattggccaatgttcattattgcaaccgctgcagcgattgtggcgagccaagctactatctcggcaacattctccttagtcaagcaagctctagcccatggttgctttccaagagttaaagtggtgcatacttcccggaaattcctcggtcagatttacgttcctgacataaattggatcctaatgatcctttgcattgctgtcaccgctggattcaagaaccagagtcagataggaaacgcttatgggactgcagttgtgatcgtcatgctcgtgacaacactgcttatgacgctgatcatgatcctagtgtggcgttgccattgggttctggttctcatattcaccgtgctctcacttgtcgtggagtgcacttatttctcggccatgcttttcaaaatcgaccaaggtggttgggtacgctcgtaatcgctgcagcttttctcctcatcatgtgggtatggcactacggaactttaaagagatatgagtttgaaatgcactgtagagtctcaatggcttggatcctcggtctgggtcctagccttgggcttgttcgggttccgggggttggcctcgtttacactgaactagctagtggagtccctcatattttttctcatttcatcacaaacctaccggccattcactcagttgtggtgttcgtatgcgtcaagaacctcccagtttacaccgtacccgaggaagagcggttcctcgttaaaaggattggtccaaaaaatttccacatgttccgttgcgtcgcaaggtaaccatctgaaatagtgttatgcggtgattactgtcgattgaacactctttgtattaactgttacatatttggtcgtccattgttaacaggtacggatacagagacttgcacaagaaagatgatgactttgaaaaacgcctctttgagagcctcttcttgtacgtacgccttgaatcgatgatggaaggaggctgttcggattccgatgactacagcatctgcggaagccagcaacagcttaaagacacgctcgggaatgggaatgagaacgagaatctggcaacgtttgatacatttgactcgatagagtcaataaccccagtgaaacgggtgagcaacacagtgacagcgtcgagccagatgagtggagtagacgagctggagttcataaacgggtgcagggacgcaggagtggtacacataatggggaacacggtggttcgagccaggagggaagcgaggttctacaagaagatagcgattgactatgtgtatgcatttcttaggaagatttgcagagaacatagtgttatctacaatgttcctcaagagagccttttgaatgttggtcagattttctatgtataa

SEQ ID NO: 188428 - DNA, 185 bp, Arabidopsis thaliana landsberg
tacgaattcatcgaactggtgcatcgcctcgaccgcgataccagtggcgtactgctgcttgccaagaaccgcccggctttgctgtgtggccaaaaaacgctcaaaaacggtgaagccgaaaagcgctacttcgcgctgctgctaggcaatggcgcggcgaagaacgtgacgtcgatgcggcgctg

SEQ ID NO: 188429 - DNA, 1520 bp, Arabidopsis thaliana landsberg
atggggaaagaaaactatttaaaaataaattcctcctcaaggttgtcatctccatcttctggtaaaaaacctgcttcgaacatccaagggtaaatcctatcccatctacctaaatgctaaggacataactggtttcctaattgtctttgtgactcctttgactcgataaaatattgaaaacaagtgtctcttacgagcatcaattaaccatgctctgataccatacttataacacccctgaaccgctctaggccaagaacaaatttggaagtatcacagttgactcccgcagccggctaacccagattcacggaacacgaccgctcgcccaaagtcgtccaactgcgagaaatcggtttaccttgctatcatggcctaaggctttgcaacccgtactgcgatacgcgagttatgatagtccggacatgactaattatatcatgggagacatgggtttactaaaatcatagctttattactatcaatgaaaatatcaagttatacatactatacgcaaaacctatatccttacaaagataatgcaaactacaccggttggcctaacatccttcgctcccaaaggttacctcttaaacaaatttagaatcttgagtaatctagcattagtcagtaaatccgggattctaatagtataacccaacccaacccccaatctcaaagaatcaataacacaagattcacaagcaataaattgaacaaccacgacagtctaaaagagattacatccctcaatactatatcgtcatgtatcgcttgcccgggcatgacctgctccaaaccttcgtaagctataacgttacggagtttcacgcaacgcaccaagacggatggactatcatggttcgcctaacaatagttaaccccctcgatcaaaactcttgaaagtatcctagaatacttcggctcatcgccaacaatcattctcttctatattggctgatggttcttcgatagccatccctcggtcaatttgtagtcttagtgaggggtattacacccgccataggtatctattatcaaaactattatttgatgagcctggtaataggtgtgtaataagaattggtctatctactaaggcgaactaatcaaactcgtttagcatgcatgtttaggataaggtttcatagaacgccactgggaatcttagctttaggcatagtgagtttcacggaacgctaccagttattatgatattagagtttgagttcgagaaccgttcaataacaatcctaataatagctagatctacaatttatctattttctgagaccattccctagacctgacgctttaatctcctgaatctacaactcaatttactgttttaatgtcttttacttttacctattttgtctagcttaatattaatcatcataagtctattgtgtgaacatcgagagctcagtggaattcgactcttaagtgctaatgacgatctcttatttgagggagtaagcttaaggcaatttgagatagatcaggaacctttaccgatg

SEQ ID NO: 188430 - DNA, 491 bp, Arabidopsis thaliana landsberg
ggtaccacccagacaccgacgccctggccgagctctcgctttgcaagcagctggaaaaggagactctgcgggagtattaccgtaaattcttaacactcaagtcacagctgccctccatcgatgatcagatcgctatccactacgccatcagtggccttcgggccggcgtcctctacagtcattgtatcagagatccaccaaaaacctccaggagctatatcagctctttgaaaaatatgccaaatccgaagagctccaccagcgcaaagttgagtcacagcggaagcccaaagatgccccacagtccagccgcacatggacgaggactccgcaaccagactccggtcgagatggccgcagtcaacagcaagtgcacaacatcgccaaccagcagcctgctgcggacccccctcgtcgccaggaatacccccccagggccgcggaaacggaactcgtggcaggggccgagggcgcgcgcagccgccgcgccg

SEQ ID NO: 188431 - DNA, 502 bp, Arabidopsis thaliana landsberg
tccattgctttcaaagcttattgctctcaacagacagttacacgatggtactatgttatatcgaaagtttggtcacgatggctcaccatgggaattcaatctacgggatgtgataagatcatgccagtttatgcaaggtagtagctagagtcatttaaatttttcataatacattttttccaggtgacagttgcttggactaaattgagttctcgtgtcgtttcagaggcgatacatgacttagaagttgaaagctttctcaatgttctgtacattcaaagaatgcgtactgcaactgaccgtaaagaagttctgcgtatctataaggctatttttgataaaaccccgtcgataaatccgtatcctcgggttcagctaaatcctgcgtacttagttgttggaactgctgccattaaacgaaatttaaatcagtctaatattgccagtgagcagttgaaacttttgcctgaaatccgtcaaaatctggaagctgttgcacatt

SEQ ID NO: 188432 - DNA, 80 bp, Arabidopsis thaliana landsberg
gtttattcatcgccgtcgtagccattgcagactcggttcgtcttcttcccacccttttattcccgcccgatcgtgcgtag

SEQ ID NO: 188433 - DNA, 166 bp, Arabidopsis thaliana landsberg
agcacacggcggcggattcggagaagggaggagcaaaggtggagcaggagcccgagcaagcatcactaaagccatagaagaaaggaagaggagggagaaagaggaagattctcgccggtgggcgagaggccacaccaacggcggcaaggagaagaagaaaccctag

SEQ ID NO: 188434 - DNA, 970 bp, Arabidopsis thaliana landsberg
atggaatcggagaagcctgggattgtttcaattctcgctgcagcaacggtcgattcggagaaacctcgcgtttcaatttctgcggtgagagcgattgcggcggcaagagctgattcgtttcttctcacgcgtactctctctggttcgttttcatctgctggttctgttccaattcgtgcacctgttacaattaatgaggatgatgatgatactggtactgtaactgatgaacataactcagcaagtagtgaagctagtagttatagtaatggacttgattttgagactgatgaatatgagactgtgttaaagaatgtggttttgcatggggttagggtagataggctactaggggaagagttaggtggagatggaagtgaattttcaggtgggagtgggatttatagaccatttgcaggtgatgttgacgaggaaacgtcggtgaattactcgtctttggaggaagatggtgagaacagtgatgaggtttgcgagagtgaagttagtggagatgaaagaggtagtatgaaagcaaaagtagtcattcctcgggctgttttgtctttggatgatgatgagtttgatgaaattttgggtagtgatgatgaagaggctgtgctgttgggtgtaactaaggctccaggtgatgaagaagctgaagttgaagatagagggtcgcagtttggagataagggagtggttgatgaaccagagtgttcggattcttttataggtgatgttgattctgaagaggtgagaatgaactattcagataaattagatgatggtttgatgtcctttgggaatattgaagaatcaagtctcggtgttccaccagaaggttctagtgattttatggcagaaaatgaagggaactctagtgaggcgagtatagaattgggtcaaaatttcaagcaactcatcgagaaaggggatagtaaaagtaccatcaacaaggaggatagtggtg

SEQ ID NO: 188435 - DNA, 62 bp, Arabidopsis thaliana landsberg
atactcgaaaaaccaattatccaaaccgaacggttcggttcgctcaaaagtcgtatgcctaa

SEQ ID NO: 188436 - DNA, 474 bp, Arabidopsis thaliana landsberg
atgtacaatgctcgcatcgcggccgtcaactactactacaagaagataaaggggcagaaaatgagcaaatcattaggggccaatgagatctacctcacagaggagcagtacctggagagcgttgtggattggctggcgaaggacatggaagcctggaggtggttggctaagagatgggtgtcgcctgagtggattgcagagtccaacaagcaccgtgccaaccatggcactgaaggaccggggcacaggtacggggccgatggacaccttggtaccgcacgccgcatggtaagtatataaatcaaacttttatgttacatctatgaaaattctatggtttaactcttctttttcatgcaggaagctgaaagtggagttgctccaagttttatggaggtttacgtccgtggtcaccatggccctgatccggcgaaccctgatgtgctatgcagcgaggcggcaagggataaaatg

SEQ ID NO: 188437 - DNA, 333 bp, Arabidopsis thaliana landsberg
atggctccgcgaaagaagagtaagcctcgtcccaaacgaaagagggatgaggaaccaactgttgtcgaaccgtctgcccccaaatcgacggctctcgacgatgctagtacaaaatcgtcggctctagacgatgctcgtaagcaatcgactcccggtgaatgtcaatctcttatgctttacagaggtgagcctgttcccttagagcagtgttagtattttgctgctgaaaaaacctgtgatgactgtgatgttgctggtgatgaagattgtgatgaaattggatacgatgctgctggcgatgatgacagtgaagatgatacggaaatcagatga

SEQ ID NO: 188438 - DNA, 301 bp, Arabidopsis thaliana landsberg
atgtctcagtcagagcgcgaccgctttcgtcggaggacgcgaagacaagtccctggaagatctcttccgactcaattttcatgcccaatcactcttctctcgcttttgaatttggtactctttttctcaattcccttctcacttctctttctattttcttctccggcttgcaattttcatacccaagctctctctattcctacaataacagatcggatttttagagaagattgtaaaactgtccaagtgtatgaggcacggaccaaggagattgtttctgccgctgttcgtggattcaacg

SEQ ID NO: 188439 - DNA, 448 bp, Arabidopsis thaliana landsberg
ccccaacgacgtgcaacgcaatttcgccaccgtgcgcgctttcgccgagggcgacgatggcgccgagcggatcggcaccgacggcaacggcatcctgtcctatcgtgcgggcgatccggcggtgcggcacatcgtgcacgacgcggccaggccttcttcgctacccggcgactccgtgcgcgggctgctcaccgatgcctcgggcaacctgtgggcagccaccgacctgggcgccgcgcataccgacacccacgcgcgcatggtgtgctcgctgctgccttcgccgctggacccgcgcgggctggccgacaccaatgtgcacgccatcctggtcgacagccgccagcgcatctggctcggcctgggcggcggccagatccccctgcccgacctgcacgcgggcagcatccataacataaagctggacggcgtgcagcagcaccgcgat

SEQ ID NO: 188440 - DNA, 636 bp, Arabidopsis thaliana landsberg
gctgtttttcgaagatatttacgtcccgaaaaggattacttgtcattttctctcatatatcacaacggagatagatctcttgatctggttagtaaacaataacatattaattttctttgatttttctattcttttgtcacatatattcatgtttatcctctacagatttgcaaagacaaagctgaaacagaggtttggtttgcaggacttaagtctttaattagacaaaaccgtaacaagcaagccaaaagtgaaatccctgaggtgtgtgtatacgtgactttattttcctatattttactttccacaatttccttacgtctaatatacaactatatgcatgtaactcgttttcagatacatgacagtgattgtttctctactggtcgtccttctactgcatctatagatttcgcaccaaacaatactcgacgaggaagaacatccattgatttaggaatccagaactctccaacaaagtttggtagctcagatgtgggatatgaacgtggaaacatgctaagaccaagtactgatggttttcgaattagtgtctcaagcacaccaagctgttcaactggaacttctggtcctgatgacatagaatccttaggagatgtttatgtctggggagaa

SEQ ID NO: 188441 - DNA, 394 bp, Arabidopsis thaliana landsberg
tcacctgcccgacattctcgaaactactgactgtggattggactaccaaagctgacacagagcataaggcgagcaagacaacacttaaaggatttagagcctcaagcattttaaatcgtataaagcttgatgattttcagacaagtacaaagattgaggctttggtatgtgctctttaatatctacagcctctgtctccccccccaaatagtaccccttaaagtttctttgtagttttgagtcttttccttcctttctctaaccagtttgtgatgatttttgtatgcagagagaagaaattaggttcatggttgaaagagatgggtctgccaaagcaatagttttcagccagttcacatcatttttggaccttataaattatacccttgggaag

SEQ ID NO: 188442 - DNA, 44 bp, Arabidopsis thaliana landsberg
gtattttggcgatctgcgccgttagtgagagcgacgatgaattg

SEQ ID NO: 188443 - DNA, 1613 bp, Arabidopsis thaliana landsberg
ttagaggctgagaaaattttcaaaacgcttctggcttcacattcaaaagagagacatgtgactacaacaacaactgctgcaacgactcctacaaaagtaacaaagaaaacatcagcagcaaaagctgagggaaaagatcaagaggtggtcaagaagagggaaatagagacaaaaagagagacatctgttactggatcaagcatcgaggtgagtagagcagatggtcgaagccatggcagtagtagctatgcagggagtctcacgggttcagagcaagcaactaagcatcctataaagaagcctgaatgggttcagagatcatcacctagaccgaaaaagagccctgatagaagttctgataagcctgaatgggttgagacatcatcagctcgatcgccaaagagtcctgctagaagctctgataatcttaaatgggttcagcgatcctcacctagatcgacaaagagccctgatagaagctcgggaagagcagcggatgatgttaaggatcttaagggagctctcaggggctcggggggaacaaagagtcagggtcatgtcacgtttcagcttcctagctcgcctgggagatctccatccaagacacatacgttttcgccaaagcaaagcggtaaaatgatatgctctcatgttcaggtctcactgttgattctcttgtttctggattgacatcttaactttctttaacagattcccctgtcaaaaaacctaaaatgttacctggggtagcctacttaaccaagcaatcaagcttttctccttgggttccaagacatacatcgactattgctcatcctcccaagcaagagaactacataaagcaccacaactccacaagatcacgagtttccaaagaatcgaacacgacaccatctgtttctagttatcctttaaagaggaagacgtcacaaagatctcctgaagctattaactcgcgtggtcagaaaaatcccccaagcccacgagtttcaaaagaaccgtacaagtcatcttctttatctggttcttcttcttcaacgaggaagaagcctccaagatctcatgaagctgccaattcacgtggttacaaccataccccaagcccacgagcttcaaaagaaccatacaagtcatcttctttatctggttcttcttcaacgaggaagaagccaccaagatctcatgaagcttccagttcacgtggttacaatcatcccccaagcccgcgagtttcaaaagaattgaacaagacaccatcggtttctggttctccttctgcaacaaggaataaatcaccaagatcctcagaaaatgtcaactcatgtggtaattcatcatccggaggcaattctgttgtcaagagaaatactgacacaagcatcatagtttccaaacaagaatcaccaataaaaactcagctcgatatcagtaaggctaataagttactggaagaggtggtgactctacgggaacaagttggcgaagatggtgaagtgacatatcagataccaaagcaacaatttgaagatctaagcaaaggggtccataatgttctacatgatctacaatctattaaattcgcattgaacatacaagataatgatgatgcttag

SEQ ID NO: 188444 - DNA, 190 bp, Arabidopsis thaliana landsberg
ctactgcttttctgaaggctgctacacgcatggaaatattgtgaatagaccaaacttcagcttgtcagcatcagatctgatagatatcccaagcctagcccgaagcattggaaatagattcatgacccagatctgggtaagcggcgggcgaaaaatggcaggtgacgaagctcgaagccatcttaagccg

SEQ ID NO: 188445 - DNA, 292 bp, Arabidopsis thaliana landsberg
atggctaatggtatgcttgacgctaacggaaatcctgttgatccttcctggctcgatgctactcctgacgtcatggcttatcaaaagcctgccgatacaggattactaactgctgccaataatgaaatcgcggccaaagatgcattagcatccggtactgttgccacacaagcacagaatcaacagaataagattcttatgcaacagcagcaaacattgcttcgtcaagctaagaagagttatactgaaaagaaaactaagcaacaaattagagcagcggcgaagcaggcag

SEQ ID NO: 188446 - DNA, 302 bp, Arabidopsis thaliana landsberg
atgggtgtctcgtttaagatatcgaaggttggtagaaagtttcgacctaagatttctactgaattggctactcctgattccccaaaagcaatcgttctatctgggaaaccaaaggtaatttaacttagaattttagttgtattgtgttccaactaaattcgcttattttggaaagttatatagaaaatttattacgtttggttcaggccactgatgatagcaatattggcgatgtttccgggttttcgaagccatctttacccgatatatctccaggtttggatctcaacgaaccactttga

SEQ ID NO: 188447 - DNA, 845 bp, Arabidopsis thaliana landsberg
atggcgactaaaatggccggggcagcaatgaatttagcaaagagagagtcgtcaagtttgtgtgggaagctagagacagatgttgaaatcaaagcttcagctgggaagttccatcacatgtttgctgggagaccacaccatgtctccaaagcaactccagggaaaattcagggttgtgagctgcatgaaggtgactggggcaaagtcggctctatcgtcttctggaattatgttcatggcaagtgcaaagttatcttaacttttatcggaaaaaaaagttataatatctacatagaatatgttcttaaacttgatatttttatctatgaaaaaagtgagcagaaatgcatacttgatgtgaacttctggccaagggcacatctcagtgtcataaatccttggctccccatttcattacaaaaaacatttattcgattcttacaatcaaatccacagatatgtaatgacaaaagtatagattaattaaattttatgtttataacatttttgtgaattaatattcataccgattttttagtcaaacccaaacaaatatatttggtgcagatggagaggcaaaggtggcaaaagaaaggatcgaggcagtggagccggagaaaaacctgatcacttttagggtgatagagggagacttattaaaagagtataaaagctttgtgatcacaatccaagtgacccctaagagaggaggacctgggagtgtggtgcactggcacgtcgagtatgagaaaattgacgacaaagtggcccaccctgagacctttcttgatttctgtgtggaagtctccaaagagatcgatgaacatctcctgaacgaggaatag

SEQ ID NO: 188448 - DNA, 139 bp, Arabidopsis thaliana landsberg
caaggtcaatacccgcgtaaggaataatcccaagaagagaagggaaaagacctttgtagaaggcacgtggaccctcatgaaccaatatatctttggtgagcgttccaagcctgggaacagcaacacctgcttggctcgt

SEQ ID NO: 188449 - DNA, 60 bp, Arabidopsis thaliana landsberg
atgcatcaccaacaccaagtagtaaaaagtttcatcccaaaacaagtgaccgtcatcgta

SEQ ID NO: 188450 - DNA, 137 bp, Arabidopsis thaliana landsberg
tcgtgggatggcgacggaatctgtgttaccatctccgttcggctcgcattgtccagactcgtcggaagtcctattccgaagaatattcgcagatctgttggccggcggcttttttggattttccgattgaagattag

SEQ ID NO: 188451 - DNA, 203 bp, Arabidopsis thaliana landsberg
atgagtggagcatgcttggtggataagtttctgaaagatcttgaatttagggttttagaagacaaacactccaaaggaacttcaccagataaaggattgcatatatacttctctgcttcgttccatttcgagtttagctcaactccttctggtttcaaccaatcccaattcttcttgtacactgattttgcttgcaatgctgt

SEQ ID NO: 188452 - DNA, 623 bp, Arabidopsis thaliana landsberg
atggtaaaggtacgaacatggtgtctacctcgtgtagaagtgtactgagggctgaactcaggtggtgttggaaacctataaaatttacatataacatgacattatataaaggatcatacgcatttttggtctatatatagagcggataagttttgtttcattgaagaatgaaccaagctctattctctgggtatggaacggttgtgctaccatgcctatgcaatgtaatgactgctgtgctgaataaatcatctgtatctgaatccagatcatttgcttgtagttaatgaacataatatggttctgttacattaagaacttcatatttaatttatttttacaggctttgcatgctctacgtcctcagcaactaacgacagaagtactaagctcagggcaagccatttttcaggtattttatttcaataaggatggtagttcagaatagtgaaccctaatctcaagaatgattcacttgttttcttatatataactttttgatgtttctgttgctatagaatattctaacagagggagacatttgtgcatcacaacgcagagcagcatgtgagggtctaggtcttctagctcgtcttggaaatgacatctttacagcaagaatg

SEQ ID NO: 188453 - DNA, 783 bp, Arabidopsis thaliana landsberg
ttgctcacgcatactgaaaaacttgtaattgtctatttgcgccttctacaggttttggagagctatgagcgtgcgtacagcaatatggttcgtgttcagcagctgtcagaactagaggaggttagatctcaattatccaagatcccttctcctggacaccctccctaacacccctccatatacatgattaatctttctatttttttcccctgttgtatcgatactaggtaattgaatattatacgctgcctgtgggaaatactattgccgaagaacggagagctctaattcgtaatatgtggactcagcggattcagggatctaagcgtaatgtggaggtatattatttttaatgttatcatgttagttgagccactagtgaatgacaaggcatttggtattttaagcatcaaatattgcagtatggtgactttattaaatgaatcttcgctaggatcaaattgattttttccatattaggtttgctttatttagtttccgtctgttgatttataaagtaaagtagcttcttaccaaactgttagtcagagcttgtatcctacgtagataaaaaaacaaatccaaataagaaaactcattaaaattttattgagtgatctcaggttttttgtataatagtgtgctttttaatactttgcattcccaatactactcaggtgtggcaagcacttttggctgtccgggcacttgtgctacctcctacagaagatgtggaaacttggctcaagtttgcctcgctttgtcgaaagagtgggaggatca

SEQ ID NO: 188454 - DNA, 151 bp, Arabidopsis thaliana landsberg
atataaaccaatgctccgaccggccattcaactattccggctgctacaaacgccacaagccctaacgtcggtcctaccactttgcatctacaagggtttccgcccgttccgcactgcacgcatatcggaatcatcgttggttaaaaactga

SEQ ID NO: 188455 - DNA, 124 bp, Arabidopsis thaliana landsberg
ggaaatcttctggggcaaacttgagcttctgggaactcgaaagcgtctagggtttttgttgggccgaaactggtgtcgatcgacaccaaaagtgtatcggtcgacactcctcgctgattcctga

SEQ ID NO: 188456 - DNA, 1521 bp, Arabidopsis thaliana landsberg
  unsure (1)..(1521): unsure at all n locations
atggcttcaataagcttacttcaagtttccgtagctatcctttgctttctcatccttcattactttctcttcaagaaacctcatggccggtaccctaggaactggccggttctccggatgctacccgctatgctcaaggcgcttcaccgaatctacgactacagcgtgaagattctcgaaacctctgacttgacctttccattcaaaggaccgcggttcacaggaatggatatgttgctcacggttgatccagctaacattcatcatataatgagctcaaatttctcaaactacatcaaaggaccggagttccaagatgtttttgatgtgttaggagacagtttcatcaccacggactcggagctatggaagaatatgaggaaatcttatcaagccatgctccatagtcaagagtttcaaaggttttcaatgagtaccatgacaagtaaactcaagtacggtcttgttccccttcttaatcattttgctgaggaaggaacaactcttgacttgcaaagcgtcttcgggaggttcactttcgatacaatcttcatccttgtaactggttctgatcctagatctctctccattgaaatgcctgaagacgaatttgctaaagctctcgacgatgttggagaagggattctttataggcattttaaaccaaggttcttgtggaagctgcaaaactggataggattcggacaagagaagaagctcactgaagctaatgcaacttttgaccgcgtgtgtgccaaatacatatcagccaagagagaagagattaaaagatcacaagggacttccaatggaggaagtcaggatcttttaacttccttcataaagctagacacgaccaagtacaagctcttgaatccgagtgacgataagttccttagagacaacatcttagctttcattctagcgggaagagacacaacagccaccgctctctcttggttcttctggcttctctctgaaaatccacatgtggtagccaagattcatcaagagatcaacatcaacactgatctatcaagaacaggaaatagccaagagaatgtagacaagttggtgtatttacatggtgcgttgtgtgaagcaatgagactctacccaccagtttccttcggacgcaagtctccaatcaaatcagatgtgcttccaagnnnnnnnnnnnnnnnnnnnnnnnnnaagattattatctgtctttatgcattggggaggatgcgagcggtttggggagaagatgcatcgcagttcaagccagagagatggatttcggagaatggaggcataaaacatgagccttccttcaagtttttgtcgtttaatgccggtccaagaacttgtctaggtaaacatctagctatgactcaaatgaagatagtggcagtggagatattacgaaactacgacattaaggttctccaaggacagaagattgtgccagctcttggttttatattgtcaatgaaacatggtcttcaaatcactgttactaagagatgttctgcttga

SEQ ID NO: 188457 - DNA, 425 bp, Arabidopsis thaliana landsberg
atagaacaagtaccatttgatgaaggaggggagactcaagaagaaacagagactagggtcaaaaagagagctcgagtttctgcagaaagaggatcttctcgccgcaatcaggcatcaaataaacccaatgctgatccacaaaacttgcagcctgggcaaccacattgctcaatctctgatcaagtgcaaaaggtgaaacagattattgttgacactttaaccgggataaaacggattcggtcagagctagaaagaaagggacaaaagttagaagcttcgatactggaaattgatgctttaggtatgatctgaataaccgatgaacacttgtttattttctttactaattaggttctttgtgttggaaaaaacaggggagaaagtgtcggaaatcaacaaaatcctcaagtaaacatcaagtttaa

SEQ ID NO: 188458 - DNA, 368 bp, Arabidopsis thaliana landsberg
atgtctattgtgagagttggtggagacaacaacgtccctgcccccgaggaagacgaagttgtgatttaccgaagcttcttcaaagctgggcttcggtttccattgagcaggtttgtggtcgaagtgctgaaaatttatcagatttacctccatcagataacccccgaagctattattagaatggggatttttgtttgggctgtgagaagccagggactagagccaagcgcaaaatgcttttgcagtatgcacgagcttgtatacgagacgaaggccatgggcaaagaacaatatcataacaattttggctgttatggatttatcgcccaccccaacgcaagctatccggtgccaacataccggaaaag

SEQ ID NO: 188459 - DNA, 65 bp, Arabidopsis thaliana landsberg
atgggcagttacggtttcaagcgttatttagcgtttcgaccgctcggtttagcggttgataacag

SEQ ID NO: 188460 - DNA, 754 bp, Arabidopsis thaliana landsberg
atgggggatggaggtaagagaccctatgaagttctcagattggtcacaaataacctgaatatccgctttgatcacctcaggcataggttcaaacataagaaagttactcaatgtatcctcaaagttcaaatctgtcaatgaaggagctttgatcacaaatcctttacttccctcaacgtatgtgccttttcctttcgagttcctaatagataagttcctcaaagtaggcacatcaatattggttatcatcacgttctcatttttgatttggtctacaaccaaatgttcaagaacagggcagatttttaaaagacttgcaacagattcatcgccaaagaacttaacggatagaaggtgcaacgcttcgagtgatggcaaactaaatgaaggaggaacaaccttgatacttaattcatgaagtatcaattcttttagggttctgaaagttttcaaagacaagtcgatcctcagctctctcgaggatcgaatagataagctcctcagagaaggcacatagatattgggtatcatcacattgacaccgttggttccgtgtgcagccaaacgttcaagagcagggcaaattcttgatatacttgcagcaaatccgtcactcgagaacttaaccgacaaaaggtgcaacgttttgagtgatggcaagcgaaaccaagccgggacaaccttgatacataaatcatgtagagtcaattcttttagtgttatacaagaacacgaacaacacggcaattctagg

SEQ ID NO: 188461 - DNA, 421 bp, Arabidopsis thaliana landsberg
atggcggaagaggcatctagtttgttcgggatcgttgagacaactgtggagctaaaatcttcggtggagaagttccatgacctgcttgtcgggagaccacatcatatgtctaatgcaactccatccaacattcagagcgctgagcttcaagaaggcgagatgggccaagttggcgccgtcatcctctggaattacgttcatggcaagtcaacttttatatctctttgtttatttatataaatatctatcaagattcatcggcttccaatgcatataatgttttaatatcgattaccttagatcctctcttattttggaaacctataaaatatatgtgaaatgataattttggtgcagatggggaggcaaagtcggcgaaacaaaggatcgagtcattggatccggagaaaaatcggatcac

SEQ ID NO: 188462 - DNA, 177 bp, Arabidopsis thaliana landsberg
gatgtgaaatgtgttttgaaagaaagttctagaggaacatatactgattataaccagtccctcatagaaactaagcttattcgaaatagacatgaaatagcaactgaattcaacgttaatcattatatcgccagaagaagaatggtagatgtatatgagaaagaaaataagtactga

SEQ ID NO: 188463 - DNA, 1341 bp, Arabidopsis thaliana landsberg
atggttcgtgggttggtgaatttcaccggattatcaacgaggttattaaacatttgcgttgattcactctgcaaattccggaaattagagaaagctgagtctttaatcattgacggaatcagattaggtggggatcctgatgtcgtcacttacaacacactgatcagtggctattgtcgattcgttggtatagaagaagcttacgctgtgactcgtcgtatgagagacgccggaattagaccagacgtagctacgtataattctttaatcgccggagcagctagacggcttatgttagatcatgtcctctacctgttcgacgaaatgcttgagtggggaatttatcctgatttgtggagttacaatactttgatgtgttgttattttaagctagggaaacacgaagaagcgtttcgggttctttataaggatcttcagctcgctgggctaaatccaggtcctgatacttacaatgttcttcttgatgctttatgcaagtgtggctatatagacaatgctcttgagctttttaaagagatgcagagtaggtttaaaccggagcttatgacttataacattcttatcaacgggctttgtaaatctaggagagtcggtactgcgaaatggatgctaacggagctgaagaaatcgggttacactccgaatgctgttacatatactacaatcctgaagctatattttaagaccaggaggattagaagagggcttcaattgttcttagagatgaaaagagaagggtatacgtatgacgggtatgcctatttcgcggtagttagtgctttgattaagacgggtagaacgaaagaggcgtatgagtatatgcaagagctagttaggaaaggtaggagacatgacattgtttcgtataacacattgttgaatctgtattttaaagatgggaatttggatgcggtggatgatttgttaggagagatagagcggagaggaatgaaagcggatgagtatacgcacacgattatagtcaatggtttgttgaggacagggcagacgagaagagctgaggagcattttgtaagtatgggagagatggggattggattgaatcttgtgacttgtaactgtttggttgatggattgtgtaaagcaggtcatgtggaccgggcgatgagattttttgagtcgatgcaagtgaaagatgagtatacttacacctctgttgtgcataatctttgtaaagacatgaggtttgtttgtgcttcaaagctgctattgtcgtgttacagtaaaggaattaagattccaacatcgagcgagacgaacggttttgtcgggtttacggatgtctggatgttacggtga

SEQ ID NO: 188464 - DNA, 410 bp, Arabidopsis thaliana landsberg
atgccttgccaagcttcaccacatgggtctccaccagaagcaatccaaccaggaagaacaggtgctccaagtgcagcgaataatccgttaattgcagcaactgagtcacaattacaacaatgctgattaattctcagaaactcatgaacaaaatctaaaactcctcaaccaataagcacagatctcactctaaaattcagtgagacaaaatgtaatttagaagcaaaaataagtgcttaccatcatcagggttagtagcagctaaggagatcgaaggaatccagatcagtaaagacaagagcagaggaagaagaagaagacagtatatagatctcttagcagccattgttccaagtcagagtagagtaaaacgaaacatcaatcgaacaaaacgatgtccacgaatctga

SEQ ID NO: 188465 - DNA, 239 bp, Arabidopsis thaliana landsberg
atgaatcatgtggatgtaattctcgtcgtctctattccgaacatcgcaagtattgttttccttttgcatagtgcattttttaaaatgtcatattccaataataatctatagtgatactcgaccactatttccggtttgacgctagcatttccacacgcgtgattaactattacatgtcgttgttaggtggtgtcagattaactatgaacagaaaacgaaagaaggaacataatgaatga

SEQ ID NO: 188466 - DNA, 45 bp, Arabidopsis thaliana landsberg
atggctcaaggagtaccacgagaaggtgctggtggagatctacag

SEQ ID NO: 188467 - DNA, 360 bp, Arabidopsis thaliana landsberg
atggtccgcgacccggccttaaatagtcgaaggtgggagcgaagtccgcgcgtttgttacaccgacctccacggaactcgcggtggttggttctatcgttgccgcacgaggtggaggacgattctggcctccctgacccaccagtaagagactaaggcgggcgcgacatgaaaccgtgacgctgatcagaggggcccaccagtcagcgaaacgagaaggaaggagcgcgcgtggaattggctgcacgcgggccccacctgtcggttacatgacgcagcggcgcccaacgctggcgagatgggccgacggggaaaagagaagaagtggtcaggtgggccgaattgtgcaggagcggcccag

SEQ ID NO: 188468 - DNA, 92 bp, Arabidopsis thaliana landsberg
aaatagatcccttaatattgtattctagaagtatatttgacataacggaatcaaaagccaaattgaagagctatgtggacttttctacgtaa

SEQ ID NO: 188469 - DNA, 76 bp, Arabidopsis thaliana landsberg
atgagctgccaaccagacacaaaacgagaactttggagtatcatgagtaaaccaaacgcctttgtgccaagtgacg

SEQ ID NO: 188470 - DNA, 770 bp, Arabidopsis thaliana landsberg
atggagagttccagatcttctttctttgttagcaaaaatgtcccgaccttttctaatgctgaagcaatcgaacgggaaatgcccttttcaacaatatctgagtctcgtcgactcttcagttttgagcgagttcagaggagaggcatgaggcggaaggattcctatcatgtgttgaacgaaggcacaaagagtatcgtgaattactcagctactatgaagatcgtaaagccgaattacttcataaactggatatgttagaatctcatccacgaaactggattaagaatggttttcaaaggttggctcccatgccagacattaacctgccatactgatatgttcaagatgttattgtcaccttgaaagagaggaatcctagtattattgcagattaagattttattcccagaacgccttcactattttatctcaggccgtcaacttctgatgctgaagttaccgaatctcaaaacttgtcaactaggtatgaaccatctattttattcttcttgctttatcttgatgtttattatcttcgcctttcattctcgatccaggtcggatttatgcaccaggatcagtttcgtgaacttcagtatttccgaaataagaagcgcaaggtggattcccgtccagaggaacttgaagccgaagtcgccaaaataagagttaagcagaagaaagttactgctcgtctggatgaattcaaacagatggtcaaagcgttggagattctgtcagaggattgggagaaagtcgacctgcagttg

SEQ ID NO: 188471 - DNA, 1115 bp, Arabidopsis thaliana landsberg
agctctagccaaacttagaaaaacatctcatcactattacaatgaggttgacatgaaagatacatcccgttactatgttgattctcgcggaaagtcgaaatccgggaagaagctgaaagagttgcctaggctttcgttggacagtagagaccacgttgatctcaaatcaggtaataaactttctgaaagtttcagtagaagctctagcatgaacaaagtttcaggtagcccgaaacggcctcctagtgtttgttgccaagctaatgggcttggaaacattaccgggttctcctttgagcttatacagattcaacatgtgtgatgataacagcgatgcattcacaagatcattgagggaaaatagcctgaaccgttctcttcggttctctcctagctcgcccagaagcttaggaaaggaccctggtgcttcttcttcttctccaagatggagaagctctgagtttgttatgaaacccttatcaagtttgagatatcccattgaaccagctccttggaagcaaaccgagagaaaccggttttctcaaaagcaagcctgcaggtctgtgaaatctctgtcacagtcgatggagggaaaattgaaagatcttgaggttaaacattcgggaaaggatctcagagctcttaaagatatattagaggcaatgcaatcaaaaggtctctttgatactcgaaagcaacaacaatgctcaaacttggaagctcaaagagattacgaactggcagattctgcaacttctaagcatgattcaatagacctgagaaacccggtgattccatccaatatgagaggtccaattgtgataatgaaacctgccagacttgttgaaaaatctggtatcccttcatcatctctgattcccattcacagtctatccggtcttaataagacctgcagagaagaacctgtaaatgttagaagaagttcaacaagtagaaaggcagtaaaagatcgtagtcctggaaaccaaagagctgaaccatgtatcagttctgacaagaaatctagcagcagaaacgtgatgtcttctcaggtttacaaagaaaagcactttcaaagaattcagggcctgcaagttcaaagttgcagcagatga

SEQ ID NO: 188472 - DNA, 194 bp, Arabidopsis thaliana landsberg
  unsure (1)..(194): unsure at all n locations
atgatcnatccggtaaggcaaagtagatgctagctgaaatggtccaagttagcatggaaaagagcttacgacatctacaagaacgtgccgcgactcttgttcgtccataacctgtgatcgaaaaccgcaatccctaggtttcttccaagtataaaaacggtggtttgactccgaataagggtgatgaagattga

SEQ ID NO: 188473 - DNA, 459 bp, Arabidopsis thaliana landsberg
ggactgggaaaggggatactccgaaagggatccttctccgcgaagaaagcgggccccgagcccccctactgatcagaggttcaaaggctggcccctcggaagggttcaacagccgcctcagagcactcgggctccgcgaccactactggtcagaggttcgaaggctggcccctcggaagggttcaacggccacctcaggccactcgggctccgcgcccactactgatcaggggttcgtaggctggcccccgaagggttcgacagccgcctcagagcacgcagagcgagggatgacctgggtacgtttgatacataaccaaggctcgggctacactcccaaggtaccctaggacatttccgagaccgacgggaacgattttgtaacggaatcccaccagagggaggcatcgagccctcggaccccgtcaaaaggggaccgggtccggcgaatcaccgcag

SEQ ID NO: 188474 - DNA, 67 bp, Arabidopsis thaliana landsberg
ttcgattcaagcttctcttttcgccgaaccaagacgttctcgacgaaccacaaccaaggaagcgtga

SEQ ID NO: 188475 - DNA, 256 bp, Arabidopsis thaliana landsberg
atggcagctataccacttggactgcaacagcgtgatgttatcggcattgcagagactggttctggtaagactgctgcttttgttttacccatgttagcttacatctctagattgccaccgatgagcgaagagaatgagactgaggggccttatgctgttgttatggcccctactagagagcttgctcagcagattgaggaggaaactgttaagtttgcgcattatctagggtttagggccacctctattgtgggtg

SEQ ID NO: 188476 - DNA, 110 bp, Arabidopsis thaliana landsberg
atgggacgatacaaggtctacgagccttatactacaacaagaacattatttccgaagctgggggggcttggcacatatcattcaaagatgaaatcggaaaatgcagccag

SEQ ID NO: 188477 - DNA, 144 bp, Arabidopsis thaliana landsberg
aaagtaacggtctatcggatgtacgagtgtagacagtcagacaccgtcacatatgccacgtcagaactatggagccaccgacatgtaaccgcgtttcaaaatgggacccactttccccgttttatcttacctttttccttcaaa

SEQ ID NO: 188478 - DNA, 216 bp, Arabidopsis thaliana landsberg
gtttcgcggcccggtcgtgggatcggactgttcagattgcaggaggttcggaccgccgtccggtctgatctcgcggagccgcggatgacagaatacgactacgacctcttcgtcatcggcgccggttctggcggcgtgcgggcggcgcggctgacggcgctgggcggcaagcgggtggccatcgacgaggagttccgggtcggcggcacatacatg

SEQ ID NO: 188479 - DNA, 434 bp, Arabidopsis thaliana landsberg
atgtggagcattggcaccgaaatacgcgaacagtttgacagcaccggcatcagcattgcccgcgaactggtaggcatagtaaaaaagctggacaacacgcgcccggttacctcggcattgagcgaaccggaccctaaaaagaactttatttatcaatcgggcgcgctggatgtggttggcctgaattatcaccaggaggtatatgccgattttaagaagaattacccaggtcaaaaatttatcggcactgaaaatatgtcggcgctggcaacgcgcgggcattatgatatgccgtcggacagtatccggcgctggcctaaggatggcaaaactcctttaacaaatggcaatgccgattatacggtatcggcctatgacaatgtatcggcttattggggctcaactcatgagcacccctggaagatcattaaaaa

SEQ ID NO: 188480 - DNA, 5146 bp, Arabidopsis thaliana landsberg
ataacggtctggttgcggagtccgaagaactcacaggagaagaccctgagcagcagctggttggtggaggcaaatgtcccttgacctatctttgtcctatacattctataattcactttccgcatttacacggttatacctaaggattgactagcttttattatccatgtccttgcttacctatttgggttggattattctggtttagcttcatgctagtgcttaacactaatcaatgaacatgatgagatttatcaatgatacgttgtttccctcctttattatgatgttatacttgtggcatttaaggggactcatgctgtttctcgagtgcctctccgtaatgacctgttcattggagtgaccacccagaataacagtgcaaccatgagggtggaatgggacgcccttagctgaataattagaggaacctgggggtgtagttggatttgcctgagggccgttgtaggaaacaggtgacgcctaagaggggggtgaattaggacttctaaaacttttactaaactaggccacaattaaatccctagagcaaaacatatgcaaataatcaaaactagaatgtgcaaactcggttttgtctaagtgttgctatctctaccgcaaaggctaagtttcaatctacactaaataagcataaagacaagattgaaacttaaatgcttaatataaatgtggaatgtaaagagcaaggtagagatgcaaactctcgtggatgacgctggtatttttactgaggtatccggaaccacgcaaggtccctactaatcctcgttggtgcccctacacaaagggaagcccacgcgagggccaagcaccacggtcgagtaactccgtagagagccgcgggccttctccacgcgcaagtggtgctccgcttccggctcctctcggacgctcctcgccgtctccactatcgagcttccggctgaaaacgctgtgggcctcgttccctctggtacacggtggcggccgtgacacaaacgcggttgtcacggtctcgcaagactctcgccccactcggtacaattacaatggctcacgcaagagccgaggggttgtgaggtttatctaaactcactcaacaatctagggttcacctagagcaagcgctaaagcggtctaactaacctaagcacttcgcaaagcacctacgctaatcaccgagtgattctattaagcacttgggtgtttgagcacttggaaatatgcactatgtgtattggtatgttgcttgggctctcacgcttgagaatggccggttggggtggtatttatagcctccacacccccaactagtcgttggacagaaagcagcagctttctgtcgtcgggtgcaccggacagtccagtgcaccaccggacatctactgtgcagtgtccggtggtgcaccggactgtccggtcaccgacgacagaaagctgctgctttctgtccaacgactagtttggggtgtggaggctataaataccaccccaaccggccattctcaagtgtgagagcccaagcaacataccaagacacatagtcgcatatttccaagagctcaaacacccaagtgcttaatagaatcactcggtgattagcgtaggtgctttgcgaagtgcttaggttagttagaccgctttagcgcttgctctaggtgaaccctagttagttgagtgagtttagaaaaaccacacaaccccttggctcttgcgtgagccgttgtaattgtaccgagtggggcgagagtcttgcgagaccgtgacaaccgcgtttgtgtcacagccgcctccgtgtaccgaagggaacgaggcctgtggcattttcggctgaaatctcgaaagtggagacggtggggagtgtccgagaggagctggaagcggaccatcacttgcgcgtggagactcgcggctctctacagagttactcgaccgtggtgctttgccctcgtgtgggcttccctttgcataggggcaccaacaaggattagtcgggaccttgcttggtttgggatacctcggtaaaaataccggcgtcatccacgagagtttgtatctctaccttgctctttagcttctgcatttatattaagtatttaggtttcaatcttgtcgggaccataattagggtaccctcaaggctcctaattctcagctggtaacccccatcagcacaaagctgcaaaggcctgatgggtgcgactaagtcagggatcggtccattcgagggactcgatcacgcctcgtccgagctcagcctcggacaagggcagccgaccccggagatctccgtctcgcccgaggccccccctccagcgacgaacatacttccggctcgccgaggcccagtcttcgccaagaagcaaccctggccagatcgccacgccaaccgaccaaatcgcaggggcatttaatgcaaaggtggcctgacacctttatcctgacgcgcgcccttcagacgacagagacgaagtgaccgcagtcacttcgccgctccactgaccggtctgacaagaggacaacgccgcctgcgccgcaccgactgctgtgccactcgatagagtgaggctgacagcagccaggcccggcctcaggcgccataggaaactccgcttcgcccgaccctagggctcggactcgggctcagccccagaagacgacgaactccgcttcgcccgaccccagggctcggactctgccctggcctcagccaacggtctccgcctcgcccgacccaggggctcggactcgacctcggccacggaagacggactcgacctcggctttggaggagcttccacatcgcccaacctagggcgcagacctgccacgtcaacaggaggtgccatcatcaccctaccccaagctgactcgggccacggggaacaagaccggcgtcccatctggctcgctccgcccgatagacaatgatggcgccccgcatactctgtgacgacggcgactctcagccctcttacggaagcaagaggacgtcagcaaggactgaacagctccgacagctgtccctccgccaagcgctactccgacggccacgacaacacaccagctgggtgccaaaacttctccgactgccacgacggcatgtacttagggctctagctcctctctgctagacatgttagcacactgctacaccccccattgtacacctggaccctctccttacgcctataaaaggaaggtccagggctctcatacgagaaaggttggccgcgcgggacaacgggccgacgcataaggctctcccacgcggacgcttgtaaccccctactgcaagcgcacccgacctgggcgcaggacaacacgaaggccacgggtttccccttttcgcctgcctccttttccccccttcgtgctccgtctcgcgccgacccatctaggcagggacacgcggcgacaatttactcattggtccagggaccccccggggtcgaaacaccgacagttggcgcgccaggtaggggcctgctgcgtgttgatgaacaacttcccgtcaagctccagatgggtagtctcagcaacctttccagcctgggacggtgctccgttttgggagtcttgagttcatgtccctcgacggcagctacgacatgatactccttcccccgccgcgcgacacgacgatggcggccgacaacccgcccgccggcgtgggaatcaacgacgtcttccccacgtggtggaagaacaacattcgagctcaccccttccccttcccctcccctgccgacggaggaggaggcggggcaaccgaggccaagcaggaggcagcacctcgtcggctgtcgagcgagtcgacggcatcggcgccccatcgggggcacatcgggcatcgacctcgcgtctgagacgaagacgagcgccgtctccccgcaacacgccaactccaagcaaacggacgacgccagcacgctcgcaaaagacttgctggcatcaccctcgtacctgagacgacggtgcagtctgcccctgacgtgacttcgtcaccgcccgtcgaccaagaggtaccgaccgactcccatctcgtgccttttggattcagcctcgacccaccaagcgacttcgcttcggtggacgctctcatagaggtgagtccaaaccctctggggtattgtatgcggtcaccctgggaccggctgacgaccgtctcgacctacgggccctcgggttccgaggaagatgacgagcccgacttttgttgggatttctccggacttggtaaccccagtgccatgcgggacttcatgaccgcatgcgactactgcctttccgattgttccgacggtagccgcaacctcggcgatcgaggactgcggcccaagtcgtgaatgtttccacgtcaatctagggggtccctctgaaggcaaccatcttggcatgccggaaaacggcgacccccctagtcctgcgcctcgcgttgacatccttcgggagctagctgtggtcccaggtcctacggggggtcaggacgcacagctcgagcaaatccgcgagatgcaggccaggctcgacgagggagcaggaacacttgagcagttctggcagaacatcgggcaggaatgggcggaccaagctccggccggagaagcgcgtcatctaccccagggcatccagcaccgcattgccgacggcgtcaggcaaggccgccaccggtttccagtgggtcaggccagaacctggctgcagcggcaatacttctccgcacgacgccggaaccatcaaccaccgatggggcggcgtatccagggagagctcaagaatctcctggaggatgccgcggtccgacgggccgaaagctctacctcccgaaggcagggtacccctcggaacatcgcgccgcgacttcccgattcatgcgggaagcctcggtccacaccggcggcacgcgcaacacatgccctgcggcctcgggtcgcctcggcaacgagcaccatcaccgcaaccgtcgagcccacctcgacgagaaggtgcgccgaggctaccaccctaggcgtgggggacgctacgacagcggggaggatcggagcccctcgcccgaaccacccggtccgcagactttcagccgggctatacgacgggcgccgttcccgacccggttccgaaccccgactactatcacaaa

SEQ ID NO: 188481 - DNA, 344 bp, Arabidopsis thaliana landsberg
ctcatcacaatattcttaaccaagctggatctgatgttgtaaaggctaaatcgaagaatgatgatgaagaattatgtaagattttctatttatgaaatttttagattcttcaagagttatttatcatttgttgaggttgttgatatattgtgtcttgtttcagctgctcatagacatcaaatgttggaagaaatcgaacgaatttgaaggttgtctcatagattatatttatctagcaaacgctattattttcacgtacttcacttataaaaaaaggtttgttaatctgacttcttttgcttctcctacttgttgcagctgcttcaaatagtcttaaacactaa

SEQ ID NO: 188482 - DNA, 367 bp, Arabidopsis thaliana landsberg
atgtcttccaccaaacgacaatatctcacatccagtgacctgaaactgttagacggagttctcgccgccgcaggcatgcacgatcagcacgcagatccggccaagcggctgatccgaagaaaagctgcaagatatcttatctcgcgttttcaggagggcgcacggtcgccggaagcgcttgcaaatgagcttgacgaacgcccacgcgctctgccgatggaacggcacatcctgtcgggcggtgcattcgtcagctaccagtatggcaagcgcgtagagcccgatcggagctggaccattattcatgttatcacaggccgggcggcccgtgccgggtcatggatcatgaaaggcttgaccaaagacg

SEQ ID NO: 188483 - DNA, 328 bp, Arabidopsis thaliana landsberg
gtgtagcgatacacacagaaaaacagttcgaggtgcctctcccatgaccgacaacactttagaaattggcggcatttgcccgcccaagttcgccgccgtaaaggatgttttcgccgccaattttgccgagggcaaggaacgcggcgcgcggttctcggtcgtgatcgatggcgagacggtgctggatatctggggcggcaatgccgatcgcgaaggggcggtgcctttcagcgacaccacccccaccccggtcttctcgaccggcaaggccgtgatgaagataatgatcgcgcggctggtcgagaagggcaagctcgattacgaggcg

SEQ ID NO: 188484 - DNA, 753 bp, Arabidopsis thaliana landsberg
tacagaaactccaaagaggaaacgacgaaggaacgttacagtgagattctcagcgaaacattatctatcatctcaagaagcgaacagctatacacttgccaagagatggataatgtcataacagagcttcaaaagctattcaattcagaaactaatcatcatcataatcatcttcgtaagtccaagccaaaccttgctctcttcttgtcaggactcagcaaatacgagatgtctgaaaccaaaaagtgtccaaagagcattgcggtttgggaactctaccatatgcttctcaggaaacgccactgggctttggtacaccacgcggttactgcgtttggatacttctgtgcacgtacaagctgtaatcagctatggagattcgtacctgaagacgcggctctagccttcgatatagcttctggaaaagaagcgaaaacagagcggttcatgtcggaattaaagatgtttttggagaaagaacaagcgcttctttcaatcacaccttcagaagaagaactggagttactttcgaaagaaggcaccgaggttaaggcaacagtgcagaagcttctagaaggaagaagccagaggtcaatggaagtagagaaacgaccgaacaagaaaaggaaacttccagaaggaatttgcagaggaatggagttattgcagaatggagtgaagaggattaacgagggtttaaacgaattgaggtcagatgaaaatgagagtgaagagtttcaaaagagtttatga

SEQ ID NO: 188485 - DNA, 606 bp, Arabidopsis thaliana landsberg
atgaggaactcttttcctccttcagacggtggaagatcggcgactgatcttcgtcagcagtcgtctcactcatcctccacgaaccgttataactctcgctctgcacaatcttctccgccgctcaaccaccgtcctacttggaaccagcaacactctcagtaccctaactcaaatttcccgccaaattacaggcgtgatcgtaatccgtcgtcgggatactcgcctccagttacgcgggctagacctaatttcatcgttcagctgcttcaccccgccgccgctaacagtgacacaaagctgtgtttttcgactaagaaacaagagatcgagagtatcgctttgctttgcgaaattccggaggaatcagttcacgtgcctcaatttggttgtatcgctgcaagtttcagttttcgtcagtgggtcgatgcgcgttctgccgttgtggctctttgggattatcgtcttcaagggagacatgattttgttcctgagctgattcctaatgttgttgttccgtctgacatggacgagcttaaagacaggcttcgtgatcttttctcgtctcatgttctttcgcttatggaaaatggacaaggggtcaagaag

SEQ ID NO: 188486 - DNA, 128 bp, Arabidopsis thaliana landsberg
atgtttgttcaggtaccacgaatcatgccgagattgttcgtgttcaatatgatccaaaagagtgtagttaccagtcgctgcttgatttgttctggtctaagcatgatcccaccactttgaatcggcag

SEQ ID NO: 188487 - DNA, 160 bp, Arabidopsis thaliana landsberg
cggcatcaaaggcggcgagaatatcggaatcgagacaaccggaatctttccaacagactttgtaggcggcgatacgagcttttggagcaacacctttggctacaccggaggcgtaaccggacatactcgctttaaaagcgtgacggccagcggcggttga

SEQ ID NO: 188488 - DNA, 463 bp, Arabidopsis thaliana landsberg
atgatttttcgtcatgtatcatcacatcagccaaaaactgtcatgtcaccatctaagtcagagcccctgatccaccttaagggtatttttgtccacggaattccacgtatagtaaaatgtggcagattttgtaaggcaactggaaatatggcagggattgtaaatttttgagtgaaatatggcagattttgcaagattctctatttaatattttaaaacataataatctattataattaaaatatttatataatattacttttaaagttgtattaaacacataaaaaccagattttaggttcaaatttatgatttttcatataaattatgaataaaaattgaatattttaaatttaagattttaaaaaatgaaaaaaaaaatgaaaaacaaaaatgggctatacgccttctaggtgaatctaggcggaaaaaatcggatcaaagattaatctttccgatctag

SEQ ID NO: 188489 - DNA, 176 bp, Arabidopsis thaliana landsberg
atccttgattaatgcacatggagctcgaatctgggatctgaagttgcaaagtggagagcgtcctctgtccggaacattcgggatatcctcatcaatcatcccaaccctggaaaagtctggcatggactccgagcatcgaaggttaaaagccataatgcacaaaaggaaaaacgaag

SEQ ID NO: 188490 - DNA, 68 bp, Arabidopsis thaliana landsberg
atattttccgaaaacaaacaaacaagaatacagtaaaattacgaattcaaaccaatagtgtgatctag

SEQ ID NO: 188491 - DNA, 626 bp, Arabidopsis thaliana landsberg
atgacgcttagtaagtctgataagatccttgaatattttgaggaagaaactcaaaaatctttgatatctcttctttaagtttcttcttccattgaccttcttcctcgttgtttcatcttgttaagactttattcagtacggaaataagctcttgaactaaaaaaatggataataaattattgactttatggacttttaagccaacctataatttattgacttctatttgataattatatacatgtgttagattatcgttttaagttgttatattgtaaaatttacatttactttacttggcaaccgaattatggtgtattttcttcaatatctgattatgtgcatcgaaataactttgaacttctttattaaatttcacaagtctatatagtaaataattagtaattaaattcaatgatggaagaaatagtaaataatttgaatattgattgtataaagtatttagagttcttttgattaatatcaatatatcaatattcatatatgttaatctcacaaattaatcaagattttgtcaatctcacaacttcgaatgtattgaatattctacaattttacactcatactataatcaatatgtactctctttgttcctagttatttga

SEQ ID NO: 188492 - DNA, 72 bp, Arabidopsis thaliana landsberg
aaacaatcaaaattacgacgaagaagaagaagaagaggagaaggaaatgaacgaagacaacacaaaattctg

SEQ ID NO: 188493 - DNA, 127 bp, Arabidopsis thaliana landsberg
atggactttggaaacagtatcaagccacgcatgtcttgactaccacccggcagccggtgcatcaccgtcttctctaacggctgcagattccaaaggaataccaccaaaagatcatcatctgtatttg

SEQ ID NO: 188494 - DNA, 159 bp, Arabidopsis thaliana landsberg
caacaagattaaactcgctacgacaaaaaaacacactaaaccaagtctattacaaaagcaataagattaataagggtctaaaggaaaggaatttgaagattaccatcgaaggaagagctgagaaagcgaaaaacttggcagtatcaaaccagcaagcaa

SEQ ID NO: 188495 - DNA, 544 bp, Arabidopsis thaliana landsberg
cgagctcctactcaccaacagaccatacatgcacggagcgactcgggtgaggccagaatggctggtgaagcacgcaaagtctctctgcgtgttctctgcaccgctcaaggacccgaaaccatattactcaagtgaggaggatagagttttgtgctgggtcgttccgagtttcggtcctcataattgggaacttccggctcacagtgtggcaataacagaggatagagaccgagcagcggctttcggatgcgctttgcttcaaggagaggtattaacttgtttgaaaagcttcagggctttgttggctgggaaacctgaaacgttgttggaaagagaagcttggggtttagaaagagttgggagtttggtgatggttttgacagagaagaagattgatactttggagagtttgagaaagaattgggaacagaatccgaatgtgctttattcagagattgaagtttggtttcagaaaaagtttcgtcatcgtgtcaaagacctttggcagacaatgctaaaggaagctcacgttcgaagaagttag

SEQ ID NO: 188496 - DNA, 259 bp, Arabidopsis thaliana landsberg
atggctcatatacggaaccctatcctcgtcagaaataatggcgctaccgcagggataaaaatccggaaaatcgggtgaaggatgcaattgccactcgatagattcgtccaaccatttttcagactgcccgcaatccttgatcgtggtaaccccatagggaaggtaggttgcagctatacgttttttataaacgggcaccgagtcggggaccaggtattcgggggctttttcgtcatcacccagtacattgcccaaatgg

SEQ ID NO: 188497 - DNA, 398 bp, Arabidopsis thaliana landsberg
atgcatgcagccaccatgtacagaacttgcccatccctccccgattttgcaatggctacacgcccacttcagccttaccttcgctccagacatagcaacgcgggagcgtccctccctgaagcgcaaaaaaccgcgtccacaaaagcacatgcgaagataaatctggcgctcagcggagttgcaggtcttctccctttccgttatcggcgaacaccacattcattccgtagggcagagacttcaaagcggctctgctcatagaccttccatcaagaacaacctgcttcgtcttcggattccatccatagatttcggcgctgatctccttccaccaagccggatacgacccttgatgagcggagatgtgcagatgaaatccatcgggatcgacattacag

SEQ ID NO: 188498 - DNA, 404 bp, Arabidopsis thaliana landsberg
aaaactcttttggatcgccttcacgaagcagagacgcaacttgctttgcaaaaaacccgaaagcgtgatgaactcaaggtacagacttgaaataaaatatggagtaaatgtttgcagaaaatgaataacgatcagatctttatattacagttattgtgccttgtatcgtttactctattccatttgtccaaattgtattgctcacttaacaagtgatgccgttttctttgtgaatgatacagaaggtaggaaaagagaaaaatgctctaaccgagaagctaaaggtaacagaggcagctcggaaaagatttgaagaagagttgaaacggtatgccactgagaatgtaactcgcgaggaattacgcaagtcacttgaggatcaaaacaggaaattgacacagaca

SEQ ID NO: 188499 - DNA, 643 bp, Arabidopsis thaliana landsberg
atgaagaggtttatcaactcaaccgtgacgttttccgtcaccgtcaccatcgccgttatcatcttcctcctcttgtctcccgtcacctccttaggttcaggctcaacttacgcagtcgtatacggctccgacaccgtctgcgcattgatctccggtcaacccacacaacgtatcctctgttacgacacgcgtcttaatatcaacgtcactctaaaccccggcgtctcattctcctcaatagccgccggagataatttcctctgcggtatacgctccggtggttacagccttctctgttgggataacatcggaagctactctccaaaccggaaacgaatctaccaaaacgacaacgttttactcgagactctctccgtcggggataaacaaatctgcgcaaccgttaacggtacaaattccttaaaatgctggagaggttccgattccgatcaatcaaaacctccgaacgagagattccgatcaatttcatccggcgttggtttctcctgcggcgtttcgattcgaaataaccgaatcctttgctggggaaccgatccggttaaatcgaatcagatccaaaccggattcggaaacacgccgatggtgaccatcttcgcaggtaaatcacacgcttgtggattaa

SEQ ID NO: 188500 - DNA, 657 bp, Arabidopsis thaliana landsberg
atggatcaagcaaagggaaaagtctgtgttactggtgcttcaggcttcttggcttcttggcttgtaaagaggcttctacttgaaggatatgaagttatcggaacagtcagagatccaggtctttctatccttcttgtttcctttgtcttggtccgatttggtgcctgtcagtactcagttagttttcatgttttgacaggaaatgagaagaaacttgcgcacctatggaagttggaaggggcaaaggagagactacggttggtgaaggctgatttaatggaagaaggaagttttgataacgccataatgggatgccaaggagtgttccatactgcttctccggtgcttaaacctacctctaatccagaggcatgccacgacaaacttttttttctggtcacactatgctttgtgtatctgttactagattatctattctctgactttttcttccttataatttgataggaggagattctgagaccagctatagaaggaaccctgaatgtactgcgatcatgcaggaagaatccttccctgaagcgcgtggttctcacctcatcctcttcaacagtcaggatcagagatgattttgatcccaaaatccctcttgacgaatcaatttggacgtctgtggaactctgcaagcgcttccag

SEQ ID NO: 188501 - DNA, 1079 bp, Arabidopsis thaliana landsberg
atgacactaaaaaggcgaaagaattcagagtttgtgacatctcagagagttcgtcctgtaagacttaacgcacttcagagcttgaggaagagatgttggcaaagatgccttagttaaaagagcgaccttagaataagaaggtactgcgtggctttcccacaacgtctctctcttctgtaacttcagaaacaacagagctgcacagaaatgagaaaactgaaaactaagcatgcgcttcctctctgtttcacaaagattttggcagctccagctatgcccacaccacaaagaagtacaccacattctccagaatttcaagtcaaccacactgatcagaccacgagattcaaacgctcttatccaaaatattttctgagtgagacgttttaaacgtggctttattcttactgttgcaggagttccatctagaaacgatggcccgggctagccgctagcccgtacggagagagacatcttcagtagtgtcgacggaaatgtctcaggctatagagcttttgtttgtttcctattgtcttcagagcacagccagtgattaaagagtaagtgactgttcatctgctgtttcttcgtcaacatatacagtttcctttacatattcaaagactcaaataatttctgtgaattctcacctgactggctgactcagagatcaaatttctgttctggataaactaaaggcctcttacagaatttttcaagagtttaatctgcatgtggaccatcggcctatcgaaagggcagactttgaccataaagtaagcttatctaactcgatcagcagattaaaagaaaccttttgatttctcaactaacttgttctatcatctttggttccagatcaaagagaaagagatgatgtacaagagacatctcgaagaggcggaagccgcaaaaatggtataatactataaattttctgccaagtatagatgtatctaataaaagagtatgatagtaaatgtattttacctaaaactttgtcaggtagaggaagagagagctctaaaacaactgagaaggacaatcgttcctcaaaccagaccagtgtcaaaccttaa

SEQ ID NO: 188502 - DNA, 1039 bp, Arabidopsis thaliana landsberg
caattttggacctgtgctaagcgtaaggattccaaatcagaaggaacgggtgtatgggtttgtctctttcgctaatgctgaaaccgtgacaaccatattggatcaagaaaatcctcatctcatcggtgaatcacctgtgaacgttagaccataccagaagaaagaaacaatccctccaaagtaatgctagatccctcttttgactttttctcagtttttttttgccttgcgtctcttgggtctggtttctaattagagtttggttaaacaatagcaggtggcagcggcagcaactacagcaggtgttggttggagagaacctttttctgttgggaatggacccaaaggagcgatgtcgcgttggttagtttcaatttattaaaagagacttgagaaaaccgagtggttgtttctttcttactgacatagtaactccctcattctcttttcgttaccaggaccaaggaggtttcgaaacgagacacatgagatgctgcaaagaaacaccgagcaagctgatccacaacaagccatagaagtagaagaccaaataagaaggttatcgaatctgcaattgcctggcatggagaataaatctattcaccatcatcagcctagtccttctattggttctcacgctcatttcccatctcaagtcagggaaggttgttattgtgctctctacattcaagctttgtttttcttggtgtttattcattcttttcttctcttgttttcctttggtcaggcggtagtggtacaggtgagaaagatcttgaacaagtagaaaccaacaacgaagaacatcaagggtaaaatgagtgataagaatcaaagctttttaaattcttcttgttactgaaataggccactttagttctaacaaatagtttatttatcatttcactaggcaagagaagagtctggagaatactcttcctgatagttcgtttggttccacaaaagaatctggcgaaacccgtcaaaccgagtctgatatagaggagaaaaagaaagcctcactagatcaatcagccta

SEQ ID NO: 188503 - DNA, 335 bp, Arabidopsis thaliana landsberg
caacagaagccagccaagacggccattctgcagcagggagttccgttttattgctgatcacacgtgctggctgctgctgtgccggctgtgcaaccggtatagcggtgactcttcttgttggatttctggtcggagctcccacaacaaccaccggtttggtgatgtttcgatcagatgaagtggaaggacggcgtgccacaggataaccattagccacaatggtgatagaagctgaagaagtcgtacgtgtgaaagatccttccttcttggatgaagacgaagacgatcgggggatgatgagggagaagttgaaggatggatttgctggaatctaa

SEQ ID NO: 188504 - DNA, 99 bp, Arabidopsis thaliana landsberg
gagatcggatttacttttgccgttgaggaggaagctcactttgggagcagattatcggcttggaagctacggcgatctcggaagctaactcgccggtga

SEQ ID NO: 188505 - DNA, 65 bp, Arabidopsis thaliana landsberg
cgattgactttgatgacatctccgacaattgctccggtgataaacgcgaaggagaagaaacataa

SEQ ID NO: 188506 - DNA, 197 bp, Arabidopsis thaliana landsberg
tgaaattgggcgcgccgcctttgagctgggcaagcgtgaagtcgccctccggcgtcatgccgatacggcccgaaactatggcattgccgcccagaaaatcgcggacggaggcattttcaagcctggcggtgcggacgccgaaccgccccgacaggccgaagccgccccgggggccgggcaccagttcgatatcggtg

SEQ ID NO: 188507 - DNA, 156 bp, Arabidopsis thaliana landsberg
gttttccacttcttaaatccctttttatcaaatggatgtctttatatcggaagagtatatcaaccgccggagattggagaaaaaagctgccaccgttgccggaaaaagcatgaggtttggctcagcttcaagcaagacaccagagaagagaaatag

SEQ ID NO: 188508 - DNA, 336 bp, Arabidopsis thaliana landsberg
gaggtcgatgccagtgcacagaaggcttacgcccaggtgttggccaaggccgctgcggaaggaaagctgaaccgcaatccccaggaggttgaacgggtgagggcggtggctcgccgcctgatcgcgcagaccggtgcttttcgggcggacgcgcctggctggaagtgggaggtcaatgtgctgacatcgccagagctgaatgcctggtgcatggctggcggaaagatcgctgtgtacacggccctgctcgaaaagctcaagctgacagatgacgagctggcggctgtgatagaacacgaaattgcccacgcgctgcgcgagcacacgcgtgaaagg

SEQ ID NO: 188509 - DNA, 569 bp, Arabidopsis thaliana landsberg
atgtctccagaatatgcaatggacgggatattctcgatgaagtcggatgttttcagctttggggtcttgcttctagagattatatttggggttaaaaacagagacttttatagatactcggagaacgacgaaagtcttattacatatgtaagtgtaataatcatccaaagcattttcgtctttttttaatattttttactgtgattgatataaacgcttaaagctttgtttatgatgaatagatatggaggaattggaaggaaggtaaagggctcgaaatcatagatcaaattatccttgattcatcaacatttcaacaacaccaagttaaaagatacatacagattggtctcttgtgtgttcaagaatgtgctgaggataggcccacgatgctatcaatctctgtcatgttcgcaagcgacacaatagagatcgctccgcctggaccgcctggttatttagtccgtaaaagtcaacttgagactggttcctcctcgtcacgaaagaagcgaaacgaagaatcttggactgtggcagaagtaacctattcggccattggacctcggtag

SEQ ID NO: 188510 - DNA, 190 bp, Arabidopsis thaliana landsberg
gacatagcgatccacctcttggagggcgatgcgcataactggtggcttgcggttgataaacgcaagggtgagcgtgtcgagaccttcaaggactttgaggacgagttcaacaggatgtactttccgtccgaggcatgggaccgacttgagagtaacttcctggatcttgtccagggtcgtcgtaccgtcc

SEQ ID NO: 188511 - DNA, 234 bp, Arabidopsis thaliana landsberg
agacttcgagcaggcctaggcacagagggggtgagaaccatcctcatggttccgaggaatttgctaaaaatgaagactatggtaatcaaatggtatgaatgatttctcataagattcgtaatgattctagtaatcaaatttacttacaaactgcatagaaattctttttttaactatgtctattttcttcttttgcagaacgtaaattccccaagaaaacaccgagtttattga

SEQ ID NO: 188512 - DNA, 934 bp, Arabidopsis thaliana landsberg
  unsure (1)..(934): unsure at all n locations
atgtctaagcttatgcagaatccggtgttacatgaattgaagaagcaagcttctttcttcatcaaggaaaagatcaagactgctcgtcttgctgtaaccgatgttactgcagaagaactgtgagtaaactttactaaagttataaacctatttcctgctaaacctaaatctctcatattttagaaacctttacaagtattatcaagtgtttttgcaatcaaaacttgtttttgtggtatttttagcatatctctctctcttgtactaattgagttgaaatataaactgtctaatgtgaagattgacagaagaagttacgggcagcgatcactcatccatagactcacgctccatggcggccataacaagagtttcttttgaggttgatcaattccaaagaatcgtgaagattctacgtcaaaggttattttgcctcactgttatataagcaaaacaacttacaaataaatatcacagattcacagaannnnnnnnnnnnnnnnnnnnnnnatactacaccaaaaataaaaatcaccatattttttttgacggcaataaaattaccatattaagcatcaaaaatcccgaaaattttatagtaattcatcataatagtcaagaatcagattactgtttagtgtctatataatgtattgattggtaatttttttttgtagaatggtagtgttagatagaaaggaatggcgcggtatgtgcaactacgtcgtaatgttgaaccacttgttgctcaatggcccactaagtgtattcagtgagtttcaacatgagagagctattattgaagatgctataaagatggagtggattgatgagagagggttcgattgtggtctaaaggttcgaaacatagccgagaaagtactaagattgcttgaagacgacatgtttcttaaagatgagcgagaaagaaacc

SEQ ID NO: 188513 - DNA, 374 bp, Arabidopsis thaliana landsberg
atggccgcatcgctcggtccacatgcgcaggcggtatcctcgtcggcgcgggtgtgccggccaaatcacggcgatctagttcaatccaatggcacggtgagcttcacgaggtgatgtagaggctatctatgcattgaatcgaaaaatggcgcagtggcttaccgggtctatgctcgccggcggtcggaggatgtccggcgaccgtggactagcctctccggcgaagcagacttcgattcctcgctcggggagcttcaccaaggtgtgctcagtcctctccgagggtcagacggggctggaaagggcttggttggccggtctacggtggcaggggctcgggtggccgcggacacgccgtgcgcgggcaaacgccg

SEQ ID NO: 188514 - DNA, 1935 bp, Arabidopsis thaliana landsberg
atgcaagctcagatgttccctgggcaaaaatatgctgagttgtctttctacttggggcttcgagtatatgaacctggattttggggtatagaatcaggtcccccaggaaaagtgctggttgttgcagcctgtactctgcagtacaatgtatttcgttggctagaaagaacatctggtttaactgttatcaaaggaaaatatgaagagccgtgtccactttttgtctctgcagaagacactactgcaagtgtttccagttctaatggtgaaaatccatcttcgactgatcatgcttctatatcaatgaaacaaggcgaggcaacgagtaactcatggcctttcttctctccccgtggtaaccagggagctggttttttgcaccccaagactggaggctctgaaagtggcagtagtaggaaattttcatttggtcacttctggggaagtatcaaagagagtcacaggtggaacaggaggagaattcttgcattgaagaaggagaggttcgaaacacagaagaatctgttgaaaatttacttgaagttttggatagagaatatgtttaatctctatggccttgagataaacatgattgcgctgcttcttgcgagttttgctttgctgaatgccatctccatggtatatattgcactgcttgctgcatgtgtcctcttgagaagacgtgtaattcagaaactatggcctgttgttgtttttctgtttgcatcaattctcgcaattgagtatgttgccacatggaatagttttttgccttcagatcaggctccaagtgaaactagtgtgcattgccatgactgctggagtatcgcagctctctactttaaattttgccgggagtgttggcttggtatgaccgttcaaactttttgaagcacttttctttgtgcaataattctttattttacagatccaagaattaggtactatttggagaagctttttctatttatttttgcaggagtgagagtggacgacccccggactcttattagctattttgtggtattcatgcttgcctgtttcaaacttcgggctgatcacatatccagtttctctgagtcatcgacatatcatcagatgaagtctcaaagaaagaattcatttgtctggagagatctctccttcgagacaaaaagcatgtggactgtgcttgattacctgaggctatattgttatgtccatctgctggatgttgtgcttattctgattctaatcacaggaactcttgagtatgacattctacacctgggttatcttgcattcgctcttgtttttgcccgaatgagacttgaaatactgaagaagaaaaacaaaatattcaggttcttgcgggtgtacaattttgttctcatcatcttttctctcgcatatcagtctccatttgttggaaacttcaatgatggaaaatgtgaaacggttgattatatatacgaggtgattggattttacaagtatgactatgggtttcgaatcactgcaagatctgctctcgttgagatcatcatatttatgctagtatctcttcagtcctacatgttttcctcccaggagtttgattatgtgtcgcggtatcttgaagcagagcaaatcggtgctattgtgcgggagcaagagaagaaagcagcacggaagaccgagcaactgcaacaaattcgtgaggctgaggaaaaaaaaaggcagcgaaatttgcaggtggaaaagatgaaatctgaaatgctgaacctacgtgtacagcttcacagaatgaattctgattctaattttggagttgcttctccgcgcactgaaggtctaagaaggaggaagagcccgcctcttattacagatagtggtgcagccagtcctgagattgacggagtggtccacagcaaagaaaatcagccaattgacgtgtattcccagtatcctttttaa

SEQ ID NO: 188515 - DNA, 448 bp, Arabidopsis thaliana landsberg
tacaaacatacctcctcatactgctcagaatccccaaacagagccacacacaacactcgccaatgagagttgcaaatcaacggtgtcgatcgacaccacaactcttgtcgatcgacaccctcaagattcacagatagagggttttgcacaatctcttcagcccacacttcttgaggccttatgtgataagttctcttctatcttttctcccgctttaccttcgattaattctttagattctttgaagtctgcttcacatgttaacaagcctagagttcctcgaaagcttgtttctcgtgttgttcttgcaggtgatgagaagagtgtcgatcgacacaacagtgagtgtcgatcgacacctgcagctgccccatccagatcagtttacacaccgccttggaaggataagaggcagcagcaatcctccaccactccacccacatcctga

SEQ ID NO: 188516 - DNA, 650 bp, Arabidopsis thaliana landsberg
atgacacccaagtcacccccactaacaaaccacctaattaattctgggatcatgcagaatctgagacccttcgatggcaaggtacgtacgccaaatatctgattctcgattttttcacgagtgatctgttgatagaagaattgtacagtgttaccgtggagggagatcgattggaaatcgccaatctcgcggtttctcttcatcatcatcacctaccaaaaatggtaccagatctacaaatctcggtcactaatcatgtctttgtaattaggatttgtggtttcttcttttgattgcagagccatcgatatggatcaaggaagtacatagcatggaattttggcatctgtatgtagagaaaaagatatccatatatattccagctaggacaaaaggctcgatacatgagggaggcactaggtaagaacaaaatcaatagttaagcacttgaacaaaagcattgattgctattctttctcatcttcttcgctgcattctctttgtgtgactcagatcttggagccgagttggcagatcttgcagccgcaacaggggaaaaagtggcaatttcagtcgatcttaatcttttcaaacctagtaaagctctagcggtgtattatgatgatctagctgatctagttgttgtgtag

SEQ ID NO: 188517 - DNA, 420 bp, Arabidopsis thaliana landsberg
atgggccccagcagccctgggatggccacgtcgatcatgttgtcgagcgggaccgtgctcgtgtgcagcccggcctggagctgcgggaagaggtcgaccagggtcgcggccagggtgaagccgagcgccgaggcggcgccgaaggtgaagccgtcgagcgcctcgtcgaagctgtgcagccggaccacgagcagcaccagcgccgggatcagcatcagcgcctggctgaggagcggcaccagcgcaccgcccacgatcaggccgccggcgtggaggccggtggtcgcggtgagaaggacctggctggtgacgatgcttccgaagaagtgggcccagaggccgccgagaatggccccgccgagcatgagtcagacccccccccacctccggatcgtcctcgtagaccacaacaaaatagag

SEQ ID NO: 188518 - DNA, 1292 bp, Arabidopsis thaliana landsberg
atgggttttgtcgacgttgttctcaactataacgtcaagagaaccacttgttcaatccaactccaaaacctaggctccacttctaacctcaaagacgttttcaacctcgctttcttcactttcgtgttcctcatctgcatctacgaggcgccaacgagcctgagaacaacttgtctcaaaacggtgaaagatcagctggtaacttgtaggtcaaggcagggctctaagttgctcatggtgcaactaggctctaaccttgaagaacaatggatgagatcgctgaaccttgcaataaccaactggatcatcgagatcaaagcgtttcagcatctcaagtctccttctcctttgttttcatatgctttctcgactcaaggtctatggaaagttcatatgtattgtcctgtggtagcaatggaaatggagagcgtaaatagttctctaaacgacgagagattgttcttctcgctaaactatcatcaacttgaaggtgtaatccaattgaaccacaggatttacgttcgtgaaaagtggtttaacgtcgcagtaaatattgacaacgtcaggtatcgtaaaattgtgtgtaatcaagcatacataagtaatttgttcatattaatttctcttaactatagatattgtttataactaggtgcgacataataaggcttgtgaacgagaaactattatcggaacgtggcatgggaacagaggaaaaacatttcccctcaagaatatcattgcaactaacaccaacgaatcaatcaaacatcttaatggtatccgtacaaaaatcttcagaaaacccattgacagaattcgaagtagagaaaggcatagaagcaacaatagatccaccaaacacattctttggactaaaagtctcagccaacgagaccacaacaaaaagcatgaagccatggaagttcgaggaatgggttcatggttatagcgccaatctcacttggtttctccatgatcttgacgatggaagagaagtttcgtcctctaaaccatcgaaagtctcgatgatgaaccctcgagcttggttcaagaaccggtactcgagcgcgtttagaccgttcacgaagcaaggaggagttgtgtttgcaggagatagttatgggcaaagcgttttgtggaaagttgataaaacggctattgggaaagtaatggagtttgaggttaaaggttgcgtttggttgacttattggcctaacaagcatcatactttttatagtgatactagaaagttggaatttaaggagatgctttacctcaatcttccttag

SEQ ID NO: 188519 - DNA, 193 bp, Arabidopsis thaliana landsberg
cgtaagtgcctttgtgtctgcatcggttgctaccacaaggttagctgatctggcagctaccatcgagcaaattcctgtgcagccacaacccaattccaacacccgttttccagaaacaatgtttgggttcctgtcaagaacagaagccataagccgagcagactcccagagcatcaaccccgtagatttgcaa

SEQ ID NO: 188520 - DNA, 196 bp, Arabidopsis thaliana landsberg
atgggcccgtcgggtcagccgctctgcgtgtgcagtttcgtggtgaagattttcggctcgaatgtcgatttgtcgcaggtcaagagctcatcgaaaggtcgtgtcgcagcggtttccggggaaggctggggtgttttggtgtttatccggcagcttagaatgagccacggacgttggagcggcggtgctttcggag

SEQ ID NO: 188521 - DNA, 394 bp, Arabidopsis thaliana landsberg
atggccaccaaacttggtgtcactcagggaacgatcgctcatgcgttggagaagacaaagtatgaagattcagatgcaaagtggaaggaattagatccgaaataccatttctcatgtcagttcacagctgatttaatcgcaatgaatgttactgacttcatcattaccagcacatatcaagaaatcgcaggaaggttcgtcttgttcgtttttttgcatcaacatatacactgaaatttcaaactcataaaaccaaaatctgtgctctgtttatgttgcagcaaggacaggccaggacagtacgagagtcacactgccttcacaatgcctggtttatgtagagttgtctctggcattgatgtctttgatccaaagtttaacattgctgctcctc

SEQ ID NO: 188522 - DNA, 125 bp, Arabidopsis thaliana landsberg
aaagtgaccagtatagtaaagaaaagaaagatcttcgtttacaaggagatgtaaacatcttatttgtccggtccggtgctcattacacgttgattcatgattcaatgaagaaatttcttcaatga

SEQ ID NO: 188523 - DNA, 281 bp, Arabidopsis thaliana landsberg
gttcatctatgcaagcgacataatgcggtttctgccagatgacgaagctttgaagactttaagtctctttgaaggagcatctgagacgaacaggatcagcaagtcatctcttaaaaactgggtggtaagaaatttggaatgaatttacactctttaatgaattcagatattgatgaaaatgtgcaacaaccttttcacaggtgaatgcttttagagagagaagagctcttgcattgaccctaaacgacaccaaaacagcagtaaacaggcttcacaagatg

SEQ ID NO: 188524 - DNA, 366 bp, Arabidopsis thaliana landsberg
atggagattttgatctttcctccaatcttccatcttcgacagagtgagtaatctaatttacagttcttagtctgcatataattggtctcttgaaacacctcttttggagtttaacattggttctgttttattagacaagtggaatctagaaacgatagtggaattgaaggcattttgaccagattggagaaagaaaggaatttgagtctagggattagcttgagggagaatgggaaaagcaatggtgccatgcaagatatctccccaaatggttcagttccttggtcttccaggaatgtggcacgttttctcatctgcaaactttgctgtccagtatgcaaaatatcctgatgaatacgtcctgag

SEQ ID NO: 188525 - DNA, 55 bp, Arabidopsis thaliana landsberg
atgactattgggcaaaacaaacatccaagcactcgagctcatccatcacactccc

SEQ ID NO: 188526 - DNA, 154 bp, Arabidopsis thaliana landsberg
ctgctccttcaagcgaggaagaaagatggctagcacaatatggtcaagtcatcgaatcccctgggaagaccctgcctgagatcccgtctgttgatttgtgggattggaaacttgtatgtgaaaccagagaagctgacaatgaacaggtggctag

SEQ ID NO: 188527 - DNA, 354 bp, Arabidopsis thaliana landsberg
atgactcccgctcagtttgagaagtaccggcaagacaaggaaaaggactcgaacgagatcgctcaccaagcgactgcccatgccgatgatgacgaagatgagatcaactacgacgacgacgaagatgaaatcgaaaagtcgaagcagcaagcgaagcaaaggagaaagcaggaggctcatatggctgtttaccgacaacagatgatgaaggtgacaggcgagcaacccgagatgcagccacctgaccgccccggattgggtgcttcgatgagcgcaccccaactgcacgtcatgaagaagaccccatctccaggacctcccactggcatttctgacgaagatgacgatgacgag

SEQ ID NO: 188528 - DNA, 792 bp, Arabidopsis thaliana landsberg
gggtttgcagaatatcgaccttttgggagctcaggccagctagaagggattgttgctctaatggcccgtcgtagcagactgcatccagggactcgttacctagctaggggcattaattcatgttctggcacaggtgacatgcccccctaaaatgctcctctctcttaatttctttgttgttctcttaaaaagtgtggctctggattgactagggcctaatttagaagtatatgtgtagtgcaggtaacgaagttgagtgtgagcagcttgtatggatacctaaaagaaatggtcaaagcattgctttcaactcgtacatttggcgacgtggcaccataccaatatggtggggtgcagaattaaagatgactgcggcagaagcagaaatttatgtggcagatagggatccttataaaggcagtacagagtattaccaaaggttaagcaagcgatatgatactaggaatctagatgcacctgttggagaaaaccagaagaaaaaggcttttgttcctattgtgtgcgttaatttactaagaagtggagaagggaaatcagaatgtatcttagtacaacattttgaagaatcgatgaactttatcaaatccagtggaaagcttccttatactcgtgttcacctgataaattatgattggcatgccagcgtgaaactaaaaggggaacagcaaactattgaaggattgtggatgtatctaaaatctcccactatggcaataggaatttctgaaggtgactatttgccttcacgtcaaagactgaaagattgcagag

SEQ ID NO: 188529 - DNA, 631 bp, Arabidopsis thaliana landsberg
atgtgtcgtggtagccaaaaacaatttagcttcttcctcttttgttttttatacaatcatcacatccttgaaaatcagattaaggctcgagactatagatttcaaggtaaactcttatatatatatatatatatatatatatattttatataaagtttaattaactatcaaccaatttcaatttgatcacttaagcaaaattcgtttgtgattaatttagtttttggtgttgttattctgtcaaaaattaaaaactcaattcgtcattattcatgagttttctttgtaacgttagtcgtcaatatactgttttcttcttaatttttgatgtagtttgttttagtttctaatttaatctcacagtaatttttactaatgacaaaaattaaagttgtcatgaatcatgataaggccacggagaaaacaatttttatgtttgatttaagtttcaactcatgatttttatattgtttcttattttttgtatgtaggcaaggcaacaacaaaaataatgtatcggtttctgaaaagaaaatctccgccaccacctgatattaatttaaatgaattgccaagtgatcccgcaaagagaaaaagcattctaagttatcatcctaatcaaagagatgag

SEQ ID NO: 188530 - DNA, 425 bp, Arabidopsis thaliana landsberg
atggttctcagccggctcattcatgtccagagcatctcggtcatgcaccacgcctttgcgcgcactcgtgtgccggaggcgtcgatcatcgcggcggcagagcgagcgggaaggcagggcaactccagcgcgcgcgtcagctgccaacggcgttgcaaagacaaatattctgcagtgatcgtcatcatcccgtcctgtcgacccgtggctcgcgcatgcgacacaggatgctggcaacaaaatagacatattgtcaattcaaaatgactagttgaagatgggccatcgaatatttgcgatactgcatcatggcttccatcactcgacgtaccggtatccgcggcagcgacaagcgcaacgccgtggaagacaaacttgaggcggcgctgcagcgactgatcgacgccggcgaaagcttcacccag

SEQ ID NO: 188531 - DNA, 387 bp, Arabidopsis thaliana landsberg
atgccagcctccttgatcccatgtatcatcacctcgcctgtgacagcataccgctggtactccttagcctccgttggcggcgatgacgacttcttttcgtctgatctaccgacctcagctcttcagtttacctttggcagactggacaaaccgatgttaattttgatgtctgagaaggatgagatggttccgcttacggtggataaggagttattgctggggagatgggtcaaagctattccagagggtttggcgagtgagcaatcgcagattattaccacggctgaccacgagctcagcgagaaaagagtagctaggtatttcgtagggctggttgttgaattcctaaaggagctcaacaaggaacctactggagcgcccttgaag

SEQ ID NO: 188532 - DNA, 237 bp, Arabidopsis thaliana landsberg
atgtgtgtgattgcaaatgcttcttcagagagcgtagatgaagttcttgcctttattccgtcgctgaaggtgaggcttttagaactaccagagtctgactctgatgtgtgtgttgttattctttgagatcttaattagctttgggactcttatcaatcacagactaaaaaagaggtgatcaatcaacctctacaagatgcattggaggagctatccaagctgaagaaatcggaatga

SEQ ID NO: 188533 - DNA, 155 bp, Arabidopsis thaliana landsberg
tgaagaagaagactaaaagcctaaacaccacaaacattaataatagctcactctccatttcaaacaaatcctttcggattctcaatttctttcattttttcatcggagattcttctgagattttcttggcgatcaaagacgaggaggatcgatag

SEQ ID NO: 188534 - DNA, 83 bp, Arabidopsis thaliana landsberg
tggtgcgggacaccgtgggcgcggtggtcgtggacaactcccaccgaggggtggtgctggcgatcgatgtcgacctgtgctga

SEQ ID NO: 188535 - DNA, 100 bp, Arabidopsis thaliana landsberg
atgggtggctctctttacctatctcatgtccccattcttttactcatcaaagacaacatcacattcaagtttggtggatctcctcctaccactaaagtag

SEQ ID NO: 188536 - DNA, 448 bp, Arabidopsis thaliana landsberg
  unsure (1)..(448): unsure at all n locations
atgattgggatttggggtccttctgggattgggaagaccaccattgcaagagtcttatataaccgtttttctggcgattttggattgagtgtctttatggacaatattaaagagttgatgcatacaaggccagtgggttctgacgattacagtgcaaagttgcacttacagaaacagttaatgtccgagataaccaaccataaggataccaagattactcatttaggagttgtacctgataggttgaaggacaagaaagtgcttattgtccttgatagcattgatcaatcaatacaactagatgctatcgcaaaagaaactcaatggttcggtcctgggagtcggattatcatcacaacgcangaccaaaaacttctgaaggcacatgacatcaacaatatttacaaggtggagtatccatcaaaatatgaagcttttcaaatctttt

SEQ ID NO: 188537 - DNA, 305 bp, Arabidopsis thaliana landsberg
agcatcctgcatccacaaacgttggaccgaacctgcgtggagagaagctcattacggcttagaggatgaagttgatcaaaaattcgaagatcgacaacgaattgaagcgatgagtctcgtatatagtgagctttgtgcttccacctcgtactattcagttggcattgatcagtctactattacatgtcaattgatttcatctacaaattggttgtaagttatacgttagaatatgcacatggacctctatttctatagtatcgttaacatgttttctagcaattttgttcgccgatcatccctaa

SEQ ID NO: 188538 - DNA, 200 bp, Arabidopsis thaliana landsberg
aactggaaaatgttagatgtcttaccacaatttgcgtgtttgtcaccctctgttggccaaccgacttctccaacgatgattggcatatctccatgaccaacagctttcaaagccgataccaaagtgtcgaaattggcatcgaaaacgtttgtgtaagcaacaccattgtcatctactggtttagcaccatcaaagaaggc

SEQ ID NO: 188539 - DNA, 324 bp, Arabidopsis thaliana landsberg
atggctatcaccaagaaaattcttctcccatttgttctcactatcctctttgtcatatcttctgttcattgttctgatgatacccaaggtactagtttattcacacacactccattttttaaatcatagacttggtttactctttttatgaacgtgtatttgttaaattgttattgtaaaataggttttggaataaagcaagagtataaacaatgctatacaccagatccatgtcgtaagggaggtaatgacgaatgtgagaggttttgtgtagctaaaagcggtttactatacggtaaatgtattaatgacggttcgaaagac

SEQ ID NO: 188540 - DNA, 219 bp, Arabidopsis thaliana landsberg
accggcttgaaaaagcttttgagaaaccctccaatagttaaacttccaaaattgagcgacatgatcacctcacatccgttatcggttgctcttcctcctgcattttgtgaacctttaaaacactcgaaaaaagaaccaatgaaactgcgtggtgtcacgctttataaagaaggttcaaagccaactggagtctggcttatttttgatggcatcgttaag

SEQ ID NO: 188541 - DNA, 554 bp, Arabidopsis thaliana landsberg
tacctaattaaacacataatcaacccaatggagcaaaccttgcgagttcttgaggcaaaaacggacgacgacccgtttggtgagggtgatgctcgttgctcactccaagaaaatcccgggttagacccatctgttgagccgggtttagacccgatcggttcgattgaaagggattattatccacactactagtggagacaccactaagaggaggaggagcacgattatgattctctcttaagacattggtgttgaagttgtttagttgttgttggatcatcattggagaagacgatctaggaggaggagaagcggtggccgaggaggatgtcattgttgggccggcgaagaatgacggagcggtggaggaattgcttctagtagagcccatttgtgcagctttttgtaagagagctgtggcagacattggagagagaggcttgttttgtttgttttcggaggaagaggagaagagtggtgagaaagatgagtcttttagggtttggtgttgtagtgaagctgaggtttgttgtgatgttgaggatgatgataag

SEQ ID NO: 188542 - DNA, 362 bp, Arabidopsis thaliana landsberg
atggatcagcttgaagctgaacttgaagctgagtttgagcttcttcagattggtcataaccaggaggttagtgaagatgcagaaggattaagattgggacatgtgtgtccaggactagtggaggaacaacaaggagtgtgtccgtatgagctggagagaagactatacgagctcatggagacaagacaacaagaggagataaaggagttagagattgcattggatgatgctaaacaaagacttcatttgaaagagacagaagcttcttggtggaaagacactgcttatatagtctctgaacgtattccagaaccttctagaatcactcacagctctcgaactcatccttaccctctctcaag

SEQ ID NO: 188543 - DNA, 1332 bp, Arabidopsis thaliana landsberg
tgtggttttctctgctgctggggttttggcgctgctgcttttgcctctactggcaaagaacacttacatctccgagaatgctctaatgccaggttttgttacataccttagaattcaattaaagtccacatttggatactgtacatgttaacctggaattagtgttctatacgattggaatctgtagaagggtttaaaactgttgagtcatgtgagtttatggcttgccaactttgaatgcgttgttgtttggtgttttacactttctattttgactctaatcctcaggctctgcacggtctatgctctctaatcgagatgtttctgatggaagcaaactggtgaaggacataaagaactttaggttgaatcatgaaggccagggtgtgtatgtcttttcttccctcagttttcgcatgaaatagagctttctcctacgttatgaagaattttacttgtccttctgttttggtcctagcccaagtaacttaatgtttctccatttgtgtgatttttctttctagtgaagtccaaaagctcattggaaaatacatgtcagatatgggtgcagaattttcttatcaaaagttccatcctgaagggaatcaatttcaccccctgcactttttctccggtccagattcatatacattgctggagaatgtcagttgtgcttcttatggggtcaatgttgcggggattataagagcccctcgtggtgatggaaaagagtctattgtgctggttactccctatgattttataaatggtggagactatgaggatttgtctttaggaattgtcagttctcttttttccttgctctctagagttacctggctttccaaagacataatatggcttgtcgctgattctcgttatggagactataggcctgttgctgcgtggttaactgaataccactcaccttcatttaaggtctcggatcttctgaagtgtgacgagcaaaatacagctgataacttcagacgagctggaacaatggctgctgctttggttttgaaggttgatggtagaagtgaaaagtttgaggacacactaagtatctttgcagaggcatctaatgggcagatgccaaatctcgacctcatcaatgttgtaaattacttagcggtgcacaggcaggggttttatgtcaaggttgagaaggttgtatctttactttcctctagttggctaaagatttttggggaaatatttgaagctgttgggaaattggcgcatatgttaaatccggactggaattttggtatcccagctgtatactatcttgaaggcagtgctacccttgcaagttcactgtactcccag

SEQ ID NO: 188544 - DNA, 311 bp, Arabidopsis thaliana landsberg
gattcaccgtgctggtccgagggagaagatatacttcaggccggaagaagtgaaagctgcgattatcacttgtggtggcctttgccctggtctcaatgatgtcatcagacatgtgagtttgtatctgaaactttggcattatagaaacagtgtgtgtgtgtgtgtgaagtcctactaaagacctttgattgttgtgttgtatggatacattgcagattgtcattactcttgagatttatggtgttaagaacattgtggggattcctttcggttatcgaggcttctctgataaagatctaactgaaatgccg

SEQ ID NO: 188545 - DNA, 309 bp, Arabidopsis thaliana landsberg
atgatggagttcttcgagaatcttggagtagacatggaggtttcagatatgtcttttgcagtgagccttgacaatggcaaaggttgtgaatggggaagccgcaacggtgtttcgggcttatttgctcaaaagaagaactttttaaatccgtatttctggcaaatgatcagagaaattgttagatttaaagaagatgtgttaaagtacattgagaagcttgagggtaaccccgatattgatcgaaaggaaaccttaggagaatttctcaatacacgtggatactctgagttgtttcagcaagcttactta

SEQ ID NO: 188546 - DNA, 57 bp, Arabidopsis thaliana landsberg
atggagacgagctcgggttgcacgtgcatgctcacggtcacaagcacgggattgttg

SEQ ID NO: 188547 - DNA, 388 bp, Arabidopsis thaliana landsberg
gtaccatgttcctcggtctttcttgaactcggaaggagacaacaccttggttttgtttgaagagattggaggaaacccatcacttgtcaattttcaaacaattggagttggaagtgtttgtgcaaatgtctatgagaagaacgttcttgagctttcatgcaatggaaaaccgatttctgccatcaaatttgcttcctttggtaacccaggaggcgattgcggatcttttgagaaaggaacttgtgaagcaagcaacaatgctgcggctatcctcacccaagaatgtgttggaaaagaaaagtgtcccattgatgtttccgaggataagtttggagcagcggagtgtggtgctttggctaagagactcgccgtcgaagctatttgctag

SEQ ID NO: 188548 - DNA, 355 bp, Arabidopsis thaliana landsberg
tggactatgtcttccccgcactcttatctccaaactgttaacatctggctactactcaacggcgctcccggatgtctttttcaaaggaaaaaagtgaagcgtttgctagcaaatcagtactatagttcgaggaatgccagtgcaggtttgaggttggttcgctacgttggtataaactggatccgaaaagtgaaggtctcgacgagagcaaaattaaattattaactactaattctgatagttagtgtgattcaaatcatcgcgtgtctttgcctagctactgcgttctatactggagggcaaaggagtcagtactatcgtactcgataggttgcacgtggaccacggctattga

SEQ ID NO: 188549 - DNA, 208 bp, Arabidopsis thaliana landsberg
atgatttcagagggagctggtttaaggcctcgttatgttgatgttggagcaatattcagtttagggactttacagggtaaagttacaaatattgctatgaaagctgcagaggaagatgtgaattctgatcctagcttccttggtggatcaaaattgcgtataacgacgtatgatgcaaagcgtaatggattcctcaccatcatgggag

SEQ ID NO: 188550 - DNA, 13 bp, Arabidopsis thaliana landsberg
atgaccattaccg

SEQ ID NO: 188551 - DNA, 878 bp, Arabidopsis thaliana landsberg
tgcttacccgggaacgttttcctcctcatgaatataataagctcaagtctcgtaaaatagacccgctagaagtcctgaaacgcatcaatgaaaacgcctatcgggtcaaactccctccccatttgcgtacgtctgatgtgtttaacgtgaagtatctctctccgttccgtggtgacaatgaagtgcttgattcgcggtcgaatcttttcccacccaaggggacctgatgcagcgcattttagacgtttgtgggcttctcgtatacttctcatgggcttacttatccgagaaccctctaggataatcttttagttttcttctttctttttgttactaggataataacgaatctgcgattcgatttgctttcatgatttgcttttatcttttaaaccctataagtagtttccttttatcaacgttgtaatcaccttttgattaataaaattgagattacacctaaagagctttctaagccctgaggagaggatcctcgtcttttgaattcattgctttctcgatacgtcttcatcaagaaagtaagaaccaagcttgattagtcttctcctggagaatacaagttcttgtttgttacatagcttttgcctctctatcaatattgtttccttgatagaagatacaaagccaaagattcatacggacttcgactacaccatcaaagctttaagaagcaagaagaagcttggttagtgttttggagtcgaatatgactagatgtaatatatgattgagtataagaactagaaccgcaactgattcccaaaagctaaagtagtgctccatatttagaagatgcaaagccaaagactcctacggacttcgactacactaccaaagcttttagaagcaacaagaag

SEQ ID NO: 188552 - DNA, 1009 bp, Arabidopsis thaliana landsberg
attcctgagttcagactgaatctccttagtgttagtgcattgaccatagatattggtgccagagttgtgtttgattcgaattgttatgtggtacaggatcttaccaaggggtcaacgattggaagaggtagaagagttggaaatctataccttctggacgttgaagattcagtatctgaagacactgtatctacttcttttgttgcaaactctgttgttgatgcatctgtttggcatcaacgacttggacatacatcttttgattgcatagacttgctcacagatgtacttgggatttctaaaaccaagaataaatgattgttacattgtgatatttgtcagcgtgctaaacaaaagaagttaacttaccctagtcgtcacaatatttgcttagcaccttttgatttgctgcacatagatgtctggggacccttttctgaaccaacacaggaaagatatcattacttcttaaccatagtagatgattacacacgtgtgacatgggtctatctcatgaaatttaaaagtgatgttctcaccattttcccttgttttatcacgatggtagagacacaatatcaaacaaaagtcaaagacgtccgatctgataatgctccagagcttaaatttgaggaactatacaggagaaaagggattgtagcataccactcatgtcctgaaacaccagaacagaattcggttatagagagaaagcatcagcatatcgttgctagtagctgcgatagagagacagaactgttgagaaatggtttgcagcgctcctttaagctaagggatttgggaactctcaaatattttctaggcctagagattgctagaaatgctgatggtatctcaatctgccaaagaaaatacacgcttgaattgttggctgaaactggtctccttggatgcaagccaagttttgttcctatggaaccaaatcagaaattctctcaagaagatggtgagttgatcgatgatgcagaacattatagaaagctggttg

SEQ ID NO: 188553 - DNA, 211 bp, Arabidopsis thaliana landsberg
  unsure (1)..(211): unsure at all n locations
atgcgcctaaatggcaataaggcgacacaagatgcgnnnnnnnnnnnnnnnnnagtccgaaagcgtgattttgatccgaaggtctggccttctaagaaatatacaactgccaactttacaatggattctttgctggcggaaagagggcgtgagtttatttttgaaggataccgcagacaggatctaatccgggttggcaaattcacaacag

SEQ ID NO: 188554 - DNA, 227 bp, Arabidopsis thaliana landsberg
agataaccggaatattagttttatttgcgcagaatcatcacgagcggcatgagaactcacatcttcgggcggagaacgaaaagcttcgaaacgacaacctaagatatcgagaggctcttgcaaatgcttcgtgtcctaattgtggtggtccaacagctatcggagaaatgtcattcgacgaacaccaactccgtctcgaaaatgctcgattaagggaagaggtatga

SEQ ID NO: 188555 - DNA, 152 bp, Arabidopsis thaliana landsberg
gataccttatcgggcagactctggaccgctaatcaggggcgtcctaaaagaaggtaatgccgagcctcgtcctgcagagaaaactggtagagatgaagaacgtactaagtatatcaaacgtgatgaactcctttcaaagctgacgcctcttc

SEQ ID NO: 188556 - DNA, 99 bp, Arabidopsis thaliana landsberg
aataatcgaaagcagcgcaagaaggatggtatagagcaggtcatggcagctcatcccacgatcatagtacatttcggtgaacgcttttaccacagctag

SEQ ID NO: 188557 - DNA, 274 bp, Arabidopsis thaliana landsberg
atgcgtcgcttttgctccggaggcggcgagagagaaaatcaggatggtgaagactggcgcagtaggcgcgaaaggaagggagaagaagagacgaagaacctcgtcgtggcggccggcgcgggagtaggcgatcataagggcgttgtaggcagtgggactgagagttgcaggcacagcgccggcaggggggaagggcgagcgggagcgggagtcggcgagggagcgaccgccgacaggaaggacgtgagcttgcggtcaaagggacagcggcaag

SEQ ID NO: 188558 - DNA, 393 bp, Arabidopsis thaliana landsberg
ccacacgctcaagtcctacaaggaccccgaagttgtggtcatgaaacagtacacgctcttcacaggggagcgcccagaccggggggctttcatggtcgaggtgaccacggacaagcgagacaaggcgtacggcatcgtggtccgagccttcaaccgcctctccttctcaatcggcttctacccggacggagttgtctgatgtccgcaacgatcacactctaccccgatggcgacaactggcgttggcgtatccaggtgccagatgccgtaacgggcctgacggttgaggtgcgtagcggctcggcctaccccgacaaggagcttgcccgtatcgacgcagagaccgccgtccaggatgctctagacgctgccgccaacaccgagcgctattag

SEQ ID NO: 188559 - DNA, 338 bp, Arabidopsis thaliana landsberg
atgatcgttgagaaatccaagtatcacaaaaatgtcaaaaatatacaaaatttacagcagaaaggtacttgaatgtaatgttcctagttagaatttcatcttcacagttttctaatgaaaattgcataacgaatacggacaatctagaacaaattcgtgaagcgatgctaaattaataacagagcaatggcctgtgaaagtaagaagtctactagttgatcaatgtttatgaataacaaagattcatcatcgttgttccagagatagttcttcgaattttcagatacaaaaatgacgacattgacgattatatcgagattttaaagcgaaacggataa

SEQ ID NO: 188560 - DNA, 276 bp, Arabidopsis thaliana landsberg
atgttggaaacagaccttgaagctcggatgcaaatcctgcgtgagtctggttttcaagaaagccaaggagatgatgatacctttgctcaacgagctgaatggttttaccagggacgacctttgcttctctcactttgtctggacctgtacaacggctacgtcactctcttgggtcgttcttctcatcagaccagacttaaacccactacttctcttccgaaccagcttctccaagatgatgatgactgcatttcggacattgattccgttagtgag

SEQ ID NO: 188561 - DNA, 498 bp, Arabidopsis thaliana landsberg
tatgttcactctattcacaatcgtgcaatcgaaccgtcctgatattacactcgggtcaggactccagcgagaagagtgtggtgaaactgctagacctatcaaagcaaggtcgagcaccactggttgcgaaaacggtcgcagccactatgcttgtgttgtttggctcggttatgttcagcactattcaaatccacacaagggtctctgaatctggtggtgtagctaactcgaccgatcaagtcatgtttgccaatcgcctcctcgaagctttcctcatgggtaaatagtgacattaaaacaccattttatttcacacaccatttttatgtgtgttttttggatctaattcttaatttatttttatttttatgtgtgtgaaaagggactgtcttgttcttggccatggttatagatagaatgcattactacacaagagagcttcaaatcacaagaagaaacttggagattgctgtaaagaagggcaaaaccggtgcttaa

SEQ ID NO: 188562 - DNA, 218 bp, Arabidopsis thaliana landsberg
atggcagtgatgaatccatatgtagagtaagttcacctttgagaacttttactaaatcgattgtgaagtatatgaaattaacttgatatcttttgattgttaggatgcatatggaagaattgcaagctaatgatatccgatgtggaaaaaatgagactcttctgtggaaatttcacacagccagattctcattgtggataaaagaacaaggttattga

SEQ ID NO: 188563 - DNA, 76 bp, Arabidopsis thaliana landsberg
gcatgtgttgggtgttttagttgatcggaactgttcaatttcccgtgtggcatattacatgattaaaatgatgtag

SEQ ID NO: 188564 - DNA, 750 bp, Arabidopsis thaliana landsberg
atgacaaaactaaaagctgtgcttgatcaagaaacatgggatgagatagatgttcctgaagaattccaatccataatcagttctctttttgcatcccagcagttgatttctaggaatgttgatgatactgatcttaaaacataccacagtaatcgcctccctctcaatgggtctttgacttctgaaactggggatcaaaatactgaattacgaaatgaaaaatctaaatctagtgaaggtcctgcagttagtgatgcacaagtgaaatccacagtctcacctgagtctcttgaaagaagcaaggctggtgtatcttcagttacaaataatcaaagtaatcagaaggcgcacggaaaatctaaccttttctatcaaggagttggttaccacatggtaaactggttagttttcttgttatgtattttaatgttgttgatcgatgactattgttatattttgtctgtcttgcatgcctggatgggcagtcttctctcaaaatatatgtactgtttgcgaggtttagatagcataatgtttggctgctatccatgctggaaattttagttgtgctgatgcaattccttttatgtctgtagtggattaatattgctcaagatgttgtcagaatacattgatatgaacaattctttgccagctttgtcctcggaaattggtcttcgtgttgttgaagtgttgagattttttaacactcggacatgccaacttgttctgggtgctggtgctatgcag

SEQ ID NO: 188565 - DNA, 1542 bp, Arabidopsis thaliana landsberg
cttaagatacaaggaatcagacgtcagggttttcttcgaaaccactttcataatttaatcgtttttgaaacagaaatgagttatttacagtaagtaaattttactatttgattagaaaaatgaataaaaaataaccattcgaatataatttgaaaaagaaaattgaatatgccgcataaaagaatctcatacctgaccagaattttcaatacgaaaatctaggttatagatctcgttctcggtaatgcttgcttcttcgtctcaccacctaggtttttttctatctggcctctaacaccacggggcaaccacaccgttagccaacaaagaaacttatcatagtcttgtttggaccttgactgatagatcatagatccaaattctctcataatatgcatacgacgagtcgacgacatataattcaatcacattagaggggtgaatttatcccaaccatgttatattcttccactattttacactagttttactatgcaagattttttaattaataattgtaaatttcttagaaatatacatttgtttctttttggtcgggaagtatacatttgttttgaatactgttaaagtttatattttttggtcaaccctctaaaaatatctaaagcattccaatagtaaggatatttaaatggctgatcacttattaaaatttaatataattcatttgtcgtttttaaagacatatttctaacaatccaattgtttccaaaaatgaaattaataattatctataactaagaatgtttattataattgtttctttgagaaaaatcatagagatgacatcatggatatacgtaagtatgtctagatacatacgtatatatgtccatttacatacacattcacactacggattccttctaagttctagcttagtccacccacccacttaatatgggctgtctttatgaatatatatcttatcttatttttttgaagaactatctatattctatactagctagctaccataaatgtaatagtcaaaatcttttcagtttttttctacttcttgtatctttcaaaaataagaaaaatggaaaatcatccattcttaggttgaatttattcacatatttctttttttgtcacttttttctttcaatgtaggaacaattcaacataataaggtaatactattatataatataggatgaaggatagcttccaatgccaaccttcctctccttatcactctccaagtcaatgtcaacggtcttcgccctctaactcctctctcttctctcacacacacttcgtggctaatatattccaccaagaacacaaccaaagagcatccctctcgatacacacacttctctcctaaaacccaaaaatggtggctgcaagtcccggtggctcaatgaagagcttaaccatccaaatcctaaccggaagatggttcatgttctttggaagtctcttaatcatgtcgacagctggagccacttacatgttcggtatctactcaggcgatatcaaggaaaccttaggctacgaccaaaccactcttaa

SEQ ID NO: 188566 - DNA, 168 bp, Arabidopsis thaliana landsberg
atggccattgtgaagattcttttggcttttgcagctaagttgaattggcatcttaatcaactggatgtgtcaaatgctttcttgaatggggaattcgatgaagaaatctacatggaattaccccctagttatgaagttcctgatattgatgcgtctcagggcagattt

SEQ ID NO: 188567 - DNA, 1546 bp, Arabidopsis thaliana landsberg
atggaggtttccgaagagcaaaggcgaagagacgaagcgactcggttagcttttgcggagaaacgaaagcagtcgttcgattcttcggaaaacccacagcgacaacaagatttcaggttagctaaatgtcgaaagcttgacggtagtaacgatgtgtgtcctcaagaagggtatcggaactacgaaccggtacgagtattgagtactagtgtgccggaaaagtttcgcgtcaggctcgagatctgttctcctgattcgttttcggttacgccggttcaattgcaagggtttcgatgccctgaagaacaagagtgccttcgtcaattgagaaagattctatctgatgtaagttcttctctgagttttctcgcgtaaagttttgttttttgttaaagggtgacgaaatgtagaagagaattttacgaaaaggggaaattttgagtctccgattttttaggggttttagtataatgcgaagaacgaagttgatattctagttgattttactttcaggcgattcctttacactacactcaaaatgatgatggaggaaaagctggggtttataagattagagactacaataaggtctctggatgtcttaaaaggtccaagagcgttgaagttgaaggggtaccttggaaaacgttggctgttgttgagaaactttctcagtcatatatttccgggaaatggcaaccttgtttacctgaacattatacggaggagaaggttgaacaactgattgaaaccctgccaaggaaattggtgaatgcccttttgcctttccaacttgatggtctaagatttggtttacggagaggtggcaggtgtttcattgctgatgaaatggggcttggaaagacgcttcaggttatatatttggtattgtagaagaaagtttttagtagtttggtaaagtagttaatcttgagtgttcaatcttgtgtcaggccatcgccattgccggttgcttcataagtgagggttccatacttgttgtctgtcctgctgttttgcgtttcacatgggcagaagaattggaacgttggttgccatcttgtttgccttctgacgtacatctcggtaaaagtctctactgaattgcctatcttttctcttctaaacttatgtgtcttgcacttgttagctacattagttgaatacagaattaacaattttgcgtgttacctttctggttttatctttcacttccaagtcctgcacatattaactgatggaatacagaattgcaatttagcaatttctgtctctaatactttttttttctcctctggagctctaaagctaaagctttaattggctatcttttcaaatcgagttgtgtttgatgaaacttttggtttcagtattcggtcatcaagataatcctgcctatttaccaagatggccaaaagttgtggttatctcatacaagatgcttcagcatctccggacgaccatgctagagcgagaatgggccctcttgatagtagatgaatctcatcatctacgatgttcgaaaaagaagtcagatccacctgag

SEQ ID NO: 188568 - DNA, 879 bp, Arabidopsis thaliana landsberg
atgagggcttcgtactcaaactcgttgtttgatacgttgaatccgagtcggatcgattgttcgatgacttccccggtgggggagggagttgtattcctactctggatcctcatcggttgcaggaaccgtcacgtggagtagccacttcttattggagttgggttccatccaggtccgctaacgggagctcgattacaaagtcggctaggacctgtgctttcaagctggatctggtgcgatattctatatcgtactcacttagttatatagccaattttgcaagtcaacctgattgagttggactgtgcagaatggttctgattggttgagacgtcatcactacgatgggatgtgattgaaaatatggtctcagttttcgagctgacatggctacggccagtgctagtttttccattgctggataacgagtttcagcgtctatcaacgttttactaaggtaatagatgggtttctgtccttcgtgatcttctctcaccagcacccagctaatcctggtttgagaaaattcagtgtggaggtacgagggttctccatttctgggggccgcaagtatgcgcgcctcgcaaatcgacgcaagaaaatgtgttctcccttgcttatggtttaggagcagtaatccctgtcgatcccatggtaccaagcgtgagaagaaccgcctgtcctgctaacccggacctgaacacgcaaatgttacaggacaacatggacttcatcgatgaacgcagagatcaggcaatgatccgagttcaaaactatcaacaagctgccgcccgctactataactccaatatcaaaattcgggattcgaagtgggaaagctcgttttacgaaaagtgttcagcaacacgagagagctaa

SEQ ID NO: 188569 - DNA, 230 bp, Arabidopsis thaliana landsberg
gtcaggcggcgtggcgggcgaagcccgacgaacttcttgagtacgccaatatggaacacatcatgaagacgcgcgccgggcagcagttccaggcgaacagcgacatcgttgatcaatttagtgacacggcatggcccgacgaagaggggcttgagcttacccgtggccaaacgtggaagggagatggacgcgcgctgacagaggcgcatgaacgcccagtcgccgacctg

SEQ ID NO: 188570 - DNA, 1129 bp, Arabidopsis thaliana landsberg
ttcagtttagggaagaattgaaaggtatgtgagattttggatttaatcgaattcactacataaaagtgttgagttttaatttttaggtagtgatgatgttgattttgttttgcaaacggttttcaaagatgcaaggatttgttgttggcgactgttttactctgtcagatgttattatcatactaatttgtttcatttcaagtatgtgttgatttgattgaaagttagctgagtgtattattgtttgaattcatcatcacaaaatctataataggtggtggagttgtggtcctattgtcgtgatatggataaggcatgggtgtggcttccaaggtataagtcttgttgattctaagtcttatttgattcattgattttaataataaactgagtcgaaaatatagtgatatgaactctctttgtctaatgaaacatataaggcaccgtggaaggagcaacaaattttgttactgttgcatcaaggaggttggggattccaactgaacttttctgtccctacatcgattgtcgtaatgtttgccatcaaaaagtagaaacagtattggaccatcttgtgatcaagggtatggataagaagtacatgaggaattcttgttggagtatgcatggtgaaagaaagtctgatattactgatggtccaacattagaatttgaggcttatggtttgctaaggacggcttattgtagtggtgaaggtacacagccatcagacaactttggaggagagaatttggatggtgaaactgtagaagactctgagtttagacagaaattgagagatgttgaaactccattgtactcgacgtgctctaatcacaccaaggtttctgcaataatgggtctataccgcataaaggtgaagagtggaatgtcaaaaaactactttgatcagttgttgacgtaattccatgacatgcttcctaaagagaatgccctgccacagtctactaatgcaatgaagaaattcctgaagatttttgggtttggatatgatgtcattcatgcatgcaagaatgattgtatcctctatcgaaagcagtttgataagatggaaagctgccttaggtgtagtgttccagatgggaaacagataagaatagtggtgagg

SEQ ID NO: 188571 - DNA, 165 bp, Arabidopsis thaliana landsberg
tgctgcagccgccccctctccattctcaagttttttgcagcagccatctcctcaaccctagccgccacccccccccccccatctcctcttctccaagtgtcgttcttcctcgtcggaccttcttcgtgtgggtgcaagtttcaattggagaattggtgggaggaa

SEQ ID NO: 188572 - DNA, 205 bp, Arabidopsis thaliana landsberg
gggcgcccgcctgacatccttatcgtaccggcgtatgtccgcggtgtcctacacgagtgagcgcaccgactccaacagcagcatgcagtacatgctgccgcaagggcaaacaagcccgtcgcgggagtccggcgcacccgtgtcctcggaaatgctgaatcacctcaacgcacaggtcaacagcggcacgcacgccgagtaccag

SEQ ID NO: 188573 - DNA, 1385 bp, Arabidopsis thaliana landsberg
atgagagcgtctaatgttgctttcaattctattccgcttatgcgagcagaaagtggttatcccaggagatctgcaagtccgttactttcttcacctgaagttagtaagcaattgttatcgaagtcttgccctgatcctagggcttgtgagcagtctcctggaatgaatggtgaattgtttcagcaaattgaaggttcctcacaacgaaagattttctcttcacactggtctcttgatgctgtgaccgaagctttagaggtttgtttgagatgttatctttatctttctttttttcttccttttaagttatatgttttggacctcatagctgtctttacttttatgcattgtatcagaaaggtgaagcttttaaagcgctatttcgggtgaatgctcataatcgcaatgaggttagtggcaacatctgtttttccaatgaggtttcttctgttcacttttaatccgttttttttttcctttgaaggcttactgtaagatcgatggagtccctacagacattctaatcaatggaaatgtttgccaaagtagagcagtaagtttggtttatctttgtacaataagcttcctggcttgtgttttatcttaattcattgtttggttttctaagttcagacttgtgtttctttacgtaggtggaaggtgatactgttgttattaaattggatccgctctcactgtggcccaagatgaaaggatttgttactgaaagcgctgctaagcctgaaggaacgaacagtcccccagagaaagatgacaaaaaagctcgtcaaaaaaatggtattgatgtggtagaaggttttgaagatgggttctcgaaaaacaaatcatcagttataggaaaaggagctaagaacggtgttactcccagttctccaccatcactggattcatgtttgggttctttttgtgagcagaaaggaaattgcagtgcggttgataagctatgcggcatccttagttccttcccccacaaacgaccaactggacaagtagttgctgttgttgaaaagtcacttgtaagggattctatcgttggcttgcttgatgtcaagggatggattcattacaaggaaagtgatccaaaaaggtgcaagtctcctctgtctctttcggatgatgaatatgtccagctgatgcctgcagaccctaggtttcctaaattgattgtccccttccatgtcttacctggaagcattagagcaagacttgagaatttggatccaaatctcgaggcagagctggtagctgcccaaattgtagactggggcgaagggagtccatttcctgtagcccaaattacacatctatttggccgaggcagtgaattggagcctcagatcaatgcgatattatatcagaactcg

SEQ ID NO: 188574 - DNA, 83 bp, Arabidopsis thaliana landsberg
gtcttatgtattttgcaccaaaactttaaaactaggggtagacatccgggtacgcggatcgggttcggctaaaacccgatcag

SEQ ID NO: 188575 - DNA, 374 bp, Arabidopsis thaliana landsberg
aacttcttctgcgctggcccattgccgtaccaaaccctagccgccggattcctgcgccaccggtgcgcactggcaggtgggcctcacctgcaacctctctgtggcgctcgccagcgcttgcacgcatgccctttgactgcgacaccaaacccactagtcaggttcgcctcctccttcctcctcgcaacagcccgcacgtcgcgcgcaatggggccgggtcaatcgcgcgcacattggagccgttagtcgcacgcaggggtgtgctcccgtgagactggagtgtggggcacgccgtcagccacgttctttcgcagccccatgaccgagctcgtcatcctgtcgcctgccgttgcaacatagacgcggatcgcgcg

SEQ ID NO: 188576 - DNA, 85 bp, Arabidopsis thaliana landsberg
atgaatttgtcaaccgaatacgtcgcaggagttgaggaattcatgacattcgctaatagtcggcctatagtacagagtagtcgag

SEQ ID NO: 188577 - DNA, 184 bp, Arabidopsis thaliana landsberg
aatcgcagatcgtctccggagagacgacaacgagaatcacaaagccatggagttggaattccggcgtcgcgactatggagctacacataaatctcaatttcttcctcggtcacaaactcaaaagcatcctctttcctctacacttgcttctcgtgaccaacaggtctgcgatacgatcccttag

SEQ ID NO: 188578 - DNA, 432 bp, Arabidopsis thaliana landsberg
atgggtggttttctgtgcctgctgttcggctcgatcgcgggggggggcatgaacaccatgatccgccacaagatcgacctgtccgaagcgcgcaacctggtgatcgtgtcggtcaccctggtgttcggtatcggcggtgtgctgatcggcagcggtgacggcccggatgactggggcctgaagggcatcgccctgtgcgccatcgtggctatcgcgctgaacctgatcttgccgggtaatgatggctggaagcaaaagaagctggacgatcagctttgacctgacctggccccttcgcgggtgaaacccgctcccacaggcattgtacaaaacctgtgggagcgggtttacccgcgaagaggccggcaaaggcaacctgacaatcaggccttttcgcacatgtcggccaacaccctcacccactccgggtga

SEQ ID NO: 188579 - DNA, 143 bp, Arabidopsis thaliana landsberg
gggcaatcattgatgcggaccaacccctcccacacgcatacgagttactcatgcactcgttcatccgtcccaaaataaaagagagaaaaagagaagggaaagggaaaagggaaagaaaagggggaatcaatggaaaagaaaat

SEQ ID NO: 188580 - DNA, 639 bp, Arabidopsis thaliana landsberg
acaattcctgtagccttcttcttgaagtatatagaaggaagatatgagcagaagacggcgaagctgagatcagacgcgtcaaagagaacttgggaagtgaagatagatggccagagactcaccgacggttggaaagagtttgctgtctcacatgatcttcgaatcggtgacattgttgttttcagacaagagagtgacttggctttccatgtaacactgttgggacctagttgttgtgggattcaatatggttcgtgttcagtcgaaaagaacaacctcggtgacggtgagttgtgttctgtctctgactcttcaagaaatgtggtctgagtttggaatatggatcagttagtagagagaaccagtttaactatgtaacacttagtatctattctttttcagagaagaagaagaatccaaatggagaagcaaagtcttcttcactagatccttcttgtttttcggctaatgtggcgccttcgagtctacgttatgacttaatggtattctactcttaaatttgaattccaaattaaactatgaattcatgttgttttataatgaatttttcagctttttccaatgggttttgtgagggaaaatggtgtagtcggatctgaaagattgtctgatgaatga

SEQ ID NO: 188581 - DNA, 603 bp, Arabidopsis thaliana landsberg
gtggtggctaatgatgttgattttaaaagatctaaccttctcattcaccaaacaaagagaatgtgcacatccaacttgatagtgacaaatcatgaagggcaacagtttcctggttgccgtttgaacaaatcccgagcttctgagaaaggaataagtgaaaatatgcctattaatcaacttgcctttgaccgtgttctatgcgatgttccgtgcagtggtgatggtacactgcgcaaggctccagatatctggcgcaaatggtattttcacctttggcatgttttacctattggcaatgttgtgaatgcattatattgtttttcattggttcttgaatttcttattccttttggtttatgtacaggaactctggtatgggcaatggacttcatagccttcagattattcttgctatgagaggtactttttttctttcttatatgtctcaactaatttccatgaaattgcttgtagaatgatccgcctatcgtaaatatgtctgtttggtcttgtccaggtttatctctgttgaaagttggtgggaagatgatatactcaacctgctcaatgaacccagtggaggacgaaactgttgttgctgag

SEQ ID NO: 188582 - DNA, 72 bp, Arabidopsis thaliana landsberg
gcaaaccggggtatcccggttaagttgaattctcgatttgattcacattccctcggtttaaaccggtattga

SEQ ID NO: 188583 - DNA, 1472 bp, Arabidopsis thaliana landsberg
tcatttcctcgtccctctcccgtcgttatcgtcaacaaagctttcaatcggctgacattaattcgtcctctcccgtcgtcgtcgtcaacagttgttctcccgtcatcgtcttcattttcttgtctctcaatcgattcgtcgtatccggcgtgtgctagtaacttctactcggtcctcaaatgtaaggtattaatcttctccaatcattttatttgctccaattattcaatcgtgtgctaattttatttataatatccaacattgtgaagagctaataggtgaagacatgaatgctacgttaggtgatatttcaaaaatgttaatcacaagaacttatcttcttaccatagacttcggcttgcttatctcctcattgttgacggtgtcctcatatcctcaaaccaacctattacgtctacattaaaatatgtagagatgttggcagatttggagaagttccttaactgactgaggtttacgtaactgactgtctatacacatgtggataaatggtcaaagaaacatgaataatatactttggattgacgtttattgttcatgtataaacttatgtattagtatgaaactatcatgtgagtctttagatgatcatggactggactgcttggacaatcattaatggacaagtatgtctttgatttgctgtgaatgtgtttatagctcgataaaattgtatcaacatgtctatatacatgtggataaatggttaaagaaacatggataatgtactttggattgatgtttattgttcatgtataaacttatgtattagtatgaaactaccatatgacttattagatgaccatatgtactagactgcttggacaatcattaatggacaagtctgtctttgatttgctgtgaatgtgtttataactcgataaaattgtctcaacatgtctatacacatgtggataaatggtcaaatagacatggataatatactttggattggcgtttattatttatgtataaacttatgtattagtatgaaacaaccatgtgagtcatttgatgaccatatggactggactacttgaacaatcattaatggacaagtatgtctttgatttgctgcgaatgtgtttatagatcgataaaattagcacttttttgtttgctcatctaacattatcattggagcccaacttgatacaacctctctagcttctcttcttcctctcttacaataaacagaataatcatcaccttctctttcaacctctctacattcctccctcgacgtcacagttacatcgggcgatgaaaaaatcggagctacaaatccatcaacaccaatcggtatatcaagccttgtaggtcgtttcctttttaaaacttcttccggaggagacgatgcagaaacagagtcagatccaaacgataacccgaatcagggggagattcctaatcgacttctacgtcatctctccaatcacagtggcggttaa

SEQ ID NO: 188584 - DNA, 20 bp, Arabidopsis thaliana landsberg
atgcgggtgtacctgatgag

SEQ ID NO: 188585 - DNA, 540 bp, Arabidopsis thaliana landsberg
atgtatgcatcaaaactgggtaaagttctgatctctaatggtaaaacggcaaggagtgttccactatataggacattcgtttcagcgtcaccgaggcccttacaggtaagaaacaatgtaaaaaaagtcctcaagcacaacgttatttagttataattaaactcaaattggaatagggaaaagaagaggcagagcaatgccaaaaggtgaaagaagcagcagaggcagtgaaagaaggagcgaagcaagtgaaggaaactactgagtacatccaagatgtcgcttccactactgctggccgagtaattaattgatcaatccacattttctagatataaattgtgaattgatgatattatcacatttataatatcggattagttaatttggtaaaacaggtgactaagatgacaaaagatgtaacggagaaagtcactgagacaacggataccatcactgaaaaagctaaaggttctgtctctggtgttttaggcaccgctaaaaacgctaccgatatcatcaagaacaagatccttggtg

SEQ ID NO: 188586 - DNA, 93 bp, Arabidopsis thaliana landsberg
atgagaattgtacgaccacggatgaatatcgtcggacacttgcggatatgcacagaccggatcagcgtgcttcgtggtaatggacggcctaat

SEQ ID NO: 188587 - DNA, 115 bp, Arabidopsis thaliana landsberg
atgacttgccgctctagcagcagaccagtaagcgccgaccgatactccatcatgttccgtgccctgtgcgcagatgtacgccaaggtgatcaacgacgaccagctgaccaagaag

SEQ ID NO: 188588 - DNA, 76 bp, Arabidopsis thaliana landsberg
gaaaagaaaatatgttctcattaaaatgacaagcggtaaacagtaccgtaaagacatcaccggtctgcagttcaag

SEQ ID NO: 188589 - DNA, 65 bp, Arabidopsis thaliana landsberg
ttttgtcggatgagaggaaacgaagctcgtacgacgttggactctatgattctggagaagatgag

SEQ ID NO: 188590 - DNA, 367 bp, Arabidopsis thaliana landsberg
gcagttgaatggacgacatcacctgaatccggtgtaccggcgatgggagaaaccggagaagaaagagtttgtgaaggtgtggaatcataaatctcacggagattcaaatgtggccatcggacggcgggagaagctcgactgtaagtgaatttctgggaagaagaagtagtgctgctgatgttcgcttgttcatctttaatctcaggattaagagtggcgcgaacggataaagcaggaaaagctaaagcccctgcagaaaccgccattaatgtcttcttctctcagcttcataaatttcgttgtaccgttaaaagatgagaagcgagtgaaagagaagagtgatcttttaaggttcctgagaaagtga

SEQ ID NO: 188591 - DNA, 915 bp, Arabidopsis thaliana landsberg
atgccgcaagaggagatccttccaatatgggagttgccaaaagatactttgtttgtgccaattgtgagtgcttccatattcgtcaggcatattcgccgtggtgtgccaattacccccacgtttgcaggtttcctgagcaccataataatcgatctgttcaaacaaatcagttccagaaacataagatggcggaggaagacgaactattttattcttcctaaaacgttttttgttacgccgatatggatgatgcaggagaagaaaccaacggtgacaatcaaaccaacatggttttctgcctttctttagttgaaacgcatctgtacgatccatacagtagggacaagataatcttccatgcgttgtccaccccgataacattccatatgccgggaagtcactaatcgtccacattagcactgcccgcatattgaaattttgtttgctcgagtaatcaaacgtatgacaccttcataccacaacttcttgagttcatgaatcagcggttgcaagaatacatcaagcgcttgtttcagatgctttggcccaggcaataaaatacttaagaacagaaattcgctttgcatacacatatctggaggaagattgtatggggtcaagataacaggccaaagagaatattgtcgcccagacaaaccgaatgtacaaatccatctgtgcataagccaagatacacattcctacactcgttagcaaagtcaggatataccgtttgaaagtgtttccacgcctttgcatctgatgggtgcgttatttctccgtctgcagttgtatgttgagcatgccatctcatttttgccgcagttctttctgattgatataagcgtttcaatctatcagttattggcaagtaccacatccgtttatatggcactcgcgtccttccgccagtag

SEQ ID NO: 188592 - DNA, 324 bp, Arabidopsis thaliana landsberg
atgggccaagttcttgggcttcgtagggatgctggaagtcggcagcaagaggaagggaaggagtggttgtgcgccctagtggttggtgtaaattcgaggggacccccgggtccaagtcaccatagccggcgtttttaaattgatcattttcaaaaccgcgaatttaggacatgtcttcactctttggaccataacttctaaacggcttcatggattgcttcgattcgacttttaggttaagcttgactcttctagatttctaatgacaccaagatactctcatgccaatatcggaaagaccttgtccggatgtcaaacatctga

SEQ ID NO: 188593 - DNA, 81 bp, Arabidopsis thaliana landsberg
atgccgaaacagaagccggtacatcattatgtgaacagcatccttatgatggcagtggttttacatctcttgtctctgcat

SEQ ID NO: 188594 - DNA, 204 bp, Arabidopsis thaliana landsberg
gttggaagagatccaggtgacggaagccatactcgctttcggcctcctccagcagcgctgcgaagacgaggtgctcgaggtggcctattgactgctggtggcatcagcaccgtcaaccttcgtgcatcccccagttcgtgtaccggtactttggccgcggcagagtcgacatctggtgaacccccatgccccacggtgatttag

SEQ ID NO: 188595 - DNA, 962 bp, Arabidopsis thaliana landsberg
  unsure (1)..(962): unsure at all n locations
gtcaaatattcatgatgaattcaattcttcaagtctggtttcaaacacaaaaacaaatgcttcagttcgtggacctagatcaggatcggggttaccaccaaaactgtctccaggactccataacactccgtccccgattgaatgggatatctctggctgtacgaataagcctccaacattgtcaggagttacacaacgcaagcgtatgacatcaaatcgttcttcatcaccacctgtcactcagtgggccagtcaaagaccacaaaagatatcccggatagcaagaaggacaaatttagtgcccattgtttctagtcaggacgaagttccctactctgataatatatcagatgttggttgtagtgaaactgggtttggatttcataaacgttcaccagctgcttctcctcaattgaaactaaaaggtgaaagcagcttctccactgcagccttatcagaaagtgaagaatctggccaccctgagatcaaatctaaagacaaaggtaaacagtctgatgaggtaaatgggaaagctgcacagaatgttcctagagtgtccatccctgctttacaatcaagaaaaagtaataagcctgcagctggtgaagagcttggggatggtgtgaggagacaaggaaggacaggccgtggcttttcttccacgaggtctcttaacccaaatggagtaaataagcttaagaatgttgnnnnnnnnnnnnnnnnnnnnnnnnnnagacctatttttgacaagaatgaaaggtagagattattcttattttccacgtactcttattttttttttcctgtatgattaaaatttgttatggtgtttatctcatagaatttttaatgagttctgtgcagtaaggtgggtcgtccacccactaggaaactatctgatcgtaaggcctacaaacgtcagagagctacggcaacaaatgctccaacactaaattttcatg

SEQ ID NO: 188596 - DNA, 800 bp, Arabidopsis thaliana landsberg
atttttagttggaacaagaaaaggtaaaaatcataattatccagggccatgacttaaaggcatgaatatatgattatgcaaggaaaatttcataattatccaacaaagagagcatcattgtctctaaccatgcgttccttattgtaacaaactttttcaatattatttatttgttgactaccttctcagatcattatgtctacactctcattgctttaagagacacaaaatcatcacctagactcacaacctcttccattaaccaaacaatcccttttaatcagacaaaactctgtctctcaatctcaaaatcaagattgacatgtctcgttttgtgcttctctttatcatttccacattcattaatctgtcacaaggtattaatgtagagtatcttcttgtttgaaacaaatatattatatatgtgcaataaggtttttcattagatgttgtttgatgttttcaggagcgcaaatgccttacatgaccacagatgctaaagaagtttccggcaagtcattcgattacatcgttgtaggtggcggaactgcgggatgctccttagccgcaactctatctgagaaatactctgttcttgtcattgaacgtggtggctcaccttttggtgatcctttagtagaggaaagaaagtactttggatactcattgctaaatacagatgaatactcatctgttgcgcaaagttttacctctgtagatggaatcgaaaactacagaggacgcgttcttggaggatcgagcgctataaatggcggattttacagccgagcaagcgatga

SEQ ID NO: 188597 - DNA, 114 bp, Arabidopsis thaliana landsberg
gtcaagctgtattcaaagcatattggtaaatccccggagcagattgaagctgacatgaaacgcccgaaatattttagtcccactgaggctgttgaatatgggatcattgataag

SEQ ID NO: 188598 - DNA, 160 bp, Arabidopsis thaliana landsberg
atgccaatccgccccgagctccaccagaaggtgacacgcccgtttccgtgctcattttccccagatacgctatgttttcggccaatttcgtcttcgctggagtttccccgtgtcggttttccgcgcccgctcggtgaccggcctttggagactgacctag

SEQ ID NO: 188599 - DNA, 74 bp, Arabidopsis thaliana landsberg
atcgacaagatccaatccgtaaccaatccctaatacgagggataacgagacttagtggagtcaaactccggtga

SEQ ID NO: 188600 - DNA, 222 bp, Arabidopsis thaliana landsberg
atgatcatcgattcgtccccggtggttcccgaacggcagtgcgccaggattttcgttacttcctgctcggtcagcgttgtcatccagacctgagggtcactattgccggatttttccgctgtagagatgacgaattcatcaagatcccatacacgtggtgcaggcgtttcaagtccgcgaccgtcagccgattccgctgttgtattttctttgttcataagg

SEQ ID NO: 188601 - DNA, 102 bp, Arabidopsis thaliana landsberg
ctttctcctgcggagatggcatccatacggagcagggatattgccatgatcttacaggaaccgatgacatccctcaatcccgtacttacctgcggtttgcag

SEQ ID NO: 188602 - DNA, 69 bp, Arabidopsis thaliana landsberg
atggatcgggatcaatttgctcactacataatgaaacgtctatctatgctggtaatggcgatccgctaa

SEQ ID NO: 188603 - DNA, 447 bp, Arabidopsis thaliana landsberg
atgtctcgctcgccccttttatcatacgatcgcgcatcgcacgcaaatgcggaatgcaagcacgcgcagcatcgccgcatcgaacacgcgtcggatacgcataatgcgagcaccgattactcctcgcaacaaagagcgcgccggatgcggcgcgcccagtccttccactttccatcgatctatttcagccgcttcaggaattcctccttcagctgcgccgggttcgcggcgcccttcgactccttcatcccttgcccgatcaggaactgcaacgccgcctcctttcccccgcggtaatcgtcagcgaccgcggcattggcgcgtgatcacccggtcgacgatagcccgggagatccgcagccgagttcgtctgcaggagtacgcgtgccttcgccaccgtcttcggttccccaccctccttacagatggcagccagaaggtccttag

SEQ ID NO: 188604 - DNA, 563 bp, Arabidopsis thaliana landsberg
atgcgcagcaaaagtccttcagctggagcttcgtcggacatttttagttttggatgccttgcctatcatttagttgctcggaaaccgttgtttgactgcaataataatgtcaagatggtaaactctaaaatccgagcttgttagttttgatattcagatagatgctgtcagatacgttttctctcaggcttgatgtcattggagtagttttaattattcagagtatcctttggatttcccatggttggtaatgtttaacttgaatttttttgcagtacatgaacacgttgaactatataacaaatgaatctttctcatctataccctcggaattggtatctgatttgcaaaggatgctatcaacgaacgagtcctttagaccaacagcattagatttcacaggtaagtggagataactttgacgaggtttccttctttgttgtggcaaattttctctttttcttgttagttacatctttaacttgaactctgactctgtaggatcgaattttttccgaagtgacgctaggttacgtgctctccgcttccttgatcatttgctt

SEQ ID NO: 188605 - DNA, 481 bp, Arabidopsis thaliana landsberg
cgcgatgccgtcgccgaggctgtgcacgacgaggccgatcatcgccagcgcgagcgcggccagatgcgctttgcggcgcgcgcggctgatccagtgttcgagcagcgtcggcccgagcaggccgatcgcgaggaacggtgcgctccatcggccgccggcgctgaacgtgccgggcagcacttcgagcagcacgaggccgaagatgctgacgaacaggaagccgtcgaggaacgcgagtacggccgggcgccgccgcgcccagccgtacagcagcggtccgctggacagcgcggcgagcgttgcgagaagcagaacgagatgcatggtcgtgccggtggtcagcagacattattccatgcgcgtcaagccggctggccgctgctacagtgacggcgttcagggagaccgctatgaaaaagagcttcgcatcgatcgccgtgctgctgatcgccgtatcgctgatcgtcgccggcggctggtg

SEQ ID NO: 188606 - DNA, 18 bp, Arabidopsis thaliana landsberg
gaaaatgtcggcagctga

SEQ ID NO: 188607 - DNA, 412 bp, Arabidopsis thaliana landsberg
atggctccgagagttgacaatcagatgcttccaaattttttccggcagttcattataatttctggtggagttgttggtgggtcggatcctcctgcttatcagcgagcagagaaagagagaatggaaaaagcagctagagaagaaaacgagggagggattggtaacttaaaccacgatgaacaagttaatgtaagcaaaagggcaaaacaatgttcgggtgagtttacttcatgtcttatcacttatcagcttaaagtttttatttgctatcgttagagctcttgagaatcttttgtgcgcagagaaaggcgaaggagaaacatatgggggtgaaagacatgctgaatattcggatgaatcagacatctgttcggacgacgatgattctgaggtcgaatgcttaaacttttga

SEQ ID NO: 188608 - DNA, 579 bp, Arabidopsis thaliana landsberg
ccgcttgcgcgcgatctacgatccgggtgattacgactatttcaatgcgcgcagcctcgacggtgcgcaaggtggcatcagcggcggtcagccgagcctgtaccggggcaaggtcgactatttcgactatcgcgtcgaaggcgacaagcaccccaatccgctcgagtggaccggcaagaactaccaggtctatttcccggcgctgtttctcgaatacaaccacggcccgctcaacgtgcgcgtcggcaaccagcagatcgcgtggggtcaggcgatcttcttccgtgtgctcgacatcgtcgacggtctcgatctgcgccgtcactcgctgctggactacgcccaggaagagttctcggacaagcgtgtgccggcgctcggtattcgcctcggctatcaggtcaacgacgacatccttgccgatgcctacgtgcagaaattccagccaacggtgctcggcaatccgaacacgcagtacaacatcatcccggtgcagttcaccgttcatgacatgtaccacgaaggtggttacgacaataaggtcaactacggcatccgcctgaagggcagctacggcca

SEQ ID NO: 188609 - DNA, 460 bp, Arabidopsis thaliana landsberg
atgttcgtagatgagctgaccttggtaccggatgtgttctgggaactcggtcggatcgtctactggcatctcaagtaacgcttccggattcgttcttagtcctagaacggttcgggggtgttacaaggggtcttctatttctgcaaaagttgcattgaatctagagatcgtttcttcttctcttgcacttttacttcggttatctgggacatgcttgctagaggtttgttcaagcgggagtatacaagtgattggtctcagctcatcaatacagtcttagccccgtgaagtaatcgagttgacaggttcctcatgcgatacttctttcaagccaccgtcaataaagtttggagagaaagaaacagaaggtgtcatgatgaaaaaccaaattcccgagctatgcttattcaatagatccataaggaaatatgaaatcaattattcaccattcgaaggatga

SEQ ID NO: 188610 - DNA, 540 bp, Arabidopsis thaliana landsberg
atggagagaaacaaccgcaacgaggggactcacgaagaagagcaatgttcgctttctgatattatttattcgttttgttcagaaaatcatagtgaattaaaccctttgcaagagatattcggtgttaccaaaaacaatgatcatgagaaacacgacgaggagccagacgaggaaagttaccgtatggctaaacggcaacgttccatggaatatcgtatgatgatggagaaggtgaagatgacttaatctccttcttctcttacgtgattccctagctaatttatatttttgctttctaaactttgtagaaaagacgaaaggagatcaaagataaagtagatattttgcaggggttgatgcctaatcattgcacaaaggttaactattacttaatttacttcatattttttatatattagagtctaatacaatatcaagtttcgaatatcgagtttcttgtgtgtttatctacagccggaccttgcatcgaagcttgaaaacatcattgaatacattaaaagtttgaaatatcaagtagat

SEQ ID NO: 188611 - DNA, 306 bp, Arabidopsis thaliana landsberg
atgttccaacgccagaaaaacttccgggcgggcttccaggcggttactgttcctgaaaatgcggttgcggaggctcgtaagcaggtagggcttgatctggtcggttttgccgagggattcccttcgttcccataggtagaggaaaagatcgtgcacgaggtctttcagtacatcgcggtcgctgacgaaacgtcttccataatcgaacaatggccggtagtaattgcgcaggagttgctcaaaggcaagcgggtcgccttccctgaacttgtgccaaagtaccgaatcctgttccacgaaaaatgg

SEQ ID NO: 188612 - DNA, 242 bp, Arabidopsis thaliana landsberg
tggaatcggaagctcaaagaagaacccaggatctctatcacacattacacatagtgcgaaaaatccggagagaaagagagagaatcacagtacattaccttcttcgtcttcgtctagttactccatcatcatgctgctgcttcgtcgtcgtcgtcgtctatatctggaaattggccaatggctctctcagtgtgaaggaggagggaccaatgggcattgatttggtcccgcaaatctcgtag

SEQ ID NO: 188613 - DNA, 746 bp, Arabidopsis thaliana landsberg
aaacttactattacgtcttcttttcactatgaatattggggcatcactatcgatacaccgagtcttgcctacttagaatactctgatctagttccaagacactttccgtttgtgaatcttgaatcccttgtcgaagctaagctcgctcttgatctatgttctgatagcaatccaacaaatctgattaaggggttaagaaatgttgaggtcttggagttatcatctggttatactagtcaggtaaagattgatctcccctctttttctttctctgtaagataatcgaagagcttggagacgaattttaggaaccctgtcttgaggtttttggatccaaatattgcaaattgtttgatgactatgtatattgactagttaatttttgttgcagatattatatgtgaagcaatcccagtgttgagcaagttgtttcgtttatctattaaaagtaattcaagacactactacatttggaatcttctgccaatacttctagaaaagtctccaaaactagagactctcgtcatcaaggtataactgaaactcctgaagtttattggacaatctaaaatctctaatcgtccctcttgtttcagggtccattgtccgctgatagatatgaacgagaatatggattgtcatgtcctgtgaaagtattggagataactgagtatggaggaaaatatgaagagctagagcaaatggaacatttcttaaagaaactgccatgtcttgagcttggcaag

SEQ ID NO: 188614 - DNA, 697 bp, Arabidopsis thaliana landsberg
atgagagttagggttgatgtttgttggacacaacacatcttcttgttctttgtctttggcttgagttttatgtcatttgcattatctctggatggcgatgattacagcaaaacagggaacccaaaagctcttgtttcggttacaaaccttatctatactcgacttcagaatctaaagactgtcttaaaggctgacgttgatcgagatttaggttattgcatcaaaaatttgtaagtcttttcaaaatccgcttatgtagtcccatgtttgaattttacatttttctcatatcgtttgttgataattcaggaagggcgattggaatgaagcatttaattttgataaaaatctggacttcttaagcaattgtgtcaagaaaaatgatggtaaacaacataaaaagggttatgtttttatattcaaatacttgaacattgagatttaatggtcttgtgatatgcaggtgacctcacacttagactatgttcagctgcggagataaagttctactttagtagttttgttagaagagatgaagcaacaacggttcatgtaaagcctaacatcaactgcaatttagctaaatgggtttccggatgtgagcctggatggagttgcaatgcagatgatgaaaaaagatttgatctcaacaatggaaaaattcttccatctagaactcgtaaatgtcagccttgtt

SEQ ID NO: 188615 - DNA, 374 bp, Arabidopsis thaliana landsberg
atgcctcgaaaggtatgtgtttttttttgctttcccactgtgttttcttggtttatagtctgctttttgatatgcttgtttgagcagattgccattggaggggcgaaatcgaaagactactttgacagacacggggacttaaagagaatccgacggttgaaatattggccacttgatcgcttgctgattgataaatataagcttccggaagcagaagcaaaggagtttgctgagtttctgactccgattcttgagtttgcgccggagaaacgaccaactgctcaacagtgcttggatcatccatggatgaatgtatcaacacagaacgatgcagaaaatgtagatgacccaatgaacaacttgcatatcaaagg

SEQ ID NO: 188616 - DNA, 514 bp, Arabidopsis thaliana landsberg
atgggacttccacaagaagatcagcatgacacaaaccaaactttcgaaacacaatatgatgcatacaagaaagcaaatcgaatgtttcttgatgtcataatagacaactatgaagaaggagatattgtttggtgtcatgactatcatctcatgtttcttcctcaataccttaaagagtacaacaacaaaatcaaagttggatggtttctccattcaccatttccttcttctgaggtctacaaaacattgccctcgcggtcagagcttcttcgtgcgattcttgcagctgatttacttgggtaaaactcaaactcttaacagtttcatatatggttaggaatcatctgatttggatatcaaaaaaggtttaaatttatgtattgttttttccagcttccatacatatgattttgcaagacatttcttgagtacatgcactcgaattcttggagttgaaggaacacatgaaggagttgtgtatcaaggcagagtcactcgagtagctgttgtatga

SEQ ID NO: 188617 - DNA, 622 bp, Arabidopsis thaliana landsberg
tatcaaatcagtctggtttccctatcaatgttggctcttgggatgtttcttctggtgggctattgtggaccggtggttcgagttcaaccagagatacaacaacaaccattagcgggaatcacaaaacaaacacttcaacgcacccgtagtaactaccagcatcaggcctactaatgttcagatagggagaacggcacagagtctgatgaccgatgagttccctcaccttgatatcatcaatgatctgcttgcagacgaacacggtacaatggataatagcgtataccgtgtaccacaacagttcaacaaccagtactcatatcatggcggtgcggatctcgggatctctggcaggtctaggagttacagtgatgatggatttcaccagtcttacggtgaatacatgccacattctgcttcttcctcgccatatggtaatgggcaaacacaatcgcaatggcagatggcaaatatggacttctctttaccggctatgaggaaccaagacgatgtatcagcatcagcaacagctacttactcttactttgatttagattcatcaaacccgaatttgtctggaatcaacggctatagggacttcaggccatcaaacggacactga

SEQ ID NO: 188618 - DNA, 96 bp, Arabidopsis thaliana landsberg
atgtgcgttgggtgggcgatcgaaaacgcatttgcttacatttatttggctaaggaccacttcaggaaaccgcttcatactaacttcagagaaacg

SEQ ID NO: 188619 - DNA, 130 bp, Arabidopsis thaliana landsberg
atgtctatgaacaacaccaacggtctcgccttgaagatcatagggatgcttgtggattctgaccgcgaagagctctcacattatctgccatggtacatggggcttaaatatagcgctgcccgggatggag

SEQ ID NO: 188620 - DNA, 215 bp, Arabidopsis thaliana landsberg
atgaagcaagaaaaagagaaagacatttgtcggggaatttatgtaagaaaccgtcaatataaagcaagaacgtcaaaaaagttgattttgcgcgttttcgtttaaagacctttgagaagaaagaaccacttggaggacacgaaacctataagaaaaataaaagcttcaatgtgaagaggaagaggaaaagagctatttttataaattacttttaa

SEQ ID NO: 188621 - DNA, 721 bp, Arabidopsis thaliana landsberg
gaaagaaagaaacagatctgtccctacaactgctcagccacgactcacttttttcacttatccggtgacgacatccatctctgatcattcgcctccggcgatgttaattcgggtcagtgagctaccgatcattccgttgaagcggcggcagcaagcttctcgcaaaatcctaatcctcaagttgggcccttcctctgtgctaggcccattatctgctggcccattattgttttcccctcagcccacaaaacgttttaagttttggacccttacattactgtggcccaggtctgttctatttcttattttgtcaaaccctactctattgtgtttcaactttgctgagattggttatggacgcctcccttactctgttttattaccaatagttagtttagacaaaccccatctattgatcctggtggatgaaacttgtagtgttctagagctttttccagaaacctttttaccatctaaaaaacccttgttgcaaccttccttttcatttgagagaaatttcgcaagacctccgtcctctctgatgcgaaacagtgtatatttcttaatgtgctccattgatggtgcatgcattgatttggggctatccaaggtcatcgacactttttcaacgtcactatgcctcttttggaatgagaccattcaacaatctcccggaatccttgtggatttgctttcgactcaccatactgtatgcacgtga

SEQ ID NO: 188622 - DNA, 285 bp, Arabidopsis thaliana landsberg
atcattgttctacagatacctgtaagttcaagtgtctccatttggtgatttacaattttgtctagaaaattggtttcgctagttctaatacatgataatttagaaagagaaccaaacaaatcatggaattaaaaagctgattcttttcttcctttcagaatgtcacattggatctgatggttaaacaaggggcttctcctggtaatcaaactcaatacgtctttgcagtgaacgctgacaaaactccatgctttactgcctccaatcttgaacggttgaagtctg

SEQ ID NO: 188623 - DNA, 2428 bp, Arabidopsis thaliana landsberg
atggagaagcaattgagcatcaatggtgagttcaacagtaggtttcatgtcattgaagagccagcaaaataatcgaaatttctgggatttggctataatgagagggaggcagttggctccgtcaatggcagcggcggaggtggtggtcgcgacggcgagaaaaaaaataaaagagtgagtgtaagctaaaaggggtgaaaattataaaacactatcacctataattacctgtttttgggagtacattgaaatgttcctaaaatcacaaaaacatacactttaaagtgctaattccataattgttccaactttagatatgacaaagaattaggaaaataaaaccaaaaatagtcttaaaatgattcagtagacgtgactcgtaggcttcaaaagaagacagaatcgcaaagtacagtgtggttctaatagtgacgaaaataattatatatatattcgttattattaaaatcacattgcattttattcgcaattaaaccgcatgtctctatccaaagctctagatttcaaatgatgattgttctgtatggtgtggttgcaaccctaatatctatacaaaaccgccctacaattcttcacaattatctagcacgtcttcattggtaagttattttctctttctattcttttcataggtgatgatgttaattcattctgctcaacctgcttatatggctttaaaaacatgtatattactgtttcaggaaaaagacatgttattactattttagttacaactagtaaaaacattgaatttaaggtgatatgtggatgttttaataaggttatcctaattggagtataataggtccaaaaaaaggttccaatggaatttaaaaggtccttttggttaaaaagtttatataatatgccgtcaaccaaatatcatcgattataaatgtaaatgtgaaggaggaggaaaccacccactccaattggcattggcctttacctttacgatttatggaaaatacattcgaaaatactaaaattttatgtactattttatatataaacataaagatatacgagaaaggagaaaagaaaacatgaaagcctatagtgttataaaaatttactatcaatctcagtcaataaatgactaaagttccaaaagtttttctgttgctttattatctttttatcttcttaatatgaaccgatggacaacgagaatgcccccatgagtttctttgactgtgatgatttcacttggatatgcacatgttataataataggttgtctctgaatcgtacgacggtaacattagtagttgtaataattatagtatattatttaaactagaaagcaaaacaaaacagaaaaaaaacaaagaaaaagtaagagtttaaatgccaaatgagtgctaaccgttggatggagaagacggttgtcttctgtgctctgcaactccaattggtaagaatcatttgaaaactactctctttgttttctttttctttgtgtactttgtttattgatatttaggttttatttattgctttcttcaattatttcttgtttgatcaataattgtgagtttaggtttcgtagacatggtcatgaccaggtcaccgtgacctgaagctattggtttggtcgtttctatttcagtcttcttccacatatagctactatatatacatatatatatatatatatataattttgatcaataataaaaaaatacatgttgcattataatgatttaatttctagttaagagaaaaagaagttctatctaagagtgtttaattttttaaagtctttaaaaacaaatgttgcattaatagtaaacgcaagtgacatatgaatttcaacaatatacatatatattatcttgcaaggagagagttggaattttggtatctaaatttgtgtatgaaaattgtcatttcattttgtagaacaacctaattaaaggataataatcgataggttgaactgaaatactgaagatggccaatactttatcaaaacaaatgatggccaaggcaaacctttggtaacaacgtaaagaatatatgatttcgaatgtttgataatgattctacagttataaaatgttcaatagttttcatgttcttaatcaaactaagatagtatatccatgtaaaaataccttaaacttattaacaaaaagggaaatattttttaaaaaaaattacaaaagaaaaccatttcaacaacctgataccaaagtatatttcatgaaatataggagagagactagggtatgcttgtacggataatgaataaagttttatatgcagtttgtctatatgaaatgaatggtgataaatagttgttgaaaactttaacaacaagtacgagaaaacaagacatcatcaccataaatatgcgaaaaaatcgggaaaacgtcttcgatcggaaccagaaaagatttaa

SEQ ID NO: 188624 - DNA, 524 bp, Arabidopsis thaliana landsberg
atgctcacagacacgcagcgggcggcgctgaccgcgcggctgcgccgtggccgggtgccgtcggtgaacgagatcccgcgccgccccgcggaccaagccgatcttccgctgtcctacggccaggagcagctgtggttcctggaccggttcgcgcccgggctggcggcctacaacatcccgctggcgctgagcctgaccggtccgctcggcgccgcggcgctgaaccgggcgctcgacgccctggtggccaggcacgaagcgctgcgcacccggctggtgcccgacgactcgggccgtccggtgcaggtgatcagcgcaccgggtccggtgcccctggacacggtggatctgtccggcctggactccggcaagcgcgagatccggctgcgggagttcatcgacgccgaggccattcagccgttctccctggccgacggcccgttgctgcaggcctgcctgctgcggctggacgcccaggaccacgttctgctggtggtggtgcaccacgccgtgtttgatggctg

SEQ ID NO: 188625 - DNA, 145 bp, Arabidopsis thaliana landsberg
atgataatttgtcggactcgcactgtcgaatccgataattatgatgcgtcgctcgtacatgcaaatgcactcttcattctgatgtaattctcagtcttatcgtaggagtaaagaagataaggcattgattgatgatgtttcttag

SEQ ID NO: 188626 - DNA, 88 bp, Arabidopsis thaliana landsberg
atgtcacaaccaaaaacaagtggaagaacttttggattcctgaaaccagttatgcggctgtgtatgtgctttgacgtggcggcggaag

SEQ ID NO: 188627 - DNA, 688 bp, Arabidopsis thaliana landsberg
cgctccaacggggggcgcgtcgggcgtcgacctcgcgtttgaaacgaaggctagcgccatctccccgcgacacgccaatcccgagcaagtggacgacgccagtgcactcgtggagagcttgcagaacgtcgccctcatacctgagacgacggtgcaatcagtccccgacgtgactatgtcgctgctcgtcgaccgaaaggtaccgaccgattcccatcctacatcattaggactcagcctcaacccgcctagcgaccttgctttggcgggcgctctcgtaaaggcgagtccaaaccctctggggtttcgcatgcggtcgccttgggaccggctgacggacgtctcgacctacgggccctctgggtccgaggaagacgacgagcccagcatctgctgggatttctctggacttggcaaccccagtgccatgcgggacttcatgaccgcatgtgactactgcctctccgactgttccgacggtagccgcagtctcggcgacgaggactgcggcccaagccgcgaatgtttccacatcgatctagggggtccctccgaaggcaatcatctcggcatgccggaggacggtgatctccctaggccggtgccccgcgttgacatcccacgggagccagctgtggtccccgttcaggcggggggccatgacccacagctcgagccaatccgcggg

SEQ ID NO: 188628 - DNA, 430 bp, Arabidopsis thaliana landsberg
atgaggaaaagaactcctctgatactgaaaacgatagtgaaggaaatttctttgctttggaagcatttggtaagatctttgaaggcttagcagattgtttgacttctcccagaaagacatcagaggtaattaaaaaaccggaaaaaaaaccctcgtgttaagtagtgtactgcaattggattatttaacacagctttcggtttatttgattttcaggatctggaactgtgtaggaatgtaataatgatcttggctctagcagcttcttcaggaaactctggctatgaactactctcaagtcacaagctacctcaagacagcagcttcttaatgctgatacttcatcttttagttgctgaaatagactcggaatcaacagaatttcatccaaaagcggaaatcttcaaagcaaggtttattctacaccgag

SEQ ID NO: 188629 - DNA, 241 bp, Arabidopsis thaliana landsberg
atgcagcaagattttgaagataaaaaacacgaagtcataattgagagcttagaaagcaaaataaaagaccaatcagctgctcttgaaaagaagaacttcgagcttcaggcaaacgaaggcttattggcggaagctgaagctaaaatagcagaattaaatacgaagcttctctctgagtcagaaagcttcgaacaagaaaagcagaagcttaatgcaaaatttgagaccgaggcccagaaaa

SEQ ID NO: 188630 - DNA, 224 bp, Arabidopsis thaliana landsberg
ctctaagaacagatgagcaactggaaaaagaactaatgcatgctgcagaggagagagagcacagatccgtgacagtaccaatacaggctacatgtacatcaccgaacgaatcaattagatcaccaacacgatccaataccacaagtagtaaggctaccagcccaacgctgaagaaactcaatgctatcatcggtacacagccaacggcagttcccattctaagg

SEQ ID NO: 188631 - DNA, 176 bp, Arabidopsis thaliana landsberg
atgcaacaagatctggaagaagagaaaaacaaagccgtcattcaagatttggctgaaaaagttgaaaatcacgaagccaatctgaaaaagaaagacttcacaatccaagaccttgaaatcatggtcaaagagcacgaaggtgcattagaaaagaaggattttgttattcagaccat

SEQ ID NO: 188632 - DNA, 560 bp, Arabidopsis thaliana landsberg
atgatgatagataaaacagcagacttgattctggaaattcgacttggcattgtgtattctagaacaaataaaatgtgtcgaaatgaactcaaaggtagcttaaagactcatcgttattcataacactacaatccgaacatgagcaatctatgagacctagtagtacctaaacgaacatatccgtttgtataaacaaatatagagacagagcagagtcactacttgcagcagaaacgataacgataaatcgttgagcagcatgcattaaagaagaaaaaggaagaagtaacgatgagcatctttgggagattaaaacaatttgactaccttcataaggagattgagtaggaccaagaatcataacattgaaatatctcatattttcctctgatggagacgcacttatcccaggagctgcaatttcgaaagatatacaacttagaattaaaatcaatagttccagctaccaaaaccaactgtttgagctaaaatcaactgtgagaaatcaacaaggatcgaatgaagtgatgaaattaccaggttcactaagcagacgttga

SEQ ID NO: 188633 - DNA, 64 bp, Arabidopsis thaliana landsberg
tttagcgcagatcaaccaaagtgtagaattcgataatgaaagagaagaagaggaagcgaactaa

SEQ ID NO: 188634 - DNA, 585 bp, Arabidopsis thaliana landsberg
atgatcttcaaaaaagaggtgtctaaagaagatgtcgagtgtgtggaaacattactgatgatgagtaactcaaagccaacgcgggaggagtataacaaacttcagttatgtatacttcgaagaaacaaaagctcgacgattactactccttctaccgtcatggagtctaaatcccatattcacgaccactcattaagagaatctccaacaagacgcagtagaaacagacatgatctccctcctatgtctcctcccatggaacaacgaaaatctaagaaggcaaaacgcagtacggatgcttcttcttccaagacaagagagccgacgccagggtggcttatcagcttgatgagaagcaagaaccgtggagacgttgaagacaattcgaagaagatcatagataaagaattattccaaaccgatgtcgatccacaccaaagtcgtctctcaatacctgtcagccagatcgtggagttggaattcttgaaccacgaggaaaaaagggccatagaagaagatgccaatagggttcgcaaagaaagagtagacgcgatactcgtggattctcatctaagggaatttccg

SEQ ID NO: 188635 - DNA, 330 bp, Arabidopsis thaliana landsberg
atggtcatcgacccgcgtggcgcgcttgcgcgccgccgtgcgcgcatcggcggcgggctgctgcccgtcttcaggcccgctgtcgagctcggccgcttgcggcaggccggcctgctggggcgggtacagccacaacggcacgggccacggcgcgcgctcactgcgcgggaaatcgacaaggctgccgggctcgtgcaacgcctgccgcacggcgtgttccagcgcggcctcgtcgcgccgcaatgcggccggctccgggcgcaggcgcagatgcgcctcgaccaaccgccgatagcgggggcgcaaggccgggtagcgctgcagcaaagc

SEQ ID NO: 188636 - DNA, 775 bp, Arabidopsis thaliana landsberg
  unsure (1)..(775): unsure at all n locations
atggagaatggagttattgctggtaaaggctttgcggagtttaaatcagagattgcggttttaacaaaggttaggcatcgtcatttggttacgcttcttggttactgtttggatggcaatgagaagttacttgtgtatgagtatatgcctcaagggacattgagtaggcatttgtttgagtggtcagaggaagcacttaagcctctgttgtggaaacagagattgactttagctttggatgttgctagaggtgtggagtatctccatggattagctcaccagagctttatacacagggatcttaagccttctaacattcttcttggggatgatatgagggcgaaagttgcagactttggactcgttcgtctcgctcctnnnnnnnnnnnnnnnnnnnnnnnnnnnnnnnnnggaacatttggttacttggcacccgaatacgcaggttagtttgtttctttatgatgatatgattcagtttgtactaaagattgtttattgatgatgattgtgatcttgtttgttgcagtaacgggtcgagtgacaacgaaggtcgatgtatacagcttcggggtaatcctaatggaactcataacggaaagaaaatctctagacgaatcgcaaccagaagaaagcattcacttggtctcttggttcaaacggatgtacatcaacaaagaagcatcattcaagaaagcgatcgacacgacaatagacctagacgaagaaaccttagccagcgttcacactgttgctgaactagcaggccattgct

SEQ ID NO: 188637 - DNA, 904 bp, Arabidopsis thaliana landsberg
atggcgaaatcagagaaacacaaattagctcaaaccttaatcgattcaataaacgagatcgcttcaatttccgattccgttacaccgatgaagaagcactgcgctaacctctcccggcgattgtcgcttcttcttcctatgttggaagagatcagagacaatcaggaatcatcttcggaagtagtgaatgctttgttatctgttaagcaatcgcttcttcatgctaaggatttgctttctttcgttagccatgttagcaaaatttacctggtgtgtgagtatttcgattctaaacatacttagatctgagtgtagttgaaatcgaaatcgaattatgaatctgattgattcctgtaggtgttggagagagatcaagtgatggtgaaatttcagaaagtgacttctctattggaacaagctttaagtataatcccttatgagaatctggatatttcagatgaacttagagaacaggtactactaaaatcattctctgctctgcttttgttcttgttcatgaaacttcagcttttcagattcatttcttgttgttgtaggtggagcttgttttagttcagttacgaagatcgataggaaaaggcggtggcgatgtgtatgatgatgagttgtataaggatgttctatctctttatagtggtagaggtagtgtaatggagtctgagatggttaggagagtggcggagaagcttcagttgatgactataactgaccttacgcaagagtcattggctttacttgatatggttagttctagtggtggtgatgatcctggtgaaagttttgagaagatgtctatggttcttaagaagattaaggactttgtgcaaacttataatcctaacttggatgatgctacattgagactgaaatcatcgcttccgaa

SEQ ID NO: 188638 - DNA, 165 bp, Arabidopsis thaliana landsberg
atggtggcattctcatgttgtctctacgaaggtggaagagctgagaaatctgaaatggatgtgattagacagaaaagttggaaaggaaagttcaaacgacgagatcgcgtccctaggcccgaccttaaccgagttaaaaaaaaatgtccccttaccccattagag

SEQ ID NO: 188639 - DNA, 132 bp, Arabidopsis thaliana landsberg
ggtaaaaccacctcccatgtggataggcaccttgcccctcagatcgggcaatgcaaaatttacacggccatctccgccaaaggttgtccccaaaagcgaaaacaaagcctggttcgtgttaatggccaatag

SEQ ID NO: 188640 - DNA, 409 bp, Arabidopsis thaliana landsberg
atgatgtctcttgatctgtatcgatataagctcattctacgtgcgtcttatggtgcttcgcctgaggttaaattactcttctttgatggattggctcaatgtcttattggtaaaacggctgctgagttttttgcagaagttccaaaggtacgtagtaaagtttgaatttttaatatttaaactttctaagaatttcaatatttgcccacaataagtataagaaaacttgatgagtttaatgttattctatttgtttgaggagtcggacccttctattttacccgaggttcttgctgatttaatgggaaaaaccatgttattcaagttatccattggtaccgataatttgaagagtacgaaggctgcgtatgttgtcgagaaatttttgggaaaaaacggatatggttga

SEQ ID NO: 188641 - DNA, 103 bp, Arabidopsis thaliana landsberg
aaacttgaaagcggagagtttggttgttcgaagaagagtgtataaactatacaacaaattcttcagcataataattgaatcttcatcacaaaaaggtgcttga

SEQ ID NO: 188642 - DNA, 628 bp, Arabidopsis thaliana landsberg
atgtttctgacaattacaggtgagagagagagagaaaagataaatgatccatcacagtcacgacaaacgatcgacggcaacctttggcggtgatagcgggcttgttgcgccggagtatcatcttggacttccagttgactactcgccgtgatgttcagggtaagtttcatcaatgctcttcttatatgtctctctcagtcgttactctgttaaaagccatataataaaaagaccctataataaatcgtagacttggtgagtaatgagttagatggtcggtttttatagattaactctctgattcatccatatgtagctcgtgtttcttcagtttttatgattttttgtcattgcatacttgttagtaattttggaatgttgatttgataaaactgattccaactccacgaatactggtttatcaaaactgtgattgtatcatcgtagacacaacaaataaaaaactttttactttgaacatttcaaatgctaactttttccgacaaattaattacatggtttgttaaagattcccaactcttagttttttctcgcagtcgcaggttttcttaccaaggaaggttacgttgacccgaataagttcattagcatagacatctttcctcac

SEQ ID NO: 188643 - DNA, 413 bp, Arabidopsis thaliana landsberg
atgcaacgtttctgtataaagacatctagcattgagatagatccacttgctgcgccttccgctttcgtttcattcctgatgtcggtgaggtatatatatggactgatgccaaaacgtgtcttgttaaatgtttgctcatttggctatcaaagtctcttcataaaggttgtaatattattattatgtacttctttcttcattttacttttagtgagcatcttttttctttcaggaccttacattccttacattttggcgatagcaacctcgatagatattttgcgaggatggttttctctacacttcttgattcttcttccaacctttcatcccttgacctctctgaaaacaatgtgggtaccaccgtggttcttcctgttcaaattgatgtatggcttgcatttcatggctga

SEQ ID NO: 188644 - DNA, 126 bp, Arabidopsis thaliana landsberg
attgccccgagcgaggcgcaaagcctcatggccgtcatagagggccagcgcaaggcaatcgaaatgggcgacctcgaagagcgcatcgccaaactcgaagcggtcacgagcgggacacggaattga

SEQ ID NO: 188645 - DNA, 329 bp, Arabidopsis thaliana landsberg
agaagagcatgttgctcgaaagaagtggaaattttttgctgcggctttagagtccttctataaacaaaagtcgaggattaaatggctcaaagaaggcgacgctaacacgaggttttttcacagagtggttattgctcatcacgccaaaaaccttatcaagtttctcaaaggagaggatggagttcgggttgataatgtggataaagtgaaaggtatgattgttgattattattattctgatctattgggctccgatggaaatcacactaccccctattctgtggatagaattaacggacttcatccgtttcgctgtgatgatgctttaa

SEQ ID NO: 188646 - DNA, 80 bp, Arabidopsis thaliana landsberg
tgaatgatggatgtgactcggaaacttttgtgatatttgataaagattctgaagaaatcaaaggaacaactatagaaagc

SEQ ID NO: 188647 - DNA, 66 bp, Arabidopsis thaliana landsberg
ttttttctttatttgattttcaaaaaaaaaatcaacttgacgccttgacggaagaaaatggaaaag

SEQ ID NO: 188648 - DNA, 173 bp, Arabidopsis thaliana landsberg
atggggcgcggtttcccgctccacggagatcgtcgcgcggacgcgcgctccaccgagttcgtcgccccagcgaggcccaagaagcagagcttccgggagctccttgtccggccgcagcctgcgcgccacgagccggctagtttggttaccgacgaggcgaaagccgaatccag

SEQ ID NO: 188649 - DNA, 287 bp, Arabidopsis thaliana landsberg
atgaatttgttggagccatttatcgcatttaggcgagttcttctccaaatcttgggatgtgagaaatgtaccatgcaacatcttttgcagtctgcttcattacttcgcaaggtatgtataaagtgaaaagctacaatttcccttgtagtaaaatgcagaggaccaagacattatcttgttgctttcagggaacaaggttttctcatgcagctgcgtctctgcatgagttcaagtttctttgtgcaagaagtaatggacaacaacccgttccagactggcttggaaag

SEQ ID NO: 188650 - DNA, 508 bp, Arabidopsis thaliana landsberg
atgcatgtaccccggtatgggggcgcccatgccatcacctttgggatggcggccatggttcattggaatgaacactggcatacgggcctgcaggcctttaacccggtacgggtaaaatatgatggcctgggagatgatgtgatacctacggtgtaccgcctgggtattggttaccagccttcagaagtgtttttattgtctgctgaaatagcaaagacaggagatcttccggcggaggcaacttttgcgtttcgttatcgcatgattcaatatctggggcttatggcaggaatggctaccggggaagaaaaactttttctgggcattaccctttacttgaaacaaattcagatcatatttaccggtacttatcattcacgactgggtgttagccccgcagcaggatttatttatgaagatgattaaatgtgatatcaggtattttgcaggcgtcgtcttgttgatggcggccatgcactctaacaggaagcagcagccgggtgaccag

SEQ ID NO: 188651 - DNA, 200 bp, Arabidopsis thaliana landsberg
gtattgtggtaagaaccattgtaccgaagaaacctgtgaacgagaacattagtgaaagcgaaacaatgaagaagatggaggaaacggtagagcctatggttgccttaagtagaccaccaccattttcaccatttgtcggtccagtgctcatgtattccctgcttcaatcatggacgtctagccgcgacgaagacggctag

SEQ ID NO: 188652 - DNA, 130 bp, Arabidopsis thaliana landsberg
attacttaatatgatgcaggttcaaaagatggttgcgaagtcgccaaacttgtttcttgaaagtaagcttaatggtgtcaaacatggtacaatgaggtcatcacatcagcttgcaatggcggcttcaaag

SEQ ID NO: 188653 - DNA, 275 bp, Arabidopsis thaliana landsberg
atgacacatacccgagtcatctcgacctggaccgagttaactcgcgacttagctatttacttgctcttcacgtttttcgcaatcaaagtcttcaaatttctcttctcctgtaatcgaacctctgaaatatcatcgttttcgatggcgactcatcccgaagctctccgacgagagcgaattctcaacagtaaactctacttcgacgttcctctttcaaaggtttcgattatctattcatcgtcttatgatatctcgttcatgggtattgagaaatt

SEQ ID NO: 188654 - DNA, 155 bp, Arabidopsis thaliana landsberg
atggcaaagttttttcaatatattgaagacggcttaaaaaacgagaagatcactgaagccgatgcgggtcgggttattgtgtcattcgtagcagaacgcgatggaagtctgacagacatcaaaatagcgcgaagtgttggcgcaaaaagaaatgc

SEQ ID NO: 188655 - DNA, 288 bp, Arabidopsis thaliana landsberg
atccttcaagagcctcttccacttgctgcattatatcagcatatctcggacttttttgtagctttgaaacactatcgagatcatcgtaggtaagggtatttaattttgtcatgtccaaaccaatatcttcaagagttgcctacaacaaaacagatccaacgtatttagtttgcaagtttcaagcacagaccaaagcagagaggatttaaacaaatacagcgaaaaaaggaagaagcaatatctaattatctccgaaaccctataattgaaattgacgatgaaacttaa

SEQ ID NO: 188656 - DNA, 341 bp, Arabidopsis thaliana landsberg
tatctcattacactcttctgttattcgcccaatacagtcattgtccacgtcatcctatttccctctgaagccgccaaatatcaaaaaacacaaaacctttacccgaagcaaagtagctgcacacttgccatttataaggcatgtttcttcatctaaagcaaagtattttcgagttcttgagccaaaaatatcaaacaatgtctaaagaagctgagatgtcgatcgcggtgtcggctttgttccctggttttagattctctcctaccgatgttgaacttatctcgtactatcttcgtcgtaaaatcgatggtgatgagaactctgttgctgtgattgctgag

SEQ ID NO: 188657 - DNA, 623 bp, Arabidopsis thaliana landsberg
atgaccgatcccaacacaagactacactacgacaacatgatgtatgctcaagttgacgcagttgctttcgcggctgcgaaactagggtaccgtaacatagaagttagggttgcggaaacagggtggccttcaaaaggagatgtcggagagattggagcgtctcctgtgaatgctgccacgtataaccggaatcttatgatgaggcaattcgccggagaaggaactccagcgagacggaatgcaagactcgatgtttatatatttgcgttgttcaatgaagatatgaaaccaggtcctacttcggagaaaaactacggtatattccaaccagatggatcattagcttacaatttgggattctctacaatgtcgacaacgacggcaaattcagaatctgtcacttattcatcctctgccactaaggtacgattagtattatgtggtgaattttgttagaatttggaattattggggccacgacgagaataagtttgtgaaaggactagatgtgcaaaatgaattaattctctgttttcttcttctttcaggcaaagaggagcttggagtattggacaattttgatattggcgatggttcaagttgtaatgttgagactattttag

SEQ ID NO: 188658 - DNA, 296 bp, Arabidopsis thaliana landsberg
cttggccggaagcttatggagttccaacattgattcctcctgtcattgagccgcctccacctaaagtatcaggtaagttccggagatttatattgtgttattgcagtctcttactttttctgacaccatgtttgtgttatcttgtaaaaggaaaagggaaagagaaagataccgaggatgatcatcttgaagaagatgaagatggtgacgatgatgaggaggaagaagatgatgatgttgatgatgacgaggaagacgatgatgatgttgatgatgacgaggacgatgagtggtaa

SEQ ID NO: 188659 - DNA, 862 bp, Arabidopsis thaliana landsberg
agttctaactcctcctgatgctgctgatgcttcctccgaatattttctgggaggattaggccaagataagtcaaatgatcatgtggagcttccatctcctcttcagtgctcagtgaaagtcaatgttccaggaactgagccaattttgatgaacatgcttgactgccagatcatccctctgggccataagtacagattgatgatcggttgcaatcctgaagaatacagtgcagcttttcttccgctaaacgaacaaggaggaggaggcgaattcgttgcgctcctcgactgcactgatttgtttttggtgttaagaagtactgaaatgagatggattcggcttgagaaaccctcaactgcttcatgtaaggagttattcacttttagaggaaggttctatgcaactttctttaatggggacaagttcgttatcgatccttcttcgctggaagcgactcccctaacacctcatatcgactccaactttctggttccatctggcaatgaggagcttttcctggttaagacagacttcctaagatgtagagtaagtaggctagatgaggaggctgctgaatgggttgaggtcagcgatttgggagaccgtgttttgtttcttggtggacacctggggaatttctactgctccgctaaggagcttcctcatggttgtggtttgactggggactcgattttgttcaccgttgggtcacgcaatgtaacttacccctataaatatggagtacatacaaataaaagaaaggctgaagacaatatcaattgttggagatcctcaagggagaatcgtgtgttgttccgcaacagatatgatccggtcctgtctttccgggttgaacgctag

SEQ ID NO: 188660 - DNA, 250 bp, Arabidopsis thaliana landsberg
cagggcaggtcgtccacccactaggaaactctctgaccgcaaggcttacaaacgtcagaaaaatacagcgaccaatgctacaacactagattttcttggtaaaataagttcaattgatcagaattgttctttgacaggattgatttttcccctcttcttttatttatgtttttttttgaaaaacttcttattggttcagatgatgggcatgaagagctactagctgctgttaactcggctatcaactttg

SEQ ID NO: 188661 - DNA, 407 bp, Arabidopsis thaliana landsberg
aaaaggttacatcagagcaagtgtcggtggctctgttcactttttggcgctattcgacgagaaagacaatggatttgtagatactactcatcggagttttagttctcttatccgttccagttctcacgtaagagggcttatctccaccaattgtttaaataaaggtcttggtgtgcgatgttctgtttcgcttgatagggaaacacctttaattgatacctactcctctcaccggagtatgtcttcttttcgttgacctaatgttttcaccttttttgtatattgtgttgtttattggtttagtgattgatacttagtttggagaaatgtcaatgtgtttgctcgtttacagatttcttcactcgggcgaaacaagtgaagagaattgagatcaatgatcaacacag

SEQ ID NO: 188662 - DNA, 1236 bp, Arabidopsis thaliana landsberg
atgcttggaaagatgtgcaagtattttgcattgctaagagtaaaacaaaagctattgtggctagcgaaagtatcacaatcaaggggaaacaagttatggaggccgaatcttcaaaagttgaaaacaaaaagcagaagatagtctcaaaagataaagaggttagttattctcatcttattactgaatgtgattatacttttaataaaatctgtacatttaaatgattctaggttgataaggatgagaaatatagctttgcggatattctgaaggtgatgaaaacactgaatgagactatttcaaacgtaagcaagaatttgagttgtaggatcgatgctatgaagactatttaaaagtctaactagtgatcaacaaagtattttgaagtggaaatacaagctttaaaattgttaaaaacataaaacataaggcataaaaattaaagtttatgaagtacaagtcttacgattgtgtcctacttgattccaatactccatctaaggtaaagtaaatttttaggttaatgtgaaatcataaatagaagtcgattttaaacattatacaactagttaaactaaaaacatacctttatccgaaaatgtttgtttaatgattcagcaacatgcaatggcaatactttgggtccaactccacctttatccgaaaatgtttggaaataaacacacgaacatgaaactttgggtcatctctcaatggcttagctcgtactctccatgtacacctttttacccatcacttgacaattagttgatatggtgtcgatttatacacgaagtaataaaacttctgtaccacgatgagtatctttaatcgtgcttccaagtgctctcttgtttcgtaatgtgagacccaaaccccttttaggcccattaaaagcccaacctcctcaaataaaacctagacgataattatgtgtatatatatgtacgtattgtcttcctcatcaaccaggccgcaaccatttacgtcttcatcatcaccaccatcgttctaagttttgagaaacagatgcaaatcgtgattcttagccaccacaattcaccattgttgagttcggagctgttgtttgtgtgtgtaactgtgtctttaatcgagaataagtcaggagaaaggagtcgatcgtcgcgaaccataatgtcgagtcgtcgtcgtcaccggttgtcaccggctcattggaaaaagagaaaggagatatcagttcaaatagggatattg

SEQ ID NO: 188663 - DNA, 98 bp, Arabidopsis thaliana landsberg
attttcgaaaagaaaaaacgaaaaagcaatttctgagcgtggaggacaaggcaaaattcggtgtgcaaggcactggatattgggacccttgtttcctc

SEQ ID NO: 188664 - DNA, 69 bp, Arabidopsis thaliana landsberg
cggtcacttcgttgtgaaaattctggcgtccgcgaccagacgcctcagaagatggcgagtggccgataa

SEQ ID NO: 188665 - DNA, 314 bp, Arabidopsis thaliana landsberg
atggagaaagacttgcgcgaagcgctgccacgcaagcagctttatttggtctatcagccccaagtcagctatcgggaccagcgcgtggtcggtgtcaaggccctgttgcgctggcagcacccggagctgggcatggttccgccgaaccagttcattcccctggccgaacagaacggcagcatcatcgccatcggcgaatgggtactcgaccaggcgtgccgacaactgcgtgaatggcacgacctgggcttctgcgaactgagtatggcggtcaacctgtcgaccgtgcaaatgcaccacaccaaactgcccgg

SEQ ID NO: 188666 - DNA, 303 bp, Arabidopsis thaliana landsberg
gctggaacttatgtgaaagaggatgtatggcacgcgctgattgttgtaataacaaatgcccctgatctccatgggtacactgtcagggctttgtatagagcattacatacatcttttgaacaggtagacatttctttggttagacatttcctaaatttgaatatcttgtaacttaggagtaagagggtcattatcatgtttgggcaggaaactcttgtgcgcgttgcaatatggtgcataggagaatatgctgatctgttggttaacaatgctggaatgcttgacttagaagatccaataacg

SEQ ID NO: 188667 - DNA, 341 bp, Arabidopsis thaliana landsberg
atggctacgtttctttgtgacgaaagcttcatgtccagctacggtcataaacacacaggtctgtttgccacatgtacactttgattccaaattccttgctgagattctacaaaagaaacggctcgctaaaagatgctcacaaggtgtttgacgaaatgcctgatccagatgtgatataatcagggaatgaagatattgaaattctggtttttacgttggaggaagaagaagactccctctgtttgtttcttctaaagaagctacagagatctgatgaatccaacggtagccattggatcgctcttcaagatgctttaagaaaccggttcttcatccgttaa

SEQ ID NO: 188668 - DNA, 785 bp, Arabidopsis thaliana landsberg
atgggtggaaatggcattagagctttggttggagtgattgcatctttgggtttgattgtgtttcttcttgtcggtatcttagcaaactctgcaccaagtgttccatcatcagaaaatgtcaagactttgcggtttagtggtaaggatgtgaatctgtttcatgtaagcaagcgaaaagttcctaatggacctgatcctatccacaacaggttcttatcccttctctctcgaattttcaatcttttacttttgcttctttgagtttgctaccagagatcaagcgttttgagaactttgtcatgaagtttgtttaaagttcgtttatacaaaaactaatcatccaatattagtgtttcctctgttcaagtttttttgttgtcactgtatacacagataccgataatcactggtttctaaaaagattattagcatgcagaattcttgttctttccttcttttcagtgtcactatacattttgtgtacattaaagagctcgtcttttgaaagcagacaatgttatcatgttttagtaaaagcttcttctttatctaattttaaagccttagagaagaattaaaggcacttgtgaagaactttgaccactttagttaaagtttattactgcagaaagaactctactttaataagcttttgtttcaaatctatttcttcaggaaagcagaaacttcgagacggccaccaagagtatgatattgactgtaatgtttatgtcatgcgggcttcgttcattttcgggtttttctaccgtctcaagacacagtga

SEQ ID NO: 188669 - DNA, 829 bp, Arabidopsis thaliana landsberg
atgcccgctgagctgcgctgtcatggagcacatgtgcacccaagtacggcaaagactgataactgcgccatggatacagtcaacacaccccaggcacagccaaattcagtagcacagccagcactggcctctgttattagctcagcgatgcccaggcatgattcagcgccagatgagcgacatgtatccattgctccgggcacccataatgagcaggacacctcaccagtgggtaagacccaatggcctcatactcataccaacacccgtgcttctgctcaggcgcacagcaagccaacacagcaacctaggcaagttacaattgacagcctctggcggcgggcaacagcctccaagcatgaatgcccacttactgagcaggaaaccaaacagcctaagcgccctgctaattatgcctgccatgacagcacccctgacgatggtgatgcacaaatttctgtgttgacgtggaatgccatggggattaccaccgtacaagaggagctgaccatgatgtgcaccgaagagaagcctgacgtggtcgtgctgagtgagaccaagcttatcccgcagcagcatggcaggcgctggctgaaggacatgctgccggagtatcgcttgtactacagctcccaacgtctgccaatgaagtaccagcaccgacagcactatagtcgttgtggttctggcggtgtgctgctggcagtccgcaatacactagctacacgttgcactattgtgcaagagatgggttccccggcagagctgacaggctgctgtctgtccgtcaagatcaccccggcgcatggcacaagtctccttgtctccg

SEQ ID NO: 188670 - DNA, 67 bp, Arabidopsis thaliana landsberg
atgcagaaccagaaacattcacatatactcactgccataacaattgttctcttgtttgcgatggccg

SEQ ID NO: 188671 - DNA, 435 bp, Arabidopsis thaliana landsberg
attccagcgatggagtcctatgagtacaggtaactcaatatgcataatcttgagttatggccagttcttctgttctcagttcttaacattgtctttctttgtgtcgttaattttctttttgggaagatatttattcttagagcttattttctttcaggggtaaagacaccattgagtccaacagttcggggatcaccgcgtaggccatttagttttggaagcagcatccagctcatggaatcttcattgtactcatcgagtagctgcgttatgcatagttgttcttctgatagcttaggggatatacaatatgacagtactggttccttctggtcctcccctcgcaggagtcaaatgcgtctccaaagccgaagatcgcaatctcgagaagatcttagttcatcgctcgctgattcacacatgctcaaaatgtag

SEQ ID NO: 188672 - DNA, 132 bp, Arabidopsis thaliana landsberg
ggcaaagacaactccagcaagcaaagaagcatcaatatgtattttatacacacactctgtatttcacctcctaacgaacatgttctccgagaattgagtgaatgcaacgatgaccagacaaacttcctctag

SEQ ID NO: 188673 - DNA, 142 bp, Arabidopsis thaliana landsberg
atgaattggaagagctctcatcctttgcgcattgtggattgcgctgctattgccagcttgggcttgaccgctgtcattgctattttgagttttggaccgcagatggctttgtataacattctcagttcgctagagtcccgtg

SEQ ID NO: 188674 - DNA, 281 bp, Arabidopsis thaliana landsberg
cgcgggggggatggctatgacgtcgcggccgaagcgctccatcgaataggggccgggcggcgagccggactggccgtggccgcggcggtcgtagcgcacaacgcggaagtgctgcgaccacgctgccacctgatcgtcccacatatgcaaattggggccgagcgagttcgacagcatcagcgccggggcattgtcgggccggtgacctcgacattgacggcagccatcggcatcattttcggcatcggcgtttcctcaggcgagtcaatggcgcacttagg

SEQ ID NO: 188675 - DNA, 156 bp, Arabidopsis thaliana landsberg
atgatcagtcttgtgagccagccgttaaccagcaagccttcaataaaagttgttcctggattgtacaggaaacctattactttaaaagccagagagactgactttaaaaaccgatcaaaaggcgatgaggtcatagaaaacaaaccttcatcaacg

SEQ ID NO: 188676 - DNA, 57 bp, Arabidopsis thaliana landsberg
atgcctttgttaatgacagggctaaccgaaaacaacgagaaagcagatgcaactgag

SEQ ID NO: 188677 - DNA, 534 bp, Arabidopsis thaliana landsberg
atggcgaacgaggtggtggcaactgatatgaggaccatcattatcgtgcggaggtatagagggccaaatggaccgtgtctgccgagccacccgaggcacgacccatttaatagtgcctgggccaacccgatatgagcgtcgtgcggtgcttgggccgtagctgagagtacctagagggggtgaataggtgatcctgtaaaatcaaacactaaatagccacaaacttgattatataaaagttagtgcaagttaatcaagttgttattaagcgatctcttgcgactaaaacaatcacagaagagcaacacaagagacacgcgatttttatctcgtggttcggccaagtaacacttgcctacttccacgttgtggcgtcccaatggacgagggttgcactcaacccctttcaagtgatctgatgatcgacttgaataccacggtctgttccttttgaggtcttttcccgtttgcgaggaatctccacaagttggagcctctcgcccttacaaagttttgatcacaagaagcacaaga

SEQ ID NO: 188678 - DNA, 104 bp, Arabidopsis thaliana landsberg
aaatcgaaaggctagaaaaggaggcaaaggaacgacagggtgtaaactactctcaactgaagctaaatgaagaactcatcgctgaagtaaacagacttaagctg

SEQ ID NO: 188679 - DNA, 182 bp, Arabidopsis thaliana landsberg
atgctcgaggatggtctcgttatgccatcccgcattcctcaggttgacgggctgggaaactacgcgttgtccggaagctaccgagacatgccgaccaaaggcttaaaggtcatcaccttcagtggccttgcgatccggaaaaaagagcaggacgccctgcgccgttctctcgcgaaggcaag

SEQ ID NO: 188680 - DNA, 247 bp, Arabidopsis thaliana landsberg
ttggttgagcagaaacaatgcacttggttttcaggttctacaagaacgaggcgagagtacatctagacatggaagggcttcattttccgtcttgcttttccaggtttgttcaggaaaaagttaattatatacgacaactatgctgggcatttctcatcagtttgttattttttcttcacaggatctagctgtagttgttttactgattctcatcccacttatttcacctaattcatcgaaaggaggg

SEQ ID NO: 188681 - DNA, 583 bp, Arabidopsis thaliana landsberg
atggctaagctttcatatacagatgtcataaaaagactatgtgggctagaggagaacgatcaagcttacatttcttctacgttctttgacgttgagagatatgtgatcgtccatggacaaataatattgcagtttcttacagaatgtcctgacgaatatatcaaaaggtgtccatttgttactggtcttgcaagtaaaatgcaggataggcaccatacaaaatggatcatcaagaagaagagaaaaatgttgcaaaagggagagaatttgaatctaaggagaggcaaggcacctaaggtatccaagatgaaagccatgcaagcaacaacaactcggcttatcaatagaatttggggtgagttttactccatttattctccagaagatccgttggaggagattggtgcagaagaagagtttgaagaggtagaagatgttgaagaggaggatgagaatgaagaagaggacactatacaaaaagctattgaggttcaaaaggctgatacacttaagaaaatccgaggtagttgtaaggaaatggaaataagatgggaaggtgaaattcttggagaaacttgtgctg

SEQ ID NO: 188682 - DNA, 368 bp, Arabidopsis thaliana landsberg
acacacaaaaagaaatcattcgtcgactttattacaaaaccctctcacaacaccatcacttcttcttcgtcttctgtctgagtccaaaatggaagactacagatccagatcgtacggtgacgggagaacatcagaccttcaacaatactctgctcaccgaagatccgacggtccagattcattcagtggtaacggtatgcaagatcttaggtcttacagtacttcctacacagattacccgacccggatacccgaagaccagaacccgaagaaaggaagatcatcttcatcgtcttcttggggatttgtggatccagatttacaaaggaagaagagagttgttagttacagagcttatactgttgaag

SEQ ID NO: 188683 - DNA, 456 bp, Arabidopsis thaliana landsberg
atgccgattcacataggttcatcgatccctttaatggtcgagaagatgctcaccgaaatggtaaaaccctcaaaacatattcctcaacaaactcttaacctttcaacacttgacaatgatccttacaacgaagttatttacaaggcatgttacgttttcaaagccaagaacgttgctgatgatgataaccggcctgaagctttgcttagggaggctttatccgatcttcttgggtattactatccgctttcggggagtttgaagcggcaggaaagtgaccggaagcttcagttgagttgtggcggtgatggaggtggtgtgccgttcacggtagctactgcaaatgtcgagctctcttctttgaagaatctagagaatattgactcggatacggccttgaattttttgcctgtacttcacgtggatattgatggttatcgaccttttgctttgcag

SEQ ID NO: 188684 - DNA, 281 bp, Arabidopsis thaliana landsberg
atgactccgactccggctattttcgaagtcaagcgaaggcccgtctgggatcctgcagctggaagtgaatgcatctggcgatgtctccgcgagaagcccttgtgcatgcaccgcctatcggacagggtactggggtccctccacatcgcgatagccctcaacctcattaataaatccgattgcaaccagagcgagacggacctcgccgcagggttcaagatccgggccattcgatacaccgccaacctgggccacccgcttttcactccagaaggcaaagc

SEQ ID NO: 188685 - DNA, 280 bp, Arabidopsis thaliana landsberg
atgacaccacagtcaccggatgagactcgaagtagtgtcgcaactttcgccgcgtcagaattaccgtgtacagtagcttctggatttgcgggtagcggattttggtctcggacagtacttcagtgatgaagtagaccggcctctagacgggcaatgcgtgcccctcttctcgtctctcgaccacgatcgcggcgctgaccacctgagtggtagcggcgacgtagatcaagagggcttcttgtggcggaactgcccgaattattccgacttaagtgcctaa

SEQ ID NO: 188686 - DNA, 97 bp, Arabidopsis thaliana landsberg
atgaacaagggtggagctcaacagaaaggtcattcgtcaaagcaagctgaaaacatagttttagtaggccggacagggaatggaaaaagtgcgacag

SEQ ID NO: 188687 - DNA, 180 bp, Arabidopsis thaliana landsberg
ctgcgctttgatacgatcacggaaaaaacgctgtacatacagacatcatcaacgcaacaacagcaaaacaaacggaaagctcaaaccattgaaaacacatcgtgcatattggtcctctttgcctttcacaatttcaatcttcacatcacgcgtcacattgtctgcatatgtgtaacatag

SEQ ID NO: 188688 - DNA, 184 bp, Arabidopsis thaliana landsberg
ctggggccgcctcgtcagccgctcagggacttgttccactgacgactcgggcccccacacatcagaaacgctacgtgcacggcccacccaagcccagctgtgtccgtggcggctgtgtcgtaactctgacatgcggacccggggaagtcggcgcctcccaaccactgcatgcacgacgctgtga

SEQ ID NO: 188689 - DNA, 640 bp, Arabidopsis thaliana landsberg
cgaattcaaatcagaatctgaagataatctccgctctgtcgaagccaaattactccggagaagatcgaaaactccaagaaacagcgaaatatactcttcgactggagaggaactttaaatacaagcataaatcacggggtaagaatccgggtagtcgggtcacccagtaactgttacggagctccgggttttgtttagagaagtatgacggagagaaagagagaaggcatttggaggaccgaccgtgagtaatttataaggtggaggaaaatatagagatattaacggcgttagattacttacgacgtgagttgacggagatactttttttctttctctttgagtaaaccttgaaatttggtctcgataagagatggcagggagggcccattggtgtttgccggtgacggagataaaaagagagagagagagagttctcttacgtgtgcaggaagtagcctagtggcggcttttaattggatgacgttagttcaaacgggtcgtgttacggtcatgattttacacactatacaactcccccaatgggtacggtcgcatcagtcacaaacgttttttagttgttgtttggatctctttatcaaagtttttgctttaaatcgttttctcttgttttagatag

SEQ ID NO: 188690 - DNA, 162 bp, Arabidopsis thaliana landsberg
atggatatgttgaagaagcgaaagctcgatgaaaatggaatcgcgatgctacacgatggagtcagtggctctgtttcgtttcgattggtgccacaagacgcgaggaagattaccgagcttttctttgctgatcagcttcttgatatcttgcaagaagctatt

SEQ ID NO: 188691 - DNA, 2229 bp, Arabidopsis thaliana landsberg
atgataaacaatacttatgagttggaaagtatgaatctatatgttgttagggttgatgatccttatcttgatgatgttcttgttggagaagaggaagaagaagaggaacccaagaatgaagatgaacctatagacttttatcgtgatgattatgctgatagtgattcagatgatgatggtcaaaatcttgatttttttgttgaccaagcttttctctccaaagaaacatgcaagatagcaatagaaaagtatgctatcaaagagaaggtcaatctccgttttaaacattctgaaagtaaaaaagtagaagcaacttgtgtacaagagtgttgcgattggaggatatatgcctcaataaacagtcggtatacaaatatggttgtcagatcttacaaaggaactcacacatgtttttcaacaggtgtggtgaaactctacacagcccctaagatagcagctagttttctgagtgagtttaggactaatcgaacactaagcgctgatcaaattaagcaaagattgtcgatccaaggtctacgtgttccaaaaacaaaatgtcagagtgcaagacagattatgttacacataattagtgatgaatacgctgagcagtttacaagaatgtatgattatgtggaggagcttcgtgagtcgaatcctggttcaaccgtgatattagggacaaaagataaagtttttgagaagttctacacatgcttcgaagctcaaaaaactggttggaaaagtgcatgcagacgtgtaattcatttggatggaacatttcttaaaggacgcatgaagggacaactcttaactgctgtaggaagagatccgaataaccagatgtttattattgcatgggctattgttccggtggagaataaagtcaactgggagtggtttatgacattgttgcaagaagacttgaatttggagcttggaaatggccttgcattatcatcagaccagcaaaaggggctcatatatgctatcaaaactgtccttccttatgcagagcatagaatgtgtgctagacatatttgggccaacttgaagaaaagacacggtgagtcgggaaatttacatggcttgttttggaagtgcgcaaaagcatacaatatgcaagtttttgaaagaagactcgagaagatgaagagtgtacgacctgaagcttatgaagaagtgaaaagaagtatgggttctaattggtccaggtatttatataaatctctttaacatttttaatgatttgtctacttgtctaaaattcttttgaatctatccatcatcatcataatatatatgtccactattttaacattgatataattttccttattgtagagcattttttaataatattacaaagtccgctgcggtagagaacaacataagcgagtcatataatgctgcattaaaagatgctcgatataaaccagttgtcgcattgctagaagatataaggagacatgttatgtcaagtaacttggtgaagattaaagagatggagagtgctacaggaacaatcacaccgaaggcaaaagctgtgattgaaaagcgaaaaaaaaatcttaagtggtgtcagccactacgtgcaggaaaaggatggtatgaggtagaccatgggataaataagtatcgagtttatgttcgagatgttgtttcttgtacttgcagagcatatgatgtgagtggcattccgtgctgccatattatgtctgctatgtgggaggaatataaagaaacgaagctaccggaaactgttgtgtcagattggtattcaattgagaagtggaagctatgttacagctctttgctttttcctgttaatgggatggaattgtggaaaacccacagtgatgttgttgttatgcctcctccagacagaatcatgccgggaagaccaaagaacaatgacagaatccgtgatccaactgaagatcgtccacctcaaaaagttccttctacacgtgaaaaagttcaaatggtaaaatagagaacaatgaattatgtttcacaagatcttccttttcaaattatttaatttaatctttgcatatttagacttgcagcaactgtcaacaagtcggacacaacaaacgttcatgcaagcgtaaagcagtgccaaaaccacccaagaaacctcaaggacgaccaaggaaaaaacataaaacaatggatgaagagaaccctatcactcagccaatacaatcttctcttcaaagttaa

SEQ ID NO: 188692 - DNA, 110 bp, Arabidopsis thaliana landsberg
atgggtgaagactacgagttttttgccgatatgctggaacataccaccagcactgttgtgaccggggaccagtataacctggatgtagcagtcttcccttttccaacctg

SEQ ID NO: 188693 - DNA, 119 bp, Arabidopsis thaliana landsberg
gtacggcaaggccggaagaagtgaaccgcttctgttttgaaaaaggccttacgctgaatatgctcagcatgaaaaagaaaagcctggaagccaaattctttgaacttaccaataactaa

SEQ ID NO: 188694 - DNA, 194 bp, Arabidopsis thaliana landsberg
aaacagcattaaacgaccagtttgaacagagagagaaggttctttctgataagagagacaacgtgggtggcaaacagacgcggcggccacgtgagcctattgagccaccggtgcggcgagtggtgcttacgcgaatgcaaaaaaatcagttaatgggccctacagggtcacgccggggacgcactatcacgtga

SEQ ID NO: 188695 - DNA, 1020 bp, Arabidopsis thaliana landsberg
tgatagcggatttcctgctgctcgactatctgaaatccctgtgaaacagtcagaaactggcaagtttgagcatatgaaagttgttataaagccaagacctactaaaggatctggaatggaaggtgatgaactgaaaggtggtcttctgaaaagtgttgaagagaggaaagaagattacgacagggctcgagcacgcatatttaacggtcttgtgaacattgattgtaacgattcttcatctgaaactaatccttggagggtgaattgtagttctagcagagatgaaaatcaagtgttgaagaatggtaatatcgaagcagacaagaacaatatctccaggaagagcaatcctgcatctcgtattgcaattctcagagacagagagaaagatcgatatgaccctgactatgaccgcagcaattacaggtatgtaaagcattgctaaaccattataattgtttgtggataaaaatgaatagttgaaacttgttctgtatctttaaaaaccttttggctttcaggtacattagtaacctcccagtcgatcaaaatttatgcgtggcacacttcaacattcagacaatggggacaccaatctatgatatgggatttagcgggtatagtccaactgctcctccatctcttaacttgggtcaacattctgtcatgagcccctgcgtcaccacaggtttaaaccagccttcaagagatgctgctatgtacatgcaatggccaaatgcagcagctgtgatgtatactcattcatatgaccacttcagaaactccccttttcaggtaaacaaattttttccctttttcctctcttttctttagcctttttgttaattgtgtaaatgttggttgtcgaccttcctagatcacaatgtcacacttaagagtgaatgtggattttatatcacatctgaattagtgaatatcaagttttaaaagtgattgttgtttctgcaggcgcagttctattcgcagccccttagtttcgattacatgcagaaccggtaa

SEQ ID NO: 188696 - DNA, 153 bp, Arabidopsis thaliana landsberg
cgaagacagtggaggatttaccgtcacgttgtcggaccaaacatttccgttaaaaaaaaaaacaaattccataatcgtcgataaaacaagaaaagagaagagaaacaattacggaaattttgaaattacggttggttttgtcgtctatcgatg

SEQ ID NO: 188697 - DNA, 96 bp, Arabidopsis thaliana landsberg
atgcatcagtctcagaccatccgcaaagacgctgaaagaagactcattcacattgtggttttcaatagcgaaagggctgaaatggagcctaacaaa

SEQ ID NO: 188698 - DNA, 8 bp, Arabidopsis thaliana landsberg
atggcctg

SEQ ID NO: 188699 - DNA, 314 bp, Arabidopsis thaliana landsberg
atggtacagttttccctgacttgcctccaccgccgccgccaccgccggaagcatcttttggcgtctccggatttttcttcttccgcgttggctttcccatttaaaggtgagatttttattcgaaaattcaagaacccttaaatcgaagttcaaatgatgaagcagaggatttcgaaattgttatgagcaagttattgaccgatcgtgagaagaagaagaaagaagaaagaaatgtttccgtacaaaatatggtttggtggaaatgccagagaagcacgacacgactctatctgtataggtggagtgaaccctaa

SEQ ID NO: 188700 - DNA, 62 bp, Arabidopsis thaliana landsberg
aaaattaaggaatgatggatctaaagtttctaaatatgaatgtacaaaaacgaaggtgaaaa

SEQ ID NO: 188701 - DNA, 690 bp, Arabidopsis thaliana landsberg
ggttttctcttcgattcaccacatcgtcatgaaccaaatctctttctggtgcctttctttactccttacggtggtgattgctgcagaagagactcctatcactcgtatagccttcggatcatgcgctaatcaaagtgctccacaggtaaatcaatcgtacaacccctacttggctctggattcagtgttttaagactgctctgtttggctggtgtttaagtgagctgattatggtttttgtttaattagccgatgttctcttagatgatataagcttgtgttgcatactatgttaaacattgtatttttgttacattttagccgatatgggatgcgataaacaagtttgatccgcaactgtttatttggttgggtgataacatctacggagatataagaagaccacttacagtcattgggaaagagagaacttttgggccatggaggaattcaccgaggtttgtaccttcttcagaggaagaaatgaaactaagatacgctaaagccaaagctaatcctggatattctcgtattcagagaaaagctaaggttattggtacatgggatgatcatgattacggattgaatgacgctggaaaagagtttgatcgtaaagtcattaaccaaaaacttatgcttgatttcttgaatgagcccctcgatagtcctaggagaaagccagtctggtga

SEQ ID NO: 188702 - DNA, 1698 bp, Arabidopsis thaliana landsberg
atattctgtgcaggattacagaaaatttcggagtaatcctatcaatcaggctgctatttcacttgctgagagcgggagaataggagccttaaacctgctatttaagcggcatccttattcacttgtttcgtttatgctgcaaattttggcagctattcctgaaacagtccctgttgaaacctatgcacatcttcttccgggaaaatctcctccaaccagtatggcagtgagagaagaagattgggttgaatgtgagaagatggttaggtttattaataacttgccggagaatggcaagaatgattctctgattcaaactgagccaattgttagaaggtgtttggggtataattggccatcatcagaagaacttgctgcatggtacaaaagtagagctagagatattgattcgaccactgggctgttagacaactgcatttgcttgattgatattgcatgtcgaaaaggcatatctgagttggaacagttccatgaggatctatcatacttgcaccagataatttattctgacgaaattggaggcgaaatctgcttcagcttaagccttgctgggtgggagcatttatctgattatgagaaatttaaaataatgcttgaaggggttaaagctgatactgtggttagaagattgcatgagaaggcaattccatttatgcagaaaaggtttttggggacaaacaaccagaatgtggagtcctttctagttaaatggctgaaggagatggcagcaaaaagtgatatggatttatgctcaaaagttattgatgaagggtgcattgatttatatactgtttgtttttttaaggatgatgttgaagctgttgattgtgctctgcaatgtttgtatctgtgcaaagttacggataagtggaatgtcatggcaacaatgctatcaaagctaccaaagataaatggttagttgtccagatccaatgtattcccaacccaaaatctatgtaactaaattatcggatgtccttatcgattcattactgtatcaaactgacatccatgcaaatgcagataaagctggtgaagacattcagagaagactcaaacgggcagaaggtcatattgaagcagggaggcttttggagttttatcaggtctcgaaatgttgctgcatcttgaattactttagttggtgtctcttagcaaaaaaatatgtagccttattccatgtgcacatatttcaaatgaactaacttaagcatagaaacatgtgcactggattagttctctgcatctgtagaagtacaaggggatcttatgtttgaaattatggaagttctaatgctaccttctctttctccacaggtccccaaaccaattaactattttcttgaggttcatttggatgaaaaaggtgtaaagcagattcttcgactcatgctttcgaaatttgttcgtcgtcaacctggacgatctgataatgactgggcatgcatgtggcgtgatctgcgacagttgcaagagaaagccttttatttccttgatcttgagtttgtgctaacagaattctgtagaggacttctaaaggctgggaagttttctctggctagaaattatctcaagggtacaggttcagttgctctgccatcagagaaggcagagagtctggttattaatgcggcaaaggaatacttcttctctgctccgagccttgcttctgaagaa

SEQ ID NO: 188703 - DNA, 198 bp, Arabidopsis thaliana landsberg
gtcaaaacgcgtggtatcacgcgtaaggtactagaccaacacatgattgtgactgtgtcacgaaagtctctgacacgtggttctaagcaagtgctttgtggaaagcttctcaagttcctgttcgccaagaaactgacacgtgtgactccactgatccataaaaccaacacgccacaccatttcagaatttacttgtag

SEQ ID NO: 188704 - DNA, 608 bp, Arabidopsis thaliana landsberg
taaactacagaccagcggcctaattttcatttgtctctcttgttcttggtctgtcgccgtcggagagtacgacggcgtcgtcggaatcttcttgtctttcaccctcgcagtcttcatttcaccatcaatttcccaggtttgtgtttcacttatggaatcgatttcgaatttgttattttagcctaaatgtctcaatttcgaattgaattattcaattttggtgttgattatgtgaattcgttatactgttttgtgatagattttggtttcgatttagtgtttagcttgattcagtttattttttagtttagcttgattcagtttattgatttagctctctcagtccatgtgtgaaacaatatacaaaataaatcaaaatcgagatctaaactataagatttagggtgatttgcaaaatgattaattgttaaggtaatccactagaaattgcacaattgagaatcatattgaccatagaatctttggcaaaaagtttcttcaccggatctggcgatttcttcgtcggatcttcaaataggaaatcgccgtcggagaagaagaaattgtgtgtcgaagagaaaagaagaagaaaaacctaatctttcagg

SEQ ID NO: 188705 - DNA, 376 bp, Arabidopsis thaliana landsberg
gcactcgcggttaatctctatggatgcgacacactttgtaaagacctgctcgggaaattcaatcagctgtctcccagacgaggttttgggcaaaatcttgtcctttctgccgacaaaacaggctatatcaacatctgttctgtcgaaaaagtggacttttatgtatatattggcggatagtctcgactttgatgattccgactcgctgcatgcggaagagggtggtgaacaagtgtttccagagagcttcaaaagttgtgtggatcgaacactggctttgcaatgtgattcttccatcaagaaattctcactaaagtgccacattggtgtggacgatgaatgccaaagggcttgtgtgggacgctggaatatctaa

SEQ ID NO: 188706 - DNA, 2719 bp, Arabidopsis thaliana landsberg
agattttggacttgtggatgatgtgaggattccatatcagcagcaaaggatgtatgggtttgtaacttttgctaaggctgaaactgtgagaaccatattagctcgtggaaaccctcatttcatatgtgactcacgtgtgctcgttaaaccatacaaggagaaaggaaaaatccttcaaaagtaatgcttggtccttgttactatttatcatgtttttttctttctcttgggcgttttcttattatagtttggtgaaacaatagcaggaggcagcagcaacaactacacgagttgttggagagagggaactattcaccttcttcaagtccgtctggaaaggactcgagggaactatatgaatgtcgcttaggttggtttcaatttgttaaagagacttcagaaaaacaatttcttgtttccttcttactgagatagtaactcttcattctatattcgttaccaggaccaaggatgttttcaaagaagacacaggagatgttgcgaagaaaaaccgagcaagctgatttacaacatgccatagaagtagaactccaaagatgaaggttcttgaatctgcaactacctgacatggagaataaatatattcaccatcaccaccagcgtagtccttctattggttctccctctcatttcccacctcgattcaatcatagtcttctctttcaatcaggaaacaacaacgaagaaatcatggaaggttgttgttgttgtgctctctacgttttaagctttctttttctcggtctttattcattcttctcctcttttgttatcctttggtcaggcgacagtgatagaagtgagaaagatcttcaacaagtagcaaccagcaacgaagaacgtggttacaataacggtttctacaaagggtaaatgaagtgataagaatcaaggcttttttaagtcttcttgttactgaaatatgatactttagttcttacagacagttaactaattatttctctaggcaagagacgagtctggagaatactctccctgatagcttgtttggttctccaaaaaaatctggcgaaacctaccaaaccgagtctgataccgagcataataataaggaagcctcatcaaatcagttagcgtagcaatgggtatgtttaaaatccctagtcattttacctcctaatagtcatcaagaacatttactcaagatttttcagcctccatataagcagaaagaagcatgtgtatgaatgaaaaggtaaacaatttccgccatggatcaacctgaaactcctaaaaccgtcacgttttctaactctccatttcgtttttttgttaattgcagaaaggtgtagaagactgataaaagaatgaagtagaagagaagaattgtctatatatagtaaaagctaagaggtcacatggaacacaagagagaaggttaaagagaacagttttaggattataatatcatctacaataataggattttaccactaatctcagcaacatatgaatacagatcaacacagtaactgtaactcacaagtaggtttctttttggtaatttctttttaccttatcggatacaacacagttaccatggttgtatgaaatgcatgtgttttttcttaaagctctcttgacaggttgatacttttaagttaaaggtgcacattttaattgaactaaaccggactgaaatcatccaaatgttgtgattctgttcggtttacttttgatcggacccggttaagcatggttagatttgtatcaatctgattaaaccagaatctgttgtatatttaagagaactcagagaaatttaatgattagtttctttctggtaattcgtcttcttgatcatcttctgtggtaaacataaaaaacttttcggccaccatgcaacccggcgacgcaattgcgactatcattaaaaggatcctaactttggaaccagagcacgctttgaaaatcattggctatattctgtttcaggactttggacacactgaattgattcgacttgctttttgccctgcattgcattacaaggtcactgtgaaaaagctaaatccgctttgggtctttcgagacccttcaatctccatcaccattcattgtctcagtcttccccaagaaatgagttcttggacttctccagaaacccttaccctttgtatccttcgttaactcgaaatacattaggatattaccctaactttcatgacggttcgtcgcaacaacaacaatggagtaaccattttccaattcccagattttgggtacccggttatcagtttccaccaggcggtttagctgttcctcctagtgtttttggtcctcccagtgagagaatatctccaaatcagcaacaaagaatgattgctactcatggctctccagtgtcgaacatgtaagattataatttatgtttgcttgatgctttctcttgatatatgtttggttactagtaaagaaacgcaaagactttacagaacaagtgtagtagcattgtagcttgaggcaagtttgtttaacttggtgtttgtttattctgttgtttctgtatcaagaagaagttttgaactctggggattggttttgcttatggtgattcttcttttagacaaggatcaggacaatttggaatagaaggtggttttgggtcgccgagtgagcaacaacgaatgattgctcctcagttcatgggggattttggctctcgaatgtcgaacag

SEQ ID NO: 188707 - DNA, 255 bp, Arabidopsis thaliana landsberg
atgcaagaggacttggagctcggaaatcaaaactttcccatggttcttgtccaaatcccaatgtacaacgaacgagaggtattttgtttttgttcaaagaagttatttcaattatatatagtgatgcagctttttaagtaaagttctacttcacaggtgtttcagttatccattggtgctgcttgtagactcatatggccattggatcgactcatcgttcaagttttagatgattccactgatcccaccatcatg

SEQ ID NO: 188708 - DNA, 244 bp, Arabidopsis thaliana landsberg
atgtccctatctccgtccaaatatgagaaatgggaatgccccaatgatggtgccacgtaagcaccgaccgttcgaagaagttgactggatctctgtacttggcaaaaaagcttaaaagattcagttgcttgcaaaatctgaatgcccaatgagaacacgcatcatgcgccgtccatttatttaccgtatagtatttactttcctcgttaccaggaaaattcaccatcaacgcgttattttgtgg

SEQ ID NO: 188709 - DNA, 666 bp, Arabidopsis thaliana landsberg
ggtcaacatgatcactttatggagtcacccaactccatcaagtttttggttaagctgttgagacctgtggtttctgccagtactaaagtaaagccgcggaatataggatctaggctcttatcaataatcaaggatgttgatgcagcacgtgatgcagccagtatgcatgatttaagctcctgtgatataattgacagagctcaggaaattcttgttaattgcaaggagttgagattgattgatagctatacaatcgagaggatgaggcgtgagctaagtacgaaatgggtagctttgttggtgatggagaaggcgtgcttgtccaaaatctcttttgatggtactttaacttcctgtctgttttgctggaacaatgactagctaactatttaagacgcatctggtatattatattgagttatagaattggaaagttatgttatctgcttcagtgaatcagtttaacaaatgtgtcagcggtaatagaatcctacgaccagattataattgatttataaatttctaattattgatattatcattccccatccagatacctctggtactgtgaaaaaatctggaggaatgttcaaggagaaactgagagaacttggaggacttgatgctgtctttgatgttgttatggattgccacactgtaatggag

SEQ ID NO: 188710 - DNA, 118 bp, Arabidopsis thaliana landsberg
ttacatgcataaattcatccgactatatttcaagaaactaatcgtattaatttcattaaatatttggcgtatcttcgtcgatgacgatgaaacagtaattcgtgtggatcttctttga

SEQ ID NO: 188711 - DNA, 644 bp, Arabidopsis thaliana landsberg
  unsure (1)..(644): unsure at all n locations
atggtagccttcgggaaaaaactcaaggaacggagcattcaagaatggcaagggtaatttctcgataaacttttcgaaaaactcgtaaaaatgtttgtcctaatgttaatcatgatcgcttgtagatattatatcaattacaaattgatgaagaagaaagtgaagcaatatagtcgccaattagaaggaggcaatcttgagcgccgtcatgttcttaaagatttctcaaggatgcttgataatcaggtaacaacaacctttagtgtctgtgaagataaaagtgtggagctttataaaaagctaattttgaaaatgaatgcatactagatcgagaaaatcgctcttttcatgttggagcaacaagggttgcttgcaagcaggctacagacactaaggggatcacacgatgctctccaggagcagccagacatatcccacatgtcttatctaaaggaagagtatagagctgttgggcaagatcttctcaagcttttgtttttcgttgagatgaatgctattggtatccgtaagatactgaagaaatttgacaaacggtttggttatcgattcacaaactattatgtcaagactagagctaaccatccttactctgaactccagccagtctttagacatgtggntta

SEQ ID NO: 188712 - DNA, 778 bp, Arabidopsis thaliana landsberg
catgtaagctcttgaggcgtaaatgcactcaagaatgtgtgtttgcgccgtattttccaccaactaatcctcaaaagtttatctttgttcatcgagtctttggagccagcaatgtaaccaagatcctcaacgatcttccacctgaccaacgcgaagacactgttaattccctcttttatgaagcggaagcgcgtatccgtgacccaatctatggatgtgttggtctcatttcctttttacaacaatacctcaagaaaattcaacaagatcttctcactgctaaagaagagcttgttggttacatgggacccgatgctgtgattccgccgccttatcttcctcctataggtaacaatcctcctcccaatttcatgatgtctatggaaggaatgccaccaggagtgatccctcaaggagaacctttgatgatacgcgaaccaaacatgtctcagcaacatcatcatcaacaaccgcaagatgagcagttgcaattcatagcttctgatgcacagagaatggctgcaatgatgttggagagaggagatcaacaagggatgttcaatggttacggaatagacaacaatggttcggttacagccacgggttttaaccaaatggatgtgaatgatcaaggtgctggtggttcgatgtctggaccatctcttgctttaggaagctttggtgatgcttatcagatgggtcaagagacagagcatggtcatatcaaccatgatcagcttcagacacagcttatgcttcagccttcattacaagaaag

SEQ ID NO: 188713 - DNA, 264 bp, Arabidopsis thaliana landsberg
gatataagacgaggcatgactggaaacctccggccgcttgtgacaaaagttccggcatcatcaatgtacagtgtgagaagtcggccgggtagtgtctcaagctctccggtggccacgagcagcactgtgagctcatctgacccgagtgttgacaacatcaacattctgtgcttagacggaaacgaagccgaaaatgatgatcttcttagtgaaagaagctatgctgcttctccgcggaaccagtaccccaagttcacatcttga

SEQ ID NO: 188714 - DNA, 493 bp, Arabidopsis thaliana landsberg
aacagttcccaaatcattacgctgaaatactgaatattttaccaatctcccattacatggatccaaagcgcggtctactaaatattgcagccaacctacctgacactgtacaaccacccgattttggcccatgcctcaatatttcatacaggagtggtgaagaatatgcacagcctgattctgtgaagaagttaggttttgaaacttgtgacatggtatgttttcttagaacttctcatcttggaagagttttcctttatttcacaatttcctagctttacgaattgaagatctactctgattgttagctaaagaagtagtggtcagctaaatatccttttgacttttctcgtttaacttttcagatctacttatatttttctaaaccttttgatttgctctgcaggttgatatcttgttatatgtcacagaaacacctgtatccacaaaccagatttgtaggataagaaagctaatgaaaaacatcggaaga

SEQ ID NO: 188715 - DNA, 276 bp, Arabidopsis thaliana landsberg
gcgacctgccgccccttcctgcagtcgcggctggcgcatctgcctcgtctgaaggtgatcgtcaccctgggcgacgtctcgcgccgcaatgttctcaagaccctgggcaagccggcctcggccatgcccgccggccacagcgccgaggcgcgggtcggcccctacgtcctgctgaacagctaccactgctcacgcctcaacacgaacaccggacggttgacggcggagatgttcgaagccgtgttcgctcgcgcccgcaccctgatcgagacctga

SEQ ID NO: 188716 - DNA, 493 bp, Arabidopsis thaliana landsberg
gaccgatccggctcgtggcactggatcgggattgagcacgttcgaagccggcctgcgcctgcgctacgagttcacccgccagttcgcaccttacctcggtgtggattacgaacgtgcagttggcaacaccgccgatctccgccgcgacgcgggcgaggacgcggacgatgtccgcctgctggcgggtctgcgcatctggctctgagcacacgacatgaaaatgcaaactgaagactgcaagggccgccgccacgccgcgcggcggcacgacgacattgcgcggcgtacacccaatatcagcactgataggagatttacgatgaacacgaccctgaagaactcgctcaagctcaccgttccgttcgtactcgctgcgttcgcgctgccggcgctcgcccatgacccgaagatgcacaagcaagaaggcgccgccccggccgactgctcgaagatgaaagacatgaaaatgagcaagatggacatgaacgacccg

SEQ ID NO: 188717 - DNA, 120 bp, Arabidopsis thaliana landsberg
atgattgaatcatgcagccggagcgtaatcatagactacatcgtcgtcatcatcaccttcgttcttgaaagatgcaaatgcatagtgaacattgtaatagagaacaaagtcaaattctag

SEQ ID NO: 188718 - DNA, 113 bp, Arabidopsis thaliana landsberg
atacatcaactgtagatttaaccggactgaaccggaattataaagtgaaaccggttatctcaattgaagaagaggaggaaagaggagcttactgtcagcgccaccgagcttag

SEQ ID NO: 188719 - DNA, 154 bp, Arabidopsis thaliana landsberg
atgaaattaactggtttgactacagtaaccaaaaccttctttgaaaatctggtgaaagctttggagaatggtcttgctgatgtggattcacaagctgctagcagcaaaccagctaactctaaaccttctagcaagacaaaaggcggtgggaaag

SEQ ID NO: 188720 - DNA, 173 bp, Arabidopsis thaliana landsberg
ctgaatttcttagtttagaaatctccaaactctgtgcaccactactgaatcctgccgtggaagctctcactaccccagctgctgccatgaagacagcgaaaacagcatacttttccttagaagtctctagtaccttcgttcgcaaaaagagacatcttgttgatagaatttga

SEQ ID NO: 188721 - DNA, 539 bp, Arabidopsis thaliana landsberg
atgccacatccaggttttacacaggacggctacacaaagttactagagaatgtgataattgcagacaagagcaaacaatgtgtaagaacaaggaaatatagattttaccactgtaacactgcaaagtccatttgaccttagatgcatcatgatctggcaactgcacactcatatgatcaatgctcgcgagaggggttctaagaacagaacaaacagcctggtaaaaaagtaatatcagcaacaactacttacaccaatgaatttcattgctaaaaatttcagaataacagtaaaataccttcaaaagtacactgaaatgagcttgaggaccagaaacagtatatacatcaaagaaacttgactgaaatgtgatacactgataggcagaacgtgaagcattcaaagtgtgcaatgccagctgcaaagttatgcacaaaacaaaagaaattagatctaacaaggcgaataagagtaatgtgacgaattgttcagctaaaagaggtgataaactacaaattcaatcaacacagcgttcctaa

SEQ ID NO: 188722 - DNA, 163 bp, Arabidopsis thaliana landsberg
atggcaagatattatgaggctcgttgcaggaaaagacttagacataatgagcggttcattctcaagtatgtcctatagaacacaattcactccatatggcaagaaagaaatgatagaagacacgacgaactgtcttcgacaacggagaggattgttaagttga

SEQ ID NO: 188723 - DNA, 71 bp, Arabidopsis thaliana landsberg
aatcttacagacttattaaattccgacataaacagaaactcatttctttcactcattcaactaaagtttaa

SEQ ID NO: 188724 - DNA, 42 bp, Arabidopsis thaliana landsberg
ctcatctgctcgcctatgagatcgagacccacaagaagaaag

SEQ ID NO: 188725 - DNA, 362 bp, Arabidopsis thaliana landsberg
aacacattgcatcgagctagcgactcagaagttcagtagccatgtgattgagaagtgtctaagaaagtatccagagagtcgagctgagatcgtccgcgagctcctctcttatccaaactttgaacagcttctgcaggatccttatgcgaactatgtgatccaaactgctctctctgtaaccaaagtaagtccaaatcaatacatatgttataagcttttagaaacagaacttgacatggcttttggggttgatgcagggacctgttcgtgctaaattggtggcgaaggtttacaggtacgggaaactacactcgagcccttactgcaagaagattttctccaagaccatcttgaagaagtga

SEQ ID NO: 188726 - DNA, 132 bp, Arabidopsis thaliana landsberg
ttccggagatctagaggagaaataattggaaacttggaacgtagatccatgaaatgcggaattaacattaataaaagaaaagatattttgttacgagtcttacgactaatcatcatcgtggaacgttattga

SEQ ID NO: 188727 - DNA, 564 bp, Arabidopsis thaliana landsberg
atgaagcccggccatatattcgaaataggtgatgatggtgatgaagttgaaattgttcacaatgatggtaactctcggctgatttgctctgaatgtaatcttcattgtgcacaggcttgggcattcaagatgatacgtggatacaaatggtattgcactcttaattgtatgggaaatggtcttggccttggacgtctctattgaatgtagccaagacattgtgatcagcgcatcttatgtgtttcagggctttcgtcgagtacacgtttcttagggtttaatcttttggtgttaaattgtattttttttttctttttttttcttttgtgttgatgaaaatgaaaatgataaaattctgttctcgttttggttttggagtctatcaagatcactttgctgttattatatctttaggtgttatataagtagagtccttatagagacgttgtcattcattcttgctttttccacaccacatactttactatagtccaagtcatggcggatgtgataaagttgtgggagacatttgtgagggagagtcggatagattctcgaaattaa

SEQ ID NO: 188728 - DNA, 74 bp, Arabidopsis thaliana landsberg
cggagacggagttcgccaataaaagaaatccctattttgtaaacttagctcgtcgagaaactaccaagggttaa

SEQ ID NO: 188729 - DNA, 125 bp, Arabidopsis thaliana landsberg
gcccacgaaagaatgaccttacgatttattgcgcccttgggccttttgtgaggtcttttactcttttagtggacccgggggatatctatcccccacaagcccccgatctttgggttaatttagag

SEQ ID NO: 188730 - DNA, 844 bp, Arabidopsis thaliana landsberg
  unsure (1)..(844): unsure at all n locations
aaagatcaagctaaactggaatttaacaaaagcagagaagcgatagaatgcaagaaagttcctacagcttcgacgatgatcaatgatcctgaggcctctgcagcaactatggtgaattattttctttcctcatattttggctgaattgaactcaggttgtttagaaactgataatatttatcaggaagttgtcccagggttagttgccaggaaaggaagaactaagaagaaaaggaaagaaaagaataagagtaagaagtgtacaagtttggaaaataacggggaagtgaataagtctgtagtgaatagttcagccatcgtaaaagcttccaaatgtgattcnnnnnnnnnnnnnnnnnnnnnnnatcctcaggaatatatcaatgctcagattattgaagagcatggttcatttagctgtgaaaggaatagatcaggtacttgtgcatctgtgaatggtgcagctaattgtgagtattctggagaggaagaatcgcatagcaaagctgaaacgcatgtgatttcatccgatttgagttctgtggatcctgccggtggtccaagctgtgagaacgtgaaccctcaaaaatcttgctgtcggggtgatcgtaaagaaaagttgacaatgcctaatgaacgatccagaactttggatgaaggggaatcccatcgaattcaccatcagagaagagaagcaggttacggttttgcctccagcagttcagaatttgtttcttatgagtggcctgctgtagctcctatgtacttttcgcatgttagttctcaccttccaactgcaactgacagactgcaccttgatgttggtcacaatttgcatccatac

SEQ ID NO: 188731 - DNA, 1236 bp, Arabidopsis thaliana landsberg
atgcgtgaacggacccaaactcttttcgaatttcggaagccaaatgtcttggtcttgccgtgagacttggtgtatattttcatatatcttattttttttttccttttgatgtatgaaactttttttatgtgtggttaatgagtaaaacaaagaatcgaacaccatcacattagtttaaggttgatgtgtgaaacatagcgtacgtgaaacagttcttctaattaacccaatttgatgttattgttaaattatcttcaagagtgacaaatatacgaccaaacatgtcagctactttataatgccggttatgcttaaccaccccaaatttgatttgcctgcctcagaccggttatagcagtacgggaagaaccggtttgataatgggtataaaagtttttcgtttttcttcttgcaaccaaacccaaaattgaccctaaaattaagcatgccatgatagctagctagtaacgatcgacggtgccaaaccccgaacgatatgaagatttacttctgattcggtaaacatttttataaagcaataaatacaaaattaatgttatttgcttctcaattactctattagtcttccgtttccttccctaataggatttattttggtccatttctgctataattttttacctttctagtggttttatttggtagacttttagctggtttggattctctactataatagactcttatattcctctactacataagtatataccctaaatgtgtcactgcccaagaaactagaaaaacaaactatggaacaatcaaattttgttaatatgaaactctctctagttccaacacttcttcttcttcttgttcttctcgtcttttatcaacatcactcttctccaaacctaaactcgaacgctctctcttctttcgtcgacgctacgcccttcgccccatctcctttactttccctgtccatggagtttagtatcgcctcatcaaacctttcaacaatttcgagtcctcctgaaaatgtatgtttttattaacttacgtgattttgttcaattatgctatagatttgttttgaatatatataatttgttgtaataagaaaggaaagaagaggaacagaattgaggaaggtttagcaaaatcaagatccgccatacgtgaagccgtgaggttgaagaaggttgtatcggacaaagaagaaacctttgttcctcgaggagccgtttacagaaacgcttttgcatttcatca

SEQ ID NO: 188732 - DNA, 187 bp, Arabidopsis thaliana landsberg
atgggaaaaacttcgggagcgaaacaggcgactgtagtggtcgcagcgatggcgttaggatggttagccatagagatcgctttcaagcctttcctcgataaattccgctcctcaatcgacaaatctgacccaaccaaagaccccgatgacttcgacaccgccgctactgcaaccacatccaaagagg

SEQ ID NO: 188733 - DNA, 368 bp, Arabidopsis thaliana landsberg
agcctgatgcgcttcagccaggacacaccacttctaatgatggatctgaagcgagaaaagaagtagttaattctgaaaatgatatcagtaaatctttatccactgaagaagagaatgtgaagtctatcaacagtggagtggctggcacagtggattctttgatatctgaccctgcagattctgagaagggagttacacatgacgatgcatctaatgttgatggaatctttgctgcttctggaaacatagcggagggggaaggtgttgaagttgaaggtggttctgggaatgtggaaaagccgcatcagccatcctctctccaagaatatattcctgatgtttccttgattcgtgcaaggggagatcag

SEQ ID NO: 188734 - DNA, 1170 bp, Arabidopsis thaliana landsberg
atgaaagaagaagggtttgtaaattatatgttacgacagacttctaaagctttggagaagacgaaaggttcggtaaatttacatgtcacagctgagttatatgcttcaggaaagacgaaaggtttggtaaatttacatgtcacggttgagttatatgcttcaaagaagacaaaaggtttggtaattacatgtcacggctgagttatatgctttagagaagacgaaatgttttgtaaattatatgttacgactgatttgtcacgatttacatattacgactgagttacatcacattacagctgagttataatacatatcggaaaacaatatttttgggaagaaaatataaaatttattggtcaaataacaacaatcaaattaaaaacttaagaatatatttaagggagacataggaggaagactaaactgtatgaattaaaacatagatagaagtagaagagtcactagtcaacaaaactgtatgaatcaaaacatcgatagatgtagaaatgtctccaaatagatcgattgagaggaagactaaaagagaatcatgtaaaaccaaagtaaaagagtagctattactgctttcaactcaaacctgtaacgaatcatgtagaattccatagacctctttgatttggatttttatttttgatgtttttcgtgaacgaggttgtgtgtagatctgacgaagcttttgatttgggaccctatagcaagcgttgtggctctgaggtctaggaagatccagcccaatcatataatttgaagacctatgtccatgttgtacccaagttgcaattattagatctaaaagcttttcttggattttgagacaaaaaaaaagaggagggaaataaaatgattttgaggagtgtgagattggtgacgtgagttaatgacatggacagtcaaatttttatttattattttttattaaaaataaaataatcaagagtgttaattgtaattacacaaatactcaaaatatatgagtaatttttaaaacatgtataatatcactacaagaaaacagacaaacaacgactacagaaagcaacaacagatgtagtcgtcgtttttggcgactacgtcacgacagttttacgacacatatacgacaacctgaacattagtacgacgcatatacgacaacatgaacattag

SEQ ID NO: 188735 - DNA, 674 bp, Arabidopsis thaliana landsberg
tcctaatggaattttcccacgtttctccaactagggttttgacgcgtggtacttttatacttctacgtaagtggacataaaagttgtgtacaaaacaatattttcggaatgtgcaaaaaccatatgtttcttgagtgcaattgcattttttttttcttaggttcagatcctgaaagtttttcagatcgagtttctctagtgaatacgtgtttagttcccatttttttacgagaagaggtaatgttaccaatcaaatacattataacaccttacagtttttttatatattaaagaagcaaggagctaaaactagagtaggatttacatttttaaaaaagttgtaaagcataagggaatctagacatatagataatatcagaggacttttgtggtggataagtaagttgtatctaagttttattttggctgtcttcttgtccccaattttctctacatcttctgtcttcttcctcttacttaactctctctttcatttttgttatttatttaacaataaattaccttttcacctcactaatctgatttcttaacacttaagtcctccaccagcaaaaaagacaaactaacacgtccaattattgttgcatttttacttttatctttaaataattctacactaatttcaggatcctgcaaaaacgatagaagaatga

SEQ ID NO: 188736 - DNA, 117 bp, Arabidopsis thaliana landsberg
atgaactcgaggaagaattacattttagcctttgatgaatggaaagaggatgtgctgccagaaattttggatggacacaatgtgtatgatttcattgatcctgatattccgcatagg

SEQ ID NO: 188737 - DNA, 214 bp, Arabidopsis thaliana landsberg
atggaggctcctcagaaaatggtcagtgtgaatcaatatgaccggacatcagaccaaataaagaggctcttgccaaaatatcacactgtcccgtcaggcaaacgcacacaatggagaatttcaacctaaacctggtaaggtcagacccagtgtttctaaaaactggctacatctgtacatcaacatcagatggatgaggcagctccaaaagtta

SEQ ID NO: 188738 - DNA, 188 bp, Arabidopsis thaliana landsberg
aaaatatgtttgttcgttttaaattagtaggtttgaagtctaataattcgattatggaaatagttgtgggtggaaatggtaaattttggagttggggggagttaaaagaagaattcaccacttttaatttctcgactcaaaattctgaccgattaaagacggtaacacttcaatacgcgtgtgcgtga

SEQ ID NO: 188739 - DNA, 62 bp, Arabidopsis thaliana landsberg
gaaaataacggatacgatcgtgaagcagaagcgtcgtgtatttacgatgatttgaataggag

SEQ ID NO: 188740 - DNA, 444 bp, Arabidopsis thaliana landsberg
atggccatcgaacacccgctggtgcgcgatgccgtgaaccagctcgtgaaaagcggcgtgcacgtggtcaccctgatcaccgacatatccgggtcggtcagtgccgcctacctgggcctgaacaaccgggctgccgggcgtaccgccgcatacctgatcggcatattcatcggaccgcgtccggccaaggtggccatgatcgccggcagcctcagctaccgcgcgcacgaagagcgggaaatggggttcctgtacctgttccgcgaacagtttccatgcatcgaagtcgtcggcttgcgcgaaggccaggacaacgccgaccgcaactaccggctcacgcgccagctcgtggaacaatgccccgaactggcccgcatatacaacatccccggcgcgtccgacggcaaagcgcgcgccctgaaaaaaaccgggctggaccacaaa

SEQ ID NO: 188741 - DNA, 104 bp, Arabidopsis thaliana landsberg
gtgatataaacccaagagagagaaaagagagacccatcaagataaaacataaaagaaaacgaagcagaagtaaaaagaaaggacagatacagttacatgtataa

SEQ ID NO: 188742 - DNA, 131 bp, Arabidopsis thaliana landsberg
atggctacgcatgatctcaatgtggacattaaccactgtgatgctgatgctgactcaagctgcgatcaaaagggactggcgctgcaaagttcccaccggaaatctcaaattccaggacccccagctcctct

SEQ ID NO: 188743 - DNA, 222 bp, Arabidopsis thaliana landsberg
tggataagcctgttgatacacctaaaccaacaccacctccggtggtggcaaatccaaatcaggaagtattggatttgtttaaaaaaacagacacaattacaacagattctatcgcatttaatttgtctggatttggttcaaaagtaatttctacatctgtacgaatccaatcagcaccttctaatggttggggacaaatatggaaagatacggtaattcaag

SEQ ID NO: 188744 - DNA, 607 bp, Arabidopsis thaliana landsberg
atgggaatattgattcagaccaccgggatactatacgtagtcccgtttgctattagcagcgccattgcaacccgtgtaggtcacgctcttggaggcggccaaccaacacgggcacaatgtacgaccgtgattggcttgatactcgcggtagcgtacggtttagcagctgctgtttttgtgacggcccttaggtcggtttggggaaagatgttcacggacgaaccggagattctcgggcttatttcggctgcgcttccgatcttggggctttgcgagattggaaactcgccacagacggctgctgtgcggagtcttgactgggacggctaggcctaaagatggagcacgcgttaacctatgcgcattctacattgtgggcttgcctgtggcagttacgaccacgtttgggtttaaggttgggtttcgtgggctatggtttggactgttatctgcgcagatgacgtgtttggtaatgatgctttatacgttaatccgtacggactggtctcatcaagtgaagcgggcagaggaacttacctccgctgcagccgacaaaagccattcggaagacgaaaccgtccatgctgaagtacaagacgatgatgat

SEQ ID NO: 188745 - DNA, 194 bp, Arabidopsis thaliana landsberg
accgacccatccggacaccgaccgaggcgacatacgagccaatgccaacccttgccgagattgccgcacgaccccgcgcccgcttcaagaccgcgatggaaatcgccgtcgaaggccttcgcgaagcgattcttgaaggggcgatcaaggccgactccccgcttcgccagacccagctacaaaaggttttcggg

SEQ ID NO: 188746 - DNA, 219 bp, Arabidopsis thaliana landsberg
aagaccctttttcaggagctctctaccatgaaggatacttcgccaagcgaaggacggcctgcttcccagacctgcctccaagaaatcgaagagagggaaatacctggccttcataatagaagaaaaaagactatccgagaattgaatcaatctccaagcctgtttagcaagaagcgcctggttaaaaagctggatgtctttgaaaccaagacctcctaa

SEQ ID NO: 188747 - DNA, 432 bp, Arabidopsis thaliana landsberg
cggtactcgtcaaggccaaggagcaaatcgaccgctgcgcctggatcgaagcggagcaactgttgcggccattgaccggcgaaaagaacggcagtcgagccgtgcaagtcgtccttctcaacctgctcggctgctgtgcctgcatgacgcaggagttcgacgacggcattaaatacttcacttccgcgatcaagctcgcccccaacgacgcgcggctgcatcagaacctcgccctaacctacgaatggaagggcgaactgccgcagtccgatccgtattggaaccgttatttcgatttgctcgacgaccgtatgccggcgccggcggacatcccgcactaccgcgaacatctgacctacgagagcctcggccgactggccgccaactacagcgacaaagaaaaatggtccagcgcactgaactatgtgcagc

SEQ ID NO: 188748 - DNA, 557 bp, Arabidopsis thaliana landsberg
atgttccaaagcaaaatttgtagattaattaagaaattatttgtcaacttgggtacctgtaagacggacaagaaagcagcgcgatttttattgggtaagtcaacattaagtttaatggcgatgttaagcatgaaaaaacaccaagagaggcagtcatgcaccatcatggatgcaagtgctaacctccctggctcagtgttcaacatctttaagctcgacaagactccgtaaaccacctgaaaaaacattgtggactggacgatcgctacatggtggaactccacgggagggatccccgcaggcccgcttttgagcctcttggagatcaagatggccgcgaattggccccatacgaaaggtatgaggaaaagtaagatgccgtttatgaatgctaacttgcctactctctttatcatcctagtgtctacttgacatgttgtgatgtagcaaatgaagagaaaacatatggcctcgaaggattcgattatgtacacgcttctcgcgtagaagaatgtagccatgtactgtttgttacgtcctataacggacggtcctaa

SEQ ID NO: 188749 - DNA, 285 bp, Arabidopsis thaliana landsberg
gccctggaccgcattacgttcaatacacccgatgacggcgtgctggcaggctatgtgtcggtcatccgtcagcacttgggcaacggccagaaattcgcgtgggtggagctggacaaggagctggcggggcaattccgaggagtgccgctggcggacatcctcacttgcgatgatgcgggagttctacgccgcaataccgcgaatcgtgaaaccaaacgtctttgcttgggcgactacagcggcaatctgggtgttgaaatggggaagagggaaccacagtcatga

SEQ ID NO: 188750 - DNA, 386 bp, Arabidopsis thaliana landsberg
  unsure (1)..(386): unsure at all n locations
acgcgacggtcgctggcgccgacggctggctgtacgcctgccagaacggcggcgtcgtcggggcgtggcgatcagggcagccgcggacgccggnnnnnnnnnnnnnnnnnnccggcggcgacgtggaaaccctgaccaccaccgtggacgggcagccgctcggcgccccgaacgacctggtattcggcccggacggcggcctgtacttcaccgaccccgcgcagccgttcgacccggaccagccgaagcccgccggccggatcgccgtgctgcgccccggccgcgacgcggcgcagaccgtgctcgacgtcggcggggtctactgcaacggcatcgcgttcggcactgacgatcgcctgttgtgggtggagtcgtatacgcgcgcg

SEQ ID NO: 188751 - DNA, 345 bp, Arabidopsis thaliana landsberg
aactaataaaagccaaaactttttgattctacgagtcgtcgtcgtcgtcgtcatcgccgaaagatgccgtcggggaaatatgactgtgattattgcgagaaagagtttcaagacactcaagtcgctagaaaacgccatcttcaaagcaaacctcatcttagagctaaagccctttggtacagttcttcttcctcaggtatctctcttctctcttttttctctctgtttcttaaaggaacgatttttaacatctctgtttcttttaatacgaaattcttagatcttgttaatccacaagtctccaattttgcgacgaaaggtctctgcaatcgattcattgcctcg

SEQ ID NO: 188752 - DNA, 110 bp, Arabidopsis thaliana landsberg
ttcgcctggagcacggaaagggcgatcaccttcaccgccccctaaaaagggttcaccttcaaagaaagtccgttcgccatcaccaccacttaaaaaggcttcacccctag

SEQ ID NO: 188753 - DNA, 321 bp, Arabidopsis thaliana landsberg
atggtcttaaaaccaatccattccttcatcgttatcctcctcctcgttctctccgtcggtgacaaaatatccgccggtactgagccggagaaggagccagttcctgcggtatggccggagcagttccacgcgttgatgttgatgaacaaatcagggtcattggagattgtggatctttggtatgactgggtcaatggacgtaactttaacatcattcagaagcagcttggtaagctcacttatgacctcgaatggaacaatggcacttctttctactacactcttgacgcttctaaaacttgtcgcaccgttcatttcgag

SEQ ID NO: 188754 - DNA, 112 bp, Arabidopsis thaliana landsberg
acggacctacccgaagagcatcatagccatccggaaccggacacccctttatctcccaatagaccgatattgtggccacagctgcctccctccatcattcaaggccttaaag

SEQ ID NO: 188755 - DNA, 1151 bp, Arabidopsis thaliana landsberg
tgcttcggctctattttttggtgtatatgaaccaaccaaacagaagctgctaaagggtttaccagaaaatcttagtgcggttgcacatttggtatgtattatcttaaaactatcctgaatcctgaatctaatttaagtgttagtttatctgctggagaagaatgaatgtctttttgacctgcttgacctgtatatattagttttaagacttactcatttgagacagaggcccttagaatctagttatgctctgttgaaaagtatatatgtcttagcgagttatataagctcaattaggctgcaggtgcgttaggaggtgctgtttcatctattgttcgggtaccaaccgaagtaagtctcttccttcttgtttctttgtttattcttgtgtgttggctataaacttgtgtaggttaatggaaacttcaacaggttgtgaaacagcggatgcagactggtcaatttgttttggcccctgacgctgttcgccttattatagccaaggagggctttggaggcatgtatgcggtatatctgttacttcttgattatggttctagtattttagtattttctttggagcaggcacatcttgagtttaagatgaacagacaacaaaagctccatgtaatgtttcctcatatgttcctaaacatgcagggttatggatccttcttattgcgagatttgccttttgacgcgctccagttttgtgtttatgagcaattacgaattggatacaagttggctgtaagtttttgttgctacaatgataagtaacagaacatccgattttgcaggcaaatgacagtgtgatatccatttgtttagaacaggcaagaagagatctaaatgatccagagaatgcgatgattggtgcttttgctggtgctgtcactggagttttgaccactcctcttgatgttatcaaaaccagattaatggttcaggtatgtcaaaacgataaatacacaaaatactgaaagagaattgttattcttggattcatttcataggagaatagaagctccagtaatatattaccgacttttcattttgaaatttggcagggctcaggaactcagtataaaggagtttcggattgcattaagacgataataagagaagaaggttcatcagctttgtggaag

SEQ ID NO: 188756 - DNA, 424 bp, Arabidopsis thaliana landsberg
atgaacatttctcgcaaccacgctcggatcttctatgacttcactagacgacgcttctctctcgaggtacttggcaaaaatggctgcttcgttgaaggtgtcctccatctccctgggaaccccaacgtcaagctcgattcacaggaccttttgcagattggtgacaaggagttctacttcctgcttccggttcggagtatcctaggcggtccattgggacccaggcaccacgtcttagggaaggctactgttgttccgtaccataattatcattcgggtccaggttccgggtcgggtaagaatggcgtccggagtagagagttgtatgagtacgatgatgaagacgacgatgaagaggaggatatcagaggcagtggaaagaaaacatggagagatggacatgaaggagtatatgcctctggag

SEQ ID NO: 188757 - DNA, 272 bp, Arabidopsis thaliana landsberg
atgttcttgggctaccgacccccggtaacctccagcatccgcgccgaagactcccggagctcgggcgaagacatccttcccccgagggctgcgcacgtccccatcaactccacaacaaaactatcggagacccccagttcccccaactgcagtacctagttttcttttcttagtcgttggggcggcctcctgcgcagggtcttcttcagtcacagtcgctggccctttcccgcagcggtcgaaagcgtcatccccgggataaccgccgtacg

SEQ ID NO: 188758 - DNA, 389 bp, Arabidopsis thaliana landsberg
cccgagcggcgatggaccggtgtcggaccgctaccgacagcgtggaacggacaggcgtgtcggaacttgctggaaatgcaccacgttcaagcacagaacggagctattcatgtcgccagcacccacaaccgcctcgctttggatggatgtcacgctgccggaatttccggcactcgcggaggacatcgacgtcgacgtgctcgtggtcggcgccggactcacgggcatcacaaccgcgtatttactggttcaagaaggcgtccgggtggcgttgatcgaccgagaaaaggttgcaagcgccgacagcgctcgaacgaccgcgcatctgacctacgtcaccgacgaacggttacatcatttggcaagcaaatttggcacggacgccgcgc

SEQ ID NO: 188759 - DNA, 455 bp, Arabidopsis thaliana landsberg
atggtaagagaatcattcgggctaagcctggtcttcgtataggctataggaaccggctccatcagctcgtgggccgaattacaacttgtacctgcaactgctaaaaaagtgatgagcaaggtgttgaataaagttttcttcgtcattatacgcattgctgtttttaagtgaaaagaaaattaacccttgttaattctaaaaaaatcgttcgcgaagataacccactacacctgaaataccaatgccccaaatgtacttttaacatttgggccactgttgattatgaggcaaatgcagcaggcaattcagccctatttgtgctgcatatctttgatgatattaacagtttcggataaaataatatcctttttcagcaggcgcagccagttcttattacgctcggcggtcgcagtatcggaggtgatcctggtgtttatcggcaaaaagatccttga

SEQ ID NO: 188760 - DNA, 69 bp, Arabidopsis thaliana landsberg
atggacctcaacctgatgataacgtcgagcgcagagatgaagaaaattaagagtctcgatgatgaaaag

SEQ ID NO: 188761 - DNA, 747 bp, Arabidopsis thaliana landsberg
atgaggtcagatacggttcttgactacgtggtattcgaattatcgccaaagcattcaaagtgagtatatgttccacttcaagatttcatgatttctagtttgttctgtataaacaagtgtgtgtttttcctttgatagatgcgaattgtttgtatcaagcaatgaacagacagagaagctagcttcagggttgattcaaccctttgtgaatcatttaaaagttcttgaagcaaaagcgtcgcctgttgctcaatcctctattagattggaggtggagaaaagcaacacttggttcactaaaagaacattagagaggtttataacaaagaattcaatatcattttggtttcttttcacatagccttttttcgatatagtaatagtttcttccaccatttgtcctttcagatttgttcaatttgttaatagtccagaaactctcgaaaaggtcaatacatattattccgagatgttgcagttggaagcagctcgaacattatattcgcaggttgtaaccactattttgaaacttgacttctaattgtgattcttgaccgatcgatctttcctaaagttttggtgtcatttttttggttcttaaagcggagtgaagactcaaagtttggtgcatcaggtgtgtttgattttactgatgttactttgctcgtacattgatctttaacatcaatttgaatcctatttacttccgtttcagatgatggagctgcagcagatgccacaaagtaa

SEQ ID NO: 188762 - DNA, 162 bp, Arabidopsis thaliana landsberg
atggtcatgaaatatgtttggttgatccaagaacttgaaccggtgtgtagccgcatgatcctttgccgactaacgactacgatgaaacttgtaagatgcgcgacagactttttccaggcccgtcattttcaagactcgaagtggcatcgaagcagggacagg

SEQ ID NO: 188763 - DNA, 297 bp, Arabidopsis thaliana landsberg
cgaatacacccgcaagcaggtggatgaactgacggaatgggtgaagcgtccgcagataggcatgcagggaatggtatatattaaatgcaataccgatggcacctataaaagcagcgttgacaaattctttaccgaggataaactgaaaaccattgcagatgctgcagatgcacaagccggagacctggtgctgattctcgcaggcaaagaggaaaggacacgaaaagctgccagtgagctgcggctggaaatgggcaaacgcctcggtctgcgcaaagaagatgaatttaaattgct

SEQ ID NO: 188764 - DNA, 330 bp, Arabidopsis thaliana landsberg
atggcgccgtattggaacctggccagctcccttcctagcacaagcaagccctggcgcgcccaagcagcgcgcatcgccgcagcccttctgcaacgccgcgggcatgaagcacgcaactatctggccaacccctacgtcatgcatctggcacgtctcagcctgatgttggccgaccaccactattccagtctcggcatcgacaagaacaatcaaccggtcagcgcacgccaacgtttcgtgcagaagcaacaaagcgtcgccgcgaataccacgcgtgatgccgcgggccgcagcgtgatcaaccagtctctgctcgaacatctgcttggc

SEQ ID NO: 188765 - DNA, 220 bp, Arabidopsis thaliana landsberg
atgaatgatggtccaagacaagaatcatggaaagattttgtcaagatagctcaaaatgtaccatgtacgtgacatcgagctaacccattgccgactcttttgctgcatcttgcctaatttttgtcactggcctaactctgcttgttttcaaggttatttttttacaaaaaaatcgaacatatacgattcggagcacaatggagaagtgtttcgatactaa

SEQ ID NO: 188766 - DNA, 77 bp, Arabidopsis thaliana landsberg
atggatacagaggaaccgagaggagggggctctactatagaagaagccatggagaaaggagatggagggagtaagag

SEQ ID NO: 188767 - DNA, 450 bp, Arabidopsis thaliana landsberg
atggctgtccaaggcgcatttgcagatagatctagtgctttactgacagttcagacgcttctatcagagcttccttctctgcaaactagagttgagaagctagaggctgcatcatcgaaggtatttggtggtgacaaatcaaggatccgaaaaatagaagagttaaaagaaacaatcaaggtcactgaggatgcaaaaaatgttgccatcaaagggtatgagcgaatcaaggtatttagtaataaccctatgcatatcacaacttgtgctgttttaccaacatgatatgaatattttggttatgctctgtgtaaatttgtatcattgcaggaaaacaaccgatctgaggttgagaggttggacagagaaaggcgtgcagacttcatgaacatgatgaagggttttgttgttaaccaggtacgttattattatacagcaccttaccattag

SEQ ID NO: 188768 - DNA, 53 bp, Arabidopsis thaliana landsberg
tagataacgagaaaccgccgcaaaaccagataatctgctatagtttgcggtga

SEQ ID NO: 188769 - DNA, 575 bp, Arabidopsis thaliana landsberg
caacctatggttagagtaaaaaagtccaactgttccccccaaaacctaatatttcttcaagagcaaacaatttttttgatagaaacttaccatagaaaagctatccctgatgaacggatcaacagtccatttactggtttcctgaaatcgatcaacttccaggtaaaaacaaagaacgaatcttcctctaaacaaaaagatcaattatttcatcagcaacatgaatctgtatatgctggatgcagaaaaataccaaatttctggtaagagggcctgcgcagtgatggcatctgatttcaatatcatgcccagaatccgtcattttctttgcaagaagaagaagagctcgagaaacccaaaccagactttttgttttgttttgtttcgtctcttttgtttttgggtcgtagggtttatactctgttactgtttccttcttcctctgttcgacaacaaagagagtccaccgatcgatcacttacggtttagaccattttagctccgtaaaccgagtcggtccaacccgtgaagaaaataatcagaatatttggaccggtcacagaaccggttcctga

SEQ ID NO: 188770 - DNA, 366 bp, Arabidopsis thaliana landsberg
  unsure (1)..(366): unsure at all n locations
atgacgaaggtcagtgcttgccgaacgtggtnnnnnnnnnnnnnnnnnnnnnnnnnnnnnnnnnnnnnnnacttgttctcaaatactatgaattaagaacaaggcaacacgagatgttaaatgttaatgcccttcgtcctttaaaacattatttcccttaggatataatgattttcagaagaagaaacatatgacatataggaaacaacatatacaatcatatgacattattaattcattctaattatataatcatagaaagacaggaacaatattgaattacaaaagtaccttcggcttgatagaaggcaaaaaagtacaagcatgacgcaaaaacaagtaccagtcagcgtgaacagtacgagg

SEQ ID NO: 188771 - DNA, 1491 bp, Arabidopsis thaliana landsberg
aggatgattcatcattcttacatcccgacactaacttctatggagaagaagaagcagaacagccgagaaatgctgttacaaatgaacaagtgtcttatcaaatcgattcaagtacccaaaattataattctgccacagattctaagacagacgcagtgcaacatgaaccgcctcaagaagaaggtcatcaatacaagttttcgtcttccgaaggttacagatttgaaaacaaccaactgttccatcctccatcagaaacaaatcctcagaggcagaatctcgatacctaccccaacataatggtaaacatcaaacactatttagatttaaaaatctatcacacaatcgaaaaggatcactgaaaagattttaaccatatctactattttttttttcttaatgtccagcagcaaggatatacaagttcgttacccaacactctactcccatcaggcattcaagatggaagagaatctaatcttcactactcgcctttcacaacactatacaacactgaaatttccatggccgaggtaaccaaatccccgtttctctttcatataatcttattctaagctttcctacaataccattgcttacacaaatttgattgcaggcactaagagctgcgagtatttcacctcaaaacgcaatacccagtgcaggacagcaagcagcaactcttgcacaacatcttgccttaaatccctactctcatcagcctgagatgcctttaggacattatggcaatttgataagctacccattcatggcacagtgttacaaccctttcatgctttcagcttttcaacaagtgtttcctactggtaatcatcagtctctagttgatatgcttatgcaatacaagactcaaacaaccgctcctcctgttcctcctccctctgcctatgggttcggtggaggcgctgtctcaagtaataacttccctttgaatcccacaagtgctgcaaactcctacgaagatgtcttgagctcacagtttaatgagagcaaccacttggcatcatctcttcagcagcaggtaaaccataaaattcttctcaggttttataatcatgttggtgtgttttggttctgtttggtttccttcctctgtttagtcagctggaatttatactggagtattcgattttatttatttttgttcgattttggatgggtttggctcagttttgaactgttggattttaagaaaatcggtgcagtttggtttctgttatttgtgcgttctctttttcgcaaaccttaacgagtagctttctttgttttgctttgatctacagaacgaaaaaacaacagcatggcatcaaggacaacaagccaactcgcgagtggttccaggaagcggatattacagctaccctggtcatcagaatcagcagcctcccggttttcgtcaacccaacaactgcaacatcagcagcagtcgtctcaactacaacaacaacaacaacattatggaggacatgg

SEQ ID NO: 188772 - DNA, 1250 bp, Arabidopsis thaliana landsberg
atgactgacgaaccaaatcaacagaatggacccgcaaacattggtgctggagatgcaccacgggatcaccatcagaggaaaggaattgcacctcctgctatccagaacaacaacttcgagattaagagtggtctcatctcgatgattctggggaacaagttccatggtctgcctatggaagatccactcgaccacttggatgaatttgataggctctgcaacctaacaaaaatcaatggtgtcagtgaagacggattcaagctccggttgtttccattttccttgggcgacaaagcacacatctgggaaaagaatctgccccatgactcaatcaccacctgggatgattacaagaaggcttttctatcaaagttcttctccaatgccaaaactgcaagactcagaaatgagatctctggtttttcacaaaaggctggtgaaagcttatgtgaaacatgggagcgtttcaaaggttataccaaccaatgccctcatcatggcttcactaaagcctctctgctgagcactctttatagaggagttttgtattgttcccttgatagaagatacaaagacaaagactcatacggtttttgactacactatcaatgctttgagaagcaagaagaagcttggttagtgttttggagtcgaatatgacttgttgtcatgtgcatgattgagtataagaacttaaaccgcaactttatcctaaaagcctaagtagtgtttccttgttagaagatacaaagacaaagactcatatggactttggctacaccatctgatatgtctataatttgcatgttttacacatccttttatcaccattttgagtcttgtttgtatagtcgagtctaggactagtcttgcatacattctgcattttggagttgtttcaggtgttttggagcttttggtgctcagaaagagggaaaacagaacagaaagtcacacttccaccaaacatactcgatcaccagtagcagagagggaagcagtcagctcagcagtccatccagacacttctactcgaccgcagaggagcggaggcagtccattatgcaatcctactatatcgcagaggcgaccaggtagtccactttgccagtccaccagttatactcgatcgcagaggagaagaaccagtccatcctgacagccgacacacttactcgatcatagaggccaagaagcagcccagaccattctgtcaaccaacttactcgaccaccacctcgaccctctga

SEQ ID NO: 188773 - DNA, 196 bp, Arabidopsis thaliana landsberg
agttcagtctctctggcaccaccaccaccaaaaccaccatccagtgctccgtacgatcagattatcgctccaagaagtgctccgagaatccaggtgagttaccgctccgagaagtgcgcactcatgtcagcgcgtgttagttacttgacgcgtgcagtttaacccttttcttgtttcttggcgtacagggaactga

SEQ ID NO: 188774 - DNA, 216 bp, Arabidopsis thaliana landsberg
cggaggatgagtttgacatcgattgtggcggtggagtctccttcatcgagcaacgctccctctagaaaaaccattgatcttggccatggaagcgacctcatttacattcagaggtttcttccatttcaacaatcttggactttcttcgattatctcgacaagcatattccttggaccaggcctactattcgtgtctttggtcgatcttgcctccag

SEQ ID NO: 188775 - DNA, 95 bp, Arabidopsis thaliana landsberg
atggccacacggccgagctcgccggccagggaccttgccgggtctcgccaaagcgaggctgttgagtgcacgacggatggaagttatgtgacaaa

SEQ ID NO: 188776 - DNA, 321 bp, Arabidopsis thaliana landsberg
gagggtttgcaaggctcttgctagattattagcattggcgctcgacttggacacaaattactttgataaaccggaaatgctgggaaatcctatcgcagttatgcgtttgcttcgttacgaaggtgatatattttcttaagcttcgtagccctacttatcctaaacaattttctttcttccttttgttaccttttagggatgtctgatcccttgaaaggaatatttggatgtggagctcattctgattacggaatgctgactctcttagcaaccgatagtgtaaccgggctccaggttttcacatttttgctagtcatataa

SEQ ID NO: 188777 - DNA, 1149 bp, Arabidopsis thaliana landsberg
atgcattacatgttgagttggtttgtacatggcggcgttgatgttccaaacctggacttgggaataccaacatttcctccatatcccaaggaaaaatctctggtttatcggattgttttggtgaccagcttggcattggttctctttgttgcgcttgttgcatcagctttaagtatctttttctacaggagacataaaaaggttaaagaggttctagaggaatgggagatccaatgtgggcctcataggtttgcttacaaagaactcttcaaagccacaaaaggtttcaaacaacttctaggcaaaggagggtttggtcaggtctttaagggtacacttccaggttctgatgcagagattgccgttaaacgaatttcacatgattcaaaacaaggaatgcaggaattcttggctgagatatcgacaattggtcggcttagacaccagaacctagtcaggcttcagggttattgtaggtacaaggaggaactctacttggtttatgactttatgcccaatggaagtcttgacaagtacctctaccacagagcaaatcaagagcaactcacttggaatcaacgtttcaagatcatcaaagacatagcctctgcactctgctatttgcatcatgaatgggtacaagttgtaattcatcgagacatcaagccggcaaatgtcctgattgaccaccaaatgaatgcaaggctcggggattttgggttggctaagttgtacgatcagggttatgatcctcagacatctagagttgctgggacattctggtacattgcccgggagctcataagaagcggaagagcaaccacagggacagacgtctatgccttcgggctgtttatgctagaagtctcttgcggtaggaggctgatagagcgaagaacagcccccgacgaggtcgtcctagctgaatggacattaaagtgctgggaaaacggagatattctcgaggcagtcaatgatggaatccgtcacgaagacaatagagaacagctcgagcttgttttgaaattgggagtgttgtgttcgcaccaggctgtagcaattaggccagacatgtctaaggtggtccagatcttgggtggtgatctgcagcttccagataatctactcgatatagtcaaagcagagaag

SEQ ID NO: 188778 - DNA, 387 bp, Arabidopsis thaliana landsberg
atgctggcgccgacgtctgcaatgcggtggacgaactcggtcagttgctcgacccacaccggtccggtagcggcttccgagcgcaacgcggcacgtatctataattgtgatcacctgtatttcgtcaccaacggcacttcgacttcgaacaagattgtctggaactccaccgtggcgccgggcgacatcgtcgtcgtcgaccgcaactgtcacaagtcggtgctgcattccatcatcctttgcggcgcgatcccggtattcctgatgccgacgcgcaatcatttcggcatcatcggcccgattccgctccacgaattcaagcccgagaacatccagaaaaaaatcgatgccaatccgttcgcgcgcggcgtcaaatcgaaaccgcgc

SEQ ID NO: 188779 - DNA, 206 bp, Arabidopsis thaliana landsberg
ataccctactgttaagtaatagtagtgagagagtcgaatctttggctactcattcgataactacgtcatccaagcgtaaggacaaagaagatgatcctcttgaaagtcaatcatcgtcatccaaaaagttatgcattccgagtattggagataatattgtcaaaggaagtgttggaatcgtggaagaggatttggtttcaaaataa

SEQ ID NO: 188780 - DNA, 57 bp, Arabidopsis thaliana landsberg
atgcatcatcaaagttttagactatacaaagaatgtgaatgcctgagaagtaactcg

SEQ ID NO: 188781 - DNA, 385 bp, Arabidopsis thaliana landsberg
atgcatgctatccccaagaggcgactgttagatcagggcaaaaaacctggctgtcctcgttgcaggttcacttcaacagcagctgccacactcgaaggaaaatattatcttactgccataaattcaactcatgagaaaatacatcagcctcctgctactggttttctattacagtggcagccatgcacaaacccaccaggactcgcttgactggataagcattaccagccgctggtacgatcttgacttcacccaaccggagcgcgactcgatgctcgataatatgcgggagatgtacgagctctaccaggccatgcaccggcaatatgtatatgaaacggtgccctatccattcggattcagacccctgcctaacggaaaatcg

SEQ ID NO: 188782 - DNA, 519 bp, Arabidopsis thaliana landsberg
  unsure (1)..(519): unsure at all n locations
atggcaacaatatcgaagaagtattggttgcctaaggtacgtactacacacaaggccagatctctcgtattcagttggtgttttaagcaggtatatgcaagatccaagagaatctcacagagccgccttgaagcaagtcctgaggtatcttcaaggaacaccctctcttggactctactttaagcatggtggtcaatcgggtttagtaggatacagtgacagcagccataatgttgatgtggatgatggtaaaagcacaagcggtcatgtgttttatctcaacgaatgtcctnnnnnnnnnnnnnnnnnnnnnnnnnnnnnnnnntcactttcttcttgcgaagcagagttcatggctgccaccgaagctgctaaacaggctattttgttacaagatctctttgccgaagtcacaggaactgaatgtgagagagtggtgatattagttgacaataagtctgccattgcactcactaagaatccagtatttcacgggaggatcaagcatatacatcgaag

SEQ ID NO: 188783 - DNA, 300 bp, Arabidopsis thaliana landsberg
atgacattagttttgaggacaaaactttctcaagaaggagagtatgatgcggacatcacatttgctgatgtactgattgatggactttctgacgaacttcctgaaagacttgctgaaggacttcctgaactactacacgtcgaaccaagcaaggaaagtgaatcatccatcaaccttggatcgtttatgttggagatttcaaaccctccaaatgaagaagaagcttgcaaaacatctttggccggaatatcaaaaggaatcaaagagaaattcaaaggaaataaactttccttattcgac

SEQ ID NO: 188784 - DNA, 170 bp, Arabidopsis thaliana landsberg
gttttcttagaagcgtcaaaattgagattcgtaggcttttttcatccccaagtgctcgttgtactcggatgcatctcctatgcgtcgccaaaattggacattcgagtggcctgatgttagccatgttagctagttttgtcgtgttcattcttgctggggttttatcttaa

SEQ ID NO: 188785 - DNA, 238 bp, Arabidopsis thaliana landsberg
gtacaaagcgcggcttgtggcgaagggattccatcaacaatatggtcatgactttaaggagacattcagtccagtgattaagtcaaccaccgtacggtctgtgcttcatattgccgtaagtaaaggatggagtatccggcaaattgacgtcaacaacgccttccttcaaggcaccctatcggatgaggtatatgtgacacagcccccaggatttgtggacaaagataatgcccaccat

SEQ ID NO: 188786 - DNA, 310 bp, Arabidopsis thaliana landsberg
aggtacaacagattgctcttcttcctggcctgccctgaaatcggatatcaacgccgagtggaccgctggtgattgtgatgatgatgatggtggtggcggtggtgatgtcaacagccgcgagaatgagtcggcggcggtgtacggcaaggggacccgatcggtgaagagcaaaacgggtgctgctgatcaaagactacttcttctgctgatgatcgtcgtggtggtggtggtagcggctatggtgactgggcgacagagcagcacaggcgacaatcgacgacgagtcaaattgagcaagtggatgcagtag

SEQ ID NO: 188787 - DNA, 236 bp, Arabidopsis thaliana landsberg
atgggcttcgctccgatacgagctgtgacggaacctcccaagtcattaggcccacctacagttgtccttgtccaacggacctcagacaaccctgcaggtgcccctgaatcacttgacaagttcgatatctgtatcctttaccttgcccaagagcgtttcacccgtcacgtagacattacaacacatcggaggtacgagaatgcggaagcagttacaataacttactttattttaaa

SEQ ID NO: 188788 - DNA, 82 bp, Arabidopsis thaliana landsberg
atgtcgcggatgatgccagcgattctgcatcggatactgcggatggctgcagtagcggcagcgttagatctggcagcagtag

SEQ ID NO: 188789 - DNA, 1202 bp, Arabidopsis thaliana landsberg
atgggaacattgtcagaagctagtggagaacgaaattctgttaatcagcaaaaaccagacactattcaatcgcaggtacttaatgctcagcactacgacatttgaagtttgagctgctgtaagatgctcattgctttgttatgtgttcttttggttctctcagatgttacaaaatactccacagagaaactggggtcagctatcgacagtacaaggacacttggccaacttttacgggtacttgaaatttctacatttcttcacttagctttaaaaagaggattcctgacattgttgtgttatctgctttcaggaagtatgggatttgggtagcaagacaccccactcttgttttgtgtttgtcagtctctgtagttcttctcctttgtgtgggtctgatccggttcaaagttgagacacggcctgataaggtatgtacttggtttctttgcccctttcttattgctgttacaagctattgctatatgcaacctttgtaaatgtttttatattgtatgttgcagctgtgggtaggatcaggtagcagagctgctgaagagaaacaattctttgacactcatcttgctcctttctacagaattgaacaggttcacatttctatcagcttgtttctataacttaaagttcttgtgctggataatgcagcctttttttttcatatgggggacgaaacattaagcttctcttttgtataagtggtacttttcacaatgttatgaaaatttatgcagctaataatagcaacagttcaaacatcttctcacgaaaaggcgccagagattttgacagatgacaatattaagttactttttgacatacaaaagaaggtatcccaactattttcaaatccatctaatcacccatataatgtttttatgtaccggacatgtaaaaagttgtttaatatggtaggtcgatggacttcgggcaaatcactcaggttcaatggtttctctgacagatatctgcatgaaacccctgggagaggattgtgccacacagagtgttctgcaggttgcactacttcctttttaccacccgtttttagcttttcctcgtttgacaaatagtcactaacgtatctggtggatttttcttgcttttggaagcagtatttcaaaatgaaaccagaaaattatgacgactatggaggcgttgatcatgttaaatattgttttgag

SEQ ID NO: 188790 - DNA, 703 bp, Arabidopsis thaliana landsberg
aaccccatggacgggcaagagtacacgtaagcggcaaggccgaccgagccgggggactcctacgcctccgggatacggatacctcactcatcaccttccgtgagaagcaactctcgctcgcgcaaaacaattatgttaccgacaaaaaagtccagatactcgaaacaagaggaaaagagacgcagctttacaacacggcgaaggtgtgtttaggcctcggcggccgcagaaagcacacgctacaagatgatctgatcctgcaggctcgggtcttcacgctgaagggagccgtagcaccctcggcatcgacgacgtcttcagcaaagcccgacccagcctcgggcgacgccacggtccaggggctcctccgggaatccggcccgagcaggcggctcaaccggttacccctggggcctcggtcaaccggcttccaagggcgccagcccgatccgaggcctcaaccgaccgactttggcgtcggtccgctgacggacgacacggctaggctccggccaaccaggttccccattctcgagccaactccgcctctgttcatactgatatcgctacccctagcctcggtccaccgaagggcggccgaggggtctcttcaactaagctagaggagccccagacaacgaggctgaacgggccgagggattcctacgcctccgggatacggatacctcacccgtcaccttga

SEQ ID NO: 188791 - DNA, 465 bp, Arabidopsis thaliana landsberg
atggcgatccggccaaacgtgcaggtaacgaattcctgttccagatgcaggccatgcagaacatcatggtcatgaatggttatcatgtacaaaagatcgtaacggcctgtccgcactgcttcaatacccttaaaaatgaatatcccggcctgggcggaaagtacgaggtcattcaccatacccagctcatcaatcaattgctggccgaaggtaaagtgaccatcaaagacggtggtgatttcaaaggcaaaaaaatcactttccacgatccctgttatttgggccgcggtaatgatgtatatgaagcgccacgcgaagtgctgcagaagctagatgcggagctggtggaaatgaaacgctgcaagcaaaaaggtttttgctgtggagccggtggtgcacaaatgttcaaagaggccgaaccggggaaaaaagaggtccccaatccacgcaccgaagaagcgcttg

SEQ ID NO: 188792 - DNA, 359 bp, Arabidopsis thaliana landsberg
aagtctcctggttcccgccgtttacgctttacgacgacagcgaggagaatttccaaaacgaagacatcaccaaagaagaaagctacaaggagaaaaccttaaatgagctaatcgtaaaagagccagccgccaaaaataaaagaggaagaaaggctactacaaaggctcctacaaaggtgcctccaaaggtgacaataaaaatgccaaaatcacctgaggaagccaaggaaaaagctgacggtgagagggtagatgatgatgattctattcttgatattactgaccagtgggtagttgaagataaagatgaggaggcagcatgctgcctaaatctgatgaaaatgaggaggaaaccatga

SEQ ID NO: 188793 - DNA, 60 bp, Arabidopsis thaliana landsberg
aaaacgataagaaatgggtcagagcaagttggtgttgtaaaagtcagaaccacaacgtga

SEQ ID NO: 188794 - DNA, 163 bp, Arabidopsis thaliana landsberg
gcgtctccaacgtcaagtatatcacgttaaaatccgagttagcgaagtcttcatgcgggattatgaaccctcagctttgcctacgatccttgaattattctcgggtccttccgtgagcgtgcgtcggaaaatcaatgctccttttcctcctcctctgccgtga

SEQ ID NO: 188795 - DNA, 164 bp, Arabidopsis thaliana landsberg
gtcaacccgcaacatttaccgctacgtcaactacgccgggacaacctttagctggtatataacgccaactggcggcagccctgtctttaccgggccggtatttactactccgccagtaaatggtaacattacttattataccgaagctaaggatccaaatacag

SEQ ID NO: 188796 - DNA, 372 bp, Arabidopsis thaliana landsberg
gcgccgttgggccttacgccggtggtccgaaataccaaggccaccttaattatatgccccctcagcaccattactaactgggatgagcaaatcaagcagcacatagctcccggtgagctttcttatcatatttaccatggacccaatcgtatcaaggatatagcgcggctcgcctcatacgacatcgttctcacaacctatggatctgtctcaaacgagctcagcgctcgtcgcaaagcaaagagtggcacttatccgcttgaggagcttggatggtttcgcattgttctagacgaggcacacatgattcgcgagcagtctaccatgcaattcaaggccatcgttcgacttcaagcccagcggcgatgggcc

SEQ ID NO: 188797 - DNA, 226 bp, Arabidopsis thaliana landsberg
atggatttaaacgaggcacaacgttccttgcggctatcaaagagtgaaacctacaagtacttaagaaagcttgatgaattcgggttggtaaaatggaacaaaaatgatgaagttgatgttcctgaaagcgctccgtttttgtttgattcaaaatcggtttcggcaatgaagttcgcaaggtgtcaggcccacgcgatggttgaagacggatttgaaccgtcaaccg

SEQ ID NO: 188798 - DNA, 1114 bp, Arabidopsis thaliana landsberg
tgaagaggcaaaccatgttgagtggatgatcaccgaggatggtgagttatacgcggtgccaactgagaatgccaccgaagaacaagcatgtgacagtctgaacaatatactgtcacgtttctatgtgccatcgacggatgaggagggaagtttcagtgttccaaatatgggaaccattggcgagcatgggctagaactggaagaagtgaatggagacatgttcgatgtaccattgatccaggcgaatggtgcgtttggagcgatgaataagtatggagacgatgatgagtatgacatgctaatgcttatgggaaatgacgaggaagatgagagtggagtcatagagaatgagatagagaacgagttagagcaggcgatcgataagttaatagcctagtgtgcccaagactttggtccgaacggagaagaaagaggaggaaatgggaacgatgggggtaattcctcattggactcatttgaatctttaacgccataacctaagagtccgagtgtgatcaacatctcatcggatagttcggaggctatcctgatgatgctgaatcccagcaagccggaatcatgttgggagattgagatgtttaagggagatgagccaagtgaagaagaaggaagaggaaggtgggatccgatgctgcttgaacaggaactaaaccacgagtatttaatgaatcatttaaaacttgatgaagaaaggtcgaaagaaaagatggttgataaggagggagaagacgagaggcgaaagggaaagagaacgaccgaagtaggaatagagtcggagaagtctaaggcccaaaggatcgttggagtaaatctgcatccacttcggatcggatatgggattaattccaaggttaagcccagaatacgggcaacggcgaggaagtcagttagaaggaagttacccactccggctaagcgtccgtgggagatatgtggctatactgatcattcgactgagcagtgcttgcatccaccacaggctatgccttatatggttgattgcgccaagtgttactcttgtggaggagtgggacatgtgtccatgtattgcccgtaccttgcgccgaatgcgggcgaaggatcctcgaggtga

SEQ ID NO: 188799 - DNA, 294 bp, Arabidopsis thaliana landsberg
atggcggttgccctcatacgcgccggcgcatcgtacgtcaggtactcagggtcggcgcccacacctgaaaggtaacaaccacgtggtgcggcgcctttttttcctttcttctatgctaacctgccgcccagcgtggtctgaccacaattttctcactagcgagactatcaactacgtcgaaagcgtagtgcgctacagcgcacgcatgtttggcgcaagtaactcgttattcttcatgcatacacaggtcaggccggtgtgtttgtatccgtacccgtatagtacggataccag

SEQ ID NO: 188800 - DNA, 537 bp, Arabidopsis thaliana landsberg
tcgcagcgggggcaccacacacgatgagactggagtagaggccaaaggtaggagccgacgggtggaaatccccccgcagtcgcagcgtcgtgatggtgtgcatgttgcagctggagtagagaccggtgcgtgctccaagaagacgatagccctagatgccgaggtagccgaagtcgaggtggtcgcggtcaggagacacgtagcagaagcctgatcttcgggaggggtcgacgttcgagcgtcaacgatcggcagggcgacacaacaaaaggacaccggcaggccgaccttcgtgcttcttcgatcgtccagacgtcaaggagccccgccaggatggccgacggcaacgcacgcgtctgcgccgatcatggtgttcgcgcccgcggcagaatagaagggaaaacgacagatccggccgggaaggcactgacagcgacggatccagccgggaagacgcgatccagccaaagggacgacggatcgagccggaaaggttgcagcaagccgcggcaacgacggatccaacgaaggcgatga

SEQ ID NO: 188801 - DNA, 118 bp, Arabidopsis thaliana landsberg
cgacactgccttagcgggaagggctatcatgccgtgcatggcggccaccacggcgccagcataggccgcaccgcagaccgcatatgtaaaaagggctgcaccgaaggccaggttgagg

SEQ ID NO: 188802 - DNA, 618 bp, Arabidopsis thaliana landsberg
atgcagaaaacagaaaatcaaacagaaacagtaaaacactcgaccaacacagctctttgcagagcactgggtgaggtcgagtgacaggtcgagtaacagacagaaaatgaaacagggatactcgactgcacagtctgttgccagacaactgggtggtcgagtatcaggtcgagtaacagtaaagaattgcagaaactaagcaacagaagacaggatgcagtacacagtagtagagtaaacaataaaatcaatcagataaagaattcataaggatgggataattgagtagtttcgtttcctcagtttacagatgattgacatgctcaataaattaaccctagacaacgagttcattaaccaaatctaagtgccaccgcaacagagactctcaagctaacctagtcccaaactcaatcaccattgacgagagctaacctaacaggcattacgaatcaacaagttaaagccaaaacgctctctgcaaccaataccttggtacagggtcacgaatctctggaattagtggttcagacatttcatcgaacaccttttgggtgcggaaatgtctgggctcaaattccagttgatcagaaagcaataggcattaagaacaactaa

SEQ ID NO: 188803 - DNA, 76 bp, Arabidopsis thaliana landsberg
atgagtatcgttactgttcgaaatgttgaggcgaaaaggttattacttgaagaaattcctcagttgcatcatgaag

SEQ ID NO: 188804 - DNA, 175 bp, Arabidopsis thaliana landsberg
tcgatgctctgcagcaaatcgctaccacattgggctcgaaattctggaaattcgatgctgaaaattgtaagattgaaatggtggggttaactgaagttcctcctccaacagctaagcaagaaatagaatgtgaatgcagtcccactaacgacactgattgtcatgttgtcaaatt

SEQ ID NO: 188805 - DNA, 585 bp, Arabidopsis thaliana landsberg
atgttgtctttgcagctggagctatcgttatggctgctgctcctgatccgtatgttttgatatcgggtcgtctcttggtcggtttaggagttggtgttgcttctgtgactgctccggtttatatagcggaagcatctccatcggaagttagaggtggacttgtgagcaccaacgtattgatgatcactggtggacagtttctttcatatctcgttaattctgctttcacacaggttagttggttacttggttagttagacatatctttcctcaccgtaaaaagttttgagttttggtgaagttttgttacatctagagagagcaacagctaatatgtttgcgagtgaatgacaatgcatcagtcatgttatgttcaatgtaagcatttaggaattctcatagggatctgtgaattcagaattttattatgggattacaagtatgctcttttcatctgactctggttagaagaacgaattcagaaatagagtgaatgcttatattgttttattaattggaactaaaacgaaacttgagaaggtggaggactgtttgatttgcattgctgttgatgccgaagcttaa

SEQ ID NO: 188806 - DNA, 64 bp, Arabidopsis thaliana landsberg
atattcacggattagcgttcatgatatatgttgggttatcgatcggcaagttgacattgtttga

SEQ ID NO: 188807 - DNA, 408 bp, Arabidopsis thaliana landsberg
ccctagccttgactttatcaacaggaccaccaatctcctccgcggtttcgagaatccgatcttccatgtcaccggatatggtagactttttctcactatgccctttgaatttcctctgagtccttttcctccaaaccctattcttcactctctccgtttgctgaccttccaagatccgaagcagaatctcaggtaaatctttgaaatacccaaaatggacaagagtagggaaattcaaagctagagtttttgggtggttcttgtaaagccacaaggcagctgtgtaaaacccttccttgtctgattttccagttcctctaacacctctgagattgcagaggagcttcaacgtagtcaaaggataatgagaccaagaaatggccagcctttggatcagatcatcggaag

SEQ ID NO: 188808 - DNA, 44 bp, Arabidopsis thaliana landsberg
aagttgatgaggaagactttgacgaagatattgatgattactga

SEQ ID NO: 188809 - DNA, 68 bp, Arabidopsis thaliana landsberg
atgatgaatccaaagaggaaaatgacttagaaggatttgagagacttgatgaacgtgaaattcaatga

SEQ ID NO: 188810 - DNA, 390 bp, Arabidopsis thaliana landsberg
atgtccatgtggaagttggcgtcgtcgtccttctcaaactgtgcggaggacgggacgcagcaggcagggcgcgagcgggcgcagcagcaagcagagtgtcagtcagtctcagggaatggtggaggacgctgctgcagcaagtagacatgcagggccgggaatgagagcggaggagaggactacacgttttgaaagaaagccagggagcagcgcccttaactagacagactatcaagagcctactgcatttgatagtccttcttccttaaaataacgtactgcgcccaaataggggagaccgcggtcgtgctgccaagcgaagcagcaacgccgccagggccgcagaggggcatagatcttgcggtcacggtgctgctcgtttatgattga

SEQ ID NO: 188811 - DNA, 75 bp, Arabidopsis thaliana landsberg
tggaatctaacgatcatgtatctcaaaatgttctcaaactcgaatatggcttcgcaagcacatgtactggtgatg

SEQ ID NO: 188812 - DNA, 226 bp, Arabidopsis thaliana landsberg
atgcgccataccagggcgaaccgggatgatcggagaaattggaaggcgccacaatccatgaaacagttggcaaccggccggtctttacatcctgccttaattgatataatacatcgcctttaggaatttgcatggttcgtgttgtgccattatcatcatacgtaatggtttcaaggctgcggtaatctgcatcgttgctgttattgcaaaacgctttttcatgcag

SEQ ID NO: 188813 - DNA, 212 bp, Arabidopsis thaliana landsberg
gtccggataaaaaacggccttacggacgttcggatccgctccccaaaaggaggtttctctttggaaatcggatgccttttgtggccactactttccgaagagagtgggcgggaaaggggaccatcggaaatcgtcgaaatccgggaaaaatgtcccaacttttttcttcgttttctcgagcaaaaacggcctaccggtgcttccccccatga

SEQ ID NO: 188814 - DNA, 271 bp, Arabidopsis thaliana landsberg
atggtggtgcactcggagaggtttaaaagaattgatttgaacacctatgtcattaaattgcacttatcttttcggtcaaacgtctcaaaatgggtgaccttccgaaaagtgattgtcggaaccatgtgagtgaggataaaacatggaaaaatatcatgtggtaatttgtagggttagtaacaagtctttaaaacctcccagatatggcgtaccgaccatcggacatgggtggacccataagcccgagagaggatgtggaacccactggtag

SEQ ID NO: 188815 - DNA, 466 bp, Arabidopsis thaliana landsberg
ttgcctcagtacttcacgaatttctcattttccgagattgagaaagcaactaatcactttgattcgaccctaaagattggggaaggtggatatgaaagcatctacgttggtttactgcgtcatactcaggtggctataaaaatgttgaatcctaacagttcgcaaggccctgtagaatatcaacaggaggtattttcttgacatattattagtgaaatttcttgtttagtttcatcatcattgtttactggtttattgtgcacaaactgctgcctctacgaaaaaggggactttgaaacacagttctactgtagttttgattttatagtgttcgctgtggaggagctttgacttattcttgcggcattgcaggttgatgtcctaagtaaaatgaggcatccaaatatcattacgctaattggagcatgtccagaggggtggagtcttgtctatgagtatcttcaag

SEQ ID NO: 188816 - DNA, 1526 bp, Arabidopsis thaliana landsberg
ggttggctgttcttgagattttcgatattttcacggatccaaactggtattggatcggggtaggaggcattctcgggtttacggttctctttaacatcctcgttaccctcgctcttacattcctaaaccgtaagtacacttatattgattgattgtttttatcatgttttctaatagaatcatatatctacaataacttgagacctaaatgttatgatatagaagaacatgaacgttgacatttatttgtgttccttctcaaacaaacaatatcactttttgttgatatgccagcacttgagaaacagcaagccgttgtttcaaaagaaaatacagaggaaaacagagcagagaacggctcaaagagtaagagcattgacgtgaaaagaggaatggttctaccttttactcctctcacaatgtccttcgacaacgtaaactactacgtcgacatgcctaaggtaacaccaaatcccaaatccttgttgacattaaaaccataaagatgttaaccaaaaaagaaaacaggaaatgaaggaacaaggagtttccaaggataagcttcagctactaaaggaagtgacaggggtctttaggccaagggtattaacagctttgatgggagttagtggagctggtaagaccactttaatggatgttctagctggtagaaaaaccggtggttacatcgaaggagacatcagaatctctggtttccctaaaagacaagaaacctttgcaagaatctctggttattgtgaacagaacgatatccactcaccgcaagttactgtcaaagagtctctcatctactctgctttccttcgtctcccaaaagaagtcactaaatatgagaaaatggtaacactttttcttgtaacttaacaccatttataataggatctcaatccatacaccaacttttgcagagatttgtggatgaagtgatggagctagtagagctagagagtctaaaagacgcggtggtggggcttccaggtatcacagggttatcaacagagcagaggaagagacttacaattgcagtggaattagtggcgaatccatctataatcttcatggatgagccaacctctggtcttgacgctagggctgcagcgattgtgatgaggacagtgaggaatacagttgacacaggaagaactgtggtctgcacaatccaccaacctagcattgatatctttgaagcttttgatgaacttcttcttttgaagagaggaggacaagtgatttatgctggtcctttaggtcaaaactctcacaagattatcgaatatttccaggtcagattctacatttaatttgtcaaggtctctatattaaaatgtcagaactttcatgatcagtcctcttttgagaaactgcaggcgattcatggagttccgaatattaaagagaagtcttatccggcgacatggctgctagaagtgagctcaatggctgcagaagctaagcttgagatggattctgctgagcattatataacatcatccttatatcagtga

SEQ ID NO: 188817 - DNA, 390 bp, Arabidopsis thaliana landsberg
atgttggcgcgtgaaccgattataccgagaactgatcggccgtttaagacgagtatagtgtttgctcacgagaaaggcacgtgcgttttgtttaaggttctctctgcttttgcgtttaggaacattagtttgactaagattgagtctaggccgaaccataatgttcctattaggctagtcgatgaggctaatgtgggcacggctaagcattttgagtatatgttttatatcgacttcgaggcttccatggccgagtcacgtgctcagaatgcgctttctgaggttcaagagtttacgtcgtttttacgggttttggggagttatccgatggatatgacttcttggtcaccatcgtcttcgtcctcttcgtcatcaacattttcattgtga

SEQ ID NO: 188818 - DNA, 122 bp, Arabidopsis thaliana landsberg
atcacttactccgagagattccaccggaatttctcatccaaaattcagagaaatttcgagtctttcgagaatgtcggagaacgaaatcgtccctgacgagtttcgttgcaaccgctccgatg

SEQ ID NO: 188819 - DNA, 377 bp, Arabidopsis thaliana landsberg
atctcaatagcaagattgacactctacgctcccaattctccaatctctcacctacttcagcttctatcaatgtagtcacactacgcagcggaaagcaggtcaacccaatacttcagcgcaaacgatcagctctgccttcatcatttccaattgcagaaaacgaatcagtgttgatcaatacaccagggtgtcgatcgacaccaattactcttgacgactctgttttcatttgtcgagtggaatcgataattttgcagaggaggaggaaactattcccgatggtgttgattgacacccagctcctgtcgatcgacaccgagctcgttcagacaatgtgcaaattccagctgcaaccatgtcagcaaggctatgattga

SEQ ID NO: 188820 - DNA, 312 bp, Arabidopsis thaliana landsberg
atgcaacaggatttggaagacaaaaagcacgaggttataattgaaaatttagaaaataaaataaaagatcaaacagctgcctttgagaagaaagagttcgaactccagacaactgaaggtttactatcagaagccgaagctaaaataacagaactgaatacgaagcttctcggttccgaacaagaaaagctgaaacataatggaaaacttgaggttgaaatccagaatggtttagctttgaaaaaatcattgatggaccttcaaaacaaatgcttgaaattcagcaatcaatgtgttcaacggctgaagaag

SEQ ID NO: 188821 - DNA, 501 bp, Arabidopsis thaliana landsberg
aaagattgatagcgaccttcatacatgctacctataaaattgaccaggaagcgtggctaatggagtccgtgcttgctaactttccagacacaaggggttgttctccatctttggtaagaatcagatcactactggaagattctgtatagcagttctatttttatgcagaaagataatcatatatacaactttctgcaggccaattttttccgggctgaaaagaaatatccagaaaacaagaaaatggggtcaccttcgatcatgaatcataagacgaaccaaagaccactttccacaacacagttcgtgaactcgtcacaacatctttatacagctgtcgagcagttgacaccaacagatttgcagagcccagtggtatcagccaagaataatgatgaaaccagtgccagtatgccatctgttcaactgaagaggaaccttggtgtacacaaaaataaaatatgggatgagtggctctctcaaagcagtttgatcggaagg

SEQ ID NO: 188822 - DNA, 75 bp, Arabidopsis thaliana landsberg
gacccggaactggcccttgacaattgcactgttcgccatccctcctcaactggtcctgcggaaatgaccgtgtaa

SEQ ID NO: 188823 - DNA, 570 bp, Arabidopsis thaliana landsberg
atggccctaatcatcaaaagctttaggcaaattctcaagcaacggaaggggaaggactacaaaccccgttccaagaaggtttgctacaagtgtggtaagcccggtcacttcattgcaaaatgtcctatgtctagtgacagtgacaggggcgacgacaagaagggaagaagaaaggagaagaagaggtattacaagaagaagggcggcgatgcccatgtttgtcgggagtgggactccgacgaaagctcaagcgactcctccgacgacgaggacgccgccaacatcgccgttaccaaaggccttctcttccccaacgtcggccacaagtgtctcatggccaaggacggcaaaaagaagaaggtaaaatgtagagcctccactaaatatgcaacatctagtgatgaggatagctctagtgatgatgaagataatttgcttgctctttttgccaacctaaacatgcaacaaaaagaaaaattaaatgaattgataggtgctattcatgagaaggatgaactcttggatagccaagaggaattccttattaaggaaaacaaaaagcatgttaaa

SEQ ID NO: 188824 - DNA, 1290 bp, Arabidopsis thaliana landsberg
atgaaattccctttgtggttgcatgaccgaactgtgataagattttctgtggtttcaacatttccatcaaaaggggtgggtaagactatctttaatccgcacttgtgttgtattcccgttgtctataccatacttttcaagtttcttcttcttattcttcaacttatgttccctgggatacaacaaggggttaccattatgacttgtctcttatacttacaatcattataagttgattaatgacagagttttcttgactggtggctcgttttcagtacaacttgtgccaggaactgaagtggctgtggctccaaagagacgtgacagaaatctcaaagcaaaaaagagtcaggaaaaagaatgtaacaatgtgaaggctctactacgtgtacaagagactgatagatcagcctttcatgaagctgatgtcaaaggatttgagctaagggtagccctcacgtctattgcctatattcatccagaaactgccaagaaacactctctagaatctcttcagttgatttctgtatcccctagaatacctttgaaaggtagtgcaaagaaggatgaagccttaaatatgaaaaacagtgaagcttcaaaggtggccgagaatggtacttcaagcgccaagaaagagccccgtcaagcaattcttcgtcttgtcttttcagatttagctgctaaaggacatctaatgatggtcgagtctcttcgtctctatctaggagcaggcctacactcatgtgagtaatttttgcttaaacattcagatgcttttgttttatgtacctccagtattttgatgtttgtgtaaaaatatctgttcagcaatatcattgaaatgtatggagagactgagctgaagttaatttgactggttatttgcagtatgcgacactaggatttttttattttatttttattgttgtgaccatcaggaagtaaacttgtaaggtattttggaagttatcgtgcaggttgaataaaaagcatcattttgcattttccattctcaatcgagcattgttaccacagaaaaataaatgtctgagcaagagttatcacttgtatgtaggggtttacttaaggggatgcaatgtgaatgaagacaaagaaattcctgctctttcactttctccttgtgtcttcaagatttctgaaaatgaaaaggtgctggataagggtacggataggcttggtaataacaattctgttagaaaaagcagtcatccaccgtctggcttgagcacctatgtggatgttgtcgactggtctgtgcacgataag

SEQ ID NO: 188825 - DNA, 1023 bp, Arabidopsis thaliana landsberg
gtggatgccatacagaaggatcatgatcagtctctctctgagctcaagttgatacatgcaaagatgaaggaatgtgatacacagattagtggttctattgcagagcaggaaaagtgtctgcagaagattagtgacatgaagcttgacagaaagaagttagaaaatgaggtctgccctcttcaatttgtttgtctggaaatacatgtgttatttcttgcagcgttctccctatctaatgacagatgtcttgggttcacttaattactttgactttaatattgaagtaggactggggtgttggatgatagaggtggatataagtattaggacttcctggtaattcggcttataaaaaaattgaagatgttgtatactcatgggagaacattttactctgagtaggtgacaaggatggagatggagcacaagaattgttcagtgaaggtagacaaacttgttgagaagcatacatggattacatctgaaaagcggctttttggaaacggagggacagactatgattttgaatcccgcgatcctcacaaagcaagagaagaacttgaaagactccagacagatcaatcaaggtatgtttctaaggatagtcatagatttaattttgcaacttatataatattcactctcatgcaatgcaatatcaatggaatgtgctttatttttcttttttgtttcttctctttaattaaatgagaaatctctcctctcgtttcctggctattcattctcttataaagtctagacacaagagtgaacaagaaggtcacggctatgtttgagaaagctgaagatgaatataatgctcttatgaccaagaaaaatataatcgaggttagctttggagggtctgtgcaacatatttaaaaaagcttaaaacacatttacgaactatgtttattttttttcattttcttagactgacaaatcaaaaatcaagaaagttattgaggagcttgatgagaagaaaaaagaaacactgaaagttacatgggttaaagttaacca

SEQ ID NO: 188826 - DNA, 362 bp, Arabidopsis thaliana landsberg
atgaagatgagaaagagtacgaaagctaactttgaggtttcttcttggatccaattgcgaatatgcttcacgtttcgctttagaacggaggacgctttctttgttaggcccattagcctgggctctcgtgtttttcataatgtcaagtcagcccaacaagcccaaatttttacaaaaagaaccaaggaccatgtcatccggaatatggtgatattattggattataccattggaccatttaacacaaaagcaaatatgcaacagaatatatatagatcacataacagtcagaatcttctcaaaagatatgctttcttccttttctattctagagtgttttgatgacatcggcacgaagataa

SEQ ID NO: 188827 - DNA, 710 bp, Arabidopsis thaliana landsberg
atggttcactgtgacataaaaaccactaatgtgcttctagacaccgaccttaatgcaaaaatatctgactttggattagctaggcttcatgaagcagaacacactcacattagcaccaaggttgcaggaaccatgtaagtattgaacataagacaaaaaccacttcatggctgaagaaatatctcattcttggtttctttccaataatgatgcagcggatatatggctccagaatatgcattatggggtcaactgacagagaaagcagatgtgtacagcttcggagttgtggcaatggaaattgttagtggaaagagtaataccaaacagcagggaaatgctgataacgtctcgcttatcaattgggtaaccatggagcttttctttctctttagttgattttatgtgtaatctgtttccataagtttactgaaaccagtttttacatcaaatctcaggcgctgacgctgcaacagacaggggacatattggagattgtagatcgaatgcttgagggtgagttcaatagaagtgaagccgtgaggatgatcaaagttgctctcgtttgcacaaactcatctccttccttaaggccaacaatgtcagaggctgtgaagatgctagagggagagatcggaaataacacaggttatgtcagatcctggtatatatgggcacgactggagcatctcaaagctgagggacattga

SEQ ID NO: 188828 - DNA, 274 bp, Arabidopsis thaliana landsberg
cttcgagcaaaatatctggcccaaacacttgcctttctccatgatgatcccattgcaacggagttctacaacttctcccatagaacgcctaaaatggtgacatcttcaagctggcctggtaactattgttataggagaattctgcaaaaggcaacttcttgtcccatccggactgatcttgcaacgcacaggctctcaacatgtcttcaaggatttgattggtcctttcggtctgaccatctgtctgcggatgataggcggaactgaaattcag

SEQ ID NO: 188829 - DNA, 92 bp, Arabidopsis thaliana landsberg
aatccataggaaagtttcgacggtgttttgacgggaaacatgtcgtcagaaatccgtcggaatatcattacgaagccgtcgaaaatttctga

SEQ ID NO: 188830 - DNA, 575 bp, Arabidopsis thaliana landsberg
gaagagctgtaatgccatcttgatcagagaaggagatgatgtgtgggaagaattagacactgaagacgagttggagcttgtagttgcagagatggtgtcgactgacacgttccagtgtcgatcgacaccctatcgaacgctcttctcagaaacgattccttacgaaggtgtcgatcgatacccctctagtgtagatcgacattggatctagactgcaccttgtgaggtgcgaataccgatgcagcccgagtctgtttacactcctcctatcccttatccgaggaagcatcgttctaagcaggagattcatgctgctaagtgcacagccataatggagaagatcctcctttctcttcctaaggatgcatctgagacagcttctgccccactcaacaggtatgtcacgtgactagttgacaatggtattggctcagatgaagcttcactgctgacacgggacatcaatgcaatcatgctgcctacggtcaggaaagagaaggcacaaagagtggacattgctgagtatatccgcaccatcactcctgatcagaccactgagaagcttccagatccaa

SEQ ID NO: 188831 - DNA, 60 bp, Arabidopsis thaliana landsberg
tatttacagcaggttctgccgcacatgttcgagccccttataatgttcttatcatattcg

SEQ ID NO: 188832 - DNA, 274 bp, Arabidopsis thaliana landsberg
cgttgagaatctctacttaaacagcaatcgtttcaccggtgaagtcccggcgagtttcgtggagaggttgttatcggcgaacatacagactctgtatctacagcataatttcttgacgggaatacagattagcccggcggcggaaatcccggtgagcagctcgctgtgtctgcagtataactgtatggtgccgccgttacaaaccccgtgtccgctaaaggccggcccacaaaagactaggcccactacacaatgcaccgagtggcgagggtag

SEQ ID NO: 188833 - DNA, 394 bp, Arabidopsis thaliana landsberg
atggtacgcaaaagctttttgtttggaacaaaaaaaccgcgcgaaaaaatttccgggaaatttgccgacgcatgcaatgcattggaccagcgtggcaccaatggaattccggacatcctcgtcaaagcaaaatgggcacttgattgcatgctgaaattgcatccgcaacacgaccagctttttcaacaggtcaccgaccaccgcgatcaatcagggctggcgctttccacagaatgaatcgggcgatcgcgcctggggcgccggcaaagagcgcgtcgtttatttcgccgacggcaagccgcagggactcaaggaatataaaagcgaatcgaccggcgtggagagtctggcgggacgttacgcgacggcgatggcgctcgcgtatcagttctga

SEQ ID NO: 188834 - DNA, 219 bp, Arabidopsis thaliana landsberg
atgcaaaacgacaagaccagcgcacataaaacgccgaacgactcgacttgtgcagtcatcactttacgttgggaaatactcttaaggatcacggcatcagtttgggctcacttgataggtacttttaccagaaattaccactctgccactggctaagctacgtctaaaaattgacattgccattgccattaccaaactaaaatatccacgcggatgcgg

SEQ ID NO: 188835 - DNA, 295 bp, Arabidopsis thaliana landsberg
atggaagtgaaacagttattgattccaattaattccgcaaaacggtccctcagtaaaactaagtttgggttagttgtgaaccaaggagtaaagcatgcttttaaactgaatggacctgacaaaggtgcttcatatatagaagcaagatatccagtattattatttaaacagtatatgacaacatgggtggagaagatctatggaataattcgagatgcttggaaaaaagaattatcaccggttctgggaacatgcattcaggtgagagattcaaagcaggtggatactgatgttg

SEQ ID NO: 188836 - DNA, 249 bp, Arabidopsis thaliana landsberg
aaaccctttctcgctcttaaactccggcctcgtccttcaaatatctccggtctaggtcacagtactagtgttgtttgcttcaatccgttaaggtatagtgacacagaaacacccgattcataaattctcaatcagtggattttggctttttctaaatgaatgttggttggtaggttatcggctgatcgtcagcgaaccgctacggtgtcggcgagggctgagaagcggcgaaagagaggatcgagtgtg

SEQ ID NO: 188837 - DNA, 291 bp, Arabidopsis thaliana landsberg
atggtagagatcgaggagtacgagtacgagatcggagtggaaacggaagagaaagaggtagagaagaagaagccattagagagagagaggataaagtaatcgaagcttttgttagttaccacatacacatggcgggaagataatttccattttctgtgttatttattttttaatctcttctcgaagtatctcttgtgtatttgtgtagaaagcccttccattatcggtagtattctagaaaagggacttaaacttccaaattctcgtttcagacccttgagtttaccttag

SEQ ID NO: 188838 - DNA, 349 bp, Arabidopsis thaliana landsberg
tctatacgatgatggagcctacatagcttcccaacgtcctgtctacggtgcaccagctcccaatccatttgcgtcccatgacccgtttgcatcgtccaatggcacagctcccccacctcagcagcaagcggtgaacaacccattcggtggttaccagcagacatatcagcatcagccccagccaacgtatcagcatcagtccaaccctcccactaataatagtaatccatttggtgattttggggaattcccggttaacccggtttcacagcagccaaatacctccggttatggtgatttctcggtaaaccaacataacaacccgttccgtagcactggcctcatttga

SEQ ID NO: 188839 - DNA, 103 bp, Arabidopsis thaliana landsberg
atgctacgggcttacaattttgatagatacgataaaagcccatactgcggccaattcgggtccatcaagtataactatatattaatgagtatctatcgaaatt

SEQ ID NO: 188840 - DNA, 352 bp, Arabidopsis thaliana landsberg
gagtcggtgtacgcttcctcagggactgttcattaccagagaaccatcataatgatccaaatattcttgcacctaattgtggatgccctgagactgaacactccgatgagtatggagaattcggtgtagagacgaaaagaagtaggaagcgaaagcgggtaagcattaggcataacatgtacacaatactagatatgtgtcccagttctgtttcaggatcaaccacttactattttgtataataaagatcactgcattttgttttatttttcagataaccttaaggaccgctcaagaaactattgacttgccctaccttcagatccgggaagaacagaggatgtcactttga

SEQ ID NO: 188841 - DNA, 446 bp, Arabidopsis thaliana landsberg
agagcaagaggatttcgtctagtaataactttcagagggaagccaaggctctgagaaaaccgctgggggtcctgagcgaagacaatcatgctcgagaagccaatagtgaccatttgttttccttgacttacaagcgaagaaaggttcagagaatcgcttgagctcccgtgacgctatgctaattcaatgttccacctaatgtagtcttccatgaaaatatgaagtgtaatgctgcaacttggtaactggatttggtttggggttgagtttgttagttttcaaaatttgaaggcactaaaaagaaacactaaagaaatagaggagtaaaagtgaaaataatctgaactattaaacaaattaccgataaggtcacattctttagcttttctctgcggaacacatcgagagagcttcttccaaaaacctcaaacgctcctcacacaacg

SEQ ID NO: 188842 - DNA, 161 bp, Arabidopsis thaliana landsberg
atatatgggtcaaacttcgattacaggcccacgtcgaaactagttcttcaaatcgagaagtttatgaaacatgcttggctttctccatctttaataacaaccaaaaccatgatgaatccatgaccaacagacattacgacaaaatgcacataaacacatag

SEQ ID NO: 188843 - DNA, 868 bp, Arabidopsis thaliana landsberg
atgggtgagagccgggcctgaggtggtcgcaactcgcaaccgacgttcagagggagaagcagaggtggtggtggaagcaaagagagttagatgatggctgtggtgaggattatgtaaagtgtaaacatgtgtcacttatctttgcttattttacagttggaggaaatgccgaaatggtatgtaccaataacatatacatgtatctgtagcataataagctgatgatcttacacgatcaacagctacaggatatatatctcaccacaatgaagaaaaaaaacatatagttcacattaataacgggtttcgggaaactttaatccttaggtatttcaagaaccttattatatttttggttcaactgaatcatttaggccaaacatatatatgatcttcttacggtctacaacacaacagtcaccacagtgaagaaggaaaacacagagttcacattaataaaagtacagaaagacaaccttttttatgtcaacgaggatcagaggacgacaacttggcatgaggtagatcgtcttggaatggtaagtagttcacattctgctttctttctagaagaatcatccaaatttatagtgagtttcttgaggattggtgagttctcaagtaagtaactcacaagtttcatctcaaagacctcccctgtcaatggcgattctatttcaacatactcaagagatgataggagacgcctaggtccagataaaacactagttctcctctttggagatgttatagatccctgaaaatacatccatgtttgagtcataatgtactttccccatttgcatttataccaaagaaagtacacaagttttatgtgaacgattctaaccacgacaagggattttag

SEQ ID NO: 188844 - DNA, 188 bp, Arabidopsis thaliana landsberg
aatgaataacccgttgttcatgcatattgttgatcgactctcaaataaaattccatacttcgaacaaagaagagatgctaacggaaaactcgatttctcatcactacagaatgctacaacagcaatttgtatgatgtcgtatggtttagcggctgatgcggttgacgaatacctccagattggtgaaa

SEQ ID NO: 188845 - DNA, 40 bp, Arabidopsis thaliana landsberg
atggacgcgtacatcggctacggcttgggatacagcgaac

SEQ ID NO: 188846 - DNA, 252 bp, Arabidopsis thaliana landsberg
atgagcggcgaacgaaagtgctccaactgcaacgccaatgagttcctggccgaacgggtggacgcgtacaaggcggcgacaagcctgctcaaggaagccggggtggacttcacgcccgaagacctactgatggttgcggcattcctgaccggagaggtgggctcgtgactaacgagttcgttcgggtgcgcaccgattcagacgtgcggctcgaccacattgccagactgggcatgttcttcgacggccagg

SEQ ID NO: 188847 - DNA, 273 bp, Arabidopsis thaliana landsberg
atactatggggcgttttggtgttggttgtatcagtgatcatcttgatgaaagtgatagatcgacaagtgcccacaggagctactggaacggcaacatacagtggaaatgcagcacagggaacaccagaaagaagaagcggcacagttatataccatgaggaatctccaagaacaccatcaccatttatggagtatgtgaagagaacagtggatgaaactccctactacagaagagaaggaagaagaaggtttaatcctcaaaacactatgtag

SEQ ID NO: 188848 - DNA, 188 bp, Arabidopsis thaliana landsberg
cagacacagaaaaagagagagcgagagactctgctcacacacatatttacttccctaacttgtctctctctctacacattctggtgagtttcgtaagattcaacaatcgtttagacttcttcttcttcttcttctacagcttttacgttttctggaaaagagatttttggctgatcactacgttgcag

SEQ ID NO: 188849 - DNA, 173 bp, Arabidopsis thaliana landsberg
ttgactatgatggaagcaaacggtctggaaaaaccaaaggtggacgcaacaaaactcgggatggctctgcaaatagcatcaagacagatggaacaagactgagaatagctctgcagaagatgacgaagatgaattcaagcaggtcagaagtcgtaggaataagaaaaatgtga

SEQ ID NO: 188850 - DNA, 906 bp, Arabidopsis thaliana landsberg
caaagcggcatgttatatgttttcatctaaagggtgcaaggggctaactgattggcttccaccatcactgagggaatattcggatgacgagattgcagctcgtgtagttattagtgaaattttgagctcccctcgtgttataaaaaagagttctaaaattgcatttatgttcttaactcctggtacattgccttttgaaaagctatgggacctctttttccaggtatacttcatctcttcccagcttcttttccccgcatcaattgtgttagaggtttccttcttgctaataagatacgaatgataggaagttcagtgaactctttctaagtttaggctggccttttatattgacaactcttcaaaattgtaaactttttctggaaaatcgtttaccaacttggatgcagcaagtgccatatgaacacttgcaatatgtttagcaactctgcgtttatttcattatttctttgacttatttctctcactgactgttttcggcttttacccctccgcacagggtcatgaggggaaattctctgtttatatacatgcatcaaaggatactccggttcacaccagttgttactttcttaaccgtgagattcgaagtgacgaggtatgtctccttttctatgtctgatgtctatatttgtagatatcatgtcatccctctcttcggtcatgaaaaaactattggtttggaatgactacatctagttggttgatgtatcataaatttctcttgcttctgttatagttttcatgattgtggtaaaagaatcatatatttttctgtaggtggtctggggtagaatatcaatgattgacgctgaaagacgtttgttgaccaatgctcttagagatcctgaaaatcagcaatttgtattactctctgataggtaa

SEQ ID NO: 188851 - DNA, 340 bp, Arabidopsis thaliana landsberg
accagacccgacaaccaccggagctccaacgtgagctaggccatctcttaagcccatttcttttccaacactttaatttaattaagcctattagcttcaagttgccacgagcatccggggtgtaaggataacgttcgaaaacttatatcgtcataacttacatattttcagcaagcaatcgacactatcaaactgtaaacaagtgaatcatccaaaattgagaacattgtgatctcagcactccgacactactagtcgagatcccgtatcatctggcaacattcgtctaaaactatcttcttctacaagcttcaagctgctaaaagagactcatcgatag

SEQ ID NO: 188852 - DNA, 70 bp, Arabidopsis thaliana landsberg
aacattatatcagcaactacaagcatttcaagagaaaaatcctttagaaaaagaaccaaaattaatgtga

SEQ ID NO: 188853 - DNA, 766 bp, Arabidopsis thaliana landsberg
atagaaacaggtcacggaaatatggagaatccaccatcgattcccattgcttgcaaacaattttgaaagttgtgaaaatctttattggtaatttgacgagtatcatcgccaatagatcctcaggtaaggaattcatattttcctatctctctgtttcaccgagattaggttttttttttctaagcgtgtgtgttagattagggttctcgggtcaatacaagtgctaccctaaacaaaggtaaaattattattgaaaacttgcaatatgtagaaagaagataaaactttaaaagtaaaatttttataaattaataatgttggaactatgatattttataattaatattggtattaacttatattaacatttataatttatgggtagacagatttgttttaattgttaagttttagaaaacaatatgagttaaaaataatttgatttaaataagcctaatgttttggatgttataaattttatactttttgggtttgaaaatttaatatttaagctgtagaaaaaacttttaagttgttgacacataatttagttaatagtgaattatcttatgcatcaactaataagtatagttcatctgtttatgcatgagggaggacattgaaaagtcacagaaaatttttaagttgttgaatcgttggtttatttccactatttcaatttggtttgctctaatgtattttctttacttctctgataatagactttgctgaatctagtgctgacattgtgtcggactttcaatag

SEQ ID NO: 188854 - DNA, 329 bp, Arabidopsis thaliana landsberg
atgaacaagtcgtgtttggttactttacgccgactaaatgcagaccaacagctgaggcagcacatgttcttgcaatgcaacctgtattcccaggaatctgtcaaggagagtataagttgtttagatccatcaacatgtactaagaagaccaaaggtagcagtgagagtgcaaacctgaggagagaccaaaactacatgaagcagcttactcctcgcatcttccttgactccttctccggcccctcgcggcaggggatttttcttatctgactcgcctataccaactcctcggagagcatgagactgaatcttggaggaaaacgagttga

SEQ ID NO: 188855 - DNA, 298 bp, Arabidopsis thaliana landsberg
tatggattagcagaagacacacttagaactgggggttcaggcaacggcaaagacatgccccctggtgagttatacagccagtctgccatctacattgctgcagcgcattcattgaagccaagttactcagtaagcttattatctccattttgtactggaatcaagatgtttgaatcatacttgtataaaataagattgaatgccagactaagattcatcgcttcaacatctttgggttaggctgatccttttcctggtccaggtttacagcagcgctttgaggcttgttcgttccatg

SEQ ID NO: 188856 - DNA, 100 bp, Arabidopsis thaliana landsberg
atgttccacaggtgtatatcatgaggccgttgaagtcacgcttttggttctttgggagcggggaggatgtagcttcccaccagtcttttatgctggagaa

SEQ ID NO: 188857 - DNA, 688 bp, Arabidopsis thaliana landsberg
agaaaaacttacggcaggataatctaggcaacggtgagttcaatttccggtaagaaaagttcaattctaagtttgtgagatcgcttaaaaagtatctgattttgtatgtattttttcttaaagcccctgtctttgagttttactttttagaggaggccatggtgtggtgtaagcattgtgcgaagaatgttcccggaattcgccccttcgacggtggtttgtaagtgtttacgagattcttaaactctgcgggttatgattctgccagctccgacttacgaatgatgagcttgtagggcatgtgatttatgtgggaggattttggaaaacttcaatttttctactgatgttaccttcgttaagaatgccgcaggacaggtatgtatactccagagattttcttcactatgatgctatctttttttttggtgccctttgaaaatatgtcttgtgcatgcagagccaagcgtcaggtaacataatgacgagtgttgggaattcaagctcacgtgataggagaaggagaaaaggtatatagtgatgagtttgcctttttctcaaatatcagttcattgggctcatcttttgttgttggcagctatagatgagttaaggaatttgaaagatgccttaggaatcggtgatgagagagatgatgtggttgacatggctgccatattctactcaa

SEQ ID NO: 188858 - DNA, 458 bp, Arabidopsis thaliana landsberg
ggtcctcgatcatcaagcctacatcgacaaggtccttaatcgactcagacggagacactacaccgagactctcttctcgtgcaagtcacccgcccggtctcagcttaattatttcaacccaaaaacttggtacctggcagaggtacattttttccgatgttgaatccatcatggcccatgatggatccaccatcaaattttattttcgaaaacaaccctccactttgccaaacatcttttgtaaaacaaatcctttggtttttctaaagcaatactaagcatagtaaaacctttttggtaaaaacagggtttcaaggaaggtaatcaagttcaaggaaggtaatgcaagaattgttttatcaagcaacacctatcacctaatgcagcaagcaagtgagaaagattttaaaaacatcaagggaggtggcaaatgcaccggggcttgccttcgttcacag

SEQ ID NO: 188859 - DNA, 166 bp, Arabidopsis thaliana landsberg
atgaaggagtctcgaggattaccaaatcagaaagctaaggtgttgagaatggagtctagtgcctattgtcatatggttagtgaacgagggagtaagaatgttgttgctgctcgtacgtataacaagtcgtatactaagccgttgttgattactagtggggcaccag

SEQ ID NO: 188860 - DNA, 1554 bp, Arabidopsis thaliana landsberg
atacatggagaaaagacattgaacccattgctattgaagatgctatcaataaagatgcttctgggaagctaagggttgtatcaatctctaaggtatactctctgttcaggatggttttgtttcctgtttttagtttactggcaaaagtatgtgtaaagatacaaatacgttctaattcttttttcttggaactatgaactgaatctgcaggtttcccgttcatttcacccaaatttctcggcaaaatggaggcgctacttgtatatcttccccttggatgatgctgagccattgcgaaaaagtggcgagaatcatgagaactttatctttgatgagaacaagaaaaagcaaagaaatggactcttaagtgaagagattgctgaaaaagtaataatgagcgaggatgatgagcttgaaattgaggaaaccagcaatgcgcttgaagtagtagaaaaaccaagtgactttagtgtaagcaaggttgatcaacttttgcagcaccttcaaggaaaagtattatcctacaagatgtttgcgcgtgatacaaaagctgcaagaaacgagtaagagctcacacaaggtcattattattacgttttagcatcgcaacagttcttgatcactgttttaccagcatagaaatttacctttcttatcagcatggtgtacagtggcatagatttgtagtgtaaatggtttcttatttggattttcttgacattgcagaggtccgcctacagaatgttttatgtaccatgcacgggcagccgagattagattgtccagttctgtaagtgttcgattctgttctcacattttagctatcatttctttacttcacacccaatcactctagtatcacttgttgagttctggtacttcacgctatagttaatacataacaatttaaggcttagctcaaactcatatttttcagatatatagatatgatattaggtcgtccattttgtggcatgggtttttggtggatcaatagtacttgtaatcctggctactgaaggatcaacattagacttgacagatacaaaactgtatattgcatcttggtttttgattaaacgttcttgcgagttcttgttcattgcaagtgtgtcctaaagatgagataagctcctcatgtgaaactaaaattgacttcttttgatgaattgtaccaggactgtgtggaaggaagaagggttatgtgtgttgagcttgtggctaaccgatttctccgcaaggtgtttactttaagcctaatattagcttcaaatacacttaagttgcaagttttggttctatgtaaaaaaggtttactttaaactttaaaaaagtaaagaattacactgtattaaagacacatgtatgggaagttgtacaacagcatccccgatctcatccctaaagaggcagagtcatatttgactctcaaatctgtatctgctcgtcttgttttacattgcctaataatctacttatacgtttatacatgtctatgtaactttcagatggttcgagttcttgtggcaacatcaatccgagaagctgccgctg

SEQ ID NO: 188861 - DNA, 252 bp, Arabidopsis thaliana landsberg
atggatgcatcaggttccaacaagaggccgtgtgtggatgacggttccaacatcaggctgcttgaaacggagaaaaattcaaaggcatcatctctctcatcagatgcaacatttataagggagacggaggaagcacacttcttggatctcaaactgcgtgagaaagaaacggaacttaatctcctaaagaaaatgaagaggatggaggatggatttaacgtggaggaagagttccagaaagtggaggagcag

SEQ ID NO: 188862 - DNA, 110 bp, Arabidopsis thaliana landsberg
gatttttatcgtggaaagcctttgccttcggcgtcgattccctaccgcgacctcgacctcttgatgatttgcctttaccaccaccagccatcgttgaaattcgagtttag

SEQ ID NO: 188863 - DNA, 565 bp, Arabidopsis thaliana landsberg
atgtccgccgaaattcgctggaagcaggcaccttccgcggagcagttacaccggctgaagcatgatcttgaagaccgtttccgcatcacccaggtggatttgacaccaattgactcagattgagacgttgaggctcctgccctggaggttagtccaggaaataatttaaagattagaaatcggcttcccgataaacacttaagataaaaccccgaaacggaaggttggacgcatgaaattatcgatcgtgatggccgtattgctcggctcagctttgagttttgcccaggaaccggctccggccgaaggcgggccctattctcccgagtggacagtggacccctctgcctttgtcgacatatatgaagacaccacggccagcggaaaccgctttcggattttcgtgcccgacgagaacagataccggcccttgacggaagaagagcagcagcggtgggaccgcgccgagcgcaaccgtatggagtgtcaacgcatcggctcccaacgcggcggcagcggcggctctggaatcagagaaatgatcggtgacgcatggaaccgtaac

SEQ ID NO: 188864 - DNA, 158 bp, Arabidopsis thaliana landsberg; identical to SEQ ID NO: 176980

SEQ ID NO: 188865 - DNA, 859 bp, Arabidopsis thaliana landsberg
atgaaaaagcataagtttagagaaaccttgaagtctttctttgagcctcattttgatcatgagaaaggtgaaatgcttaaaggaactaaaactggtaattttcctacactactaagtttgattcacatgtaaaatgagattcttagctcttggtttaactgcttacatgaaaagtactaccatcgtctgatgcagaaatagatgaaaaggtgaacaaaatcttgggaatggttgagagtggagacgtcaatgaagatgagtccaaaagacaagtggttgcagacttagtgaaggaattctacagcgaataccagtccctgtaccgccagtacgatgatctaactggagagattaggaaaaaggtcaacgggaaaggagaaagctcttcttcttcgagctcagattcggatttagataagaagagcaagagaaacgggcggggtgagaatgagatagagttgttaaagaaacagatggaagatgcaaatcttgaaattgctgatctcaaaatgaagttagcaacaactgatgaacacaaagaagctgttgaatcagagcaccaggagattttgaagaagttaaaggaatcagatgagatttgtgggaatttgagagttgaaactgagaagttaacaagtgagaacaaagaactgaatcagaaacttgaagttgctggtgagacggaatctgatctgaatcagaagctagaagatgtgaagaaagagagagatggtttggaagcagagcttgcgagtaaggctaaagatcacgagagtacactggaagaagttaaccgtctgcaagggcaaaagaacgaatccgaagcagaactcgagagagagaagcaagagaaaccagc

SEQ ID NO: 188866 - DNA, 529 bp, Arabidopsis thaliana landsberg
atgcaatatgaaaaggaacgcgttactacggtcacgcgaggaaaaaggaacgcgacagtcgaagctacggtcgagaagatatcacgtttacactaaataaatattaactataacatttaatttgacattatcaaatataaatattatacgccatttagttcgattaatctgctacactaacaaatgtcagttaattaaataatttaattaaaacaagagatcctaagcgagatgaattttatgacgcgtgaaacagcacgacagcgtgaaaacgacgcacggacacgcgcgacatagcacgctgacgacatacaaaaatagcgcgtgcgacgagcgcgaatgcgcacgaaccagcacgcgaccacgagctcatcacgcacgaacaacgcgcagacaacacgtgaacgacgcgcaaaacagcacgcgaccaggacgagtaaaaatgggtttgcaacgcgttatatcaaataactggccatctacagctagcaaacaacacgaccaacgaatactactaggttgtgattaa

SEQ ID NO: 188867 - DNA, 772 bp, Arabidopsis thaliana landsberg
tgagggtctaacagttacaataaacgtgaagactgtaacgagcatatttagtgaagagtttattcgaattgatgactgtaacgatcgagcactaaaactattcaccaaagtatttcaaacattcataaattatttactaagcaaacaaagaaacgtgaaaaaaaacaaaagtaacattgatcatttccttttaacaacgtaatcaaatacgtatatttttatgcatcggttttatagagagctacatagatatttcatatctctctctagaagaaaagagaaaacgaaaaccaaacccacgcgtaatgttgatttcaccttccactccaacaaaccagcgcctctccgaatcacttcaaaagttttgaagaaaatcaaaactctataaatacaaaaatctctctctcggcaaatgaaacgtgtgtgaacaatccacggtggttattctcacagattagggttacgatcacttacgccgccgtcgacatgtacgtttccaggagaatctccgacgtcgatcgtcgtcttctcctccttctcatagtcccatctctcaccctcctcgtcttaatctctttctcatctctctcacttgatccttttccaactctagcccctcttcgtaacctaatctacactcataccctaaccgtcaccgatttcaccgtcgaattgtcagattcgaaccctaacgacgttatccaagcggaggagatggaaaatcgacggcggaggaagagggaggagttggttaagtcgaacattgcggcgc

SEQ ID NO: 188868 - DNA, 1134 bp, Arabidopsis thaliana landsberg
atggatatcatcaacaacaaccaccgtgacgaaaacgatgacgacgaagaagaagctctctccgccatgagctctgttcctcctcctcgaaaaatccattcctatagccaccagcttcgtgccaccggtcaaaaaggtcaccaccgtcaacgtcaacacagcctcgacgacattcctaaaatcactgaaatcgtctccggttgtggtatctccggcgattcttccgatgacgagttctatccttacgccaccaccaccaattcctcatctttccctttcaccggaggagatacaggagattctgatgattacttgcaccagcctgagatcggagaagattttcaacctcttcctgaattcgtcggatccggaggcggtgttgggatgtttaaagtcccgacgcggtctcctttgcactcggcgcgtcctccttgtttagagttgagaccacatccgttgaaggagactcaggttgggagattcttgaggaacattgcttgtacggagacgcaattgtgggctggacaagagagtggtgttagattctggaactttgatgatgcctttgagccaggttgtggtttaagcggccgtgtacagagaggtgatgaggatgctgcaccgtttcaagagtcggctagtacttctcccaccacttgtttgatggttgataatgggaataggcttgtttggagtggtcataaagatggaaagattcggtcttggaagatggattatgtgcttgatgatggtgatgattctcctttcaaggaaggtctagcttggcaagctcataagggtcctgtcaattccgtaatcatgagttcttatggtaataatttctacctcaaaaaaaattcatatactttatatatagtcttgtaatgaattcaatctgaaacccattgtttgtatttggaaaatgcaggcgatttgtggtcatgttcagaaggtggtgtgataaagatatggacttgggaatctatggagaaatctctttcgcttaggttggaggagaagcatatggctgctttgttggtggaaaggtcagggattgatctcagggctcaagttactgtcaacgggacttgcaatatatcttcctctgaagtcaagtgtttgttagctgataat

SEQ ID NO: 188869 - DNA, 1395 bp, Arabidopsis thaliana landsberg
  unsure (1)..(1395): unsure at all n locations
atgaaggggtaaaaggagacaatataaccgccaagtcacatgttttgtctgatgttctcgctgctgatgtgccccattctcttatgggagactctgagccagatgaagctgaaaaaacctccgtagagatcaaggatgtggaattgttgggtgaatctaactcttccactaatccagagagccccacactgtttggaaactccgaactagatgaatcaagagattcttcagcagccacgtgcgaagaggcttttgttaccacttctccagagaaagaacttttaattaaccctggaaagcaagaacaaaaggaggtggacgaaaatgtggttcaggaaagtcacgttgcagctccagatttcagaggaaacaccattgttgactcaagcggtggtatcgcatccaaagtttcttacaaccatgagcttaatgcggggcaagaaactgcatgtgcagagttaatgtcaaaaggttctcaggcagaggatgttgtaggtcttgatgctacacaagggacatcaaagaaaagaagagggcattctccacatgctgactcagtaaatctttttgattctaacattgaggaggtagatacaatcatggaagcagaaagaaatatttcctttagctcctatgttgcggtaccagccgagggtaactccgagacaattggcgaaatttccagctaccttgaagttgctggaacctgttccatggtgtttggtgagcaactttcaatagaaaattccatagagccaacataatctaaatcatatgacgtaaccataagataaccctcttgtctgaagttattatgcttatgtcattctagaagtttgagtttagattttcatatctctttctttannnnnnnnnnnnnnnnnaatctggatcttccacagacattcagaaccaaataaatgatgcgctgaaggaatgggcaataacaggtaattatcacattaacactcttaattttcatcatcaagtactttgtttctggatgcatttcatgagtgaaagatagtctaattatctccaatcatttgtagacaaaaatgaagcagatgagctcatagaagcaattgtaactaagaacattcaaaaagacttcgaaggaaatctccttctgaactcctcaggtggtggctctaatgtctctggagaaacaagcatcttagctggaacggcggatgaagatgaagcagctggtccaattgctattgccttcggtaaattttctcttttacagacatctaagcaatttccaggtgttaattattatattgggatactctcgactaattactgcttctactaaatccattctcacagttaaagctatgtctctgactcctgatgaattgactgttaagaatcacatgaatgaaaaag

SEQ ID NO: 188870 - DNA, 334 bp, Arabidopsis thaliana landsberg
atggctgcggcggttgcatctggaattgccccgacgacggccatggttgatcaagtgatccctaatcaacccacggttgctgctgctgctcctcctcctttccctgccgtgagtcaggttgcggcggttgctgctgctgctgctgccgcggaggctttgcaaacccatccaaactcgtctctctatgtcggagatttagatccgagtgtcaatgagtcacatctcttggatctctttaatcaagttgctccagttcacaatcttagggtttgtcgtgatctgactcatcgttctcttggttacgcttacgtcaatttcgctaaccctgaagatg

SEQ ID NO: 188871 - DNA, 139 bp, Arabidopsis thaliana landsberg
aatctcagttaacggtatccgagcaatgcggcatgacgacgattcggcatcttatagagactactctttgtttgagatacataagcacactttcactatgattaagatgctgataagtcatataactatagggcccgag

SEQ ID NO: 188872 - DNA, 446 bp, Arabidopsis thaliana landsberg
atggcaaaacaattcaacgcaagactttctccagcattagattctttagataaagagttggatggtgttatcctttacattaatgtttatgatactctttttgacatgatccaacaccctaaaaaatacggtaagttcatctaacagatttatctatatagaaactatatattataattcatttttattgtcgaactaaattttattccaattatctcaattcttttaggttttgacgtagccggtcaacgatggtgcggtcaaagactgctcacaatatcctatttatgtaactcattgaacccatgttacgggttctaattcttcatcttacatattttgggatcgctatcatccatctcacagagcttatcaagctctcgtcgacaatttactcgatcaatattagagcaaagtctattgatgttgaggaatcaaagaaaatt

SEQ ID NO: 188873 - DNA, 77 bp, Arabidopsis thaliana landsberg
atgccctatccggataaaacttttcccctccttatcctcccggcgctcccctgccttcttgtccctggggttggacc

SEQ ID NO: 188874 - DNA, 651 bp, Arabidopsis thaliana landsberg
atgtcgtttgtcaggaactgttgtggacaccaagatcgtacacccgacaaactacgatttttacatgtgtgctcatgcaggaaaaatagtaagtgtagacaaaagtttagcttcactcctcgcacctttattacaatcaacgctatataatgtttccctctatgatctctcagggaacttcaagaccggctcattatcatgtattacttgatgagattggtttctcccccgatgacttgcagaatctcatccattctctctcctatgtgtaagttcactccttaacgtcaattacaaaaaccaacttagctttaccatcactaagatctaattgtctcgaatcatcatcattccagcaaccaacgtagcacaactgcaacttcgatcggtaacactccttaatcaaaatctcttttataaataaaaatgcatcctcctcttttacactatacagaaactacacaactcaatattcaatgtgtcctctcttttgtgtgttttgtgatctcagtggctccagtgcgatatgctcatcttgcagcagctcaagttgcgcaattcacaaagtttgaaggtatatcggaggacgggaaagttccagagcttccacgtctgcacgagaatgtcgaaggcaacatgttcttctgctga

SEQ ID NO: 188875 - DNA, 439 bp, Arabidopsis thaliana landsberg
atgtcagtccaaggggtaaatatacaggtgggtcaacatgcaggaataacctttcgatgggtgggtcaacatgcaagaatctcaccttataggacttgaaccatccatctaaatagggtgggtcaacatgcaggaatgatggggcaacataaacaggaatggtgggtcaacatgggcaggaatctacaatttgtcttttgagatttgcaatttatttgaggtttgtcatttgggatttgatatttacccgccattatttctgccgatcattctcccaatacctcaatggctttattcagcattttatccgctccgttaagcacccggtaatatccttcggattgccatttttccctggcgaaaagggctttgagctgtaaagagatcttttgcttttcagccggtttcaggtgatcgggagacgaacatccgtctgatc

SEQ ID NO: 188876 - DNA, 517 bp, Arabidopsis thaliana landsberg
atgacagattcagcatcctcgggagacatggaagaaattttctttgacttcaggaagcagcgttttatatactcaaaagagttaggagccttttccaagcttccttatcccacaaaggaaacatttggtcattatttgaaatgtactggtcatggtacagaagctaaaattgccactgccactgagaagtggggaaggaatgtgtaagtcgccttgtaatgtttctctacatttatcgatcacttgtttactgtaacgttgatgattgatgttttttttattggcaattttttcgataggctcttattttgtgcgttctgtttttcttttaatatgtcctacgaacctctattaaaacatttctctgtgcctttgcctctgtgcatatccaaagttttgtttgttttttaatctggtttgacactttacctctgtgccttacagatttgattatccacaacctacattccagaagctaatgaaagaaaactgcatggaacccttttttgtatttcag

SEQ ID NO: 188877 - DNA, 2291 bp, Arabidopsis thaliana landsberg
  unsure (1)..(2291): unsure at all n locations
atctcgtctatctatacaaatccatctagccttgctacagataccattgctccaacaaaaatacctcagtttgattttgaaaggtttggattctcaaacttcactgaaagtagatcttgtggctgcgttcctcttgacaaatttccatttgtaaccattaacaattcgggttctcttcatagcctagaaagttctctgtgttattcgacttctgactggaggaagttatttatattaaagaatagaaaggatggggcacaaataggtttgaactgcgaatgtaacagctgtacttttcaacctaaacgtgattgccctctgaatgggcttgcgtcctccagggatcttggtcagaccaatcactttacagttgatatgcatgtcttcaacaccaatgtacattttcatgattcttcaagtgtttttggaactattatactgccagtatccagatactttcttaccatttcagatgatcttctcgatttggttgcctctgctgaagacttgatgctggtgtcatctttgttcaccaactattctggcgggtttctttggaaacaatcatcaacagatgtctcacaggtcttgaacctacgtgtaaggaagaggggtttggagccttctggttctcaacttgaagtgagcataggtattcaacacacatgctgcattttaccgccggaatatctagccattataattggctatttctctctttctgactggacttcaaagtctggcctgcagtcattgccacaagctactgagttgaccaaggctcattctgagtttgccattagttataaaattgagatactggactcctctattgttcttcctgtggaaggtgatgaccgccggcaactgaaagttgacattcagcagttatatattagctttattccagagtgtgcgttgagcaatgtggtgcagcacataccacaggaatgtgttatcccacttaatcaagtaccagggcgagccgactgtttaaacatatttgggcgggacttatcagtatcattactgctttctgagagtgacatatcaacattcaagaagaacgctgtgtgcagaagtatcactctggctgctagcattattgctgatacttggattagattcccttgtgatcacaatccgttaacggaattggcatgtgttatgtcaagggttgacgtttgtgaaattgttgtcgatggtaggtggtgtttccctcaatgttaatttctgctcctcagcgctctttgtttttctatagtgatcatgtatttcaagtaatgcttacatgtgttatcttttttctttttctttgtagattcagatgccttggatgggtttaaggcatttcttgatgtggttgatcagctttctttagtcgatgaggaatcaaaacttttcgtgtctgatgttcctcagtttcttcatacgaagatgcgcctaaagcaagagttgtcagttgcacccctggaaccttccacaagctttataaaattcagaatgtttgtcaatcttttgacgtcaaaactgcatcggttaaggaaagctcctggaacactgctatccgaaccagtgctccaagctgatatgaaatttgtttgctctggagaacttaaaaataatttccctatgagcttggatgttcagtttttcaaaatggggctttattcattactgagctcagtcatgttagctagatgcatcgatgcagatggggatccttttgcactgagagtcagatttacggagcaggctgaaaatgaatacgatctctgtttttctcttccatccctagacatctggttacacttttttgattggattgaagttattgaacttctgaaatcttattcccagaaactgnaagacagtagtgaagacccttttttctcaaaaggttcaaaattggatatggatgaatctattggagtggtaaggactatttgtgacaatactgatcgggttttgaatgttctgcaaactgaggtatcagagaactctagtgaggtaatgtcatttgccgcaagatcagagaatattggtgtcaaaatccatattcctctttgcacaagccatacagaatttccagggttcatggcaactgatgttcatgagatatctgaggaagagcacacaaattgttttaaagggaattactgtaaatatctttctgtaacagcgtgtagtagaagtggcgaactctctattcttgggagagatgtcaaactgagctataagattgaaaagctcaatgggattcttgcaatatctggggttgacactgtcag

SEQ ID NO: 188878 - DNA, 469 bp, Arabidopsis thaliana landsberg
caaatgctacattctggtgaagaaaggtagacattctaaatttgctcccaaggctgtagaagggtttttactaggatatgactcaaatacaaaggcgtatagggtcttcaacaaatcatcgggattagttgaagtctccagcgatgttgtatttgatgagactaatggctctccaagagagcaagtttatattgatgacatagatgaagatgaagtttcgacggccgcaatgcgcactatggcgatagaagatgtgcgaccacatgaactgcaggaacaagatcaaccttcttcctcgacactagtgcatccccaactcaaggcgatgtataggtacctcaagaagaggggcaggatcaagggggagaacaggaagaacatgttatggagaaagaagcccacatgcccctccaactcaagtccgggcgtcaatccaaagacatcacctcgtcaatcagattttgggtga

SEQ ID NO: 188879 - DNA, 978 bp, Arabidopsis thaliana landsberg
attcagaaattagcacccgactcgggctccgtttcaatgttggccacgacgcctgctcatggactcaggtacgtggtggtgcccacacgctcatggcttcataggtttcgatgctgctcgtcttctctcgctcctctctccccttctgaattctccggcggtaataaagcccagaagaagctcaacgacgagaacaacaccaacgtaagcaatgagaaaacggcgccgtattatccgaaacgaggagaaacagtggagcttgtgtgcgagagtttaggattcaaaggcaaaggaatctgtaaagttgatggaactggctacgtcgttatgtgtgaccgagctcttcccggcgaacgttttcttggccgtgtcactcgccgcaaaggcagctatgctgaagtaggtttcataaaaacttcacctttatcttctaattacgatttttagttataaagttacgatttttagttttgatttgttgttttttggttgtttctcttaggtgacaaaaatcaatacaatatctccacataaggacttagtagaagctccatgtgagtatgcatcttactggggtggttgcaaaactcagaatctctcttatgaagctcagcttagagctaaagaagagcaagttcatgagcttatcagacatgttggaaggttttctgataacaatcctggccttgagattgtcttgaagcctattgttgcttgcgatattcaattccattatcggaataaggtttgtttgattgttgtgcttattggttggtgctttggttttagactctgtgcttataaatgttgacattttgaattagatggagttttcatttggtccacaaagatggcttccgattgaaatgttaaacgagagacaagatggtcctaagaactttgcattggggctccatgcacctggattttttgataaggttttaaatgttgataagtgcttattacagagcgagccag

SEQ ID NO: 188880 - DNA, 601 bp, Arabidopsis thaliana landsberg
cagtgtcatccagagagtattgctactacctatggtagtcagttatttatcaatttcaaggacataactgtggattattggagtcagtgcaaatctacatccatgcgtcgaagaaacataaatgacaccggtgagctcctttaagcttaatgatttcattagtactagattgtcatttccgcctctttcttctattattcaattttgaagacctatttttgttttagtaacctgtggaattattttttaatgaactgtcttggagcttctcgtcaataataaatattctttagcaaacatgcaggtgcctggtgctactcaattgctgaaagaactttctagaactcgatgtacaggaaatggttctagctattttgggaaccctaagtctctgttttcagccaagacaaatggtgtagacgtctttgatatggtggattcatcatatccaaaatcacatacaaaattgctgaggttgaaatggaagaagcatgaacgccttacgcataaagttggtggagcaagaaatatatttatggaactctttgggaagaatagaggaagtgatactttttggctggatacttcttctagtgacaag

SEQ ID NO: 188881 - DNA, 354 bp, Arabidopsis thaliana landsberg
atcactgctactggccaccgcttcctagatacctgccagaatgctacccaaaaagccctccgccagctatgccaaagcagcagggaggcctctgagacaccccttcgctactttccacctagcaacaaaaatactcctatttggaggaaaagactccaggccttgtcagggagagatcctaatgaagatgaccctaccatagtatacatgaccggatatctccacacccttgacaaccactttgacaaccttttctcccactgcacccacctaaactcccgggtggaaagtctagagcagcaaatcaaggaattgaaggaagaaaaggcgacccttcagatagtctcgagatag

SEQ ID NO: 188882 - DNA, 159 bp, Arabidopsis thaliana landsberg
ctcctccaccgccctcgcgatgcaacctcgtcgctgctggaggtggctttgcctgccttcgtctgaccacgtcgcccagctcctccactgccctcgcaatgcagcctcggccttcacgactaccacaccgctccatcaaaaagggcctcgcgccggatg

SEQ ID NO: 188883 - DNA, 1142 bp, Arabidopsis thaliana landsberg
atgctgatgtatagtcttagatgcgataaacaggaattccaggaaggacaaaatgaaaatcctattgacattactaaaggagaagttaaacagcttaaaggtggttatcttccaaaacatctttctgaatggatcaataacatgaatgcagtattccttgagagttgcaagcaatataatttaagaaaggaaaaagaattgaatgctttgactgaaaggaggcaagaagtacggacaatcctttcagaagctgctgttcagtcacttgaagaacaatatttttggatctccacagattggcttcgtctatgggctgataccactttacctccgtaagtaaagctcctcatacatgcatttgttgttattctctacatactgcactgctttcaacataggatgcattaaaatctgcaacagaatatcatatcattcaaatgcatcgtctataatttatcagaatatgatggcgactttgtaccccacaccaaacttctaaatattgtttccctttgaaaatttatattttatttcagtttccagctctaactggtagtggtaaatatgattttctgtttagcaaatcagattacatctttcaagtgttcttgattatatttgttcttgtatggtgtagcgctttggacaacacccctttactgtgttcccatgggaaagttcatgcctcaaaagtgaattgcatgaagcggatatctgaacttgcatggatcaagttagaatcaaaggtatgcaatgtactttgtgtagctcatgtgttagtttctttcctttttcggggcggaaactttattgatttcaagtttgcatcagctgccatcattaactatttgtcagaaaaaattatagtttctagattccagtagacagacttctgttcgactatcaacatttttcttatgctatgttattatttctgatggaataattttctcgtatgtttagttcaatggcggaccaaagttagggaaaggggactactgcagggactgccttatggatggtgctcgcatggttgtgtcttctgacagttatagggatcgaagaacattcatgaaaagcatagcaaatgatgttctttcgggaaagtgcgaggacggaatgtattatatcgctagagcatg

SEQ ID NO: 188884 - DNA, 116 bp, Arabidopsis thaliana landsberg
agcaaaccgaaaagcaagtgcagcctctgcttgtctatggctcgcatcatatggaatacacgaatactcggtcaaatcgtgacgaaaaagatgctggaacagagacctcgtcttaa

SEQ ID NO: 188885 - DNA, 202 bp, Arabidopsis thaliana landsberg
ggataaattgcacggtgagctggagaaacttagagatgaccagatttacatggaacgtgatatatcatgcctccaggccagatggcatgcagtaagggaggagaaggccaaggcagccaatttgttacgggacgttacaaaggcagaagaagacctggagcgtttagccgaggagaaaagtcaacttgacctcgatgtgaag

SEQ ID NO: 188886 - DNA, 674 bp, Arabidopsis thaliana landsberg
atgcactcgttgtactccaactggaagggcaccggtccgtacgccggtggcggcaacaacggcaacccgctgtacaagcagctcgcctacctggccagtaccgccggatcggtgtggggctatcacgaccagcgcggcgcctacagccgggtttccgcgggtggtggctccgagacgctcggtgcgctgttccggccgttcccgcagcagatgcacaagctgggcatcccggctccgctgggccagaacggtccgccggcctaccagggcaagccgggtgtcctgggggacaagcagtcgcccaacgactacgacaagccgctggcgcagctgccggtgccggacgctcccaagacaccgaagaacccgctgctctcgccgttcgactccaagggaggagaccgatgagtcaacccaaggaatcgcggctggctcacacgtggaactcgatcaaggccgaacccggattcatccgcaacctcgtggtgatcttcctagcgttgatcgtcgcggtgctgtccggggcctggatggtgggtaacgccagcttcatcccgccgttcggtcgtaagaccatctacgtggagttcgccgaggcgccggccacccagccggcgaccacccacaaggttcagatcgccggggtaccgatcggccagatcgtcggcagccgg

SEQ ID NO: 188887 - DNA, 2056 bp, Arabidopsis thaliana landsberg
  unsure (1)..(2056): unsure at all n locations
atgatggctcagactccgtggttcctagcgagcagcctgctactggcgagccggatgagactgaaacaactgccgcagatcccgagtcagttcaaatcgaacccgtgatgcccgagaactcgtagtggctgtgtccacttaatggggattgtctcttaaactcaaactttattattggtttttgaattacttattgtctaagtaggctttaaacaaatactttgcctaagaaggcttttaaacctttcctttaaaactatgatcccaaaagggttttctttgtgttaattttgagtatggatttgcaaagtccatctttttaaatagcgtttttgtttaaccatgtggtaaagttacgggatttgtaggttgatcagacctatccctaaaaatgtggactcgaatccgcgaactccccgactcgggtttagtcagttcgatttatttcgcgggctctgagcctttactatttactccgcatttaatggcccccttatcttaaattcaacagttgcctttttgtccttggaaatctggaaaagtgtcacgcttctaaggcaataattgacttttcctcgattcccaaaaatggataaactcattcggacacaccacaattattaactttgtggttttgagtgaaaccctaaatcactataaataagagcataaactttctcaactctcgaaaaacatgatcgcagaaatttacttgaacaacacctatagaatgaaacgcgaaagagcctgcaccgtctgtcccctcgaccccgggagtcccttgtttttgtctgtcgatggcttcgagcccgccggcgtcctctttccacacgcttgtttccactttccttcgaaggaaaagaaagaggcgtacgactttatggacaaggtaaagtctctcttgttttctttttcggaacgagttctacttgttttctaaccagtccatactttaggtcgtcgacaagnnnnnnnnnnnnnnnnnnnnnnnnnnnnnnnngcctaaacgcttgaggcccgaattgctcgcatcgagaggaagataagggccatggagagcgacccttttcagtgggagtggaggaactttgactgcgtggcgaagatcccgcacatgctctggatgtacctccgtgctcgaggccaagtccccggtcctgtaaacgctccggttcaagtgatcccgtctgacaatgaagacggtgaagattaggaggaagacagtaacccctggaagcgcgtgaagtgaacccgacgtggacgacaaaaacgaagcgtccactttgaaccccgaaccggcgatgaaggagcctgttcctgagccccttccctaaatgttcccgagactaaaaaccctcttttttattttcgcatggacctaactactgggcttcggcccatctatttaagagaactttctaattttccttgattcatcaaatttttgttttggagatactctttgaatgtagggcgaacaaggcgacgtgaatcttccgcgaatcactccggctttacatagaatcgcatctttgaaagctaagaaacctccctatagatttcctctctagggttttcttcattcctcactaacaataccgttcttttctttcgcgcttatggccttcaacctccgatgctcggaatccatgccaaacttttcgaggattgggattatcgaggaggacattccgaacgtaccagacagaggacgctccccacttcgcaacttcagatcccagatccgagctccgtgtgcgttaatcaaggacctttcgagcagagatcaggacatcgcgatgtcctttatcaaagctctcgcggctcaacaaaaaaacgatcaacggaaaagaagaaacttcgaaagaagatcaaccaaatgctgcggagagtcaccgtgatattaagggagttacacaccctcaactctcaccccggagactggatcgaactcggaatcgcagaatttgcctgcatcccggattgtatgatgcccattcttgacatcgccagtcaaggggtcgaggtgttttacaagacgaggaggatttcctag

SEQ ID NO: 188888 - DNA, 100 bp, Arabidopsis thaliana landsberg
tgcgtactacttcccaacgtatcttatatagagacattggaggagcctgatcttccatctacgcagaagagatgcttgagttcttccatccgcgaaggcg

SEQ ID NO: 188889 - DNA, 64 bp, Arabidopsis thaliana landsberg
atggttaaaacaggactcccaaaggcggtagcccaaacatgctttaaaggtgaagctcaagagg

SEQ ID NO: 188890 - DNA, 75 bp, Arabidopsis thaliana landsberg
atgggaccatctacttcaacatatgtgacatcagcggcccagatggagaacactcagacgaacatgtctggaccg

SEQ ID NO: 188891 - DNA, 288 bp, Arabidopsis thaliana landsberg
atgccaaatgtcatcgtgttatgccaaaaatttagcaaaacaaaacgcagtttcgtgcttcgcatggatgatttgacacttttcgcccatggtaaatcaattctgtgtaatcaactattgatgaagctctgtcgtttcatttttatacttgtctagcaagtaaaactgatgtgagcttttatgttgtcttttcggtaagtcaaattgagttggattttagtctatggtttttggtttagtaatctccactgctttcaggtcatgttgatgatcataaacaatgcttaa

SEQ ID NO: 188892 - DNA, 417 bp, Arabidopsis thaliana landsberg
tacagcgaaggtggttggaaccgtgacgcctaaggaaccaatggaggattgggaggcagcatgggaattttctactggtgatgaattgtgcatccgttgggactcattaggaactatctcagaacttcgtttatattcaagaaaccccggttcgctggtacgactatcaagatttcaagttcttttcgcgttctttcaaactggtacttgacatctttgatgaaataggttcggctattaactggacggagaatgcaatataaaggagaagatgaagaagacgacgagggttttgtaacagttgttagatcaacagaagaagatccaactgaaaaagcaactgctctgatcgactggaagcatcaagccgtggaatttcttcctgaggaagacgcggttttcgtcttgttattgtcg

SEQ ID NO: 188893 - DNA, 780 bp, Arabidopsis thaliana landsberg
gtcttcccaccagttaacccaactgtcctagagcagttgagaagcgtggactgtatcgtttacgcaatgggatccctgttcacttccatttgcccatcactggttagcacccgcaataaatatgttgtgcaaaaatggtggattactaaatttgtgataactgttatagacaagtctttctgttcatcaggttttgcttggtgttggggagattatctcttccaggtcatgtcgtaaggtatgctgaagcttgtcaaaaatactaatgatggtaaaaatcaatctgatttcttctctctgtcacaggtacttcttttgaacggtagccaagaccgagaaacaagcaggttcaccgcttcctgctttgtgactgctatcgctgacgctctcaacagaactcatggagatactaatattcggctcaagaatcccgcgagtggatctttacaatccacactctttcgatgtcttctttatcagacatatatcgatatccaagaacatcatttttgtgtgcagcctggatattacatcaacactctcttggtccctaaagatggagaaatagcagtagatctcaaacaattgtctgaacaagggatatatgatgttgtcagtatctctttccttcacttgtttccaagtttatgtgcacaacaaacactcgctgttacctccactctattgcagagagtcgtggagagtgttggtgacccaaagcacggtatcttgttcaacccgagctcactgataaacacactggccggtttggtggagtaa

SEQ ID NO: 188894 - DNA, 111 bp, Arabidopsis thaliana landsberg
atggaatggatcaaacgccaagtgttgttaattagtagggcacacgttgccgacatggaatggatattttgcccaaaatatattaggcgacaacgagggaatcttcaaaat

SEQ ID NO: 188895 - DNA, 716 bp, Arabidopsis thaliana landsberg
atgcacatcataatcaaaatcatcatcgtggcttctcttcctctaactctaagagtctctctcacaagagtagtggaaacaattctttcttctccaaaacagagtctaacaaaagcaacagaagcaatagcaatacagcgaattcgaaaagcatcaattcattcgaagacggattcaaatgcagcgctttgtgtctatacctacctggtttcagcaaaggaaagcctgtaagatcatctcgaaaaggcgattcatcgttcaccagaacaaccacgatgacttcctctcaatcgatggcaagaactgcttccattagagacaccgcggtgctctcggctcgagcctccctagagcggttcgagtgcggttcttggacatcttcggctatgatttacgatgacaatgccgatcttggaggccatttcttcgacttgccttccgaattgatcaaaggtgggccgggagggaacgatcaagacgatcctgtttcagctgctttcgtgttcgacaaggaacctaatttggacaaagaaatcaaaggtgttttgaaaacgtctggttcgaaatcaagaagatcaatggagtcaccacgtcacgttcggttctcaacctcgtcgccggtttcttatccaacgtctccgacacattcaatcacgccacggttgctacaagccaccgaggatttcagtagtttcttggaagctcaagcggtgtga

SEQ ID NO: 188896 - DNA, 162 bp, Arabidopsis thaliana landsberg
cctgcaatatggagagtcgtaccttatggctccttggactctatgactcctcaagaatctcgaaaacaagctcggtacgtcttccagatcggctacactcagcgaaaacgcctccacatttgtcacacaccttacatttctgctactaagcaatccctttga

SEQ ID NO: 188897 - DNA, 467 bp, Arabidopsis thaliana landsberg
cttattctagcgaggcaacttttgatcaatcatcaagttacagtgtaacctggacccagaagaaggatacagtagagttgcatgatgagcctgaacatgagcctgcgtatgagcatgagcatgagcctgaaaatgagtcagaacctgggcctgtgacaactatgcttgaaccagattcagagctgaaaccagagtcatcatcattttatcaagaggaggaggatgatgatgttactttagatgtgttatcagaggatgatggtattttagatgtgttatcagatgatgatgagtctctcgatgatgctgatgaagatagtgatgaagctgaggaagaagccgtgaaagacttgagtgaattgaagctggtcgaacttagaggcatagcaaagtcacggggactaaaagggttgtcaaagatgaagaaagccgaattagtggagttgcttggtagtgattccagctga

SEQ ID NO: 188898 - DNA, 127 bp, Arabidopsis thaliana landsberg
acaaaaaaaaatgaagatatcatatcttgtgggcctatatccaatatttgagtgtagcccatatttggatcaaacatcacgtcttacacaatggttctcggatatcccaatctgcgtatggttttag

SEQ ID NO: 188899 - DNA, 640 bp, Arabidopsis thaliana landsberg
atgatgggtgacacgtgggaagtcgaagaggagggagcctccgagaaccggcagagttgtgacgccggaaagcttcaattccgaccaaagtcgccggaaaattgccctagtgtaacggaactcaatcttcgcccaaagaattcaatggcgagattccaatttaagcttaatgagtatatgactccaatttaattaatctgcaaatcttcttgaactccatcttcatcttcatttgaggtttaaacaaaaccaacgataatagccagttgtgcctccaccaatcaactgaaaccctagccacctaaatctaaccactacacaaggatctctgcttcttcccttttcatcgtcaacaaaatacataagaagaagaagaaccatcctattgtcttactcaaaccaaatcgccggagaaacggacggcggaagagctagacgatacagagccagccaccgttgcgaaagaagtcaatcggtgctggaattttgccgaccaacggtgataaacaaaaccatcgatgtcggagaaaagctagccggcgttgcgaagagagccaacgacgctagaagagagccgaccaacaccactgaagaagctggccattgccggagccaaatcggagaagacttctctctctga

SEQ ID NO: 188900 - DNA, 524 bp, Arabidopsis thaliana landsberg
atgcggcatactgtttatgatcggaccgtcgtcgtcatgccccaccgaatcaccaccagttccagatttcgatttcactcccttcgactacattttggagaaatctgcttacaagaacgttttagtcggtgaggaggaataacttcgatgcgtcatgtattacatttgtgaaattttttgtttattatctgtgtttctccatcatctagatgtcgttggagcgttggttgatgttggcggattgactacagactattagggtctcaaactgagtttcaagataaaagatagatagtaagtgttcttttcattgttttatttacaatatcactctaaacgctaactgtccttatttctaacgtagcaatgaagtcttggagtgcgaagcccgcaatcaacaggcggagtacttggatggttactttcagagtttgggtaagggaaattttgttgtcgcactcagcttttggcgtttaaccgaactgtctaacccgaagcttgagagccatggtgctatttcaaag

SEQ ID NO: 188901 - DNA, 213 bp, Arabidopsis thaliana landsberg
atgaatctgaaatgtgtgtacagcaagttgaagatcttagggacattgttgtgcgtatttggcgctttagctatgagcgtaatgcacagcacttcgatcagtcacaaagaagaagatgacactccaatattcgtctttgatcgagacaaggtcgttggatgtatctaccttcttggagccgtctttgttttatccaccaacgtcgttcttcag

SEQ ID NO: 188902 - DNA, 495 bp, Arabidopsis thaliana landsberg
atgctgccaagccttagaagaagatccgagaggttgaaagataaaacaaaagtgagtattttgtaatattgctttgatcttgtggctaaatatgctacttatctgtttttttacgtctttagcaggctaggatcatgacttctttgagtaggcgttgcgaaaagagaaactttgatgagcttgagggagctccaagcagtaaaaacacatgtaatggtgttaatgtagcacatagttgtttggaattgaaaacagatattgatggcatggcagttgacactttctcggtggtttttaatgggtttacaaatggtgaaagacaatatctagaactaaatgacggtgagtctaacggttctcaggatgtaactagtcgcctgaacgatgtagcagatagctccatgtgggtttcaagggctcctggtggcactgatgaattaaatgatggttttgaagacatcaaatatgatttgacattagactgtcaaaaggatt

SEQ ID NO: 188903 - DNA, 440 bp, Arabidopsis thaliana landsberg
atggacgaacgggcggcgcgcctggcgcgggcgctggaggccaaggccggagccgcgggcgtgccgctgaaggtgagcggcgacggctcgatcctcggcagctacgtggtcgcccccgacggcacccccgaccgcgagctcggtgcgcgcttccacctcgctgccgtcaacaacggcgtctacttcggccaggacggcgagtacgcgatgtcgacgccgctcgacgacgagacgctggagctggcgatcggcagtctcgaagtggcgatcgacgaacttgccgaggacgtggccgcggccccgaccggcggtgtcgtgtgagccgcggccgccgcttcaaggtcacttgcgatgtcggcggcaccttcaccgacgtggtcgtcaccgacgacgcgggcagcaccgcgatcggcaagtcgctgaccaccccggacggcctc

SEQ ID NO: 188904 - DNA, 921 bp, Arabidopsis thaliana landsberg
acatgaatcgtcctcctattctgctcatcattctcaaaacggtccaattcgctcaaacacttcacaagatgcttctggaaatattgcttatggtatgtaccgattaccaccggggatgaagcaaaacagtgtgacttcttcagagggacacaacgttccatctgtcatgatgttttatccatatggccataataatgtttacaattcaccatctgaacacaatgagtatgggtctcttggaccaggtggtgaagcgccacatttaaatgacgaggatcagccaaggtttcgtggtgctgctgcttctgctcatatgtcttcacctgacgatccttcctcgcctcacttccccaggtaattttggttttatagacttcctattacagcccaatgttaaattacagagaggaagaagattcttgattaaaaaagtatcgtagacctcagagtttcctcttgatttcactaaacaggggaaagtaacatcgatggttgctcaagtttagctgcaataaactcaagaacttagaagaatactgtacgatcacatcactagggtcttggaaatctaaagaaggcaaaaagttgtgaagccgtgaaaggagagacttgatagagctcagaccaatctggatatttctgttcaagtgtggtctggagagcagcaaagaaggaagccaagtcaaaggggaatcggtaagcgacccaagcctggattgttctttgtatgtacactacaatcaagccattaccgcccatgatcatcggtttaatcatcattttcacggagattgctgtttggttttgatagcccagatggatgaaaaaacgcaggaactctttctcagatctagttcggttaggtaacttttctctgttttttgtttcttttcgctttcccttagcattttatttccatag

SEQ ID NO: 188905 - DNA, 120 bp, Arabidopsis thaliana landsberg
gacagtccgttcttcatttcagatacctatatgttttcagttgttgaatgcatcatcgttgcgttcatcaatgtctcaggcgtgaccaatcgtcgcatgtccgactacatgtggccatga

SEQ ID NO: 188906 - DNA, 323 bp, Arabidopsis thaliana landsberg
atggggagtttgatattcagagaaattgttaaagatggggatacatatcaagctatgtatcaagtcgataggcttcaacttctctcagttgaggtaaattctagacttcattgaattatatagatcttggcaatctagccatgttctttagattggatggaaatgttttgttctcttatcttggttttaaatgactactatttggattttgagtgtggtaattgcagattattgccaatagagatgtgttagcataggtacatctgccaatggacatgtgttatcactttagcagctccttcttgttatagaaaaatgattga

SEQ ID NO: 188907 - DNA, 313 bp, Arabidopsis thaliana landsberg
atgacattttcatttgatacagctgctgctcaaggggcagtgattaaagtaattggtgtcggtggaggtggtggcaatgccatcaaccgtatggtcgacgaaggtgttacaggcgtagaatttatcgcagcaaacacagatgtacaagcattgagtagtacaaaagctgagactgttattcagttgggacctaaattgactcgtggtttgggtgcaggaggtcaacctgaggttggtcgtaaagccgctgaagaaagcgaagaaacactgacggaagctattagtggtgccgatatggtcttcatcactgctg

SEQ ID NO: 188908 - DNA, 108 bp, Arabidopsis thaliana landsberg
gattattcggtcatttcaaacaccatctcttaccccaccaaaacttctatttcacgctcctctattacacgcacattccaagttacctcttttgccaattgcaaatag

SEQ ID NO: 188909 - DNA, 254 bp, Arabidopsis thaliana landsberg
atggggctagaacgcaactcgtattgtggaggggctttagttgatatgtatgccaagtgtgaccgtattagtgatgctcgacgagtttttgaatggatagtggatcctaatacagtttgctggacgtgtttgttttctggctatgtgaaggctggtttgccagaggaagctgtcttagtatttgaaaggatgcgggatgaaggccatcggcctgatcatttagcttttgtgactgttataaatacgtacatcag

SEQ ID NO: 188910 - DNA, 711 bp, Arabidopsis thaliana landsberg
caagagaaccccctctcacggcgtgaagacgacgcgcccgtgatccgttcctcgagcggctcgcgcacgccaacggccgcctcgccaaccactcgccccgttgcattaactctgcggcacgacaggcggcgcttctggcaggagaagcgggcgacgcttcgccttcgccgaaataaccgcgccaaaaaaggtacgcgcgtcgtttcgattccgtatccttttcgtttttcctctttctctctctcttgcaacagggaccgggaaaggggataccccgaaaaggatccttccccgtgaaggaaccaggctccgagcctccctactgatcagaggttcgaaggctggccccccgaagggttcgacaaccgcctcagatcgcgtgggccctacacccactactggtcagaggttcgaaggccggccccccgaaagggttcaacggccgcctcaggccacttgggctccgcgcccactactgatcaggggtttgtaggctagcccccgaagggttcgacagccgcctcagacgcagagcgagggatgaccctgggtacgttcgatacataaccaaggctcgggctacactcccgaggtaccctaggacatttccgagaccaacgagaacgattttgtaacggaatcccatcagagggaggcatcgagccctcggaccccgtcaaaaggggaccgggtccagcaaatcacccgcag

SEQ ID NO: 188911 - DNA, 1921 bp, Arabidopsis thaliana landsberg
atttcccttaataacattatgatggaattacgaaaagtatgctgccatccttatatgctagagggtgttgagccagttattcacgacgcaaatgaagctttcaagtaatatctcatttcccaaaaatggttatctgtttattactacttattaaagtcgtctgctaacttttgcgttgaacgttttcttatatgtatcaaagacaacttttggagtcttgtggaaagctgcaacttctagataaaatgatggtcaaactgaaagagcaaggacacagagtcctaatatacacacagtttcagcatatgctggacttacttgaagactactgtacccataaggtatttgaacttcttatatgtacagtctgtttcagtagattttcattcttgttgtttttgtagaatatcattttgacactgtagaatcaactctaccattttctagtgttagagtacttaggcacaattatggaaatacaagcatgtgctgaaattgagagtatatgagcattctgtgcccaactgaaagagcaaagacacaaagtttccttataaacacagtacaaatcacaagtttagccatcttctatgtacagtagttttccaataggtcgagcatgtgctgaaactgtgtgtatagagctctgataaacacacagactcagcatatgctggatctacttgaagactactgttcttataaggtactgaacttgttatctgtactgcgtatgtacgagatctctgtattcttgctcttttatttggacactttgttctcatatacactcggttcagcacatgctcgacttactgcctaaggatcttgaaaaaggtagagttgattctatgtctaggtgcaattactttcttagaatttttgtcattacttactctgttggcaatataacttctttattccctcaaagattactttttttggtttcttgaaatgccattatcaataccattgcttttgctgacgcatgcacttgagacaacttgtttttatctctttctagcacatttttttttaacatgcagttaaggaaaattctcatatgatttatgctgttcattttcttgtctttgtcagaaatggcagtacgagcgaattgatggaaaggttggcggagctgagcggcaaatacgcatagatcggttcaatgccaaaaattctaacaagttttgttttttgctctccacaagagctggtggcttaggaataaatcttgcaacggctgatacagtaatcatttatgacaggtttgaatttcagcttctcttagtgtcatctgtactcttttcatagttattgtgtcaagctgtaagaggaactatttggcttgatagcataatattttggaagtttaatgttgatttttaagtgaattgggttgtgatgagtgataaaaaggcacttggcttttttccaataacagctatttcttgaacatggatgttctaagacagcaggaagatcaggaaaattattaaccgctatcttgctaataattagattttgtaggcatgcaatatgggtggcgtccatgggatcctgcttggatggcagtttgttttggtttacgcctgttcacattttcatacgtacgattgaaactgttttatctgtttctgtagtgactggaatcctcatgctgatcttcaagcaatggctagagctcatcgacttggccaaacaaataaggttttaaattttatctcttagtgctgtcaacttgcaattttgtgttcttttttgtagtttccctaattttccttatattttcctttaggtgatgatttataggctcataaaccgaggcaccattgaagaaaggatgatgcaattgactaaaaagaaaatggttctagagcatcttgttgttgggaaactcaaaacaaaaaacattaatcag

SEQ ID NO: 188912 - DNA, 169 bp, Arabidopsis thaliana landsberg
ctctacgcttctcatcttcgtctcccttctgcaaatgatgaactctcttctcatcatcgtttctcatatcatcatcgtctctcgatccgtcacgatccccatcaagttttatcacgtcttcatcaccggtagatcaagcggaatcggtgaaattagatacgtttcatga

SEQ ID NO: 188913 - DNA, 339 bp, Arabidopsis thaliana landsberg
atgcacctttataggcaactttactctcttaactatttcccttatggtccatatttccccccttattatatgccgcaaccatacattcaccagtacttgagcccaaatgggttccaacaacagtcttacttaccacccggagatgatgctccagcacctccaggggctgaactacctctcactcacatcaaacccggaagcgacattggaaactctccacctaccacgattccattctcatatacttcatacgccttcaaccacatcccatcagcagccaccataaatgctactcacaaggaagaaaagaaggaaaacatgtacacaactggaccactg

SEQ ID NO: 188914 - DNA, 441 bp, Arabidopsis thaliana landsberg
ctggtagaaggaattgattcactagactcagactactttgctcttcgatacctttcctcgcaagcaattcaggaatatattcctagttatgctactaatacaggaactcctgtcttttatgctaggggcgctacagagggcaaattagttgtctacccaattcctgacgctgctctgactggtggcctgcgcctcacttacagtcgctatagcacagacattacctcgatcaatgacgctattgatcttcctgaatattaccaccaactcgttgttgaatattgtcttatgaaggcatacgaaatggacgagaattgggaggccgcggatcgcaaagcacagtatgtacaaagtacggctgactttaataacaaccgtgaaggttggttcggtcatgacaaataccctagcgtcactactgtagcggaggactacgaatga

SEQ ID NO: 188915 - DNA, 897 bp, Arabidopsis thaliana landsberg
acccggtgtaactccaaatggatatctcaacctcggttttcaccttccgctgaacggatccactggtatttattcggttctttgaaaaatgagacaatggtgagaaatagattccttcaactctgctagatttaagttcaaacccttggtcacctatagttggtagaatttgagctatctcgaaaaggagttcaggcttggtagcattggccaaaagactttggagtttgagcaaatggtcaacaataaattgttggcactaattaaggtttaacatgttgaaagtaaacatgaaattggcactaatatttttgctcttgtagaagatatatgagtaatttgacttctagttgaaggctctctttttttgaaagattaagaggaaaacggctgtttacgtagcatactactctaaggctctcatgaatcatgatcatatatattaatgaactaaagtgtcgtgcctaaaactacatgaacaaaacaatattatgaatttactacatgacctatttaaatatgtagtcggaaacctacgttgaagtagatgtcattacccaaactattagtgctttcttactagaataccatgttgtactttaattttaatatgttttacgaaaacaaatcgggctcggggaaacgatattgttttatttgttaaatttgacttcagttaaaaaataatatatgaattagattataccatgttgtttgtatttcaccatgtatctcatccttgtatttcactttggttgctatttcatgaataattcagacggaaaaaaaaagattataccatgttgttttgcgtctccctctcttctctctcctctctaactccagtttcaccactacgagttagagaaagattctaacgccgataagtatgtttaa

SEQ ID NO: 188916 - DNA, 371 bp, Arabidopsis thaliana landsberg
atgggaaagtgtcggacccctttatctacggaccggacctccgggtaaggtccaggacctccacaggcacgaaccaggcccctgggatgggtcccggacccctctgtgtggggtctggaccactcacaacagggtcccaggattctgggataaagagtacccggaccttgatcaagaccaggcgagggttcggagctcacacgtgtccggaccataccacgtacgcttctgctctcgctcaggcggagacccgatgctaccacgtggcccactgcccatgacgtaagccagcgggcggagcctgacgtaaggcctctgggtcacgcgtcctctacatttattgcggataaggcgcgccgcctaccaaactg

SEQ ID NO: 188917 - DNA, 50 bp, Arabidopsis thaliana landsberg
gctctactgaagtggacatggttccaaaaccattcacaaagcacatctaa

SEQ ID NO: 188918 - DNA, 99 bp, Arabidopsis thaliana landsberg
gagaatggaaatcgacgacaagaaaggaaggctaatcagatagggaacctgttacctgatattatgagaggaagaaagtttgtagctagaagcctataa

SEQ ID NO: 188919 - DNA, 1042 bp, Arabidopsis thaliana landsberg
  unsure (1)..(1042): unsure at all n locations
gctctctcaatcttccgttactgttgtcaccaatcacctctacgacgacgacgactactgcgcctcctccgctcacgatgattcccgtgtgtccatcatcgcctctcccagagtcgcaagtagcagctatgagaacctctccgccgccacaagcatggcatacttgcctcagactcttgtgctctgtgaccttagacacgacgacgcatccgacatcgtccaacccccaagatggcgccttaaagagcgagttagtttctcctcccaatctattttgttgccactagattgtgtactcttcttgctcactctttttcaatggcagatgaaaacaggatgtgttgctctagttatgtgtttgcacattactgttgatccccctgatgttattaagatttctccctgcgcaagactcgaatgctggataggtcccaactttcacttaactctcatcttcttctttttttatttcaatgtttcccgcaatcatttttcccttcttttgtttttgatctcgcagatcctttttctatgtttcccccaagaagagctcttgaggctattggccaaaacttgagcattcagtacgagagatggctgcctcgggtgattacttcatttccagctccttcctttgttgaatgtttggcttcctcttcatttgtattctatgttnnnnnnnnnnnnnnnnnnnnnnnnnnnnnnnnnnnctacaaaggacgatgtcaggaagctctgcttgtcttgccggaaatatgcaaagactgagagagttttgtttcactataacgggcatggtgtccctaaacctacacctaatggtgaaatctgggtttacaataaggtcagttttctttcctttctctctacattgtccatgttcttagaagtctgttatcagccacctattcatcttgtgtgtgcagaattttacgcagtacattcccttgccagtcagcgagcttgattcctggttgaaaacacccaccatttacgtttttgactgctctgctgctaggggatcctcaatgccttcgccgag

SEQ ID NO: 188920 - DNA, 329 bp, Arabidopsis thaliana landsberg
gttatgacagtagcagacaagtgtttcaatggcaagactgtttcggctggtacccgtgtcaagtatacaaaacccaagctcacgaatccaaagccttttcgacttagaaccgatgtatgatgcacaataatacaacccaccaaagctgtttattctctaatatgcaactcttttctgatggaagaaaatttacatttttataggaaagacaaattctcaaggaagcaaatacagagaagaaaccacaatgtactcttgccaaagaagacactgccagcattatggggttccatggtgaaaacttgggtccaaatcatcaaccagttcga

SEQ ID NO: 188921 - DNA, 613 bp, Arabidopsis thaliana landsberg
aaactggatgacgctgcagtgcgtaaggtgttcttgaagtccctggaaaactacatcaagtggtgtgattacctttgtattcaacctgcgtggagcaagtaaattatcccctctcccttctctatttttcctgctaccactcttgcatactcactccgacatttcgtaagatgcagtttagaagccatcaatggagataagaaactgctattcctctctttgtacttcctgatttggggagaagctgccaacatacggtttcttccagaatgtttgtgctacatattccaccatgtaagtttatgctgactgtttatttttctccatattctaacaggtgttaagatgaatgaaatctcctaagtacttaccgctctgacttgctactggttcattttcatcataatatgccgtttgtttggtcttttgcgctgatactgattattttgtacagatggttagagaaatggatgagatcttacgccagcaggttgctcgcccagctgagagttgtatgccagtcgatagtcgtggctctgatgatggtgtatcattccttgatcatgtcattgctccgctgtatggagtggtttcagcggactgtcctctgtaa

SEQ ID NO: 188922 - DNA, 336 bp, Arabidopsis thaliana landsberg
atgaacgaggtttgttgtttactcatgccctatgtaaccgagtttttccctatccgatggagatttataatttacgtttttcgatttcaggaacttgacaagcaagtcccattgatggaagaaatggaaacaaaggtgagattcttttttcctttgatgattacgataaaaaatatttggtgtttgtctcttcccttagttttaaatttgatctttatcattaggtggtgttatcaaaacgctagagatataatgattccatgattgttgtaggtcgatggagccacttcggatttgaagaataccaacgttcggctcaagaaacagcttgtgcag

SEQ ID NO: 188923 - DNA, 204 bp, Arabidopsis thaliana landsberg
agacaaaaacaacttttggatgataaatttgaagatttaaaagaatttgtccgtgcagagatacgtgatgctctacattcccaggaccgaaacgaagaaggaacacgagcatcccacaaatctgattcaccatctgagaaggttgagatggtgaccaaaaatgttaaaaaggtgaacaaatgggttgagaaggtagctgaacag

SEQ ID NO: 188924 - DNA, 650 bp, Arabidopsis thaliana landsberg
gcacttcatcaagtgatgaaaaaacctgattacttgagtgatcaagagttccgtcagctaatgtttgacatgatgcttgcttgggagactcccagtgtcacaagtgagcaggaaaacaaagtgagaaatctttctaatttgccatgttcatagtattaaaaatagaaatatatggatttatgctttgtatcttatttgtctcaaatttgccaagttcaggatgcagcatctccctccaagcaggactcagaggatgaggatggatggtcgctattctattcaagtcccactaatatggcaatgcaggttattaccatcttcgacttcctttacttctgcattagttataattggaaggacttaacagactttcccctgaaaaatatccttaataggttgatgaaaaaaagtctgtcggacaggaggcttttgcaagaattgctccggtttgtcctgccattgcagatgcaataactgtacataatctttttgatgcactaactagctcgtcaggccacaggcttcattatatcgtatatgacaaatacctccgcacacttgacaagtatgaacttacctcttcagtccttcaaattgcttttctgcatttgtttactcgtaaatgtcttagtgttataaatcgtaggtga

SEQ ID NO: 188925 - DNA, 56 bp, Arabidopsis thaliana landsberg
gtttcatgctaacatcggtgaaggacggttatttcggaagtttgattttggtgtgg

SEQ ID NO: 188926 - DNA, 232 bp, Arabidopsis thaliana landsberg
acgctcttcaacgctgccggtgcgctggaccccgggatctgtggggtggactcgtaatactggtgtgatcaagcgacccttgcatagtagtctttcgtgaaagctagcagaagcttagtccgatcgcataggctatttctgtctcggtctgttccattgtgaattaggtttactcttcgcacataccaccctgaacctggacgtgcctcgtcttatcttcgattaccgttaa

SEQ ID NO: 188927 - DNA, 460 bp, Arabidopsis thaliana landsberg
atgttccgcaagcaccggcgcgcttctaagtttgtaccatatggtaatgtgaccgctggacatgctgtcggtggatttcaatttcctcaacacgtaagtattatcttactctcttcgagcatgttatgtcaaagggcttttatcaactagtaattgagaatagactgttcctctcaccactaagcgcctgaatggttaacaaccataaatgttagtattgaacaccagattaaaagatcattctgaattgatatggctttgtctgtactgttaaaatgcttccatatactttctgccaccaacttttgtttgttttgccatggatgaatcattcttccacttgcaacccattttcctgcagatgattgggccaactgttaacagagcacagcctcagagatacaccgctcagtaccattctgttcaagctgcaccaatgcttgtaaatccaagtcctcag

SEQ ID NO: 188928 - DNA, 491 bp, Arabidopsis thaliana landsberg
tcccagccatggatcgatccctccaaagcacacacgcaaaactcgtggcgcgtgacatccaacgcctgacacagtcacctacagaatccaactctttctctctgcttggcggagcgtgcgtttcacgcgtagagatagtaggcacaatcgtctctcgtgatctgaccccaaagtttctcaagttcggcgtcgacgatggcaccggctgcgtcacgtgcgtcatgtggctcaaccaactcacgtcttcttacttctcccggtgggatccagccacgattctgctgctcgcaagtgccgcgcggaaacaagccgcacaaatcagaatcggagccgtggctcgcgttcgcggccgcgtcggctcgtacagaggagtgatgcagatcacggctaatgtggcggtggccgagagagacccgaacgcggagatcttgcactggttggagtgtttaaagcttggtcaaagttgttatcgtgttcgtattcaaagttaa

SEQ ID NO: 188929 - DNA, 293 bp, Arabidopsis thaliana landsberg
atgctatcatcctgtgaccgatctgagaggaatccagagaccaaaacaaacgcagcgaaaccaaccaaaatcaaggagaagctcgaaaaaccaccaaacccaaaaccaaccgccgggcccacaaaacccccaccgaaaggtgacggtccatagtacggagcggtcctagcagagtacgaaaagctcggattcgatgttctcggcacagaatacgattgcgaagaagaagaagaagagctccgagacctcgacgagaaggaattaccaccaattctaccaccagacgcagctaa

SEQ ID NO: 188930 - DNA, 359 bp, Arabidopsis thaliana landsberg
atgccgtgcaaaaaagatcaaacggtcgctgagaaggtaatggaaagatcaggccggcacccgggacttcgttttgaagtgaaaaacatgattgaccggtaaagaaatgccgcctaaagaatttttctgtggatattttaacctctccgacaaaaataccattgcgaaaattttatttctcatcaaaattgatatatttgctctgaatgaatcccgaagttcagttccggcttgtcagtcctggcgatcatagcgcacaatcgctgattgcccaatggtacctgagcgaatggaaaatccccgaggaaaggacaagggaaaggctcaggcaattcaaggcagcgggcgaacagttccag

SEQ ID NO: 188931 - DNA, 358 bp, Arabidopsis thaliana landsberg
agtctatctgtcttccgacccaaacagtcaaaatagcaccaaattaaaaacacagacgcgccgccgtacgagaaaatctccggctatggattccgtttacaaaaccgacgaaaacttcgccgcggatgtcgccgctcttcttgctccgcttccaactccccaacttcaggtaaaatccctctccctctctctctctctctatacgcatgtttgaggctaatctccatagaatgttatagtgactgagctcgattctggtttctcaatttgtgtcttcttcaggagtatttcaacaagcttataactagtagaagatgcaatggaattgaagtgaaaaacaatggaaccattggaaaag

SEQ ID NO: 188932 - DNA, 571 bp, Arabidopsis thaliana landsberg
atactggagcgctccttacatttggttgggggctttatggacaggtgagcacgatcgatccctggctttatttattacagtatatgcttgaaacttgaatgagttaagattcttgcttccagctgaacacacatgttgaggaaagctaatcatcatagtgttgaactaattctcaaaatgtttttttatatataccaaaacatagattcaacacaggattcaggtttgataaaacatagaattagggaaaaatgctagtctgcatttaaaataagactggaaaagataattgaaactttcatttgttatacatccgcagctaatattttcactttctgttgggtatgtggaagtaattgattatttttatttttgttgctctgtgaagtgtggccaaggaagtacagatgatgaactaagtcctacatgtgtgtcgtctttgttgggaatccgtatagaagaagtggctgcaggtctatggcacacgacctgcgcttcatcggatggtgatgtttatgcgtttggtggaaaccaatttggccagttaggtactggttgtgatcaagctgag

SEQ ID NO: 188933 - DNA, 117 bp, Arabidopsis thaliana landsberg
atgataccatgcaatgaagaagattttgctcttctggcaattttcatcggtgatgaagtcaaagtcgaagactgcatagcggcactcgttcgcagggagggaggcggtgaaatcatc

SEQ ID NO: 188934 - DNA, 132 bp, Arabidopsis thaliana landsberg
ggccgatcgggccgggacggtatagctctaagccgcgaagacgcaaacggacaggcatcgcccaatcatgccatcaagtcgtgcacgcacccaaccgatcgttgccgatcgctaatcacagatcccatttga

SEQ ID NO: 188935 - DNA, 2060 bp, Arabidopsis thaliana landsberg
atggggaacaagagattcaggtctgataataatgcagggaaaccaacttccgtcgaagctactaggatttgggcgactaaggtcatcgaagactttcgagcctctgggaacgaaggtgaatttagctccgggaaaccaagtcttctcctttggattctaattgtttccttctctgaccgattctttccagaaatgattttatgagtctgagattgattacataaagctctaatctttgggaattttattgaattttggttgcattgtgttctgtagtttacacgtttgagcataatctatcaaataacgaacgtggagtgattcatcagatgtgcaggaaaatgggtattcaatcgaaaagttctgggtgagttagtgtttttgggtttgagaaagtattcatttttattgtttctgattctgggggatgcttttaataggcgtggggaacaaaggcgtctttcgatattcaaaagtaggcataagaatggaaacaagaatgaagctaatgagaaatcaaataaagagaagctcaaatgtgtgtcatttccgccgggagcagatgttattctgcaggagttatttactcattacccaccttgtgatggagatacggctgcaacatcgtttaccaagtactctggtaacaagggtaaacacggacaatggaaagatgattttttccggaaaccacagattagcagtgaggagattctagaaaaagtggcatctttgagttctagacttaagaaggataaagctcttaaggaggttaggattaataccctgttgctgagatgtgtgtcttttgtttgaaaggactgtaatttatgattctttatccggaatacagattgagaagttataaatcatgtcaagtatcagcaagtgaaaggaaattgttttttgttgatttatgttacagatcactaagctgcggtcaaagcttcccatcacatcctttaaagacgcaattacatctgcagtggaatccaatcaggttctgtgaaatttttgatatgttctctcttagaatttactaattgtatggttatgcttgctgtggtgatttccactgcttgaaaaagaattcatcatacattcttattgtaaacgcaggttattctcatttctggtgaaactggttgcgggaaaactactcaggtgtttgttatcccttgtttttcggtagtctagtagaatgatctccttagaaattttgcttactgtgagctgcgattgtgatattagccatgtaaagagtgttcagttgaatttgcgttcaatattttcattctcgaggtttctcaagtgcctccattgtttaatgttttaggtgcctcaatatcttttagaccatatgtggtcaagcaaaagagaaacttgcaaaattgtttgcacccaacctcgtcgaatatccgccatgtcaggttgacatttttttattcagctatgtatttgtgttgatcttttgaaatttcaagtttatccacatgtacgctgtataatgcttaccccttactgtctttttatccctcttttgaagtttctgaaagaatatcttgtgaaagaggtgaaagcattggagaaaacattggttacaaggttagtaatctttgtaggtagacatatttgcgtttgtacatgaaaggtgattgtgtttcaatattgtagacaagtgcaccattgactttatatgtaaatctcaggttcgactccaaagcaaaggtggaaggcactcatcagttgttttctgcacgaatggtattctcctgagggtgcttgtaggaaaaggctctgttagcagtgtttccgacataactcacatcattgtggtactttacatatttcttatctgctctgctatcatgtgcctattacgtgtgtgtttcatatgtatgatgagtattatcggaaaattaaatcgcttgtcaactgtcactatgaaaagccttcttgttgctgtttgtcatcccagatcctctacctttcactttggctttaaatttaattctgtagctttctacattgatcagtgcgttcatgtctttgtaggatga

SEQ ID NO: 188936 - DNA, 519 bp, Arabidopsis thaliana landsberg
ggccgctgtacatgcccaagccatcgccgccgcccgaatcgctgaccaagccgcccacaccgacctccttgccggccgacacgccttcgtcgacatctgccagccccgatgcggccaccccttccgccgtgaagtaattcgccaccgccaacgtccatgacaccactttcgcatttcccctaccgggataccgtcctgcacgcagaaggcgtgccattgccgctgattgcccaggaatacggcaccccgacattcgtctactcgcgcaacgcgttgcgcgaggcctggagcgcctacgagaaagccgcgcacgggcgcaacgtgctggtctgctatggcatgaaggccaattccaatcttgccgtcctggacgagttccgggcgctgggagcaggcttcgacatcgtctcgggcggcgaactggcgcgcgccctggcagtgggccccgatcccgccaaagtggtgttctcgggcgtcaacaagcaaaaatgggaaatgcgcgccgccctggaggccggg

SEQ ID NO: 188937 - DNA, 115 bp, Arabidopsis thaliana landsberg
ctggtaaagatcatcaagtagacaataactttctaagaatttatgttattatcactaatcaacaatttaattattcaaatattaacacagtcaacgagagtacgtacttcagacg

SEQ ID NO: 188938 - DNA, 387 bp, Arabidopsis thaliana landsberg
gtagcaataaagtgattgttaccaacaatattccttacggttcatacctatatgtaaaagacggtgcaaaaatcaccaaaggcgaccgtatctgttcttgggatccgtacaacgcggttattatctcagaatttgcaggtatcgctcagttcgaggctgtgttagaaggtatcaccttccgcgaagagtctgacgagcaaaccggtcaccgtgagaaggtaattatcgataccagggataaaactaaaaaccctgctatccaggttactgataacaagggcaatgtaattaaaggatacaacatcccggtaggtgcacatattgcagttgatgaaggcgagaaactacaaaccggacaaattattgcgaaaatccctcgtccaacag

SEQ ID NO: 188939 - DNA, 930 bp, Arabidopsis thaliana landsberg
tatgttgcgtcattggctagagccctcatctattgccatggaaagcatgtaattcacagagatataaaacctgaaaatctgttgattggtgctcaggtaacaaattgaatctggttatctttctccatcaacgccatgtgattgcagttagcttatgtgtttatgtattcatggatatatgttttcagggtgagctcaagattgcagattttggatggtcagtacacacattcaaccgtagaaggactatgtgtggcactttggattaccttccacctgagatgggtaagagaaagctctctctctcttgtgtgattctaaattactttcttcggcaaccagctaattgacttttctgcttttggattcacagtggaaagcgttgaacatgatgcgagtgtcgatatatggagtctaggaattctctgctacgaatttctttatggtgttcctccttttgaggccagggagcattcagagacatacaaaaggtaacatgttcattaagcgtagaatgggattagtatatgatgtttggtcagtggaatgtacattaaagaagggttttgttcgacaaatgatacaggattgttcaagtggatctcaagttccctcccaaacccattgtgtcatcatctgcaaaggacctgattagccaggtttctactcgcattcctcgtaaatctctctaagtgtttgtgcatttgaagagtgaattctgattttcacactttctgatcaaacagatgttggttaaggagtctacgcaacgtttggccttgcacaagcttcttgaacacccgtggattgtgcaaaacgcagacccatcaggcctttacagaggatgaagcgatgaagctaggaaaagatttaagattgcattcttggcactttgcaccacttactgcaaaaagtctgaccatttcatag

SEQ ID NO: 188940 - DNA, 544 bp, Arabidopsis thaliana landsberg
atgcatcttagatcaaatgggcttcttagcaccataaatgcatctgaaacgatattaaatgagagcaaagctaaagccatggtatttctacgccaccatctccacgacaatttgaaaaatgaatacatcacgagagaagatcttgtggatctatggcaatcacttaaagatcgtttcgatcatcaaaaatatgtgattttgccaaaagccagacatgaatggctaaatctccggtttttggattacaaaagtgttggtgattataattccgccatgttcggaatcacctccaggatgatattatgtggtgaaaaagtgagcgattatgatatgattgaaaaaacgctctccacctttcatcctggaaatgtaatcctttaacagcaataccgggccaaaggatcgttattccgagttgatgcaagtccttttggttgctgataaaaataacgaactcgttgtgatgaatcatttatctcccccacctggatcagctccacttttagaaatgaatgttgctacatctagtgatgataattggtga

SEQ ID NO: 188941 - DNA, 937 bp, Arabidopsis thaliana landsberg
atgaaagcatcattcgccgatctaacgcttaaagacacactcaaaccaattctcatctcttgctacgatctctcaagcacggctccgtttctattctcacgcgccgacgcgttagaaagcgacagtttcgattttcgtctccgagatatttgccgtgccacatgggcggagccggggacgtttgatccggttcgcacgtgttccgtcgacgggaaaacgcggtgcgttgcggtggggggtggattagcgatgagtaatccgacggcggcggcgataacgcacgtgtttcataacaaacaggagttcccggcggtgaaaggagtggaggatttgttggtgttgtcgcttgggactggtcagctttttgaagtgaattatgattatgaacaggttaagaattggcgcgttaaggaatgggctcggcccatggcgagaatctctggtgatgggtctgctgagtttgttgatcaagctgttgctatgggctttgggccttaccgaagtagtaattacgttcgcattcaggttttttttcttttttatcatgattggagacaacgttgtatgttttggcgttttttggatgaaaaaatcattagagaaataaattgtggtgcagcaggcaaatggatcgcgattaggagcttgtggaccgaacgtggacaccgatccaagagcagagaatgtgaagaaactgacggagatagctgatgagatgttgaagcaaaacaatgtggagtcggttttgttcggaagcaaaaggataggagaaatgagcaattcagagaaaatagagtggtttgcgagcgagcttgtcattgagcagcagcgacgaagtgttagagcgtctccaaccgtaacgctaaagcaagctgtgtccaaaactaaccgcaatgctataaacgcaactctcactctcatatctaaagatagatga

SEQ ID NO: 188942 - DNA, 123 bp, Arabidopsis thaliana landsberg
atcgatttaaagaaaaataatcttagcaaacgacatttccaaattaagggtctgactggtttaaacacagcggatgcggttgcgattgcgggagtttgcggaaacgggcggttgcggttttaa

SEQ ID NO: 188943 - DNA, 221 bp, Arabidopsis thaliana landsberg
ctggatacaagccagaggactcaaacagaactgctcctactctctctgatcggtgtttaggatctgcagatacatctcatagtgaaaaattggctattgcatatggattaatgcgaactactgcaggaacaactctccgaatcacaaagaatctgagagtttgcagagattgtcattcgtttacaaaatatgtatcaaaagcattcaatcgggaaattact

SEQ ID NO: 188944 - DNA, 791 bp, Arabidopsis thaliana landsberg
caagtgtttgcaaaaaaagactgaagtagacaagaagctatcgtcattcacttcggaggcagcatcttcttcagataacagtgtattggttaaacatcttcagaaagaacttaaacgctatgtaagttttaccagttcttagtctacccgagtaatgattttacaaagttgttacataagatgaatcatttattgaaaatgagtatgaaagtggtcaggacattgatcataactctctgttttattcaccaatagaagctgtactcgttcttgattaccatgagaaactttgcattacatacccagaatcaatgatttctattttctgttgattactctcataagcagcaaatcacggagagagattatgcaagtttttaaacacttgaaatttactcaaaacactcgttaaattttttttcttaaaatggtcgtcttatttacttaggctatctaagacaattcataagtaaaagagtttacttttcaagaaaagtgaggtaatatagaatgatgtatttttcatgtaacactagttatgcaagtcaaattttaatttgatcgtaaattcgactcacatacttttcatcatttgaagacatgtactatttgtagattctattttcgacttctatactttccatgtaatatctatttagtttttgtttttcttgtcgattttgattcttgataattgtatcaggaagctgaagtgcgagaagctagaaagttaaaatcacggcatttagatgcggagttgttgaatgtgaacttattagaagaacaaagcc

SEQ ID NO: 188945 - DNA, 107 bp, Arabidopsis thaliana landsberg
caaaatacaaagaaacactaaaccaatttggtcatgcacaaaccaaaccagagcaaaaactgagatcgtctactcctcccgtgggtgctacggcgaaccatcgctga

SEQ ID NO: 188946 - DNA, 253 bp, Arabidopsis thaliana landsberg
atgaagttcggaaaagagttctcgtctcagatggtgccagagtggcaacaagcttacatggattacgattttctcaaaacacttctcaaagaaatcatcacattcaaacgaagaaccaacaatgcaccttctcatggtggtgccaagaccggcggaggattaaaccggaaattgactctataccgtgcgtttagcggtcttgtctcaacgccaaggcataaacgtagtaatagcactcatgatgtcgaagaag

SEQ ID NO: 188947 - DNA, 456 bp, Arabidopsis thaliana landsberg
aaaaccaagaccagaacgagccgtcgaaaattcgaatcagacatggcggctgcacggcgtgggcagtcgtccgatcggcgacggcatgggcaattgcggatcgctgcgacgcgattgcagcgtcgtggactggcaatggaaacaatcacgtgcgtgcgcatatgagcacgcaccagacggcggaacgacatgggatgcctcgcatttcgacaggaatggatgcgttgacggacgtcaacggcgagccacaagcggggcacggtgccccggtcgaaacgcgggtgttacagcctcaatctctgcgttcgaagatagaggtcctttccatgcagaggacgatcgccaaactcgtcccagcttcgttccgtgggctggacgggcagcgcgaccgccagcacggcgggcagcagaatcggcagcagagcctgcggtgccggactcggcagcttgaccgat

SEQ ID NO: 188948 - DNA, 249 bp, Arabidopsis thaliana landsberg
atgttttatctctatgttcgggtcgtcaaagccaaggatcttcctccaaaccctgtcacgagcaattgtgatccttatgtggaagtgaaaattggaaactacaaaggaaagactaaacattttgagaaaagaaccaaccctgagtggaatcaagttttcgccttttcaaaagacaaggtccaatcctctactgttgaagtattcgtgcgcgataaggagatggttacaagagatgaatacatcgggaag

SEQ ID NO: 188949 - DNA, 291 bp, Arabidopsis thaliana landsberg
tgttgcatattactattatctcgcaagtcacacttgaccaaagaaaaaattatctcacaagtcaaaaacggatccgatcggcttataatattggtcgaaacacgaacggaccaagccggacaggttggatcttaaattatcaaaaacgatgcggacaaagcacaatttgtttttatttcaaggctctttagttctcatttgtcgtcacaagatttcaaagaaaaaaaatacatcttgtttaaaaggtgtttcattgaatgtgtgtacatccgaaagtcgctcattggtaag

SEQ ID NO: 188950 - DNA, 199 bp, Arabidopsis thaliana landsberg
tataaaagccgcacgctgcgcatccggcagtttcttcaatgccttgaacaggatggccgctttttctttattatcatactgcacacccggatggtaaaaatgtgcaggctcctcttccctgctcccctgccctgcccatggccttagccaggccattcttttctgcgccttctttatccgttcagcatccagtgcgcgg

SEQ ID NO: 188951 - DNA, 87 bp, Arabidopsis thaliana landsberg
atgatggaagatattattgagtggtatgcaacgcttgatgtgttaggaattcccaaaagacatacgcataaattgggtaaaatttcg

SEQ ID NO: 188952 - DNA, 1451 bp, Arabidopsis thaliana landsberg
ccccatccttggttctcgtgagatactgcgccaaagaaaagaagttgggaatagttcaccacaaaacttccattccccagtcgcgcatgaccttattagcaaaagagatatgccatgcatgtcttcccatctgattctaagagatccactagaggaacctggggtaaatgaactcatcattttgtagatattccttgtaactttatttctgcttcaagccagtctttctttatatcgggacctatattatttctttcttgttatctcaacagcacataaatgttttttgatgatgcaatatttggttatacttttcatctggtaactcatctacttacttttcagccaacctacgttgaagagagggggaagttgaccataatgaaggactacgatgagaggacaatttggacaagtgaccgtctacctcttatgacgtcgtataacaaaggtttgtaagtttcttctctggtcaggctgatggctcatgcttttttaagtttttatgaaatactttgtcttggttttttcaggcaagatgcaacattctgtgtgggcggccgaatttatagagtcaaaccttgaagcttctgcgtcatgttcaagcggcattgttcctgatgctgttctctcgaagcgggtttcttttcgtagaatatggcaagcgaaaggtgctaagaaagctgcatctaaggtgacaaatctatctaatgttctcgctgttggtcatgctacctttatttgaggaagattgtatactattttttttactgaagtatttactattattttttattttcacaagtgcctcaaaatatatttcaggtctttttggcaactgataattcagtcccagtaatttgctttctgattctagaacaaaagaagctgttatcggtgggacttcaaactgttgaaatcaataacgaaattctgttcgatgttaagcctgatataagctggagtgtgtctgcgattgctgctgcacctgttgttgtgacacgttctcagtaagttcctacttacaattttttttgccctctctgtcactgtaaatgagactatttctgtcgtcatgtcatgagttatgagtatgacaacccttttttctgtttccttgcagagtgaaaataggactgcttccacatttggatatcattgttttatctccagaaaatgacctctttctctatgtaggttcttgttatgtaccataccgttttctttgttaattattatcctaatgttgtatgttaatttatctataatattatctgtagtcaggaaaacaatgtctctgtagatatgtattaccttcttggttgggagaaagtattggttccggggatggagagtctgcaaaaacagattcaggtttcaggaacctgaagatcacaggattgtctgatgctgttttaggatctatcaatctctcagttaaccattcacag

SEQ ID NO: 188953 - DNA, 689 bp, Arabidopsis thaliana landsberg
atgcgttcctctaccctacaggttagatacttgtcttgagtctcgactgagtcgttcattaagtaatgttggttaaaacattgctctgatactgattccttatcttggaacagaacatgatcgatgatcttaatatgttatcttctggtggttttaattctgttgaggtaaccagctctaagtctaaagaaacttatagtggggttatccgtgtcgttgctgatggcttcttcacttcgcacgagagacctggaaggaacttcacacaaagattctttctttatccccaaaaaactggctactttgttttgactgacatgttcaagtctgttgacacatccgagactaatgatggtgagtaacaaagcagcttccacatttcggtttctttatctaatacttcttatttgcttatttatcagtaacaggtgcagccatttgcgttaaaaatcttccttctgatgcaaccattgccttcgttgaggaagcatttaaacagtttggagaaattagaagaggtggagttgaagttaggatcaaaaaggtaattgtctactaacaattggatctttagagcccttctacttggggtaaacaaaaacactaatttgtgttcttcaaactggtagagcttgtcttatggctttgtggagtttaaggaagaaagtgccgccaaggcagcaatagag

SEQ ID NO: 188954 - DNA, 441 bp, Arabidopsis thaliana landsberg
atgatcagagtgttagacaagctgttcatggctaaatctttaccaaataggatttatttaaagcaaaggctttatgggtataagatgtctgatagcatgactattgaagagaacgtgaatgatttctttaagttgatttctgatctggagaatgttaaagtttctgtaccggacgaagaccaagccattgttctgcttatgtcattacctaagcagtttgatcagctcaaagatactttgaagtacggcaaaaccactcttgctcttgatgagatcacaggagcaatcagatctaaggtattagagcttggagccagtggaaaaatgctcaagaacagctctgacgctctgtttgttcaagacagaggaagatctgagaaacgagacaagagtagtgaaagaaacaagagtcaaagcagatcaaagtcaagggaaaagaag

SEQ ID NO: 188955 - DNA, 1326 bp, Arabidopsis thaliana landsberg
gttgatgtttgatccatatgccaaagttgtatatgactatcttgggggaatagaagacattaaaaaagctaaggtgtgaacatattctgttacacctttttcccccggtaaattattttcaaatatcgttgttctcattgtggttctttgctcacaggtacggacagtgtttcatgctggcacatcatttcaagaggacagtggtgagttttctggaaaaataatcatcttatgtaacatttcctccatggattcttttccaaaatcctgtagagtctagaaaaacaaattcttgtatgattaccattaagagtctagataatagaagcttatgtgtgctttaccgattataacatatccagccaggattcttcgtggaacaagaattgctgcgcgtttaggttttacaatttccaaggaaacagctcatttcttaaagaacctttccttcctagtacaaagactccacagggtactactactgcttcactccacaaagaaatattttctccacattatttttacaacagtgtgttcatgaatgattctgtattatacatgtagggaagaatcttgttggaaatgaattacatgttagcgtatggatcagcagaagcttctttacgattgttgtggaaatttgggatactagaaattcttttaccaattcaggtgagtgtttccactcatctattgttatgtcttaaatgtatctttgcgtctatctaacttcaatattcacaggcagcatatctcgttcgcactggtttcaagagacgcgacaaaaggagtaacttgcttctggtaatatgcagatgcgcattctgcaatattcgtcacagagaagtttctattgcttaaattattgagtacagaacttatagttaacatttcgtaatgcagtctctcttcggaaatttggataaattgttggctcctgataaaccttgccacagcagcttatggtacggtcctcatcttctataagttcctgaaaacacaatccttatcatatacagtggataaaattgtaagacgcaacactattgtattggaaatttgtaggctaacaatcttggctcttcacaaagcacttgctgatcaacctcgatatccttcagtggtagccgcgtttagcctcgctgtccacaatggtggagatgttttagaagctgtaaaaatcaccaggaaagtcacaaagccacataatagaagcttctttgagctactggagccagaggaactggactcccaaaccttgttggatgaagtcatggattttgattcatctatcaaagaagccttgggacagatgactgatgggag

SEQ ID NO: 188956 - DNA, 572 bp, Arabidopsis thaliana landsberg
tgaaagaaacagagagaagaagaaagaagaagagttggctgtgaacagccataaggctgcttcggtctgggcaccggactgtccggtggtcgacggacagtgtccggtgcgccaggctgactcgggcaaagacgccgctctcgggaatttaccggcgacgtacggctataattcaccggactgtccggtgagccaacggtcggccgggccaacggtcggccgcacgatctgcgcgagacacgtggccgagccaacggctagaagggggcaccggactgtccggtgtcacggacatgtccggtgcccaacggctccaagtctgcaacggtccgcttctctatttaaagaacgaaatcaagcacggacagtgtccggtgtcaccggactgtccggtgcccccgatgacagaaggcaagaatggctttccagatttgtgctcaacggctcctagctgccttggggctataaaagggacccctaggcgcatggaggagaagaccaagcatcctttgagcatcattgatcactcacacttcattcttgcgcacttgttcaacattctagtgatttga

SEQ ID NO: 188957 - DNA, 1406 bp, Arabidopsis thaliana landsberg
atacaggaggacttgttgctggacttggttaccccattggcttcccaaatggacgcttatttttccggcgatctaccggtcgtttgtccgacggacgtcttctcatcgatttcctatgtaagtagaacaaaaaacttgtttttgataaatgatagtgatctctaccgtacgtttacttttggatgtacggcccagattgtgttaagacataaatgtcggtgcgtcgcaggtgtgatccataagaaaaaacaaaaaaaaatcggtcattgaaaatcagaatctagtagaacaaagtgggttccatgtagcacatgttagaagtcaatttatgttttggtttgttttagttgaattttttggtttggtttggtttggtttggtttgagtttcgattcagtttggttttatcgtcaattcataattacatttggtctgttttatttgaaatttgttaatttggtttggtttgagtttagattcagtttggtttcagagtcaattattttttttggtttgttttagttgaaatttgttgattcggtttggtttgagtttagatttagtttgggttaagagtcaattaaatttttggtttgttttagttgaaatttgttggtttggtttgatttgagtttatttcagtttcgttttagataaaatagtataaccaaaataaataaaaataactcattattttcgttaatgctgtaaacttttagtatatcttataaaaaaaatcttatgtattcaaacatattaattctaataaataattgttaattcgatttgattgcacaaaatttggttttggtttagttttggttagcataatttgatattgagatttctataacgggtcatacaaataattgttaacgtaattcaacaaaaatatatagctcaagttagttcgattatcatatagataaaatttttatatgcgaaccaaatttatatatttatgttcgtgttattcatttaaatctggtaaatggatgtactagcaatggaataatgcatatgcaggtcagagtttgaatacaagtcttttgaggccatacttagattcattgggtagaacaaggtttcaaaatggtgcaaattttgcaattgctggatccccaactcttcccaaaaacgtccctttctcgcttaacattcaggtcaagcaggtcagccatttcaaatcccgatcactcgagctcgcttctagttcaagtaaacctacctcatcccaaatcattattatttatcctaagttcttaatcagttaatgatcttgactagagttagcatttgtgttttctggattcattaaagggcatgttcataagcaacaatggattcaaaaacgcgttgtacatgatcgatattggacagaacgacattgcgcgttcattcgctag

SEQ ID NO: 188958 - DNA, 195 bp, Arabidopsis thaliana landsberg
aataaaccggctttagatgcagttgctcttatgagtctcaactggtttatcgttggtactcttacttacccgactctaccaagagttgctcgaattgtggtcccacgagtctttaacaccgtcggctcggtcttcgctttgctccatggtggctcactcccctcgccaccagagtttgtgaactatgttggttaa

SEQ ID NO: 188959 - DNA, 233 bp, Arabidopsis thaliana landsberg
ctattgtgattcacgaagccgaaccaccgcaggaaaagaagaaaccaaattcatgtccgtcgtttttgtcccttcctgaagaaatccttgtaaactgtttagcccgcataccgaaatcgtactacccgaaactctccttagtctgcaagagcttctgctctctcatcttatccatggaactttacgtggagcgattgtaccttggtacacatgaagacgtccttcacgtctga

SEQ ID NO: 188960 - DNA, 96 bp, Arabidopsis thaliana landsberg
tgtaatggtaaagcccacttgaaagaagatacctctcgtaggcctaataatgcaatgagattgcaacggttactttcaatctttgaagaaaagtag

SEQ ID NO: 188961 - DNA, 95 bp, Arabidopsis thaliana landsberg
ttctgtacaaatttaaatattctattgaaaaagaaatcttggtcgtcgtcgtcgaatcggatacgttaacgttacgacatacgagtcaccattag

SEQ ID NO: 188962 - DNA, 212 bp, Arabidopsis thaliana landsberg
gcgaacagtgagcttaatgacatgatcgaacactacgaaagactactgctcgatagggaacatgacatcgattcttggaaaggcaagttctcttctcttgagtccgaccgccgctcctcctccgacaccaagctgaaactggaggaccaagtcgatcatctttcctccgagctcatgaagtcgaatggggagttgcaagatcagtatcaaag

SEQ ID NO: 188963 - DNA, 187 bp, Arabidopsis thaliana landsberg
gcgccatttgggagggactccggaaaaaaaccgctgtgggagccctcccaaatgggtacctagttacaaccgctactcctactccctgctccggcgtcgttcactgctgcagtcaccgttcaccaagctcccgtgcttcgacgccgcgagggccataagtatagatggtcaaatgagccgtacttaa

SEQ ID NO: 188964 - DNA, 77 bp, Arabidopsis thaliana landsberg
atggcgcaaggagaactcaagagctttgtacaaaacagtagaccgaaccctaaatctcctactgtttctcccttcag

SEQ ID NO: 188965 - DNA, 111 bp, Arabidopsis thaliana landsberg
atgtccggggatgcaagacaagcatctaatatggcggtggtcagcatcagatctggtgcttcattgtgtgcactatgcgagcatgatgaacagcactctaattcctggcag

SEQ ID NO: 188966 - DNA, 138 bp, Arabidopsis thaliana landsberg
cgaaaccttggcacccgggaaccagcactccttattcgcgaggtctccttgagacacccttccgatcgtgtcacattgagggctcctcccacaacaaacatgcagcccaagctcaccttcataggtccacctttttga

SEQ ID NO: 188967 - DNA, 248 bp, Arabidopsis thaliana landsberg
cttcatcttcatcctcatgttcgtcctcgtcctcatcatctatactttcgggggagctaggagatattgtggagttgccgagtcttgaaaacaatgtaaaatacgattgtgccctgtatgactcgttggaggggctggtgtcgatgcccccatggttagatgctaccgaaaatgattttaggtatggagatgattcgggactgttggacccatgtctcaaagaaagctttttgtggaattatgagtaa

SEQ ID NO: 188968 - DNA, 219 bp, Arabidopsis thaliana landsberg
ggatatctatcatttctcttccacaagaaacccaataatctccaaatcaacacaaacccaaatcgtcaattatagtctttattacttctccgagatcaaaagctcaactttcttgaaactcaggcgattattccggcgagtgaacaataaaggtcagatcctttcgttttttcagggtacgaaattgaggaatcagaggagaagaaaatggaaaattga

SEQ ID NO: 188969 - DNA, 1179 bp, Arabidopsis thaliana landsberg
gatacttggtgaaattggcctgaaatatgtggaattaatacctgaaatagtgccccttttaattaagtctcttgaagatgagacaccagctgtggccaggcaggtcattgcttgtggagctgatttattccgttccaccctcgaaagagtggcagttcaggttgttttcttgtttttgtttttaggttctgtatttgtgacctgttcttcctgcatttcgtatgtaaatcccttcttatttgacgcgcttattgctatttggcttccagggtttgcattctagtgagttgaatgatcttcttgaatcttcgtggacatggttgattaagttcaaggatgaaatatgctcagtggctttcaaggtgggaattaatactttctctaatccccccatgggtcgtctttcttatctgattgtattttttcttgtgacctgtatattagcaaggaaatagtggtgtaaaattatgcgctatgaaatttgtggaagcgcttattctcttgtatactcctcatgaaggtaaatctttatggatctatccgctcaattccgtgaaactagaagttgttgttttattagtatcttattagatactagtttcttatacaatctagttacctgtcctgaaggaattgaagcagattttaatatatctattctccgtgggggtcatcctgttttgaaaattggagatttgtcaattgaggccagccagaaattgggtttactgcttgatcagcttaggcaccctgcagcaaaatctctaaatagctcgacgattattgttcttatcaataggtgagttgtttttaagtgcatctatatgcgtagtttaatttggtatcgttcaatcagtttggactttggagcttggaaagaataccggcaaattatctatgaatcctaaaaatctagctctatatgttttttttctattactttcgatgtggtctagaaaatctttataatctgaaaatagatgaaatacttagatttgacttttgactgaagagcatccaatctagtaaggacgaggttcctgtgattagaacggggcaagtataaaaatatgttttggtcctcacacacagttactaatatttaagggaaaactgtgtttggtaatctgccggtactctttcatcgtgaattgtgtagatggggatccagaatgtcat

SEQ ID NO: 188970 - DNA, 384 bp, Arabidopsis thaliana landsberg
acgatcaccgtgatctcctgtccggccggttcgcccgccaccatctgctcaacgggacaaagggtccggaccagcagcaataactcggtgaattttgctgacgacaatggctggttcttcgatctgccggatagcggtgagcgtgccaacaccaaccctactcttggtctcggtacgctaggctttaccaccaacgtgccgaattccagcgcctgtacagttggcggttatgcttatggctacttactggattaccgcacaggggctgtcgtatcgacgtcgagcactggtgtcgacggtacgctgctgggtaacgcgctggcgacccggccggtgtatgtgcggctttcgaacaataccgacggcgaactcactcggttgtag

SEQ ID NO: 188971 - DNA, 509 bp, Arabidopsis thaliana landsberg
atggctcttaataacgtcgatgctgctgctgaaagccttgagaaagctcttcaattcgaacctaatgacggtgagtgattaatcaagcatctattagttgtggtttgacatgtttggttcatcattatcaatgtattattagagaaatctaactagcatttatttctgtgagttgatttttcagctggtatcaagaaagaatatgctgctgttatgaaaaaggtcggtatgcggataaagaacctaagttctttttgcagttactttacttctagtataaaatcttagagctgacgttaataaccatgtgtgcagattgcctttagagacaacgaagagaaaaagcagtaccgcaaaatgttcgtatagggggggtgctctgcttcatttagggtaagcctaagatttgatgttaatctcagaaaactgacttagtataagctttatgtcaactaatttttttgatgttgtctatgtaggtttggtcggatagtgaggaagaagactaa

SEQ ID NO: 188972 - DNA, 481 bp, Arabidopsis thaliana landsberg
tcgctgcgcgcggaagtggcgagccttggcatccgcgtctgctgcgtctatcccggcgccaccgaatccccttcctgggacggcaccggcgttgacccgcggaagctgatggcggcaaccgacgtggccgacgcattcgtggacgcctggcagctttcgcggcggacctccatcgaagaaatcgtgctgcgtccaccggcatttccctgattcccagcgcggcaacttttccctgacggcacgcaggcttgcctgcactccggctgagccatcggggtcgcattgccggatttataatgaacagcactgttgtgtgttaacgggatttgtgagataagttcaaccggccaaaaagccgcgtttcaggcaccgccggatgcatcgcggcgtcatcgcgaaagcgacattccagaccgcgtttcaaacgcgctgcacgaggagcaggacatgaaaatcaagatcaacaaggcctcatgcgtcg

SEQ ID NO: 188973 - DNA, 919 bp, Arabidopsis thaliana landsberg
atggagtgtatgggacgacttgtccaatcccaccgggtaaaaactacacttatgccatccaagtcaaagaccagatcggtagtttcttctatttcccttccctcgccgttcacaaagctgccggtggttttggcggtttccgtatcctcagccgccctcgcatccccgtccctttccctgaacccgctggagatttcaccttcctcattggtgattggtttaagcatgaccacaaggtatttctttcttgaattaacaaattatgttcgttttagtatttgtcattgttatacaaggaccataattaaatgtaacattattcaggttttgaaggcaattttggatagaggacacaagctacctttgcctcaaggggttttgatcaatggccaaggagtcagttacatgtcttccatcaccgtccacaaaggttcatcctaaaaacactcaaatactttgattacgaagaaaagcattatattatctcatcatttattttttgttgtggaacaattatcaggtaaaacatacagatttaggatatcgaatgtagggcttcaacacactctaaatttcagaatccaaggtcatcagatgaagctcgttgaggtagagggaacacacacagtccagtccatgtatacctctctcgacattcacgttggacagtcttactcggtcttggtcaccatggaccagcctgaccaagactatgacattgtcgtctccacaaaatttgtcgccaaaaaactcttggtctcatctactatccactactccaactcaagacatagccactcatcttctgctaattcagtccatgttcaacaacctgccgatgaactagattggtctatcaaacaagcccggtccattagaaccaatctaaccgcgtctgggccaaggcctaaccctcagg

SEQ ID NO: 188974 - DNA, 1851 bp, Arabidopsis thaliana landsberg
atgtataatgttgttattgatgcatttaaggactttgctacttcaaattctccacttcatcaccttggtttccgtgacaaagcatggaacgtcaataagcttgccaggatagctaggaaacaagggctttatgatgtttgtgttcagattcttgaaaaaatgtatggacactcaacaatggaagtacaggtacatttctccaaaatctttaattgcagcactctacacaagagctgtatatttttgctttttttttggtttcatatctcatcaagtttttttaatagttggtttcatttgtttttaaagcttgtgatactgttatttatgaaagtatcttccacatcttctgtctttgggtgtgtgagtgcaggaagcttttgttaaaattagagagcaagcaaaagcttatctggaaatgaagggagagcgtgctagtggtcttaatctgatcaatagcacaaatttggagtattttccagataagatcaaagcagagatatttcgtctgaagggggactttcatttgaaattaaatgacactgaaagtgctaatatcgcatattccaatgcaatcaccctgttcaagaatttacccaaaggatggataagctggggaagctattgtgacatggtatttcttgtgactgtgttctgtctcttatatggctcctaacattcctctaaaatttgtattccgtgtacttatattttactcgcttttgtaggcataccaagaaacacaagaagaaatttggcttgaatatgctgtcagttgctttcttcagggaataagatttggtgtttctaattctagaagtcacatagctcgtgttctttatcttcttagttttgatacagcgaatgagcctgttggcagggtctttgataaacacttagaccaagttcctcactgggtgtggctttcttggatcccacagctgttactttccctgcaaagaacagaagcacctcattgcaaattggttttattgaaaattgctgcagttttcccacaggtaatttacctttagcgtttatgactaattcgtgcattatgattattttatctgagtatgtggcgattttctgtttcaggctctctattactggttgcgcacatacttgctggaacgacgtgatgcagtaaataaatccgaacttggcagattagttttggctcaaagaatgcagcaaaatgccactggtgcaggtcatggtggaagcaatttaccatcagaaaatcaaatccatcaaggttctcaaactagtggggctgttggagcgccatgggggtggtaatttacatgtgcaagaaagtgaacgtgccactatgataaacaatgtgcattcggggaatgatcagcctatgaatcaaagcagttcaatggcaatctctgctgctgatgcttttgatgctgcaaaggatgttatggaagctcttaggagtaaacataacaacttagccagtgaacttgaggtagtattctgttggtgaatatacttgatttctttatattctctccatacaaaaaagagagtatagaaaacgactgtctggtacaagtagcttggattcagattttgactcacttgcacgtttcctgcttctttacttggataatctaatgatctataattcctctcaggttcttctcacagaaataggttcgaggtttgttactttaccagaagagagacttcttgcagatgtgaatgctttgttgcatcgatgttacaaatatccaactgccaccactgatgaagttccccaaccactcaagaaagaactctcgggcgtatgcagagcttgtttttctgcagatgccgggaccaagcatgtagcattgt

SEQ ID NO: 188975 - DNA, 369 bp, Arabidopsis thaliana landsberg
atgatattggctaggattgttgcagttttaggtcctatcgaaacagagatgctaaagaaaggtcaagagacacataaatacttcaccaaagagtatgatctctaccacttaaacgaggtaatttttcttaatataaccaaaaatacttgagagttattgcttgaatgtgacgcattattcttgatttaggagagcaatgagattgaatacataatcacagaagaatcaagcttggaagaacaactacaagttagtgatgaattgttcttagattttgtaaggactctacttgagatcaatcctttgagacgtccaacagctctcgaggcacttaaccacccttggctctcttcttcttcttacaactga

SEQ ID NO: 188976 - DNA, 159 bp, Arabidopsis thaliana landsberg
atgatagaaggcgtaatactcaaggatggaataaaccggctcaaggattcatcaaatgtaattatgactgcagctactataatgcagacacagaaccgaatgcgggatggattctcagagatgacacgggaggccacattccggcagctgaaagcaaag

SEQ ID NO: 188977 - DNA, 242 bp, Arabidopsis thaliana landsberg
atgtcaagttttggattcgatgaaacatatgagtttgttagtaagtttaataattgttgttataaagaaatgtgtatatttatatattacaattaattaaataaattgttttcctcttcattggattgcttcacttatgttaagagtttagtagttgctttcaaggccgaatgatatgtggccacgaacatatcatcacacgtggaatgagaacgagtttcgacttttcaaatatgccataa

SEQ ID NO: 188978 - DNA, 397 bp, Arabidopsis thaliana landsberg
gggaactaccagcagggaccgccacctgggtttgcacctcatcaaaaccaaggtcctgctgcccctgatcctgaaatgaaacagatggttcaacagctactacagggacaagcatctagctcaatggaaattgctaagaaattatctgaattgcaccataagctggactgcagctacaatgacctgaatgccaaagtggaggcattgaataccaaagtcagatacttggaaggccaatcagcatctacctctgcacaaaaagttacaggacttccagggaagtccatacagaatccaaaagagtatgcaaccgctcacgccatcaccatctgccaggatcgagagctgccaactcgacctgtccctgatttcatcactgggggggggggaaccacag

SEQ ID NO: 188979 - DNA, 1537 bp, Arabidopsis thaliana landsberg
ataggtcttctagaaaaccgttcggcatgctgaaagacctaccagtcatgattaatggcgtagaagtgcctacagacttcgtggtgctggatatggaagtagagcataaggatcccttaatactgggaagaccctttttagcgtcagtgggagcagtgatagatgtcagggaagggaaaataagtctcaaccttggaaagcatatcaagttgcagtttggcatcaacaaaactccacaagggtcaaccgaagatggaagaacctctagaaatgatagagcgatctcatgagaaggatatgagactgaaagagtgaaagaacttagaaagaggtctgataagcaggatgaaactatagagaagctagcccacaccattgaggaacttaggagtaagctgaatcggatgcagaaggaagctcaacctaaaggcgggattaacactatcccgagaaaagaattcacttcaagatggtctcaagatacagattatcctccagaagagaaggaagcctattttgaagaaagggggattgagtattctgctgcagacctctccagggaggacgctgaatatgatgatggtatcagagaggattatgctgaccctctctacagttcattttcttcttgataagtgtgaggagtcaagctagagacttaaaacaagctcacttgggaggaagtcccatgactatccttgtaaataatttttactttcttgttatttttgatttgttttggttatgtttgtggttctcaggaagaaaggagtaacgtgaaggtaaagtaaaaattcaaaacttttactcaactgatggcctagagatcgagtatagtggtcgagtatgagtgatgtttaaaaacctaaaaaattttaatcatcattttactcgaccaacagaagctacaaagtcttccagggagtctttcaagtttacagaggattgcaggatttcctagagtttttctagtgaacagagaatacagagaagagacaagaagacgacaagggacccgccgctgacgcccatgtcttccatgcaagagaccaagagacatggaatctcttcactcccactcgatcaccacgcaaccccaccttcactcgatatcacctccatcactcgaccttgttttctcctccataaccaaataaactcgaccccatccttcttaaatcaacgctccctttttcttcttctactcgacttcgacgccatcaccatccccacacctattaaactcgaccccattccccttattcatcacaaccaacaaacccatcctcatcaaagccacgcactcgaccgcttctcactcgcctcttcaccaccgtctcaagatcactcgaccgcggtgctggccgcagcagaaggagagaggtcgagtttcctcagagcggtgctggccgccacagagctgatgaggtcgagtacccacctgctggagctgatacagaacaaggaggttcgtctatggcctgggagcaatcgcaggcagccattgacgagcaactacgttcattcttcgactgag

SEQ ID NO: 188980 - DNA, 183 bp, Arabidopsis thaliana landsberg
gcctttgcccagcgggtcgtgtccccccgttatgcggtggctctcccgcctccgtgcttttgtggcctcttcgtcttcctccttggctcggtgctgtggttttgccgagatcttcgtccttcctcactccttgttcggctttttccctccagcggcttttgtcgtcgtttcggtctccctgtg

SEQ ID NO: 188981 - DNA, 133 bp, Arabidopsis thaliana landsberg
ttctttcccgacctggtgaagaaaggacatgtgcatattcttgaaacgcctttgttccgtgtacgcaacaagcaggaaacgatctattgttatgatgaagtggagaaacaggtagccatccgtaaactgggag

SEQ ID NO: 188982 - DNA, 443 bp, Arabidopsis thaliana landsberg
gcaactttgcgaggcttgtcgtcgttcgtcgaggaccgccagcttaggtggatgtgtctacctactacagctgtggatgtgggcacacatacccgtcgggcgacccagagagtttcctcctcgtgagtggttcgtggtagccggacatcggcttaagcccacggctgcttaccgctgggaccaggtcgaggagccattcgcacgacaccagcgtgcttacgtggagtactcaaacgagctcaacgcacttactccttcgatggtgagttgtctccttttatctttttacatgtcctttctacttttatcgcacgacaccagcgtgcttacatgggctttctaaaacttttgcaggtgacttggcaaccgtatcttgatccatatttcgccagcatacagttgagcagcatgtgctcaatagacgagaacctctacctcatgag

SEQ ID NO: 188983 - DNA, 79 bp, Arabidopsis thaliana landsberg
atggagaagacttgtgttgaggatgagttaacactcactgtcactagactcaacagtgagtctaagagacggaaaatct

SEQ ID NO: 188984 - DNA, 738 bp, Arabidopsis thaliana landsberg
gccctggccggggtcctgtggctgacaccatgcagatcgccgtcgcgcttggtgccgcctcgctggtcgccctcctcgattccggcagcacccacaacttcatatccgaggcggcggcggggcgcacgggtctgccccttcaccagcggccacgtctcatcgccatggtcgcaacggcgagcgcgtcacctgcgccggggtcctccgtgacgcccccctcaccatcgacggtaccccgttcccggccgatctctacgtcatgccgctcgctgggtacgatgtcgtcctcggcacacgatggctgggcgcgctgggtcctattgtgtgggacctggctagccggcgcatgaagttcaacttccaggggcgcccgatatgctggaccggcgtctcggctgccagtcccacagcaatcagcgccacggtggcgagcgagcagttcctcgacgcactcctggactccttcagttccgtcttcgccgagccgatcggtctgccaccgcagcgcgcccacgaccaccgcatcaccctgacgccgggcgcgcagcctgtggcagtccggccataccggtacccggctgcccacaaagacgagctggaacgccagtgcgccgccatgatggagcaagggatcgtacgccgcaggactcgcccttctcgtcgccggtcctcctcgtcaagaagcccgacgggtcctggcgcttttgcgttgattaccgcgccctcaacgcgctcacg

SEQ ID NO: 188985 - DNA, 210 bp, Arabidopsis thaliana landsberg
atgcaaatttcggtgaaaaggtaagtttcctcttggttattttgactagaagctaactatgtttgtctaaccggtaggaaagctcacaagaaagtccaatcaaaaggatcaattttggagaaaaaagacttctctcaggtggtgaagcattggaccggtctgggaatatataagaatatcatcaatgaacactactatgaacttgttgag

SEQ ID NO: 188986 - DNA, 351 bp, Arabidopsis thaliana landsberg
atgtcgcgattggctttaaatcgttatagccgttgtttttcgcggcttaagacattgacgacgcctctgtttttctcttcctctgctgcgtcgaatcgagatggtgactatcagataggaccgcccccgatccgagtcggactcactgagtcagcgggtcgggctgtttttgcaacgcgtaaaattggtgccggagatcttatacacacggccaagcccgtcgtagcttgcccttctcttttaaagctcgactctgtttgctatctttgcctaaagaaactcatgggttctgctaaatttgaagatcgtggagtttcttattgcagtcaagagtgtcaagagaattcaaag

SEQ ID NO: 188987 - DNA, 512 bp, Arabidopsis thaliana landsberg
gcctttgaacttggaactctctccagaagaagaagtaactgtgttaatgcacatggatattatcaggtgaaggatcaccattacttcttttgtaacattttcttattcttgctatcggtttggagattcaataatgtaacaactttccagggaaaatggctttcttctagaggagaatccaagtgctcctcccggaaaacactttagactacgagccattccttatagcaagaatatcacctttggagtcgaaggtagtttttctgtacctctgttgcatcaaatgtcttttgcattacatgttcttatttactttattgttttgggcagatcttaaagacctgatctcaactctaggagataaccatggggaatgttcggttgctagtagctacaaaaccagcaaaacagattcgatttgtccatcacgagtccgtgcaatgctagcatcccgagcatgcagatcatctgtgatgatcggagatccactcagaaaaaacgaaatgcagaag

SEQ ID NO: 188988 - DNA, 75 bp, Arabidopsis thaliana landsberg
ccaataacaccttctggcttggatatggtggaagcatggttggtgtcaacggaagctagacgtaaggatcgttag

SEQ ID NO: 188989 - DNA, 94 bp, Arabidopsis thaliana landsberg
atgtcaccaaccatatcctcagccgccgcaacaccaaccccttcaccaaatgggtcaacgttctccgccgcactagcacttcttgtacgaaacc

SEQ ID NO: 188990 - DNA, 888 bp, Arabidopsis thaliana landsberg
atgtcgcgacgaggcggtggccccgtgacagtgttgaacgtggcggagaagccgtccgtggcgaagtcagtggcggggattctatcccgtggaactttccggactcgggagggtaggtctcggtacaacaaaatcttcgagttcgattacgccatcaatgggcagccgtgtcgtatgctaatgacctccgtcatcggccacctgatggagcttgagttcgccgatcgttaccgcaaatggcactcctgcgacccggcagatctgtaccaagctccggtcatgaaacacgttcccgaggtaattctattgtatgtgtgtgcacgcctaattgatttaatgtcccattgtacttgtatgcttttgtatagttctgggttgttgatttagtcattgcttctctaactaggaattgttgattgggtctgatttgttttggtaattgcaactgtataaaacgggactaggatctttgattcgcctttataatgaagttggggttttctgacttgcaagttttgtttaattctggtgttgagtgaattaggacaaaaaggatattaagaagacattggaggaggaggcaaggaaaagcgactggcttgtgctgtggcttgattgtgatagggaaggtgaaaacattgcatttgaagttgtagatgtttgcagagctgtcaagcataatctttttatacgcagggctcatttctctgcgttaattgacaggtagagattgctttacacgttattcctcatatatcttctactaagcactctatttcaaacgattgaactgattccaatgatgtaattgctagggatattcatgaagcagttcagaatcttagagatcctaatcaattgtttgctgaggctgtagatgctagacaa

SEQ ID NO: 188991 - DNA, 846 bp, Arabidopsis thaliana landsberg
atggcgtcaggtgatcggaaatccccagaacaaacaaatcaggcgttatctcctccgacgccgattgtgcaggaaaatggaactccgacgaagcgtgtgttgatcacttcccttttagcaggtttcgcaatgcttcttctctctttcgggatttattattacgtttagttgatcgcaagaactaggatactctataatgagttccatcttagaacaattttgagatttttggttgcacatatcatcggaaagtagccaaagttcatcggaaagaagcaattagattctcgttgttgtatcagttactagaagttcgattctaggttttatttctccattaattagaagaattcataacttttggtgtatagagagaatttaattcaccagctttgattgactattcaattgcttacttattgcatagaacatgtcaggaatgtttgcatcacagtgactgagaagatgtttcatgtgcaggagtaattggaggaggaactggtttagtgtctaaacaccggatagctcatcccaatattcctactgtttacgctgctaattttgctattgtcgccggttgctattgcggtacctaattcccttctttgttatattgtgcctgctcttttccatttgtgttatcaagattgaaacggagtgtttccattttctctaagaaggtggagtgtctgtcatattatgtgaatattgtgtgattgttgcaatgttttggtttggtaggagctcgtgaatctgtgagaataactcgaagatcagaacacgatgatttaatgaactcagctattggaggactttttagtggtgctttgcttggacgacttcaag

SEQ ID NO: 188992 - DNA, 69 bp, Arabidopsis thaliana landsberg
attattcgccttgacacatatatcccgtttcagctcaacttcgtggaaagttcgagtttacctaattaa

SEQ ID NO: 188993 - DNA, 54 bp, Arabidopsis thaliana landsberg
atggctgacaaatcagacactgcacccccctatggttgtgagtcgcgcaataag

SEQ ID NO: 188994 - DNA, 209 bp, Arabidopsis thaliana landsberg
aaaaacgcttgtcgtgctgcagttcaccatctccattgccctgatggttggaaccggtattgtatatcagcagatgaattacattttcacaaaagatcttggatacaatcgtgaccaggttgttaccatactgcaaaatggcgcggctgtacaaaaaggaacgactttcaggaacgagttattgaaaaatcctggaatcatttcagcgg

SEQ ID NO: 188995 - DNA, 122 bp, Arabidopsis thaliana landsberg
aaaactatcgtccttctctgaagataccattaaccctaaacccaaacaatcggcaaccgtcgagaaaccaaaacggcgccgttccgggagatgtagctgcgttgactcatgttgctggttga

SEQ ID NO: 188996 - DNA, 1102 bp, Arabidopsis thaliana landsberg
atggatcttcctcctcctccagagtcttcatcaaatcccatatcttccttctctgtggtaagaaatgcggaatataattagaaatattagtctttccttttgggcttagatctttttaaatgagaagaaataatcattttgtcatgtctttttgttaatttttgttggattggatcagttattattattattttttctttgtctctattcaggctcaaaagaggatgttgctacagagatgcgaaagtaagtttaagataaggaagctgaacgatactgtcgaagaagacaatgtcacgcagatggagccaaactttacacttgagaacactcttgtttccgaaccagaagcagatttgaggcctcacacaactgagcccactactgaaggtacttactctttttctccccacactgtttacttaattttggtgttatcagttgtatatagctaaggttttgttaatgttattggttataagggttttaaagatgaaagctatggttatggaataagaatgttagtattgtgtacctgtgtttgctttcttgaagagcttttggattccttaaaaatcaaaagcttaaaacttgtcaattatgtctcatttttttggggttagttttcatttatcgacaatttgacattttgttctgttgttcacatgcatgttgtttagaagaaactcagagatcttcagccaaatcacagttgtataatttatgtagtgtgaggcattggaaagcaccactgtatgagtatatcgccgagggtccttgccatatgaaaatgtaagagcacataatttctgcactcttttcacattttaaaggttagaaatcttttagtgtcagcatcattcatgtttttcttttgttttgttcagatttacaggcaaagttacggttgaaatgaaggaggattctcggataacggttttggagtgttttgggaatccacagtacaagaagaaaatcgcagctgagcaggcagcagaagcagcactttggtatcttaagaatgtgggttatacccttcaaacagagaaagcttctggtcgtaaaggacggagtaaaccgatatcgaagatgatggtaacag

SEQ ID NO: 188997 - DNA, 138 bp, Arabidopsis thaliana landsberg
gaatcgcatacaaaggaacgcgacgagatagaggaatacgaagtaccttccaaccggattcaacgagagaatccatggataccagcagaagtagaaaacacgatggatctccgcggcggagataggcagagagtgtga

SEQ ID NO: 188998 - DNA, 362 bp, Arabidopsis thaliana landsberg
atgggttatctcatgtttggagaagctaccttgtctcagattacactaaacatgccacaggaccaatttttctcaaaagtggcacagtggacaacggttagaaaacaaaaccagtttttatttttctctccataatctttggaagttccattttacactaaaacttcatcttggttctgttttctccttttctcaggttgtgagtccgtttacaaaatacgctctcctgatgaatccacttgcaaggagtatagaagaactattaccggaaagaatgtcagagaacatatggtgctttcttcttctaagaacagcactcgtcgcttcttctgtttgttctgctttccttattccattttttg

SEQ ID NO: 188999 - DNA, 275 bp, Arabidopsis thaliana landsberg
atgaatctaaagagagagccgatattcataagtagggtaagccaaagaacccatcaactaaagtgtgcaaaagcagagattttgaagattacaagccaaaacccatgtcgattgagcgggaaaaggcctaaatttcatatgaaccaatacagagagaacgcgcagaaaccgtttcgttccccgaacaaaatagagatacaaaatcgaaaagagcgattctttgtaaccaaaatcaaagcgaagaagaagatggagctctcagtgaagattgagat

SEQ ID NO: 189000 - DNA, 363 bp, Arabidopsis thaliana landsberg
atgaccggcaaccttgccttcttctggacccgtgccgagagccacgtctaccgtgaactcaagcgcttggctgatgaggggctggtcaccgccctggcagggtcgaccgggcgccgtcgccgcacgtcttatcgcatcaccgcggcggggcggcgggcgctgcgggcctggctggccggacccccgggcggtgtgagtatggaacacgagccggtgctgcgtgtgttcttggcgccgggtggggatcgcgatgacctgttgcgggcgattgctgcggctcgggagcaggctcaggcgatgctcacgatcggggaacggctggccgccggttacctcgatgggacgcatccgttcatcgtgcag

SEQ ID NO: 189001 - DNA, 526 bp, Arabidopsis thaliana landsberg
ataaacaagctgcaaagtcttcccaagcaaaatttgagcggaaacccaggcgaacatctaaatctgtaggaaaagagacttctagaaaaggaactagtgtaaaaggggctacacctattgaacagtttcaaagtggaggcaaaacaaatgctgttaatcaaagtttggcttctcatattcagatcacacaatctactgagaaacagcgaagtcttcagagccctgctctaaaagcttttgggtccctttcaacccctacggcaagtctaccggatttgaactcttctgctctctcaagtattctgcgtcgacctttcacggacttgcaacaagtgcaactacgtgcacagatttttgtatacggggctctgatgtaagctctttcttagtctttatttgttcttaagtcttgttgagttagtgagacttgagagcatctgatttggagttcttttgttgtttttttgctacagccaaggaacagcaccggatgaagcttatatgatatctgcatttggtggtgcag

SEQ ID NO: 189002 - DNA, 800 bp, Arabidopsis thaliana landsberg
tttagccctttcggtcattactttgcaagctgttctcatgatcgtactgcacggatttggtcaatggaccgaatacaacctcttcggataatggcagggcatctatctgatgttgatgtgagtgtctccctcatcttcattgtttgggtttaatttgcaaaggttaaatcgaagggaccaattgagttgttaattaaatgcatggataaatttcttaaaacgttttattatgcaattgaagtcattaattcaccgtatcaatgtttacaatggtttatctaacattttacattgtttattgacttagattagtacccacttgttattttaacgtgaccctgacattcataatttaagaatcgtccagtttatagttgatccaaagattgttagccaatacgcttaaagtcataaggttacgatggattacttaactatttggattgacattaagtcagatcagtaacttcaatttttctttggatacctattgatgcgactttcgttgtacttgtcaaatgcatttgatttcagtgtgtacagtggcatcccaattgtaactacattgctaccggtagtagtgataagacggttagactctgggatgtgcaaactggagaatgtgtccggatattcattgggcacaggagtatggttttatcattggcgatgtctccagatgggagatatatggcttccggtgatgaagatggcactataatgatgtgggacctctcaactgctcgctgcatcactcctctcatgggccataattcatgtgtctggagtctctcatacag

SEQ ID NO: 189003 - DNA, 63 bp, Arabidopsis thaliana landsberg
atgtggatcatcgacgcccacttcagaggcttcagaggatatgtacaaaaagcagatggaaag

SEQ ID NO: 189004 - DNA, 337 bp, Arabidopsis thaliana landsberg
atgaacacgcctaatttctcaaacccttttctcaacaactctttaacggatcaaccgaaaccctcgagcttgagaacgagtaatggttttggacacgtggacgttggaacaaactttgaggggcttcacaacattatcgtctcttcttcatcgtcgatgacacagccaaccctaaatactatccatggaccagaaaagagtactgaagccgaaaatgataataatatgctaagatccatcaatggtaatgatcaacccatggtccaaagatccgatggttacacacaacctggtgcttctggatccgagaataatctatcggccgtgagaagtgaag

SEQ ID NO: 189005 - DNA, 115 bp, Arabidopsis thaliana landsberg
cttcctcttctatctccgatacagcaacagagaccggatgtcacattaccaccccctcgaaacattgcttgtccccaagaaaaaacacgacatagctgaagacctggattccaag

SEQ ID NO: 189006 - DNA, 172 bp, Arabidopsis thaliana landsberg
ccaatacgaaaacagagaaaaggaaggcttaacacgtgaacgaaatgaccaggattacacgcgacatggcgatggatctaccgaatatgtctgccaacattggccaggacgaatcttaacttccaaagatacacgtgtgagctgtgtcaagacgtttaaacgggcacactga

SEQ ID NO: 189007 - DNA, 206 bp, Arabidopsis thaliana landsberg
atgcccagggattttgctatactagttcccgaacaagttgtgacgaccatatgtttaccaccagaatctcgacaacaacccggaagaccaaagagatcaagagtcaaatctgcaatgaagattgttatggataacccgcagccaataaaacaacatgcttgtgggaattgcaatcaagtagaccacaatcgtttgacatgcacgag

SEQ ID NO: 189008 - DNA, 394 bp, Arabidopsis thaliana landsberg
accgccgatgacgacgtgattgtcgaagccggcgccgtcaagacccggcgcctcggccgcatgttcggcgcggtcgaagcgcctggccaggcggcgggcggccatggctaggaacggcgtcaccagcatgctcaaggcgacgaccgccgttgcggcggtggcgagacgcggcgacagcaacgcattgccgcgcgcgacgccgaggacgacgaaggcgaattcgccggcctgcgccagcagcatcgcgacctcgatcgccacgccgcgcgacaccccgaaggcgcgcgcgacgccgtacagaatgattgccttgccggcgagcagcgccaccagcgccagcgcgatcaagccgaaatcgccggccacgacgaccggatcgacattggtgccgacg

SEQ ID NO: 189009 - DNA, 384 bp, Arabidopsis thaliana landsberg
aaaggagatgcgcgctcatctaccgaagctgaatacaggctagtggcaaacacttcatccgagctacaatggatttgttccttattgacagaactcggtattcaattgtcacatccaccggtcatctattgtgacaatgtgggagcaacttatctatgtgccaatccggtgtttcattctcggatgaaacatatcgcgtcggattatcacttcatccgtaaccaagttcaatctggtgcacttcgtgttgtccatgtctccactcatgatcaattagcagacactcttacaaagcctctgtcccgcgtcgcttttcagaacttctctcgcaagattggagtcatcaaagtccctccatcttgtgggggcgtattgaggatatga

SEQ ID NO: 189010 - DNA, 155 bp, Arabidopsis thaliana landsberg
tgattgcagcaccacccctcaaccctagccgccccctcctcctctccatggtgcagcctccccgcttggtaccccgtcgtgtgggtgcgagtcttccattggagtttggaggcgaggaagaaggaagaaaggaaggaggaaaggaggaacccaag

SEQ ID NO: 189011 - DNA, 345 bp, Arabidopsis thaliana landsberg
gcgccagtgattttgtggaaatttacaaccattcacaaaagaccttcaacctcaaaaactgggcgctggccaatatcgaccatgataccatcggcaaccacaaaatcatttccgccactgacttgctgttttatcccgggcaatacctggcctttaccagcgacaaggctgctttgatggcgcattacccgctggcggccactgaccatgtgatggagattccagccttgcctacttataacaacgattcgggaacggttattctcatccataacctcaaccgcaccatcgaccgtttcagaaataataccgatatgcattttgcattgctgaacaatgtggatg

SEQ ID NO: 189012 - DNA, 207 bp, Arabidopsis thaliana landsberg
cgagtgggagaggtcgcatatcaattggagttaccggatcatcttgcggatgttcatgatgtattccatgtgtctcaacttaagaagtttctccgtgtccctaaggaactcttaccaatggaagagctcagtgttcggggtgatttgacttacacggagtatcctgtcaagattctgaatacattgactcgagttacaagaaataag

SEQ ID NO: 189013 - DNA, 184 bp, Arabidopsis thaliana landsberg
agataaaagcttaccagaggaagaatcaatggaacagtatgagagattttggagtatcgagtgtgagagtcagagtgaggaggaggaggaggaggaagccaaagcggcgatagaagtttcttttttcttattgagggtttgtgtgttaaaaatacttgagataaaacgcgtattttgtggttaa

SEQ ID NO: 189014 - DNA, 80 bp, Arabidopsis thaliana landsberg
atagtcctgctggctatatccgcttccgctcatttagtgaccaaacctggcttcatcgcaccaccacattcgtaaaatga

SEQ ID NO: 189015 - DNA, 367 bp, Arabidopsis thaliana landsberg
atgggaactaagtgccaagtatacatggaccataagagcttgaagtacatatttactcagaaggacctcaaccttaggcaacgcagttggttggagctcattaaggattatgatttggaaattcactatcacccaggcaaggcaaatttggttgcagatgccttgagtcggaaggagcacgttcactccgctttcgttgtctagctacctgatgaattagcaaaagattttgagagactcaacctgggaattgttacacatacggaaggagtgactattgaattggaacctaccttggagcaagaaatccgcaaaggtcagattggtgatgctaaaatccaggagatcaaggatctgataaccgagg

SEQ ID NO: 189016 - DNA, 314 bp, Arabidopsis thaliana landsberg
atggcgacactaaccgatatcggagtcgcagcaacgatcaatattctaaccgcatttgctttcttcattgcctttgcgatacttagacttcaaccagttaacgacagagtctatttccctaaatggtatctcaagggtttaagaagtagtcctataaaaacaggtggctttgctagcaagtttgtcaatttggattttcgatcttacatcagattcttgaattggatgcctcaagctttgagaatgcctgagcctgaacttattgatcatgctggtttggattctgttgtctatctcaggatttacttactcgg

SEQ ID NO: 189017 - DNA, 238 bp, Arabidopsis thaliana landsberg
atggatgaccttgaagctgccattcagaaggcagagagggctgtgagcaacaccacagaagaccatcccatgtttgcaagcaggttaactgaactgtctgccatgctctctattcaattcacccacacgggaaagatggattgcctagaaagagctatttaccacgcatgcagagcagttgatattaccccagaagaccatccggaccttgcaggccggttgtctatacttgccaaca

SEQ ID NO: 189018 - DNA, 135 bp, Arabidopsis thaliana landsberg
aaaaaaaaaaaaaaaggatatcgtgtcttgagagttggaccggaccacagttcaacagtcatgagctgtgttcttattggaacccagaaaaaggcgctaacggttatcattgtcggtacctttcattcattgtaa

SEQ ID NO: 189019 - DNA, 459 bp, Arabidopsis thaliana landsberg
gtccacacagttgagcgtatacttacctcacatggccgtgttaatacaactcagaccttgctcaatttgaatgaaggtaactaattcaattctcgttaagcttcataaatgttctaaagatgaaatgaaacatccttatataccgtttgctttcaattgcaaaattctgcagatgaattggctggtttcgaacagtcttggagtggaaatgctagaaggcaaatgcagttacccagccgctctggttcatttggaagtaagcagtcctattacacggtcaagttttcgtgttgtacgtttctttgtgaacaaagataaatcatctctttgatgttcttgcaggtggtcttgtgaacagagagcaaccaatgttactttcctcgactgatccaagtccttctcatgcacgagcagaatcatcccgaagaccgaaagctgcaatgaatgtaagaggacatg

SEQ ID NO: 189020 - DNA, 233 bp, Arabidopsis thaliana landsberg
atgcaaatagatgcgaaaacaacacatgacaagcttgtgaagttggtgctcgatgactacggattgaatgaagtgagccattagttaaagatgagctacatgttctccaacaaggctccgaaaaatatgtctattcgtaataactcaaccgtaatatgtagatttatgcgacctttcatcttccgtcaagcattataactcagccgtgaagcattataactcaatcgtgacag

SEQ ID NO: 189021 - DNA, 138 bp, Arabidopsis thaliana landsberg
ctagggcagcaggttttggcttctctggcccacattggggatgaaatacaaacagtattaatggcagaaaaatcagtacaaagagaattcaagcaaaccttcaataaaaagccaaaggttgaagtcaggcagttctag

SEQ ID NO: 189022 - DNA, 966 bp, Arabidopsis thaliana landsberg
atgcagaaacaggtaaataacaatgtcggaccggagaaacacaataacacaaaaccgagaagtatatatagaaaccctcgaaaagccctagaaaactcaatcgaattcagaagagaaacgctaaaatctaaccccaaagatacaaacttggagagatgtgaacagaaatacctaacgactggtaatatttggaacccctctgagcacaatttcagatgcggtgtgaatctctgagcttaattttgcagaaatttaagagaatcaatgtctcttgaccaagataaataaatttgcttgatttgttttttgttatctgacggagaagaaagggggcgtggagttcacgaggaataaaaattgcttctttgcccaaatttaagtatttttattaaaagcccttctttataacttatttatgaactttacccatttaaagccttacaataatttgtaacccacccaaaatgtcacaatttgataaggaaaaaagtttctcccccaattgaaaaggaagatctttaaaaatcaaaattgacataaatatatggaaaaagtgtctttgcaaaagtatattttaaatgttatgaataggtttatgtatacaatacacattgatagaatgatagtgcattgactcattggtaatgttacatgtcatcaaaaacaataaatgactttatgacaaaatagttaggaacactaacaaaaaaaactattgggcagaaaagagattcttaataaataagagggtgataaagaaaataataaaaagactagggtgagtgaattcaagggaatagaaaaagcagagctctctctctctttttagccctctctttcaaagttgaagtttttgaaggcgtctccggctacacagcaatggcttctggatcagactcagaagtagaaaaggaatccatacaccccacagcactgcggaatcgagtttcaattaaagaaatttga

SEQ ID NO: 189023 - DNA, 637 bp, Arabidopsis thaliana landsberg
atgtactacgaaaaatacggttggactcttcaagctgaaggatatctcactgagtcacaaagacatggcaaagctggctatagtctcaccaagcttcttgctcgcttgaagaacacgattcgcctcgtcgacaggtttgttaattagttataatagtactctttctatttcaatctaaagtattgttttcttatagtgtttgaatttttaggcctcatgggcaacattcagttatattagcagaggatgcatcaaagtttgtggaatacactggagagagaaatgaacatggagcaatccttgctggttctagacagatttacttaacgtttccggcagagagtagtttcactgaacatgatgtctcaatctacttcacctcatatggacatgtggaaagatgtgaggattccttgccagcagaaaagaatgtatggatttgtaacatttgcttcctcagaaacagttaaacacattcttgctaaaggcaatcctcatttcatttgcaatgcacgtgttctcgtcaagccttaccgggaaaaatcacgctctagtcgatacctcgacaattacaagcctctacacggcatgcgatatggttctcaatttattgatagagatttagagatgaacacat

SEQ ID NO: 189024 - DNA, 107 bp, Arabidopsis thaliana landsberg
aaagaataatgtctcgctgtttcgtattcgtggtgtcgtgtgtgtatatcagtggcacatattcacggtataccgtccgatgttgtttccactggatgatgagaatg

SEQ ID NO: 189025 - DNA, 459 bp, Arabidopsis thaliana landsberg
atggagatgatgaagaaccctgaaagattctctgtaaaagatgcttctttagagactccgattctgtctccgaagaatgttcaagacatcttcgaggttcctaggacgaaagaaagtcttacaatcatctcggaagaagaggaagccgaagaaagaaatgtaagtcattatttttagtgaactaaatcttttgtttaagacatttgatcaggttactaatagatggaaaaaatctcacaggttagaggcaagatggtgactagtaattacgatagaaaagtgagtaagccgccaagagatacgagcatcaagggagaacatttgagtttgctaaaggagattcgagaacagctcaatgtaatgcagtcagagatgagaagcttaagatcagaactgcatcatcaatctaaacctgtgtccaatcccgaagaggatctagtccttaactcaattcaagag

SEQ ID NO: 189026 - DNA, 383 bp, Arabidopsis thaliana landsberg
gttttggcaatgaatggatcagcggaagctacacggacaagaccattgcagatcagtcccggtgatttagaggctgctcatctagatgaactcataatggaaatagaacagaggagtctctattattaccaagagaaaaacaagtccttgagagctcgttatacctacggaaccattttcttgatcataaatctatgcgcttggtttatccgtgactacgcacaaaaggctctagccttgcttccatgtatttttttcataaatcttttgaaatatatctaatgttgaagttaaagatactttaagttgaaatcatcattgcagatgtcagcagttgtggaccagaaggaagtcgttgtttccatacgcttggagtactccgc

SEQ ID NO: 189027 - DNA, 179 bp, Arabidopsis thaliana landsberg
tttggttgagaaaatcgaggatcatcgagatccgagaaacgaaccgattcaacattaaagagagagaagcaccacgatctcaaaattacaaatcaaacaaaggttcgtcgaatctcagtaatcgatctagcgagagagagaggattagagaagaagcaagagactcgagagagagatag

SEQ ID NO: 189028 - DNA, 148 bp, Arabidopsis thaliana landsberg
gagaatagttttttcacaaaagaaggaatgccaaaaacgccgtttcctaacggatggaaaggagagaagggactatacacggtgggtttcacgagaagaggactttcgggaacagcctatgacgccgttaagatcgctgaggatataa

SEQ ID NO: 189029 - DNA, 1129 bp, Arabidopsis thaliana landsberg
tgagaaggatgcacagatgtgtctttatcatgtttcctggcagtctgatttcggattttgttgtgatctcgatgaaagaagtgctgttgagttagctggtttgtgagtttagctaatgaaaaaattagacaacaatgtttgtcctgaattaagctaacagaataagagatggtgtttaaattaatgcaggcgtacctggtgttcttgctgttgttcctgataacagtttcgagtcactaaacaaagactatgaaggtctgtcttgaatactgatcttatggattgaaaataatgttctacgatattgtttagaatctttgtgtagctgattttgatgaatatcagtgtataatctcacattgtagtaactttggctctctttctttttcacaaaaggcgatagtacgcaagattcaagagatcaagatgattcagagtctcctcccgtaaagacaaagaagctgtttataactggtatgcttaatacttgagattgtatgcattcttttggtcacatagcataatctgttatagtgacacaatatccatagcattttaaggaaaaatcatgcttcccccaattcattgcctgcatcttaatttacgaactaagctcattcagaagataacatttactaatagatcatgtatcttggtttaggactgtctttctacacatctgagaagacattacgtgcagcatttgaagggtttggtgaactagtggaaggtactcatgatttgctatcctatccaagggtttaaaaaatttatcattaggaaaagatagataatcacagccctagaacattcctctgcagtcaaaataattatggacaaaatatcaaagagatcaaagggctatgcctttctagagtacacgacagaggaagccgcaggcactgcactaaaagagatgaatggaaaggtaaatctagattttcgagatcttaaagcaaaatctttgttatcaactcaaagtaaaatctaaacatgaccgttgattcacagatgttatggtgtttcttttttctctgtgcagattatcaacgggtggatgatagtagtagatgtagccaagaccaaaccgttcaggcaaaacagaagtcaaccaagtttcgggctctag

SEQ ID NO: 189030 - DNA, 90 bp, Arabidopsis thaliana landsberg
atgactgggggccaaggggacgaggccgaaactcaagcctgggtcaatttggggaacgctgaatccgatgctgaagatacacagctggag

SEQ ID NO: 189031 - DNA, 1219 bp, Arabidopsis thaliana landsberg
gagcaagcaaagctatcagcttatcgagatagaagattttcaggaacacaagaggagtttgatgaagcgctaagagcatctacaacggtttacattggcaatgtgtctttttacactactgaagaacagctttacgagcttttctctagagctggagaaatcaaaaagatcatcatgggtttggataagaacactaaaacaccttgtggcttttgtttcgtcctgtaagctttcatcttcaacagttttatatgtaagtttcattatggtggttgctgagttttggttttgtgtcttgtttttatcaggttctactctagagaggatactgaagatgcagtcaagtatataagtgggactattctcgatgaccggcctattcgtgtggattttgattggggattccaagaaggaagacaatggggccgtggtagaagcggtggccaggtattcatcagatgcatcatcctctctgtaattccctgaccgtttctttacaattaaaaggtcatcatggttttctaatttcatacaggttcgtgatgaataccgtacagattacgatcctgatatccttttagtccgcatagttatgcactctgttgttcttgtttagtatacctgttttgtggtaggaaagattgatttctcggttatgaatttcccgccaatccatgtgttttttccttaactcattgattacctagaggtggttatgggaaattagttcagaaggaactcgaagcacaaaggcagctcgtggattacggtactggctcattgggagcttatcctcaagctgcgccaacgaattgtatgtttttttcaactttctaccaaatttacttgatcttattcctggtttcatgatttcgcactatactgtggacaaatggtgaactaaaagtaccatgaatgcgagtcttaagttgctttacttagaattgtagtgctcagaataagactctttatcttgcaaagcatctgcttattgttttcccagttccctttcgaatagatagtgaaaatgtgaaacaagatatggatcttagtgttaagtatcttattcaagtcaaattatgtgagaatccgtaaatagagcctgcaaaacactagattcctaaatgctttttgcatatgttaatcacagatggaaatggaaggcgtggtggtggaaactatggtcaaggaggacaaaatcgccatggaagaggaggag

SEQ ID NO: 189032 - DNA, 90 bp, Arabidopsis thaliana landsberg
agagaagaaggtgaagatgaccaattaccggaaaagaaggagggctcggaggaagatcacgaccagctcgtgagccctttgctttcctga

SEQ ID NO: 189033 - DNA, 142 bp, Arabidopsis thaliana landsberg
tcagcgtcacatggtggccagccttgctccatcttctcggcttatgctatggcccacaagggcaaggcgacgtccggcgtcacctacaacctggatgacaggcccaaggcatatagcaaccccgctgtctacatccgcctaa

SEQ ID NO: 189034 - DNA, 164 bp, Arabidopsis thaliana landsberg
atgccctctcgaccaaggtgatatccagtcagagaccaaacatattgcccaggccccaatacagtcagatcacttcactatactgctaactaaaagcactttgtaatcgttgacctaggtcctacgacaagtcgacaagatgtaatggcatcaacctaggccag

SEQ ID NO: 189035 - DNA, 495 bp, Arabidopsis thaliana landsberg
atggccgtgatgggttcaacatcggacaagatgtacctctgccaggtaccaaactttgggtttaaatgataaagctaagaccgcgcgggtgacttgcacgagaagagagtcttgatgtagtgtctccgtctgagccgattaaggactatgccgatgtaggcctgctgaccgaggaccctttaaatggtcacatgcctcgtcatgggtaagctttgcctcaggcagactaataccagaataagataacacacaatgggcgtggagagatggcgagagtagcgtgtaccctccgtggcaagaggctagccggtggtgtatctgtgctctcggttggcgtgaacctgatctggtcttaagaacctcggtggtgagttgacatatgcaagggttaagtgctacatatgtcgtgtgattggagatcctcagctgagtataatcgattcggatcgccataacttcgcggacatgaagacttggtcactgacctatacgtag

SEQ ID NO: 189036 - DNA, 67 bp, Arabidopsis thaliana landsberg
atgacggcgctgagacctctctccgggcgatcacgatcgctgcgatgttcgtcggagaagatggaag

SEQ ID NO: 189037 - DNA, 347 bp, Arabidopsis thaliana landsberg
atgctccgtccccgccatgcaacaggcaacgtgggtgtaccaagagttatgattcctgtggactgcctggctgacaggtttccagagttctttgatgggatactagacgcccagccaattgccgcaacatctgctacaccactatattcaaatgctggatatcagattctgggctatgcaatcgaagcaattgcccaaaaatcgttccatgagattcttatggagcgtattatcgagcctcttggattgtcccgttcgagtcatagcccgcccgacccaagtctggcgatagttccttcagacctgacctctagtcagttcaatttggacattggagatgcaacccc

SEQ ID NO: 189038 - DNA, 834 bp, Arabidopsis thaliana landsberg
atggcttttggcaatatccaagaaccagacggcgagatcctaaagaacgtttgggcgaattacatcggaacaccacaaaccgatacaagatcaattcatgttccagaagtttctagaacttgggaagcgttgcctacccttgatgacataccagaaggttctagagaaatgcttcaaagcctagatatgtcgacggaggaccaggaatggacagagattctcgatgctattgcttctttcccaaacaaaaccaatcatgatccattaaccaaccctaccattgattcatgttctttgtcttctcgggtttcttgcaaaacaagaaaatacaggggagtacggaagcgtccgtgggggaaatttgcagccgaaatcagggattcgacgagaaacggtgttagggtttggctcggaacgttccaaactgcagaggaagcagctatggcttacgataaagccgcggttagaattagaggtactcaaaaagctcacacaaattttcagctcgaaacagttataaaagctatggaaatggattgcaacccaaactactaccggatgaacaactcaaatacgtccgatccattaagaagcagccgcaaaatcggattgagaacaggaaaagaggcggttaaggcttatgatgaagtcgttgatgggatggttgaaaaccattgtgcccttagctattgttcaactaaggagcactcggagactcgtggtttgcgtgggagtgaagaaacttggttcgatttaagaaagagacgaaggagtaatgaagattctatgtgtcaagaagttgaaatgcagaagacggttactggagaagagaca

SEQ ID NO: 189039 - DNA, 378 bp, Arabidopsis thaliana landsberg
tacatcaacacccccttcagcacaatccggcacactggctgctactgtctatcgtgcccccgtgtgaaggaacaccccctccccataccaagactgctatgggtcctcggcctgctggccatcgtcatcaccctgttcgtcatcaaccgcccacgcatggacgtggtcgcgctactggtgatcctcgccctgccgctgtcgggcatcctcaccgtggagcaggcgctggccggtttcagtgaccccaacgtggtgttgatcgccgccttgttcgtgatcggtgaaggcctggtgcgcaccggcattgcctaccgtatcggcgaatggatgagcgagcgggccggcaacagcgaggcacgcctgctggtgttgctgatg

SEQ ID NO: 189040 - DNA, 101 bp, Arabidopsis thaliana landsberg
gaacaagggatcgaaagaagaagttgagaaaaaatgtcctgtatgccgtgggtcatgtaggtgcaaagtttgctcagtcactaattctggagtcactgaat

SEQ ID NO: 189041 - DNA, 128 bp, Arabidopsis thaliana landsberg
gcccaaagcgaggtgacccggaacacctactggtccagtcgctttagagtactgaaaattgttggcgccaaggaagaagaggtgatcttcagagctgagcaattagatcttctatatcaagatttgag

SEQ ID NO: 189042 - DNA, 179 bp, Arabidopsis thaliana landsberg
ttcttttggcgttgccaaatgcagaaggagcggatattaaaagatgtgttgtggacgtgaagcttagcaagccatgcacttttcaagaatgcataccactttgttttcaaaggtacaatgggaatggcgtttgtaccggaaagaaaaacgaaatttgcacttgcgcctacaattgttaa

SEQ ID NO: 189043 - DNA, 707 bp, Arabidopsis thaliana landsberg
atgaaggtgaggacggcggcggttcattttgatggtcatgcgtctacttggcaccattcatttattcaaactggcgtgggtcttgaggtgttgtatgactggaaatcttacattaaattgttgaaagaacgttttgaggatatttgtgaggatccaattgcagagcttaagaagttgcaggagactaatgggattgtatcttatcatgagaagtttgagctcataaaaattaagttgaatctttcacaggagtatttggtcagtgcttatttggcaggtctgagaattgatacacagatgcacgtgagaatgtttcagcctcagactatcagccattgttttctgttgggtaagctgtatgagagggctcatccaaaaccttctgtacagaactggtcagcgaataagggggtaacacaggtagtacacaaaggagtgttaccaacaccaaaggagtatgagtctaagggtgctagtcaaggtagtaacagaccgtttgctaaaccaatgattacacctaagaagtttttgtctcaggcagaaatgagtgatcgccgagctcgtggtatgtgttattggtgtgatgagaaattcactccagaacattacttaacacacaaaaagactcagctctttagtatggaggtagatgaagaggatgtttttatggatgcgatggatcaacatgaggttggtgatgctgcagg

SEQ ID NO: 189044 - DNA, 93 bp, Arabidopsis thaliana landsberg
gttcaaccgaaggaaccatcgatttcggatcatggccagagctcttatcgcgcatctacaaattgtggaggaatgagtattgcagtggaaaag

SEQ ID NO: 189045 - DNA, 288 bp, Arabidopsis thaliana landsberg
cgcaccagactggtctggtggtgcatcggaaagagtgcacagatagggctacaacccgttttcaacagacgaaggcgtcagacaggtgtggtgtacaaggactaagtctggtgcggcatcggaccgaagttccagagaggttgtttattgggcaatttggagtcggggcatcggaccggtccggtggcacaccggatcatttgacaatgcccaacggtcgtttaacttcttcaacggctccctactctaataggatcaaatggttcggtggtgcaccagaccggcacc

SEQ ID NO: 189046 - DNA, 77 bp, Arabidopsis thaliana landsberg
atgatgagagacgttgtgttgtttaaagccagcatacagatgtctccgtgcatcatcttcggcacggataaagccgt

SEQ ID NO: 189047 - DNA, 461 bp, Arabidopsis thaliana landsberg
ggaggcagcaccagtgtgagaagttttttcctcgatatgtatgtcatgaagacggacgtgaccttaggcactgactacctcaagaacatgcgaaatctccggtacctcaagttttacagttctcattgtcctcaggaatgtacgcctaaggaaaacatacacatccctggagaacttgagcttccacttgaagaggtccgatgtttgcattggctaaatttccccaaagatgaacttccacaagatttcatccccaagaatctcgtagatcttaagctcccttacagtaagattagacagatttggagagaagagaaggtgcgtatctagataaaaaacttgattgcttcgttgtttttggcctaacatagtaagttcatggcttaaactaacttaagtcgctggatcctttccatcacaggatgcaccaaaactaaggtgggtcgatctcaatcactcaa

SEQ ID NO: 189048 - DNA, 106 bp, Arabidopsis thaliana landsberg
atggccatgtacaaaaacgatgtgaagcaatttgtcactgttttaagacgtaacgccaagcacatccgccactggctcgaggagaatcctccacgccctcctccaa

SEQ ID NO: 189049 - DNA, 108 bp, Arabidopsis thaliana landsberg
atggacgacaaggcgctggtcgcgggcacgaccctgttcctgccggtccacgccaagggcgcgctgttccaggccggcgacggtcacgccgcccagggcaatggagag

SEQ ID NO: 189050 - DNA, 767 bp, Arabidopsis thaliana landsberg
atgctggctcagtgctgggatgaactcaagcataccagacaagctgctggattcttggtatgttttgaatttaagaaatgctgtctaagcaaatttacttgaatcttagtaagagtttgtatttctcacatatttaccccttgaatttgcgcctgcaacagttcatccataagaaatacaacattttatacgacgagattgcaaatgatctgcgtccagtaagtatatttatcaaccaactcttttaccgataactggagaacattgacgattgtaattatgcttacaccattttaccttcactcagaaccttcaaatacagcagcattttaaactgtgtactctgtacaaggatgaaatctacaacacaaagagtgtttcccaagatgtaagctttctgaggaaatagttctcttctcttgacatatatgaagatcctctgctctagtagtttaatgcttgctcatcgatcaataggtaattgcaagcatgacaggagttatgacagacagcagcgacttcttgttaaaagaggattctaggtaagtgtagctttgcatcatctctatcttttgcttttatgatccaaagtcatgatgacatttatctctctagaaactaacaaaaccgttccttttggccatgcacagcaacatcatatccttgtcgatcgatgacttatgtagttcaatgcaagataaggactttgcccaagtgaaacctgctgaggaacttctggaaaatccatctttcatattcttacatta

SEQ ID NO: 189051 - DNA, 185 bp, Arabidopsis thaliana landsberg
atggatagagcgtttaatttcggagacaatcagatccttcaaatgtatggtttcacgcataaatcgcttgggagccggcgcgtgaaacccacgcgcaatcagacggataggccgctcgatgccaaggacgagtttgggctgcttcatccgccgttcaaagcggccaagcttagtacgacgacgac

SEQ ID NO: 189052 - DNA, 105 bp, Arabidopsis thaliana landsberg
atggtcataaaacttactattgacattcaaataacatataatgaaatgtatgattggtgccgacaagtagctatttttacggactgttcagacctggtgaagaag

SEQ ID NO: 189053 - DNA, 63 bp, Arabidopsis thaliana landsberg
gtactggacttgcttgaagatgcttgtgagtctttgctggatagtgtcactgtgcaaagttga

SEQ ID NO: 189054 - DNA, 1194 bp, Arabidopsis thaliana landsberg
atgattgttgtttctgacaaatacaaatgctccgatgagattatatcaattgctgctatgttgtccatcgggccttctatcttttaccgccccaaggacaagcaagttcacgctgacaatgcaatgaagaattttcacgttggaaatgtcggtgatcacattgctttcctgaaggtctgtacatttctcccctactttgtttttctttgcagtcttactgtttattaatatgtcttctttgttttctgaaagatttacaattcgtggaaggaaacgaactactcaacacaatggtgctacgagaactatattcaggtatgtatatggcatcatcctctgttcttatttttctggttatagttatagaatgggtttttgaatcctatgtgtataggttcggagtatgaaaagagccagagatatccgtgatcagttggagggtcttctcgagagagttgaaatagacgttagctcaaacgcgaatgagttggattcaataagaaaatccattgtagctggtaaatttcttaatctccagttcataaaaagctatatttgttgttgctaaagcagttgtatacttatgctcaggtttctttccacacactgcgaagctacagaagaatggatcatatcgaacagtgaagcatccccaaaccgtacacatacatccagcctctggcttatctcaggtttagtttaactctcactcattgaaaacatataactaaaaaatagagaaatcaaacaaatgaatccttctccgataatattgttaggtattgccgagatgggttgtatatcatcaactagtccttacctctaaggaatacatgcgacaggtaaaattctgtttttgttttttactttgtaaaccacatttcgatcattctgaaccaaagccttctttgggttgattcttctggtttcatttatcgggtttgttcttttaacttaaaaaatgcaggtaacagagttaaaacccgagtggttgattgagatagctccacactattatcagctcaaggacgttgaagatggtaataatactgtgctttctcttcgtctaatccttacttggttctatgaattcggaatccatctctaatattaaataatctcatcccatgatgtatcttttttgcagctacatccaagaaaatgcccaaaaccagtggccgagctgtggtgtag

SEQ ID NO: 189055 - DNA, 163 bp, Arabidopsis thaliana landsberg
agaattaggccgttagcttcactcaccgagagaaccgtcaaagatcaaccacatttgtttacggatggaaacaagacaaggaccttcacgagtgagtcacccacatatgagcaaattacgcagaagaagaagaagatggagaaattaataggtctacggtcag

SEQ ID NO: 189056 - DNA, 388 bp, Arabidopsis thaliana landsberg
atgggaaactgtctaaagcctctcaaagaacaacctccttcagcttctcccaagcctctcaccatcccttcaagttcaggtacatctccgttttcaaatgcactttctacttttgtttacatatataataatatcttaatacgtcttataaatgtaaaaagtggagccagtaaaggagaatttgaaagagtttagatttgccgaattgaacaaggcaacaaagagattcagaaaatacatggtcataaaaggtaatgataatgggtttactcgaacattctatgaaggctgcatcaatgagacaacctttgctccatcaagatctggaatcactgtttctgtcatggaatgttatcaagataattcgcagactctacaagactggaag

SEQ ID NO: 189057 - DNA, 336 bp, Arabidopsis thaliana landsberg
atgcgaattagtgcgattgtgattcccgctttaattcttctgacgggatgcacatctaaaaaccatggaactttctcagtggtcaataaggcaggtgagccaatcgtaaggcttgaaatcaggatttgcgggcagttatctacgtttttagcaatcaaacctggcgcggcggtaaagggtaaatacgaagtaagaggagactgcgattttacgatcacgggccaattcaagtcgggccgcggtataaataaaacggacggctatgttacgagcggttttgactacgaccatgaaattgaagtcgacaaagcgggcgtcgtttttaaaaatttgaaa

SEQ ID NO: 189058 - DNA, 262 bp, Arabidopsis thaliana landsberg
ctatgcattgcacgatgtagacgaggaagagaaagtcaatagcctgaaatatcatagcgagagactagcggtagcttatgctcttttaaagctatctgaaggaatacccatccgagtcatgaagaaccttagagtttgtagtgattgccacacagcaataaaaataatctctaaggtgaaagagagggagatcattctaagagatgcaaacagattccatcacttcagaaacggagagtgttcctgtaaagattactggtga

SEQ ID NO: 189059 - DNA, 94 bp, Arabidopsis thaliana landsberg
cgatcggatcgcttatctgttcttatccattatggaacatgaacgatgttcctttaagactaccacattcaaacgaaaaataagtcatcgatga

SEQ ID NO: 189060 - DNA, 822 bp, Arabidopsis thaliana landsberg
atgcatgcagaagggaattctctactttcaagactgcggttggactctgagaaagatgacgacttttctccggttcctggccaattgcttaggaaatatatttcctatgcacggacttttgtcaatcctaagtaatttgatctatctcccagctgcaatgactaaatgcttgcgagctaatttagatattacaaataacatctctttatctgttcaggatgtcaaaggatgctggagagatcatacagaagttttacttgaagctgagagaccataacacatctgctgattccacaccaataacagcaagacaactggaaagtttggttaggcttgctcaagctagagctcgggttgatttaagggaagaaataacagtccaagacgctatggtaagccagaacatgaaatgattgtatcctttctctgtgcttacatgcatatgtttgaccatacactgacttagcatccatatcatacatgtataaaagtcttatgttctctgatctctattggttgataaggtaagcagctagcatgaaatttcaattcaaatctgcattgttgtgatcttggcttggtcaactgtcttgacttttttcgttggatttgcttttacaggatgtggttgaaataatgaaagaatcgttgtatgataagcttatagatgaacatggtgttgtggattttggtcggagtggaggaatgagtcaacaaaaggaggccaaacgcttcttaagtgctcttgataagcaatcagagctgcagcagaaagattgtttctctgtttctgtatggacaacttgctcgacattttgctaa

SEQ ID NO: 189061 - DNA, 192 bp, Arabidopsis thaliana landsberg
actgcattggttctcgaaaacaggatctgcgttctatctccaatcttgtcaagcgcagtgatttagtcagatcaagatacttgagtgactcacaaatgttcaaactcaagctttcgaggattggacaaccagacagaatcttaagaaaggatatatccgagagtttacaccgggtcaaagacaagtccctta

SEQ ID NO: 189062 - DNA, 1140 bp, Arabidopsis thaliana landsberg
atgtttcacctgccgatttggcgacagttctccgcgattcaattcgagcgaggatgaaactgaaactgaaactgatgatgaagatgactattgtttgacagatgggaaaacagaggaattggtagtaggcgacgatggtgttcttatagaggtgaagaagctcgagaagagctctcgtcgaattcgttcgaagattggaatggaagcgagtctcgattccgtttggagcgtattgactgattacgagaagctatctgatttcattccaggtcttgttgttagcgaattggtcgagaaagaaggcaatcgtgttcgtcttttccaggtaaaaattgtgatcatctccaaatttagtgcattggctcttacttcattactgttgaaaagctctggttagattcaaatttagaaactttgatactaattgtgaatctttggtagtgaaaacttatgatcatctccaaattagtgcattggctcttacttcattactgttgaaaagctttggttagatacaaatttggaaactttagtactaattgtgaatcttttctagtgaaaactgaaaacttagagtggtatctttgttgtggttgtttgaattgatgggacagcagaacttagcattgggacttaagttcattacttcattgctgttgaaaagctttggttagattcaaatttcgaaactttgatactaattgtgaatcttttctagtgaaaacttaagagtggttcaaaacttagagtggtttctttgttgtgatggttttgtggttgtttgaatagatgggacagcagaacttagcattgggacttaagttcaatgccaaagctgttctagattgttacgagaaagagctcgaggttctgccacatgggaggagacgtgagattgattttaagatggttgaaggcgattttcagttgtttgaaggcaaatggtccatcgaacaagtaagtatcatatgaaagtcctcttatgagaatgcatctatacctttgctattcttattctgcgtttgtttggtgacacagctcgacaaagggattcatggggaggctttggatttacagtttaaagattttcggacaacgcttgcgtacacggtggatgtaaaaccgaagatgtggttaccg

SEQ ID NO: 189063 - DNA, 460 bp, Arabidopsis thaliana landsberg
atgtcagttactcaggagataaactctactccatcacggaatctgaggaactttaataatctccaaattcaagagatacaggaagaaaactgcggtaatattgtgtatcgtgcaggatctggttttggatcaaatggctcaagctccaagatttcttcagatatgaaagataacgcaattagacgagaaacagaaggtgagtttaggttattgggaagaaggggtactggtgggaggcttttgggtttggaagatgaacaaccaagcagaggaacaagggtttcatttaacatggaccgtgtcagtcatagtctggaccaaggtgaagcttctctggccagtgtatatgacgaaagcgatggtgaaaacccgaatgaggatgattgggacagaagggagcctgagattgtttgcagccatatcgatcatgtgaatatgttaggtcttaataaaaccacaa

SEQ ID NO: 189064 - DNA, 313 bp, Arabidopsis thaliana landsberg
atgaagaagaacgtccttgaccaatttaagttcccgacagagaacaacaacaacctcgttgagcaaccaccactacacaacaatatggtttcaggatccacaatggatcaaaacatggaggaatatgcggatgagctcgaaaatatgcttgatgaagaacaagaagaagatgatgatagggccattcaacaacaacatccagagtttcctcttcaaagtcatgattcaagatccacattggataaacatatggaggaatatgcggatgatcttgaaaagatgctggatgaagaagaagaaggagatgatgata

SEQ ID NO: 189065 - DNA, 179 bp, Arabidopsis thaliana landsberg
atgagaatcgcccaggtttctccattgatcgaaagcgtaccgcccaaaggctatggcggcaccgaacgcgtcgtctcatatctcaccgaagaactggtagcccgtggccatgaggtcacgttgtttgccagcgcagactcgacaacccaggccacactgatacctgtcatccccaaagc

SEQ ID NO: 189066 - DNA, 1029 bp, Arabidopsis thaliana landsberg
atgattgactattctgtaagttttttctgttcatgtgttgtacagttatatttcagattgacataccaagtttatgaattaaatctgttgcgtcttcttcccttcttgttttgaaatggaggtagggattcacaagtcttgctggagctcttcttgagaataatacaatacgcaatttacatctcaagtgagtttaggactatagatggatatatcttttgggcgtgctttttttattttgtctgtatagttcatatccctgacataccgatttatggataatctgtttcagtggaaattacggtggtgctttgggtgccaatgctttagctaaagggcttgagggtaacaagtctttacgggtacaaactttcctcatgtctctttcgatgtatatcgtgtgccatttctatattaaaagagacatttcatagttagatctgttatcttatatgatgcattaaaggtgatttctgatgtcatcagagacaaccaatgaataaaggtcatcaacagttgatttattcccttggcctttccacctgcaggaacttcatttgcatggaaactctattggagacgaagggactcgtgctttgatggctggtctatcttcccacaaaggttttccaatagaacactcgtcatacgtctatattaactcttccgtacctctactgtagaattcagtagttataccgagatgcattttcgtgtgcagggaaagtggctttgctagatctcgggaacaactccatttccgcaaagggtgccttctatgtagctgaatacatcaagagaagcaagagcttggtttggctgaacctgtacatgaatgatataggtgatgaggtacatatatatccaatttataacattaatctggattgtgtctgcgcttctctaatatcggaaaaccttgtctctttttgctctgttgtctatcttaaagattttcaatggtttcagggagctgaaaagattgcagattctctgaagcaaaaccgttcaattgcaaccattgacctg

SEQ ID NO: 189067 - DNA, 875 bp, Arabidopsis thaliana landsberg
atggaagaggacgaggaggctgaaggagcttgggaattagagtttcgaaatggaagtttgaatttgccccaacgtcgaccatcggaatctgatttgtcctccgttaaagccatcggagaatcggacgcgagagagggaaggattaaagtggatttgattgggttagtgtttttttattaagcgagaaagtcatcggaaagtggagaagaagatgaagagctaaaacgcagataaaaatagcgtttaacacgatggcgttttggattcgctttaagcttactttttggttgttgttgtgattgcgttctgaaaagcaataaaaacggttgaattacactaaaaaaataaggcttgggttttcaggttttcaggttttcgggtcgaggtcggatcatgttcgagtcgatttttttgggttcgggtattccgaatttagaaatcaaaaacccgttcggatattttaagattttgtgtttgagttagatttggatcggtttttcggattcacccgagtatccgaaatcaaaattttgtatcaaaatatttaaattacttaaaattacataaattattttagtaaaacttgactattttttattcaaatctatcgaaaagtaagttaagtatccaaaatatcttataattcaaatattttaggcacttaagttgttgtaaatatgattattactaataaattatttctatgtatatttttcagatatgttcggatacttgatcggtttcaggttcacatcgggtttgagtttagattttcagattttgaagtttataatttgtttggtaattttaaaattttggattcaaattcgaatcgaatttttcggatcggcttcggttggattcttcagattcga

SEQ ID NO: 189068 - DNA, 337 bp, Arabidopsis thaliana landsberg
gcacaaggcaactccgatgtgaattctacagcagtgagcagatctacggatacatttctttcttctacaagcttacctgtggagacagccttcacgtttccatcggctttacctgtcatcccttcgggtggtggaaattttgggaaaggaaggatagatctcggaggtcttgaggtgatccaagtctccatctcaacctcaacatcacaaagagtatggaggacatacgagggaggtcccgacaacatggggctctctatcttccaaccaatcaatcttcctcccagcttctccactcttggcttctatgggcaacccaacaaccgcctgcttttgg

SEQ ID NO: 189069 - DNA, 549 bp, Arabidopsis thaliana landsberg
agactgcttggtaagaaggttatctttatcacaggaacagatgaacatggtgagaagatagctacttcagcagctgctaatggacgtaatcctcctgaacattgtgacctcatttctcaatcttatagaactctttggaaagatctcgatatagcttatgacaaattcattagaactactgatcctaagcatgaagctattgtaaaagagttctacgctcgtgttttcgcaaacggtgatatttacagagctgattatgaaggtctttactgtgttaactgcgaggaatataaggtttgattttgaaatttggaaaggtatatatactttcttgcctgtgccacaagctttatgggtctgctttgtttttgaattctgtaggatgagaaagagttgcttgaaaacaattgttgccctgtccatcaaatgccatgtgttgcaaggaaagaagataactacttctttgctttgtcgaaatatcagaaaccacttgaagacattttggcccagaatcctcgttttgtgcagccttcgtatcgtcttaatgag

SEQ ID NO: 189070 - DNA, 98 bp, Arabidopsis thaliana landsberg
atgacaacacaaatacgtgaaaagtacgcgttgaaagatcgcgtggatcagataacaagaagatatgtacggaaacttgatggaaacgtgggaagcaa

SEQ ID NO: 189071 - DNA, 86 bp, Arabidopsis thaliana landsberg
agagagaagctttttgttgtgggcgactggtgaagacgaaggcaagtggcgggaaattgtctggtttagggcgggatgttggctaa

SEQ ID NO: 189072 - DNA, 324 bp, Arabidopsis thaliana landsberg
atgatcgacgacgctcagctgttcgctttcgaggccaagtacagctccttcggggacaccgtgcactacgtcgatccaccgaagatcttccgcacctgcaacggcagctacatgtacgacacggcgggtacgccgttcctggacctgcagatgtggtactcggcggtgaacttcggttacgccaaccagcgcctcaacaacgtgctgaaaaccagaatgaacctgttgccgaagggggccagccagtccctgcaccaaacccgcatggagctggccaaaacaatggccctgaccccgaaaaaaaagtcgggcctgaccggcccc

SEQ ID NO: 189073 - DNA, 389 bp, Arabidopsis thaliana landsberg
ctaagaaaagaaggctacactttggtagactcgtcactcacatcatcacacacagagctagagctatgtcaacagagagtaaagaaacccgacccgaaactaaacccgaagacccggtaactcatactactgtggatgtacccggtgaagaacctctcggagagcttatcgctgacgacgtgaacgaagtcgtttctgatgcgtcggcgacggagacagacttctcactctcaccgagccaatcggagcaaaatattgaagaagacggccaaaactcactcgatgaccaatcgccattaacggagcttcagcctcttcctcttcctcctcctcttccagtcgaagcacgaatctcagaatcgctcggtgaagaagaatcttccgatctg

SEQ ID NO: 189074 - DNA, 246 bp, Arabidopsis thaliana landsberg
tgacagttggcacatttttcaaagcatctccaatcagtaattcgcagaatttatgtgcccgattcgaattccttcgcttttactacatcaccatcactatacgtaaactcattcgaaaaataaatcatgtatgcataatataactttcatcatttcttttgccattttctcacaaaggtaaaagaatcttgtaaaacttccataggctatagtgtatcttataagaactacaaactcaaaatgtaa

SEQ ID NO: 189075 - DNA, 357 bp, Arabidopsis thaliana landsberg
cccgcaagccacggaggcgctgcagagcctgcgcagtctttatgtcaatagcggccggccggatgcttacctgaacttcctgaaatcaacaggacgcaccgtcagctcttcagtggaagattctatcacctatgccgcgggggaatccagtttcgggagcagtcaatatgctgcagctgccacccagctcaccaattacctggcaatattcaccggcggccgttttgtgctgaatgcacatttctaccgtgccgagagcttttatgaccagaaggattatgccaaagcattgcctgcctatgtatatgtgctttcccaaggagcaggccagttcgatgaacgaaacgccgcacaggc

SEQ ID NO: 189076 - DNA, 132 bp, Arabidopsis thaliana landsberg
aaatttcggatcaaagctcataatctcttcgacaagagaccagaccattttttcaagtcttcttctcgttgccgatcctcggattcaagacttcaagtactctaccctcttgtttgccaactagatactctg

SEQ ID NO: 189077 - DNA, 238 bp, Arabidopsis thaliana landsberg
atgcagtatgaaggtgcagtagaagaaggagggaggagtccgagtatatgggacaatttcacacatgcattcccaggtacacttttttattcatccacgttgttaattaactttttttttaattaatatatctatcaacagttttctataattgcacgtaacattttatatttttttttcagaaaggacaaacatggataatggagatgttgctgtagacttttatcatcgttataag

SEQ ID NO: 189078 - DNA, 574 bp, Arabidopsis thaliana landsberg
atgttcggcacatctagccctgtcaacgattcaggtatcgacccgaacaagatgtttggcggtgcagaccgtaaacccccgaccaccatcgtcaatctcagcgaagcactagcgcatctaccgactgccaagcagtacccgatgccgactattcccgagcgattttctccgtcattcgggcgttgggggcactacgtgcttcccgatgttgacggcaagcccggaacatccacatacccccgtgtcaccactatcggtaagactttggatgacacagagttcttggataagtggaaaacagggaagctcatccaaggattgagcaagttccgagatgtactcgacttgatcgacccgcaagctctcgcggacggtgatcgtactgccagcgacacggagaacgccctagcagaacgtgtacgcgaagctgtgggaggtagtgacgcgggaaggttcggagacagcgttcacgcctggacagagttcatcgaccttgggctgggcaccattgatgaatgtcctgacgttgtgcgctcctacgttcaggcatacctgaacgcctgccgtgcggcgg

SEQ ID NO: 189079 - DNA, 35 bp, Arabidopsis thaliana landsberg
atctaccacgaattcagaaaccgaagaaggattaa

SEQ ID NO: 189080 - DNA, 225 bp, Arabidopsis thaliana landsberg
atggatttagttaatgttcattccaatgaccaaccaattctcatcaacaaagacatgttcaccaacaatcaactatccgaaccagtcaaagatcaaaacctccatggtttagccgaaatattgactcttcagagatgtggaggtacagaggaaattaccagaccgggtcaagaccaagactataagagtcaggagcagacttgctccgtgttctgtgagatcgag

SEQ ID NO: 189081 - DNA, 2183 bp, Arabidopsis thaliana landsberg
aacatcttcttcatcttgttgttacttgttcgaacctttcccatagctttttctcatcgtcgtcgccagagatgggagttgttgagaatcagaaaattttgctagagaaaaaacttggaggctggatagccattacgttcatcctaggtatgcactttcttttcttttcttttcgtttcttccaaatttttttttttctttgaagagagttattaatcttccatttgcctcaatattcatatggtccattcaaaaaaaatatatctaaacatggtaaactattaaatgaatagccattttcgccatgcatttaacaaattatggtggaccgaccacattgatgcctttcagtttctatcgatttatgattagatatttgttgtcttgtaattcacatctttgtttgttttagataagagtacttacacaatatgacactttcttgaaatatcaccacacaaaaaaaacacatttttcttactaatatatcatttttcttgatatctaaagataacaaacagtcaatcacagtttaaaaatgtatagttttcataactagtatgattctctaaatttcaatttcattgacaatacctgtaatgatctgccatcactttttttctttcctaatcggtagttgtgtccaacaccatgctaatatcatgactcatgagcacactaaacttcttttgcgagtcatgcaattcaataatctaagaaaatatatagtagtaagagaaatggaatcagaaatcaaattatatttacaagtttatatattcgaccgtttcaagtttttgtttaggcataaacctttgcatataacagttaaaagtttcagacagatcttgagtttatacattaattgtatatttgtatttaacggtccaacttaagttataccagaaccatccattcataataaaagatgcttcatattttggacaccatatatgttattatctgctgagaccaaaacttactaaatgatgagaataaaggtaatgagacgttggagaagttaggatcgattggagtatcagcaaattttatgttgtatttgaggaatgtgtttcacatggagccagtagaagcttccaacgtatactacttgtggatgggtctcactaactttgctccactcctcggcgcattgatctccgacgcctacattggccgtttcaagaccatcgcttacgcatccctcttctcaattctagtacgtgctctctatatctatttttaatttcacattgattataagctttaaatggagtgctgaataactttatcaacccaaaaaaaattggtcgtgataagacctaatgttgacaaatgaacaaggtaaatatttggttttcaatttctatacataatgcagaaaaaaacaagacggtcaatatatcactaagctatagagtgtagactaaaacagcaaaaatgccatttgttttaatctttctcaaagtttagctagttaactttttccattagcaaataccatttcttattaatgaacttacgtaacacattggagttgtgagacttgtgacaaataattggaacgttttaccccaaaaaaaaaaactatgctataaagtgaacttttgctcgatgtgtattccataaataagtaatcaaccaaatctgtaataaatccaaacagggactaatgacggtgacactcaccgcctgcctgcctcaactccacccaccaccgtgcaacaaccctcatccagacgaatgcgacgatccgaacaagctccagctcgggattctattcctcggtctcggctttctctccatcggaagcggcggaaatccggccttgcagcattccattcggagttgatcagtttgaccaacgaacagagcaaggccttaaaggagtggccagtttctttaattggtactacttgaccttaactatggttctcatcttttcgcataccgttgtggtctacttacagactgtcagttgggtcatcgggtttagcatcccgactagtttaatggcttgtgcagtggttctgttctttgtcggtatgcggttttacgtatatgtcaaaccggaaggtagtgtattctctggtattgctcgggtcatcgtggcagctcgtaagaaacgggacctcaaaatttcgcttgtggacgatgggactcaggagtattatgagccgccg

SEQ ID NO: 189082 - DNA, 117 bp, Arabidopsis thaliana landsberg
atgagcacagatgataccgtggcacatgatgagagcccagtccgagtcagatacacacgatttttggcagcagcgctctgcaggaaaaagaggaatgagacacacccaagaaaaact

SEQ ID NO: 189083 - DNA, 1849 bp, Arabidopsis thaliana landsberg
atgaaggaagacgagcgaaccgaaaaggctatccggagtttattgaagcttcctgagaaccggagatgcatcaattgcaatagtctggttggtacaacatttttagctgatcatacgtacattcatttgttggagccaatgatccatctgaatagctcattgttgtctaacatgtgaatctttgcagggtccacaatatgtatgctcaactttctggacttttgtctgcgttaactgcagcggaatccagtaagtcttttcctcttctcctttcatttttcttcttttgatttctctatcaatccaaggaaaaactctggtacttgcaagtgttggtccaaattacatatcatgcatgtgtttctttttgtatatatttgcagccgagaattcacacatcgtgttaaatctgtatcaatggccaagttcacagcagacgaagttagtgcacttcgcgcaggaggaaacgaggtttgatattgagcttctcattttgtctcaatcatccatcttctagtactgtaaactttcattgtgttctctgcagcgagccagacaaatttattttaaagaatgggatgctcaccgtgatggttaccccgatcgcaggttcttggacatttattaatctcagccaagttaacactaggagtagcaaaaattttatatgttgacctcagttttctttctttttgttcagtaatattttcaagctccgagatttcatcaggagtgtttatgtggacaaaagatacagtagcagtgacaagatctcacagcagaaatcggtaaactgcttttcttagttgcttcattacatttacctttttcttgattcagcttaattagccaaacctgaagctaagtgttgcaactcattttgggacaacattatatgttacaatgtttaggatgtcacagaagattacagggaaagtaagaagaccagtgcacatgttctcggatctagaagtttacactctgtggataaatctgacatcgaaagatctagtgctgctgggaggagtggaagtgaatctctaaggttttattttgatgacaagaaccataaacaacaacatgttacgcataatccaaggtctagaggtttaccaaagagtcctattcgctttgagatagtcgatgataggtttagagacgatgggagtgttaagagatatgatgcacgtaaagattcaagaggaagctccaaatcacttgacctctcaagtaacaaagacatgccaagctttcccattgtacgccataccagcgaactcaatattgtaaaagttgagaaaaagaaggatccagtgaataatcaggtaatctacagttatatctattgcattttgttttatgcattttgtctagagttaatatgtgaacaagttgcattttgcagatgactgcatcatctgagaaaatggaaattcctagaagtttaattgatgatgtaccagtttcagaactatctgatgaaggcattattaagaattcaagtgaaattcctgcatctctaaagaccactgaggagccagctcctaattctttggaagctttgttgtttggaccctctgttccttctgttgtccctggaacaaacaactatgaactatggaacacaagtgatatttcctctactgaaaactataccgcagttaacctcgggacccagacaatgccaggaataccagacagtgttacctcttttgccacatcaccaacaactgcacatgctcattccggttcttcaggtccagtggtacctgttgctcctgataacttaaatacaaaagagacggctacacttgcaaataaccaggttggtctctgtagaagtttttaa

SEQ ID NO: 189084 - DNA, 734 bp, Arabidopsis thaliana landsberg
atacgattcaactcgaatgaagactacgtgggtcacctttccggctccctcattgcaaatgtggctctcactagttccagcctccgagcaatgagatcattgggtcttaatagtgctgcagattatgctcaagccttgctgaacaagactgtttcatttgttgttgatgagttgccatacctcaaagttgtccttggcgagaatccaacacattttttcatggtcaagacacaatctaccaccaacggtttcggctttgtatgtatcattcttcatcatcataagcttccttactctttctttattttgcacttgctgacaaaaaaatgtttggtttgttatatcagatgtttcaaaagggctttgagttggtgcctaatgtgtcccgagaaatctcaaagctaaggacgagcgagaagctaaacgagatggagaaaagatggtttgataatcaacttccatacacaaccgatgatacatcaaatcctataactctatacagattccgcggtttgtttataatcatcggtgtttcattcgctttcgctcttgcggtacttttcattctctgtctccgcgagaaatgggaaattcttgtgaattcggtcagtctatacctctcacaacaacttagacattacaggatccactttacaagaaatatacatcctagtccccttgatgaccccattggccaaaatggggttcaaatggctcaacaaaacagacaatag

SEQ ID NO: 189085 - DNA, 487 bp, Arabidopsis thaliana landsberg
atgatgattgttaccgctgctgctcctcaaggatctccgtttgatttctgcagtcgactctttgctcctaaactagggctcaatgaggttaacaaactaacctgcaacttcgtgcatgggagcaactctctgctttttacttgtcgtagccgcaaacaaaaaataccaaaagtgtttacctttaccttatttgcttggtgcttttgttccttcaggactctgtatgtggaagtgcacattgttcattagcacattactggagcctcaagatgaacaagtgtgatttcgtcgcttatgcggtgattcatctttctctgtaactaacattttgaagcaagaaagaatcacattttaccgaatcaacaaatttgttttgcaggcttcgcaaaggagtggaacactcaaggttcattatgataaggagaagcagagagtcttgcttaccgggaaagctgtgactgtcatgaaaggctctatcttggtttaa

SEQ ID NO: 189086 - DNA, 65 bp, Arabidopsis thaliana landsberg
atgaacacttccgaaaacattagtcggcgagtacaaaaacattatgcagacaaaaaccaagcaag

SEQ ID NO: 189087 - DNA, 417 bp, Arabidopsis thaliana landsberg
atgaatgggagtttcaacgaacctgatgaagaggatatcggagacttgggagatgcgggaatcacagaaacggataaaatcgagagaggagagataattgggaacagcgacgatgaagagagtggtggatcgggagctagggttagggagagagctatgtgaagagttgcgatagagatggatcaagcctttgcggtcggtgagtttgagagatggttgtatgagtttaagaggaggctgagctcttttcgatgcgtaggtgaaacctgattcttcttcttcaatggagattggtcgctcggagtcaacggaatgaactctgaggatgaacatcgccagaagcgggaaagagctcgacgacgaaagcttaagctactcggagagaagaaaagagacgacgatgcttcttctttctga

SEQ ID NO: 189088 - DNA, 1743 bp, Arabidopsis thaliana landsberg
  unsure (1)..(1743): unsure at all n locations
agattaccagagagacagcgagaaacatttctttcggcgatggaagcatttcttaaggaattcggagattattatggatacccagatggtcccaagaacattcaagagatccgcgacaccgaattcaagagattagataaaggtctgtttttttttgttcttttttgaatcatgtatgagttgttcttctcttggatctaatagggttcgaaacttaagctttttgagctgaaatttctatgagtcaaaaaattattgggttgggtcagtggtggatcagctccactctcactacttgagaatttcgaattgaattaaaattgagttactgtgtttctcgatggaacagtataacttatgtttatgtatgtaattgaagagatttaattgatccagtactcatatgaacaattccgttattgctaggaatggaatcatagtgtgttaattatgttctatgtagtgattttgtggaaacaatgcttagtatccagacggatttaatcattttccttccagtacaatattcgaatttgatacttataagatttttgtggtatgtgcaggtgctgtatacttggatcatgctggctctactttgtattctgagttgcagatggaatatatttttaaggacttcacatgcaatgtttntggaaatccacgtatcctcatcttttgatcctcataggataggctttacattatattttattaggctttcaatttcagattttaatgacttgaaagatgtgaaactttcatgttgattggtgaaaacaacgtagctaagctctttttagatataatgccttttttttgtgagcttatgttgttgaaagaggttccttaatagtgatttagatagtcaaagtgatatcagttcggccaccagtgaccttatagcggatgctcgacatcaggtaccacattctttacatttcttcaactggtattattggtcttcatcttataagttggttccatatgtttcaatcaatcttcattgcacactggagttaggtgcttgaatacttcaatgcatctcctgaagattacagttgcatattcacctccggagccacagcagcgctgaagcttgtcggagagacttttccgtggacccaagacagtaattttttgtataccatggagaatcacaacagtgtacttggtattagggaatatgcattagctcaaggtgcttcaggatgtgcagtggatattgaagaggcagctaaccaaccaggccagcttacaaattcaggaccatctatcaaggtaaagcatcgtgctgtgcagatgagaaacacttctaaactccaaaaggaagagtcaagaggtctgttagcttgatagtcttttctttcttctttcatcctgaaaagaatctgttcaagatgtatcacatgttatattcttgtacgctgcgtatctaatcgacttttctggtttgcttatcctgtgtttcactctattgtatgtttacaggaaatgcctataatctatttgctttcccctcggagtgcaatttttctggcctgaggtttaatctagatctggtgaagttgatgaaagaaaatactgagaccgtgctacaaggctctccctttagcaagtaggtttcacattctctctattcagctctcattttcctcagtttcttacattggtatactgctgaatgtctgcttggattcatattgctgaggtttggcgatgctatgcctagaattcaactcc

SEQ ID NO: 189089 - DNA, 136 bp, Arabidopsis thaliana landsberg
ggcaacaacgggaactatacctggaaaatatacgacctctaggtttgaaaaatgtccaaagcgaatgtacagacacaacattaaccttcgagtgaagatgcattcaattaacatcaagtacactttgacacgttga

SEQ ID NO: 189090 - DNA, 545 bp, Arabidopsis thaliana landsberg
tgcgtgcgagctatgcgcaagtgggtaatgatgcaacaccttatcagttagcccaaacctatctggcaaaaggctcctgggacggcgcggtacccaaattttccgaaaacatcgaaatcgcgaacggcggcctgaaacctgagatcacgaccggcctcgaactcggcgccgacctacgctttttgaaaggtaaaatcggcctggatgtaacctattacaagcagacgaccaaagaccagatcctgggtgtggaaatctccaaagcaagcggttataacacccgtattctgaatgctggaaagatcacgaaccagggtattgaaatctcggtttcgggaacgccggtgaaactgccaagcggtttcagctgggatgtgtcgctcaactgggcgcgcaaccgcaacaaagtggttgaactcgcggaaggtttaaccacctacacgctcgccacacagcgcggtatgtcgtcggaagcacgcgtaggccagccttacggcacattttatggcgtgggtttccaaaaatacaaaggacagatcgtgtaa

SEQ ID NO: 189091 - DNA, 24 bp, Arabidopsis thaliana landsberg
atgaccatgcccttcgcgttggag

SEQ ID NO: 189092 - DNA, 685 bp, Arabidopsis thaliana landsberg
atggccgcggggcagcgtgcgcggcccgtcgaccaacctggccggctcgaatccgaggtgctggccgggctcgccagcgaggtgcttgcacgcgcggggctgccgccggacgcgccggcgtgcctggtcagcgacaccgacatgcgcgccagccgcacggccgaggccatgcacctggtcggacaggtgctgcccgatcgcgacccggccgacaccttgctggggctcggcatcgccaacggaacgtgcggggccgcgctgatgctggccgcggtggccgtcgccgtgcagcaggtggcggaatcacgacagcccgggctggtgttcacccaccacgacgccagcgtgcgcgcggtggtgctcgtctcgccgcccccggaatccggaaccccggacgaccctccgtcgatggactgacaggaacgctatccaatgagctttttccgctacatgttctcgagctggctcggtcgcctccgctacctgctgaccgaccctcgcaccttgctggtcatcggcatcgcgatcgtcggcgcgctgttcctgcttggcgggaacaccctcaagatgatcgcattctgggtcggcgtggtgctggcggcagcgctgatcgtgctgctcgcgttgtggatcatcaagcgcgtgcgcgcgcgccacgcgttcggcgagctgggcgaaagcgctg

SEQ ID NO: 189093 - DNA, 76 bp, Arabidopsis thaliana landsberg
atgcctacagtgtggctaacggattggtccgattgtcgggacacccaggaacaaagaactgtaagagcactgtcag

SEQ ID NO: 189094 - DNA, 525 bp, Arabidopsis thaliana landsberg
atggttgaagtcgcaactgtcacctttcaagcatactccacgtccaccgtcaactttcaagcatactccacgtccaccgtcacctttcaagcatactccacgtccaccgtcacctttcaagcatactccacgtccaccgtcaactttcaagcatactccacgtccaccgtcacctttcaagcatactccacgtccaccgtaatacaagtttgaaattttgccattttggtgtcaaactttattttttctgatgattgtcggtgatgagagagagaaaaataagaatcgggaggtattgagcatcgaattcatgattgattatagtaagagaagagattttggaatttcttgagagatcataacacatatcaaatcaatcgatcagatattgcacgaatcatgtaaacatcataggtaacctaacttgatttatctcatatgacttaatggcttttatttcttcgtctacccacgtaggaaaaccattatcctaactatatcaccgagggtaaagtctcaacataa

SEQ ID NO: 189095 - DNA, 111 bp, Arabidopsis thaliana landsberg
ataaggaaaatccgaaagggaaagatcaaagaaatcgtcaatacaaaggaaaggatcatcggaagatcatcagaccagaccagagcagaccagtccagacagattacttaa

SEQ ID NO: 189096 - DNA, 345 bp, Arabidopsis thaliana landsberg
gagggatggagataagaaagaaaccaaacatattcacggttctcgtcattgatttttcttcaaagccttccatggctctccttctggctattctccttttcctctcaggcccttctgcatctgcggtagctgcagctgctgtgggacctgctactggttttaaaccggcagatgatattctcattgattgtggaagcaaatcgtcatcaaaaacccctgatggaagagtctttaagagtgaccaagaaacaatccaatacatagaagccaaggaagatattcaggtctcagccccgccttcagacaaggtcgcatctcctatctacctaactgcaaggatcttcc

SEQ ID NO: 189097 - DNA, 251 bp, Arabidopsis thaliana landsberg
atgattgagggccgccaatacttcggcgcgttcctcatcagccttggctttcgcctcgcgcttggcttctgcttcgcgacgcttctgctccgctttcggatcaggcttgggttcggcttgcggcttcggttccggctttggcacttcctgcttaggtgcctcctgtttcggcgccggtttcggttccggcctggattcaggcttcggttcgggcttcggctcacgtttggcttccgctttagaccgttccg

SEQ ID NO: 189098 - DNA, 69 bp, Arabidopsis thaliana landsberg
atgatagatctccagattcagctttgcattcacttacatctgcgttttcagcgttaccggcaagagagg

SEQ ID NO: 189099 - DNA, 146 bp, Arabidopsis thaliana landsberg
atgatagtcaacccgacaaagcgatgtcttccttatattgaaatgcagcgaattaaggtctatatggacacaaatctgttcttggtttatcaatgccgtctcgcgttttcacggataaagagattgatgttgtccatagcctcaat

SEQ ID NO: 189100 - DNA, 338 bp, Arabidopsis thaliana landsberg
cttcatcagacgttctcagccacatatcaacaagacaaagccttattccttctccagtgaacgaacctacaagcttcacagaatcagctgcttcttacttcgcgtctcagatgctcggagtcacgtacaatacagccagaaaccacggaacaggggatgctctgtttctgagaaacaatggaacaggggatgctctgtttctgagcaacaatgagaataactacttcaacaacttgactggagcgttgactcatgaggttccgaatgtaagatcaatggtgatggaggagactacggggagtgagatgtcagcgacgtcgtattccacaaacaattaa

SEQ ID NO: 189101 - DNA, 452 bp, Arabidopsis thaliana landsberg
atgcaattagacgaggatgatgaaatggttgttgatgaggaggaggatgaggtgcaaaatgagaatgacttagaaatgcttgaaggattaccttttggcaatgacaatgacgaacttgcgcctttagatggtgttgagtatgaaatggttgattgtgatgatgagacttatgatccgactaatcctgactataaagattattttcaatcgatgtaatgctatattttatttattttgcatttgtttctaaatacatatttttatatgtacttatttgcttactcttaattgcaagtgattggacaaagatggtgggtggtgtgataaggcagaggacgaggagggggagggggaccacccatacgatggaggaggagacgcaaaaggccgctgtcgaggctcaacagcaggacgtagatgcggcgcagcaggacgacgatgacgatgcttaa

SEQ ID NO: 189102 - DNA, 398 bp, Arabidopsis thaliana landsberg
cgcaatcagcggcgtggcgatgttgtggtgctgcagcaacggccggctgtggcgggtatcttccgccgcgatcaccgaaacactgcgcagcgtctcgatggcacgcaccgaaaaatcgtcgcgatgcccgatcggcgtggcgaccacccacaggcagccgggcgtggtggatgacatcgtgcgctccagttcgccgcgaagcggcaatgtgatcggctatgatcgcgcaatcgccgatcctgtcgataccgaccgaggaatgtacatgcgttcgtaccgcgccgcggccattaccgtgctgttctcgctggcgctgagcgcctgcgtaccgggcatcaagccgccctcgcccgccgaaaccgccgccgcgcaacaggccgccgcactggccagccagg

SEQ ID NO: 189103 - DNA, 193 bp, Arabidopsis thaliana landsberg
atgacaattcttgtcgtagatcgatattacatgctcatgaacttactctttgctctaacttgtctcctcttgaacttaactcattgctttagccccaagaaattcaacatttcagccgccacgaccagcgattctgattggtctatcgccggatctacgtggtatggtaaccccaccggatacggaagccacg

SEQ ID NO: 189104 - DNA, 141 bp, Arabidopsis thaliana landsberg
agtctgcatcagggtctacaacatggtctacatcagcgtcaacaacaggacctgcaactggcagtgataatgatcaaagtgatgatgatgctacaattaagtgatgacgagtttgctgagaattacaacttatatgagtga

SEQ ID NO: 189105 - DNA, 454 bp, Arabidopsis thaliana landsberg
atgaaagaggtgttgaagatgaaagaacttcaaggtttgccaaatcagaaagcggcggtgttacgaatggaatcaagttctttttgtcacatgattggagaacgttatgccaaaggagtggtgcataaaccatatgtgagtcgagctgtggctccggtggttcacaattgtcaagtggtgttacctggaccagcagctcaagaacgtcagttagtatctccgaggcaaggtcatacagctgaagagttggatgctatgaggagtaagggtatctgtttcaagtgtaagggtaagtattttagaggacatgcttgccctcttaaagagttacagattcttatcgtggtgaatgggttggagttagaggtgttggaagaagagtttgcgcagggagtggagattattgaagaagtggcacctgtgttgtgttgtttatctatgaattcttatctag

SEQ ID NO: 189106 - DNA, 722 bp, Arabidopsis thaliana landsberg
atgaccacatcagactgtaagtctctagctcaccagatgatgacttcaaactaagcgatctcacaatcttatcctgcaaagacagtatccatttctcttcagtaagttttgagttttaaagaatcaaacatgaagagaagggctttcaaattccacacctgcataacataattctgcttcatcatactgcaaataactgcaataagtgcagcgtactctgtaacttcaggtccttgaggtaattgtacagtctcgttctcctaaaacaaacacatccatactacattactcttctatgaaaccgtttttcaagttagtttacccgtgaacaaacttatggtgacatcttacctcatcacatgtgtacttgctgcaatccatcacttgagtctttatctagctgtgtggcagactcaattgcaagggcggcctcatcagtgagacgttccagctcaatcaacaagtttttggctgcaacattcacatcttacaaggttcaaaaggtacaattgcttatagaagaaaccgaagatatgataatgtgggatgagtgatgaaatgaaacagtagctaatacattacctttgattaggtggtcagaaagtcctgatagagatgtatgcacttcttattccggtattttttgttttcagataagaaacggaagaccaagtcgggaagacgaagaagaagagcaagaaaaaaaaggagcaacatgttaa

SEQ ID NO: 189107 - DNA, 265 bp, Arabidopsis thaliana landsberg
tatctctggggacttggtcttgcccctgatgaagcagagtgcaatgatgtgtatgggttagacgatgaacttctagagatggttccaaagcctgttcttgctgttctcttcctttacccaatcaccaaaaaggttctcttctgtttgatttttcaatggaaccccaatttatgattctgtgtattgattcaatttgataccttgtgatcttgctttatagagtgaagaagagagaatcgagcaagacaaggaaattaaggaaaag

SEQ ID NO: 189108 - DNA, 571 bp, Arabidopsis thaliana landsberg
  unsure (1)..(571): unsure at all n locations
atgggttgtgctgcttcaagaattgataatgaagaaaaggttttagtgtgtaggcagagaaagaggctaatgaaaaagttattagggttcaggggagaatttgcagatgcacagttggcttatcttagagctttgaggaacactggtgttactcttaggcaattcactgagtctgagaccttggagcttgaaaacactagttatggtttaagtttgcctttgcctccttcgcctcctcctacattgcctccttcacctccaccacctcctccatttagcccggatttgagaaatcctgagactagtcatgacttggctgatgaggaggaagagggtgaaaatgatggtggtaatgatggaagtggtgcagctcctccgcctccattgccgaattcttggaacatttggaacccttttgagtcacttgagctgcatagtcatccaaatggtgacaatgtagttacacaagttgaactgaagaagaaacaacaaattcagcaagctgaagaggaagattgggcggagacgaagtctcaatttgaggaagaagatgagcaacangaagcaggag

SEQ ID NO: 189109 - DNA, 330 bp, Arabidopsis thaliana landsberg
atgtccgcggtcctcacggttcgatctgcaaacgagaaaccggccgaagtgccggcatcgtgcgccttcatccccggcagtgttgtcctggtccggctggcgcgcccagccatcacatcatcgttccgggaggacgcacgtgaaaccattgaaacttcttctggcggccgtgaccgtcggcgccgtagcgctgaccagcgcggcggccttcgctcaggacaagggcctcgtcggcgtgctgatgccgaacaagacctcgcagcgctggatcaacgacggcgacgccgtgaaatcgcagctcgaggccaagggctacaccgtcgacctgca

SEQ ID NO: 189110 - DNA, 1754 bp, Arabidopsis thaliana landsberg
atggaggtgaattcgatgggactaaattgtcggtgtcttgagttagaagaaagggttttaaaaggtgaagaaaggtacactcacttagaaacagagttgcagaaacgaaacaatgagtttgaatcacttgaattgaagtttaaagaattggaatcagagaagttagtagttgaagaagagtcaaggaatcttaaagaatctgaggaaggtgcattgattgagcagatgatggtgaacagagcattggaggttgagaagcagaggattggaaataaagtttgagaaacttgtggagactgttcgaaagttagatgaaattggtgggtttagatatggagaatttgaattggatgagaatgtgaagttagggttggagttagctaggatcaagaatacagaatcttgtaaagtgtttaaagatgacttgactagggaaggattaggttatcatcaaggattaggtgagaagaatcgtagatcggtttattagtataaatccgcttgtgtttcgcttttccggtgtaatggatttgattttgtttgtgtttattttgtcatgtaggctcaccttgtatgaccacaccggttaaagactatatattagggagagacagagatagagacagagacaccatgtcttctcggagacgagtgaataagatgttgtcgtttgaagatgatggtcacaaattgactgatgtagttgatttatgtgatagtgaaacagagcagagaagtgaggaggaggaatttgctgatgttatggatactatagaggaggcaaatattggtgagaattatgaagatgaagatgtggaagcttgtgatgctaacacaagtagtcctctttctaggcgtaagaggaagcgggttattgccagcgatgatgatgatgatgctgatgatgatgatgaagataatataccgatttcaatactcaagaatttgaaaccaactaaccaagagatgtcagatttgtttgatacacctaacaaaggagagagtgagtctagaagattgagtggacaacgtcgagtgtcgtcaagactgaataaaaagagagtttctgaagaggtatctgcttcaacagagagacttgtgggaatcccaacaaccgataatgccgaggatgatgagacagaagaagaaggttcagagagtgagggtaagagtttagatgggtttattatcgatgatgatgatagtcaggagtctgtcagtgaaaagtctgatgaaatcggggtagaggaatccgatggagaagttggttatgctgatgttatgtcaaggttaaggagggagaagaaacccgagaagcgtaaatgggagtatgaggcagatatgttggcagatttcggtaaagatcctgagctttgtatgagaacggtttgtgttctgtttaggtttcaatcagaagataaaaaagtggaaagatcaagtcatgtctctaatggtcgcggtttcagcaaggttgacgctgtaaggtagtaactagcaaaaccctttttgatctgctgttaaaatgttttcttgatttacgttcttgaatgatgattaggggcactagcattgcactgtttctgacggatggagattccgcaggcgatatgaagaaatccgttgaggaattgaaagtttttgactttaaaggcgtagagaaatgcgaagaattagcacgcaaatactctaaacaactcttccagatctataacaacagagaagatccattctttactcttcctccatctccatga

SEQ ID NO: 189111 - DNA, 163 bp, Arabidopsis thaliana landsberg
cctcacgagcgcgtggattctaccaattggtcgttgtttttttaatcctctcaatcagtcaacggtcaacgatcgagaaagccgctttcgtaatgaaagccacattacaaaaagccaattacaaatgtcaaatgaaaacagatcaaaacgttataaattatag

SEQ ID NO: 189112 - DNA, 72 bp, Arabidopsis thaliana landsberg
atggggccacaaagtacgaactctgttcaggcattttcgacatctaacctggctgccactccaggtcttccc

SEQ ID NO: 189113 - DNA, 409 bp, Arabidopsis thaliana landsberg
  unsure (1)..(409): unsure at all n locations
atgtcgcgcgccatctcctgcgcgagtacgctcacttcgagcgacctcgtgagnnnnnnnnnnnnnnnnnnnnnnnnnnnnnnnnnnnnnnnnnnnnnnnnnngcagcgggaaacggagctgctgacggacggcgaacgcaaaggtttgcagcttcagctgcgcattcatggtcatgatgcgccagtccgctttgggccagctccggaccaagtcttcggctccgacgacatcttgaccttcccacacagtgggatacaactccaatcacttgaccagaaaaccacggttttctgcggttttcagaacggttcaggagtggagcggattcccgctacccgctccacccttcagaacgccgcgctgccgcggaacaaggatatgatctggccgccgatccagacctcgcc

SEQ ID NO: 189114 - DNA, 223 bp, Arabidopsis thaliana landsberg
atgaccacattaacagaagaaatggaccagtacatgacagagttttggagatatgctgatagctattaccatgagatggaaatggtgaataaaggagttgatatgagctttgagcggatccgaagagacttcagagccattgatttttctggaaacaaaatcaatggtaatatccctgaatcccttggctatttgaaagaactgcgggttctcaacttgtcag

SEQ ID NO: 189115 - DNA, 1394 bp, Arabidopsis thaliana landsberg
gtattgcgatgttcccaattctattcatgatctccaggttgatctaattgataaagtcctagtgaagattctatgggcggacttcactgaactatctaagggcagcattccacctaatcagaggaagtcagctgaaaatcttggcatgggtaattcagttagttatctgcaagagctaggaagatgcatcttagaaattctatcagggattaatttacttgaacagaacctgctgtcttttttctgtaaagctgttcaagagagcttcttgaatatacttcagcagggagatttagagatagttgcgggaagcatgagaaaaatgattgattttctcttgttattggagagatattcagttttggaaggtgagagctggcccttgcatcaatttatggggccactgctgtccaaggctttcccgtggataagatcatctgtaagttatcgtccacgttttgttaccccgttttttcatagtagatcatatgatgtttttacttgactaacccgtgtggctgtatttatattttcaggaattgttagatggtgtgaagcttttgtcagtttcagtatcggtgtttggaccaagaaaggtagttccagtgctaattgatgatatagagacttctacccttctctctgttgaaaaagagaagaatatgagcccggagaagcttattaaagtttttcaagaaatttttattccttggtgtatggatggatatgactcttcgactgcagctagacaagatctcctattttcattgcttgatgatgaatgtttcactcagcagtggagtgatgtcatttcttatgtatttaatcaacaacatcagggcttcaataacctggctgctatgaaaatgcttttagagaaggcaagggatgaaattacaaaaagaagttctggacaggagttgaatcaaagaataggttctcggccaaaacattggcaccatacactcatagaatcaactgctataagtcttgtccattcctcctcagcgactacaacttctgctgttcagttcctgtggtaagttagtcaatatatctataaatagtatcaatattttgcatttatatatctcagtcaagtcttttatgttgcttgattgcttgttcccagttcttattctatattttttttgtatgcagttcagttctgggtggttcaacccaagacagcagtatttcttttgtgtcaagaagctcgttggtcttgatatatagagggatcctcgaaaaactgctatcttttatcaaacagtcaccattatgttcagtcaatgatacatgttcgtctcttattgtcgaggctatagcgtttgattcgagcagttctgtagatgtgatcgtggctgctaagtttgcagctgaagttattgatg

SEQ ID NO: 189116 - DNA, 27 bp, Arabidopsis thaliana landsberg
atggaccgtcgatgtgataatgatctg

SEQ ID NO: 189117 - DNA, 38 bp, Arabidopsis thaliana landsberg
gtgtctttcggaaaatcaatgatcggattgaaacctaa

SEQ ID NO: 189118 - DNA, 59 bp, Arabidopsis thaliana landsberg
accttaaattttaccccttaacccttacccctggacccttaattggtaacttggagccg

SEQ ID NO: 189119 - DNA, 768 bp, Arabidopsis thaliana landsberg
atggtaaagctaacaagcctcgtcaaattatacatgaaagactgcgaaatgctcgttaagcttcccgaagaatttgacaagctgaaagttctgcaagaactagtatgctctggttgtaaaagactcagtagtctcccagatgtgatgaagaacatgcaatgcttgcagattttactgcttgatggaacagcaataacaaagattcctcatatatcctcacttgagcgtctatgcttaagcagaaacgagaagatcagttgtctttctaatgatattcgtctgctttcgcaactgaaatggctggacttgaagtactgtacgaaacttgtgtctattccagagcttccaacaaatcttcagtgcttagatgcaaacggatgtgaatcattaacaacagttgcgaatccactggctactcatttgccaacggagcagattcattccacattcattttcacaaactgcgacaaattagaccgtactgcaaaggaggtaatcacagcctatgctcaaaggaaatgtcaaatgctatcagatgcactaaaacgctggaatgaggtgatctctctcactatctcctcattcatttatcgctctcaagtaaccatatgaacctttaacttttgtatgactttttctgcagggttttgttccagaggctttgttcagcacttgcttccctgggtgtgaagtaccttcatggttttgtcatgaagcagttggatccgtcttaaagctcaacctgctcccacattggaacgaaaatag

SEQ ID NO: 189120 - DNA, 134 bp, Arabidopsis thaliana landsberg
atcgggtttcgattatcccccggcgattgaaaggtagattgaaaatttataaatccagagaggatgatgatgaaactgaatttcgagaaacggaagaaaacaaaatctgtgatgtggcgaagagtaaagactaa

SEQ ID NO: 189121 - DNA, 36 bp, Arabidopsis thaliana landsberg
atggccgaggaagacagtataatgattaaacttaag

SEQ ID NO: 189122 - DNA, 194 bp, Arabidopsis thaliana landsberg
cccccaccaccgacggcgacgtagacgaaaacgatttctccgccttcacgcaatggaacatcttaaacctaacggaccttaaaagtacctttaaaaacctcccggatttctctaagctcaacatctcatcccttcacgtgtcacccgccgatggctccgtctgctctaacaccgactacgccgccgaatgcatc

SEQ ID NO: 189123 - DNA, 237 bp, Arabidopsis thaliana landsberg
caggaccctgagtcagtggctcgatctctctcacatcccaatggatctttaagtaatatagatccacaaactccatcacctgatctccttagtgacctactcggtcctcttgcaatagaggctccacctggagctgtctcatatgaacaacatggtcccgtaggggcagaaggagttccagatgaaattgatggttccgccattgtacctgttgaagagcaaacaaatacagtggag

SEQ ID NO: 189124 - DNA, 370 bp, Arabidopsis thaliana landsberg
  unsure (1)..(370): unsure at all n locations
atgttggaggactggacggaggcaacaacggatagcagcgtggagagagaggacgcatatgaaagaacagaagaggatgatgagaaggaggaacgcgttggcagcaaagtcattggaatgagagtaaggcttccagccgcaactatgagaggtacatgtagacgtaagttcgggttggggatcagannnnnnnnnnnnnnnnnnnnnnnctcagacaagttcccaaaaacctttcatgtcttgttgtgtttataaagaaagaacaaaagagagcattaaagagaagatgacagacaccaaatggtggcttaatttggtcttacttgtgatgaaggagacgtggatgggtcgagagaaagggaccacttga

SEQ ID NO: 189125 - DNA, 269 bp, Arabidopsis thaliana landsberg
atgaagactaaccggaaccgtccgatcaacatcctcatcgtcttcttccttcttacgaccgcaagagcagcaacaagaaactggaccaaccgaactcaccgaaccgtccctaaggttcaacacgcgtactacgcatatcctcaccgttcatgcgaatctttctctcgtccatacgcacgctctatgtgcattgagctcgaaagaatccacagaagcagtcgacaaccgcttttctctcctccgcctcctccgacggagattgatcaaag

SEQ ID NO: 189126 - DNA, 431 bp, Arabidopsis thaliana landsberg
ggaagtataaatgtaatgtcgatgcagcgtggaaggcagattggaaccggtgcggtgttgggtggattttgcgggatgacacagggaaggaaagatggatgggagcaaaggcatatccgctattatattcgagcctggaggctgaagctgcagctctctcttgggccatgaaatgcattgacaatatgggttttgaggaggtaatctttgagtcggattctatgaatttaatagaggctgtgagagatcccattttatggccatggctgagcagttacactgatgacattctcacctcgccacgaaggtacttcaagcctgaatttcggttttatggaagagaagtgaatgggtgtgctgaccttttggcatctaaggcttcttctttctcgatttatcaagcgtttttggattgtagtcctcctatttga

SEQ ID NO: 189127 - DNA, 454 bp, Arabidopsis thaliana landsberg
atggactcgctgccaattgtcatgcacctggacttggcgttcccttcaagaccgcttttccccagtggtgacgccagctacgcgctgttgatggccgtcagcaagatcgccagcggcatgggtccggcaattcgctctctgatcattccaagagtggcagagtatatggatccacgaggaaaggagtacttcatcgagacccggtcgaagttctttggaaagcctttgtcggaggtgcgaccgaccgatcaagggaccatcgatgagttatggaagcaggtggagattgaggcaggtccattggtcacaatgcttaagggtcgggagggcaagaagggacctttcttcgagggcgagaccccgggatatgtagacctgtatttggcctgtcagtttgccttcttcgagcgcattgaccgggaagctttcgaccggctgatggcaatcggcaacg

SEQ ID NO: 189128 - DNA, 151 bp, Arabidopsis thaliana landsberg
gtgtatggctgttccattgtcacatggatgcacatttaccatacgggattatgagtgctttcatagttcaaaacgggccaactccggaaacgagcttgccatctccaccgtcgaatcttccgcaatgcactcgggatcctacgatctatga

SEQ ID NO: 189129 - DNA, 2526 bp, Arabidopsis thaliana landsberg
atgcgacgagaaggtgttgtttcaaattacttcactttcccttgtgcttttaaagctgtggcttctctgcgtttacccgttactgggaagcagattcatgcgcttgctgtgaagtgtggtaggatacttgatgtgtttgttgggtgtagtgtttttgatatgtattgcaaaactaggcttagagatgatgcacggaagttgttcgatgaaattcctgagaggaaccttgaaacttggaatgcttttatatctaactctgtgactgatggaaggcctagggaagctattgaagcgtttattgagtttagaaggattgatgggcacccgaattcgataactttttgtgctttccttaatgcttgttcggattggttacacttgaatctaggaatgcagttacacgggcttgtgttacgaagtgggtttgatacagacgtctctgtttgcaatgggttgattgatttctatggaaagtgtaagcagatacgtagcagtgagattatctttactgaaatgggaactaaaaatgctgtttcttggtgttcattggttgctgcatatgtgcagaatcatgaggatgagaaggcgtctgtattatatttacgctcaaggaaggatattgttgagacctctgattttatgatatcaagtgttctgagtgcgtgtgctggtatggctggtcttgagttgggaagatcgatacatgctcacgctgtgaaggcgtgtgttgaaaggactatatttgttggaagtgccctcgttgacatgtatggaaaatgtggatgtatagaagattcagaacaagcgtttgatgagatgcctgagaagaacttagtgactcggaattcattgatcggaggatatgctcatcagggtcaggttgatatggcattggctttatttgaagaaatggcaccacgtggatgtggtccaactccaaattatatgacttttgtgtccttgctttccgcttgtagtagagcaggggctgtggaaaatggtatgaagatatttgattcgatgaggagtacttatggcattgagccaggggctgagcattattcatgcatcgtggacatgctagggcgagcgggaatggtagaacgggcttatgaattcataaagaaaatgccaattcaaccgacaatttcggtttggggtgctcttcagaatgcttgtaggatgcatggtaagccacagctgggattactagcagctgagaaccttttcaaactcgaccctaaggattcaggcaaccacgttctgctttccaatacgtttgcagcggctgggaggtaaatgaaccgcattgattctattcaatttttattcatcttgttaggttgaaatcatattctaatcaattcaaaagaagccacacgatgctttgtaaacaagagccacccaaatgtttagaagaaagactacaaaactaggagtatctgagcattatctgaatcgagttttaaatagatgaaacttgtgttaaacatgaagcaggggagaccaaccatttattttgtcttcagttacttatgatctaactatattataactaatcaatgataggtgggcggaagccaacaccgtaagagaggagatgaaaggcgtagggatcaagaaaggagccggatacagttggatcacagtgaagaaccaagtccatgcctttcaagccaaggacagatcccacatactgaacaaagaaattcaaacaacgctggccaagctaaggaacgaaatggaagctgcagggtacaaacccgacctgaaactctcgctttacgatctggaggaagaagaaaaagcagcagaagtctcgcaccacagtgagaaactggctctagcatttggattgttatctttaccactcagtgtcccaatcagaatcaccaagaaccttagaatctgcggagattgccacagcttcttcaagtttgtctctgggagtgttaaacgagagatcattgtgagagacaataaccggtttcatcggtttaaagatgggatatgttcttgtaaggattattggtaatctttattagtttaggcttaacatttatttatatctttgtactataaacttagtcgattatgatcaaaatcttctaatttcaagacttggtaaaatccgcgttataaaaacatataaaaaaattggatccagctacattatggacattgcattcactacgtgacctcctcttaagtcttaatacacgtatttttgcatgtataaataagcattgcctccttaattacatttgattaaaaactaaacaaaccaaaaatgtctaattttctaaggaagaagctacacctctgtttctcctcatccggtggtctctcaccgtcgattccttcctctccgatcatcgtatcaaatcacaacgctcaatctcatcctcatcacactccctcaatctttatcaacaacttcaactctctttacgatcagctctctgtttcttctcccctccaccgccgacacagttccgagaaccccgccggggtgttctccactaa

SEQ ID NO: 189130 - DNA, 391 bp, Arabidopsis thaliana landsberg
atggacaacaaccgcataaacgctggtcgctgtcgatgggaggtgatatgcttgcatcatatcaggtatgtcagttcatggagaaaactcaagtcaagcagcatatggttgagcttattttcactgccacagtcgccttcgatggaatcaacatcagtaaatatcatcccaacggttgacggatccattttgtttcgcaccaatgagggtaagcacttttcactttttggtgatcaacaataatatcagcaatgtcaacgacatatctcccaaggaatgagacggatccccatgaaagctaagacaattgtggatcgtacaccatttgtggcagaggatgggacgatgtacactggcaccaaggagacacgagtcgtgggtattgatgcac

SEQ ID NO: 189131 - DNA, 228 bp, Arabidopsis thaliana landsberg
atgacggtggtggaggcgggtgaagtgttgaacttgaaggtgggcgagaaccctctactggagggtgaggccaagacggggtacgtctcgcccgacgaccaagacggggagaccgccagcgaaaaaccctgcggcgcgccccagctgaagaagggcccctggagtcccgatgaagataagcttctcaaaaattatgtcgaggcacacggcgaggggaaatggaacaag

SEQ ID NO: 189132 - DNA, 59 bp, Arabidopsis thaliana landsberg
atgaggtcttgtatggtcgaacatctctcaggaaagcaaaagaggcagccgtttgaaag

SEQ ID NO: 189133 - DNA, 142 bp, Arabidopsis thaliana landsberg
atgcatgcgctcgcccgcgccgggggtgcgcggtgcgctgctgctttggagttagctgcaggcgaggcctcaggggcaggaagcgagattgcacacgcacgcatgcacctacggcgagcgcgctgtaccggccgtgatcggg

SEQ ID NO: 189134 - DNA, 159 bp, Arabidopsis thaliana landsberg
atggagatgtggaatgatgctttcacactcgagttttcggaaaacgaacataacgagaatcatttggacaagaacgatcatgagacaacgagttcctcatgttttgaggtggtaaataaagtaagagttagccatggattgtttgtcacaactcgtcag

SEQ ID NO: 189135 - DNA, 134 bp, Arabidopsis thaliana landsberg
aaatgcccctgaagttctatctcttcacccgacacgcccacgacgccgttcacgcacggtcgcgctccggcgaggtcctagaccggccgattggagctacggctgggttctctgagcagcggatacgaaattaa

SEQ ID NO: 189136 - DNA, 402 bp, Arabidopsis thaliana landsberg
atgcagaagggagggatcgggatgaaagcctatctcctcatgctctcctataatctatgtaagtgcagggtgtggtaattgaatcatgtgctgacttgtatcatctctgaagcaccacagtaggttgcctttaagccaatgagagttcttcaggtaagtctcatccatagtgaaacgcgtggtgttgacttctttgccctcaaagctgatgcggaaatgctcgaatatgggagtgagaagactgccaactctctcagatttgtgtcctctatctgtaaaaggcttggtcttgagagaaaccaagtaatgagcgaacacaacaccaaagttgacattacggtcaacctgctcaaatccaaggctgtcaggaaagaagtcatgaagagcgtgatagagcagtaa

SEQ ID NO: 189137 - DNA, 401 bp, Arabidopsis thaliana landsberg
aacaagaaaagaatatgtcgatggttaagtactacgataaaaaggaacatgttgggttttggtttcatccttctgcccaagaactcatcatccgttatatcgggcctaaggttaccaaaagatcaaataaagaatttgaattagaagacaagtttgacatctatgccaaagagccgtggcggttgtctcacaccgagactaacttttttgaacctaatgaatggttctagttcgtgaaagtgaatcatctctctgaaaacgttactggaaaaacgcatcagccgcaaagtcaaaggagagacggttgatggatgttggaaaggccatgggaagttgagtgatgtcgtgttggaagataccggtgcagtgattgggaagaagtctaagtttctacgtcaaag

SEQ ID NO: 189138 - DNA, 2519 bp, Arabidopsis thaliana landsberg
atgagcaacaccgacgatcagagttccggcggccaagcctccactctcgacgacatcaagcagctgcttcagcaactttccgagaaaaccgacagacagcagctcgccgtaacgacgcttttcgataagttcgtgtccttccaagaacgttgcaatggccagctcgccgctttagctgtaaaccattccgagatcaggtcagcacacaatgcgtatgccgagcaggttgattctctttctgcaggaacggcacggactacaggagctcgaacacgactcaattttcagggcgccgcgagcccaagcgtccagaattcgcaggaagcttctggtcagcaatctccttcgcctccggttgacgtcggagcaacgtcgacacaaaatccagtcatccagtctccgtcagcaggtcttgctgcaatctcagatgagacaatagctcgggcgccggctccactggatcccgccatcagactcccgaattctaatccccgaccagagccgagcacagtcaactcggagctgcagaaccttcaagatcaaatgtgggcaatgaacgcaaaggttcatcaggctaccacgtcggcccccgaagtggaaaaagttattgaagcaacaaggaggacacctttcacttcgagaatctcaaagcttcgtattcgcgatttccgagatttcaaactccccggttacaacggcaagggagatccaaaagaatatctgacttttttccaggtcatcgcaggtcgagtcccgcttgagccacatgaagaagatgcagggctctgcaagctattctcagaaagtttgtcaggtcccgcacttacctggttcacccagttagaagagggttcgatcgataactttaagcaactctccactgctttcattaagcagtacgggtactttatcaaaagtgacgtcactgaggatcatctttggaacctctcttaaggagctgacgatccacttcgaacttatatcactgccttcaaagagatcatggtccaagtacccaacctgtctgattcggcagctcagtccgccctcagaacggtttgtggcatgagtcgcatttccgtgaatctctaactgtaaactgccccgaatcgattcaggacgcccttcatcaagcaacgaactggatcaatgccgaagaagaacgggcttttttggctacgaagtttaacgctgcaccaaaagcctccccacctgcaacctcgaagaaaccctccgagctccgaaagccagcagcaggaactttttctgttgagaaggagccgctcaaaacttccccaaaagcgtcaccatcgaaaccgcctttctctccaaaaggcaagaatggagctctcccgagcaacaaatgggtccgagatcctaacgcatactgtgagattcacaaaatgaatggtcatgcgacaaaggattataaggctttgggaaggttgttggctgcaaaatttgcttcgggagaaattcatgatatcgatgtcacaacaatcgatttggctcagacagcgtacgacgtgttagatttcgagatatcttcacctcccaacaaaaagcaaaagaacgagccagctcccgtcactccaaaaggcccgaagaagatggtcaaagtaattatgggaggatctaaactctttcgggattctgtcagcgcaattaagcagcacgaaaggaaggtggtcgctccggtggcgaaaaggcctaagaccaatcaaattgactgccctgaaatttcgttttcagaggaagaaacctccgacttagataaaccgcatgacgacgccctcgtgatatcgctcgacgtgggaaactgcgaagtacaaagaatcctcattgatactgggagttcagttgacttaatttttctggataccctcgttcgaatgggaatttctaagaagaatatcaaaggagctccgagccctctcgtttccttcacgagcgagacttcaatgtcacttggaacgattacactcccgatcagcgctcaagggattgtgaaaatgatcgaattcaccgtttttgatcgacctgccgcttacaatataatacttggaacgccttggctctacgagatgaaagcagtcccttcgacttaccaccaatgtgtcaagtttccaactcccaccggagtaaagcaaatcttgggaagtcagcgtacatttagaatgtgctatatgactggacacaaactcaaagtcaaatagcaaccacagctcgaggccgctccgaatccgattaaaaaagtaggagacgacctcatcgaacgggtgataattagcgaggagcatccagatcagcccgtcggcatcggagctaatctaggcgaaagtttccgaagcaaacttatccttttccttaagcaaaacaaaggaactttcgcctggagcgttggcgaaatgaccgggatcagcacggaagtcatctcgcacgagttaaacgtcgacccgacttttaaccggtcaagcaaaagcgtcggaaacttggtccggaccgcgcggaagcagtga

SEQ ID NO: 189139 - DNA, 507 bp, Arabidopsis thaliana landsberg
  unsure (1)..(507): unsure at all n locations
atgcccccgcagcatgtgtttctgttttccgacctgacggtgaccaaggcggatttgtggatgctggcgatgcccaatctgcccaagccgcgcgccgacaccctgcccgaacccagtgtcgagaaaggccttaagaagttctattgcgtggaatatgcgcggttgcgctcaggcctggcggtgttcggcgatgccaaatattggtgggcccgggccaagaatctttatgcccgcgccacccatccggtggaggnnnnnnnnnnnnnnnnnnnnnnnnnnnnnnnnnnnnnnnntgggcatgtggcggtggtgaccgacatcgtgtcgagccgcgaaatccgcgtcgaccaggccaactggcagaaccatggcgagatcgaccattccaccccggtgctggatgtgagccgtgacaatgactggtcgaaggtgcgggtatgggacatggccagccgtcattttggcgcccgtgtctatgcgatcagcggcttcatcctcaacgaagcg

SEQ ID NO: 189140 - DNA, 169 bp, Arabidopsis thaliana landsberg
gggaaatctggacgctggatgaaaggatatcatctgaaggttccacctcctccacttcctccacaacctcctcgaggaggcccacgtcaaaggtttcttccaacaccacggggtgttaatatgattatatggagcttggataatcgttttgtacttgccgctatcatgg

SEQ ID NO: 189141 - DNA, 144 bp, Arabidopsis thaliana landsberg
atggaaggtgggttctcttgggtaaggtttatgtggttctctactcttggaattctttattcttaatatagtatattaagtttttaagaaactaaatacataaattttaatcaccaattttggttttctaccttaggccattaa

SEQ ID NO: 189142 - DNA, 148 bp, Arabidopsis thaliana landsberg
atgtacgtgaggctagcccttgactacgttattgatatatctccgggcatctcaactaatctatctgatggttttctatttggccaacccttcacagtgacatctcttacaacaatttctcatggacgtctagctgccaagaaaagag

SEQ ID NO: 189143 - DNA, 138 bp, Arabidopsis thaliana landsberg
acaaagaatattaataattggcgtttctttttttcttatgcgcatgcagtgaatgcacagaaaccatacgaagaaatgtggaggcaaacgaagccacgtagctcagaaattgatgttcatgggagattagacttctaa

SEQ ID NO: 189144 - DNA, 21 bp, Arabidopsis thaliana landsberg
aaggtaacggtgactgagtga

SEQ ID NO: 189145 - DNA, 111 bp, Arabidopsis thaliana landsberg
ttcatatctagtcgaatccgattcgacggtcggaaacacccagtttcaagttttcgaaatttacccagtaagagtcagtcggagatcgtaacttacagagagattcgatga

SEQ ID NO: 189146 - DNA, 103 bp, Arabidopsis thaliana landsberg
atggttaaaatttttgggaaggttattgacaacattactggaataggaccaaaaaattcatttaagaatgaatggaaaaaggagaaaccaccgttttggaaag

SEQ ID NO: 189147 - DNA, 496 bp, Arabidopsis thaliana landsberg
ccgaagccctggccatcgccacgggcaccggctacggcctggccgcctcgctgtggacgcgcgacctgtctcgcgcgcatcggcttggcgcccagctggatttcggcatcgtgtggatcaactgctggatgctgcgcgacctgcgcacgccgttcggcggcagcaaacattccggcgtcgggcgcgagggcggtagcgaagcgctgcgcttcttcaccgagccgaaaaacgtctgcatcgcctggtaagcgagtgccggcaacgtgttgccgccggttcgcgacgatcagcccagcacctgccaaccgctggccgcacggcgcatcagccgaccgttctcgtactgccacaggatcatccagccattgtcgatgattcgctgcaacacctcgtggcgggcgatgatcgcgtcgatggcatggcgcggcgcggcgataacagtggtactggcgcagcggctcgtggcgccagctgcgaccatcggacaatgactggc

SEQ ID NO: 189148 - DNA, 251 bp, Arabidopsis thaliana landsberg
atggttgctgaaaagatatgtggaggtagtaatcaaaagaaggtttttggtaagatatatggagatgttataacttatatagggcttcccatcatatgactggaaactcctcgctattcactatgttatggacacttcaatttgcttaattaattgttgacgagaacaaaacgtcttctacttacatgggtgtgttatctgatatgcgattaattttgtctcaaggttttactttagagaccacacgttaa

SEQ ID NO: 189149 - DNA, 203 bp, Arabidopsis thaliana landsberg
acaggttcaatgaacctgaaacgttgaaaatggccaaactgggccgtgagttaagagccaaaggcatcgatgtgatcgacctgagcctgggcgaacccgattttgatacaccgcagcatatcaaggatgccgccatcaaagccatccatgataactggagccattacacaccagtggcaggcttccccgatctgcgcgaagcc

SEQ ID NO: 189150 - DNA, 451 bp, Arabidopsis thaliana landsberg
atgggaaaggaaatggtcacgtggggtggaggactaccattggccgttaaagttttgggaggcttattagctacgaaacatacagttcccgagtggaaaagagtatatgacaatattggaccccatctcgcaggaagatctagcttagatgacaatctcaattcgatttatcgagtattgtctctgagctatgaagatttgccaatgtgtttaaagcattgcttcctttacctagcccattttcccgaatattacgaaatacatgtgaagagattgttcaattatttagcggcagaaggaataataacgtcatctgacgatggaacaaccatccaagataagggagaagactacctagaagagctagcgaggagacatatgattactatcgacaaaaactatatgtttttgagaaagaaacattgtcaaatgcatgacatgatgagagaag

SEQ ID NO: 189151 - DNA, 125 bp, Arabidopsis thaliana landsberg
ctcaagtgaaactcatatccaatgtagaccttcacgttcgttgttttggatgattgcggtcagacttgtagaatcagctgaagaattagagaaccggtacaaaaagcttgagctttcgttatcag

SEQ ID NO: 189152 - DNA, 65 bp, Arabidopsis thaliana landsberg
accacaaatacttcggcgacaaacgacattatgttgccacaacaaataatattctcatgagataa

SEQ ID NO: 189153 - DNA, 134 bp, Arabidopsis thaliana landsberg
aactaagaatttcagagctaatagcttggcacagaaggcttcggggtatcggatcaacaaaggaaagtttcatatttctggaaatctgataatcggtgttgtaaggccgaggctacaggtgtcggaccgtccat

SEQ ID NO: 189154 - DNA, 242 bp, Arabidopsis thaliana landsberg
atggccaacaaagcagcaatgaaaaatgtctggccaaccgaaaacgacataagtgagatcacagaatttgggtaacataaaagaaatctaaaggtggtatgctacaaaatagcgccgacatgattagatagatatataccttgtctccaatctcagaaacaaatatgagtgagaaggcttgtgtgaagcctgactttgctactgctgctaaaactgacgatggtcctccttttacaaagtga

SEQ ID NO: 189155 - DNA, 1986 bp, Arabidopsis thaliana landsberg
aaagtttttcttgtcatagataatgttagtagcgaggaacagatcgaaactctttttggtaaatggaattggattaaaaatggaagcaagattgttattacgtcaagtgatgagtcaatgctcaagggtttcgttaaagatacttatgtagtcccaagtttgaacagcagagacagtctactgtggtttactaatcatgcatttggtttggatgatgcccagggaaacttggtaaagttgtccaaacactttctgaattatgccaaaggcaacccactagccctcggagcttttggtgtagaactttgtgggaaagacaaggctgattgggaaaagagaataaaaacattgacactaatttccaataagatgatccaagatgtcttgagaagaaggtatgatgaactcacagagaggcagaaagatatttttcttgacgtcgcatgtttcttcaaatcagagaatgaaagttatgtacgacacgtggtgaattcatgtgattctgagtctactaagagttgggatgaaataacagatctcaaaggaaagtttcttgtcaatatttctggtggtcgagttgagatgcatgatatactatgcacattcgccaaggaacttgcttcacaagcattgactgaagatacaagggttcatctcaggctgtggaactatcaagatatcatgtggtttctcaacaatgaattggtgagattatttgaacatattagaacctctaacgtgtgttagttgtattatattttcatttttcaattgctaactattttgtttctgcggtttgcttacgttttatcattaattattggttgtaggaaatggaaaatgtcagaggtattttcttagacatgtctaaagttccggaggaaatgacatttgatggtaacatctttagcaatatgtgcaatcttcgatatctcaaaatatacagttctgtttgccataaggaaggcgaaggtatcttcaaatttgacacagttagggaaattcagttaccattagacaaggtacgctatctccactggatgaaatatccatgggagaaacttccatcagacttcaacccggagaatctcgttgatcttgaactgccttatagctccattaagaaagtttgggagggtgttaaggtgtgtctcactgtacgatccacaattcttatatgaagcattcatcaaattcagtgttaaattctttgtcttcttcttctttacaggataccccgatactaaagtgggccaatctaagctattcaagtaagttgactaaccttttagggttgtcaaatgctaaaaatcttgaaagattgaatcttgaaggttgcacaagtttgcttaaactgccccaagagatggagaacatgaaaagtcttgtcttcctgaacatgagacgttgcactagtctcacatgtcttcaaagtattaaagtgagctctctgaaaattctcatactcagtgactgctcaaaacttgaggaatttgaggtgatttcggaaaatctggaagaattatatttagatggaactgcaataaagggacttcctccagcggccggggatctgacgagacttgtcgtcttaaatatggaaggctgtacagaactggagagtcttcccaaacgtcttggaaaacagaaagctcttcaagaactggtactctctggatgttcaaagctcgagagcgttccaacggacgtaaaagacatgaaacatctacggctcttattgcttgacggcacaagaatcagaaagatcccgaagataaagtcgctaaagtgtttgtgcttaagtagaaatattgcaatggtcaatctacaagataatctcaaagatttctctaatctgaaatgtcttgtcatgaagaactgcgagaatctcagatatcttccttcgcttccaaaatgtcttgagtacctaaacgtatatggttgtgaaagactagcatcagttgagaatccactggttgctgatag

SEQ ID NO: 189156 - DNA, 245 bp, Arabidopsis thaliana landsberg
gtttgagaatgagagttacgtgaggagattgcttggttcttcggctcacgcagatgcgagtgaaataactgatctagccgataagtttttgatcgacattagtggcgatcgtgtcgagatgaatgatctgttgtatactttcgcgataggtctgaattcgcaagcatcctctgaaaatacaacaagtgagcgtaggctctcaaagcactctgagattgttgatgttctcatgaacaaagcggtta

SEQ ID NO: 189157 - DNA, 317 bp, Arabidopsis thaliana landsberg
atgatagtagatgttcttgatcctagtcttcccgaatttcctacaataaaggaactcaaacggattgtgttgatttccctgcgttgtgttgatcccgagctaaaagagagacctaaaatgggagatgtgattcacatgctccaaccacatgacttgctgctgaataacaatgtaaaaaaactttttgacattcagtttcttgttccccaagctaaatagttatccttactttgttctttctctgtttccaggcaatacagaaggctcagaagattacccggtcacatgaggtttctgcaataagtatcagacaatga

SEQ ID NO: 189158 - DNA, 626 bp, Arabidopsis thaliana landsberg
tttaaatctcgaggagtcgctaaagaatggcaaagtcgtcgcaaaagagcctcttcgttgcgacgtaagcataggagtcacaagccaagatgtaagatttcttaattttaagatctaattacattaataatgagtattttgaatcagttacagtccaattatgatgtatatcattctttgtaggagatacaaagattatttcataagtttgttttccaacatatataaggtattaacctttctttgaaaagcttatgtaacatatcttgtatatgatttggtgttcaaaaagatttgctttaaaatatgtaaaataaaaaataaatagaaagaatctatacgtatattacctcaaataattggtaaaatatggtcacttaacatattaatcattctagattcttatattgcaatttctcaaagagtggctaaaacgaggcaaaacagccgcaactttaaaactcttttgtgacaattgtgaaacttcaaaaaaaaacaaattgtatttctactacgttgcaaatgaatcgtacaaacgtcgcttatttatgaccattcttcgactatataatggagtcgtacatttgcgacgattttgcgttgatgtcgtgtcggtcgttatatag

SEQ ID NO: 189159 - DNA, 74 bp, Arabidopsis thaliana landsberg
atggcgaggcttgcgcgaggaggcgataacgcgcgacgcagggagaccttcctggtcggacggacgccagagcg

SEQ ID NO: 189160 - DNA, 2316 bp, Arabidopsis thaliana landsberg
  unsure (1)..(2316): unsure at all n locations
atggtaaatcggtaagcctagtacctgattgaacctggcagcagattgccctcctcacgcgacctgagacgaggtctcccattccggttatggtgggtacaagtgcggtcactgcacgacggcagtcggggtcagtgaggcattgtacgccaaggcggtgagccctttctgttgccagggaatcgatggggacagttgatgtgtgtggtgacggagtgcctcgccacgtcgtgtgtgtaggtttaccttgcaaggttaaaaactcgattcgaatcgtctgcttctcgcagctaatgagactgcttgatacattgtactgcattgagtaacaagtggaaatgtgatgggttgatataagctgttgattgctaataatgcttgctactatgtatgagtagatagtacacttttagccttaagagagtcacacttaaattgacaaagttaaaagttgacttagaaactcagctagtgcatttggcaaccaaaccccacagccaaacagctgcatgtctagaggtagaggagtagactcctcacaccgggtaagtctagctgagtattagtatactcagccttgcttgtggcataatttttacaggttctctggaggacatggttgctggaataacttggccgtccatcttgccaccgggttggactgtcgagtgggaccctgcctcggctgaggaggagcatgaggagtgatgggacaggcttccccatctctccctttatttaccgttagttaatttccgctgcacttcgaacaatgatggttacttttgcaaaaactccgatgatgatgatggtgatgtaataatttaatactcttaattttatggttttatgctttattgtatttgctctgtgactcaccttcgagtgagattgtggtacttgatcctgtcagtggccgtgtcggactagatccgagggattgacgggttattcccatttaagtgtggtctagcctctaaggcggggcttaggcacttaagttggaataattcgggcagttccgccacagctggtatcggagcttgtaccaccacagaggaatcaataaaatgtaaataccataaattttctaaataaaacttgatagaaacaaggttggatagatagtaggacgagcaggatagacctaggacgtgaagccttaggttaatagaagggtagctaggtggctaagtaactcagccctacaggccacttttacaggatgggagttcctccctattccttttatcttgttgtgaggccgttcaggacgagcatgcatgcattcataactaagcaatggataactgagtaaaggacttaaaaacaagataacaaccaactaggtccctagtgcctttttacttaactggagaaaggctgagttttattttccttgttctttttataattctttttcttttacttacgcttaaccgtacacagatgacttcccacggatcctcagacgacggaaatgcactgtcccgcactgacgggcttgcacgagagggctttccccgtattttgtgggaggtacttcagtgggccggatacacgacgcctcctcagtnnnnnnnnnnnnnnnnnnngaagcaccgagtgccccgctgtagggtgaggatgaccctggagcctcatcccctaagccaggctggcgttcactggactctgagtcctttggatactgggctgaggacacgatcgaggcgattgctctgcacgggttgaccactttctgcggattccacccttggaactatctacccaccccattggcttgttcccgcggaaagggaggacgacccaatgtggaaggatcgggtggagcatgccaaggacatttgggctatctacccaggtcagactgcgcacttgactgtacggtgcatgaatgcagtgtaccatctgcaagtgatgcgcggtgaggcgatgtcccatctggtggcattgttggaggcaacgaagatcaccctgtacaatagagaggagctcgtggttgatttgtccactgagatggtggaaaaggacttgcaggtggagcagctatccaatgagatccaagagctggaggaattagtagggaccagggagaacacaattgaggttctcgaggatcagctccttaacactcagcagcagctggctgaggctaatgagcacctggatatgcatcaccaggagatccaggatatggaggccaacgaggatgtcaacatcgagggaggagaggagcctgcctccagcttggacactgctggctcagggagaccaccttcccccgagtcgagtgttgcctcgtttgctcattag

SEQ ID NO: 189161 - DNA, 273 bp, Arabidopsis thaliana landsberg
atgcgtcgtggtcagctctcatcgccgcttcaaactttcggtaagacaccttctggcgtttgccgtcacctcctcttgctcgttcaataccttgatagatcgccaggggcgagatttaggttcaccgacgattatgccgccgtagtggggaatgccactgtgcccctgtagctggggatagaagacgacttccaagacgcaggatcataattgggcggtcggtggacgaaacggatctcgagtgcgttgggccattgatcaggccgtgtacgg

SEQ ID NO: 189162 - DNA, 262 bp, Arabidopsis thaliana landsberg
cgagtccggcgccttggtctatgccgctggctcagatgccggcagggtgcgcaccctgatcaccaacggcaccgacctcgcgcgccccggctatgacctcttcggccgcctctggatgcttgaccgcactgccgctggcgccgtggtcaacgtagtcgccggtggccacgaccgggtcatcgacgtgcccggcatcatcgggcgcccggtcgcctcgattcgagtcccacccgacggcacccggctggccgccgcaaaataa

SEQ ID NO: 189163 - DNA, 267 bp, Arabidopsis thaliana landsberg
tacttcgccatgaatggaaattcgggaaaacaaaatgaaggaagagaaaatgagtcgagggaaaggaaccactacgaagaggcaatgcttgattacataccaagagacgaagaggaagcttccattgcaatgctcatcggaaatctaaacgatcactatcccatccctaacgatctcatggacctcaccactgaccttcagcaccatcaagccacgtcctcaatgccacctgaggatcacgcgtacgtgggttcatccgatgatcag

SEQ ID NO: 189164 - DNA, 6 bp, Arabidopsis thaliana landsberg
atgagg

SEQ ID NO: 189165 - DNA, 336 bp, Arabidopsis thaliana landsberg
atggtgttcatcctgatcccagggcgatcgcttgatgcgaaccggcagccgcaaagtagatcctgcgcggcggagagggatccttcgggcccggactgggccatgggcccgccaaactggataagctggtgtgtctcgtggaaaagatgtcttgggaaggcgcgagggcgaccacaggggatgcacggtctcgtagtcgagaaacagaaggcaggaagggtctcgcgggcgtttcagcgtctcgtgtctccaccaaccagtcagccagccaataggaacatcgccgtcaaagtcagctgcaaggtgacttcatgtgaacagcaagacagcttctga

SEQ ID NO: 189166 - DNA, 300 bp, Arabidopsis thaliana landsberg
atgacgcagggaaagcagcagcacacagcggcgcagcccgcggcggtgccgccggccacctcgctgcaggagcggtgctccctgatgttgaggtcgctttcgcagcgctgaggagggcggcgccccggccccgggcggcggggtgggaacgccgccgaccgccgcagctggtggtgatggtggtgcaggtgctggtgccccgtcgacagcgggccctggtcccgctcccggacctgcacgagcccccgcgggcgctggcgcagggcgtcatcggccctcgccgccgccacggccgcggag

SEQ ID NO: 189167 - DNA, 28 bp, Arabidopsis thaliana landsberg
atggacatagcctacaacatcttcaaag

SEQ ID NO: 189168 - DNA, 883 bp, Arabidopsis thaliana landsberg
atgaagacaagaatcatcgaaaatttcgcaaccacacacgacctgacacctggagagcggttgctactgctccgacataatgatacggcagtaaagttctgtaaggagttcatcgccctcgcatctaacgcgctggaggttcctgaacaaattttggagatggcattcatgatcggccttaaacctaagatccgtgccggagttaagatgtttgagcctcgaggactcaagaaaatgatgagtacggccaagaaagtcgaggagtggtcgggagacactccggcggaggattgtcagggtttacaggcaaaacgacaaataaaagagaaggagatcgcgcctggacacgtggaggttaacagactaataagtttgggtggaaaagaggcgaacacgacgccgtatcgagcagacaagaacaaaaacctaactgtgccacagagaacaaacgagagtcgtcgggcgtcgtatcacaagttgacggatgcggaggccaacgatcgtcgagctaaggggttatgcttccggtgtgatgagaagtatcacgccggtcaccgttgtcggttcaaggaactgcaggtcttgatggtgactgatgatgacgtggaggaagatatcggagaggaaggcgaggaagagtatgtcgacgtagtgggtccggtcacagagtgcgccattctctccgttcactccgcagtgggcatttcgtctcccagaactatgaagctcaaaggaaagatccaaaagcaaaaggtagtggtgcttattgacagtggggcgtcacacaatttcatctcacagaggctggcaagtcagctcggcattgcgatgcatggaaccacaaagtatggagtttcgatgggaacgagagtgattgtcagag

SEQ ID NO: 189169 - DNA, 886 bp, Arabidopsis thaliana landsberg
cttgcttgtggaagcaacacaaatcatattggagaaatgttccttataacgcggtgcgtttcagtttcggggctgctgttggaatcatgtatggaatcatcttttggagcctcggaaaacgaaaaggaacaaggcaagatatcttcaatagtgtaggcgcgatgtcaaccgttgttggcttcttaagttcacaaagtgcggctactgtacgtccagttgtaatcgctgaacgtactgttttttatcgagaagccggtgctggaatgtactccgctctaccctatgcattttcacaggtatttcattttctatgtaccaattaaaccctatcatacgttttggttcaagttttataatacgttttggtttataaacttgaacattatacattttgtaggtgataatcgagatcccatatacaatggctcaagcttgcatctatggagttattgtctatgggatgataggatacgaatggacagcttccaagttttttttgaacatattctttaccttcatcagcatcctctactctatatacactggtattatggtcatttccgtaagccctaatcaagaaatcgcttcgatactcaatggtgtcatatccacatcgtggaacgtcttttcaggattcactattcctcgtcccgtaagtaacaaattctgtagattctctttctaaattttgtaaccaaaatgttcacaattaatcaattatagtagtttcagcttggctatgaatgctcataatttaaatggatattaactttgcagagaatgcatgtatggttgagatggttcacctacgtgtgtcccgggtggtgggggttgtacggactgacgatagctcaatacggagatgtggagacaaggctcgatacgg

SEQ ID NO: 189170 - DNA, 280 bp, Arabidopsis thaliana landsberg
tcatcctcttcttcttgttctgtatatctgatttcttctgcgcgtactacgtctaagtatatctcaatttctcatagaattcgacagagctttcgagaagttattgaaaaaaggagtaatgggttttgttcattcgctgtaaacaagcgtagaagtggcgattccgttattgtggagtcagacgatgatgatgaagaagatgatgaagattggggtgaatttgatgaagaagatgaaggagaagaagaagatgaagatgtaggagagctcttaccaactg

SEQ ID NO: 189171 - DNA, 491 bp, Arabidopsis thaliana landsberg
atggaaagttctaagcaaaaacgatgtcgctctagcgtagtcgagaccattgaagcaccattaccactagtgtggtccatcctacgtagtttcgacaaaccacaagcttatcaacgtttcgtcaaaagttgcaccatgcgctctggcggcggcggcggcaaaggaggagaaggaaaaggctccgtccgggacgtgacgttagtctccggcttcccggcggatttcagcacggagaggctcgaagagctagatgatgagtctcacgtgatggtggtaagtattattggcggtaaccataggcttgttaattacaaatcgaaaacgaatgtggtcgcgtcgccggaggatatggcaaagaagacggtggtggtggagagttacgtggtggatgtgccggaaggaactagcgaggaagatacaatattttttgttgataacattattcggtataaccttacttcacttgctaagctcacaaagaaaatgatgaa

SEQ ID NO: 189172 - DNA, 24 bp, Arabidopsis thaliana landsberg
atggctggagagttcgttggccgg

SEQ ID NO: 189173 - DNA, 98 bp, Arabidopsis thaliana landsberg
ctagccccggtgagatctatagcttcgatgtctttgtcaacgtcactacgtcccttgaccatgaccaacctgttgtccttcgactatctcgaggatga

SEQ ID NO: 189174 - DNA, 300 bp, Arabidopsis thaliana landsberg
atgcagtcaaccgagttgacacccttccgtctgatgtacggatccgaggcaatgacatcgcaagagttaaagcacggatccccactaacagacaaattagccatccttgacgtcgacgaatcaacttctaaagatcttatcgacgaagatcgtgtcctccgcttgcaggccctgcacaagtatcaagcacaaactaaggcatggcgtgacaacaatgtcgtcacaagagaattaaaagaaggagacctacgtactcacaagaaccatcagaacagagtctcggggcaagctcgagccaaa

SEQ ID NO: 189175 - DNA, 93 bp, Arabidopsis thaliana landsberg
gtcttttgccaaacgcctggcccaggctcgttcaggtatatcggctaaaggttttcgaataccgcacgctacatccgtgatcgagtccgtctg

SEQ ID NO: 189176 - DNA, 324 bp, Arabidopsis thaliana landsberg
  unsure (1)..(324): unsure at all n locations
gtttcctccattaaaaatctgattaattccatctccgtgaagaagcaagcgaccgacgtacgttagagcgttgagttgagactttgaacgatgccnnnnnnnnnnnnnnnnnnnnnnnctcatggatgtgataaaagaaaattgcaaaagagacgagaagagttggtaagatcagaggctaattctcttcttaggtacatgaaaaaacctgaaaatcctacaatttaggaaatcattaattctgatggaaacaataaccaacaagaacaagctgatgaagtggatccagaaaataaactggcccctttggatgaagtggttcaa

SEQ ID NO: 189177 - DNA, 308 bp, Arabidopsis thaliana landsberg
gaacgactttggagcttcttcgcctttacttttggcggaatcagcgttgacttttcgctgtaagctctgcatccccttaggaacgactttggagcttcttcacctttacttaggtggtattttgagctttgcacccccgtatgaatgacttttaagcttcggaacttactctgcgctcccttatgaacgactttggagcttcagaacttactctgcgctcccttaggaacgactttggagcttcggaacttggttttttcacactcgatggtgtaaccacaggtttattacatcgagctaaaggttaa

SEQ ID NO: 189178 - DNA, 93 bp, Arabidopsis thaliana landsberg
atgaaaacccctttgattgattctcacccaaccaatcgaacctatattgatattatcgctgatggtgtcgattttcatgaagataatagaaaa

SEQ ID NO: 189179 - DNA, 219 bp, Arabidopsis thaliana landsberg
ttagatagaaacgataacggaaagacgaacgctgctcttccaaccatgaccagacccattaggattgagctcactgcgatcgatgttcccggtgtgtcactcacggatctccacttgtcaatgtccaaggcatccattccaacatacaagaaaataaatgtctccgcaagaaatgacaaagttgcaaaggtatgcctgtttcatcgaaaaaaatcataa

SEQ ID NO: 189180 - DNA, 72 bp, Arabidopsis thaliana landsberg
ttactaacatacaactcccactcgaggtgtcggataagccgatcgacacgtggtgatcgaatacgagagtag

SEQ ID NO: 189181 - DNA, 214 bp, Arabidopsis thaliana landsberg
atgttgggtttacggactcgaacccacattcgtctgaaggtttgcatcagtctgactgtaacacacaacaaagattcgttagttgacgttatagccttaagtgagagtaaacattcacaaagattcagctttagcacctttcaagcgaacataattcatataaaagtgctaagaacagagcagaacttcagtctcaacattgcttgcgtcttaa

SEQ ID NO: 189182 - DNA, 334 bp, Arabidopsis thaliana landsberg
caggccgttctttggggccgtggccttgccgggggcaaccggcctgctggtgagctggttcggcataatgggcctgttcgacctgccgaccgcctggttctggaagaacatcgtgcagcgcgccctgctcagcgtgttccccggcaccggcagcctcttcggtgcgaacggcggcgacatggtccgccacgtcaccggcaacggcacggacgtcctggacctggcaaacacctggcacttgatggcctcgcccaacttgtgggtcggcgtggtgatcggtgcggccctgctggctggcgcgacctggttccgccgctggcgcgacgacagctga

SEQ ID NO: 189183 - DNA, 174 bp, Arabidopsis thaliana landsberg
gttatcccagaatgtgaaaagccatctgatttgcttcaacctatggaaacacgacacttggtgctaagaactaagatgcataccaaggagttcaatggaataattcttcttctcaacaactgccctaatttggagacgcttgggtttgatattctaactccatgtcctttctcg

SEQ ID NO: 189184 - DNA, 118 bp, Arabidopsis thaliana landsberg
gccaaatgttgatgatgaactgattgcaataaggatgcacaccttgggtatgcgtccgcaacaaaattggaatcggggaaggaaagcagtactttccgcttccggaaacgtggcatag

SEQ ID NO: 189185 - DNA, 745 bp, Arabidopsis thaliana landsberg
agtaccgacacatatcggatggcgaccaaacaaaggtttggatatttacagagccatattcatgaaaatgatgaaagacatcacagatccaagaagctgagaggagatgggcatgctttcatcaagcgtcaggatcatgttgacttagctggtaggcaaggaaaggtaaagattgggaaactaaatctacatgcttttaaacctatatttgaatgaagtataaacgcctttcagttatttatatccctggattttctttgtgttatttctgactgttttatcactttatatggtctgtcttctatacttaagttttatgttgctcacatccgtatatttagacatcagttagtgtacaatgaagaacaagacccttctcatgtgatagatattttgtgtgtgtgtttcaggtctctaaccaatcaaaaaaaagattctccaatggcggagatacaatcgagcaacaagatgttcagaaaccaagaaagttaatgggcaaaagcgaagagaaagctatgcagaatcgagatataaatgacaaagaagaaggcgagataatagaagaagtgaaaggtgttgaaatagacaatgaacgtatacaagagagtctgaaaaagatggagaaacggagggagaggttcaagggaaccaaattggcggtagaagcgacattcaaatctcaaactgaactgagagctaaagccgatgttactaatcaacagaggccagttagaaagaggagatg

SEQ ID NO: 189186 - DNA, 55 bp, Arabidopsis thaliana landsberg
atgaatggtaagaaaattgttacccgctcctttagcagcagcggcttggacgagc

SEQ ID NO: 189187 - DNA, 181 bp, Arabidopsis thaliana landsberg
atgaacaagcgaataaaactcctagaagcttccccagtaggcttaaagccacagtcataccaaggacgaggtagtggcgtttggttaacgaattgacgctgaatctaaatccgatgtaaccaaagtaaaccggaaggacaaactcgtgaatcgggtaactcaaccgttggatcaacgttct

SEQ ID NO: 189188 - DNA, 818 bp, Arabidopsis thaliana landsberg
gttcagctttaaactctcggaaggtgaaagttgcatggtctgaagtatgttctccaaaacaagaagggggtttgggattacgctcgattgcagaagcaaataaagtctgtgttttgaagttgatttggcgcattctctcagctaggcggtcgctttgggtggaattggttaagaaatatcttattcgaagaggctccttttggttagtgaaagagaatacaacttgtggttcttggatatggaaaatttttttgaaatacagagacacagcaaagagtttctatcgagtggaagttagaaacggcgaagcttcttcttttgggtttgacagatggagtgagatgggttgtctttatgacagattgggtgcaagagggtgcattgatttgggtagcccgatgactgctactgtgggtgaggtaatggcaggggcaagaagaagaaaatatcgggtagctattttgaatcaagtcgaaaacgaaatagtaaaacagaagctcataagatcgaatgagaccgatgtagcattatggaatggaaagcatgaccactatcgaaaagagtttcacaccaaagagacgtggctgcagattcgcaccgcaaagccattgatggagaactacaacggaatctggttcaagcactcgactccgaagtactcactcatcacatggctcgttcaaaaaaatagagtagctacgggtgacaagctgattaagtggaacccgcaagtaactccaaactgcattctctgtcaacacactttggagacaagggatcatttgttctttatgtgcccttattctctgcaggtatga

SEQ ID NO: 189189 - DNA, 380 bp, Arabidopsis thaliana landsberg
gaagtattacaaattctacggatgttgaaatattgggtgcaggcgtcgaatttacatttaatgaatcactcggcacacaacaaggcggcacatttacaaacggcggcgataccaccaccaccatgggttttgaattagctgccgacggcacggatgaatatgagagtgtggatgtggataaggtactgaaacaagtaccggtacccggtttgtcgggaatcacagaaaccgtttttgatggtttcgtatttaatacaaagggaggggcaaccggatgcccgtatgaagggcctaccgttaccaaatattatcaaccgggtactgccattgatcagcccaccgtgcaaatagaagttcccaaaataaaagtggataatccg

SEQ ID NO: 189190 - DNA, 114 bp, Arabidopsis thaliana landsberg
tatgctgccagggaagctgattttatagcccaagcaggaagaaaatatgccatcaccatttccacaaatatggctggtaggggtactgacattattctgggaggaaatccgaag

SEQ ID NO: 189191 - DNA, 882 bp, Arabidopsis thaliana landsberg
atgatcatctctttcttgccgttaaaggaatgtgtaaggaccagtgttctctccaaggggtggaggtctctctgcttggagaccagaaacctttcttttaaggaatctgattacgtgaatcctgatatcaccgatgctgaatattcgagaattgtagcttatcgttcattcttttgttctgtggataaatgggtctctatcactcaacatcaagtcgtcgaaagcttcgagatttgtttctcccatctggtgggtttcgaggataagatcgacgctctgatcgaatacgctgtctccaaacgagtgaagaatttagttgttgatttgtcaaacccctcttggagaagcaatggtgatatatcatatcgtcattttatttatacattgcctaaaagcgtttacagtctaacaaccttggagtcactgaagatctacgggtgcaagtttgatccttcgaaattcgtaaacccggtattgctaagaagcctctctattggttgggtcagactcgaaaacctccactctttactatccaaatctccttccctccagagtctaagtatcaaaaattgctggggcgttgatatcacgtcgatggccgggcagttcagagagctagtcattgagcattcagacttcagttacatgcaatgtgcctttgagctgcctcgtatacacagcttcaagtactctggggagttgttcgagttctacttcgacgtaatgaatgtgatcataccaaatgtgtacttggattttggagaagagcgagtatatgatctacaaagccaatcatcaagaatatcgggtgaggttatttcccgtatcattaacgaccttagagcagctgagactttaactgtctgcccttatatcctccag

SEQ ID NO: 189192 - DNA, 121 bp, Arabidopsis thaliana landsberg
aggtgatgacggggagagagagagagaggagaagacgtcgatacgaaaacaccgtcgatataacttggcggcgaagaaagagcacgaaggttttctcgctcgctatctgacttctctttga

SEQ ID NO: 189193 - DNA, 1196 bp, Arabidopsis thaliana landsberg
  unsure (1)..(1196): unsure at all n locations
atgtttggatatggaggtccttatgcttgtatgtatttgggaaggtgagaattcattgtctgcttaccgattaatgttgatgtcaaccaatgattatctgccgtccttggtgcgtttaactctcttctatgattaggcgtactttggtgtcttcaaagacgaaacagtctaagaaagtattcaccttacaactcaatcgagaagctttgattgacaatcgttctatcttaggacaaaactggaaggtaataatttattcatcttcctttattgctcgtcatagtctatgtcattaaatggtagatataaaaaaattgaaaggctgatggtggaatgagggatcctctggtggaggaagtcaagttatcagctcatggaagcttcacaaaggtacaaaccatgatttatgttgctaccttcttggggacaaatgttcnnnnnnnnnnnnnnnnnnnnnnntgtcttgagtttatcactttaaacaaaattattctccatgtttgtttattcatctccttcagtgataccttttgattgaatcattatgctctatagataagactgtgcataaattaaagtctttggtgctgttctaaagtcctataaccatctgtccactttctcctgcgtggccttaatatatgttcctttatgttaatgaaacaacgagttataatatgcatttgcttatttgaaactgctattctgtttatttccaggttgagatatttgaatcagaatgtaagatcccagaaatatatcaacttcagtgcagacttaaggatatatattttccttacatccaggttttcattggctaatattaatacaacatgtggtgatccctttattttggtcttcctttgccggaggtttcatttttctttgtcaacctgtagtgtgatgaaatctctaaaactgggaggactgtaaggcctgtaaagtttcaggtttgttattatttccaaaggtgtttgaggtttgatagtatcattctaataaaaattattcttagtgctcttagttttaatcttttcttatgtccttgctcttgttttttttcatatacattatccaggtcaatggagaggatttagctgagataacaggtggagaggttgccactaccaacctaaactccaagggtcgagaattttggtttcagattcgattcgttcagagtgaaataaaaaaag

SEQ ID NO: 189194 - DNA, 261 bp, Arabidopsis thaliana landsberg
atggactgcatctttggcgtgaccttacagatggtgccggtgctttgcacgtcagcggcggttcttgattatgatacagcccttgctggtacttccctcaacccataagaaaacggactatatttcgatcatgtagctgacgcccaaacgttacaaaagggcgaattgacgaagattgtgccggcagttacgtgtctgcgagagatgacgaatcgagtgaggagcatcgatggcaaagaccatttgtcacaccgggtctag

SEQ ID NO: 189195 - DNA, 518 bp, Arabidopsis thaliana landsberg
atgcatccaacttcaaaagaggaaattaattttacttactgtaaacttttattgatagagatcttcgtcatgcatgcaacttttaaaagtaagatttttgtcatgcatcgaacttttaatacaaatattttctccataacatttattcattgtataaatacacaatgtacccccttacaatccatacgttttcgaattatacattaaaacattcaaaagaacaaaagaaaaaactcttcggaaacaagaagttatccatatcaaagcatggcttctagtatgtttttatctttgctgtgatatattgttcatgcttcttccattcttttcaaagttgttggactattttctctcaaatatttattacgtcactgattaatgaatctgcgtatgttgaaatttttacagctagtagaaatgttattaaatttgaagacgttctatcttttggacccataggaactcataaggccactatagtctggctgcatgatatcggcgagacaagcgcaaagtaa

SEQ ID NO: 189196 - DNA, 801 bp, Arabidopsis thaliana landsberg
aaaatggtccaggaatctaatcggacggtagatatatcacactagagaacttcctcgagattaacagctttacgataaaaagctgagcttcagaatcagagtggcagatttagttaacggtcgttaaatacgactacgggcatatgcttcgactgtcagttacttttcatttttcaccaattttgccccttccgcatactccatgcatgcatgaggattgggaaagtggttgtctgatttgcacattccgatgatggattcacatgatataggctagtttttggcctccaaagtttttgctgttgtccttcaacaaaaagaaaaaaaaaatgttttattgtcgcagatatttaattacaagatttacctaattacgcatttgttatgtatacatgcgaacaaactcattcttacgcgcgtgtcgatactaactatgtgccatgcctactcgactccattatatatatgggcatatcctgatctacgtatagataataattaaatgaatcctgtggaggtgaacataacacacaatgttgatagaatttgtcatcaacaggtggatagtcgcatggacaaacatagagaggttttggaaggggcactttgctccccatggttttctcgaacttaccaagaaaaataaaagacttttaaggttcacctgttttctttagaaggatctttaataagtatttgaaaatgttactaatctaaattaatgtgcaattacagacaaacaaacaaaaaacgaagagaagcgaaattaaaataggagaccagtacgagcggaaacgatga

SEQ ID NO: 189197 - DNA, 435 bp, Arabidopsis thaliana landsberg
gctgacgatggtggcagtcgtcatttcgatggcggccatgctggcctccgaattcatggcctatcttgccggccggaggatcgatccggaatgacgctgaccgtcgaagccagacatcgcctcgggtccttccgcctcgacggcgccttcacgtccgaaaacggcgtcaccgccttgttcggccgctccggctcgggcaagacctcgatgatccgcatcatcgccggattgacccggcccgaagacggcaaggtgctgctcgacggtgagccgctgaccgataccgcaaagggcatttttgtcccccgccatcgccgccgcttcggctacgttttccaggaagcgcggctctttccgcacctgagcgttcgcagcaaaaagacaaacggccggtggttcgcgccgaagacaggcggggccggtgatttcgaccgg

SEQ ID NO: 189198 - DNA, 500 bp, Arabidopsis thaliana landsberg
atggtgatatatctagaaaggacgagtcaaaagcctatggataatgtttacctacaatacgagattctgatagctatatctaggcgagaacgtttgaaacttttgagtgatgatattaagaagttgcttttggatgtgaagcagaaattattggttcctgtatagatagattatattacaataatttagtgtatggtttctgtagcctgggttctaaaagatatgctccacattgaagtcataagaacttgaggtacaagagttgttgtcttgactttccttgttcttagatcctggaaccatgtgtttgttttaccttttagattgatgagaaaagctcaaagaagaagaagcagaagaagaataagaagaagatagggttagataaatttttgattgagattattcaacaagatgctctggtgatggtattgcatgcacacgcccatccctctcggatagccggtgctttcaagtctttgttggtctttgtaggataa

SEQ ID NO: 189199 - DNA, 171 bp, Arabidopsis thaliana landsberg
atggatgagttcacatcaggtttgtaatctgttcaccggagatgtcacatctcactgttggtatatgcagttgtgtctgacaataaggtaatggatatgattctgattacatgcatcgacacggcaaagatttccatggtaacggatccaatggaaaacaaaaagtattag

SEQ ID NO: 189200 - DNA, 331 bp, Arabidopsis thaliana landsberg
atgaagagctcggagctgaagacgcgggtgaacatcgagagtgctcttaatgaaagtattcttctcttcgacatcatagagaacagaaacgtgtttggaagtaaaagagacctgaggctgtgaaatctcgcgctgggaattgttctgaaacgagagtttaagcttggcaaggttatcgaagagcttacaagacactttgtttaagaaaaggagactatcgctgtcgaattcagatgtcacacggagttttggtcggttagcagtcttgagaaaggacaaggtagagcaaggcggtcgagacggtggcgataattccgaggttccagattga

SEQ ID NO: 189201 - DNA, 164 bp, Arabidopsis thaliana landsberg
atggcttctgttgttctgatgttagatggacatactattgctctttcagaaccatcaaaacctgcatttttctcacacagcaatgcggtatcagatagttcttcttctttaggacataatgcaaaaacttcaaactataattccaacactgagttgtatcctcg

SEQ ID NO: 189202 - DNA, 801 bp, Arabidopsis thaliana landsberg
atggcggaagttgaggttaaaaggggaaaactttggacgacaactggaatcattcgtagtggaaagacatattgcttcatagaagaggctctgtatgtggcaaactaaatattttacaagttttttagatcagtctttaccaaagatctgatgaaagtctcttcctttttcgtttattcttcttccctttgcaggtatttgagtgaaattggagagttacagatcttaggtaatgaggatgacatagtgatcccattgaaggacttgtatgagaaaattgcagaggagaaaagcggttgctcttgggaaaactacgaggtttatagatacttgaagggtctaggttacatcctaggtaggcatggagtttcttggacgttaaaggatgctgcaagaccgaatggtgaagaagagtcagcttgtgctggtgaatgtcctgcagacaatgatactgtaactaaactcttgggagatatgcagatttgtgatgcaaaagcggtgtttgacgtgtatctaccaaacagccggttcaagaagtcttctcctggtgaaccaagctttgtggcttgcttctcggggtaagcgtttttgttagtttgaagttcgactatgaatgcaagtttttcactatgcgtcttactaaatatactcatattctttaacagggactctccaccaagcaaagaagatattaaagtcctgcaaaagcgcatagctgcaccattaacattctgtcatatcgctcagggccgtgccagtttcttttccttcagttctatagacctccctgtcttatcataa

SEQ ID NO: 189203 - DNA, 160 bp, Arabidopsis thaliana landsberg
atggaaagtctcgcacacattcctcccggttatcgattccatccgaccgatgaagaactcgttgactattatctcaagaacaaagttgcattcccgggaatgcaagttgatgttatcaaagatgttgatctctacaaaatcgagccatgggacatccaag

SEQ ID NO: 189204 - DNA, 306 bp, Arabidopsis thaliana landsberg
aagagcggtttgaacagtagcagcacttcttcaaagagcaaaaaggaaggctctgaaaatgttaggataaagaaagcatctgataaagagattgccttggattctgcttctatgtcgtctgctcaggaggatcatcaggaggagattctcaaggttgagagtgatcatttacaagtttctgatcatgatatagaagaaccaaaatatgagaaagaagagaaagaggtgcaagaaaaggttgtgcaagccaatgaatcaattaaagagaaggctgagagtagtggaccaacaccggttgcttctccg

SEQ ID NO: 189205 - DNA, 453 bp, Arabidopsis thaliana landsberg
atgggtgctctagcagaacttgtagctctcattatcgttatgtgtgcaagtgtaacaatgtccctcgctcaaaaccccatggcttcaccaccaagtgttgagaacccaaatacaacagtggtgatacataacgctctttcaggttattggccaatggcataccattgtgcatcaaaagacgttgattttggactccgacgtatgctagctggtggatcgtgatcatttgaatttacacccagtgtttctggagatactaaattcatttgcacttttgcttggagactagtgtttcgttatttccgtatatacatacaagaaagagaccaagaatctgcaatgtttggatgcaaaagatgcgaatggaagatacgtgaagaaggaccttgcaaactgaacaaaaagactggaatgtttgatctttgtcctccttgggattctcaaaatatttga

SEQ ID NO: 189206 - DNA, 186 bp, Arabidopsis thaliana landsberg
atgggtgagaagaaggcagctggtttggttccaaagagaagaattaagatcccgcattttgacaattcagctctgattgcgggatattcgaagactctctttggtcggtgtatgaatcctcggaagcaggagatgaagacattgttgtttatgcttccacgcatctggcagattgaagggaaggtg

SEQ ID NO: 189207 - DNA, 100 bp, Arabidopsis thaliana landsberg
atgtaccaatgttgttcatggccaacccatcaatgacatatgcctcctcctattacgaggaaagatgatatttcgaatccaagtaaccaagactttataa

SEQ ID NO: 189208 - DNA, 105 bp, Arabidopsis thaliana landsberg
gcttatcaagtcaacagggaacgggggtttatctataaacgttttggtgaaacaggccatggagttgccataggattattgaagttgacagatgggtccgagtaa

SEQ ID NO: 189209 - DNA, 340 bp, Arabidopsis thaliana landsberg
atgaaacagagttcatcagatcaagagctcacttggggttcatccaacgagtcccagcacaccttagatgaaacagaatcagcaacactcgattgggagctcgagtacataaccgagatcctcaactctgggcagctcatgtttcaagacttcgcctcagggacaaccactaatgaatcattactaccctccagcctctttgatgaaatggaacgctctcgaggagctgcaacgtcaatgaagacagaaagaaaggcgcttttcgactgtgtgaatcagtgcttagcggtgaaatttgaaaggatgttaattggaagctgcaaagggatgatgatgtcag

SEQ ID NO: 189210 - DNA, 977 bp, Arabidopsis thaliana landsberg
agaaagagtcagagtctcaaaaccgattgatcttgaggatcaacaagattttgaagacttggaggaacttcttacagttgaacaaactgttcgaagtgatacaccaaaagggtttctttcttttgatgctattatctccattgagcagtttagtaggtgagctaatttaaacaacaggatcattgaatcatcttcactttgtggttgttgttaaagtattcatttttctttgaccctttataagcaggatgaatggaatcactgggaagaaaatgcaggatatatttgaaactcttgtttctccagctttatctactgatgcccggtacttggtggagtattgctgtttcaggtttttatcgagggatagctcggagtttcatccgtgtctcaaggtatctggaaactgggttgctttacacttattgtttcagaaacggagagtattgtttattggtttctgaagcattgaaaattatctcttcataggaacctgcattccagagacttatattcatcacaatgctcgcgtgggcgaatccatattgtaaagaaagaaatgcacgcaatgatgcctcaggaaaaccttcttttcaggtatttcttagaccgttcatctcgtctgtctggcttatatgaagacaaaagttctttattctcgaattgaatcttattgttgctctgaaggttgatagtggtagtagtataaacaaacaaagtttgtgatattagattgtattctgctctttgggaaactatgattgatatgctggggtagcagatcaatactgatgaaggttattgatgttgaagggacggtttgttggggaagaggcatttgttcgtattgctccagctatttcaggtttggctgatagggctactgtacataaccttttcaaggctctagctactgccactgatcagaaaggcatttctttggagatttggcttgcttacatccaggaacttgtcaa

SEQ ID NO: 189211 - DNA, 522 bp, Arabidopsis thaliana landsberg
atggcttttgagctgtatgggatgttggctgggagtgttagtccaatgacaggggagcatgtaaaaccggcatatggtggtgaaggcgaagctttcctgcaaaaagtagtgactcctatatacaagacaatagcaaaggttggttgcttcagtttttcagtcttgatcattttgtcttctttagttttcctctgaaccaattccttcattttttcatcttcatatctgtgcactataggaagcaaagagaagtagaggaggaaaatcaaagcattctgagtggagaaactatgacgacttgaatgaatatttttggtacaattcattgatcatcttgtaacagactggaaatacacgtcttttacatttcttcatgatgattctccatgtattttaactggtaggtcaattcggtgctttcggttagggtggcctatgcgagctgatgctgatttcttttgtcagacagcggaagaacttcgacttgacagaagtgaggtatgggtagaagaaactaattga

SEQ ID NO: 189212 - DNA, 45 bp, Arabidopsis thaliana landsberg
atgaacaaggacaagggagagacacagagggaaagacaaccagtg

SEQ ID NO: 189213 - DNA, 284 bp, Arabidopsis thaliana landsberg
caacaagctcattactttgcttgtctctcatcaatctcgcaactccaaaattaccggagccaatatccttgacgagttcatacctatcactatcgtgcataatcggcaaatccattggaccactcactgctggtcgatccattttctccccctctttcctctgtctctttgcgacttcaatttctgtgtcaagaagatttcttttttgggagacaatatctaacgacaccaagacatcagaggaaatgaacaacggtgtgacgtggatgaatttgagcctttaa

SEQ ID NO: 189214 - DNA, 72 bp, Arabidopsis thaliana landsberg
atgggcgcatgtcccatcttcgtgtccgtgcgatccatctgcggcgtggatcaacccgagtattccggtccg

SEQ ID NO: 189215 - DNA, 60 bp, Arabidopsis thaliana landsberg
gtttcataagcatcgattgtggaattccaagtggatcatcgtacaaagacgacacaacag

SEQ ID NO: 189216 - DNA, 236 bp, Arabidopsis thaliana landsberg
atgcacaaaattaaggaggaaaatagtgtaggcaatttggaagtgcatgaattgtgagtacattctccacttctggctgtcatgaccacgaaaatattattcaaaccttggtttcttatattataatacaacatttggttatatgtatgattaaaatactaaatcaacatataacactcacaatctcagcatgattcttctcttcttccttcgtttcctctagcttttacagataa

SEQ ID NO: 189217 - DNA, 354 bp, Arabidopsis thaliana landsberg
gtcaaaaggcacttctttcatcagatccctgttggtcatcggcgtcgtaaaagaagccctgtagctgccgatcaccttatgcgatttcgcaagcagtatccttacagcattcttggaaaccccagttttgatctcagtattgtgtacatcgttgtcaaatacactgatcttcagcgaagccggcagtttaaataccggcgaaaccagcacgccggtcggcggataccagttcacctcgctccacatcagtttaacccgcggcagctcacccagaatagcccggtctatcatggtccatgggttttccgggtcaccggtttccagcaaaggccggttgctccattcttccgctga

SEQ ID NO: 189218 - DNA, 388 bp, Arabidopsis thaliana landsberg
atggctcgaggtagaataagatcgaagctgcgactaagccttctttatacatttggatgtcttaggccagctacgcttgaaggtcaagattctcaaccaatccaaggtccgggtttcagccggactgtgttctgtaatcagcctcatatgcacaagaagaaacctttgagatatcgttctaattatgtctctacgacgaggtacaatttgatcactttctttcctaagtcgttgtacgagcagttccaccgtgctgcgaatctctacttcttggtagctgcgattctctcggtgtttcctctatcaccattcaacaagtggagcatgattgctcctttggtctttgttgttgggcttagtatgttaaaagaggctctagaagattggc

SEQ ID NO: 189219 - DNA, 8 bp, Arabidopsis thaliana landsberg
atggacgg

SEQ ID NO: 189220 - DNA, 145 bp, Arabidopsis thaliana landsberg
caccacttgagctcacaccttgaaacccggcattacccattggttcttatagtctacttcagtgttaacaatatcgattatgactattattacgtaaacctgcgtacggtccaagttcaggcccataaacttaaggactgtttct

SEQ ID NO: 189221 - DNA, 411 bp, Arabidopsis thaliana landsberg
ggcccactgagaggcgtcaccaccagcgccgccagcaccaccatcgccacccgcggtgaccgcggtaccgccagcgccgccagcaccaccgtgactgaaccaggcgaaggggccggcggcaccaccggcgccaccggcaccaccgtcatagccggagccaccatccccgccgtcaccaccgaacaggccgccctgcccgcccgagccgccgtcgtcaatgccgcccgtaccgtccgagtcccagcccgcgccgccgctgccgtagatccacccaccggcgccaccgtcggggtgggcggccgtgccgtcagttccgtcaccgaacggcatcagccaattgacgtcaccccagttgaaggaaccgtccgcctcgcccggcagatcgagcgaggccgcgccgatgccgcttag

SEQ ID NO: 189222 - DNA, 168 bp, Arabidopsis thaliana landsberg
taaactcgatttcatcatcttctgctcacaacacttactgttgttgttgttgttgttgttattgttcttctcgattcactcgatcgatgttgttcaaaatgcgttcttttgtggcttttgtgctccttctgagctggttcggttcgtgttgttctctcaaggaccaag

SEQ ID NO: 189223 - DNA, 136 bp, Arabidopsis thaliana landsberg
atgagttttgaacgagccagtcaacaagagactataaaatccagcaatggtcaacaaagcaaaagtggccgtactctcttggaaaaaaagataagcaacaataatagagagtacgagacggtgcaccgcaacacag

SEQ ID NO: 189224 - DNA, 48 bp, Arabidopsis thaliana landsberg
atgtcgtacggccattggtgtttccagtgccgttctgttatgcactgt

SEQ ID NO: 189225 - DNA, 507 bp, Arabidopsis thaliana landsberg
atggataacgaggtacgtaacttcaggatatggtgtcgagctccttcctcaagctaaattgggttatttgtaatttattatgaagttggtgaagaaacaaattttgtttgtcaattaggtgatttgcatatgcttgaacttgagaggcgttttctgctcctgacatgtgtatttctctctacagatttccaaagcagagtttgatcttgtggaaactgtccaagaaaatgcaaacctccgctcacaaattgttcaatcaccggacaaattgcaggtatatttttattccaactagtactagtcctaagataaacttttggtatacactagtataaacgtttgttgtggagacagggagctttagaagagaagaaactagtacttggggaaacaaagaaagctgaacaatcagcaatggtaactttccaggaaaaggctgccattcttgaggtttttgaaaaggtatctaatgaaaactctagattgttactaaatcctgtcgcttag

SEQ ID NO: 189226 - DNA, 322 bp, Arabidopsis thaliana landsberg
atgtcgtatcagaacgattatgctcatcaatcttattggtataatactgatggtgatggtaatgggatgcttaataatggtttcttgaatgatgttccttcttcttcaagagaccgtgtctcagattactacactaatcgttttgggtatgaaggttacaactattggaggggtaatgaaggttttgactataatcaatgtcaggcctcgttctctgcctttgctaaagacaaagaaatgagtgagaggttggggatgagcatctttcagggtactaaagagacagttgatgcgatttacaacggtctcattggcgatattt

SEQ ID NO: 189227 - DNA, 376 bp, Arabidopsis thaliana landsberg
atgcttgtcaattcggctaccagtaatatctggattgatggtggtacattgaacatgtttggtggtattgccttttccaacacctcgcagttcacaatgagttctggtgattttaacatctacccgcagggatttgattatctcgcgagtggatccacggtattaaattttgcatccgctaacaccaccaatgcagttacgtttacaggaggaactttaacgatcgttgacccaccttctgccggaactggaaattccctttctcttccaaaccttgctggctacgcgtataacttcgatggcggcacgatcaatttcggttatggtagcagtaataaaaacggccctgcaagtgtgggctttactgttgatggag

SEQ ID NO: 189228 - DNA, 176 bp, Arabidopsis thaliana landsberg
atcatggcttcaaccctgctgcaagcaacaccatgacagtactgctgcagcatgctagtacatcaggcctgcgagaacgtcgtcgtggcactcacccccaaaatgatcgttggtggctccgcaaacatgttttaatttatagcccctcctttgatccaatcctggatccgccactg

SEQ ID NO: 189229 - DNA, 419 bp, Arabidopsis thaliana landsberg
atgtggagattcgatcatagacgtttagcgtccaaaagacgttcaaatggatgtcaaatctacaaattccagagatttgtagactcgaccaagacattggcttgtctgcttattggctttggtagattatttcttaattgcttctgtatacatcttgattgctagcaataacagtagacaggattgacagcccctatagctgcatcgacatgttagtggttaagggtaattgaactgaacacaccacacttcagcacataagtaggcctaaaaaaactacttataagagtataagaagcaaaaccgcaacctgatcttaaatgcctaggtagtgttttccttgttagcagatacaaagccaaagattcatacggactttggctacaccatcaatgctttgagaagcacgaagaagcttg

SEQ ID NO: 189230 - DNA, 830 bp, Arabidopsis thaliana landsberg
atgatcctctgtgatgtgaaggtgagtatctatgatgtatatttgaattgttattctggtttttgctttctattattttccaaagaattttatatggttctctttttagtcagggaaacaaaatcgatgctagaataccttggggcgagtatatgaacaattttaagactaacctatttgaaggaaagtggtattaccttcaacactttcgattgaagagagcaacaacaataccaaagtacacagattttcattatgaaatcgagtttatgtggcacactaaaatgtggcctgtaagtgatagagcagaagaaagttctctcaaattcatccatgctgatgaagtcaatgctgaatctgaggatcatgtagtcggtaatataagtcttaattatatagtatatggtttcttggaattgttattccttagtactaagattttgattaattctgatttattgttctgttattgttagatgctattggagttataacaactgtctcaactatgtcgagttttccatattgctgtcgtgaagtggaaacagactatgaggccagatatgtaatatttaccatcagagataatcagtgagttaacaatcatggatgtataatggtattgaaattcgttaggaacagacatatatgtgtagtatgataaatttgtattttctttggttgtagtgagaggatcataacttgtgttgctagagggagtgcgtgtgagtcttttctgtcaaagttttatcgacttattggtatgaaaagttacaactacgagccaatcactacagtgctccggttctgtagaacctctatgtttaaag

SEQ ID NO: 189231 - DNA, 1223 bp, Arabidopsis thaliana landsberg
atgttgaagacgacgcgctcaagttctcgactactgaaatcgaaacgacctgcggagacacctccgacgccggtccgaaggcttctggacaggaggtgatttggcgtctaaccgatggatagctgcgactgcgatgcattgttaaggaaacagacagagatgagtaatccaaatgcacctgtgacctgctttggtattgtttctgattcccctcctatgtgaaattcaatgcttgttaaattagggaaatttggtaaagctaaacccttggtttctagctttagagtctgatattgtattagagagagtgtttttatgtgtatctttgttatcattttcgatgatttgatctatctagttttctcacaatgttatacacaatcttttaaccattgataagcaaccttcattgagatagagagaggcaaagcacaaagaaaggagatttcagaactcaaaagatttcagttttaagttttccttataatagaaaaggatctattaaccgttgaaattctaaagcttttacatttccttccaaactcattcctctgttttcttattttcctcttttcctaaatcaggtttgtcaaaaaaaaataaaaaaaaatgggttcagtttctctctgaagaaaccaaacgacccaaaacaagataattccataattgtaatggcttcaagtccacccaagaagaccttaaattcacaatcttcttccttaagccggcctccacaagctgtcaagtttggtcgccggacgtccagtggtcgcattgttagcctctcccgtgacgatgacatggacgtctctggtgattactccggccaaaatgattacatcaactacaccgtcctcatgcctccaacacctgacaaccaacctgctggctcctctggctccacctcggagtctaaaggtgatgctaaccgaggtggaggaggaggagacgggcccaagatggggaataagctggagaggagattgtctgtcatgaaatcaaataacaaatcaatgttgttgaggagccagacgggagattttgatcataacaggtggttgtttgaatctaaaggaaaatacggtattggaaacgcgttttggtcagaagaggatgatacctatgatggtggcgttagcaagtccgatttcttagacaagccatggaaacctctcacgaggaaagttcagatcccggccaaaattcttagtccctacaggtga

SEQ ID NO: 189232 - DNA, 503 bp, Arabidopsis thaliana landsberg
atgttggtcgaaaggaacccgctctgtttgctggtgaattctctatcaacagtgaagaagaaatcaaagacacatatctatcattcaacggttggggtaaaggagttgcttttgtcaatgaattcaacattggaagatattggccggtataactctgtcctctcctcctctataaagctcatccccaatgtacagtttctcttacacatgatactttttgcagtctgttggaccacagtgcaacctctatgttcctgcgccacttcttaagcgtggcaaaaacactttggtatgtcaacatgaacatgagatttaacctttttgttagttaggacagaggaatggaaaatctctatacattctcattccatgtaatccattacttagatttgttgaattcttttgcaggtggtattcgagttggaatctccgcatctcgagctttccctggaggcagtggatcaccaagacttcacatgcggttcaaatgtttccaaagttaa

SEQ ID NO: 189233 - DNA, 255 bp, Arabidopsis thaliana landsberg
atgtttcagggactagtaccaatgcgatgcaattgggaagtatacaaaggagatagcacagaatctgataatcttcttttctcagcaagggaaccaaatctattatccttcaaaacatcacttgatgtcactttaccgccggaccaatcttcaacggtcataagtagtgtcgagccagattttcaaacatttggtcgttatatcggctcttctttcaaactcttcgaaccaattcacaatactctacttgctgag

SEQ ID NO: 189234 - DNA, 63 bp, Arabidopsis thaliana landsberg
atgcaagtgaacgaaacgcataaaatgcatgcacgacacttgaagacacacaaaactcgaaaa

SEQ ID NO: 189235 - DNA, 388 bp, Arabidopsis thaliana landsberg
ccctcgaggtcgatcctaactgctctgatgctgaactcaagaaggcataccgcaagttggcattgaagtaccatcccgcagaggtaaatacaaattacaatcttgatgcttctgattcatgacgaattgattagagctagcacttttttagactgtgaactcatcattcttgttgggtggattcttacaaatcactctcactctacacatttgttcattatggttgaccttctcctttttacctattcttcttagactggaggcgctacctctgaaaagttccaagagattagccatgcatatgatatcctttccgacccccagaagcgtcagacctatgaccaattcggtgaagctgaactctcaggcgacggacctggaggaatgg

SEQ ID NO: 189236 - DNA, 72 bp, Arabidopsis thaliana landsberg
atggttgctgtcacagactctgaactctttcatggctctccgatttcaacagatttctccaagaaacgcaag

SEQ ID NO: 189237 - DNA, 1705 bp, Arabidopsis thaliana landsberg
  unsure (1)..(1705): unsure at all n locations
atgcggaatctgaataacttggaaaaatctcgaattacaagttgcagagcaaagcggcgcaacaagagtaaactaggtaagacataaataaaaactgaagcaaaaactggatgtaaaatggatgtcctgggtcaaaaccatcaaaaacctatttatacaaaatgataggagatgggccgggaatccaatcgaccggcccatagaatgataatgggccaaactgggccttgtgatcgggtgaagctccgggccgcttccaaacacttcttcttctcctcttctcttccttatgctcagcttgtctgtttgagtgcggatttgagaagactctgaaggtgtgatcaagtgcttggtctagtgatttgatgggtggtgagtgatgatactcgacaagggggtcgagtaatgtggtagagtgaatggtcaagtggttgtcaagtggtgtgacaaagtgttgcttgccgatgcggtcgagtggtgtcatcgagtaacctggagtgtggttactcgaccatggggtcgagtgattggcaagaacggctccaatgttactcgaccaaagggtcaagtgattggtaagaacggcttcaatgtanaatttcctcaaaattcttttctttacacaatgaattgagtgtcaagattaagctagaagaaaatgagtgaaataaaaagtaaacaaagtaagaagacagaagattgattggttatgaaacgataaaatatagattcaggattagggtattcttagaaaactattggttagtagatctaattatagctaggttattatcgaaccattcttaaattaaaattctaattttggaataacaggtggcgttccgggaaactctcaatacctatagttaaaaataaccaaagaagccgagaaaccttatacttatacatgcattctaatcgagttcgattgttcaccttggtaaataggccgattcttattacacacctgtaaaccaggttcatcaaattatagaaccaaagacagatgcctatggcgggtatatctattgtttggactcaagttctagctacttactctaaaactagcattaagaataatcaaagatgaagaattctacagatagcctagaaagggggcgatctactaacccatatgaacccgtaatgataaaccctaaccctagcaagcaacctactcagacatagagattgaagcaagcagcatattcaagtaagaaagcataaagccatcaataaagaaaagagttaaaaaggatctcttcactgtattgaaaactgaatgaatctgtgaaaacaagggatgcatagcttatgtctctcagggaaaacttggtagaaaagaacttagatctcaacaatgacctctaaaactatatatatgacctaaaaacgtccagggactaacagtgcaaatagggaagtcttatggggcaaatttaaacttctgtaaacttttaagcgtcagggacatctccgggccgaaactagtgtcgatcgacactcttgattggatttgaaagtgaaatcgtctttcgcttttgctctaaaatgtatcctcatctccattgttattcctcttcatagaatacctaaaaagactctaaaaagactctagaaataataaaaagactcaaaatcctatatcgaaaacataggtaaaaaacagggttatatcaactaccggaagctcaaccatgactag

SEQ ID NO: 189238 - DNA, 105 bp, Arabidopsis thaliana landsberg
aaagaagaaataacatggatgattggtgcagatgcatctgcaaaagctgttgttttcagccgttacgaaaggtttttggagctgataggcaggctacttaccaag

SEQ ID NO: 189239 - DNA, 75 bp, Arabidopsis thaliana landsberg
aatagagatgaacgatgttgggcagaaaagctgctggttggaacttggttcaacgaaatcttcaatttagaatga

SEQ ID NO: 189240 - DNA, 447 bp, Arabidopsis thaliana landsberg
atgctgcctaaagccaagaaggagaaggcacagagagtagacatagctgaatacatccgcaccattactcctggtcagaccactgagaagcttctagatccaggtagctttattcttgattgctctatctccacaggcagattcagctgctctttgtgtgatctgggatcaagcatcaacctcgtgcccaagtatgttgctgagagactaggcatgactcactacaggctaactagcatcactcttctcttcgcggatcgttccaagcgaatccctgaaggaatccttgaagatgttcatgttaaggttggtaactccataatccctgctgatttcgtggtcctggactatgagaaggaacccaaggatccccttatccttggaagagcattcctaactacaactggtgctaggtttgatgtgaagagagggagaatctctctcaag

SEQ ID NO: 189241 - DNA, 206 bp, Arabidopsis thaliana landsberg
gaaagccacctgtttctcgtggtaaacggcgtcgatcgcatccgtgcctttgcgctggccgtcaatgactacgcggaaggggcgttggccgcgtggcatcgccagcacatcgacagcggcttgaccgaccgccgagatatccaacgcccctccgctggccgcatcgatcgcattgagccgatcacccaagttcgtgattcgatcag

SEQ ID NO: 189242 - DNA, 1188 bp, Arabidopsis thaliana landsberg
atggagttgataagacaaggtgcaatgcgcaccgtactaaactcgcttttagcagcaatggtttggccggcaacaatccttgtagctgctgattttatagatagtagatggagtattgctattgacaggtaaaatgaaaatatttgatgaaactgaaatgccaaatgtgatgaaaccagtactgcaagtaagtttatgtgctattattttcgtattatcttatttcaggtcagacaaagcagggaagcttcttgctgaagcgcttcgaaaagggttgcaaggaaataggtataattattggataaattccatcatatatctttatgatagaaagttatgcaattagtattttacatcagcatgttgattctcttacattggaaaatttgtgagaaattcagacctgtgactctggttggtttttcgcttggtgcacgtgttgtctttaagtgcctccagactctggcagagactgaaaagaatggtatttctccactcaatatttatctttgctttagaattgacaattgattcttgtctttaacacatttttcacggtagctgaaattgtggaaagagttgttcttcttggagcaccaatttcaatcaagaatgagaattggcgagacgtaagaaaggtaataaaccttcttgatgagagttccctaccattaacaatagttggtgtcacagtctaggaaacagatccgtcttttggtgttctgtatcatcttatacgagtttttttatgggttaccagatggtggctggaagattcattaatgtttacgccacaaatgactggaccctcggagttgcatttcgtgcaaggtatgttgaattgtgttcttcgatcccccctttcacctgcaaatccaaactcttttttccttattaaattctgcagtctgttgtcccaaggattagctggaatccaaccggtctgtataccggggattgaagatgtaagtcatctcatttactctcatcttcaattcgtaggaagtgaaaatgatagaaacaatcagagtaatcatcatcacatttgtaggtagatgtaacggatatggtggaaggtcactcatcttacctatggaaaactcaacaaatcctggaaagactcgaactcgacaattcttaccctgttttacgaaacactctctaactaaacccaacatttattactag

SEQ ID NO: 189243 - DNA, 1775 bp, Arabidopsis thaliana landsberg
atgaaattaagtagaactgtcttgtcttgtttgccgtctctgctaaaaccctactcgagcttgagctggacaacgaaaatagcgacgatagctacaaactttgaaggtatgaaaacagtagatgaagctgacgtgggcatctcctgttttatctcccagctccctggcttccgtggaatcctcaaacaaaggtcgtgagatcagtttacgtttttatgcttcttcttatacacaaacgttcttgttccatataggagaaaaattgaaactttttttctgtatttatgtttcgtagatacgcagactttattgttaatgaagtagatatggatggtaatgtggttcatttgacatccttggacttgcctcctgagatggtttgtctctctcctcatttcaataagctatgttttgtttcgattgtatcttttagttttgtttgtgccaatgcgttgttgtgtgttgttcaggctgtgaaggaggaggataaagcgaaaagttgtgataatgtaccccaaaattatacttctgcagttgagtctttcaaatctatttccagtgttactgatgcagagcgtttggaaatattgatcaatcaagtcacctcaggaactgatggtgaagtcttaccagttgttcttgatccaagttctgacaaatccaagagaacggtataggttttgattgcagagttacatatactgttgtcgacattagcttttgacttcttactagattttctttttcgtatactactatccaggctatccacaactttgttaaagagaatttcaagttcctagtgactgacactgtcgacggtcctgattctacttcaaaatgcatccgtgtgcgagtgaattcaggagccaataacaacagaggtaatagatcaaaaaaacgaaaggaaagaggcgataagccttttgatagcagaggttcagagcattggccagagcatgttggcaagtttctcaggtaatatctttaaatcaacatttatttgacattaaagttactatatattggacctagtacattagtctatcctgaaaaatggatacctgaactggatttcccactttagagatgtagattagcgtcttaaaattactgatacaataaaacgaaagggtgtattttatacatcataatctctgtagtgcttttattttattaatgcatttggacgttcaacctatgtgtcatttgatttatgagtcgtttaagttaataggttccatctttacaaggagaacaaagatacacaagaggccttgggattgattggaaagatgctaggcgttcaggtgtttcccatcttcttctatccatctataaaggggctgttttatctctagccattgtactttccttgataaactgtgtattgaaatggtttttgaattaacagccaaagtcattcgtattctctggaacaaaagataagcggtctgtttctactcagcgtgtaagttatctgtacgtgttttctttgtaagatgagtttaatggttgcaatacataataagagaattgggctttttaggtaactgtgttcaaacagcaagctagcaaattggctgcgcttaacaagagattgtttgggatcaaagttggtgacttctggtaagccaacatattcttgaatgttttcatttggacatatttatgtggtcttagtgttaatgatgattgttgccgttttccagcaatgtcaaagagggccttctccttggccagctcatgggaaacagattaaaaatcacaataag

SEQ ID NO: 189244 - DNA, 523 bp, Arabidopsis thaliana landsberg
actcgtccacccgacggtaccagggcacagggctgggactttccatctgcaagagtctggcggaattgatggacggagcggtcgggtttcacgccaacccagaccgatcaggaagtgtgttttggatctccgccaaactggcgcgcgtcgaccgaccaccgctcaaactaccgagaagcatgaaaccgacagttccggaattgcccaccgtcgacacctccgccctgcttcaaaaagttgcgctaaagaaacacatcctgttggtggaagacaacaaggtcaatcaaacaatcatgctcaagcttctggcgactctcgggtttcagagagtagatgccgcctgggatggcgcggaggctgtgcgcatggtgaagcaaaagcctttggcgtatcacatgattctgatggatattaatatgccggtgatggatggtctgatggcgaccgaactgattcgacagatgagagttgatgtgcccatcattgcgttgaccgggaatgctttgaaaggcgatgcccagac

SEQ ID NO: 189245 - DNA, 170 bp, Arabidopsis thaliana landsberg
atggtaagctttggcatattctcatctagaatcttacgaagctcggagagaaaccgatgccagttgtcatcgttctcttcgttaacaatagcgaatgccaaaggaaacacagctccatctccatcaaatccagtggcaagcagcaacgtccctggatatttgctctttaa

SEQ ID NO: 189246 - DNA, 100 bp, Arabidopsis thaliana landsberg
atgctcggagaaagcgccttcccgccaatcggtcaactgccgttcctgctgaccttgccaccctacacctactactggatcctgctggccatccacgacc

SEQ ID NO: 189247 - DNA, 163 bp, Arabidopsis thaliana landsberg
ctacatatcagttgctgtttcggtgttgcatcgaagatggatcaaagatgggccacgattcgtcaagaacaaaacaaattttccaaaaatagtatccgacacgttacttggtgtggacaccacccaaaaaacaattctaatcttaaatctcaaacatggataa

SEQ ID NO: 189248 - DNA, 405 bp, Arabidopsis thaliana landsberg
atgatcttctcaacagtaagtgtttgcgcatgaactgtgatgccggcaaataaacatagcagcaagtgtagtagtcttggtttcatcaagtgaagtttttagataggctgggaaagatacgaaaatgtagacggttaatgggctgtagtccatagaccatagtcgatggtccatggcaagaactgttatctattataatagagtagaacagaataatactactctcctcatcgtgctatggactatggaccatcgactatagaccagaattactacttataataattattcctctcgatttcctcccgcactgtatcctgtacaaggtagcggatggatttgccctgtttgatctggttacggatctgcgccgcagacatagcaagcagcggggcatcaagaaag

SEQ ID NO: 189249 - DNA, 57 bp, Arabidopsis thaliana landsberg
tggtttggattagacagagagcttaagagacttgtcgttgaaaccacagccaaccag

SEQ ID NO: 189250 - DNA, 114 bp, Arabidopsis thaliana landsberg
ccagatgaacaacaacaagcagtagcagataatttggttaagatgcttgaccttgcaccttctgcggaagagaaagtactaaagcctgatcttactcctaacccggttttgcag

SEQ ID NO: 189251 - DNA, 1066 bp, Arabidopsis thaliana landsberg
  unsure (1)..(1066): unsure at all n locations
atgaaagagaagctttctgagctcaagggtggcgtatctgatctgagattttgtattaccatgtgtcaagagcatgacaaatacactgaggcagagaattcactaagttctccagcccactgtagtgaaggacaggtgggctaaaactttttttatattaacgatcatgccttgttatgtatagtaatgttttagtcctttactgaaaaaaattccatacaggaacctggaaggaatgtagttgtctcctcttgcatagagaagactccaaacaacaatcatacagagtccatgagattgagcagtaaggtgtctagtgagagaggtaaagtgataatactgctaaagcaagaaatggaatctgcacttgcaagcttgaaggaggttcaagttgaaatggccaatctcaagggtgagaaggaagagctaaaggcatctgagaaaagaagcttaagcaacttgaacgatcttgctgcacagatttgcaaccttaatactgtgatgagtaatatggaagaacaatatgagcacaagatggaagtcacagatcataaacttaaggcaagtaactcgttattcttgtccctttcaaattactggatttaaaattatgatacgttattaaaaatcactagattaactgcacaaaactgagatggctcgcatactttgtacatttgctatcttcattacatcttttatgggagggagggtttcacctattctttacatctctctcagatgctataaattttctctctttttttttctgaaattattatgctattttacagactttggagcatgaaatagctaagatgaagatagaggctgaccaagaatatgtagaaaacttgtgtattcttaaaaaatttgaggaggcnnnnnnnnnnnnnnnnnnnnnnnatatcacagtcaatgagctcgtaatagcgaacgaaaagatgagatttgacctggagaagcagaagaaaagaggaatcagcttggttggagagaaaaaagccttagttgaaaagctgcaggagctggaatccataaatgtcaaagaaaatgagaaacttgc

SEQ ID NO: 189252 - DNA, 723 bp, Arabidopsis thaliana landsberg
ctccaggagagcatacagagatcaagacgtccaatacaaggacggattcagaggaatgaaaagcttgactctttaaagcgtcctctcagaatctctgacccaaataacaaagccaaacggattctagctatgattaatcattcaggatccaagtattacgaagatttagctgaaggaaatgaaaaccaaatcagaagacgaaaaggcgaatttttcataacactcgaaagccctatactatcagacgagcatatctcaaagggtaaaacttaccaacaaaagactaaaacttcaaatccaatgggcaactcaaatcaaaacccagaaagtttcaaccaagtagactctctcgacttgcacgaatcccaacgatcagaaaattggagaaacccagtagacaaagagatcattaaactctacagcagcattttacttggtaacaaatatactaaagcagacgaccaatgtaggcagaactataagtctatttgtagccaatatttatatttgagtcaaaggttagggactagttcgtacgttgacaagaggcgtttagagtagtttttagacccaattaagtcaataggaccgttcttgccttccataatttcggcgtaccatttaagttacttaacgatgcgttcgattttgtcactctcaaggtgtttcgatgcaagatgttttgaggttcgcatcttattgtcacgggaaagcattacatga

SEQ ID NO: 189253 - DNA, 488 bp, Arabidopsis thaliana landsberg
ctctcgataaccgctggcgtcaatccggcacttgacgtgaacgatgttgtagcggttaggcgtcgcaggtccgggattgatgaccgctacgccgttgacgcgctgtcgatcccgctcaaggcggcaggtacgtcttctctgactctcaggaataagaggacggtatgacgactccagtagacccggcaagcatgggatcgtcggcagcccccgtacaggtccccgcagcttcgccaacggatgatgaaatccgagacctagcggcgcagttgatggctatggctacgcctgacttcactccctctgctctactaaagggagttgtggatagctctgactttaccgtgagtccgtctcttgccactatcacgctgatgggtagtaccactcagatagccggtgtgctcatcgcggacaacgtaacgtgcgtagctggcgatgtggtcaacgtgaccatgcagggcaacaagctacagatcaccgggcgc

SEQ ID NO: 189254 - DNA, 327 bp, Arabidopsis thaliana landsberg
atgcaaaaaccaaagcatgcatataaaacgggtaaactctatgtccaggtagctaattctaggttgcaagatgatagacctttactcaaaaacgttagccatactcgtcagaatgcaacctaacaacttgctttaatctattcaagcattctcatcaaccaattcctttaacattcattaagcacgaaaagtggatcaagcaatgcaatggttatgaactcacttggtttcgggcttaggctatgagacaaaaatggtccctcttgtgattggtcgagtaacaggggactctcagagaaaagattgagcttcagcagaatgctaaag

SEQ ID NO: 189255 - DNA, 798 bp, Arabidopsis thaliana landsberg
atggcagcagtccttctaagtgttggtgaaggctctaacaaagattcaagcggcattaatgcggatcaaaagctgttttatggaattatcccggtcttggcagcctctgtcctgtcgggtttagcctcttctctgtgtcaatgggcttctcaggtcatccagagtttacatatcatattccaataaaaaatctgtacttcaattcattcgtagcctaaactgtcttaccgtttacaggtcaagaagcattcatcatacttaatgacggttgaaatgtctatcgttggaagcctctgtttattagtaagtactcttaaatctccagatggtgaagcgattaaaaaatatggcttctttcatggttggactgctttaacactggtaataaactatctctttttttatccacaaaacaattcttttgatagcaaaccagtgaattctgatggttggtatgcactgtgactgttgttataggtcccagtaataagcaatgctcttggtgggattcttgttggcctagttacatcacatgccggtggtgtaagaaaggtaaaacaaaaaaaaaaactcccagactgatattacacaatcaaaagctgaaatatgtaatgtcgttatatcactttgcagggatttgtgattgtgtcggcattacttgtgacggcgctacttcaatttgcgtttgaaggaaaaccgccatcatcgtattgcctagttgctcttcctcttgtgatgagtagtatcacaatgtaccagaaatacccatacattgacaagaagaagaagaaggtgtaa

SEQ ID NO: 189256 - DNA, 244 bp, Arabidopsis thaliana landsberg
tctccgtcagacacatcccgatcgtcgatctcctgtacagctcaaacgtcgccattctctacttccccaacgatctgttgattcaaattcgagcaacaaatcgtcgaatcaaaattcgcaactaattacaaatcgggaatctgaaagtttcgacgccaaaaaaaaggtgctagatgaatctaagacctcaataagagatgaatacgggatgaagaaccggtttaccgatctccggcgacgttag

SEQ ID NO: 189257 - DNA, 129 bp, Arabidopsis thaliana landsberg
caatttgaagatgaaaagtttcaaaatttgccggaaaccttatttgaattaaaacacttggaaacatataaaaatcaaccccagattgggaaacgcttgtcggagcaatgtcggtcccatgacaaatga

SEQ ID NO: 189258 - DNA, 136 bp, Arabidopsis thaliana landsberg
atgactgcgaaaaatgaactggtggtgtctcatagcttcaaagttggagaagttggcaggattttgctaactgttgataacccgacttcgaccaagaaaatgcttatctacaggttcaaggttaagcctttagctt

SEQ ID NO: 189259 - DNA, 747 bp, Arabidopsis thaliana landsberg
atgaaggagagacaatgcgtatgcgattcaagaacgtttgagatcatggtcgaggcgtatgaaaaagaaggtatgaatgataagatctattacttggaacaagagaggcaaaagcttatggatcgcactgttgctacaaaagagatggagaatcttccggcaggatgattgcggtttgtgtgtgaatctctctctctctctctctgcaaggagagatcgatgtctcacttgaaagagtagaataaaagagtttgtaatacacttgattgttcttgcagctatgcgtgttatatattttgatgggcccaaaattatgaatagaggcccatagataaactgtgacgtgcacaagaaatcggacaagtccaaaaagtggataagtgcgtgtcgtctttctataaataatctcttttctctcatcttttaccgtttcttctcgaacaatcaaaaacgaactaaccaaacataaaattgaacacatcctcttcctctgctctctgcaaacaaaaaaacaccgattcggtcaggaatcattcgtcgtgaaatctgtaatggggattgttgtcaagtctttcaaggatcaattctcctctggtttgttcttcgttaatctctttctgattctttggaattttttttccttcgaaatgtgcttctgaagcaaagttttcatctttgtttgaggatatagatgagagattgaaggagtcgaacaacatcattgcgaaatatccagatagaatacct

SEQ ID NO: 189260 - DNA, 508 bp, Arabidopsis thaliana landsberg
  unsure (1)..(508): unsure at all n locations
tcaatgtaaggtgccggttccttcatgcctttacgcatgatttgcgcatttcgagagtgctcgctaaaccgtatgccatccttatgatagagttggaatcacacgaaaaaactgaacttggacagctctgcaaaatatctgacaagcgaacaatacatgttcattgcttgaggtaattcaacaaagattttgcagctgctccattctccatataaacctgctacttactgttaattctcacnnnnnnnnnnnnnnnnnnnnnnnnnnnnnnnnnnnnnnnnnnnnnnnnnncgagaaatcaatatgttccgaaacttcttttcgccgcaaacaagcagtctctctccggaggaaatacttgacctcgcgaataaacgcctagaacttgcccgcaaagaggatgacccttcgaagaggttggagatcatcaacggcgtcaaacgactgttgaaagacgccgaatatattttttcccccaagaaagacaaggatccagctctcagcgagg

SEQ ID NO: 189261 - DNA, 528 bp, Arabidopsis thaliana landsberg
attagttccacaccagttttgattaacccggtaatgcaaacccaagaaaatctgttggggaactatcatgctgctcaaaagttagtaccgcttcctacagagccaagaaacactgcatatcaaggtacgatttctcctggtataccatttgatggttatggcgggtctcaagttccaccatctaaccatgttgttctccccgatggaagtttttatcaacaagtaactatggctgaaagttttcaaagggtaaatgattgtcatatgtgccagacatcttttcctcatatgcattctgatccgattatgcgggagggaaatgatggttctacaatgtatgtgccatatgtgagctcagctttccatgcttctcgtccagatgatatcatgagaatccaacaaacggataattttacgggtcaacaaagcttcctcaatcattcaaatcatcaagaaagagatactttacataacgccaatcttgccactgctcaggtcgagactactgaaccaattgtcaatgagata

SEQ ID NO: 189262 - DNA, 126 bp, Arabidopsis thaliana landsberg
ggatctgctaattatcgggagaaggagggaattaatatcttgtctgtacctcggggtttcctatcgtctctcgagtatgttaagatagaaaggccattgaaaggagaggcgatggagatgaaacta

SEQ ID NO: 189263 - DNA, 62 bp, Arabidopsis thaliana landsberg
tctccggagacgacattgatggaatgaccgagacgaaaacttgtgttgacaaggaaaaataa

SEQ ID NO: 189264 - DNA, 79 bp, Arabidopsis thaliana landsberg
gttggagacacttgatgatggagagaatatttctcaaggaagatttggtgatgatgaagagagatcaacagattcttaa

SEQ ID NO: 189265 - DNA, 68 bp, Arabidopsis thaliana landsberg
atggtgcagaccaacctctccatcgacaagattaatgccatgcttaaggcattcgaccatacgagagg

SEQ ID NO: 189266 - DNA, 860 bp, Arabidopsis thaliana landsberg
aaaactacatgaccgggtatcgtgtagtattcgacagggagaaactcgtcttagcttggaaaaagtttgactgtaagtttcctcttacgtgtgttatatatcactaaaaccctctgttttctaacttatgatctgtgaatatctcttaacgcaggttatgatatcgaagagacaaacacaactgttgccggaacaaacaaaacagcagcggtagctccagcaatggcagctggaataaagactcataacaattcctcagagctacacaaaacaaaccaaaccatctccaaaagtaactcctccccaaaccaaatatccaaaacagtagatgtatggtcttttttcagatttgtgttcatattacttccacttgtgtagatttgtaagccccatccaaaacacatgccaatagtattttttttgtatcataacgacactatagggattttttcaggaaatatatgctcttcatacgcatcttactatctttgcaaattctcgtcttttttctcttcaataatgaggtagttaaaccgagataaaccgaaccaaaagggaatttggctgtaatgttgaacgccgaatattctaaaggaaattaaatgggttccacattgataacctgcctcggcaagtggccaacgctcgacacttttacacgaccgagacaatgaatctttcattttttcgtcattttattctaaaattccaatattggttcgagtcttagatataatttttagtattggatttgaaaatacacccattaatcattgttaaatatactaaaatcactctgatagcattgtttagtatatcatcatatgataatgcatcgtttgtccatagttaaaagttaa

SEQ ID NO: 189267 - DNA, 1062 bp, Arabidopsis thaliana landsberg
  unsure (1)..(1062): unsure at all n locations
atgtcagaaattcaagaatttgaaaaacttctgttgcacttagaggccatgaggtcgagtaagttggtcgagtattagtgatgattttaagaaccaaaattttgaaattatacttatactcgaccaacagaagctacagagacttgcatggagtttaacaagtttacagaggattatagaaggttctaatcaacagggaacagtgcttcaggacaaacagaccaagtgcggcccaccttctctcctctttgtcctcccccacgcgtttttagtgataaggaaatcccaaggcttcatcacagccactcgatccaacctcatctcttcccaccgacgccatctctccctcacaactctcacatgaccaaacctcactcgtcatctctccaccngtcttctttcactcgattgaacgtcctctccaattgccgtttactcgaccacctgaccttcccgtctctccgtcgccttcgttcactcgaccttgccgttccagcttcaccattcctcacagctccgtctccttctcactcgaccacaactcgacgtctccgcgcttcatcttcatttactcgactttgcaggagctcctcgccgttccagctttgccatctctcaccgctcatcatctctccttcactcgaccacttcacgcttcgcctcaacatcttcgccggagattctcgccattcaccgcgctttcgtcgcctccgtttactcaacgacctcacgccattcactcaccgcaagcttgacttggccaccaaggaactcgcctctccctcctcaccgttcaagccccctctcaaccactcgtcctcatcgttgccatctctcatcaaactgccaccgtcttctcttcattcaccgtttactcgaccaaactgcaactgcaatccaccaaacaagcctcgccaccattcactcgaccacgccgttaccgtctctcattcactttcactcgaccgcaaaaccgcaaaactcgtagccacaatttcaacgtactcgaccggtttactcgaccgtgtctcatgtagttctaattcgcgttttttggactag

SEQ ID NO: 189268 - DNA, 1677 bp, Arabidopsis thaliana landsberg
gcaattgacgaccccaaggcagatgtgtcagaatccttctttgttggacaatcagttcgggctaatatagttgatgtatgtgaacactggactaaaggccttagattaagtttgttgaagatgttataaggtcttgatcagttgtaatatttttcaggtcaatcaagaaaaaagtaggataactctttcattgaaacagtcatcttgcgcatctgtagatgcttcttttgtccaagagtacttcctcatggatgagaaggtggtgttcttgagacatatctttttctttttattgggctaaagaactcaatgtaatctgttatgtactgcatttttattgagcttgtgtcaggatatttcgaatgggtctgcataacactggctagcactgtacttcatgtgatttttaagaaggattgatttctaacagttactgtttatttgtccagatatcggacctgcaatcatctgatattactaaaagtgactgtagctgggttgagaaattctcaattgggagtttgatcaagggaaccatacaggaacaaaatgatcttggtgtggtggtgaattttgacaatattaataacgtccttggttttatacctcagcatcatagtaagtcattttggagaatctgtttctcggtacagtttagtatggattgcatctgatttagacatctctacatagtctttgagtgatacattatgttttcttcttgtagtgggtggagctactttggtacccggttctgttgtcaatgcagttgttcttgatatatctagggcagagagactagttgatttgtctttgaggcctgagctcttgaacaacttaaccaaagaggtgtccaacagttcaaaaaaggtttcactctaagaagatatattctcgcaaagttttgttttattcaagttttctcccatgctcatcgtggttcgcataagtctaaattgggctacggcttatatcatgttgtgttttatcttgctccagaaacgtaaaagaggaatctccaaggaacttgaagtccaccagagggtcagtgctgttgtagagattgtgaaggagcaacacttggtaagtatataattgcattaagttgataattagtgcatgttacattgttactcagagctgccctttttttccaggttttgtcgattccagagcatggttacactataggatatgcatcagtatcagactataacactcagaagttgccagtgaaacaattttccactggacaaaggtgagcttgctagtcgtccatttttggccaatcttttacttatttaatttgcttccctttgtcatggttcctaatttcccatatactctttgccctgcccaactaaactaataaaatttgaatttgtatatacatccactggcagctcattgtaccttttattggcaatagacatagctgtccttactgttgtagttacttgatgggagctaagtattttttgattattttctatgggcagtgttgttgcttctgttaaggctgtgcaaaaccctttaacgtctgggaggttgcttttacttcttgactctgtttccggcacttctgagacttcccgttctaagagggcaaagaagaaatccagctgtgaagttggttctgttgtccacgccgaggttactatcgcccttccttcttaa

SEQ ID NO: 189269 - DNA, 92 bp, Arabidopsis thaliana landsberg
aaatattaagcttgatcaacgaaaagaatatgtacaatccgcacgtaaagaatgttgtcacacacccactaaagagtaaacagaattcgtaa

SEQ ID NO: 189270 - DNA, 76 bp, Arabidopsis thaliana landsberg
atggcgaccattgctgcgcatggatatcgagtgacccagtgctccgactctaccgcagaacctagctacgtgatgc

SEQ ID NO: 189271 - DNA, 733 bp, Arabidopsis thaliana landsberg
tcactgaagaaaatatatgaaattggcacaggctgtgggaaatttgcgttgagggcactgtctcaatgcttagcaaaagaatatcaagcttttggaatacatgtggctcatgttatcatcgacggtgtggttggacctccaaggtacacacaattatgtgatcattttccattataattgaattagaaccacaaatatctgtccgaaaaaggctcttttaactttttataccttccacaaacggcaagattctgatccaaaccgacaagattcttacctcaaaaaaaaatcgcaaataaagaatcatgtagctccacttcttatttatttgctatttttttctagcaaatggaaaccatttttttgattccatagcctctatttcattatcttccatcggtcaaatatgaaaaagagtccccacactcacaacggtccactctattgacacatttaagcatttgaagatattacaaaatgaaatagtatcgcatatatagataaaatctcttgaaaatgtgttttcagagaaacaaacatccctccccgaggaatggtcgcagagcaatcattcaacgtaggaggcgaagatggagaaggagaaggagaaagctcgggagtgatgggaatggatcctgatgtattggctcaaacttattggtatctccatgttcaagaccggagagcttggacacatgaactcgatatccgaccatcaaacccaaatttctag

SEQ ID NO: 189272 - DNA, 100 bp, Arabidopsis thaliana landsberg
tgcaataataatcctaaacataaaacaagagagcgagagatagtgaagaagtgccccgaggattcggcgtttggtcgtgtggtctttgttgcgaaaacag

SEQ ID NO: 189273 - DNA, 112 bp, Arabidopsis thaliana landsberg
cacagtgcaagactgcattatccatccgcaatagcatccgcagatcgcattatatatcccttccatcaggctatgtcatctacacccctgtagcacagctcatcgtgtcaag

SEQ ID NO: 189274 - DNA, 634 bp, Arabidopsis thaliana landsberg
atgggagaaggagaagaaaatggaaatgaagcagattcaaatgagagatctttggcattgtcacctacttggtctgttgctattgtcttgactgttttcgttgttgtttctttgatcgttgagcgctccatttatcgtctcagcactgtgagtagtctccattggatgctcctctgtgatttgatcttcttgagaatcatttcttacttctgtttttgtcacagtggttgagaaaaacaaagaggaaacctatgtttgctgcattagagaagatgaaagaaggttttgttcataaacaaaaaaactcatatatgatccttctttgtgtctgtgtgtgtgtggttacataaatctttgatgtgttttgaaatggtattttcttacagagttgatgctgcttggcttcatttcacttctattaacagctacctcaagtacaatagccaatatatgtgtcccttcaagtttctacaatgacagatttcttccgtgtacacgatctgagatccaagaggagctcgaaagcggttcaactgtcaagcggaatcttttaacaaaatccctctttttcaacatctttaggagaaggttggatgtcataaaacgaaccacctgcagcgaggttcaaacttaa

SEQ ID NO: 189275 - DNA, 337 bp, Arabidopsis thaliana landsberg
gtaggtttaacaggacagctatcgtagagactgtccaatctgctcacaaaactctcaatcacacgactctcgcgaatatcaatgccagcgagaaagttgttcgcccgccaaaaccttatgtaagccaaaaaaggcggcagttccggcgggcggtcgattccaccaagcggggcattatcgcctcaccgctcaagtcaccgcctacagccatctcagctctttccttctatcaacctcatcgcgaagctttaccattgacatcaaccgctacaatggacgcaacaacctcacccagcaatgccctcgccgaaaccgagaacccagtctcccacattga

SEQ ID NO: 189276 - DNA, 466 bp, Arabidopsis thaliana landsberg
atggaagatgcggagaaatggtcgaagatacgtttctctattcgtcattctatgcatttatttggacaagacgacgatgcatttctcattacaggaaatattcacacgggtgagattattttcgtaccttacgattgcgatgcaagattcggtatgactcatgttgtctattatgatctcaagacaaataggcttaggtttagaactgttgcgtttgatttaggaactcttttccctcagatttctgtaatggtacctttttcgattatatatataaagaagtagtaatatcaggtacgagattaacacaaattacaaacaaacaataaacgtatataataaacggagaatgtgatgatgattaagcatatcgatccatcattcctggttatggagaatgtggtcatccgaatcagcaatcatcttctcgagaaacttataaaacttggcgggttctgagtcttcg

SEQ ID NO: 189277 - DNA, 497 bp, Arabidopsis thaliana landsberg
atcgattattccccgatctcctacaatatccattaagtatcccatgttagaccagttatcatgccagaaagagattgtagaaccgttattaacttcagccttgctgaaagcttttgccaccactcgatacttcaataattttttccacattcacgagcctaagctggaattagcgttaatcgaccaaaaagtgtcatgcttaagcagattttgcttgatccaaacaacccagagagagttactgtgggaaacaattctccatatgagctttaaacaacaaacctcatttgcttctttgagtgatcttaaaccaagacctccttcttcctttggtttacaaactgcagtccaagagagctttgctctgtgagaattcaaatcgggtccagaccaaaggaaagccgaacaaactttgtcgatttcccgaatgcaatctctcggaagtctataagcagatatccaaaaagtacaaatactccaaagaaccgattgaatga

SEQ ID NO: 189278 - DNA, 1315 bp, Arabidopsis thaliana landsberg
atgatcataacagtccttcattctcatgtctcattctatttcatcatccttagcttcctcttcttccatggtacgtaatattcatatctatcatactttcatatcagtatgaatatttctatataaaatgtaaatattaacatatagctaaagcattgcatttggtaggaagtgatggtgctacaataaccatcgtaaatcgatgcagcttcaccgtgtggccgggaattttgtccaactccggaagcggcgatataggcaccaccggcttcgagctcgttcccggtggttcacgttcgttccaagctccagctagctggtcaggtcggttttgggcacgaaccggttgcaacttcaactcagacacaggacaaggcacctgcctaaccggggactgcggctctaaccaggtcgaatgtaacggtgcaggagcaaaaccgcccgctacactcgccgaattcacaatcgggtcaggtccagcagacccggcccgtaaacaagacttctacgacgtaagcctcgtggacggttacaacgttcccatgttggtggaagcaagtggcgggtcagaaggtacttgcttaaccacgggatgcgtaacggatctaaaccaaaaatgtccaacggagctccggttcgggtccgggtcagcatgcaaaagcgcgtgtgaggcttttggtagtccagaatattgttgtagtggcgcgtacgcctcacccaccgagtgtaaaccatcgatgtactcggagatattcaaatctgcgtgtccaagatcatatagctacgcgttcgacgatgctacaagtacgttcacatgcactgatgctgattacaccatcactttttgcccttccttgcctaggtaggttaacttattttatttttgttttcattttatttgttcccacttgctttttggtaaatgcacacgacgagcttagctagcaaagtaaggtgattggcttgagccaggctaagaaaaagaggttgatactttttttttttttacacgtaataaaggagtttataatagtcattccatcaaagaaaaggaaaacaaaaaggttattacaacacgtaccataggcctaccattatgaaacggggaagcacagatcaattattaggctttagtcctatgttttataaaagaacaaagatatagtcctatacactattattctgataatctgattaaagttggaatatgttacagccaaaaatcggcagcgaatgggtggagagatggcggtggatcagtacaaacctcaccgtcaccattatcgacgtggatgtccgatgtcttcacctctga

SEQ ID NO: 189279 - DNA, 1798 bp, Arabidopsis thaliana landsberg
attttgtccaactaggctttttgccacggagtattgcaaaatgggtgtctcctttatgggatattggattctttaaatttgtgggatatgtgtatcgggatgaagtccttggagctgcttcttgtaggagcaacgagaaggtgcaactagtgctgcatgtattacaggcagggtactcttcatatgcttatgagatactttgcataaatagagtatggatacatctaaaaatctctcttgaattttgcagggagtgtccatttcagatatgtcaaagttgattcaaccttatcatgttgttgcattgtgctcgttgattgcttcacttcagagatgtactggcatttggaggctacaagaggtaagtttgattattaataaaactaaagaatcatcctttcagacccttgagttataacgagagtatatctgtctctaactgtgttcttctgtattgggtttctgaaaggtgttaggccgttacaagtggcccgaatctcaggaatctgatttcgtctacagtaagttcattgcctatgataatggtaaacaaacaccttaatagggtattaagtttatagtttttctttttcttataataggtgcatcctcgattggaggctcagcaacgacaggatttcaagctgatttttcatcagctgcaggtaaaaaagcgttacagcattttgactcccaggagtctgatccagaggtaccatttttttttgaagcacccttaaaaactgttactacaagttttttgcatgaaacgtttggtctgtgttcttcttgatcagtggggatgctggagtaacagggaagaacgggaagctccttccattaaaataatcttccctaccatagaaagagtcaagaatggccatcatggtgtcttgtcttcaagacgtttgctttgcttctctgaggtatttgcttattttacacttgtataatgcccaaagcttttgttcagaaagataaagtaaggattgctttggactgattcaataatgtactggaaattatgaacctcaaactttgtcttttgactatcttgtgcagaaaacctggcaaaagtggagacatagcaatgtgcttcacgatgcagttcctaatcctcaagatagagttggacacccaatgcatatcaaggtaagaacaaaggagagctctgtctgtgacaataaaagatttttcgagttggcgaaacccgactcttccactgtagtaaaatgtctttataaactatgaacaggtggctaggagactctttacctccccgagaggttcacgatcttcttcgtttggttgggtttacagcggctcacataatttcagtgcagctgcctggggacagaccatatccagatcctccagaaacagccaggaccagtcaaacaatgccatcagagcagttaaaaaacttcgtgtatgtaactatgagctcgggattgtgttcgttttccctccacctcatgaagaaaccgactcatgcgaagggtctaaaattgatgatattgtcttgccttttgttgtaccggctccaaaatatggatggagtgataagccggctacaggtttggctatgagggaagcttttgctgagtttagggaaggctctacaagtttctgtggagaatcagaagttgaggaagaagtagaagaagaagaggaagaagaagctgatgctgaaggaagaggagagtttgttgcagaagaggagaagcaagaggaagaggcttatgctgaggccttgtggagccaggttgagtcatcctcatcctccctcagctcctga

SEQ ID NO: 189280 - DNA, 299 bp, Arabidopsis thaliana landsberg
atgcagcaagctgagttctatcgaaacaacgttttccgggcatacgagaaaagagtccagcccagcatatttatttgcgactttcttgatcccggaaatcttgtactcagagtcacggataaagataaagtggactaccctgtatgacctacagttctttttagtggctttttcttgtcctggaccattcagccctttctcaaccaagtataggtagaagccctcttttccatacagataaaggttcgacttccaagagaaaagataaggaagtcggtattgatcgtggaaatatctag

SEQ ID NO: 189281 - DNA, 66 bp, Arabidopsis thaliana landsberg
gaacaacgtcagataaacagtcgaataacgatcgacttaatttctgagtcttccgagtacaaataa

SEQ ID NO: 189282 - DNA, 219 bp, Arabidopsis thaliana landsberg
atttgggagtatcatcaagaaaccaccattggaagaaagaaggttgagccaacaagcaagagaaaatccaagaaaatagagaggtttcttaaagaggatcatgagtttttgaataacgatggatacaaagataatccaccgtcgccggaatctggaaagatcatcctcaagcctctcttccgaagaatggatgaactttctatctccgagatccgatga

SEQ ID NO: 189283 - DNA, 112 bp, Arabidopsis thaliana landsberg
agagctgttacatcgtcaaggaggatcaagttcatttgttacaatactataagaaagtagatcaaaagatttatatcacgcagtgcatgcgtagctctcttggttatcaaag

SEQ ID NO: 189284 - DNA, 585 bp, Arabidopsis thaliana landsberg
atgcatatcagaaaccggtggttgttatatggttacatcctgataataatcaaagacgatgatgatatgacgccttggccatctaaatttctaaaagaagtaattgtgtacgacaaaaaaatcacatccattcgggagatgcgcaaatgcacgtggaactaaaggtattagggttttggtcaggagcaagactatattgtcggtcgtacgttaacgttgcttttcccgtagaatctctttttcttaccattttgacattttcatagcttttttaactaagaagattgttaccctttccaaatgaatatgtaacacagtggctatgtttagtttgaaccggctctgcatcctatcatttcaaatgtgtgaacaaggttgcttacgagggagcaagaagggagaccgacgttgacgaaagaagatttgatgcagcgcatctatacatcattgatcaccacttcaaaggctttcatggtgctcgatatttctctttgttttacgtctagtcttgttaatggcctaatgggccatgtgttcgtgggctttaaatctatatcacgtcggtatcgtattacattagattag

SEQ ID NO: 189285 - DNA, 330 bp, Arabidopsis thaliana landsberg
atgcaccgcgccagtcacgctcacggtttcctatggcgtctgcacgcgatccatcacagctccgagcggctgtactggctcaacggcgggcgacggcatccgctgtcggcgctggtcctcgcggtgccgggcctgaccgtgctgctcgcgctcggtgccacgcccatcgcggtcggtgcctggctgagcttcatgagcgtgcacctggcgttccagcacgccaatctcgactaccggctcggcccgctgcggcatctgctgggcgtcgccgagatgcaccgctggcatcacaagcgcgagttcgaggacgcgcaggtcaattaccgcgag

SEQ ID NO: 189286 - DNA, 731 bp, Arabidopsis thaliana landsberg
  unsure (1)..(731): unsure at all n locations
caagattcaccggagtggcaccggccgagtcatcgcatccatcgccgttgtcgatttccttcaaacccttgcaaaaccccaacgatcagagacatggaggaggagagaagagatgactacaaattcctgagaattcaagacgctttcaaagcattgcatcttcatgttaacctcattggagtcatcgttgagctaggattctccaatggctctggtatcgtgatcctctcccaaaatccttttttgctatttcatttcatcatagcttcgttttttcatacttccgactgctcgaaatttgtcgcagattgttcatgtacgctcaaaatcgttgatccatggtattcgggatctggccttcccgttaagttcgtcgcnnnnnnnnnnnnnnnnnnnnnnnnnnnnnnnnnnnnnnnnnatatcatcttactttcacgtgtaaaggttgacacactattcctctgatatgagaagatcaattcttcgtggcttttgctgattttgttgttaaacagttttcttctgggtttaaactcagattgtgctgattaaccggaaaatcacagctctctgcaatgaaacaacctcttcgtcttttgctttattcaatgggaaacatagcgtggattctataccttaccagtcctcacctaaattcctgatgagagaacaggataagaacttcttatcgaatctgagagaatggatgatcacgtacaagtttgaagatg

SEQ ID NO: 189287 - DNA, 389 bp, Arabidopsis thaliana landsberg
  unsure (1)..(389): unsure at all n locations
atggtgatggtcacggtgtgattgagggtgcgtggaatgcagctccaggcgacactttcaactttcggcagcatattcgattggctggcgtnnnnnnnnnnnnnnnnnnnnnnnnnnnnnnnnnnnnnnnnnnnnnnnnnnnnnnnnnnnnnnnnntaggcgtacaatcgaatccacagaatacgatcactggtctaagtgcatcatatgcagtatgttcgaccggtgtcctgggtaagtttgccaagcaactcgattccgcgctcgatgacgggaatgtcgaaaccggctctatgcgtgcaacggcggtatctactccggtaaccggcacaacggctgttgccgcaaccgcggtaactaccgccagttacgattccccgaacatcacg

SEQ ID NO: 189288 - DNA, 95 bp, Arabidopsis thaliana landsberg
gtaccaccatgttttaccacaagagcttagaacaaggccacgaacctaagggtccgtttggttgggctgtgactgtgaaaaaagctattgtgtga

SEQ ID NO: 189289 - DNA, 220 bp, Arabidopsis thaliana landsberg
  unsure (1)..(220): unsure at all n locations
atgaccaggtaaagacgccaagggccagctgcgcggaaagctgccgtgcgagcgcgcccccacccnggcccgcgggagcgggaagcaccttggccatgccccggaggacggaaaaatccggattcgcatgagaggccgcatggttcgaggagttggccgaaggctggagaagcgcgtctccgaaaaggtcgtcttgcatacttgtcgtactggcacgaag

SEQ ID NO: 189290 - DNA, 564 bp, Arabidopsis thaliana landsberg
gttaagcgagattatgtagatggattgggcgatacattggatttagttcctattggtgcttggtatggcaatgggagaaaagcaggatggtagtaaaaacatattttccaactttctctttttttttttctgaaaagcagaattgtaatcataagtttactggtaatttctcaaatgcatcttgatgaattctgatgttttttatatattttgtgtgtaggtatagtccattccttatggcctgcttcaaccctgagactgaagaattccagagtgtctgccgtgtcatgtctggtttttctgatgccttttacatcgaggtaatgaaaagctcaactctaacgttgttgtttaatgatgaaacagatggggtagtaaatacgttgggtttggtctatacttggactcctaattgtcacgtgagaaccatttcaagcttgattctactttcttattttgcttatcttgcagatgaaagaattctactcggaggataagatccttgcgaaaaagccgccttactacagaacaggggagacacctgacatgtggttttccgcagag

SEQ ID NO: 189291 - DNA, 263 bp, Arabidopsis thaliana landsberg
atgcttgcttcgtgctcgtaccaatagatgagatgctgcatttgcttcaaccaatgcgttggcatggatacgaagtctctgctgttgcttttgttggcattgctgcttactcagttctgcacaactggtcctgcctccttggagtgttagtgtgcccattttgcttgtacgtctctgcgtttggcaagaaaacaccagttcctctgttgctctattttcctggtcgcaaagcagagcaaactatcggcatgaaccaatattaa

SEQ ID NO: 189292 - DNA, 4879 bp, Arabidopsis thaliana landsberg
atgaatacaaagccgttccacaagctatgcaacagcattgaaggtaacaagttccttgaccttgcgaatatcaaacccaataccactccaaggaacaccaatggtaacatcctctgcacattgaaatgtgccaaagcaaatgcaatcgaactcacaagaatcgcacaccaaactggcatgtacctagttagagacggtaacaagaaccctctgaacactatctcttcccaaaccggtgcacaaattgatactacaactgcatacagtgccattgccacagggtctctagccattatagactgctcgacacttgagagtgagactggacttgaggttggtgggagtggcaagaggtttaggtttaattgggagagccggttaacgaaagggaacatgaaacagcctatgataacatctagttgccagtttcctttaagggtaaagcggaaccaatcacttgcaagtggacggaacatggagaggcaacggtggaggatagcaatcccgggtaggccttctgttacatcggttatcagactgaacaaagcttggcctctaaatgttagggattctttgtggaaacctgatatatgagccatgaatgggatcatccatgaaccaatgaaccagaaagcggctacccacagaaacattacatgaaaaagtgtatgttaggggcatggcagattatcgcaggattaaccaaggaaataactgaaagctttggtatataactcatttctcattactgtatgttttgcttcttttgtatgaaccaaagcatctataatactattagcttgatgttatcttgtagtccctagttactaagtcaaggatattagcccacgtttaaatgtctatacattaaaaaactacgtcttacacagactcaatatccataatacactcttatcagataatcccgtaaaatttctatataggtttcaataatgttcttgtgtaaaagttatgaatatgatacggtaatacaaaagaggttaagtaacattaagatgtaggtacctgcacaatggtctcgacagtccatggtaccttccaacgagtcccaatggccttcaaaactgcatctgcagcctgaaaaccaacgaaacaaagtgctttttagacccaataataataggttgaacacaagatcgataagcctttgtgagagtttccttatttgcatttttgccatcacatttagtaaatagaaagcctcatcaatttgtatggcacatttccagatcaaaagaaacctcaaattcttatttttcactagtaaacaaaaaaaaacaaagagtggataatggatatatacataacagtttattgacaaatataagattctgctgcagtcctaacctctagagtctagaccctaatatcaaaaccggtttgtcagactaaaacagagacagaaggtagttcttcttcaactgtacaagtatccagtaacgtccatagatctttaccttttgaaaagttgccttccaatctgttttatctgtacatggagaatcttgatctggcttaactaattcctcaggcacaaaatgctccggattctcgggagcagaatcttcatttctaaaacacaaaatcttccatttctgcagaaaatagccccaaagtttaatacattggagacaaactaccgattcttccattaaccatttgacactgcatcaatacaaatattgaattcttacaataaagaagtcacaagattactaaaacctcaagaaaccacaaatttctaaaactactagtaatccaagcaaatccttatcaaaaagcactctctttcgtaaataaactgaatccacagtgctattcgaatccaagattcctcaatttcaacacaattcaaacaccaaagtctctttttcaattcaaagtttcatacttttgaatataaacagagaaaagaagaaagaagcgtacatgcttggcggacttagaaggtgaagaagcagttaaaggggaaatcttggtaagagcaggagagaaaacagttcgacaaggaaccctaaacttggaacgcgaactagagagagctgggcgatggcagaggagagacgaagaagagcagaagaggtcaacatgggatgggaatctgaattccaatttcaaactcagatttcagctttagcaagctcaatgagagagatatgagaaatccctctgaagaatgaagaaccctaatgagagattcttctcagtttcatcagagaaatcgaaaaccctaattaatctgtggatttgggggttttcgtgactgattttgtgtctttcagtttttctcaccaaaaaaaagttgttgaattttcaacgacaataattaacaatccgtcttaaccggaccatcgaacaaaaccgatgtttaaaccaaaataaaccaatttattgatgaataaaccaatttgttcattatccttttatagtttatagctgaattgccttcagaacacattggtaaatttatttttatatttttcagaaaaacaaatcttttctatttgacatattgcaccaaaaatgtcaaaactatagaggtcacagtagaaacattatcaaatacagagccttaactgtaaattacatagtatgattccttggtgaagaatctattaccatgacacgagttagagaaagtcaaacggtcaaattaaaatctgttttcgtctctttcctcctcatatatcgccatgccttcctctcatccatttcttgactctcaagatacacaacaatctctctctccccaaaaagaaaaagaaaaaaagaaaaaacaaacaaaccctaattctctctttctgtctccttcaattgtctaatgtctccttgatccatcctgatctcaagacaattctttgcaacgttgttttcttggaaaattttcagggatgggaaggagaaattcatattttccagggaattttgttccattgttcttcgtgtttatcgtgttgattcttcagcaagaaatagtgatttgtcaagaagatagcagcttggataatcccgcggctaatcgtctctataaccaatttgttttcgacaaaatatcgaatctcaccgaagtttttgaggatgacatcaaaagagagctcggattctgcattaccaatgtgttagtttcaaaatggcattaacctttatcctatagcattgaagatgtttatgttattgtctttgtttcagaaaagaagattataacgaagcctttaatttctctacaaagccagatttcttaaacgcatgtggtaaaaccacaaaaggtatatttatacatcctctgtttcattgacagaagccgaaataatattttaattttgctgatgtttttggtttgagaataggtgacatgatgcagaggatatgtacggctgcagaagtgagaatatacttcaatggattattaggaggggcaaagagagctactaattacttgaaaccgaacaagaactgcaatctatcttcatggatgtctggatgtgagcctggatgggcttgtcgtactgctaaagatgtgaaagttgaccttaaagacgacaagaatgttcctgttagaactcagcaatgtgcgccttgttgcgcaggtttcttctgccctcgtggtatcacctgcatgatccgtaagttaacctccctttaaacattcagaaacgatgaaagattcggttgttgatccatttctaatgttgtttcctcactatgatgtgaagcttgtcctttgggagcttattgtccagaagctaatctgaacagaacaacaggattatgcgacccgtaagtcttgtttttgctcatttttctaagtttgtcttgaacatatggtaagattgctgcaggattattgtttttgcagatatcattaccagcttccttctggtcagccaaatcatacttgtggtggagctgatatttgggctgatattggtagtagtagtgaagttttctgttcagctggatccttttgtccttccactatcgacaagcttccttgtactaaagggtaactaactaagaatgattttcattactttctttgaagattcatctttctctaatcaggtagactaatcttttgttttctccagacattactgcaggacaggttctactgcagaactgagtaagtgatgtattttgtccaaacaacactacttgttatatcagagataaagaaggagaagcaaagaacttacggtgtcttttctctgatgaatattttgcagattgttttaagttggcaacgtgtaatccaagatcaacaaatcagaatatcacagcatatggaatcatgcttttcgtgagtcataattgatctctccttagtttcatctattttgttggttatttctgatcatttgacccttggttattgtactgtgtaggccgggctaggtttcttgctcataatcttatacaactgctctgatcaagtgcttgcaacgagagaaagaaggcaggcaaaatccagagaaaaagcagtgcagagtgtgcgtgattcgcaatcgcgagagaaatggaaatctgccaaagatattgcaaagaagcatgcaaccgagctgcaacaatcgttttctcgaacattttcgaggaggaaatctatgaaacagcctgatttgatgagaggtttaagccaagcaaaacctggatcagatgctgctttaccaccaatgccaggaagcagctcagacactaaaaagggaaagaaaaaggagaagaacaaactaacagagatgttacatgacattgaacaaaaccctgaagatcctgaagggtttaatcttgagattggtgataagaacattaaaaaacatgctccaaaaggcaaggccttgcatacacagagccagatgttcag

SEQ ID NO: 189293 - DNA, 213 bp, Arabidopsis thaliana landsberg
ccgcggtcgagaagttgctatatttgtccaaatgttagatctcagtcacaatgagcttcattcaactgaaggtacgttatgtagtgttttctaacgctttttgagtcttgttcaatattagttgttgcatctttggtgcttagaggtttgatgaaactgaagcagttagatattagagtcaacgacctaatatttgcagacctaactaaataa

SEQ ID NO: 189294 - DNA, 1576 bp, Arabidopsis thaliana landsberg
atgattgggtctgattggcagtttagatgctttaaatctctaagtattggtgataaatctgtgaatctgtttgtgtgttttagagaaggcgattcagttatcgtcggtcctgcctgcgaacctggacagactagcgcaagtgttgttaagtattttgaagctggagaaccaacatttgcaggcattgtacagtctagagataaacctgttccggcggttggaggaggttactttgcgggattattatctactgttcaagataatatggatgcccatccccccaacaatcactctgcttttgttcagagtacaaccgtttgtgatttatccagtcaatgggacataagcgatgaactctgttagaagccctagaagcagtggagaagtctggagcttttgtcaccgctgcaggggtggatacatccctaccggcagaagtacctgattcaggtgatgattcagagtctttagcagaatctgacgaatcttcctctcttagtacaggtagtgacttagaagtttctgagttcgacgacgataccctccatgaaaacactctccaatctgataaagagattgttgtacatgaagacatcggggatgatgatttcattgagcagcccccccaaaaagaaagttttgcttcacaataccaaccctggtgctatgacagagcttttggaaacttgtcagaaaggtataagcattgatcaagtgtatgggtacgaagatctcgagccgatgtttggggacgatgatattgatgcaaaagcagcttacgttgatttgacaaaagaggatgacaatatgtttgttggaaggacctttgcatcgagggaagatttcaggattgccttgtccatttatgccattaaccgtattttccgctttaaatttactaggtatgagaaaaattacttggttgctgaatgttatgacaaaaaaaactgtgattggagagttagagcacaccaagttggaggtgacagcgaagaatatgaagtgaggctggcaaagttggaacatgtgtgtaaggttcagactaggagccgcttttcaaaacatgttacgtccaaggttgtagctgctctcctaagagctaagtatgccaaggccttctgtggtccaagagcaagagatttacccgactccattctaagggatcacaatgttcggatgacgtactggaaatgttggaaagccaaagaattggctgttgagacagctcaaggcactgatgagagctctttctctttattgccggtttatcttcatgtcctacaactagcaaaccctcgcacagtttatcatttggaaacagagttggatgatattgaggatgaccgattcaagtatgttttcctgtcattgggggctagtgtaaaaggattgaaatatattcggagggttgttgtcgttgatggtacacacctttttggtaagtatcttggttgtcttcttggttttcttgtcttcttactgcgagttgccaggatgcaaactttcagatttttccaatcgcctttgccgtagtggacagcgagacagatccatcttggatatggttcatgaataa

SEQ ID NO: 189295 - DNA, 172 bp, Arabidopsis thaliana landsberg
ctagggatgtgctagacaagaagacaaaagcgcagaagctctccatgggacattgcatggtgcagcggcagcgaaagccggccaaaattttggtccgcgacgtgctgtcagggctgcaagaggcagtcaaccagtcacgcgagaaattcgaggcagagagcatggctgattg

SEQ ID NO: 189296 - DNA, 435 bp, Arabidopsis thaliana landsberg
gggctctgacgtaaaagaaactaagactcagggagacacccgagtgggttacggatttattcatgtgaagtgcggcgtctctttagcaaagtgtacccacgaaggggtaccggccatttctggcgttggatttgattcggtcggcacaaattagatctgcatttccgagcactggaatgagataggaaccgcccgatctgagatcgacggttcaccgtgcaccttcactcacgaccttcactcacggccgcacgatctaaaataaacggtggagccttaaaaccctacagattccccttggtcgtccgaagcctggtcaacgatgcagattcgatctcctcaaccggtacaccccgtttaatcagggttgtccgctctcagatctacgacacaacgcggtcatcattatcccgagcttcgtcgatggcgagaccg

SEQ ID NO: 189297 - DNA, 38 bp, Arabidopsis thaliana landsberg
atgacatgccaacgtcgatatgctgccacagaaaatat

SEQ ID NO: 189298 - DNA, 302 bp, Arabidopsis thaliana landsberg
atggtctatggaaattatgacggtcaaaatacttatcccaaatttgatttacacataggccctaatttctggttaaccatggatttgggggaagtggaagaaggtagtggtgcactggaggatatcattcatactccaagatcgaacttcttggatgtgtgtcttgttaagacagacaaatcaataccatttatatcgtccttggaactaaggcctctaccaaataacagttatatcactacatcaagttcattgagatattggagagagttctatcttagtgagtcaaacaagtttataac

SEQ ID NO: 189299 - DNA, 408 bp, Arabidopsis thaliana landsberg
atgatgggaagcttcttggctggaagcaccgaggctcctggagcctatgaatatcgagtaattgcacacaccttcctactttggatattgattaaccaacttccttgatattttcctcaatatcttgctttgtttggtctgtttttatagaacggtaggagagtgaagaaatacagaggtatgggttcattagaagcaatgaccaaaggaagcgaccagagatacttgggagataccgcgaaactcaagattgcacaaggagtggttggagcggttgcagataaaggctcagtgttgaagtttataccatacacaatgcatgccgtgaagcaaggttttcaagatctcggagcttcttctttgcagtctgctcacgagctattgagagataatacccttagactcgag

SEQ ID NO: 189300 - DNA, 319 bp, Arabidopsis thaliana landsberg
  unsure (1)..(319): unsure at all n locations
gcaggtgcgcgtgagcaatatacacctgcgcaattccgctttctggatgcagcattacctcggatgcgaaaacgtgaccatcaacggactggatatctggaaccattccaataagaacaatgatatgatggatattgatggttgccgttacgtgaacatctccgatatcaggggcnnnnnnnnnnnnnnnnnnnnnnnnnnnnnnnnnnnnnnnnngctgttatcgcaggatatcaccatcaccaattgcgtattgagcagccattgcaatgcactgaagttcggcaccgaatcaacaggcggttttaggaatataacg

SEQ ID NO: 189301 - DNA, 564 bp, Arabidopsis thaliana landsberg
atgaagatgagggaactgatcggggaagaggtggtggtggtgacggtggcggaggtagaggaagaggtggaagtggtaaggagagaggacgagcgcggaaggaagatgatagagcttgggatggagtggagccagattgctggaaacgggttaatgaagctgaggtacggtttctatcatgtttggatttatctggctttaaattgattttggagagattatgtgtgcaatttcgacctacgaatttcaattgcattgttttgatttgaagtagtcttaagtaatctttgcttctttgatcgatttgaagatttgaaattgaatcaattcgtatatgtgatattagttgtatggcctttaattatctgttcatggaattgaggtgtagaagacctcagctcaaggccattagttattttagaatcatggcatgacgaaaaatttagttggaaatatgaacatttttactgaaatgctaatgacatttggcagcttgcacgcaaggttcgtgatatgcgggagtcgagaacagcaccatccgtgactcagaaccttgatagaaag

SEQ ID NO: 189302 - DNA, 292 bp, Arabidopsis thaliana landsberg
atgctcctgcggaagtatctactcgttacggaatctcaggtgtcaaagtgtggatttcatatagtcaaaaaaaagggagacgtgctatatccgaaacgtacgaaatatagtaaatatcgtaaaggcagatgtagtaggggttgcaaaccggatggtacaaaactgggttttggaagatatggcactaaaagttgtaaagctggtcgtctttcatatcgagccattgaagcagcgcgtcgggctataatcggacactatcatcgtgctatgagcggaccattccgaagaaatg

SEQ ID NO: 189303 - DNA, 112 bp, Arabidopsis thaliana landsberg
gcatgaggaccggagaacgggagaaggaggggaaagacgaaacgacgtcgttaaacggaacaaaagaacggcccctgaattaaatatctattttcgacggaccctgaattaa

SEQ ID NO: 189304 - DNA, 10 bp, Arabidopsis thaliana landsberg
gtcgcggtga

SEQ ID NO: 189305 - DNA, 257 bp, Arabidopsis thaliana landsberg
gagttaggcgtttctccggaggctaccactgtgaacaggaacgggttgccgggccttgccccgaacacttttggcgaattgatcctgggcagttccggtggtggcggtgtaagaatatatctatcatcatcattcgggatattcatcggaaggcttcccccggtcatgataaatttcgcatcggcccaatcggaataattcctggcagcgtctttgccattggtgaccagcaacccgaggcgttgaataccttccag

SEQ ID NO: 189306 - DNA, 249 bp, Arabidopsis thaliana landsberg
gtgcaaaaggatgagttagagcacatgctaaaagagcttgatgcacatatcagtgtggctccattaaagaagatggctggaggaagtgtgaccaatacagttcgaggcttgagtgttgggttcggtgtagccactgggattattggtgcttatggagacgatgaacaaggccaattgtttgttagcaatatgggttttagtggtgtgagtatctcaaggctcaggaagaagaaaggttccactgctcag

SEQ ID NO: 189307 - DNA, 1129 bp, Arabidopsis thaliana landsberg
gttttcgacgagagccttcgcaggtgcctgtaaaaaggcggcctgccgattgataggaggtaaacctctatcgaggcaaaatccagacgagttttcaaagtaggatcggtcggggagacggtacttgtcagttctatggggacctgggcaagaagcctagttttgcggggggggggggggggaacctccttacccgcggtatcgcgctctacctcatgtgccatgcgagtgggatcgcgtctctgctgacccacaatcgcggcgaggttgcgatgcgcaatttcttggtttttggttaaattaatcaaattcatgatcattgcgcggagctcggctaattcgctggcaggtcgcggagggacctgattagacaggttggccgggttatctccgtttggaggctgtatcgtgacgtttcgttctccgccccttgtttgcggagggggagtgatttggtcagatccagaagaattcgagttttgggagatgttctccgcatcagcgttatggacagcatcaaccctggttcggagagagagatccgttgggaggtgcccgtccgtaacgtcatcgtttgggatctaaactggtaagccagatcccgatgaattggatgaattgggatccatgatcgttggtcacaattgatgtgttagttacggtattggaatgatctatttccgtccccacagacggcgccaaatgtgggttctgaaatccacactagagatttgtaattgagattatgagaaaggagggctagatcttcacaaaaaccttgagagttatattgctaagaacgaatggactttttgtattgataatgacaaagcttttacaatgtgaaaggagattacaagtgtaaaagtatgtgggtgaatgtaagcttaattgaatgtcccttccaagtcgtccttgcttccttatatgggtctacgcacgtggtagctccatccgggatctgcggagatcctcctggatattcggcaggtcagttcccagatatcaggtccgctccgcgaatatctcctcatcagttcctaggttgttattcgcttatctcccttcatcaggtgaccgggcttatctggcccaaatacccattcgcgtatgtgggctcatcagctgc

SEQ ID NO: 189308 - DNA, 466 bp, Arabidopsis thaliana landsberg
atgcctacgaagctaagtccactagggctccaactgacgaagctttttcgaaaggtggacgagccggatcagacgaagacaagcaaacccaagcggcaaagaatcattgcggtaactgaagttatcgataggacgccgccaagggcgtcaatccaaaaaacggcagctgccgaaggtgcagcaatcgttgaaggcgtacttcggaggtcgcggctaccgaagccgctacagccgaagatacaaacttagaaaccacgattaagaatatcaacaagattttggaagacatggccgcggaagaaactggtgctactactgaaaaaaccatggccacagtgcctgaaaaaggaaaagaaatagccgaagacccttcggatgacgaagcatacactttccagaacttagttgggcaaaaactgacgaaggaggaaatagaagaccttaaagactacgccaagtcttgcgg

SEQ ID NO: 189309 - DNA, 353 bp, Arabidopsis thaliana landsberg
ggtccggagagtggaatgaggtcgaaacggcggacagtgaaagtgaaagcggcgatgagggagacggcgatagtgacaatgatggaggagacgactccgacaatgaaagtaagggtgaaaaagatggagatgaaagccgaaggaacatgaaacgacatgaaggcgagaaggatgatgttgattctgaagcaaggcaaagagagaagaaatcggggagaaaagagacgaaagatctgtgtgaagaagacataatggagaggttcgagttcgagatagaggaagccgtggcaaattggtttgatgagtttcagattcggcgtgatgaaataccagagagttgtgatgcagattag

SEQ ID NO: 189310 - DNA, 150 bp, Arabidopsis thaliana landsberg
atgccggcgaagaaagagaaagttacggcgccgacgaagaaagagaaagagaaggtgccggcgaagaaagagaaagttaaggcgccggcgaaaaaagagatagagaagatgtcggctgaggagcaatcgccggcccgaacgactgcgacg

SEQ ID NO: 189311 - DNA, 622 bp, Arabidopsis thaliana landsberg
tattacatcatgtttgaggtattggaggtatcatggtctaatttctcaaaagagatggaagctgctaaagacctcgatgatctcttggcagcgcatgagaagtacctcaacgccattgttggaaaatctcttctgggtgaacagtcacagaccatccgcgaatcacttttcgtcctgtttgagcttatattacggttcaggagtcatgcagatcgtttgtatgaaggaattcacgagttgcaaataaggtgtgttttgtcttttatattcaaacaaaagtagaccttaaactattgctcaaacattttcctctgattttagggtcacaatttgatctctaatatcaccgatttcctgcagatctaaagaatcaggacgagaaaaaaacaaatcgcaagagcccggttcatggatcagtgagggtaggaagggcttaacacagcgtgctggagaatttctacaaagcatgagtcaagatatggacagtattgcaaaggaatacacatcgtcacttgatggattcctatctctcttgcctctgcaacaatctgtagatctcaagtttctctttttccggcttgacttcactgagttctacagccgattgcattccaaaggataa

SEQ ID NO: 189312 - DNA, 373 bp, Arabidopsis thaliana landsberg
atggtccttcttaatggacaacctaaaggacttataataccagaacggggattaagacatgtagatccactttctccttacttattcatactctgcacagagttgctaatagcgaacatccggaaagctgagctaggaaaattgatcacgggtatcaaagtagcaacaacaagcccttcagtttctcacttgttatttgcggatgatattcttttcttttgtaaagctgataaagagcaatgcggagtaattttgggtattctaaaacaatatgaagcggtatcaggacaaatgataaattttgcaaaatcatcgattcagttcgggcataaagtagacaaagctattaaggcagaaataaaatcgacattgg

SEQ ID NO: 189313 - DNA, 60 bp, Arabidopsis thaliana landsberg
atgggaaaagttggacgtgccgcggccaagtttgccctaccggccgcggaactgaccatg

SEQ ID NO: 189314 - DNA, 665 bp, Arabidopsis thaliana landsberg
atgcgagtatatggatggtacaatttatcaaagcgatgcgtgacgagaagggagatatggttcagaacgcacacttgatcgggttttttcgaaggatttgtaagcttttgtttctaaggactaaaccgatcttcgtctttgatggagctactccggcattgaaacgtcgtactgttattgctcgccgtcgtcaacgtgagaacgctcagactaaaatccggaagactgctgagaaattgctgcttaatagggtttgtttagtctcgatttggtgtggttggttataattagcaagtttttgtgaggttttgagttggttttgggatttttgttgttgtagcttaaggatattaggcttaaggaacaagctaaagatattaagaatcagagattgaagcaggatgatagtgatagagtgaagaaacgtgtgtcttctgattctgtggaagataatttgcgagttcctgtggaggaagatgatgtaggggcgagtttttttcaggaggagaagctagatgaagtgtaagctgttaaatttttgttgttttttaaccgtgaatttcagttttgttggtggaatttgctttaatgagcttagttgttgtagatctcaagcatctttggtgggagagactggtgttgatgatgttgtcaaagagtccgtg

SEQ ID NO: 189315 - DNA, 463 bp, Arabidopsis thaliana landsberg
atgagtttctcaacgccgggccatggggccgctgtccttagggaagagcggatcaagtttgacgcgatgaatttacaggttggtggaaagctgcaactgctgataaccagggacatcaagcaggtacaactgttttccaatctgattggatacgtcaaagacgaatacctgctggtgcagattccgatggacggctcgacgccggcctcgatacgtgaaggcgagaaagtcaccatgcgcgtgttttcgggagtacacgtctgctggttcgataccgcagtcgtgagaacctttcctcctccctactcgttcatgcatgtcacatatccacgagaaatctacggaacaccactgcggacagccgtccgggtaaaagtggatataccggcgaaggcgcaactgcctatggctaacggcgatggcagtgaattcgacatcagccttcaagacctgagcgttgccg

SEQ ID NO: 189316 - DNA, 561 bp, Arabidopsis thaliana landsberg
actccgtttcttttcctcggcgatatccatccttacctcctcaccaatctcctccgttctttcatcgaccgtgagaatcaagattccgacgacgaagacgaggaaacttctcttgatcttgtgaatcaaccgttaaagatgacgatggcgtggaaagatccttctgatgagttggttaaaagaatcgatcagattgagtgtacaatgagacttatggttcctggtttaatggatcgtatgaggaaaacacagagaagtttcgtggctcgagtttctgagagttgggtctcgtcgtatcaagttgggaagaagaagaagcttactgcgacggttgcgacggcttcaacgtcggtggatgaagcagcaaagattgagatggaagagcttgtgaatattttcgttgatgcgaatcgtttgaggaagagtgtgattatggacattgttggagctacaagtgagcatcaagcggctctgtttcttgagggtttatgtcagtttcttgctgggtttaaagatcagattcttcttcaagattttgagattctttctttgcccaattaa

SEQ ID NO: 189317 - DNA, 109 bp, Arabidopsis thaliana landsberg
atgccgcaaacatggtgtacagagctgacaaccaagggcaacaaaaagcagagagccatccagacgattaagcggatacgacacaggagacgggacttccggatccaag

SEQ ID NO: 189318 - DNA, 521 bp, Arabidopsis thaliana landsberg
atggcggtgggtgagtagcatgtaggattcatactttcacactctctgtttcgggtaatgactagtgtggctatctgaaaacttgagcctcgtgttgtgtttctctgtctcgtttcaactcatacgagtatgcagagtaaatgtaactttaaatcattcgacataaatcggtttatataatgatgattattgtggatgatgaccaatctgtcgagaagaatgtactatacatgtgtcctggggaaaaaacgagatctgtctctcaagtgatggaaacggctaccacacgtacacgttagggtggagtaacggtggtgacaccggacgttgtgtaaccatgccgatcaagtatctgatatagctgattaactcttccaagaaccagtttctccattttcaactaccactggattcttctctactgtttcaacgatgttctcttaaattgaaagatcggaagattcatcatatacggagataaactcacagaacctatcaatatcggcaatcgactaaaataa

SEQ ID NO: 189319 - DNA, 132 bp, Arabidopsis thaliana landsberg
accttttccagaatactcgttgaactttatgtgaacagaattcgccccccatcccatcaacttgtaaatgtatttctcaatgtggacttggttgtacatcgcccagaagaacataaggctcgtcatcgttga

SEQ ID NO: 189320 - DNA, 77 bp, Arabidopsis thaliana landsberg
gtgatggttccttctacgtggcttggcactggggaaaattggacactgatgaagacaatcagaaaactacgaagacg

SEQ ID NO: 189321 - DNA, 410 bp, Arabidopsis thaliana landsberg
atgaggatgttgcagtcaaacactatcacacaatcggagattgacgccataatgcttgaagtaagttacatttaacgtaaatgttcattctcatatttgtttataaagtaaaaatttagtatgcatgctttgttctcatctttatagtatcttatagtaaatacccttcgttgtgatcttaaagtatacttaaacaaacacgtactttataggactctccaaatttgagtatataatatgtaaatggccaaaacacgttggtgaaattatgtatattcgtaattaaacacacaaattggattgtgattttcacaaattgatttagtggcactttgccaaaccatgcaaataaaatttggtcttccggtctggccataattaacctttttacatttttctagaagacttag

SEQ ID NO: 189322 - DNA, 406 bp, Arabidopsis thaliana landsberg
agatctggatatgaagcttacatattggaagcaacatacaaggacccaactgtgagttctctgcatactatttactcttcgataagtttgattttgtatctcatttgtagttttcatttttagcctagataaataggagcacactacgaccattatcatattaaatagaataacattcacttggtgtttctaagcgtgtgcaaaattacagggctgtgctgcaagaaacgtacatggcatcacagtagatcaagtacagcagatggcagaacaatgggaagaagctccttcattgtacatgcagcttgatatcaaggttcttatgtcattctttttctttccaacattgacctcgctttttgataaagacgccaaattaatgccgtcatgtacgatttggcattga

SEQ ID NO: 189323 - DNA, 300 bp, Arabidopsis thaliana landsberg
agaattcgagattgaaaaaacagaggaaaattatgagtttgttaccgatagctttgtggccatggagggtttgagacatccgagagattgttatcagaacggtctcgtgataacggagaggaggaatctgaattttctccgcctctccgaccgtcgtcgtatccgtcgtgttcatcgtcggaacaagcaagtgctgcttgattttcctcgtcatctgtcagaaacgaatggtctctgtcgtgtaagaattcttcgtcgagtttcatcttcttcctctgttttctcaaatctcaaagaaag

SEQ ID NO: 189324 - DNA, 140 bp, Arabidopsis thaliana landsberg
gaaactttcgggagatggaagaacttatggatgatcttgaaaaacttatggatgatcttgaaccacaaggagccatgttcgacatgggggcgatttgtaatataacagtttgtattattaaatttgttaccgtatcgtaa

SEQ ID NO: 189325 - DNA, 157 bp, Arabidopsis thaliana landsberg
taatggttcgagctatactccctcagattataccaccttctataaaggtgctactttacgttacctttactacattaagagcacattatgcggaagatggatgacgttagaaaacagtcaattttacaaagactcaacacaagatttcattgaagtg

SEQ ID NO: 189326 - DNA, 106 bp, Arabidopsis thaliana landsberg
gtgtattgggcctgatgagaccaacaaaattcttaatggagatggtccagcttctgctttcctggtttgtgggccagttttgacgaccctgccaattataaaatga

SEQ ID NO: 189327 - DNA, 183 bp, Arabidopsis thaliana landsberg
cccataaattgtgaagtaaaaaggcccaataggcccataaaattgggagaagagacgatcatcggacaaaccgagaaagtgaaacaacaaagaagaaacctgactcttcagaaactattcaggcgagagagagagagagaaacaattttggacaagaacagaaacgatgtacgttttctgtga

SEQ ID NO: 189328 - DNA, 153 bp, Arabidopsis thaliana landsberg
agaaccgatcgatcaataccaaaaaaacttcaattttctaatcgaaacaagaaatctgaagccaacacgagattcaatattgaaattgtgatacgatcgacgacgccaattcgagagctttctgacgcgaatcaaagaggaattgacgaataa

SEQ ID NO: 189329 - DNA, 69 bp, Arabidopsis thaliana landsberg
ttctctaaagcctattccaccccttaagtgccaaactcaatttcctatccaattctgtgaatccgtgtg

SEQ ID NO: 189330 - DNA, 141 bp, Arabidopsis thaliana landsberg
atgacccgttttcgttttccgcgttcgctggtggtggcggttggcgtgtgcgcgctgctggcgggcatcgccggcgtgcaggcgcaacagtaccacgacagcccgcagccttccacgcaggcctacaacaataccgaccag

SEQ ID NO: 189331 - DNA, 1063 bp, Arabidopsis thaliana landsberg
atgcacgatcttgaaggtaactgcaaaccagaggcgaattacaattatgcctctgtagtatgcataaataagacttgtgctgctgtttcgcaagagaagcaaacttctcacgattggaagcagacacacaatccagtaaaagggagattcgaataagtggaagttgtctaacttactccattgtttcctcaagagcagcaggaagtctcagttcttcattatacgctggaactattaaagacaaatacttctcggcagggtcggtaatatgagggcaaggaatctgataataaagtttgaaaaacagggtcaggaaaagtaaaatcagattcctcaaccaccagaaaatgcgatcaagcaagtcaaactcgttataattgacaagacaatctatgtatggattcaacattataatggaacacttaatttttctagctaagccactaacttaagagtttccaaagtctgcatctggaagagactccataaactacttatcaagtttcacacgactatacaatataacttctcaagcttctttgctaaaccaaaatgtaacatttgatacaaaaaaagagctaaactaatggaaacagttcctcttaaagactacgtgaagcttcaacattcgttttagcgaaacacagaatcaagtgttcaaatcgccaacgcaaaacctttttaacgagaaaatctcagttccattaactataattaactgattttcaaaacgctatcgttctttgccacactattgccagaaaatcactgtaaactaatacgataaatcaatcagacgttaccggttttatagatttcggatcgtcgagtgtagtcacggtctcgacagagctgagaaaatccaaaacaaatcaatcaaatcttatcctcagaaatcggaacaaattcgaagaaattgagtaaaacgtacacgttactgtgtctccttctccaagcttcaaaaacaacaacggatagaaatccgaataagacgatcagcagcagccagaggctgaattccgcaactgttaccagaaactccattgttgctcccgagatttga

SEQ ID NO: 189332 - DNA, 109 bp, Arabidopsis thaliana landsberg
attcttctaaaatgaagagaatccgaggatcatttttgaacaataagacaaaaatccaaaagaatgaatcactcaaagtaaagtatcaaactcgacgtgagagaaatgt

SEQ ID NO: 189333 - DNA, 299 bp, Arabidopsis thaliana landsberg
agcttagaaacgcttgcgttcgtgggggaattgcgggggtcgtgaagaatgcggagaaatttagcaaccttctggcccccttatgcggtctacgtagtgtggaacacagggatggcggggccgggggagagttcctccagtacgcgctcgggcgatcggcgcggttgcatcagagcgcgtacgtcctgtgcggtgactggcacctcgcccgggacgtcgtccggcagacgctgctcaaggtgtatttgcactggccacgcctccggcaggcgcgcgacccggacggttacgtccgccgg

SEQ ID NO: 189334 - DNA, 129 bp, Arabidopsis thaliana landsberg
aacaacgactctaacacaacaaaacactgtacaaattctgataaaaaaaactactttttcgactcgagttttgtcaaaattataaacatcatcggacaatggacatctacatatgtgtcgatattttag

SEQ ID NO: 189335 - DNA, 105 bp, Arabidopsis thaliana landsberg
atgagtcggaatcctaaactaagaaacattttttataatgatcggtacaagtatgtaaccgatcagttctggacatcttatgtactgactcttgcgattgtcaag

SEQ ID NO: 189336 - DNA, 223 bp, Arabidopsis thaliana landsberg
ccaactctactgagctcacaaccatgggttggagatgttgatgttgacattaatatcaaacgtttcaacggcatttctacgcttggacgttctgacgttgaaactctcaactttaacgcacactttcatttattttcactcgcaatgatcaccatgctagtaaacagtgaattgttggataatggaaatgacccagatgatcaaacattacatgccactgtag

SEQ ID NO: 189337 - DNA, 2382 bp, Arabidopsis thaliana landsberg
  unsure (1)..(2382): unsure at all n locations
atgcacaaacgtctagaagagttactggacttccaattgatgcaaaaggaaagtgattttttacttcgggttcggttcttttctccttctttgatcatgatcattatgaatttaaccgaaccgaaccggaccgaacccgaagttgaagttcgggtttacttcgggttctggaagagaacttatccgcaactgtaaactttttagttcagttttcggtttggttcggtttataaccgaactaaccgaaatgaaacaactaaaatgtctaaacctgatctttaggacacttgggttttcctttcttctcgtctaacttcgaaacttgcggcggcgtctcatctccgtcgagaccatctccatcgaaactatcttcgacagtgacagttctccgagccttggattctgaccaaccgacattaatatctccaggtaaaggtctgctttctcgttgatgtttattcgattccaaatgttatgtttcttcaccatcgatttgattcacgtaatgtaatagtacaaggtttgtttgttttcatgtttcttctatatttgtctaaacgtgaaacccaatctgcttcaaagttttgttctttctcagttccttcaagtataaatgtgcttgtgaatctgcttgatgttgacacttgacactgagaactgtgtgttttgtagatatgtcttcgccttcttctcatgccaacaacaatgacttgcttagtgaagaagttaaagttcagactagtgtgggaaagaaaaggacagaaacacaaagatcaagttctgatcatcaactaaaaccaaggaagaaactttctcaaagttctgatatacgacaatactttgttccaaaggacgatgantaagagagcactaatcgtacaaggaatgacattggaagatgtgagctgtttaaggcttatcaagagagtagtgaagataaagctttgactagtggtaatcccacatccttgaaatgtgatcaagatgagtttataagaacagtcagtgagatgattgttcttagtgggctgccgttttccttcgttgaatcggaaggctttaggagattctgtcataatgtaatccctatgtacgaggatgtatcacgacagacagttgctaaagatattgctgtgatgtatttgcaagagaagtcttttttgaaggtgatgtttagtgttaataagatgagagtctctctgactactgatatatgggaagctcctactacctcatctagttacatggttgtaacagcttactggattgatgcaaattgggaattgcagaagagaatcattagctttaagcctgttttagataagaaaggagaaacgattgcaagacgtcttattgaatgtttagatgaatgggggattgagaaagtcttcacagtcacggttaataatgctgagggtaatgatgatgaggctctaaccttattccaggatgctatgaggttgaagggagctaatgcgttagttaaagatggtgatttcttgcgtatgcgttgttgtggtcacattgtgaatctgcttgtaaaagacagtatggagcatgtgagtgatagtatcgttgctgttcggaatgcggtgaagtatgtgcagtcatccttatcaagaataaagtcattcgagtttcgtatagagacgggaaaggttcctaaaggcaacttgtcattggatagcgttactgagtggaattcgacgtatcttatgttggtagctgcacttaagttacgggtagctttcgataagatgttgggtgaggacaagctttatggtaaatattttcttgaaatagaggaggagactggagaaaaacgtgttggaccgccagtttcagctacttgggatgaagtggaaaggttggtaacatttctcggaatctttttcaattgtactgtggaatcttcagaacgtaaagcagcagcttcttcaaaaggttacagtgagattgccactattgactggaatctaatcaaattaagtaacaacgttgatgaagaagtaaggaaagaagcaacaagtataaaggacaagtttgagaagtattgggatggattgatcaatataaatccacttgtgattgttgctagtgtgtttgatccaagaaagaaaatgaagtttacttcactttgctttgacaggctccatggtaaagatagtttggaaagtaagaatcttacattgtcgattacaagtgtgatgcgtcatctatatgaagagtatactataatgctggataaacagtctcaaagtgatgatgctgcaatacaaagcgatcataggggttctgagcaatcaggtgagtgtgatgggtatataagtagtgactacttgtacaaagagatgattaatgaaatgagaaaagaacaagcag

SEQ ID NO: 189338 - DNA, 348 bp, Arabidopsis thaliana landsberg
atgaccgatctttcatccgttcaagagcccctttcgcaccgtgcccgattgtatgaagcgctggaaaagtcagttgcctgcatcgaatttgatcctcaaggccatgtattgaatgccaatgctgtgtttttaaagctgtttggatatcgggaagaccaggtcatcggcaggcaccatgccatgttctgcaagccagacaccgctgaatccatggaataccggcaattctggaaagacctgggcgagggcagacccgccagcggtgaatttctgcgaagagacattaatgggcgggatgtttacattcaggccacctacaacccggtgtttgatgacaacggagaggtg

SEQ ID NO: 189339 - DNA, 738 bp, Arabidopsis thaliana landsberg
atggacatacttaacttacgtgccattaagataatcaagtgtcctcaacttcgagtatcaaattatgcagaagctattcataacattcaacaagtaagaaaggtacgtatcatatagacaatgaagttgagatcaaggtaacaagataattttatttaatgttacataggttacatgaaaagaaagatcccaccagaccaaaaagaaaacgaatcatctctatgctaaagagagtaaaatgataacttaattctaagagaaaaacactgattaagcctaaaacactagcgaggtaatgttattattacctacttctactgcatccaaaattttgctgattgaattaaagcactatgccctactgtcacaacataagtacacaaacgaatttggatgccattacgagctaatcctataatccatcccaagaaagcttgcgagttaccagtaatcttaaaacccaaaatcgcattgagcagatgcccatcagggtaatatgtacctcacaagaagaaaagtaactaggtccaagctgatgatcatctcgacattaatagacctgtcaaatgctgtccatctgaagagccaaaagtatcttccatgaacttacagttctcacaatccaaagatctttcactagagaaaccatcattcaagctaggatcgtgtggacagcaactgacaactcgattccgcttcctcgatgattttttccactttaagtcagaagttgactag

SEQ ID NO: 189340 - DNA, 137 bp, Arabidopsis thaliana landsberg
atgacgtactctccagttcggagagaaacacgttacttcttggcgttgatagttcttgtttacgcattcaaatctaaactacgaactaaggctaatcagtttaatttgtcggaaaaggtaattgaaaaatccaagcg

SEQ ID NO: 189341 - DNA, 114 bp, Arabidopsis thaliana landsberg
aaaaccaaaatccgaaaaaggatagagatgaaattatatgtttatattattataagcaaagattccatatttcgagggaagcagaagaagaagctcagtcggcggccggattaa

SEQ ID NO: 189342 - DNA, 125 bp, Arabidopsis thaliana landsberg
atgcgcacggccacgcagggcctgttacaatgggccggaccacgcgtgggcctccatgttggacgaggccgcggggtaggacgacctcatcatgggccttcgtccaacgacgcgtggggcgaagg

SEQ ID NO: 189343 - DNA, 339 bp, Arabidopsis thaliana landsberg
caaaggcttttagtccattatcgcgacaacgttattccggtgaatagttctgacattggaacggtttatatctccaaccaaatcgttgacgtgcaaacgctggcaaacaaaaggtacgttctgaacaagaccctggatgaattggaacaaatacttggagatcagtttttccgtgtaaaccgaacagctctcatcaacaaaaaactagtactgggagtaactaagcaattgaatcgaaaactggtcatccaccttgatcctaatttcaaaactgatctcaaaatagcagtcagtaaatcaaaatccccgttgtttttgaagtggctgaagacagcctga

SEQ ID NO: 189344 - DNA, 498 bp, Arabidopsis thaliana landsberg
atgtataaaacgacaatgtactttggaaataccaatgaaaacgtaatgtcatgcatgtagttccaagctctttggcattccgtttcaattctattattattttttgtttgttatacgaagaaaaaagagtttcgacggtccagtttatttgcgtaaccttcacatatacttctttgaacgttaacatctcaatttggtcaatcagactgtattcattagtgtagagggaatcaaaattttatagccacaagttcacgagtataagacgaagaagagtttcaatgaacaaatcaacaaatgatggaagggcttttgtattttagtttaatcaataatgacttttcttttgtatttgataaatgctgatatctaaaaagaaattgcattgtataaccaagaaaaaactatataattcatcaactaatattttgtagccacaagtttacgagtgtaagacgaagatgcgtttcaataacaaatcaacaaatgatggaagag

SEQ ID NO: 189345 - DNA, 563 bp, Arabidopsis thaliana landsberg
atgacaaaacagcatttttcaactagtgaacaatacaacactgggaatcactctgtcactggcctgtctagacactggataaacaggtatgttcattcattaaatgcaaatccgcactttgcagatattttttggttttcgaccttaaatgcaaatcacaagtttgcttggggtctaaatacgtacatatgcatgagcctcaaaacctttttcaccttgtttgactccccaatctatagctattacttgatattgccatataagagtgtatcatactatcatgattgtacgaatggaatatatccaccactatgctgtacgtatggaatgtgagcaaataaatggtgtgcaattatgagtgtaagcaagttaatgatgtgcaatcgatttgagaaaagactgtttcaaatctatatgctactcgtatatgatgaattaacgtttgcctaccaaactcttatctatttttcagggtccataagaatgacgacatgggcagtcctccaggagatgcaactactgacacttacggaaactttagtgagacgcagacagaatcacag

SEQ ID NO: 189346 - DNA, 390 bp, Arabidopsis thaliana landsberg
ttctcgaagacgcatcaattcattttacgctacgtatatttaaagcgacagtccattcaatttggacggaaaggaatcgaagaagacatggtgagcttcccatctctgcatcggtaataattcaagtgattgaccggacagttcggaatcggcttctatatatctcttcaaatgggttcaacctccatgagagatggactgcaactctggtttgcaaccaaaccgtaaagcttcagcattggtcattcattcaaaaaaagaaaaacaaaatctgcacgtccaatcctactggttaaccagtgttacagatatatcgggtttgagtttactgttaatatccgacaatttaaaaagcgcaaaaatccacaaaaatttggcactaacttgtga

SEQ ID NO: 189347 - DNA, 718 bp, Arabidopsis thaliana landsberg
  unsure (1)..(718): unsure at all n locations
atggcctattggagaattgtacgtgatataggtgttggagatggtttatcggtctttatcaatacggaatcttaccaagtcatttctaagtgttgcatctatgtataaaccaattattggagacttaaacaaaaagtagtatatatatacatggtttgcacattgtgctatatatatgtttagatatataacagtctttggtcggaggggggtttggtgaggaagacaatgactattattattataaagagaaaagggaatctttctggtttcaacacaaactaatctcccaaaaaaaataaaaaaaactagcaatattagaagacctaacggttaattagtgactttgataatcttggcctctggttctgtccaagagcagacaagtgaatgcaattgtctggntttttttcttttttttttttgctaagagagtaaatatcattagatgaaaattaggtgttacaaagatgaagacctaagagaaagcgccttgtcaaaaaaagaaaaaaccaaggcgacaataaacagaaactgtaggattgcaaatccgttaatagagccagtgctgcataagacttctaaaattctttaggtgtcttcttgccgttatcgagttaatgatttgacggtctatatccttaaagatggcttgaggcggaatcctgatctgattgtgcatcaagttgttcctctgcctccaaacagtatacactaa

SEQ ID NO: 189348 - DNA, 329 bp, Arabidopsis thaliana landsberg
atgttcggggttgccgccgccgtcgcctggcacttcacccggcagatgcttcctcaagcggtttccgcccaccgggatcccgccctggcggagttcttcgacgcagacgtaggcatgcccgagttaagggccgccgtgcatggcgacggtctgtgccagcagggatgctcttccttgggacccgggacagcatggcccggaacggacttcttccgaaaaggaggaaggacggcctctatgccgggcaacggcacacgaaagcgggaacgaggacacgcccggattctagcgctgaccgctaacagcctcaggccatgcgctccagaaag

SEQ ID NO: 189349 - DNA, 1452 bp, Arabidopsis thaliana landsberg
  unsure (1)..(1452): unsure at all n locations
atgttggatcgagggattcggtctgatgaagttggattgacaaatgcagttagtgcatgtgctggtcttcaagccttaaaggaaggacagcaaattcatgctcaagcttgtgtatctggtttctcatctgacctgccatttcaaaatgcactggttacactttattctagatgcggaaaaatagaggaatcgtatttagcgtttgaacaaactgaagctggagataatatagcatggaatgctctggtatccggatttcagcagagtggaaacaatgaagaagcacttcgtgtcttcgttcgaatgaacagagaaggaattgacagtaataatttcacgtttgggtctgctgtgaaagctgcttctgagacagctaacatgaaacaagggaagcaggttcatgctgtgatcaccaaaaccggatacgattcagaaaccgaagtttgcaatgctttaatctctatgtatgccaagtgtgggagcatttctgatgcagagaagcagttccttgaagtctccacgaaaaatgaagtttcgtggaatgcgataattaatgcttattctaaacatgggtttggttctgaagcactagattcttttgaccagatgatacattctaatgtaaggcctaatcatgtgacgcttgtgggagttctatcagcatgtagccacataggactagtggacaaggggattgcatactttgaatccatgaattcagaatatggattatctcctaaaccggaacactatgtgtgtgtagtggatatgctaactcgagctggtcttttgagnnnnnnnnnnnnnnnnnnnnnnnaaatgcctattaagccagatgccttggtctggagaacacttttgagtgcttgtgtagtgcacaagaacatggaaataggagaatttgcagcgcatcatctcctagagttagaacctgaagactcagcaacatatgttcttctgtcaaatctgtatgcggtgtccaagaaatgggatgctagggatcttacaagacaaaagatgaaagaaaagggtgtgaagaaagaaccgggacaaagttggattgaagttaaaaactcaattcactctttctatgttggtgaccagaatcacccgttagcagatgagatacatgaatacttccaagatcttaccaaacgagcatctgaaatcgggtatgtgcaagactgtttcagcctattgaatgaactgcagcacgagcaaaaagatccaataattttcatccacagcgagaaattagcaatttcatttggactccttagcttgcctgcaacagtgcctataaatgtaatgaagaacctacgtgtttgcaacgattgccatgcttggataaagtttgtatctaaggtatcaaatcgagaaatcatagtgagggatgcatataggtttcatcattttgaaggaggtgcttgctcttgtaaagattactggtaa

SEQ ID NO: 189350 - DNA, 1116 bp, Arabidopsis thaliana landsberg
ctcttgtcctaagacatgtggaggaatcgacatcccgtacccgtttggaatcggaacgggttgctatctcgagaaatggtacgagattatttgtgtcaacaactctgttccttttctttccatcattaacagggaagttgtgagtatctctttttcggatatgtatcgccggttctttaacgtaggctacgggtcaattcgcataagaaacccaatagcttcaaagggatgctcaagtggcggacaagagtttggatcacttttaaatatgacaggttaccctttttaccttggcgacaacaatatgctcatagcggttggctgcaacaacacggcgtcgttgacaaatgtcgagccaagtattgtgggatgcgagtctacttgcagcacaaatcaagatatacctataaatgattatctcggggtactctactgtaatgctaggtatggcgattccgagtattgtaaaaatatttccattatgaatgatacaagctgcaacggtattggatgctgcaaggcaagtttgcccgctaggtatcaacagattattggtgtggaaatagatgatagtaacacagaatccaagggatgcaaagttgccttcataacagacgaggaatactttttgtcaaatggatctgacccggagaggcttcatgctaatggatatgatacggttgacctaagatggttcatccatacggcgaatcattccttcataggctctctaggatgcaaaagtatagacgagtacacaattctaagaagagacaatcgtgaatacggaataggttgcctttgcgactataactctacaactacaggctatgcaacatgttcatgcgctagtggtttcgaaggcaacccatatattcctggcgaatgcaaaggtatataagtaattgcgctaattatcctagttttctatgaccatgcatgataaaaatattccaacgagatcattgtttgataacatgttaattttaataaaatcagatattaatgaatgcgtaagaggcattgatggaaacccagtctgtacggcaggcaagtgtgtcaatttgctgggcggttatacgtgtgagtacacaaatcatcgaccacttgttatag

SEQ ID NO: 189351 - DNA, 132 bp, Arabidopsis thaliana landsberg
atggcatcaactagatcactttttgaacaaatgattgccgatcaaaatcaagagtttgacatgatgattgctaaactgttggaagcgattcgactgcgtggccttcaacatcaacaattagagaactcggag

SEQ ID NO: 189352 - DNA, 65 bp, Arabidopsis thaliana landsberg
gtgttgttgtaaaacgactttcgtgtatccctctcagtggtggagccgtggagggcccaatttga

SEQ ID NO: 189353 - DNA, 410 bp, Arabidopsis thaliana landsberg
aaatattcaggaagcagaaagtacagctgcaacagctgaagaacgagagcgctctgtgaatgaacgcctctctcaaacattatcaaggatcaatgttctagaggcccaggttttctatgctttttgacactgttcttcatcaattttcgcagctttctctaaattttagcttacccagttctcctatccagctttcatgtctcagagcagaacagggccagttaagcaagtcacttgagaaagagaggcagagagcagcagaaaatagacaggagtatctggcagctaaggaggaagcagataccctagaaggtcgagcaaaccaacttgaagttgagataagggaacttcggagaaaacataagcaagagttgcagcaagtgctactccacaacgagcttattcaaaag

SEQ ID NO: 189354 - DNA, 466 bp, Arabidopsis thaliana landsberg
atgagaagcgaaggcgtcgtcccgtgccccatttcacactctcgccgccgctatcacgtgcctttgcttcgccgctgccacctcaactttcacggctctgtcgctttgattgttggtgaggtcaccacgtgattccaacaactttcaagctacttatattatattctttaattttactcataatataacagataaaattatacaactcaaaattaagtcgaccaatttattaaaaatttactttatcacaaagaaaagaaaaatctaaaattttatctttttcttttacagaaaacaagaaaagaatttatcaaatacatcaaccgagtacaaacgattttatcgtcaattactaaaactattttatagattttcatctcttattccgacttttgttgcacaattatctttgatctatgtcgtgttaaattttatttatcaaacgatgccgttaaagattggttaa

SEQ ID NO: 189355 - DNA, 231 bp, Arabidopsis thaliana landsberg
cttgtggtctccatgcgttccgtctaacggagctacgccttcgaacgaccctcgcccagtctcgggaggtgcatttctccattgcggctgtggtgccaagccattcggcgagtacagaggacgatacgaagagtctggcgcagcgtttgcctgaccatacggacctgatggctggggttgctggcgtgaggtctcgagcgactgccattgcccagattgtcgctgtgactg

SEQ ID NO: 189356 - DNA, 370 bp, Arabidopsis thaliana landsberg
gagtcaagatggtttggaggctgtagcgttagatggagaaggagaagaaggaagtacaccggaaacaatccgaagcttcagccaaaagtacagaccaatgttttttgaggaattgattggacagagtatagtggttcaatcgttaatgaacgctgttaaaaggagtaggatcgctcctgtttatcttttccagggtcctagaggaactggtaaaacatcaaccgcaaggattttttcagccgccctgaattgtgtggccactgaaaaaatgaagccttgtgggtactgtaaagagtgcaatgatttcatgtctgggaaaagtaacgatttttgggaacttgatggagctaataaaaagggagctgataag

SEQ ID NO: 189357 - DNA, 580 bp, Arabidopsis thaliana landsberg
atggctagtctcgaagccggttttgctcgagagatattcgtggagtgggcaaatgatcccagaaatttagtcctctttactgaaacaggccaggtatgtttttagaacccacatacgttgaggaacgaaaatttattagcattgctataaagacctgatggtagattcttttcctagtgctgatcagctagttaagtggatatatgagaatcttttttgtcttctgatctgaataagagttcccccatttatgtgtggatatttacccccaatatgtacacaataggcagagattgagtaccttaaagcagcattataattaccaccaaagcctggctggctcctttaggataatctccagagctttcagtcttgaatttatcaattagttacatccagtacaaaataaagggtcttagtagactatcatattaatggaattgacaccactatgcacaaactgtctaattggccatatcattcatctcaattgaacataatttttttttgtaaccgcgtactttgtttatttttcttctagcgagacatcatcctgttccctgaaatatcatacttttaa

SEQ ID NO: 189358 - DNA, 509 bp, Arabidopsis thaliana landsberg
atgaaggtaaatgcatctctccagtaagttacactatatagtggaaaagacagcagtcgtcctctatttaataatacagaaacctagtaatcgcgtaatgatgtagcatctctatatccataagagattaacttcaagacttaatacagataaatgagaaaatatcaatgttatattatatatcaaatgaaaattttagagtatgtgcacaatcaaaatgggaagaagatccaagttctttcgtcattgatattttccatgataatacatattcatgggtaatgaggcacaaaaagacctttaaaacacaaataatatcaaattcctcatgacaaaaacactagcgattagatacattgccacaaacgagaagatgatgagtcgaaacctcaattctcactggcatgtgagatacattacttcttacgcgaaagatagtaaaacaggttaggagtaatgagggggggttctcggttggaaaaccggagaccaaggtggataaggactaa

SEQ ID NO: 189359 - DNA, 144 bp, Arabidopsis thaliana landsberg
attgagaaaccgctccattcaaaacggtttagagccggtcacgatcctgtggaagatgatgaaccaactgctcaaagactggactgcatcctactcgatgtggaaattcctagactccgcgtgggtcagattgatgagatataa

SEQ ID NO: 189360 - DNA, 93 bp, Arabidopsis thaliana landsberg
atacgtgatagtatttggcgtcaagcagagaagaagctgcgatcggggaaagtcttgtgtggccacgaaaggtgcaacgttgttcgcaactaa

SEQ ID NO: 189361 - DNA, 301 bp, Arabidopsis thaliana landsberg
atgactacgaagagaaagcactttgtaaatggagttagaagagaaagatttcggattcttgagatcgttgatggaggtgaaatcaagatcaggcaatgagagaaagagagatctccatcgtttcgaaagtaagctagcttgtgctgcagattcaagaggaagcaagagaagaatctgatgaattagagaatcagggaggttgctgattctatctactttgataaaccaatttgcttcttcttctttcttcttcttcttccgtttcacagatcttgtctccattgttaaaatagtatcttaa

SEQ ID NO: 189362 - DNA, 304 bp, Arabidopsis thaliana landsberg
atgaccgaaaggtacccactcccacgaagtagtgttccctcgacgacaaggcggaaagacggcgcgtatccccatccgggggcttggaagacgggaagacccggcgcttaagggaggaagaagacatggtcgccttacgaaaggagcctccctccttttaaaggcaactccccctacgtcgcccccaggcccgcgggccgagtcttctccaacacgctccaaggccctcccctgcgactcgggcgctgggtcctgcatgtcatgaaagccggctcagggcagaagaagccaaaccgccggcatg

SEQ ID NO: 189363 - DNA, 62 bp, Arabidopsis thaliana landsberg
cttttgataatatgaccaataacgccaattctccgtggcggggacgtaacgcgtatgtttag

SEQ ID NO: 189364 - DNA, 326 bp, Arabidopsis thaliana landsberg
aactgaatgcatagcctatacggcacatgccaagaagcaggaaaaatcttccaaatttcttcatttgttcggattcgacgctttatccaagcatatctccgctctgtcttatccaactttgccaattctgccaacagctaacctcttagaaattcaatccaaaaaagacaaactattgccagttatacttagggcattaagtccaatgtaccagctccttcaaaaatttgttcatatgaggtgagctccctgctgcaaaagttatttaccaactcttccctcacagatggttccagagcatcaacaaccaagcaagaatcagataa

SEQ ID NO: 189365 - DNA, 258 bp, Arabidopsis thaliana landsberg
atgccttcgacggatatgaatggtggagggacggatctcattggcgtcttcaggattcgacacaaagccatcgcgacgtccggtggggaccacgtagcttggtcctccacctaagaacacggcgtcacgtgtggcgagcgtgactatatcggagcacgagaccgtagagggacattgagcttcgagtgccgtcttgatctcgtcgatcagctcgaaccctctcacgctaaagtttgggccggcgtttttttccgatag

SEQ ID NO: 189366 - DNA, 33 bp, Arabidopsis thaliana landsberg
ggcgacggtatgaagatagcaacaacaacaaag

SEQ ID NO: 189367 - DNA, 495 bp, Arabidopsis thaliana landsberg
atattaccgaggttgctggatggccagaatttggagggcaaacatgcaaaagcagttagttgcggcgcgcgacatagtgcggttttggcaggtatgttatttcaaatgttgatggccgaaagggacctccccaaaccgatctgagccctagcatttgttttcagttgttttaacgagaagaaactaaagagccctagcttgtgagatgctgcaacttgtcttcaggtctccttttgcattgttttcagttttaatctgtggtctctctttcaggggagataaagctagctctttccttcttagaacatgtgacatgttcgtgaaacactttgcgttctatgatatgtgcctgatgttgatacaccttttaagtttggttcattgtaatcagtgaaggtgtggtactgaatgtattatctgttttttctgattaacactgcaatttttgttttgcagaacatggtcagttgtatgctggggatgacaatatgacag

SEQ ID NO: 189368 - DNA, 375 bp, Arabidopsis thaliana landsberg
caaaaagaagaacaaaaaaacaaagcatcgaagagacaaaaagatgaacaataaatttggcgggaagaagccgacgggaacaccgtcactagcgtggtcgacagtcgtagttgtagcctctctgctcgccggagcctccgtcgttcacaatatatacaagccagatctcgtaagttgtctttctttacaaatgtatgtaaggtgttcgatgaaatgtctagctgaaccaaaaaaatatgttttgaaaatccgtggagaatggagatagatgttctgataattcatttcccttttcgttcactttggttgcagacattacctcagatcgaaaacgatgaaggagacgagaaggaggagtctgcaaacaaaggttaa

SEQ ID NO: 189369 - DNA, 231 bp, Arabidopsis thaliana landsberg
atacttttattgaactcttacgaaggttacgagaagaataaaacgaaaaaaaatgttcttcttcttcgtcggtggattagggcaacaagtaagacaagtcctaaaatccggcgccggaacatgcataagatgcggttctcaagccgatttggtcgagtacgacaaagtcataaagctcttcttcgttcctgtctggagatggcctggaaaagatcctctacttcattgtag

SEQ ID NO: 189370 - DNA, 101 bp, Arabidopsis thaliana landsberg
gttgtccatgccggtgagctgctgctccatcacttcggtcaccgagccttcggccgtgctggagcttgcgcccggataatgggcaacgatccaaacttgcg

SEQ ID NO: 189371 - DNA, 347 bp, Arabidopsis thaliana landsberg
aacctttaaacagtgtgcatggtaaaatagataagcgagcagtatcaccacatcggtttccgctgctaagatctggttcggttgctatccgaccgtcatcaatcagccggccaacaaccccgagcaagagtagagcggtaactccaactcctaaacgggtaagcttcggttacatttcaaaaacactcacttctaggctctatctctaacggttgattcttgatattttctggctcagtatccgtcagaaccaagaagatcggcttcggttcgggttgcgttcgagaaagaagctcagaaagaaccagagcatcaacaacaaccgagcaagagcaaacggctgctaa

SEQ ID NO: 189372 - DNA, 467 bp, Arabidopsis thaliana landsberg
gggactcagactcaaactcttcgccctcgggatttctcggaagccggcgcgctataattcaccggactgtccggtgtgcatcggacatgtccggtgctccaaggaagctcggcctcctgaactcgccagcctcgggttcgcgcggcagcgctccactaaaattcaccggactgtccggtgtgcaccggactgtccggtgagccaacggtcgactagggccaacggtcggcagcggattctgcgcgcgacacgtggccaagccaacggtcggaagggggcaccggactgtccggtgtgcaccggacatgtccggtcggccaacggctcctcagatcagcaacggtcgactgcgctgtttaaggaaggaaatcgggcaccggacagtgtccgtgtgcaccggactgtccggtgcgcccgacgacagaaggcaagatcagccttccagatttgttctcaacggctcctag

SEQ ID NO: 189373 - DNA, 157 bp, Arabidopsis thaliana landsberg
gttgttgttgccacaattgcgtttggaatgggaattgacaagaaaaatgttcggaaaatcatccattatggttggccgcaggtctctcgaagctcttataagatttctatatctcaacatttcacatttcctataatttacgttctattcaaattcg

SEQ ID NO: 189374 - DNA, 142 bp, Arabidopsis thaliana landsberg
attcaccaatgggatcgaaaaatcaacggtccagactaaagttaccaacgcatctctgaatcagcaaaacaaaggaaaaatcactttgtcacggcaacttcatcagatcgtggaagcttcatgcaatatccgatttgactga

SEQ ID NO: 189375 - DNA, 995 bp, Arabidopsis thaliana landsberg
atgtatgtttgcgctcgcatagagaacgatttggttgaggagcccgaagaactcgcaggagaagcccctgagcagcagtcggttggtggaggcaagtgtcccttgacctatctctgtcctatacattctttaattcacctcccgcattacacatttatacctaaggattgactagattttgttatccatgtccttgtttacctatttgggttggattattattgtttagctttatgctattgctcaactctaatcaatgaacatgatgagaattatcaatgatacgctgttttcccctcttttattatgatgttatacttgtggtcttcaagggggctcgagcggtttcttgagtgcctctccgtaaggacctgttcgttggatgaccgcccgggaaaacagtgcaaccatgagggtggaatggggtgcccttagctgaataattagaggatccgaggtgtagttcgcttagccgtcgtgccgtcaatggggctcggtgtatgcggctcgctctgccaaggttgatttgtcccttggggaggagtgcggtacatttaggatacctgaaagggaattaggcttacacctagttcctaaataattttggtggttgaattgcccaacacaaataattggactaactagtttgctctagtgtataagttatacaggtgccaaaggttcacacttagccaataaaaagaccaagtattgggttcaatcaaagagagcaagggataaccgaaggctgccctggtctggcgcaccgaactgtccggtgtgccaccgacagtgtccgtgcaccagggggctccaagctaaactgctcaccttcgggaattctcagaggcgcttcgctataattcaccggactgtccagtgcaccaccggacagtgtccggtgccccaggggagagcaactctgaactcgccagcttcggaaatccgctccgctaaaattcaccggacatgtccggtgcacaccggactatccg

SEQ ID NO: 189376 - DNA, 1518 bp, Arabidopsis thaliana landsberg
atgacaagttgcgaggtgagtgatacggctgccgagattagaatagtagagaaggtgctaaagaacggcgacctttataacggaggcttatcagcgggtgttccgcatgggacagggaagtatttgtggtcggatggttgtatgtacgagggtgagtggacacgtggcaaagcgagcggtaaaggacgtttttcttggccgtccggagcgacctatgagggtcagttcaagaacggtcgaatggatggcgaaggaacgttcattggaatagatggcgacacttatagagggcattggctgtggggaagaaagcatggctatggagagaagcggtatgcaaacggcgatggttaccaaggaaactggaaggccaatctgcaagatggtaatggacgttatgtgtggagcgatgggaatgagtatgtgggagagtggaagaatggtgttatttcggggaaagggaaaatgacgtgggctaatggaaaccgttatgatgggttatgggaaaatggagccccggttgggaaaggggtgttgagttggggtgaagagaagactagttataatgggtgggggaggaagagcaagaagaaagatgaagagattgtgcagaaccataagctctcttccgttgaaactttgtcagcgaataccaatttcccgaggatttgtatatcggaattggaggatactggcgtgtgtgatcatgtagaggcgagtccatacacgagcgagtcggatacgagtggatgtggagagcaagagtgggcaagaagccctttgcttttggagagtggtggtgccatgagtgttcaacaaagtcctaggtggttggatgaaggagatgttaagaaaccggggcatacggttacggctggacataagaactatgatttaatgttaaatctacaacttgggattaggtactctgttgggaaacatgcttcccttttgagggaacttaggcatagtgattttgatcccaaggataagcaatggactaggtttcccccagaaggctctaagtctacacctcctcatctatctgccgagttcaaatggaaggactattgccctattgtgtttaggtaagtaaatactttaaaactttggagtacaaacaatttgttaattctgattgcacatttttgtgtggtgaaacaggcatctaagagatttattcgcgatagaccaagcggactacatgctcgctatttgcggaaatgaatctcttcgggaatttgcttctcctggaaagagtggaagcgctttttacttgactcaagatgaacgctacatgatcaaaaccatgaaaaaatccgaaattaaggtaaattatatcttcttttgcgttcacattgctttcgataacatatatattttgagattttttaaaccatgcttaggtattgcttaagatgctcccaaattattacgagcatgtttccaagtacaagaactctttagtcactaagttctttggggtgcattgcgtcaaaccagtaggaggccataaag

SEQ ID NO: 189377 - DNA, 604 bp, Arabidopsis thaliana landsberg
aaaaatccaaatttcctggctacaaaataaccttccaatatgtgatacagggaaaggcaaagaaaattgtcattgttggtggtggctacatcggcatggaggttgctgctgcagctgttgcgtggaatctagatacaacggttattatccctttcacttgaatttttaaattgtgctagaaatgaagaatacttctaatcattcgatgagttaaacaaattcctagaaacgttcagataaattgtggaacagatgtactaacttacagttgcttttgggctttcccatgtggaacaatagattgtattccctgaagatcagcttttgcaaagattgttcactccatcgcttgctcagaaatatgaagaactgtaccgtcaaaatggtgttaagtttgtcaaggtaagatatcagcacacgatcaacaccttatactgaagcctttgctttcctgcaaacctaagaatttcagaaacacagtgtgcaaacttgaatttctctttctgttgaacagggcgcttccataaataacttggaagcaggttcggatgggcgtgtatcagctgttaagcttgctgatgggtctacaattgaggcagacacg

SEQ ID NO: 189378 - DNA, 155 bp, Arabidopsis thaliana landsberg
atcttggtgatatagcaagagccaagttatacttcgattcggttggacattactcgagaccagatgttttacacttgaccgtaaatgagcacccgaggaaatcggttacattcgtgacgaaggtggagaaagctgaggatgactcaaacaaatag

SEQ ID NO: 189379 - DNA, 80 bp, Arabidopsis thaliana landsberg
gaaccatcatcatcatcgtcattatcactgccatcatcatcaacaactggagaacatacaatggtgaccagatattttga

SEQ ID NO: 189380 - DNA, 164 bp, Arabidopsis thaliana landsberg
actatgccgccgccgactgctccagcggaaaacgcgacgcgcatcacttggggtataattccgagccggcggagccggaaatccctaccgaggccgtcaggccgacatcagacaattccaaacgtccaaatttcaaaaaacagagcgccccaaaaggaaaacac

SEQ ID NO: 189381 - DNA, 223 bp, Arabidopsis thaliana landsberg
atggtgtgggacggtaaccagtgggttaacgtatcagccgacgccgatggcaacctcaatgtgaatgtttccggtgtgcagattgacaacaccgacggagctatcacagatggagttgacccgctcatcaagggcaccgtgaaagattacacaaattcaaaccctctcgctgtcgtcctcgttgatacttctggagatgcttacaccgctttttgtggcacaa

SEQ ID NO: 189382 - DNA, 139 bp, Arabidopsis thaliana landsberg
atgtcttcgatgggagcaaactatgcacaacttcaagtcatgcagaagaagcagaaggagaagatgatgaaaaagaagttggagaagagaagagatggcggtgttgacggtgaagaaggaggtggcgtttcttccgccg

SEQ ID NO: 189383 - DNA, 368 bp, Arabidopsis thaliana landsberg
atggaaagtggaacagtggaaaagtgtaacagtggaacagtggaaatggtctacattgaattgacgggttctttgtacctcaataaaagactgactagtccagtggaactagataggttcaaaggtcagggagatgatcgaacctggttaggatgtggagatcttgcttaagcaagaatgaggtgtgtattatagtcttgcatagtgatgtaaactatatgagtgttgtatttgtttctatgtgattgttgattgtagtttaaaggtagaatcgtgtatcgtatttctagtgagcggaaaggatcctcacactgagtaattctttactcaccctttttttcccttttttctcagcgtcacaggtgtga

SEQ ID NO: 189384 - DNA, 26 bp, Arabidopsis thaliana landsberg
atggcgatgacaaaaccaaaactcaa

SEQ ID NO: 189385 - DNA, 1900 bp, Arabidopsis thaliana landsberg
gaggtgtggtcctatgcggcctgattacggacgcatgcggggtccactccataaccggggcgttcctgttcggtctctccattccgcacgaccacatcatacgtaacatgatcgaggagaagctccatgacttcctttccgggatccttatgcctctcttctacatcatttgtgggttgcgagcagatattggtttcatgctccagtttactgacaagttcatgatggttgtagtcatctgctcttccttcttagtaaagatcgtgactaccgtaatcacctctttatttatgcatatacctatgcgtgacgcattcgctataggagcccttatgaacaccaagggaactttatcgctcgtcgttcttaatgctggtcgcgatactaaggtactaatcaatcaatcaacgttcttttattgcatatgacacttttcgagtctagggaagtataaagttgaataacatacgaatgagtgaaaacattagagaaatatttcattaatcattattcttttttttttttgtcaaggaatcattattcttctaaacattattttactcatagaacaaagtatgtttgtttttgtcagcaataattttcattgttttttttcaaatagtaaaatttcagcgttattcaattttatttaatttctccaactaaaaaaaccatttgcaggcgctggatagtccgatgtatactcatatgacgatcgcgcttctagtgatgtcactagtcgtcgagcctcttctcgcatttgcatacaagcccaagaaaaaacttgctcattacaagcaccgtacggttcaaaagatcaaaggagaaacagagttgcgcgtcttagcttgcgtccatgtactccccaatgtctctgggatcacaaatctcttacaagtctcaaacgcaaccaaacaatcacctctcagcgttttcgccattcacctcgtggagctcaccggtcgaaccacggcctctctgctaatcatgaacgacgaatgcaaaccaaaagctaacttctcggacagagtcagagcagagtccgatcaaatcgctgagaccttcgaagctatggaagtcaacaacgacgcaatgacggttcagaccatcaccgcggtctctccttacgcaaccatgcacgaagacatctgcgtgttagccgaggacaagcgagtttgtttcatcatattgccttaccacaaacacttgacaccggacggtcggatgggagaaggaaactcttctcacgcagaaattaaccaaaacgttttgagccacgccccttgctcggtcgggattttggtggaccgtggcatggccatggtccggtctgagtcgttccgtggtgaatcaatgaaaagagaagtcgccatgctcttcgtcggtggtccagacgaccgcgaggcgttatcatacgcttggcgaatggtcggacaacacgtgattaaactcactgtggtaagattcgtcccaggacgcgaagctctaatctcatccgggaaagtcgcagcggagtacgagagggagaaacaagtcgacgatgaatgcatctacgaatttaatttcaagacaatgaatgattcttccgttaaatatatagagaaagtggtcaacgatggtcaagacacgatagctacgatcagagaaatggaagacaacaattcttatgatctttacgttgtgggaagaggatataactcagattctccggtgactgccggtttaaacgattggagcagtagtcctgagctaggcacaataggggacacattagcttcgtcgaatttcacaatgcatgcttcggtattagtcattcaacaatactctgccactaaaagacaagctgcagtcacagcagccgccgcaacaaccgttatgggagcggtcgccggtgttacag

SEQ ID NO: 189386 - DNA, 113 bp, Arabidopsis thaliana landsberg
acttgccggggttctattaccagcatgctggggagtcaatgtcaaccgtcattgccattggtgtcgctatgttgactgtgttccaaccaaaaaatggagctgcatcgacatga

SEQ ID NO: 189387 - DNA, 969 bp, Arabidopsis thaliana landsberg
tctcggtggggtgtcacaacgaaaaacaacctgctcaaggggtagtcaaattcataacacacacgcagttaaaggagaggtttcttgtgaacgacaaagcggttttctatgccgagataagcgaagaagtcataccaaacttccccgttattggtatccctcgaaccatggggacagcagaacgctttaaactgatagaggtggctcggaacaattccagattcacctggaagatcacgaagttttcctccttcaatggtgaagagcattcgtcttacgagttcacggttggaccacggagatggtatgcaaatcttatatatactctcatcttgtgacttgttttgattgaatggtcatgaattttttataaaaattatctaaatagactcacttattcaaaatattagaataaaattaataatgtgttacattaaaaaaaatatacaaaacaatggtaaaaatatgtttatcttatacatatgcgcacatgtttcccatatatatgaaccaggaaactagtaatgtacccaagaggaaccggagatgggaaaggaaactcgttgtctttgtatttgaatgcgtctaattacgtcacaaataatggtccaaaggggagaacattcgcggtctataaattgagagtgttggaccaactccatcgcaatcatttcgaaattggtatgtatgtatacgtaattatccttttgttttctaagctttacattttctatatgcatatatcatctatataataagccgtttgctactactaatgatcacatgtttgataaagactgcctagattggtttctttatgatccggttcatccaagattatgctcatggggacgtaccaagttcttgccgctggaggaactccacaaagcttctaggggatttctggtgaatgatcagatatatatcggtgttgaattcttaattgtatccactactgagtatctctga

SEQ ID NO: 189388 - DNA, 205 bp, Arabidopsis thaliana landsberg
tccgcccataagcccagctcatataaagctcgagcgccttgcgggtgaccgggccttcctggaaatcgcggccatcaaggcggttgacgccgacgaccttggagtagttgccggaggtgaagatttcgtcggcggccatgaagtcttcgaccgacagcgttgcctcgcgcacctcgaagccgacacaagcgtagcaggcccatga

SEQ ID NO: 189389 - DNA, 98 bp, Arabidopsis thaliana landsberg
gattttcaaaccatctctaaacgtcacccttgaaagagtcacatataactatgtccatgaaaaaaaaattggcctaggagggtacaacccaactttgg

SEQ ID NO: 189390 - DNA, 1149 bp, Arabidopsis thaliana landsberg
aaaaattgaagagacaccgaagtttatcgaagagaataacgtttacggagtcgattactaagcaccagcctgttaacaccgtcgcgtttggagccggcggatttcaccatatcaggtaatgatttgatttcaatttggcttttgtactggtgttgttgccgccgccgttcgagctaactcatcggttttgtttctagatggacgacgttgaattaccgaaccgatagattgcatttggagaagagccgcttggtgaaagggtgaatgtgtatcacaaaatcaaaacactgtccggtattataaacgcgctcgatgaacaagagtgatctttcattctcaacagttctttggggggcttctagatttccccaacaaaccggcgtttcggcgagctttgggttatttttgttgagtaggcaattggaagtggctaactccgacgagatttgggttgtttttgccggtactcccattagattttcgttaagggagtttaagattgttaccggtcttccttgtggcaagtatccaaaagttcaaaagaataagaagagaggaactggtgggaagcagattccatactacaatacattgttcggtcttgaagaagatgttacggttgagagggttattacaatgcttacgaaaagggtggtaacggatcgcgatattaggttgcggtatgcttgtttggctctcgttgatggcttcttattgcctacatcacactacccaaaaataatcaaaaaccacgccgagatgtctgaggatctccaaggttttctgtcatacccttgggggcggctatcattcgagatgatgatgacttccattaaagagagggaagttgagcagcttgcgactacgtgtgtggcggttcaaggtcttttattcgccttgcagctcgttgtccttgaagcaccccccgcaattgaggaagggcctccaattgatgaggtgtttcgttctgactcagatgaagaagcagccgctggagtaggttcgcgtcagggagttgccctcaagctcgggaacgctaaagatgttgatgctaaatgcgaggtaatgatttcggacgatcaatcgataacaaatttgttatcacattaactgtttctttattttagggtcacagcttatgttatcccg

SEQ ID NO: 189391 - DNA, 119 bp, Arabidopsis thaliana landsberg
acatttcaactcaagaccaaagttataatttcatttcatctaaatgtaaagaaactattatgggagccatggaccgttatgtttcggtcaagctcacatttaatttacttcctttgtaa

SEQ ID NO: 189392 - DNA, 136 bp, Arabidopsis thaliana landsberg
gttatatttatccgcccccacaaactggggtaaaattaatggtttgtataaccgggatgagtcgattaaatttgctgatgctctaaaaaaacaaggagaagaatggaacaagaccccaattttcgtcaagatttag

SEQ ID NO: 189393 - DNA, 98 bp, Arabidopsis thaliana landsberg
tttttacatatacgatgtatatacacttgctggtattacaggtatgccgatgcatacccggcatactctataggtccatcactgagaggctcgtttag

SEQ ID NO: 189394 - DNA, 117 bp, Arabidopsis thaliana landsberg
ctcggcgcgacggcgccgctcgaccggcctggggacgacggctgctcgcattggcgccccactagctgctcgcgttgcgtggagattggagaacaaccaattgggcacttggtttag

SEQ ID NO: 189395 - DNA, 45 bp, Arabidopsis thaliana landsberg
ctgcaagctgttcttgctgtcgtgaactatactctgaaacaataa

SEQ ID NO: 189396 - DNA, 140 bp, Arabidopsis thaliana landsberg
agacgtacagccgctccaccacaacagtgaaagtggaagagactgagcgcaaagtaaagcccacgaagaaggagaagcctgtaaaggctcaaacagtgacgagaggcactcgcgcactcacgcggagaaagacaatgtaa

SEQ ID NO: 189397 - DNA, 1311 bp, Arabidopsis thaliana landsberg
atgggtagatctggtggtttcaacttgggagcaacatattcatcacatcgtccacaacaacagccacaacatacttcatctgtgagtggcagtctctcctatccctatatgtatacaagccggaactttcttcaatttgcatatctcatattattatgatactgcatcatgtggttgggcaacacttgctccaactaccgtatcttatcatttaattcttatttaataccagactggtgggctacagggtcttggccttagacctctaagctcgcctaatgcagtttccagtattggttatgatcagcttattcagcagtatcagcaacatcaaaatcaatcccagttccctgtgcaacagatgtcatcaatcaaccaatttagagattctgagatgaaatcgacacagtcagaggcagatcctttttgcttgcttggcttgttagacgtactaaacaggagcaaccctgaattgacctcacttgctcttggcatcgacttgacgacgctaggattggatttgaattcaactggaaatctctacaagacatttgcgtctccttggacaaatgaaccggcaaagagcgaggtcgagttcacagtaccaaattgttactacgccacagaacctccgcctctaactgtaagttccctctgttgttgcgagtagtaccaacaaagtattttctcgattttgttaacaaatgtgtcattatttccgtttgttgcagcgagctagtttcaaaaggttctcctacgagttattgttctacacattttacaggtctgttattagatcagcattcagcgtcacatttgcccaactcctaaattaaccttgtgcttttaaacttattactttgctctaaatattgttccagtatgccaaaagatgaagcacagctgtacgcagcagatgaactgtatgttttttctctactgtaatctttgatctattcgtttactccgctctctttggctgagacttttgagttcgattgacatgttgcagttacgaaagaggttggttttaccacaaggaactcagagtatggttcttcagagtcggggaacctttagtcagggcagctacatatgaaagaggaacatacgaataccttgatccaaattcgttcaaaacagtgagaaaggtaagccgacgattattgcaggaatatctatttccttgttctcgaatttgcagtgttatgagtgaattttgctggtgatggttatcgcaggaacattttgttatcaagtacgagcttatggaaaagagaccaagcttgctgcagcttttacgacaagtag

SEQ ID NO: 189398 - DNA, 1127 bp, Arabidopsis thaliana landsberg
aaactttttgcatcaggcttcagaccttggcttcgcacggcccacacaaagatattcagccttatgattgcctcgggggtaagttggtgaagatagacttcaaaaatcttcagcacctccacgacgaagctgctcaagggcaatcgcagcccagccttcaaaaagcttcggaacactacgacttcattctcttcggggtgtggacaagtcttttccccttcgtcggccctcacaacggacaaatcccggaaataccttcctctcatgttaacaagatgattctctttgatagttgatttaccataaactgaatggcttggtcgccagggcgatcttcggagtcttcaccgccactatctacatcaaaactgtcactgtcaccagtatcttcagacaagccttccagaatttccttggtgattttttctgtattggtcttcgacatcgctataagaaaccccaggtttttctcctcatcaagagacagtttcgtctcagtaacagcttccttgtctccagacatcttcggaaacactaaaaaactattttcaatgccgaagctttaaaactaaagactcagggaatcttagcgcgcaaaagctaaaaatcgagcgagcgagagcaagtggcaagagagcgtaccaaatgagctcgtggtatgctcttatttatacgttcgatgcggtaaaaattgaaaggtcccgcctgtcagtgaatgttgctattctagcaaagggaaggtgttttttcggaccttcggcttaaagccttcgtccatgtcgcaatctaaatttattattttaacaaattaatattgcgaggggctactgttggggaccttcggcatacgaaggtcctcaaaaacaggatttaacagtatttctgtagtacaatgtgtgaacaggtatcctcggactaaagtcggcattgctgtagaccggcataatacgaaggttgacacacatccgaaggtgcgagcaagaaagcttctgcgtgacagcaatgagtggaaccgacttaaagatgaaaagccgaaccagaccttgaagaattactatagagttattggtaaatgtaaagggcatgaatgtaatcttgcatgggctgcgacccgtgcctataaatag

SEQ ID NO: 189399 - DNA, 106 bp, Arabidopsis thaliana landsberg
atggcgtctagggctcttcggtactttttcatacaaatcccggagccaacgccaggtgtttttgatgcgaccaacaagtttatctatgcacttcaccaggacaaaa

SEQ ID NO: 189400 - DNA, 531 bp, Arabidopsis thaliana landsberg
gttgttgctgactatggcaacacagatcagatgcgattaaccgaacttatgctgaagaatgtaagtattaagtgcattccaaagttctaatgtttctttttgtaagaaataaatgagttttcattctttctctctctctgtgaaaacttttaccaagcacaccctccttaacctacttttttcacacttacagcagggtgctttctttcagaaattgatcgatgtatttgatgactgtgagaatcggaaagatattgatggccttcatatgatgttcaatattgtcaaagaaatcagttagtaattacatctcaacatcattttttcttacctaagcttctggattttatgtaatgagcagcatttcttgtttttactgcagtttcggtcaacaattatcagatcctggagattatcttaggggatcaactgttcatgaaaattttcgggtgccttgagtgtaagcttcaagactctggtagaatgttgatcattataagtttcagtgacgacgaagggcatgaccagtag

SEQ ID NO: 189401 - DNA, 549 bp, Arabidopsis thaliana landsberg
atcttgtttcgctggcccatgttttgcagaagaaatatgctctcctgcgcgatttggataaaagtttgcaaggtaacaatcaatagagtcgtacttacagcagattaaggcatcattgttgtcattatgtatcctcactgattagtaatttgttagaaaaggggtaccgcagacatgatctttagtcattagactaaacccatttcgttgtagttcatgtgctgcatagtttgttgttttcggatgagttgtttgctgggttttagtataaagtaagactttgtaaagcatctatatatgcactttgttgatttgttatgtggattgctttcatctttgtttgtgtcttttgtggtttaagcagaaaaccaacgacaaaatgaacaacgctgtgaaaaagaaatagaggatataagaaggggcagagctggaaatatcacacctaatacctctcttacaaagttctcagaggaagcacttgatgaacagaaacacagtgtccggattgctgacgagaaagtcacactggctatgcaggcatatgatctg

SEQ ID NO: 189402 - DNA, 234 bp, Arabidopsis thaliana landsberg
atgctgaccccggtttcggtcacaggagttctaatgatcatcttcatgggtatctcattcacccttgctatgcattacttcagaagaaacatagtgaaattgcctataccatttaaccgtcttgctggatttaattcgttttggtatgctcatcatttgctggttattgcctacgctcttcttatcatccatggttacattcttatcatcgagaaaccttggtaccaaaagacg

SEQ ID NO: 189403 - DNA, 344 bp, Arabidopsis thaliana landsberg
  unsure (1)..(344): unsure at all n locations
atgcggacacgcacgcgcagcccgcgctccgcccgggccgacggcacgcgcgaggcactgttggctgcggccgaacggctgatcgcggagcgcggggtggaagccgtgacgcatcgccagatcgtcgacgccgccggtcagggcaacaacgcggcggtnnnnnnnnnnnnnnnnnnnnnnnnnnnnnnnnnnnnnnnnnnnnnnnnnnnncacgccggccacatcgaggagctccgcaccgcgcgggtcgacgccaccggtgactccgtcgagctgcgggactgggtgggttgcctggtgcagcccgtgaccgatcacctggcgtcgctcaccggggccacctg

SEQ ID NO: 189404 - DNA, 40 bp, Arabidopsis thaliana landsberg
  unsure (1)..(40): unsure at all n locations
atgaatcagcaaccggacaaacgctgggaacagaggcncc

SEQ ID NO: 189405 - DNA, 123 bp, Arabidopsis thaliana landsberg
ggctgtatttatgtagaacattgttcgttaatgtggaactcagatgatgtattagataccgagcttgatttgaatatcggccatctaaacctcgtcccgtggaggaaaaacaacagacaatag

SEQ ID NO: 189406 - DNA, 339 bp, Arabidopsis thaliana landsberg
gaaagctggtcaagcctgacaaatcttcggcgacgtatacttcttttataggatgctcagatcgacgaatagagcttgacgagaagataaatgttggtagcatcgaatacaaatcgatgttgtcaataatggcttctaagatctcttatgagagcaaaccttacatcacttccgtcgtcaaaaacacttggaaggttaacttcgtttcttcttcttcttctcttttaactaggctttttttttttaatgtttgttttactgctcactctctctatatgactctacgtctatatcctgtgatgcagatggacttggtgggtaactacgacttttacaacg

SEQ ID NO: 189407 - DNA, 88 bp, Arabidopsis thaliana landsberg
atgagggaggattattttagagccctgagtctaggcaagattcaggctaaatgcagtaggttagtcccatcaaatgtcggtatagcaa

SEQ ID NO: 189408 - DNA, 268 bp, Arabidopsis thaliana landsberg
atgaacgacctggcagatccttttacaggggatttctcttactccatccctttgatggatgtggatggttacccactcactttaagctacaattcgaatgtgaatatgaataccgaggcaacttgggttggtttaggctggaacctggatgtgggatcaatcagcagggaaatgcgcgggattccggacgaattcaacggggatcaaatgcttgcaacgacatataagacacaaaatgacgagacaattgatgggtttaaagcgggag

SEQ ID NO: 189409 - DNA, 169 bp, Arabidopsis thaliana landsberg
ttcaagagtccattgccgatagggcgtcgcacaatgatgaccgatggcggcaagttatgaagggattgggcgaagtgattgcggaacgtgatgtacttgatggaatcgggaaggttgttgagttcttgattaaattcgaatccaaaggtcaagtgggtgatagtgttgg

SEQ ID NO: 189410 - DNA, 133 bp, Arabidopsis thaliana landsberg
aggaaaaagtttgatattgtccggatgtttttcctgaatcttcactttaaagttcgacttcaattgttgatagtgttagctgttctcgtatatgctggttttgaaggccacatagatgagcttgacacagaag

SEQ ID NO: 189411 - DNA, 163 bp, Arabidopsis thaliana landsberg
atgacccagcacaatctcctccaatcaacgatacacctgtacgatcgccgcaccggcatcgtagttccacaaaatgcgacgcggaagcgcgtcccaactcgcgacgatctcgcttttgtcattgaacattcccggcctttccgcgacagagttgaagcggatc

SEQ ID NO: 189412 - DNA, 407 bp, Arabidopsis thaliana landsberg
gatccgcagacctcgatcctgtcgaccccgacgccggcggctcccaagcccgccgcccccaagccggccgccccgaagcctgccgcgacgccgagcgccgcgccccccaagtcggccgcgtcgcagccggcctcggccaagccgacctcaccgccggtggtccagatcaagcctcccgcgccgccgccgccggcgcccaggccggcgaccaacgccacgcccgcgcccaccggagcgccgcgatgagcatgagcggcggccgcgccctcaatccgggccgttggctgggcgtgccgatgctgctgtgcgtgctggcgaccatcgtgttcgccgcgccgatccgcatctggggcctgcagctgcccgagcctgttttcgccatggttccggcgtttgcttggcgatga

SEQ ID NO: 189413 - DNA, 567 bp, Arabidopsis thaliana landsberg
ttttttctcttgtcatgtatgctctgatacaccatggaagaaggttggtccagttacagaaattgtctaatttcagagtttcagttcaaaacggatctgctttgtccaattccttctcttttgctagtgttgctgatgcgacccttatagatagccttaaaggtaacaactttacagtctcttacctagttgattcattgggtttaaccacaaagctcgcagaatcgatctcaaagaaagtaagcttcgaggagaggagaaatccggattctgttctgagtcttcttacaagttatgggttcacaaagtctcagatttcaagtatcattactatctacccacgattgcttgcattagatgctgagaaatccattgctcccaagcttcagtctctgcagtccagaggagcttcaagctctgagctcactcagattgtttctactgttcctaaaatcttggggaagagagggcacaaatctataactgtatactatgatttcgtcaaagacattatagaagctgataagagttctagttacgaaaagttatgtcattcttttccacagg

SEQ ID NO: 189414 - DNA, 218 bp, Arabidopsis thaliana landsberg
atgctgccgccgcgactactgaattcccagctcctctgggcggagaaagaaagtgcactcttacagcctatagctcccggagaaactggccccgcgtacacaggtggacacagagaaaaagaaacgcgaaggctaggcaccaagacatcccagagcacagaggcagactcaaaactgtggaagcaactctggctggccaaaaaggaccgcgacactag

SEQ ID NO: 189415 - DNA, 248 bp, Arabidopsis thaliana landsberg
ttttcgagaaatgttcgattcttcgagagttcgaattctcaggagaagaagaagaagaagaagtgaacagagaaaatggcggcttactacagatggaagagtttcgaggagaacgaagatcgtccagagaagcctcgccgttacggtgttacggagatgcgaggtcctcattactccgttctcagccagaaccttcttcaggtccctacacgttaattattccggttatgattcacaattttgcttga

SEQ ID NO: 189416 - DNA, 135 bp, Arabidopsis thaliana landsberg
ggaacttcaagtacctttgtccaagcctacactgctcttctgtgacaacactgcagctatacacatcgccaacaatgctgtcttccacgaacgcaccaaacatgttgaatcttactgccacaacgtccgtgagag

SEQ ID NO: 189417 - DNA, 930 bp, Arabidopsis thaliana landsberg
gaatttggtatggctgctactgcttctgcaattcgttacgctcctgaggatccgaatctccctaagccatggaaaggtcttgtggatagtagaactgggtacctctacttttggaatccagagaccaatgttactcagtacgagagaccggcttcttccgctcctcccaagcttgctgctattcccgtaagctcttcggttcagactaatcagcaatcttcttctggatttaactctggcaaggaagatgataagtatggtaggggcagtgatgggcctaagtctgactctggatcaaggtttaatgaggtactaacttatggctgttaatggctgatttctatcctttgtgctctccaaacgtcataatttttcatttcaatttgtttgccacactggatttatccctcttggtcatactgtatcttcaatttcgatttcatttggaacaggctggaagaactggacctatatcttctaatgatgctgctagtggactagggaatgcttcatctggtggatcatctgccagagggcctccttcttcagccgcaggaaatgaattgtccccagaggcctattgccgcaaacatgaaattactgtcagtgtaagtatctatgagacataaatctctctctgggttgcatttcttcatttctcctccgtggtagcacacagaattagttgcattcatcttcttttcatgtactctgaaagtttcatttgcggctctacctatgtggtgacaggctaataatgttaacgtattatttaagtttgatttcctttgagtactaaccattaactatacaagtttatttatcctactgaactctgaaattcatttttcaatttcgtagggaggccaagtaccaccacctctaatgtcttttgaagccactggtcttcccaatgagcttctgcgggag

SEQ ID NO: 189418 - DNA, 81 bp, Arabidopsis thaliana landsberg
gtcactttggagtcggctgcagtatctcaatcattgtcacatacgccaccagaagtcaacttcgatggtgaccccatgaag

SEQ ID NO: 189419 - DNA, 254 bp, Arabidopsis thaliana landsberg
atgccggttcgacagactttcttcttcgatggggagcaccgaaaatacctatcgggaccgttcggattcgttccattaagcggtaggtagacgaattcagtgaacggcgtgctcgataaactcaattgccggacggctaagcccggcgggccgcgtagtcgcgcacgcccgatcccggcagcggcgccgagcagcggcaaacccgacggaggtcacaacacccgagaccgcgtccgcgatgagggcgtatcccg

SEQ ID NO: 189420 - DNA, 296 bp, Arabidopsis thaliana landsberg
agcggattcaggattcaccatctcgatctgtgtccaaagctcctatctttcttctttcttccctgaagaattttctggagcttctcaggtcaaatctcaaatctttttttaacttaattttgttatttctatcagaaagtttcgatttttatgctcatgcttgtgcatccgcgtacctgcatttcgttttgtgtttgagccgccaaagttttcaacttttttttttgggatttattgcaaatttgtcgatgttgaaaggttttctcaagtagaatgtgaagaaaaaggaagagaat

SEQ ID NO: 189421 - DNA, 869 bp, Arabidopsis thaliana landsberg
atggctacgttgtccaagcttggttcggataataaggacaaatcgtattatgaatctgagcatcagataccaaatggtgacatcgcagaatcatcaaatgttgttgaggtcagcttgcttttgaggaatgtgtcttttaacgatgtttaatactggtaaaattatccgctccaatctcaatcgaaaccacattaaattcaatatagttccgaaaacaaaaccgattaagaaactaaaaccaaaccaacaccatagtaccatactataacggattcatagtacattagatttcactaaagttgttattttactaaagcagattctaaacttaaaacgtaacaaaccaatatatccaatgtttggtttttattttggctactaatattataactctatagactaaaccaacacttgggctgaacatccttagttttcttgtattggtagagtttagagtttgtaactgaagttgatctctttctattgcgatgcaggatcaggccgataccgatgatgattgttacgccgagattctgaacgatgatataataaagctcgacgaagaagcgttgaaagctagccaagcgtttcgaccaactaatccaactcatcaagaaacaatatcaagcgagtcatcgagtaagaggtcaaaatgtggtataaaaaaagaatcaacggaaacaatgaattgttacgctttgttcaggatcaagaacgttgccggaaccgactccagctggagattcccgaacccgttcaacatcaagaaagatgatagccagagattgatgaagaatgttctggccactactgttttcttggctatcttattttctttcttttggactgtattaatagctaggaactaa

SEQ ID NO: 189422 - DNA, 107 bp, Arabidopsis thaliana landsberg
ttctataattcctccaaatatgctgaaaacactggccattcggttcgagaaaacattatcttcacaagatctgggcgccaatcatacacagtaaaacttcgatttcg

SEQ ID NO: 189423 - DNA, 275 bp, Arabidopsis thaliana landsberg
tgactataattcggccattccgtagacgctggaattttcagcgtctcaaattctctttctcctatctcttcagatctatcgctgcgactctttcattcatcttaccttcatctctccttcttttttcttttatattttgtgccgccggtgcttgtcgcagcgatcaacaaaagaacagggtaagtatataaacttacatgtaataaattatatttttataattaatggggtcacttgacccccttctttcttaataggtccgccggtgtgcgtaa

SEQ ID NO: 189424 - DNA, 93 bp, Arabidopsis thaliana landsberg
aaaacagtacctatggagaagacaccatacgaaatcaacgatccttctcagggcgatgcactcgttcttcctgattgttcctcaacagaaaag

SEQ ID NO: 189425 - DNA, 651 bp, Arabidopsis thaliana landsberg
atgcaactcgcttccatcttcttcttgatcggtgttggccttgccgcgggagctgttaacatatacatgttgatcattggtagaatcttgcttggattcggtgttggctttggtaatcaggtataatgtgatatgatctttttcatttcaagtttagtttgtgtttaggctgagatgctacaagatatgaattttaactgaatttctggtctggtttagtttatatgcattttagtttgtatgagatcttgaattttctggtgttcttcaatgactaaacattgtagaatgtgtctgattttcttgtaggcggtaccgcttttcttatcagagattgctcccgcgaggcttcgtggaggtctcaacattgttttccaacttatggttacaattggaatcctaattgctaacatagtcaactacttcacctcctcaattcatccttacggatggagaattgccctcggtggcgcgggaattccggctctcatcctcctctttggatcgcttctcatctgcgaaacacccactagtctcatcgaacggaacaaaaccaaggaaggaaaagaaacactcaagaagatcagaggcgttgaagatgttgatgaggagtatgaatcaatagtccatgcttgcgatatcgcaaggcag

SEQ ID NO: 189426 - DNA, 803 bp, Arabidopsis thaliana landsberg
taattcaccgtcgttacatggatcccgttacctaaccgaacgtcgcgactccacacagttccgccgtcaaaaccgaacgtcgcgactccacacatccgttacagttccgttgcagttccgtcgtcgttccaaaccgccggcgttccaaattgtaagtgtagattggaacggtttttgatttttgatttggttcggtttttgatttgaaacattagaattggttttcgttgggttgatttgaacggtttccttgattgttgagtgtttttgcaaggtaatcatgggtcgtgtaaggttagtcactcctagttcgagtgaaagtgaagacgagagggtcacgatcatccgtgaagcggatatgaaccgtgaagaagttgcagccgaggaaaacaaatttgaagacgaaaactgtgaacaagagcctccggaaaaccttaacgaaccggaagaagaaaagatttctgaggtatatacaaatttatgaaaattttgtgtgaatattgatgtagtgtttagggacaactagaaaacaatgagtacaagttaatagtataggtctgtgtaattggtgcatggatatacgtgattaatcatacattaggttgcattagaaaattgaattctgagaaaggttgataatgttgttctgagataactagtacaagtagtacagcgaaatattaattttatggttgtgtatgaattttcaggaaattgatgatgatgaaccaatgccatctcacgggatggaagaaaaccctcaagaagaggaaaaagaaagggaagaagaagaagaatctgag

SEQ ID NO: 189427 - DNA, 72 bp, Arabidopsis thaliana landsberg
acaagtcgccatggatttgtaaacgaagatgccgttgatcatattatgcggaaatcggacaaagagggtcgg

SEQ ID NO: 189428 - DNA, 567 bp, Arabidopsis thaliana landsberg
atgaagaaacttggcggtgagggtttaccggagtccaccgtgcgtcgccacacaggatcagtgcttcgagggttacgtcacatccacgctaaagggtttgcacactgcgatataaaactcgcgaatattctgttatttaacgacggctctgttaaaattgccgatttcggtttggcgatgagagttgacggagatttaacggcgttaagaaaaagtgtggagattagagggacgccgttatacatggcaccggaatgtgttaatgataacgagtatggatcagcggctgacgtgtgggctttaggatgtgctgtagttgagatgtttagtggcaaaacggcatggagtgttaaagaaggatcacacttcatgtcgcttttgatacgtataggtgttggtgatgagttaccgaagattccagagatgttgtccgaagaaggcaaggattttttgtcgaagtgttttgttaaagatccagcgaaaagatggacggctgagccgcttttgaaccactcgtttgtaaccattgatcaagaagatgatcacaaagaaaacttcgttgtgaag

SEQ ID NO: 189429 - DNA, 116 bp, Arabidopsis thaliana landsberg
ggccggtgatcgccggtccggtggccgataccgaagacgccgcctgggggagcgtgcaagacaccgtagacgtggtggacaagcgcttccagcgagatcccgctgatgatgagtag

SEQ ID NO: 189430 - DNA, 656 bp, Arabidopsis thaliana landsberg
atgccgttgtccaacccgacctcgcgggtcgaggcgacgccggcggaaatcctccagtggaccgagggccgcgcgctggtcgccaccggcagcccgttccagccggtggagcagggcgggcgcagcatccacatcgcccagtgcaacaactcctacatcttccccggcatcggcctgggggtgatcgccgtcggcgcccggcgcgtgaccgagacgatgctgatggccgcctccaacgccctggccgaatgctcgccggtggtgaccggggagggcgacgcggtgctgccgccgctgcgcgacatccagcaggtcagccggcgcatcgccttcgccgtggccaagcaggcccaggccgagggcgtggcgctggaaaccccggacgacatgctgcatgccgccatcgaacgcaacttctgggcgccgcgctatcgcgagtaccggcgccgctcgttgtgaggttgccgctgcaggcgttgcgctagcgcttccggcgcccgtggcggtcctcgtctgccgggcgccctgcgcggcgctcctgcagggcgagctgcaaggccctggccgcgccggcgccgagcagcccgcccagcagggtggcgagtatctgcagcagcaggccgagcgcgctggcggcgttcatctcgcgcagccag

SEQ ID NO: 189431 - DNA, 72 bp, Arabidopsis thaliana landsberg
ccaagcggggaaattcttcacatcgatagtccaggtttcatatccagtgactcttatactcgcaagatctag

SEQ ID NO: 189432 - DNA, 355 bp, Arabidopsis thaliana landsberg
atgctttgcgccatcccaatgtccacgtcgccaggcctggccgtcggggacacagacaagccacctagccccagcaggaaggcggtcgccaacaaggtcagtcccaggcgtttgagcaagggattcagcatgaaatctccggggtgagtttgcagaggtgttcaacttgtacttgcaagtgggaatattggattaaacgacccggcacccgcttccgcagccagtcgatttgccggataatctcggcatgcagacctattcaacaagggtgctggcgctgatcccgccaatgacccagctcaacacgccttatccatcaaccgcttatctgaccggttttctgcggtcccagggc

SEQ ID NO: 189433 - DNA, 95 bp, Arabidopsis thaliana landsberg
gagttactaccgttgcacaacggcttcatgtaacgtgaagaagagagtggagagatcattcagagatccaagcactgtggttacaacctacgaag

SEQ ID NO: 189434 - DNA, 1046 bp, Arabidopsis thaliana landsberg
atgaaaaatttcctggcacttgttgaacgccaattttcgacacatgttcgcacgatacgcagcgacaatgggtcagaatttatttgtctccgagatttctttgctgaaaaaggcattgttcatgagatgtcttgtgtgggtacaccacaacaaaatggtcgcgtcgagcgaaaacatcaacatatattgaacgttgctcgtgctcttcgatttcaagcaaatttacccattgaattttggggttattgtgctctcactgcgggttatcttatcaataaaactccaactaagcttctacatggtaaaacaccatttgaaatgatatatggtcgtccacctccacttgaacacatgcgagttcttgggtgcttatgttatgttcataaccaaaagcatggaggagataaatttgcacctcggagtaatcggtctgtgtttttgggttacccttttgcgaaaaaaggatggagagtttatgatcttcaaaccggcaaagtatcggtttctcgtgacgtaatattcatagaagatgaatttccttttgctctgcttgagaaagatgagataacagatttacagccttatctttcacaaccagttggtttacctcatgaagatgagacgatgagtgcgggtattatttagtctccgatggactccatttcgccaaccacagatcctagtttgggagattcttgtgcacccgaagaacctgttactccacgaacactacctttgcttaccgatgattcttttggtcccgaatctgcttctctatctcctagcaactaccggtgtgttaggtgctaagccggtcgctttccctatggtgcaaaaccacagactagcattagacaaaggggaacctattacggatcctttacgctatcgtcgtctcattggcaagctaatctatcttggtgttacacggcctgaattatcatatgcgatacacatcttatcgcaatttatgagtcagcctaaggaacaacattggactgctgctctccgagttctttgttacatgaaaagcagtccgggccaag

SEQ ID NO: 189435 - DNA, 180 bp, Arabidopsis thaliana landsberg
atgctgtttcgtgcacgtcgtcgtgtgtcgttcgcgagtgtcgcgcgtgttgttcgcacgcgttgtcgtgtaccgttcgcgtgtgtcgcgcgccttgccgcgtgccgttcgcgcgtatcgcacgttgtccgcgcgctaagtcgttgtgtccacgcgttgcgcacatcgtgtttgcacgtc

SEQ ID NO: 189436 - DNA, 439 bp, Arabidopsis thaliana landsberg
atgagagctccgcttatgaaaaacatttttgttgacttggatttaaaggtctttcaattgattgatcctcactcaaaaacctgggacccggatatccttcaagatctcttcttccagaatgacattgatatcatctctgcgataaagccggtagtttcagggtctgacttttggtgttggttacacaataaaagtggcgattactcggtcagatccggttattggctgggctcgaaggatcataacagtgatatattccggaatgcttcagccttaccgtccatcaatcccatcaaagatttgatttggaacactttggctccttcaaaaatcaaaatctttatgtggaaggctatcagcggtgcaatccccgtggcagacaagttggcctctagagggatacacacggatcagcgatgtcaactttgtggtcatgaag

SEQ ID NO: 189437 - DNA, 91 bp, Arabidopsis thaliana landsberg
atgcagggttcttgtctgaccgccatcgcagcaaaatcaacccaaggacctccctacactgaccactcccctactgcccttgccctttcgg

SEQ ID NO: 189438 - DNA, 287 bp, Arabidopsis thaliana landsberg
atgtttgatgtggaagaggtgaatggaggaagaatactgatgggaaacgactcctattgtgaaatcactgcaataggaaaaatcaaaattgtaaattctgatggaagtgaagccattttattcaaggtaaggcattcaccaactgctaggaggaatctcatttcgtcgggacagttggaaacacttggatgctggtatcagtcgaagaacttcagacttcgagtgtttaaaggagacaaggaagtcattgcaggagactacaaagacactctgtacatccttgatgg

SEQ ID NO: 189439 - DNA, 202 bp, Arabidopsis thaliana landsberg
aaaattaatagatatcaccaatgtctgtatggatgagacagctgtatctagtgatccggtcattgctttcttgctggatgaagttgttgtcaaggattgggtcaagcgtacattccggagcaccttagctgaacttcaagaaatctgcatccttttagctgctaatatttttatgtttcttaagactgtatatttgtgcacc

SEQ ID NO: 189440 - DNA, 134 bp, Arabidopsis thaliana landsberg
gaagctctatggcaactatgatagacagggaaagcccactctcaacacctttaccccaccagccatggtcatccacggcagcggaagcaccgacactgcaggcatcaccttctcgacaccccgcggaacaacaa

SEQ ID NO: 189441 - DNA, 73 bp, Arabidopsis thaliana landsberg
atgacgggcagcctgtcgtgtgccgctgtccgaaccatacacaagccactgaccattcttattcgcacgtggg

SEQ ID NO: 189442 - DNA, 181 bp, Arabidopsis thaliana landsberg
gccgatactgatcactttggctcgatcaaaaccgctgaaacgccagctgtcacggcggcagctgaggccgagatagagccacagaagaagaggacaacacttgcggagcttttcatggaggaccacgcaaaggttatgacacgtggcattgcaaaaaccaaaaatacccctaatcttgacg

SEQ ID NO: 189443 - DNA, 163 bp, Arabidopsis thaliana landsberg
ttttgtaataaagaggaatgttcaattgttctcatcgccacgaaagcggtttgcaccgaaagggagtgatcaattaattgagggagctgagccgaagaaccgggtcacggggaaggctgtgcgtggtggtgctaaaccaccaaaaccaacggttgataaatga

SEQ ID NO: 189444 - DNA, 121 bp, Arabidopsis thaliana landsberg
aatcagacccatcttcaattcgatgaagtcacacgacgatggatatgctaagacccgcaaaccgcgtacacaactccgctttccttcttccactcaaagtaccatcaaccaaatcacatga

SEQ ID NO: 189445 - DNA, 110 bp, Arabidopsis thaliana landsberg
atcacagtataggaatccaaaatatggttcaaggatcgattaaattttctgattatgaaaaattggtgctatataaagatctggcgatacgaatcgataacgagagatag

SEQ ID NO: 189446 - DNA, 805 bp, Arabidopsis thaliana landsberg
atgccacgaccacatgaagatcaacagttagaacgactgtcggttcgaggaaagttttattttaaggattatcggttactcaaaccgccactgtgttctccaaaatacggaagatcgcaattttgttctaaacttatcatagtattccataaattcactcttaacccgagtaactggcaaatcatgtttataaaaattaaaagaatgataaacgatgattttttgtaagtggataaataaattttttgtgcccgcaatcaattaattaggacaaaaaaatcccaactaaccaaagcattcaccaagaaagaatatgatcgctcagaggtaaagtggattgagccaaccagcttttagccatttggacttaatcggatgaatctgccctggaacgagaaatgaaagaaaactgttcagtttcgttcctttgtattctggttacggaaataatttaaatctttaaaattaaataaaaaaacgtaaataattttaaaacttaaaataaaatcaaaaactgtcttcgagaaacgcagaacagttccgacgaagtccgtattcgaagacgcagaaaaattctgacaaaacttaaacccaattccgattgaggctctgttccagttcgagtctttgcttgagtggagaaaatttcgatcgagttcgttttaaagtatctaacaaaaagaggattttctggtttctcgaattactgttcatactaaaatggcagagatcaacaagagtagtcggcggccagcagtttcgcaagttaatgtatcatcgtcggcgacgacaattatgggtcagg

SEQ ID NO: 189447 - DNA, 486 bp, Arabidopsis thaliana landsberg
atacttgacggagacaaaatacgagatgaagttggtctttcaccggcagaacttgccaagggcatatatgggaggtcagacatcatcaagtagttcccaaggttttgtagcaagaaatgaaaaggattgtttagataggagtatgcttgtagggaaatcatcacttgcatcaccatcaagcaagccttctgcttgttggcctggtatcaagtcaagtgagcaatctggttttgcaactcctcaaagccgacgagagagctatgggcttcaaaattttccaaggactccttattctagaaccattctttcaaattctaagtcaaaggtgtgtggagtttttcttattactttttactaaagatttttggtatatttgagctgttccttttttttttggctcagttgatgcaattgcagaacgatagtagcaagcacctaagcaacctccagtctccctctcaaagtgtggagagaagatatggccag

SEQ ID NO: 189448 - DNA, 150 bp, Arabidopsis thaliana landsberg
aatacactcacaagtcccaccaaaataaatcatcgtgtgttcatgattttcgtggacgtgaacatgtcgtggagccaaatatcatttgtcaaaaattttgtggattatctgaatatacttcattttacaaaaactttaaagaaactctga

SEQ ID NO: 189449 - DNA, 638 bp, Arabidopsis thaliana landsberg
gggtgaatatggcatctgggcagcattcttggcgcttcttactcgactgttcttctcttttccaggttcgtattcgtcttcaagtaggttgggttataggttgttgaattctagtgttggattttttttagttcagttgccatttactagaaaagaaattggaatgaaactcatgctaattttcgacgtcaggggctaaaatttccattactaagacatgctgaaaggaatcacgcatgttttatcagatcttcatgttaaataagagtgtgcctgcctttgtatgtttttaattcttatacaatgccttgtttatagttgaacttgagctgcccttcattgctttgcttttggtgattgtggcgccatatcaagttatgagcataaggttagattctcaaaaagagtgtaatgtttcagatcaaggttttattttctttagtcaagactcattgaatttatacgcttgcagagggaaacaggaaggtgctatcctttctttagcaatctcttgttttctggctttccagcatttctcaagagcaggcaccttgcagaaagcatttgatcagaattcagttcttgccactgtagccataattggtgtcacagttgtatcgttccttttcttgatataa

SEQ ID NO: 189450 - DNA, 1035 bp, Arabidopsis thaliana landsberg
atgccgatcgggtgggtcaaatccttacattgcaaatcaaaagcattcgacgatgtctatcatcatcactccaacaaaggtaaactcttattgccaagttacagctgcagaaaaaacgttagagacgttgtcaatacacaacccggaaccgttaagaaaaacccaaaaccggacccgagtttaagacgtttatgctcttctcgtcgacccgaattagactccaattctcatcacccgacccgacgaagtgtatcagctcgagcttcctcggaatctgtattgcccgtattgaccgatcttcctgatggtcatccgtcaagaaacgtcgtggagattatattccaatctagttggagctccgatgagtttccgggtcgggttgaaatgatttttaaagttgaaaacgggtcaaaagctgtgacccggtttgaggaatatagagaagctgtgaaatcgcgatcgtgttcgaaagttgattctgatagagttgacggcggcgcgtgtgatgaaaacgcgcggtgctccgctgatgggaatgagatgatgaggttttttccgttgggtccgattccgggagggataaacggcggcgcgtggggttttcccggagggaaaggagcggcggtttgtacgttttccggtagcggagaagcgcacgcgagcactggcggcggaggagggaggagagcgatgttgatttgtagagtgattgcgggtcgggttgcgaagaaaggtgaattcgggtcggattcggtagcgggtcgagctggtgagttgattgtctttgatgctcgcgcggtgttgccttgtttcttaatctttttcagattgtaaaaaataataattattataaaatttatacttattttgatttatatattttggttccattttttggtttgttgtatctgcttcgtatttttcagatttatatttaacttttcgttcaaaatatatttttggttgtttttagggtccaatctatatacttatgtttaaggtttagacaatttggcaggattcgatattgaataa

SEQ ID NO: 189451 - DNA, 90 bp, Arabidopsis thaliana landsberg
atggggatagatctcaagagtttcggtactaaatgcatctatgtagggaagatgaatgatcattcaaagaagctgaatatcgcgaccgag

SEQ ID NO: 189452 - DNA, 121 bp, Arabidopsis thaliana landsberg
tgaaaggaagctgaacaagaaactgcataagaaactaaacaagaagctgctgcgcatgaagctgaacattctgctgtgcacgaagctacaaaagaagttgacgaatatttacacattttaa

SEQ ID NO: 189453 - DNA, 252 bp, Arabidopsis thaliana landsberg
aatgtacgtttagtcagttcgtttcactaccgcaagcggcacgtccacgacgagaggctacggcaggctctatactggaccgcaagttgtagtacgactcgtcgccgctgccgcagccgttgccgctaccgctgccgcatgatttatgttcgtttagttgacgctgccgttgccgctgccgttaccgctgccgttgccgctgctgcaagtcactatgttcgttttgtcgctgctgcgttagttttcacttaa

SEQ ID NO: 189454 - DNA, 291 bp, Arabidopsis thaliana landsberg
atgagcggcaggggttatttatctgaggatactttttcgccttaccctcgcattaaaatgttaaagggggatggcacttgggttacagctgtaaatccattgcatggagaattagagcccggtgatgccggagttggaccgggtttgggctttgccacggaaatgctgaaagatgcggaccctaatgtaacgataggtttaattccaactgcaattggcggtcaaagtatcacagcttttgcgccgggcgcttcaaatactagaaacagcaacagcatttacgatgaatcg

SEQ ID NO: 189455 - DNA, 340 bp, Arabidopsis thaliana landsberg
gcaattggtccggcgggacccgcgattccgtgtagatgcactcacacggaggcgagcaacatttccgacgagcacgcggagcgacccgacatggccgggccctacggcaaaggatacccaacccgctctgaaggggtcaaaacgggtccggtcacagcctcatccggcccacgtggccgattcggaggtcgagggtcgtcgtgcccgcgagggtgcctcatgttcggaccgtccgcaagcatcggccgcgtttggcgtggcggtttccgggtcgagcggtagtccgctcccccggccggcacggggggtgtacgtgaccatgctgcgatcggtccgcccg

SEQ ID NO: 189456 - DNA, 716 bp, Arabidopsis thaliana landsberg
tcgtcatgaagtatgggatttagttccaagactggttcatgtcaatgtggttggtactaaatggatttttaagaataaaactgatgaagaaggcaatgtgacacgtatcagagctcgactggttgctcagggatactctcaggttgaaggaattgattttgatgagacttttgctccggtagctcggctggaatctattcgtcttcttcttggaatattgtgcttgctgaaaatcaaactgtttcagatggatgtcaagagtgcttttctgaatggagttattcaagaagaagtgtttgtgtctcaacttaaaggccttgaagattcaaactttccagatcatgtgtacaagcttaaaaaggctctttataggttgaagcaagcacccatggcttggtatgagcgtctcactctgttcctaatagaaaaaaagtttcaaacgtggaagtgtggacaagactttgttcatccttgttgatgaaaaggacatcctcattgtgcaaatttatgtggatgatattgtgttttgaagcacacaacagaaacttgtctctgactttgtggaatccatgaccaaagagtttgagatgagcatggttggagagatgaaccacttcctgggtctacagattaaacagactgatgaaagagttcatatctctcagtctatgtatgcccacagggttgatttagagatttgggatgcagacagctaa

SEQ ID NO: 189457 - DNA, 405 bp, Arabidopsis thaliana landsberg
gaacgcttcattgtattttatgaaaagctgaaacaggatgattttacacttacctgcgccattcccacttacctgtactcggtggcccgtaacctgtggctgaaaaggcttaggaaactccagtacgatggggttcttaagctcaaggaaaccatggatgccgaagaggtggaagaagatgtggaagcacacctggtgaaagaacagtttttgggcaacgtggagcaaagcctggaacaattgggcgatccctgctgcagcattctcaaagactttttttacaacaagctgagcatggaagaaattgcattgaaattcggttataccaatgccgacaatgccaaaaaccagaaatacaaatgttttagccggttcaaaaagctggtgctggtaacccagagataa

SEQ ID NO: 189458 - DNA, 463 bp, Arabidopsis thaliana landsberg
  unsure (1)..(463): unsure at all n locations
atgatcctcaacagcaaggtgtacggtaaagcgagatcccgccttgacaactgtgattcgctgcaactggtcggccccaacaacgttnnnnnnnnnnnnnnnnnnnnnnnnnnnnnnnnnnnnttcatcattgacgggacaaaaatgagcttctcgggtaacaggcgtggcgataaggaaactgttcaccactatttccccacccataaccagagttatatcgttttcgagatccgtaaacgtctatcggtttacagtatcctcgtcaaacgcaataccgatggcgacctcgagtattaccgttatgagtcggcttatgaagacgaccattatttcacgcaggatggcaaatcgcaaaaactgctcaagtgggaagaagtgcagatgcgattggagaaatcgggattgagcctgcaccagtttgccaacaagaccgaggttttcaatgccgtttaccaacgcg

SEQ ID NO: 189459 - DNA, 938 bp, Arabidopsis thaliana landsberg
aaattttggatttttcagagtttgtaatggtgacgaaatcttctgcagaggatggttctgtttttgaggttccttgtgattcaggttttcagcaaaaacctgcagcaccagtagcagatggtttcttaactgatcctactggtaagtctctctctctctatatccaactttttgaatatatttctctttcataaaaacagaacatgaatctttgtcttgcaagtagtactactgcagaatttattccatataagaatttggtactatgcatttctgaaaaaatagagtaacattgaactgttttagagatgtagtcaaagttctttagctaaataaataaaacaaatgttccttactttcttgaaaaattgagcctataaaaatggacacaaatagacagctagtgagaatcatgcatatgaaaatgtataaagatatactcaggtcatattttttctgaatgtaatgtttttgtgaaccaaagctgttgatttattgatccaccccacacagtgaagataccctaaatcagtttatctttcatagtttgacatgaataatagtgacagaatctttgtcagaggatggaccagttttggaacttggtttgacagagtttccaatgttttcagaatctctcccagaggataaagcggttttggaggttgctttgacagagctgccaatggtcgcagaatctttgccagaggatggttctggtttggaggttacttgtgatttacgtttggagcataaacctgcaagaactctacttttggttggacgttctggtaatgggaaaagcgcgacagggaatagcattcttggaagaaaagccttcaagtcaaaaggccgtgcatcaggggtgactacagtctgcgagctacagagttcaacgctacccaatggccagatcattaacgttattgatactcctg

SEQ ID NO: 189460 - DNA, 1101 bp, Arabidopsis thaliana landsberg
actcccgagctccgtcgtattcgatcatactccgttcgtaacgcatcagtctccgtttcggatcagccgcgacggagatcatgtgacgttaggtcaagcgcaagctctctcctggacttgtttgtcgatgatgacgaagaacgggtggatagttcgattcgaaagcctctggttccagatttaaaagaggaggaagaagaggaggaagaagaggaagaagaagaagaagattactacgatggagaagatatcaaaggttttgatgaaggcaagccgaggaagatcgtcgaagagaacaagacgatgaaggagttcatagatctagattggagaaaccagattaagaagaacaatggcaaagatttgaaggaaatagcatcggttttgagcaggagattgaagaattttacattgaataagagaaatgacgaaaaatcagattccagattcgccggaattgtgaatggtcgtcactctcctgatgtggatcctagattgtcttttgatggaggtaggatctcgtttgagaaacctaggtcttcatgggatggttgcttgattgaaaaatcatatcacaagcttacgacattgtctactgtgacggaagatgctaaagctaaatgtggtgttgaagaagaagaagtagaggagaaggagaagagtccaggtgggacggttcaaacgaagaactattactcggattctcgtcggagaaggagttttgatcggtcggtttcgattaagagacaaggattgcttgaggttgatgaattgagaggtatatcgaatgcaaaggtatcacctgaaactgtaggtttgtttcatggtgctaagttattggttacagagaaggaacttagggattcgaattggtattcgattaaaaatgtcaaaccagagagtaaagaattagtttctaaaggaaagatttgtattgctgctggtggtgaggggaagaagcaggatagtgttgagttaaagaaacctagaaagaaatggccaaagggatggaacatttggggattgatacagaggaaaaacgaggtgaagaacgagataaagactgagcaaattctgaaacttgcacggaaatgcggttga

SEQ ID NO: 189461 - DNA, 167 bp, Arabidopsis thaliana landsberg
atgttatggatgcattgcagcaagttatagttggttttgatacgatggagatgatcaaggaaatggagctgatgggactttctgatagtgactttgaaactccagatgatgaaagtggagatgatgacagtgaggaaacaggagaagacgaagatgaggaggtttaa

SEQ ID NO: 189462 - DNA, 151 bp, Arabidopsis thaliana landsberg
ggtacataccacaatggaaatgacatctggatcgttaggcaatgggatcccggaagcgatgggacaaaaccgcgggaatattaaacgttgcctcgagaagtatattgagaatgagcagaagggtgatgaaattgaacgagttgatggatga

SEQ ID NO: 189463 - DNA, 212 bp, Arabidopsis thaliana landsberg
cttttttccttctgaagctttcaaccattgcggaaattgccattgctaagaatgacatgaataatcctaatcccattcttagcttaacgctaagtctaaaaggtctgcctcggatcttggaagctaatgggataaccgcacggtcatatagaatgacccatagggctagagctatgattgtgaacataccgaatgatccagctggaacttga

SEQ ID NO: 189464 - DNA, 811 bp, Arabidopsis thaliana landsberg
atgttagttcacgacaatgaatgtcggcgcatgaccccatcttcatgtgcacgagttgtggtcagttaggtcaatgatgtgatgtgaccatgctttttgtgtcagaagtcatttactctggtgtgaagccgcctctaaaattggtaaaacgctactataaagtatcataatgctgcaacttgtgatccatgttaacaacccaaatgatagtgtgacgttttctataagaggatcgacctgccctacgtaagaactttaataattgcaaacttttggggtttgttctacctttccaaaactagcctaataaaacaagatatgtacttataccgttcatgcaacgacatcaacattcaaccgagtagtggcgcttccattgggcgtgtcaagggatcttgcccgtgtgcgaatcaaccgaaattctcgtttctaactagtagagttggacacggggcgagtacccattttgagtttgtgacaaaagttacagaaaattctagaagtagatcaaagtacactacataactaagcaaacaaggctaagtcgagagtggaaacaccgatttcgagttcacgaatcccggaagttcacgtggttgccacatgaccgaataactggggtcctcatcgttgttaccacgagcaatttatacgaggtccgtccttaaaagttaaaacctcgtaatagaagcctacatcttctctgagagttagaaacgtagaatttgctgtaagacatgttgcagatattgttcattatagacttcgaaaggttgttgacgttgtgaagaacatgaagcaagaattttga

SEQ ID NO: 189465 - DNA, 984 bp, Arabidopsis thaliana landsberg
tttcttgttttttcacatcgacgtcctagatcgatgtggagattacaaaggttaattatcctcctcctttaccgagtgagatattttccgatcacaatccgacgatatcatcggagcagtgtcggcgtcatcctgctaaggctttgtctaagcggcttccagatttccaagtttgtaaccgatcgatcgcaccataatcgagtttttgactatgcaatcaacatctccatcttgaaccggttttctcaaaacaaaatttggaatccgagaattctaaatttcgagattggagacgatggagagaagttatggctggatcgtattcatcagcggcgcttaataatctacttgacggttatggattattatctctctggtcgtaaacaatttacaatttcacgagagtttaatgctctcttcatgtctacgccgacttggaaggatattactatttgattcaacactcattatgtcaaggcatcgacacatgatatgggacaaggatatgggagttccttgtgtgtgataggcaacgtagtctccttgacggccacgggcacacatcttttccggcaacggacaacaatttacggtgaagtcggtgctctatttttctcggcggtgatgcggatggacgatactattcggatgcgaaccagaagatcaaatcaccaacacgtttgggtttacggtacaatcacaaaaaactatatctctttcttcatgagagttccaaaatctagggtcttgcgatgtaacggatggatcgcggactttgtctttcgaaagcgtaaaagatgggtcatcgacataaaagagatatttcctaagctagaaagtcatacaagattgaaggataagacaaaagcaactaagcatatgattcggatcacggcgcttcaacttttttgctctttcgttataaaaacatttgattgtatttttatccttatgtgtaacattacagtctttggttcatattaa

SEQ ID NO: 189466 - DNA, 679 bp, Arabidopsis thaliana landsberg
acggtcaatatcactacatcatccaaaacgttgtcgttttccaaagccgacgaaatccaaacacttctctccgcggctttgactaacgagcaaacatgtcttgatggaatcaacaccgccgcttcctcttcatggactatacgaaacggtgtcgcattgcctctaatcaacgacacgaagctctttagtgtctcgctcgcattattcaccaaaggttgggttccaaagaagaagaaacaagtagccagttactcttgggcccatccaaagaacactcacagtcacacaaaaccattccgtcatttccgtaacggagctttaccgttaaagatgacggaacacacacgcgccgtttacgagtctttaagcaggaggaaactcgctgacgacgataataacgtaaacacggtgcttgtaagcgacatcgtaacggtgaaccaaaacggaacggggaatttcacgaccataacggaagctgttaattcggcgccgaataaaactgacggtaccgccggttatttcgttatctacgtgacgtcaggtgtttatgaggaaaacgtagtgattgccaaaaacaaaagatatctaatgatgattggtgacggaataaaccgtacggtggttaccggtaaccggaatgtcgtcgacggttggaccactttcaactccgccacttttg

SEQ ID NO: 189467 - DNA, 79 bp, Arabidopsis thaliana landsberg
atacatagctggacttcatagctcaacgcagcttgtaataaacgacaacaatgtagagctcctcggactcgccggagaa

SEQ ID NO: 189468 - DNA, 170 bp, Arabidopsis thaliana landsberg
atgaagatacttgataactatttgtaagtttctactttagcattttgcttagacttacaaacttttgcatattagggcttgactggtttaaacggcagcggttgcggttgcggttgcgggagtttgcgaaagcggacaattgcggtttcaagcgttatttagcattttga

SEQ ID NO: 189469 - DNA, 52 bp, Arabidopsis thaliana landsberg
atggatggttcgacatatatacttcccgtgcttgcgcagcaagataccaaag

SEQ ID NO: 189470 - DNA, 966 bp, Arabidopsis thaliana landsberg
atggaagtagatgatggttacgtggagtatgttccagtagaggagcgtctagcgcagatgaagcgaaaggtggtggaagaacctggcaaggtaaagctcactgaagaagctaaacctagcttacttgttcaagcaactcagctcaagcgacatgtaccttaagtcagtgctaccgaggccattattttacaagagaaggggatgatggagcatttatctgacaagaagaagcttatgtctgttggtgaattagccagaggtatcacttatacagagcctctctcaacatggtggaaaccccctctgcacgttaggaagatgtcaaccaaacagatggatttgattaggaagcaatggcatattacagttaacggtgaagatattcctcctccaatcaaaaacttcatggatatgaaatttccgagtccacttctccgtatgctcaaggataaaggaataatgcaccctactcctatccaagttcagggtcttcctgttgttttgtctggcagagatatgattgggattgcgttcactggttccggaaagacgttggttttcgtgcttcctatgatcatattagctctgcaggaggagataatgatgcctatagctgctggagaaggtcccattgcgcttgttatttgtccgtctagagagcttgctaagcagacttacgatgtggttgaacagtttgtggcatctttagtcgaggatggatacccgcggttgaggtcgttgctatgcattggaggagtggatatgagatcacagttggacgttgttaagaaaggtgttcacatcgttgttgctactcctggaaggttgaaggatatcctcgccaagaaaaagatgagcttagatgcttgcaggctgttgacacttgatgaagcagataggttgggtgatttgggtttccaagatgacataagacatgtctttgtccactttaagtttcaacgttaa

SEQ ID NO: 189471 - DNA, 287 bp, Arabidopsis thaliana landsberg
atggcatgtgcatgtgatcacgtccagtccaaggcccacttctccactccaccagatgaccagacggccagaccgccagaccaccacggtgtgcagtactcgtagcaggccagcagtcacactctgcagactaatatgggtacttcgggtaccgggtgctactacccgaaatacccaaactaattttgggtaatagcatttactatccggattagacttcgggtactacgggttcgggtatttcgggtccgggtctgggtttttcgggttcgggtatcgggtagcgg

SEQ ID NO: 189472 - DNA, 241 bp, Arabidopsis thaliana landsberg
ccagaacaatgcgtttctcttccacaagtgctcagacatcgaaggaagctttacctcaaaaagtctctacgagtcaaatctcaacaatctctttagtcagctctcttacaaagttccatccaccggttttgccgcctcctccactggcaacactccaaacaacgtcaacggtttggccctttgccgcggtgatgcctcctcctctgactgccgctcttgtcttgagactgccatccccgag

SEQ ID NO: 189473 - DNA, 824 bp, Arabidopsis thaliana landsberg
  unsure (1)..(824): unsure at all n locations
atggttgacagatcaaatcagcagcagcctgagaagctaaagggaatctcaagctcttgcaatcctacagaggaaacaagagtggtcaagagaaagaacgaggctgtaatggctgagaaacaagtcgttcttgccctgaagaagcccgaacatccacagacacgtgtaatcccagcnnnnnnnnnnnnnnnnnnnnnncgaacaaccccggacctgaacttgccaagttgacatcacgattgacaaaggagctcttagaaacgccggagacaataacctctggcctcttccttccttgtattttgaggtggacgtcattagtcctggcgatgccgannnnnnnnnnnnnnnnnnnnaacgcatggtttataaagttgtctgtattccagtttggctcttattaagttagttactctatttacgtgtcctttttcaaaactctaatgtataaagttatgattttacgggcaactctttacttttgagtaaaaaaattgattgtccgaaaatttgatttcggacgataatgtaaaattgatgaaatacatcaaatgactacattaatccttttgacacaatatgaataatcaattttaattaatattattattacttgtaaaacagtatacatatggctcattacttcacagattctcaacactctctcattctccacaatttacgatggcacaccagctccgttttgccgccgcaagagaacccatctcagaagagtatacggcggatgctcttcctcatccacgttgcatctccgacgcgtgtcctccaccgagattcataccatcgtcgtcgcccttaactaa

SEQ ID NO: 189474 - DNA, 678 bp, Arabidopsis thaliana landsberg
atggcggataatctccaaagacagatgcaagaaattgcgctaggagtacaagaggaagctatcaatctccttattgaactatgtgatgaggcgctcaggaaacccaatttagcctcattacaaaaccggtgccctaagaagtagaatctccgagcaatgctgagtgctttgcctcgcctttggagcgtaggtgaagaggtggtaggcagaatcctggagattcacaaaatcgaattccttttccaatctgaagaatccatgttctcaatactccgtcgagggccatggtcgtttaatgattggatgtgcgtcatccaaagatggacgaaattgcactcggatgcagaattcaagagaatcccattctggatccaaatcagaggaatacccctccgcttcctcactgcaaggattattacttcaattggtgaaagaatgggtctgttccttgagacaaattttggtcgcgatggtgtggtcctcacggactatgtcatggtcaaaattttgtggaatattgatgatcactacgctttcagagaattttccgattcggagaaaagtcagtgttctgaagtttcaatacgagaaactcaggaatttttgtacacttgtggaatgctgagtcatgatgctccgaatgtccacttctgggaacgaggtctcatgcggacgatg

SEQ ID NO: 189475 - DNA, 24 bp, Arabidopsis thaliana landsberg
gtaaattctcagtctctcgtctga

SEQ ID NO: 189476 - DNA, 108 bp, Arabidopsis thaliana landsberg
ctgattttgcagttttcggtgagaaaaaacgaaaatcgacgatcacaaaaaaaaattctgacgtcgatggaggtcaccggaatcgaagacgttgacggcaaaggatga

SEQ ID NO: 189477 - DNA, 569 bp, Arabidopsis thaliana landsberg
atgaagatgcttcgagctctgcttttgtgtctctctttagtgttcttcttggcgtttcagattgttgtttcagagattcaattaggttctaagctcgttgttggtgaaaacaccttgtgggtatccaacaatggtgattttgctctaggtttttttaatccacctggtttgcttaatcggttcagcattggtatctggtttaactccaattcaatcccttatgatcaacggaaggtcgtttgggttgctggagcaggtgttgtcgtttctgataacagctcttactttgagcttactcgtaatggagaattggttttgtttgattctttgttgggtgttccggtttggaatagcaagacgaaccggttctctgtatcctctgctttgcttcgtgatgatggtaatcttgtgttgttgaaagatagagaagagattgtttggcaaagctttggtactccaactgatactttgcttccaaaccaaaagtttccagcttttgagatgttaagagctgctagtgagaattcgaggtctagttattatagtcttcacttggaggattcggggag

SEQ ID NO: 189478 - DNA, 534 bp, Arabidopsis thaliana landsberg
ggaagggccctgctttcgggctttcatcccccggccactcgacgtattcggcagaaacaggactggcagccctgcggaatgttgtggcaacgagccggaaattcctgcgggtggccaaacggttttaacccctgttttaccgggaattgtgaagagaatgtggtgtgcagacccggctgtcatccggggccgaaagatgtcacgggtaacgatcccgctgcgcatgccttgcggatgcatcgcgcagcaatagtcaacgataggacatttgagagacaaccaggcatcacttgagataatctcaaaattaggagagacaatttcttgaaattggaagttctctatataagttagatacaagcaactattgatccatgctgtcatttccgccgaatctttccggcaccgcatgggcgagtcgcgacacgatttctgaacgtgcctcggtccttcggacggcagcgcacgtgcccgccggaaatcttcgcgaagttgtgcgtctgtagcaatcggacccgggatctccgggtcgtc

SEQ ID NO: 189479 - DNA, 194 bp, Arabidopsis thaliana landsberg
atgggtgacgggagaggtacatgactctttaattacggataattaaatctaattacgcgtcattatatttttataaacatctttctacagttggaatgatcaagctgatctggcacatatgtggacccacttttgaacattgggctgtcacggcccacctaataccgtcgtctacgaagaatccaacgacatag

SEQ ID NO: 189480 - DNA, 74 bp, Arabidopsis thaliana landsberg
agagtttacaaagcttaaggatcggaaaccccttgtttgtagcgtgtgcacaaacacaacatccaaattcttac

SEQ ID NO: 189481 - DNA, 203 bp, Arabidopsis thaliana landsberg
atagtattaacgaaaaaaggatggaaggcgattacctgcttgtgtatgctgtcaaaaaacaattgccctcatccgttgtacaatacctggttgataaaggtagtgatgtgaattttttcgggaagcgttttgccgataatacagagatataccagacacccctggccacggcttgtattaacggtgacgacaaaacagtgaag

SEQ ID NO: 189482 - DNA, 211 bp, Arabidopsis thaliana landsberg
atgaatagttgcaagagacatcggatgaagaatcaagagagagatttttatgaaattccgtcggattgttcggaagaagagattcaacggagttgcgagttcgtgaaaaaagtgaaagagttggatgataagacaatcatcgttaaatttttcaatgcaatgaagtcttatcgatctaagtcttttaagttacatcgatctcaaaaccaaa

SEQ ID NO: 189483 - DNA, 706 bp, Arabidopsis thaliana landsberg
atgggaccaaaccaaggttattcttcgtctatcccaaccgatgaatatctaataggtacaagaggtgtgaacatatcattgcaaaggataatgttgtatcataaacatatcatcgcatacaatcacttttgtaaaagagacccaccgtagcaaataatttgtcttcctctaacgttatacgttgtacttcgtcaaatatgtttttttttttggttttttttttgtttgtttacattttcattccaaaaagaaacaagagatcttatttttgttttaccggaaagggaggtgagactttgttagtgggagaaacgaaaatcaaataagcaagtcatgacattccggtattggtgggagatgacaggatattaaatttaggattaaaatttggtttttttttttcatttgtaggagctggaaaataagaaaatctattctagtaattatagaaaaagctagttttgttctgatttttcatttttgtagcttccatgcaaattttattcttttaattagctccacaatatttccccctaatcaattagtttttatatattaagcaaatatggtttgtgaaaaatatgaatcattcctattttaaactttatgtttgtttataaacatacaaaacacttttgagaactcttgctcaaatttgtttttcttaggatgttttcttactgtagtttcaccagagaaagattga

SEQ ID NO: 189484 - DNA, 116 bp, Arabidopsis thaliana landsberg
gacacagtcaacaagtcaacgtcggtaagagatcccacaacaacatctacacagacacgtgtacactatctcccactttttcaccgacacgtgtcggttctttcacctacaagtaa

SEQ ID NO: 189485 - DNA, 156 bp, Arabidopsis thaliana landsberg
cgtcgtgagccttgtcgtcatctttataacggtacccgtatcgttcatgagaacaatccttacgtgcttgataccacaatgcgtgatattggtctcgcggtgaagacgtttgagattaggacgattggagatcgcttgcttaggacgagacaatga

SEQ ID NO: 189486 - DNA, 2998 bp, Arabidopsis thaliana landsberg
aagatacaacgccgaaagatcatacagattttggctacaccatcaaagctttgagaagcaataagaagcttggttagtgttttggagtcaaatattactagatgtcatgtgtacgattgagtataagaaatagaaccgcaaccggatcttaaaagcctaagtattgagtatttgttagaagatacaaagacaaagactaatacggacttcggctacaccatcaaagctttgagaagtaagaagaagtttggttagtgttttggagtcaaatatggctagatgtcatgtgtatcattcagtataaggactaggagcgcaatgggatcctagtagcctaagaagtgtttccgtgctacaagataccaagcccaagacccattcggccttcgcctaccccatcaaagctttgaaaagcaatacgaagcttggtttgtgtttcagagtaaaatatgactagatgtcatgcctatcattgagtataagaactagaaccgcaactgattcccaaaagctaaagtagtctttccttgttagaaaaaacaaagccaaagactcctacagacttcggctacaccatcaaagctttgagaagcaataagaagctgggttagtattttagagtcaaatatgactatatgtcatgtgtatgattgagtataagaactagaaccgcagcggggtcccaaaagccaaagtagtgtttcgttgtttgaagatacaaaaccaaagatgcatacggacttgggctacaccatcaaagttttgagaagcaataagaagctttataagttttttttattcaaatatgactatatgtcatgtgtagtattgagtataagaactagaaccgcaatcggttcccaaaagctaaggtagtgtttccttgttagaacatacaaagccaaagactcatatggactttggcttcaccatcaaagttttgagaagcaataagaagcttggttagtgttttcaagtcaaatatgactagatgtcatttatatgattgagtataagacctagaaccacaaccggttcccaaaagttaaagttgtgtttccttgataggagatacaaagccaaagactcatacggacttttgctacaccataaaagctttgagaagcatgaaaaagattggttaatgttttggagtcaaatctgaccagatgtcatgtttatgattaagtataagaactagaaccgcaatcagatcttaagaggaaaagttgtgtttcgatgctagaagatacagagccaaagactcatatgaacttcggctacaccatcgaagctttgaaaaggaagaagaagtttggtaagtgttttggagtagaatatgagtagatatcatgtgtatgattgagtatgataactagaaccgcaaccggatcttgaaagcctaagtagtgtttccttgttagaagatacagagccaaatattcatacgaactttggcttcaccattaaagctttgagaagcaagaagaagcttggttagtgttttggagtcgaatatgacttgatgtcatgtgtatgattgagtataagaacttaaaccacaacctgatcttaaaagcctaagtagtgtttccttgttagaagatacaaagccaaagactcatatggactttggctacaccatcaaagctttgagaagcaagaagaagcttggttagtgtttttgagtccgaatatgacttgatgtcatgtgtatgattgagtataagaacttaaaccgcaacccgatcttaaaagcctaagtagtgtttccttgttagaagatacaaagataaagactcatatggactttgggtaaactatcaaagccttgagaagcaagaagaagcttggttagtgttttggagtcaaatttgacttgatgtcatgtgtatgattgagtataagaacttaaaccgcaatcttatcctaaaagcctaagtagtgtttccttgttcgaagatacaaagacaaagactcatatggactttggctaaaccatcaaagctttgagaagcaaaaagaagcttggttagtgttttggagtcgaatatgacttgatgtcatgtgtatgattgagtataagaacttaaaccgcaactggatcttaaaagcctaagtagtgtttccttgttagaagatacaaagacaaagactcatatggacttcggctaaaccatcaaagctttgagaagcaagaagaaggttggttagtggtttggagtcgaatatgacttgatgtcatgtgtatgattgagtataagaacttaaaccacaaccggatcttaaaggcctaagtaatgtttccttgttagaagatacaaagctaaagactcatacagactttggctacaccatgaaaggtttgagaagcttggttattgttttggagtcgaatatgacttgatgtcatgtgtatgattgagtataagaacttaaaccgcaacccgatcttataagcctaagtaatgtttccttgttagaagatacaaagccaaagaatcatatgtactttggcttctccatgatagctttcaggagctagaagaagtttggttagtgttttggaatcaaataggacttgatgtaatatgtatgattgggtataaaaacttaaaccgcaacccgatctgtaaagcctaagtagtgtttccttgttagaagacacaaagccaaagactcatatgtactttggctacaccataaaagctttgagaagcaagaagaaggttggttagtgttttggagtcgaatatgattgatgtcattgataacactagattttaacctttttaagcccttgtttttcatgcatttagcttagtttcatgcccctttttatgcattcttagtctcttttccttcttttgcacattttgcattgcattgcatagcatacttgcatttggagtgttttgcaggtgaattaggtacttttggactcaacttggaggtttctagcacaagggatggacagactcgagttcggggaacctaa

SEQ ID NO: 189487 - DNA, 59 bp, Arabidopsis thaliana landsberg
aacaggaagctcccgtccaccttctccggcgaaactcacctgcttctgcacatgtttaa

SEQ ID NO: 189488 - DNA, 76 bp, Arabidopsis thaliana landsberg
atggtcactgcctgcctcctgtcaagttctcatcgaggacctaaatcgtatgtgtacgatacagcagggcatgcat

SEQ ID NO: 189489 - DNA, 434 bp, Arabidopsis thaliana landsberg
accgacaccctacacttcgccggtcctcaaataccgcatgtgtacccgcgagggctgcttcgtgcagatgccggtggaaaacgacatggtggaatcgctggcgcgatcctccggcaagggcaaggtcaacctggtgggcgatgacggccgcaaggtggcgctgcctttctcgctcaagggcttttccgccgcccatgacgatatggttagccaggcccgggccaaggcgacatccaagccggcagagactgccgcgccggccacgccttaagggcgcgctggccgccgttcaggagagtaacgcgatgaagctgttttccatgaagaccctgtcggccgccgcctgcggcctggttctcaccgccggcgccgccctggcccaggccggcgccgcgacgtcgccctcaggccccggcacgcccgaagtcaaccgg

SEQ ID NO: 189490 - DNA, 1742 bp, Arabidopsis thaliana landsberg
gatgccacgtggcagagtgtggccacatgggcgggtcccacgggacgggttgttactctgccacgtggcatcctattggagctgcagcgcatcgaccctaacctctctccttgggccaccaaatccaccaggtaggttattggtgcgcttggcgttcctcgaaccaaagacctcaccctttaacaaccttcccacaggttaagctgttcccaattaatctgcagatcaagccaagggcaattatcgtttcaaagatcctacaccccttagtagtgaatttatagtttaccaaggagtttaactgatgcagacccacatgtagaaaccaaatgtgctttgatggcatcatcaaaatgctttaatggatgtgttgcccctttgatggataaactaaaatatgagagtccactgctttagatgaggtattgattgataacgttaaattcggggatattgatttttctttttttttaaaacgcacttttacaccaatcaagataatttaataatattttacatttttcggaaaaaagggagaaaaaaaaacgcaaattttagacagataatagagtggaacacatttcaaaatcagacccatccttttacccgtggtccaatacaaaaacgccgtatgagttgagtaaatacatctttatttttatttttattttaatttttattgtaagagttttcttttcctatatatacacacatctctctctttctaagaaagcaaaaacttttctttttcctaatctatcttcacatttctctaactatttctacatttaaggtaattacttcaatatatttctttattttaaagtttctataattgaaaagagattatttgattccatatctataaatttgtggttttaaattcaaattttattatagtaataggttatgtagttacttaatttagaaagaaagaatgatcgttaattatcatagtaattgttaagataaacatacatcgtggagtttgcatgtattagttaaattaatattattcgctaatttgtaatccatttaacttgatttgtctaaattatacaggtctgttaattatgtaactaatttcaatttagtaatgtttcatataatttcttagttattttatataaaataacgtttatatatattaaatatattttgtacttgaatatatatacttgaatttattcataaaacgaaaaataaatagttaatagcttatcaaatttgtttcaggaaaattatttcgatttaaatgattttagatatgtaatctaatcgtcgacggaacacaaatccttccacaagaatcggttcaactcatcctgaagtttcagctcctccctccgaaacaacagtgcgggtaaatttacttttacttctattttttgtaaagaaaaatatttattaaaatttgacataataaattacattgtattcactaaatttgtagaataaagacaagtacaaatggtcatacattcaagaaaaaacattaattcaattgttcgacgaagcaattgccatgaataattatattcttaagcatcttacttcaaaaagtagagtatatggttgaaaagtttaatcaagcgttcgacaaaaatataacttatgttttcttcaaaagcaagcttgatgaattcaaaaaaagttacgagagatggaagtttcttacgcataaaattggcatcactgttgatcctgagacatcaatgatatttgcatctgacgtatggtga

SEQ ID NO: 189491 - DNA, 1059 bp, Arabidopsis thaliana landsberg
gtttatgcatccgggggttcaagctggattatcgacagcggatgcacaaaccatatgacgggggagaagaaaatgttcacctcctacgtcaagaataaggattccaagattcaattatattcggtgatgggaatccaggcaaggtaaaaggtttaggtaaaattgcaatttctaatgagcactctatctctaatgtgtttttagttgaatcgctcgggtacaatctgttatctgtgagtcaattgtgtaacatgggttataattgtttattcacaaatgtagatgtatctgtttttagaagaagtgatggttcgctagcttttaagggtgtactagatggcaagctctatttagttcattttttgaaagagaataccgatctagatgcatgcttaatagctaagaccaatatgggctggctttggcatcgccgtctagcacatgttgggataaagaaccttcataagcttctaaaaggagattgtcggagaggaaattctccggccgggtggcggaatgcacccgccctaaatactaagatgaggaggggcctaagcattttgcttgttagttggaaaatggggagaacacaagaacacacaaggatttagagtggttcgggccgcctgagcgtaacaccctactccactgtgtgatgtattgagtttgagagcttgtatgaacttgtgagtttgagagtctaagtgagcttgagtgagtgtgagagaacttgtcttgtaacgttgcgtgccctcccttttatagctcaaggggggcacgtacaaggatgctgagccccgacatgtgggcccaggggcaaaacggaaggaagtaactaacgcctgtcatgccagggtgatctccgagtgccataatgtccgtagtgcatattgtattgatatcacgcgccgcttcctcggtaacgcgcgagtgatgatgagcatagtgtacgccgcagcacgggcgtactgcctgccaatggaatggacaggcacgctgcctgcgggatggccaggtcgccgcctaccagcggagtggatagggcacattaaatgctga

SEQ ID NO: 189492 - DNA, 1368 bp, Arabidopsis thaliana landsberg
gcgagcgatggtaggagattgtttaatgtgtctcgggtgtcagatcatctacaagaaaggctcgcatttgaggccgatattatggttggtactcagctatgctcgcggcgcttgcttcagcagataatttactgtgtcggagggatatctgttttctttcctttgataacacaatctgatagatgtgaaagtgaaacactgaacgaggaaacttcagctatgcctacaaaagagcgtatgacagcagaagttattgaactgattgcttctgtcttggatgaaaatccagcaaatcagcaacagatgcatcttctcgctggattccccatactaggatttttattacagtctattcaaccgaagcaactcaatctagagacactttcgtctttgaaacacctcttcaacgttatttcaagctctggtacgtgttgtgagtgcctcatactaatacttcatttctggtaccatatattgcggttgtggtttgtggtctggtacatgaagaagaacgtttttctgattgtggtgtgtgttggaatatttttatttgtttcatatggttggatcgtaaactattttctgtagctagtacattcagtcagatttcttgcctttaaacgtttgtctgattgtgctatgtgttggaatattaaagttgtttgtagatcacgagctgcattatgttaacttctgtaagtgtatattctattacgctttacactatccagcgtttgctgagcagcttgtggaggatgctatatctagcattttccttaatcctcacatttggctccatgcggcctataatgtacagcgtgaactttacatgtttctcatccaacagctagataatgatccacgacttctcggaagcctttgtcgactccccagagttattgacattgtatggaacttttattgggaatctgaaagatactgtaaaggaagcaagcctcttatgcatccaacaaggactattgcagaaagaccaagtagagatgaaattcacaaaattcgtctccttttgctgagcctaggtgaaatgagtctgaggcatgtcatccactgtaaaaatacagcttttctggcttctatattttatgatgtaatatttttggaaacttgaactcaagtccttgtattcagttttattcaaaaaattgttccgtttttcaggcagaatatctcatcaggggacgtaaaagctttgacagcattttttgagacatgccaggatgtagcatgtatcgaagatgttctgcatatggttatccgtgccatttctcaaacatcggtccttgtttcgtttcttgaacaagtcaatcttatcggtggatgtcacattttcgtcgatcttctccagag

SEQ ID NO: 189493 - DNA, 69 bp, Arabidopsis thaliana landsberg
tttcagggacatgattttggttcttatgatatgaacttacaaattcctttgttacatgcagactccagg

SEQ ID NO: 189494 - DNA, 346 bp, Arabidopsis thaliana landsberg
cgcctcggtctccaccgtggcgggcgacgtgacgctgcgactgcccgccgacagcgacgcggccgtacggctgaacacggtgtcgggcaaggtcgcgacggagttcagctccctccaagtccgcaaggccccggcatcccgcgtcgtgttcggtaacgtaggcgccggtaccgggcacgtgtcggtcagcacgctgtccggcgcgatcactctgctgcgctgccccggccgacgcacaatgcccgacaggggggacaacccccctgagaccccccgacgtactactagtgggccccgcgcgcaggacctgcgcgaccagacgggaatggagagcgagacccgatga

SEQ ID NO: 189495 - DNA, 21 bp, Arabidopsis thaliana landsberg
tttagtcgtatagcaagttag

SEQ ID NO: 189496 - DNA, 218 bp, Arabidopsis thaliana landsberg
atggggtcatgggaaacattcttacctgatatgactattcccgagcaccacccggaacttgaaccagcggagcagcttgtagcggaggagcaagctttggccgaaccaagaagacaaatgactcgttcgaagaccaaacttctcaaccaagctatttcggactacccaaacacttggacacgaaccatgatggttgcgatatctttccaagacgattg

SEQ ID NO: 189497 - DNA, 387 bp, Arabidopsis thaliana landsberg
atgggacctttcttgggtttaggaatccgatggaaagaagacttccgatgttttgaaggcgtatggtagggtggcgtgggaatggaaccattcacgggtgaaggaatctgatttgatgaagaattcaaatgactgagacgtgtatgatcagtctcgaaagatgagattgatggaggtaagattggatcggcaaggagagtatataaagcaggaactattgtgaggacaaatagaacaaatgctaatgtaattgcaactcttggtgttctttgaaggattgcaaacaaaggaagctccattgtctgcttcaagacaatggtgtctggtcttgtcataaatatgtatgtatatatggtgaataatggtgagctcgtggtcatccaataa

SEQ ID NO: 189498 - DNA, 143 bp, Arabidopsis thaliana landsberg
ggcacaaacgaaacagcaaaccaaccctgaaaattctaaacattggttgcaggaccaactttagacataagaagctacaagggacccccatcattaaccaccatactccaataggcttcatcaaaaatgaagcatactcatag

SEQ ID NO: 189499 - DNA, 111 bp, Arabidopsis thaliana landsberg
cggctgacgatgctggttttgagatagccagtgaagtagaggaagctgatccattcgactcaggactctcggtagttgcatttgaagcagtcacagcaggagttggcggag

SEQ ID NO: 189500 - DNA, 377 bp, Arabidopsis thaliana landsberg
atgcactatagctttttatatgttctctcatgtgaccaaggaggacttctgccaagcggggacaacttacttgcggttgtaagacgaacagaacatttcagctcttgtggaagagttgaagagctcggaaaatcaaagtaaagaaaggtgtaaaaagagaagacaaagcttataaagaaagtgcctatgagacttgctcctgagttctttatagatgccaatagatttacactctgctgacttttatcaacctaaggaaaaggagtatcgtcctatcaatatcaaacataagagcaaagttgaagaaaaagttgaaaaagaagttgaagaagaagttgaaaagtatgttcaagaatctcagtctgcgacgagtgaag

SEQ ID NO: 189501 - DNA, 147 bp, Arabidopsis thaliana landsberg
atgaaccacttatgtttgtatgaagtgaagatatgtccgatcacaaatccacaaaacataccaggtccaaacgatatcgcggctgctatccagttcagcaattggtcttccgattccgacaaaggttcctcgggttccttagatgta

SEQ ID NO: 189502 - DNA, 383 bp, Arabidopsis thaliana landsberg
atgttcctgcgttcgctctgcgacgttttcaccatcgacgtcgccgagagcggtggcggcctgacgctgtgggccaagaacaacgtcaccttcaggcaggtgagcacaaccggcagcggcgacatcgtcctgcgttcagacgagggcgcgatcattgcgctcggcaccgggctggcgaacgtcaatgccggcggctcggtgacgatgaccgtggctacgacgatcaccggcgcagaggtgagggcaggcggctcggacgggatgacggcgaccaacggtcaggtcgcctggaacgccgtcacagtcgggaccaccgtgaacgtgcgctcgtccgccgacgttatcgatgtcgcgacgatcacgagcggtggagctcagaccct

SEQ ID NO: 189503 - DNA, 129 bp, Arabidopsis thaliana landsberg
ccaccaccaacccgccgccgatccccgtttaagatgatcgtccgcacctacggcccgcgaaaaggaaccctctcgggaacgtattcgggctcgtcctttctaaacgacgacgtttcggagccattcagg

SEQ ID NO: 189504 - DNA, 152 bp, Arabidopsis thaliana landsberg
cttcactgacctggttatcattatacaggatagatgttaagtacaacttacaagcatgtggcagaagcttgcataatccagaacaacatgatactgttaactacaaaatgaccatatcaagagacataacaagtgcaaaagcagatagctga

SEQ ID NO: 189505 - DNA, 471 bp, Arabidopsis thaliana landsberg
gcaacagcttttcagccacaaataatccatgacgtatacataggaagatggagaaaggtgcagatgctccgttcagcgagtggaacaacacccgcaatgaaaacatatcttgacctgccgataaaattccagaaaggagagatctcttttggaattggatatgaaccagtacttgctgatatcagctatgccttcactgtggctcttcgtagagctaatctcagtctcaagggtcctggtcttcttcagcctcctaaaaaggagaaaagtttaccatggtgggatgaaatgagaaattacgtccatggaaatgtaaccttgtccttttctgagacaaagtggattgttcttggtagtccagatccctatgagaagcttgacaagctccacatgacctctggctctgtggaaattcagcaatatgatggtcgtgtgcacttctctgctgaggacataaagatttttctttag

SEQ ID NO: 189506 - DNA, 93 bp, Arabidopsis thaliana landsberg
gaacatttgctttatcgatacctcttggaaacctattacctggcttttttgggttggatcttcaaagataactatgaccgcatttatagttaa

SEQ ID NO: 189507 - DNA, 1344 bp, Arabidopsis thaliana landsberg
gtctccacaccaatcagcaatcaagtccgcaattgtcttctcagcagacgacacaatctatgcttcgtcagcatcaatcgtcgatgctaaggcaacatccgcaatcacaacaagcctctggtatccatcagcagcaatcttcattgccgcaacaatcaatttctcctctacagcagcagcctacacaattaatgcggcaacaagctgcaaatagctcaggcatccaacagaagcagatgatggggcagcatgttgttggggatatgcagcagcaacatcagcaaaggttactgaaccaacaaaataatgttatgaacatacaacagcagcagtcgcagcagcaaccactgcagcagccacagcaacagcagaaacagcagccaccggcccagcagcagttgatgtctcaacaaaacagcctccaggcaacgcatcagaacccactgggcactcaaagcaatgttgcaggattgcagcaaccacaaccaacagatgctcaattcccaggttggcaattcgagtttgcagaataaccagcactcggtgcacatgttatcacaaccaacggttgggctgcaacgaacacatcaggctggccatggcttgtattcttctcagggacaacagtcacaaaatcagccatcacaacagcagatgatgccacagcttcaatcgcatcatcagcagctgggtttgcaacaacaacctaatctgctacaacaggatgtgcaacaaaggctacaagcttcaggccaagtcactggttccctgcttccacctcaaaatgttgtggaccaacagagacaactatatcaatcccaaagaacccttccggagatgccatcatgtatgcttttgatccttttaatactttaggttctgatattttccataatctctcagcaggatatgatgttgaacatattttcgtttttataattcttagcatcgctggattcgacagcacagacggaaagtgcaaatggaggtgattggcaagaggaggtttaccaaaaggtagttctctctttttgtgtttgctatatatctttaccaattatggctacacttattaaatcttcaagtgatagatatcattgtaatgagtaatcatatgaccatattgcttgtctttgtagatcaaatctatgaaagagacttacttaccagatctgaatgaaatctaccagagagttgcagcaaagttgcagcaagtaagttacaattttcttttcttttttatactaggagaatcgtttgtacgtctatgtcctctggaacagtagtgagtaccttctgagaagctttatgaattcaatgcaagttcggttcgttattgcataa

SEQ ID NO: 189508 - DNA, 396 bp, Arabidopsis thaliana landsberg
atgacagagtctattgatttgaatcgatcagagtccgagtctgataacaacaccgacgacgttactcctatttttgcaattgatgactcttcaaaagggtatgtttctcttcgtccatctcttgttcgttcctcaattatattttgtggtttggtttatatttgttgcaacttgatgaatttgggggtgggtgttatatatatgtgattaaggtttttatgtgtgatgattaagattagtaggaaatttataatatcagttttaagtatatatgtttatatgtcattagggtttgatcttatgattgctttgtgatgtttgatttgtggttaaagatacagaacagtgagtggtcctactagaagatcaactaaaaaaggatggacagccgaagag

SEQ ID NO: 189509 - DNA, 194 bp, Arabidopsis thaliana landsberg
atgaagatgagcaaagaagaagaagaagaaagaagaagaaagaaagcaggagaaaaacgtcaattccaagttcttaaagtactctttttcaaatccctaatggaaagatcccaaaatcaaagttttagcaaaaaagccatgttttgacaataaccccatttaacaatgttttgtactctctttagagaatttaa

SEQ ID NO: 189510 - DNA, 205 bp, Arabidopsis thaliana landsberg
ttgcagcaagataaagccgtcgtcgtctcggccacaagtggtcgaaaaaggaaagaaaattccaccgtcgccttcaccgcaagtggccaaaatcgacaagaaaaagcctccctcgtcttcggcacaaggggggaaaacgtacaaggaaaagccacggccgaaacggcgagtggtcaaagagcaacggattcaacttcttatataa

SEQ ID NO: 189511 - DNA, 134 bp, Arabidopsis thaliana landsberg
agaagttggatactttgaagctggctgagataaagcactctcgtctcgctatggtcgcatttctcatctttgctcttcaggcggcctttaccggcaaaggccctgtcagcttccttgccacctttaacaattag

SEQ ID NO: 189512 - DNA, 339 bp, Arabidopsis thaliana landsberg
atgggtgcctggcgcacagccataagcagctttgcacagtatttcctggaactcatcttcctggtgcacgaagctgttatgaatacggatgccgtgatacggaccgcatggcgcatgttcattaccaaaaagaaattactggaatggaaccccttcagcaaccagcgtaatgatgatatggtgggcagggcctacacatccatgtggtttgtacctgccgtggcggccggcatttttgtatacttgaccatcagccaccccatgcgtttgttttccgccatgccggtgctgatactctggtcactcgcgccgttcttctcctggtgggtgagcctgccg

SEQ ID NO: 189513 - DNA, 3835 bp, Arabidopsis thaliana landsberg
aagttcttttacaagccgtgtgaagttggtcgtctcatacctactttctgggacatcttagagaaagcaggaagtgaaggtgcgagtctgcagaacatatcatcacatggcatctacattttgaattccgcttttgacagaacagaatatgacaacgttttgaacttcttgggtctgaagcaagtaagcaacgaatggtatgtaaaatgcattcagggctgtgatctcgtgacaagtgtgtcagaagctacgtatgtggaggttctactcttcatcgctgagaattggcagtgcaggtttcagaatacaaatatggggaaagttccccttatcaagtatgttgtccaaaagggagtgagttctctccgcagtttgggtggtttcagtcctaggactttatgcttgtccacagagaagaaccaggcatggctacttgattggaacgatgagttcagatgtatgtctaacttcgtcttcatgccaccaacaacccggacagcgttgaaagtgtgctccaagaaggagataattcatacttggctcaaagagaacgttaaagtcattactcttagtgtctctgactatgcaaaacatctccgtgagaatcttaatggagataagaggcttgttgttgcatatgcacactttctgcatcactcaatctcaaaggattttttatcaaaagaagaagcgggtaaatgctgcaaagacatgccgcttgtggacaactatgggaatgtaaacataagcaggaatggggttcttgttccagctagtgcaggtaaatgggttagcttagttggttccaatccgtggagacatagtggctacattgaactttcagaagagtatttgttgtcgaacaggttcgctggtcttcggtctaacaagaaagaccttctcgggttcttgaaatcttctgttgaggctggagatatacctgacatagaacctcctaatgttgctatacctgcattgtcagggcctcttacaaaggagaatgttttgttgctgttagagtggattaataagtgtaacagacattctcttcgttccaactttttgaattctgttagaggaggaagttggctgagaacaacaatgaatggggtttctgattatcggccgccttctcagtcgttttatcatacttcatcatggggaagtattcttcagaacggttcaattcttgttgatattccgctcgttgatcgaagctactatggcaacgagattgagaagtacaaagaagagttgaaaattactggtgtcatgtttgagttcagtgaagcatgtagatttgttggcaaccacctgatgagtttagctgagacgtcaacacagtcaagcgcaaacgtgttctcaatactgaaattcatcaggtacttgagagagaagcgcctctcaccagctgatttcatcactgctgtcaaaaatggtccttggctgaagactatttctggttacagatctccagatggagctgttttgttcagcgaggaatggaaagctgcgtcgttgatcagtgacatcccattcattgacagaggtttctatggtgtagctagcctcaatggttataaggaagagcttgagttgcttggcgttgtagttaagtttcctgataactacagcctcatcgtttcacatttgaatactgcaaagctgacttacttgacacctgatgcaatgttcctagtacttgactgcatgcgtcaactgagtccacataggctgatcaatgccctgtggaattcttctcagtgcttcaagacaaagaagaatggctataaatctcctgctgaatgtttcatacctgatccagagtggacttgtcttctttctgtttttgattgcttcccttttgatcgatgatgatttctatggcagcagaatctttgcctacaaaggagaactgaagcagattggtgttaagcttcagcttgaagaagctgtgaaaatgtttgtgagtacattcaaacagaaagctacctcctctgggctaacacgatgtaccgcatcgtctcttttatcttgctacaagaagctgatgggaagtttgtacaaatatcctgaagaacttatgaaaagcttcaaacagtttcaatggctgcataccaaacttggtgattttcgtgcaccaaaggactgtattctctttgattcagaatgggaacctctccgcctcatagcgaatcttccctttatcgatgatggtccgaactggtatggcaagagcatacacgagttcagaaaagagctcgagagtttgggagttacagttgagctgaggaaaggcatgagccatgtgatcagctccttaagtctccctgatccatctcgcatcgctccttcaagcgccttgtctcttttcaagtgcatcaagttcttgcgtgaagacagatttcagcaactccctaaagagcttcttgataaggtctcagtaaaatggttgaagacacatgcaggttactgcagtcccgaggagtgtctcttgtttgataggacctggaagttagagccgtgtgatggtcccttcatcgacgaagagtattatggctcagatattaattcgtttagagaagagcttattgcgataggagttggtcatgattcagacaaagcttgccagttgcttgcaagaaatgtctataaactctcagaaactgatgctatttcccgggtttatagatttcttagtgaagctgaatggaaacctgagaaaggtgcctcttcaggtcggatttggataccaagtgatgagaaatgggcagatatttctagttgtgtgctctttgacaaagataagctctttggatcaaagtttaacgttcttgaaaaccactattgtagtggtaaggatcataaccttcttggtttcttctcatctgcatttggcgtgagaattaatccgtctattgaagattactgcgagttgtggaaatattgggagaaaactaagaacagattgtctagtcatgagtgttgtgcgttctggagctttgttgtgcgacatggtgacacggtgaaagcagagaagctcctctctgagtccttttcgcgtttgcctgtacactcaccggattgcaacaacaacgaaggagtcatgttatctagcataagcgacgtgttcatagctgatgacttgctcttgaaagatatgtttattgattctcctgttttcgtttggtatccaactccaagcattcctacattgtcccgaaccagacttattgagatttatcgaaacatcggtgtcaaagaggtctccaaatgcgtcgagatcgcagaagctgatctaaccggattcaaaaccgagctgcaagaggttgttgatccaaagaagaacctgattggaccggggctagtgaagctcattctcgcgttcctctctgatccatctctcaaggtagaaactgctgaacgtttaagaatcatacatagccttgttgacatcgacgttaaagaaacttcggagactatcacaacggagtatactctgagtctaccttcaaagggagagaagctgattgcaaaggctaagaggatgataagatgggaaagggagaaaggagtggtttatgcagagaagatggagaaaacttgtggtaaaagaaagcttttggagtacgccacgtgtttcgctgaggtgattgctaagggtgtgatgtgggagagagaggatctgatcggacggttatcagagcttgtgaagatggcttacttggttgagtttgatgaagaggctttagagtttcttatgaagtctaagaaccttcaggtctatgaagaagatgagaaactaatctcagatgagttctctcaagtaaactaa

SEQ ID NO: 189514 - DNA, 334 bp, Arabidopsis thaliana landsberg
agaaggtgctagggttacctggggttatattaatagaattcttgggcagccatcactgatcagagaatcttccatgggccgattcccatgggcaggctcagtgtctcagtttaagaacaaacttagcacagctgcaggggcagcagcatctgcagaaggagaaaagcctcttgaaaatgtaattctccatcgttctttgaagacgagaattgagcgtcttgcaagagccacagcaaataccaagtcacataaagcaccattccgaaacatgatgttttatgggcctccaggtaccggaaaaactatggtggcgagggagattgctcggaagtcg

SEQ ID NO: 189515 - DNA, 583 bp, Arabidopsis thaliana landsberg
gacaaacagatggaggctctagttgagaagctttgcaataggtttagcggagtcacaggtatgcttgtattgatgatatatccttacacctgttttgggtttaataagaagtatatccctttgacatctacacctaaacttgcagatggaaaacagtgggaatacatttcgtattctctttcgctgctgacattcacagaaaagggaatcaaaaagcttattgagtcattcaagtcttacgagcacgctttagcagaggatttggtgaccgagaactttagaagcataatcaataaggtctggtttctctggttttcgtcaccctagtcatttttaatgctatatgttagtttgacatctggttgtgaatctgaacagggaaagaagtttgcgaagccagaactgaaagcgtgtatcgaagagtttgaagagaagatcaacaagttccacatggagaagaaagaacaagaagaaaccgcaagaaatgccgaggttcatagagagaaaaccaagaccatggaatcccttgctgtcctcagcaaagtgaaagaagaacctgtagaagaatatgatgaaggtgaag

SEQ ID NO: 189516 - DNA, 307 bp, Arabidopsis thaliana landsberg
atggcttggattgagtatagtgatgttcttaaactgattagggtttgggttgggtattctcgtgttaagcctactagtcctgttttatcaacacagattgatctctctggtaaagttaaagagtatatgcatgttggtttctctgcttcgaatgctggtattgggtcagctttgcatatcgttgagcggtggaaatttacgacctttgggtctcattctgatgcgattcaagaagaggaggaggagaaagatgaagagtgtttggtttgctcaggggaagtttccgaaaatccgaaggaaattcaaa

SEQ ID NO: 189517 - DNA, 374 bp, Arabidopsis thaliana landsberg
cacatgcaactccccttcgcccatcagtaatagtcgacacaagatggtgaagaagcttatggcagttaaaccccctttccctggcgatttcgacgttcaagggcggtgccggcaagtcaaccctgaacgtcaatctcgcagccgagttcgcgcagcagggacatcgaacgctcctgattgattgcgacgagcaggagtcatcgacacgctggtacaatgtctcaatgaagcgcgggctgctcccgacggacggcacgttgctgcatctgcgagtcgcacctggcgacaggtttcgcgcccgcctggccgacgcacctgaagcggatatccgtatctatgacgtcggcggctacgttcatcaacgggctatcgag

SEQ ID NO: 189518 - DNA, 810 bp, Arabidopsis thaliana landsberg
atggtaagaagtgtatctatgtttctttggtttggggctggcaatagttctcatgtgttcattgcttataataaaatttgtttcaaattgagtggttcttgcacaaatagaatattcattacaagagtttgttctctgttcgttatgtcatcttttcgacctatataaggacatgtagatgcaagcccttctaaaatttaatttcgtcattgtaccattatttttcctaaacaggtcgagagaggaccaaccgtctatttaagtggtctaagggagaagcattttggtgaactgtttctaaatgcatataatgtaagtgagagttcttctgcaacgcaagcgtcaagttctcaagcagcgtcatcagaattgggtctctctgaagagggtttgaaacatatagctagatacatagagtattttgaatctcgatataatgacatatggcttgtgtttcaccacgagggtgtatctttatcaaagctgatgtacactgtggaagaagcagagattagctctgaaaaggctgaagaggcaagtcacgggcagatacttcgtccgtcaaagtggtggacctggctgaagacgacagaatcaggaaaagaagaaatgcggagaataatatggcaattggtatgtgcttaggaatctgagaattttatgatttccttcctttgtttgacagatgcatcgtaggaatctaattctatttgtacttactatattccctaatgctttattcttcttttcagttgctaggtttaaaggcatgccatgatcgcaatattactcacagagatataaaacccg

SEQ ID NO: 189519 - DNA, 248 bp, Arabidopsis thaliana landsberg
atgcaagtcacaacaccggaaatagaggtaaacgcactgagccaggttctccgaaagaagatgcgacacttcctcttctttcctttgacgagtctgcttccaccaacttcaatagagctaaagatagtatttcccttctgatggaacaacctgtgtacaccatccaccgctactggagaaagtttgacgacacatacatgaggcctatcttcggtggaccttgtcgagaaaaccaaccagaatgctag

SEQ ID NO: 189520 - DNA, 335 bp, Arabidopsis thaliana landsberg
gaattacaactattaccatggattcaaaagaagggaagttaacggtgattggtgagtttgacgaaatgcagattctcaaaaaactcaaaaagagatggcagagtgcgaaaatggctacatttggcccgttcgatccgaagaaggaagcggaaaccgctgcagctgcggaaaagaagaagaaagaagaaaatgaacgtgaacgtgaacgtcaacgtgaacgtgaacgtgaagaagctctttaccggtctcagtctcaccatgacactccggtttgtccaatgcatcatcacactactattgtgtgcgatcatgatcacggctgtataatctcttaa

SEQ ID NO: 189521 - DNA, 88 bp, Arabidopsis thaliana landsberg
atgactgagatcctggtttcagattcaattgggttcacaaaggccacaaaagagtcatatgctctcttctgcaatccgtgctctccca

SEQ ID NO: 189522 - DNA, 202 bp, Arabidopsis thaliana landsberg
ttttaaaatcatcggtcttaaaaacgtaacacgctttcgagttttgggtaatgtaggacggataaggaacatttacttcccgtttgagacggctattgatactgcatggagtgtagcggttgagatggtgtcagagctcgacataacgaatcaagatgttgcgaaaatcgcggagattatcgatgcagagattgctgcattg

SEQ ID NO: 189523 - DNA, 2088 bp, Arabidopsis thaliana landsberg
  unsure (1)..(2088): unsure at all n locations
atggaagtgaagattgcttgtgagaatgggaatgttgttgaagatgttaaggttgttgagtctttggttaaagaggaggagagtttggggcagagagatgcctctgaaaacgtgagtgatatcaggatggctgagccggtggaggttcagcctctgagaacttgtttgccagaaggtgatgtggtaagagacttgtctgttaccgcgggagacgagtgttcaaacagtgaacagattgtggcgggttctggtgttagcagcagcagcggaactgaaaacattgtcagggatatcgttgtttacgcagatgagagcagtctaggaatggataatttggatcaaactcagccgctagaaattgaaatgtcagatgttgcagttgcaaaaccgaggcttgttgcgggtagaaagaaggcaaagaaaggaattgcatgtcattcatccttgaaggttgttagccgagagtttggtgaaggatctaggaagaagaagagtaagaagaatttatattggcgtgatagggaaagtctggattctcctgagcagcttcggatactaggtgttgggacaagcagcggttcaagcagcggtgatagtagtcggaacaaagtaaaggaaactctacgtcttttccatggcgtttgcagaaagattctgcaggaggatgaagcaaagcctgaggaccaaaggagaaaaggtaaaggtcttagaatagattttgaggcttcgaccattctcaaaaggaatggcaaatttctcaactctggtgtgcatattttgggagaagtgcctggggttgaggttggtgatgagttccaatataggatggagctgaacattcttggtatacataaaccaagccaggccggtatcgattatatgaaatatggtaagggcaaagttgcgacannnnnnnnnnnnnnnnnnnnnnnnnnnnnnnnnnnnnataactcggatgtcttgacctacactggtcaaggcggaaacgtgatgcaagtaaagaagaagggagaggaactgaaagagcctgaagaccaaaagcttattaccggaaacctcgcgttagcaaccagcatagaaaaacaaacccctgtgcgtgtcattagaggcaaacataagtcaactcatgataaatcaaaaggtggaaattatgtttacgacggattatatcttgtggaaaagtattggcaacaagtcggatctcacggtatgaatgtcttcaagtttcaacttaggcgcatacctggacaacctgaactttcttgggtagaggtgaagaaatctaagtcaaaataccgggaaggtctatgcaagcttgacatctcagaagggaaagagcagtcacccattagcgctgtgaacgaaatagacgacgagaaaccgcctttgttcacctacactgttaaactgatttacccagattggtgcagaccagttcctccaaagtcatgctgttgcaccacgcgctgcaccgaagctgaagcgagggtgtgcgcttgtgtggagaaaaacggtggagagataccgtacaacttcgatggagccattgttggtgcaaaacctactatctatgaatgtggcccactctgcaaatgcccttctagttgctacctaagagtcacacagcatgggatcaagttaccgcttgagatcttcaaaaccaagtcaagaggttggggagtgagatgtcttaagtcgatccctattggtagcttcatatgtgaatacgttggtgaacttttagaggatagtgaagcagaaagaagaatcgggaacgacgagtatctctttgatattggtaacagatatgataactctttagctcaagggatgtcagagctaatgctggggacacaggcaggccgatctatggcagaaggtgatgagtcgagtggattcaccattgatgcagcaagtaagggtaatgttgggaggttcataaaccatagctgctcgccaaatctgtacgcccaaaacgttttgtatgatcatgaagactctagaatccctcacgtgatgttcttcgcacaggacaatatacctccgcttcaagaactctgttacgactacaattacgcgctcgatcag

SEQ ID NO: 189524 - DNA, 189 bp, Arabidopsis thaliana landsberg
atgacggccgtgcaagttgaacgcgtcgaggtgatgtgccccaaaccatgccactggactgaatgcagctacatgaggtcgtgctgccatgcctgccacaccgcagggagcacgatgagcatcacaggatcgaagttacgttcaagtacgacccggagagcagggccgtcaccttcaccggcaagtacg

SEQ ID NO: 189525 - DNA, 758 bp, Arabidopsis thaliana landsberg
attagcattgctgttgctgccttggcggtgcatgttcctgcggcagactggggagatggtggtataattagctggcttagggatgagatgcatatgcatcctgaatatgtgcctggtttcttggaactcttgacagttttgcccgaggtagagtattttttattcctttgtttaagtgttcatctccctcagtaattaatttgacttcatgtatccggctatatagatatgaaaggccttattttggtctgacttggatcttcttacttattatttatgctggtattactgacctcaaattgggtagacctatttggagaatattctgttccttttttactttttccatatctatgtttaggtagcattcgacgttactctgtgagtgttatttcaatccctaaagtattggctgggcaagaccttgatattttgtatggtattgtttgcaaaaaatgttggtagtttatttgtaactaaatgaagattctaattttttcacaaatctctaccacatcgtttgacctttccctttcattaacttgattcactttaggaatgtttagctttaatctagatggttatatgatgtcttgatcttatattgtccttcttgctatgaccaggaaacatttaactacaaaatagctgctcgtccggatcgacgacgtcaattcgaaaaagagcttacttctcaaatggaagctgcacttagtatcttatcagcatgtttgaaaatatccgaacttaaggaacag

SEQ ID NO: 189526 - DNA, 151 bp, Arabidopsis thaliana landsberg
atgggtagtggtgacaacgcttctctgatctctactgttgtcaccaatggtgtgaacgcaatcgcaacagatatctctcttttagaggttgaattcgccggtaaaaaggtgtcttctgatgaaaggagctctccagatgaccgctacacag

SEQ ID NO: 189527 - DNA, 476 bp, Arabidopsis thaliana landsberg
atggccgacaaaaaatatggaaactgtgacggtaaagtcgccgggaaaagccagcaaggtacactagttgaaaaggagcaagtagataccgcttctacatcctggagaattgatctcgcaaaggttgacgtttggtatgcctcttacggatccaacatgtggaaaccgaggtttatttgctatattcaagggggacaagtaagtagccttgtttcgtttctttttggagtctgagcttgtgtcttaattgacacatctatggctgtttgtgtttattttcaggccgagggaatgataaaagcatgtgtcggttcaatggacaaaagtccaccaaaggaaataatgtggaaaacatttccacatcgattgttatttggccgtgaaacttcaatgttttggggtgtaggaggagttgcttacaccaatccccttactaatctcaatgatcaaactcacatgtgtttgtacagaatcac

SEQ ID NO: 189528 - DNA, 97 bp, Arabidopsis thaliana landsberg
ttctccgggctcttggtgattttcgtcttatcacacaaaggttggtctcttacctctttcttgatttgatcagttgcttccttcctttcacagttga

SEQ ID NO: 189529 - DNA, 160 bp, Arabidopsis thaliana landsberg
acattttctgtatagcaccaaggtattcatcgtcgattccagcagcaacatcacaatacgaaactctccgatgaactgtaacataaacaatctgagtcatcgacaattagttctctatgaaatgctaatcactgagagtatcgaaaagacacataaatga

SEQ ID NO: 189530 - DNA, 522 bp, Arabidopsis thaliana landsberg
atgactcaggtcaagcagcacagcttctttaaagacatagactggaacactctagcacaacagaaggtgaatttcatttatcttttacttttaaagtcatacgctttgcaaagcccgaactcttgattatttattttattttggcaattattgcttgtttcctctaggctgcatttgtgccggactcagaaaatgcttttgacacaagttacttccagagtcgctactcgtggaactattcgggtgagcgatgttttccaaccaatgagaatgaagattctagtgaaggtgacagcttgtgtggcagtagtggtcgcttgagcaatcatcacgacgagggggtaatatctgctgatccactctctttacttactcgtcagaaatattgacgttaaatttttagatgtgtagtgccctgaattggatcaatgattgtatatgcaggttgatataccctgcggacctgcggagttcgaaactagtgtctctgaaaattacccattcgataatttctcgttcaag

SEQ ID NO: 189531 - DNA, 131 bp, Arabidopsis thaliana landsberg
atgcaggaaccagttcaagcagaaccagttaaaccactggcccaacccagcatgttgccaagcattaggtgtggtggagtaccaagtcaagtaaatagcccagccattaccaaaaatactcggatggccag

SEQ ID NO: 189532 - DNA, 343 bp, Arabidopsis thaliana landsberg
atgaacataactgcgacctctctcgattctgaaggtatgtaaaacccattttatatgaacatttataatatacatctatcgatcactagtcgtaactaatgtattgacttaaatcaataaaattttacatgtagatgaactgagcataaaatatatggatgcggtggataacataaacatattgaagagatacgggtgtgatattcagcacgaggttgacgtgcacacaatgagcttcgataatagtttgagtctgcaacgttatgaccgcattgtcttcaattttcctcacgcagggtctcgtttctttggtcgtgaattgtcctctagggccatcgagtaa

SEQ ID NO: 189533 - DNA, 98 bp, Arabidopsis thaliana landsberg
atgtataatcagttggcgatatcttcgtcttcttcatcttcttcgtactatgaatctttgaaggttttggaagctgatgttcaacacgctaattcttt

SEQ ID NO: 189534 - DNA, 342 bp, Arabidopsis thaliana landsberg
ctcctccctagtggtcaaaatctgtcatatcaagcctgtcaccatcatcaatagtaagtacttcttctgattatacccaaacttgcccctgacttacattgacattctttctgatctgtccattgctattgctcgctgaaatttcattgaatgcgcttaggaaataattaaggatgattttaaacataagcttacaagttttcttatgtattgccacaaaatgatacaaaacataatcttacaagttttcttctaacgatatagtgtgtgcttttcctgtcggtttcttcatttggtatcttttcttcctagaaaaatgcattttagggattggcaatctct

SEQ ID NO: 189535 - DNA, 92 bp, Arabidopsis thaliana landsberg
atgcagccaaaagcgaaaggcttgctgacgtgtcctctttctcagatattttgtcgaaaattggtgtccgttgatcaggatattaagataag

SEQ ID NO: 189536 - DNA, 244 bp, Arabidopsis thaliana landsberg
cttcttgccacaaattgtgaactccttcgtgactctcctaaataatggtgcgcataacgatccggagattattcagcaggttgttggtattctatagcatattttacgctcatgccactacctaaatttcatatgttttttttgctgaattttggttctttttcgtgcaggtattcacatcatgggcttccataatagtgtccctgcagaagtatcttgtgtgcgacatcgaaggcattctcag

SEQ ID NO: 189537 - DNA, 452 bp, Arabidopsis thaliana landsberg
gactccgtctccctcgacgacgtctacacccaacttcgtcactttttgaggcgcatcaactacgacatcatacaaatcttcagctacagatgggatcatctgccaattacgctagccgaggaagccagtccaagggccatggtggtggactctcctgtgaacatggaggtgggcggcctcatgggggtgctctgtgacgtcccaacgatcgtcgcccacctagctctacttcgcaccccatctgccagatttgcggcaaggaaggtcacacggccatacgctgctggtaccgcatggacgactcctactccgaggaacctcctttctcacacgtcgccaccgcattctcaaaggttgataccgactggtacactgacaccggcgccaaaggacacatcaccagcaatctggatcgtcttaccgtccgtgaacgctaccacgggaatgaacaa

SEQ ID NO: 189538 - DNA, 886 bp, Arabidopsis thaliana landsberg
cgaaggcacatcattgtgcaacgcttgatgggtcgaggctcgagcaaggcgagaaagggagagagagataaggcaccaaaggtaagtcatcacgaatctcactgagatatgatattcagtgggacattttgttctagcttacaatattctgcattaaaaagtccaacgtgcagactgtatctttccctcttttaatcaggtaagtgtctctttcgccttccaaaacaaggtatgattttcgtaatatttttccttgatggagtttttagttcgttaattgattacaaccttagatcacatagtcatttataactatttatctgtttttttagtttcacaagaccaagaaaatggagtaagtgtacgtgatctttctcaggtttgacttctctccctgagtttgaaatattatagtgttactcgttgtgtttgaattgttgtagtgaatgttcaatatcacgtacaatatcatatagttataatgtttggcctaacatcaatgaattcgtgactaatactcttttagtttttatattgaacttgtaagacttaaaataaagcacggttaaaggcacttaacgcttacatgtgttagttaccatttgtagaatcaaaatttgaaaaatctttatattctattcgcaggatccataaataaggcattgtgtacatgagtaagatgtaagtattgatccaattattcttgcaagttttatctatgtcaaagactcttaatcgtatatctgatatgtttttcacattaggcatctctggtggtagtgttgtctgttgtgtacatgaattctcttttcagtgttatagtgttgttgctcgcgttttcattgttatagtggacaatgccgatttttaccgaaaaattcagcag

SEQ ID NO: 189539 - DNA, 768 bp, Arabidopsis thaliana landsberg
atgtctcgagctcgaggactctgttatctcgcaatcaggagcacacgactgtgcggaataaatagatcgaaaggggttgggatcggagtcaaagaatactactacgagctcttctacttcaaaagatccattcttttgcttgaaatggccatgggattcaaacaaacaacccaaatcctcttcaagcgtctgcgactttcaaggaccgtggctcttcagatctatgcaaactattggttccattgctctcagctctttgacttcatttggccaaaaccccaatttcagaccaaagaagaagcctttaagcagtagtgagcaaggagaagcagagcagagggcttttgcagctgctttagctagccagaaagaagctacggtgcttgaattttactcacccaaatgcagactctgcaattctttgctcaactttgtattagaggtagagaaaaggaattcaaattggctcagcattacaatggcagacgcagagaatgagaaatggtttcctgaggtatcataaatattagttatctctctcttcacgcaaataacagagctttttcttgattggtaagactcaaaaattcatctctctgtttgtctaaaatgcagcttctccactatgacgtaaatgatgtcccttgcttcgatccattggacaaaaatggacaagctttggccaagacaggagttccaagtagtcgtgctcatgtcatcgccggtatctctcatcttctcaagatgaagcgaccaccatctaagtag

SEQ ID NO: 189540 - DNA, 78 bp, Arabidopsis thaliana landsberg
gaagagatcgatgaaccgctgcctccagcgactctcactcttcttccaactaaactccaaaatgtcaacgaaacataa

SEQ ID NO: 189541 - DNA, 526 bp, Arabidopsis thaliana landsberg
atgaattcgtgtgatattgttccgatggaagcagagctaagtccaggagccatcgaagagtggctttcgacggtaaagcatggaaagatgacggagaacggaaaacgacgatcggatttgtccatcaaggtgaagagacatctctcggctcttggttgggtaatctcttactataacaaaaggaacaagaaagagcagcgttataagtctcccaagggaaagtggttctactctttagctaaggcttgtatgagttgtgtcgaccaagactctcaacagcaactacaaattgttcccaaatatgacttgtcttgccttccaagcaatattgcctcagagtctagttctgatgtttcgaatcaaaaacagaagaaaagtaagaaaaggggtagggtcgaggatttggatgtcaaaagcacagcttcggaaaaagataatcatccgtctgctgatatgatcaaaatcgttccaaattttgatgtcgcacaacaacaactaccgaagatgataataatgtatagagagg

SEQ ID NO: 189542 - DNA, 171 bp, Arabidopsis thaliana landsberg
ttgtcccgtgaggtgtcaacactcgccaatatccgataccttggagcgcaaggtaaatatgcctataaacactcgattaatcccgtgtcatttaaaaggaagagagggaaaacactgaaaggctgctacggaggaattgttgtgatcgtgagcaatatccaagaattctga

SEQ ID NO: 189543 - DNA, 323 bp, Arabidopsis thaliana landsberg
ccttatcttcactcgacctccatctcttcaaatcaccaatgtcgtcactcttcactcgaccacaacaatttttacctcatcttttccgcaacctgtactcgaccatctctctcaagctcatctctcatcgaccctcactctcaagctcaccaaacactcgatctgatcgaccactcttcgccaccaccacctctcattcgtctcagtttcactcgaccacagctctcttcgcctctccctctctccaaggaaacaacacgacctcaccattttattcactcgacctttatcaccaagtcgccttcaccacttctcgctcttaa

SEQ ID NO: 189544 - DNA, 69 bp, Arabidopsis thaliana landsberg
gaggggaaactgaggatcttccagtacaatacagctgctacctcaaacttcacaggaccaaacacctaa

SEQ ID NO: 189545 - DNA, 352 bp, Arabidopsis thaliana landsberg
acaactaacaagactaggaagatctcaaggagtacttgatggtaaagaatctgtatcaatgcaatacctattcaatggtcttaacaaagacaatcttacgccaagaggagccataaataaccaccttagcacaaaatcatttttgattaatgaaggaacggtgctacaaagactttgtccactaacgaatgaacttggcgttgcaaataaagctttagaacaagtctctaagtttctgaatatttatcatgttatgcttctcatccgtcttggtaggatgaacggtgttcggtttcgagaagcgcaggattctatggggaaacaacgaggagtagatggttatattaagccg

SEQ ID NO: 189546 - DNA, 513 bp, Arabidopsis thaliana landsberg
atggatttggaagattacatctggcgtttcagaacagaccacctggcggagttaccctccggtgaacatttcctcgtcaagtggtacgtatttgtttattaattataagcgcaagtttgctacttctatgttgaaacacatagatatcttcttttgcaggttctttaaggacgtgatgatgaacgtggggaaaatcacccagaaaacggatgggtttaaggtgtttagagtggatacaatttgcggtcacttgactaacacgcaagacattggagatctttgtatctttcttggacatggtgaagcatactgtgtcccggcaagctcgtctcctggactcagacctaactccatctattatgtgggctgtaactttggtgttcacgatattgcaaccgacactaccactaacttctacacacacagtaatgttcctttaaggtccactgagttcccttactggcctcttcctctctcttaggagtgacttttgatatcgtcggatgtctctaa

SEQ ID NO: 189547 - DNA, 523 bp, Arabidopsis thaliana landsberg
  unsure (1)..(523): unsure at all n locations
atgattgaggatatcatggaggtcttcatggatgatttttcagttaatggatcatcgtatgaggactgcttagaaaatctctacaaagtattaacaagatgtgaggagaaacatctggttttgaattgggagaaatgtcacttcatggtgtaggatgggatagttctcggtcacagaatttctgagcatggtatagaagtcgaccgctctacattgcaaagaagtcaaattcgagtttacacaagagtgtcatgatgcctttcagcagnnnnnnnnnnnnnnnnnnnnnnnnnnnnnnnnnnnnnnnnnnnnntgggatcgaccttttgaggtaatatgtgatgcgagtgattttgcagttgaggcggttctaggacagagaaaggataagaaacttcatgccatctactaggcaagtaggacacttgatgatgctcaaaggaattatgctaaaacggacccggagcccttagctgtggtgtttgctttcgagaaaatcaaatcttatcttgttggatccaag

SEQ ID NO: 189548 - DNA, 305 bp, Arabidopsis thaliana landsberg
atgctgctgttcatacctctgaacaagctttcatcacttgaagaagcaattgttcaaaatctgttagcaacctttctgcttgtaagtctcttatcaactgatttctccacaatggatccctctttgatctgatatcatatttccccttttttacaggcaaaccttgttacaggaatggtgaacctcaccgtagataccatctttgcttctccattctcttctcttctgatattaaccgcttacgcctttgctttatctgctattatcggaaccattcatttctccggtttccggttaaagttctg

SEQ ID NO: 189549 - DNA, 823 bp, Arabidopsis thaliana landsberg
atggcgaccaaaatcaccggcgttttcatcctcatactcacgatcaccttctcctcctcctccgccgtaaccgcgacgcagcaagcaccttcgtcttctccaccggttctgacttgtacggaggagctcgtcatgttctctccttgccttccttacgtctcctctccaccaaacaatatgtcagagactccggatcctatttgctgctcggtttttacctcctccgttcattctagcaccggaaactgtctctgttatcttctccggcagccgatgatccttggattcccgttggatagatctagattgatttctctttctcagatctgtaccgatcagaattccgaagaatcttttgaatctctctgttcggtatcaggttaatttcgaatcctcctatgtaattgaatcgattgaattcgaatctcagatgtgtgatttctatggttttgatctgtggtgcagagtcgccggagcttcctccgcttcagagtattcagttcacaaatccgtttgtttccggtaagaaacggattattccggtggattctgttttaagtttcgttgacatgtaacttgcttcattcattaatattctgcaggtaataatgtttctgcctctcctcaatcagtcgacttagcaccggaagtttcaccaagctccgatctattctcaccggaaacagccaccctagcaccaccaccaccaccaccactaccagttctacaatacttctcaagcgactctctcaagatcagaaacttctggtttccatcgactatcatcatgacttttgccacttctattctcgctcgtatctga

SEQ ID NO: 189550 - DNA, 149 bp, Arabidopsis thaliana landsberg
tttttcaagaagaaacactgattctgaacgccgaattaaagatggacattcgcgtaattgtcacagttccaaaaatctcgagaccttatcgtcgttattacgaacaatctctaccctataccaagcttctaacctcaaagagacgctaa

SEQ ID NO: 189551 - DNA, 280 bp, Arabidopsis thaliana landsberg
acacgacggtcgagtgcaactgcaactgcggaaacagctgggaatgcagcaagacatgtccggacaagaacaccagcaacctcggaagcatgaacagctcgggcagcttagtctcgggcaacaacaaatgtttgagcagcatgacccgtcacagcatttggaccctatacagctgcaagatgtacagttgcagcacttgggtttcctcagatggcacgaacatttggattggcagcaacagcagaaactcaccaggctcaaacatgggccactgcattga

SEQ ID NO: 189552 - DNA, 1781 bp, Arabidopsis thaliana landsberg
atgtgggttaaaccgttaaggtaagttgaaaaaaaaaaaaccgttaaggtaaatgcgcgcgtatgatttgtcgtgtagtgaactatgaataaatgctaaatatggtcggccactacattatattctcatattccagaatcctttgttatatattgctgtgtcggcaataatatgaatgactttgaaaagtatacacaataatgcaatatatatgtaagtaattattttcattagggaggagacccgcgcgttgcacggggtggtttgtttttggttttgttagtatgtaattataacttcgaatttttttactgatctttgattaaaaggggaatatctttgttatttgcacccctcattttagttcggcccaaatcaagaataaactaatcaacatcaagcccaaaaagcccataaaagttggtccatatcaccagcttagtttttctataaatagagaggcatctcaaggaaaaaaggaggaagaaatccatattaaaacgtcttcaagctcctcagctcgttctctagctcctctgctcgtcctcaagcttatccgctcgccctcaagctcctcagctcgtcttcaagcttctcagctcgttctcaagctcctctgctcgtcctctagctcctctgcttgtcctcaagcacttcagctcgccctcaagctcctctgctggtcctcaagctcctcaactggtccttaagctcctcagctcgtcttcaagctctccaactcgtcttcaagctattcagctcgcctttaagctccatcactcagcgaccatctcctcgcctagctgtcagctagtcagctcgtgcaactcctcatctagctatcggctcatctctcgactgcaaaactcaagtaggacgagcttctcaagtagcttgctagctcgctcttcttcgttaagctccagtttaagctcttcaagctcttcagctcgtcctcaagctccttagctcgtcctcaagctcctcagctcgtcctcagctctttagctcgtcctcaagctcctcagctcgtctttaagctttccagctcgtcctcaagctaatcagctcgtctttaagctctccagctcgtctttaagttcttcagctcgtcttcgagctccacgactcaactaccatctcctcgcctagctgtcagctagtcagttcgtccaattcctcacctagtcgtcagctcgtccctcaagtgaactcatctatctcctcgcctagcttacagttcgtccgttgactacacagtccgcctatctcgtctcccagctcgtctagactttcaccagaactcgatttgtccgactcgtctctctactacatttcgtctagcttggcacctggctaccagctcgtcactcaaatactcagttcgtctaactcgttgtctatcaaccagttcgcctcgtaactaagttcgtccagctcttcgcctacctgccagctcgtcaaacatctgctagctcgtcgcctagctgccagctcgtcaccaacctgccacctcatctctaaactgcctatctcaatatacgacctacctccaacgatgacctagctcacttattataatatgaactacgtatggcttgatcccttttctaagggtacgtaggcagccttttacaaggtgcagctataaaactaataaactctatgtttatcgcaagaacgacctaactcccgaccttcaacgcgatgagaatgtttttcccttatcaaagaacttagaaatatactttgttgaaattcgtgcatcaacagggcagtga

SEQ ID NO: 189553 - DNA, 48 bp, Arabidopsis thaliana landsberg
acattacagaacatcggagataaagaaatgcggaacgacattacataa

SEQ ID NO: 189554 - DNA, 422 bp, Arabidopsis thaliana landsberg
atggccagctttgggttgatatttctcgggccgtctcagcatctgtggttcagttatctttcgaagatattgccaaagcgcgacgtgttgacaacctttaagaaaataatgatggggcaggttcttttcggacctgttagcaacacagtcttctattcctacaatgctgctttacaaggtacataacatagttaagcctatggattgaacggatttagctttttacggtttctctgcctgtaaatttatggtgctcattatgtgactggttctggcacgttgttggtcctttttaaggtgaaaattctgaggaaattgtggcgagattgaagagagatcttctgccaacattgaaaaatggacttatgtattggccggtctgtgattttgttacattcaagtatgtgccagttcatctacag

SEQ ID NO: 189555 - DNA, 140 bp, Arabidopsis thaliana landsberg
atgttaaatcgaaagaaagaaacaatgattacctcgaatgggaacatcgtctctccaccttcttcgacactcgataagaacaataggaaagtcacgacctgcattcatatgttgagccatgagtggaggatcaacagatg

SEQ ID NO: 189556 - DNA, 137 bp, Arabidopsis thaliana landsberg
acgcacgagagagaatctcagactttaaacagaagcaaagaaaagtggacgaagtggccctttccgacaaaaacgtttcgcgtccggtcctctcttctactcattccaagtgtcgattggccagtagtccagcatga

SEQ ID NO: 189557 - DNA, 204 bp, Arabidopsis thaliana landsberg
atgaaacaagcgagccagcgagccacgagcattttgtccagccctaaaactcgttgtgtaacacatactacggcaacggccatgcaaagacgccaacacgtacgtgtcgcccaggtagccagcagcccagaacaacccgagcgagtaccaaaccgttttaacggaaaaaatcgctacccagcggtaatagtttaccatcggtaa

SEQ ID NO: 189558 - DNA, 503 bp, Arabidopsis thaliana landsberg
ttgatctgaccaaagtatcaaagagcaaagattccatctgtccaattgaatcatgcaaaaaatcagaaatttcaaaactctctcaagataaaaagtttgaccaaactcaacctctgagatcaccgaaagaggtccaaagcacggaattcaattttactagaagtcgtattaaggtaagcataaaatcattatatctgtaacatatgacttttttttttaaaatgtgaaactagtgcattcaagcaagcattcgccgaaaaaaatatattttaagaaattttgataagaaacatacatattaggtaacttagtatttttagatatcaaatatatatttgataagaaaatttcgtaaagctttcacatgattttgatgtggtatgttctaacaggttcatatgcaaggtgtagccataagtagagttgtggatttaactgctatgcatggatacaatcagctgatacaaaaactggaagaactctttgatctcaaagacgagtga

SEQ ID NO: 189559 - DNA, 1252 bp, Arabidopsis thaliana landsberg
  unsure (1)..(1252): unsure at all n locations
atgcaggccaagctnnnnnnnnnnnnnnnnnnnnnnnnnnngctccggcagaacatcagacaggagtgggcaggccgagcactagccggagaagcgcgtcatctggcccaggacgtccagcaccgcatcgccaacgatgccagggcaaggctgcccccggcttccagtggggttgtcacacccggttttgaaggtaaaccgaatgcaaaccatgtacgtgccaggatcagtaattcacgtacacagcgattacataaatgactcatcatagcacaatgcttcgaattacaataaagagtaagtaataatattacagactagagccatttacataatataaatcaaagtacacagaatcgaaacgtagccaacgtaaacaacccaccacaggcagctgactgggggaggtcgctagcctaatcctcgaactcatcgaagtcctggaactcctggagatccgcctcgacgccttcttctctttatttacctgagcatagattgcatcaaaggcaacctggtgttttgtggtaaagcaaggatgagtacacatcaacgtactcaacaaatgtcccgtttggctgaagtggactagctttatgtggggttaggctcaagcagttgcttttagttggtcaggtatttatcattagtagaagccagattttagcattaaccaacccgtaaaccatttcctcatcgaggaacaacatcatcatagtcgaaccaaaaccataacataatccttgtatctcgaaccatctgtatctctaatcaaagaggatcccaaggctgctcttaaccgtgagcacggctgatatatcagtttcactaccctctgcagaggttgcacactttacccatgagtcatgattccctttctacccggggagagctaatccccattgaccactacctaggtggtccagcagggcatcactacgtagcttttacaaagattccctagagatcatagctgcccgttaggtttctccagtttgataaacacagtacccctccccgcaggagagtgactaacaaagagcaaaacgaaagaacctcggcactcagcctcggcagagcaagcactgtgcctggaccccattgacggcacgacggcgaagcaactacacctctagttcctctaattaattagctaagggccccccatttcaccctcatggttgcactgttagcccgggtggtccctcaacgaacaggtccttacggagaggcactcaggaaaaaggcctga

SEQ ID NO: 189560 - DNA, 157 bp, Arabidopsis thaliana landsberg
gtctttacatgttttagatgcatttgaagattatggagcattttggagcaaaacatacaatttaagctgcagaagcaatccagagacgaaaatgcacgtaggtgtcgaacgacaccacccctggtgtcgagcgacaccaatacctgacggcaattga

SEQ ID NO: 189561 - DNA, 424 bp, Arabidopsis thaliana landsberg
tctgagattgctgctgagccgcatgtctgctttgccagtattccactggccgggcgcggtccgtggctgtacgtgctcgacatgccagaggagaagctacagaggtttgagtatgacagtgcttccggaggtctgggggtaaagcattttgccatccctgtgtctgtcctcaagaacgagaccttccaggtcatggacttcgagaatgcgacagggcggagctggaagcactggtcgatcgtcctgcatccgcgggatgcacaggatggagagtggtcacaggtatggatctctcgctttggcgtggctcaggtcaagcagcacgctgatcttcgcggagaggtcgcggatatcgaaatgaccgacatcttcgatcctgagcaggactatatcatcgtggagaaccccgcgccgcacgatctga

SEQ ID NO: 189562 - DNA, 45 bp, Arabidopsis thaliana landsberg
attcgggatgatggtattccacgatttgggaacctccgaatctga

SEQ ID NO: 189563 - DNA, 446 bp, Arabidopsis thaliana landsberg
atgctacggtcaagtgggatgtatctgaccttgccatgtgagtccgttctttcgtggggtgtgcttgacgagatgcaagtgacctcaaggggttcgaaggacccagagagactgggttaggtacccaaggcccggtgtcgcttacacgacagtgtagccaatgtgatgttccggttatatgcctttgtggttataactcgggtgttcacgatatgttgaggaaggcagtgcattcgggccctaattaaaactttaagaaacgttatctccttgttgtgttgtgtgttgcttacttccttctttgtgtactctgattatttatgttatgcatgtgggattatgggtggggattagactaacatttccttgggaaacccgagctcactgagtaatactagattactcatgattctacttgtcttacaggtaaccttagaggggattag

SEQ ID NO: 189564 - DNA, 162 bp, Arabidopsis thaliana landsberg
actactaagatcactctcgacagtctagaggacttcgtggtcgacttgtctttgggattggtggaaaaagacctacagttggaacatttgagccatcgcatcgcgactctagagcagcaggtggaaatccgagataacaccaccgatatcctggagatctag

SEQ ID NO: 189565 - DNA, 138 bp, Arabidopsis thaliana landsberg
gccaattgatgaacttgtggctgcggcacagcaagataaccgaactacgccctcgcaaagcttctctcatctcatcagagcctgctgttgcttctgctgtgacggaaggccccaccgtccaatcggacaaagcaacag

SEQ ID NO: 189566 - DNA, 321 bp, Arabidopsis thaliana landsberg
gggtcaaacttttgctaaagatgggatggcggcgtggtcattcaataaaggaagtgcgtgccagttcaggtttgaacttgtttaacatgcactaatccataatcttcttttgtgcaccaagaaaagccgtcaatactttttctattttggaaattcacagcaagctctttatttcgtctctctctctctctcttttataccttgttggtgcagatgctcgtagagaagctagaaaagcattcttagccttctatactgatgagaatacaaaggaaacgcccgactcgcttgtttctgagactgaagtggaaacatctctgg

SEQ ID NO: 189567 - DNA, 115 bp, Arabidopsis thaliana landsberg
ctactacacagtctttctatattttcgtggattaggcaaactgatacgcggtgcccattacttcaaagttggatacacgctcaactatgttttgtccacgtatagaaaacctcag

SEQ ID NO: 189568 - DNA, 565 bp, Arabidopsis thaliana landsberg
ggtcttcgagaccctgcttctggtcatgtacggttcattgcggccgtccccgaaaacctttttcgccgtgacgcgaaccggacccgtcgccgggatgttcaaccggacgatgatctgcgcttcaaagctgggcagatatagaaagcgcacgacctgctccgatgccggcgtctgcgtgaggggcaggagagagggttcgttcgcagcgtagagaacgcgggaataccattcgctctcgtactcacggataacaggtccgcacgccccatcgcgcgaaagttcgacggggaagtatgccgcgtgggcacagcctgtcagggtcagggcgacgcctaggatcagagggcggatcaatgtgcttcccgacttgagcggacgttcgggtaaggtgtcacggtaattcgtacgctgtcaccgtgattcgtttttggggcgatcaggcgcgggccaaacgggctttccaacgcctgtcccaaatcgcgctacgacgcgcgcaggcggcgcggatatcctccggcgaacggcgcaaattgaccgcttcgagcgaggcgcacacggagaggag

SEQ ID NO: 189569 - DNA, 435 bp, Arabidopsis thaliana landsberg
atggctgctttctttcttggagaatctgaaatgagagaacactcttctgatctttttatgatgactctgaatccgtttcgcgagcagacaacgaccactaatgctcatgacgatcacttctacaacttgtgctttggttcccaacaatatagacctcgagatgaagtaggtcatatagaacaaggaaattcttccatctccactttttcaaacggaggagtcttcagggctttggctccgatctacttgaaagcggctcaagaattactcaatgagattgtcaatgttggaaacggtagccacggcgcaaaacaagagcgaccggtgagtaaagagtccacgatttatggagttgaggacatcaatggtggctataagcctggcgtagctgctttgcaaatgaagaaagcaaaactcatctccatgggtgaaatg

SEQ ID NO: 189570 - DNA, 372 bp, Arabidopsis thaliana landsberg
atgcataacaacgagccaccagtatggggtctgatgctgatcttttcgctgatgattctatggtcaatcagcctttggaagatctttgaaaaagcaggtgagccgggatgggcggcattaatccctatttataattttatcatactcctcaaggttggcgacaaggaagcctggtggattgttgtttggttgttaattcccattgttgcagtatttgttgcagccgaaggcctggcaaaaaattttagcaaaaaaagcggctttatggttggattggtctttttgccttttattttttatcccatcctcgcttttggtgatgctgtttacaaaggcgaacgcagagggattcccaacgacctgatcgaccag

SEQ ID NO: 189571 - DNA, 371 bp, Arabidopsis thaliana landsberg
atgcagatcaaagctgtgtcttatgccaagatcctttggagacaagagagcacttgttcttccaatgtccgtattcgagaaaggtgtgggaggagctggcacgggggatcctagcaaacaagttcactgaaaaatggcgggatatcatgagggagcttgcgaacaaaaaccgagacacaacgaaaaggtttatactaaggtatgtgtttcaaaacacgatacactctatttggcgtgaaaggaatgatagaagacacggagaaaaaccatcaagaaaagagaaatttgtcaagctgattgatagaaatataagaaaccgtttgagcaccataacaatgaaaggggaagaaaaatacattggaggactttaa

SEQ ID NO: 189572 - DNA, 379 bp, Arabidopsis thaliana landsberg
atgcgcaatctcaaactctttgagagatttaaaagcactcaagtccacgcctttactacacaagactctccctctacaagcagcaatggtagccctcgaatgatgaagttccttgggcatcccaaatccaaatctcgttcacttctccctcatggctttcccaccacagacctcctcgagcctcccttggactcttacctcaaacctatcgatttggtggagtcattatcaaatctatatcggagaatcgagtccagttcggaatccgaggcatcgatgctctaccttgagcagtacgctgttctccgcagtctcggtgatgccaagctcttgcgtaggtgccttctcaacgctaggaggcacgccattgatgtccctt

SEQ ID NO: 189573 - DNA, 472 bp, Arabidopsis thaliana landsberg
atgaattctattgtctccgggattactagttgtcgtttggagaaaacagatttggtgtctgaagatgctgtaatgatgaggattcttcaagttttaaccggaatcatgaaacatccatcctctgtacgttcattaactataatctttttactacaaatgtttattttgtcctcttttaagacagtaataataagttatgtattaaaacaggagttattagaagatcaagcggtttgcacaatagtcaatacatgtttccaagtggtgcaacaatcgagcggtagaggagatttgctgcaacgaaatggaagatacacaatgcatgagctgattcagatcattttctctagattacctgattttgaggtcagaggagacgaaggtggtgaggattcagaatctgacactgacgaaatccacatgagcggcggatatggaatccgatgttgcatcgacatttttcatttcttat

SEQ ID NO: 189574 - DNA, 699 bp, Arabidopsis thaliana landsberg
atgaagaagacctacaagcttcaaagcctcttctcttctctcatcttcctcataatcttgctattgatttcgagagccgcggccgtcggctctggcggtgtctgccggcatccaccatcacaaaacagctgcaagacatgcatggcggagcaaatgaaatacgactgccctaagtgcgtgccggtgctccgatgcatggctcgttgtctttggggcggtgttactcagaggaagtgcaccaccacgtgtggatgcgacaccgcggccaagccgtcgttgccggagtgtaaacgctgcgtttctaggtgtaagtgtagctgtgcggcttaggaacaaatcgagtaaatgctctcttgatggtaaaataatatgttaaatgttaccatgttggatctttgtctctttaacttgatgttatatatgtatgttgaatctttttgtcgtttaacttgatgttgtatacgttgaatgctaaaagtatatagttcctatttatagtcatatatctaagagatatatcacattattcttttttcccggtcaatatactcacacacacacacatttgatgaatttgattccggattatgacacaagtattttgttccggtcaatatactcacacacacatagtaatcgtatagaattgactaactagtattttttttttcaaattagctatgcaattttttagtgtag

SEQ ID NO: 189575 - DNA, 1071 bp, Arabidopsis thaliana landsberg
ccgggagggatttcggcgcgcttgcttgcgggctggcaccaaacggtatgcataatgcagtttgcgctgatcccgtttgtatatttggtttttgactgagtttttggtcagtgatattcctcaacttcgtgcttcagtgatggtcctgaatcagaggaaaatgtgactaggatattgaaagtagcatgggtgacagttccactcgggatagctattactattgcagcatgcatttttgtgttatggtggcagaaccttagttactccgacccatatgcacaggctatctggattcacggtatattgtggtcttttttgtgcctttatcatagttctttagcttacagccttggaatttgaaagtttcggttttcggtcatacttgtgtctgtaatcaactcaaggactaacctactaacgtggcaggatttgcatgtgtactggagcttatggctgaacctttgtatatcctctctcagacattgctgaaactacagttgcgactcattgttgagaccgtagctacattggcacggtgtgtaactctgtactctctcctagtcatgcaaaccaacatggtacagtccttgtactattccatcttgtttcaggcaaaataaagcatatattatcgaacttaaggttatcttcaacatgttcaggaaaaagtgataatcttcgcattgtcacaagttgcatatggaggttccttgtttattgggtactgggcctattttctcatctgtggtgtttacagaagttcgaatctctttcctttcaggtatgagttctctatcatttgatctcctcgccagcattgttaactcttaatatgctctaattagttctatcataaatattaatgttcaacaatttttgtgatgtcacagacctgggaacttcatggattttgataatgatctctcgaagatgtgtaagctgtttacttttcagtccttccgaaagttaatccttcaagaaggtgaaaaattggtcctggtatggttagatacaccttataaccaggctgtatatgggatagtcgacaaactaggcaagtctttttggtga

SEQ ID NO: 189576 - DNA, 524 bp, Arabidopsis thaliana landsberg
gccatgaaggtttcgccgaagagcgcttgattgacctgttcggctcagtcctccggggcggcgcgcagggcggcatgactttgggccacctgaaggcgcacgccatcgacgaaggttttcgcctcgacctgacccttcaggtgggatgccgcgatatcgccccgagctggcgtcagtcgggggtctgacgccatctaggccgcggcgctgtgggccacatcggcctgcagatgcgacggatgcccgccgatctgctgctcgcactggcagatgcggtcgccgaactccgagaggtaatcggcgccctgcgatgtgcgctggaccagcacgttgcgcaggtcctgctcgtccttgcggcgacggacaaaatccagcgccgtcagggcgtcaagcgcgcggctgaccgccggcttgccgagattgagggcgccggcgaggccccgcacggtgtgcggaccgggttcaagataaatccgcatcagaatggcggcctgtcgggccgacagatcaagccttcagcttga

SEQ ID NO: 189577 - DNA, 126 bp, Arabidopsis thaliana landsberg
ttcgattccttctttactaacccacgttttaaacttcttcatcgcggttatattcgcgtatactctcgaaacattgaacaccttgagactgccgactaccatattgttcttcttcaacttatatag

SEQ ID NO: 189578 - DNA, 76 bp, Arabidopsis thaliana landsberg
tattccatttgttggcttggcagtttctcatcgtcgtttgtccttttgtcgttgtcggattctcgtttttgaataa

SEQ ID NO: 189579 - DNA, 409 bp, Arabidopsis thaliana landsberg
ctggaacggctatctggtaaagcttgattgcatccttcacgacggagagttggttttcgtcgaggcccaggacatcgccagacagacacatccggccgaggaatgtcgccgccagactgtagttcattctttggatggaatcgtcttgccgcaggacagcccagatttgagactgccggggcagcatcagccggtgaactgccgcggcgatgatgggtatctcgactgtctcgtgcgcatccgagtagctgctcattgcgactcgctggagaaacgacgcctccatacggtgtccgccagccgaaacgagttcgatcaccaagtcgggcaacgcctctctgatcccctcaaccctcgcatgggtgccttcgccctgaaaccgcaacccctctcccagcccatcgggacg

SEQ ID NO: 189580 - DNA, 170 bp, Arabidopsis thaliana landsberg
tctatcacaactgccgtccgcggtacgggttacaaagccttaggccgtgtttgtgaggaacgacactcgcggtcggacggcttgggtgaatggattcattccgggaacctgggttggctgactacgggcgtccacatgacgctcctattccctcctggtcctaggacggg

SEQ ID NO: 189581 - DNA, 912 bp, Arabidopsis thaliana landsberg
atgattggcgagtggactcaacctacatacggttttacagtttatgacagacacctagctgttaagaggaaggtatgctgaagagaaaatgcagaaccccctttctttcttgaaaaggtagatacactctaggaaggtttagaacaaatgaatgagaaaactctgcattgtaggttcaagaaacactaataagaaatccacatgtttactgattagtgagaaaccaagttatagatgtagggatagatacagtgatacataaataagaaagatgagtggaaactgcaaagaaagtgaaagtttggttgtgtgtaagaaacagctttgggattcaagatgatgaatcattagaattatacagtggttgaacttttttgttgattaaatgccctatgaaggggacaacatagaagattatgggaccccttattttttatgtatgactttctttcacttttcttttgccctttagtcatttctctttttttccatttttcaccagatgttttttatttggtttaatttttcactagaggttgataattgaattgattcattggtatgaacgcacgtgcttctcgtcggtgtgtgctctgctaattttgatctcttgtttttttttttaacaagttacagtgtgaaaagaattgactgtgtttgttaagttttcaaggtatgcaacggctaagtaaatatcattaaaaaaaaaaagaaggaaaagagaaattattctgacaatgttataggtacaattctgggctccttcatccatgattcaactaaatttgggtccttggttttgagtctgttgtagttatcatgaaacccacttcaggatattttgacacaaaaggtgataatgggagttggaaaaatagaaaaagtatcacggggaagtgatgaattgaagag

SEQ ID NO: 189582 - DNA, 338 bp, Arabidopsis thaliana landsberg
tttttcaaaagacgcaattgttgggctataagagcctagcggcgatgaaaggctcagtgaataccacgactgatccggcgctcaagatcccatttgagacttgcgtgacggattatgaagtagccattaaagcgatcgaggaagctcaagggtttgtgacatctaaggcgtacgacttagcatctctgggggcagctaaagccttcattagtatatcagtgtgtgaagctcagtttgaaggacgggataatgtgccagtttatgtaacgaaactcaatatgttttttaagagaatgtgtaacattgatagggttttctccgacgttttgagaacttga

SEQ ID NO: 189583 - DNA, 489 bp, Arabidopsis thaliana landsberg
atgcctaaatataggtataataacaattggtacttaagaaaaaaacattttaagaaacataaagaagcgagtggcaaagttgtgaccaaaaaaaaagaaaaacgagtggcaaagtaagcaactccaaaatgtaaacatgttaccagaaaagtggttgataaagggggaaagtaaagagcgtccagaccagagcttttaagcgatcattcattatccgcggcgggtgtacgaacagacgtggactgttacatacgtggcttcataattatggttcatcatttattctggggtcctattctcttttttcgtctcacctctatttattagttattacttattagtactatcttcttcttttctttatgggagaaaaaaaaacagtctcactactttattaaatttgacaattagtatgtgatatctctcaggactcaggaggaaactaatgaaatgaaaagaccggtctcctatatcggtcggaccaaatag

SEQ ID NO: 189584 - DNA, 631 bp, Arabidopsis thaliana landsberg
taactcacatccagtttgacccatatcaaattgagctactcgtggtccatgatgggtggataggattatacgaagttcgaactcttgattgccgtttgcaggtaaaaggcaaagactgttgtagactctcttctctgattatattcccttgcctctagctttaccttatcgcctctaaataaaaaatgctacgcagtggatacccgatgcatctgatcctgcaataacttctgctacatattcttccgatggtgagatcatctatgttggatttagatgtggatctattaaaattggggactccaagacttttatgacactatgtcaaatcaatctgacttcttttactcaactcagcaccagcaacatcaggtacagtttccttgtccacacttctattttggtttaaataatgatgtaattgattttgctactaaactggggatggcacaggctcgaggtttatccgactgttgttgccgctcatccttcacatcctaatcagatatcggctgggcttagtaatggtaaggtcattgtccttcagccgttgtggagtggaggatggggtgaagcagctccacttgaagacaatggagattattctaatgactcagatcatagttactga

SEQ ID NO: 189585 - DNA, 764 bp, Arabidopsis thaliana landsberg
atgaaagggaagttgtggctgatcggttcccttttggttctctctttggtgatttcatcgaaggtggtctcaggtcaaccagacaaatttcgtaaacttagtgagtgtttttattatgatgttatgaaatataatgtagtatacgtacactcttaacatacccactcataactaggtttgatctatacgtatgtataaaaaatcttgttaagctgtagcatatgacataccacgatacaaaggcatcaacacgtacgcacacaaaaatttcaaagtgttaccgcgtgaaatgacagaatggttctgcaatttctgaaatggcagaatgttccatagtttggaattgttttctcgataacgcaagtttacagaaatgcatttttttattccacttctttacatgaaattggtattacggttattacataaattcatgttcatcctggatgaatcatccctttattttaatttatgattcgcatatttaattgattcatgttttgcattaatcgacaaagttgtgtattatcgatatctatactaagaagttacctaaaatgtctagaagaagatttaagaatgtcaatgaagattggaacacctcatagtgactcgccaccagcacacggatgtagggctggtggatcttgtaaaaagccgccaccgcgaggcaatggcggttagaaaaactggttttgaatgtgtacaaacatcaatatccttccttttcttagaaattgacaacgaaccagtttattttgtat

SEQ ID NO: 189586 - DNA, 243 bp, Arabidopsis thaliana landsberg
atgatggttgtgaagctagtgaaagagacaactgtgcaggagatagatatgatggtgctgcagactctgttgaaacattttctttctgtaagatacataaaagatgcgaaagagacgttaggcatcgacaatatgagagaactcagctactgatgaaacaagcattacctgttcgaagactgtattcatggaagaatttcttggaaaagatagatctgccacaatagaatttgatcaagacag

SEQ ID NO: 189587 - DNA, 64 bp, Arabidopsis thaliana landsberg
atgatcagtcatttccatcgatcctccatgtcccctgaaaattctgttcagcacgctggtacag

SEQ ID NO: 189588 - DNA, 1153 bp, Arabidopsis thaliana landsberg
atgtgtttgccgaagtatagctatgaagtggaatatcttccggcacaaaaagaggatgcagaaggcaaaattcgacttgaaaaggaagctgtggatatgcaacatctctacactgatgtaatgaggagatcaagcagagaaggatttcctagagcctccagtttatcaagtattgactccataatgaccccaagcgtaggcgaattagacacttgtagcagcacacatgccagcactgagccgtctgaatatgtccgtggaatagatcctaaaatgaaacgcttgtcctctggaagaagagatgttacggctgagccagaggttattcatcctcaagcacagtcaacaacccctaattggccaaggacaagatcaaagtcaagaatggataaaggatggatggggttaacatccgtgcaggatcctccaactcgatgttcatgggggaataccggtggtcaagacagggaagatatatcatctactgtatctgatccaggtccaatctgggatgcaggacccaaatgggacactgaaccgtctgcttgggatgtagaaaattcgatcgagctgcctggtcctcctgaggatatagagacaggactgaggaaacagagcatcactccaatatttgaggataaatgggtttcgagaaagggacatttcctcggcatcatggtctgtaaccatgcttgtcggactgtgcaaagttcccaagtcgtggctcccaattcagaacatgatgatggtacaatggatatgctcttggttcatgggtgtggaagactgaggttactgaggttttttatacttttgcaaacaggtcgacacctttctcttccgtatgttgagtgtgtaaaggtaaattatctttcctattttcttacattacgaaacctgcaactcgctatgtgctaggaaatgctaatcaaacggtcaaactcaatgcaaatattataagtctagaatagaatgtagttgatcaaatgcatgacaattgcaggtgaaatcagtgaagataaaggcggggaaaaatacgcatgacagttgcgggatagacggggaactgtttgcattgcatggagaagtgatatcgacaatgctacctgaacaatgcagactgatcggtaacgctcctggacgacattcatag

SEQ ID NO: 189589 - DNA, 192 bp, Arabidopsis thaliana landsberg
gaagatggcgcctctccctctccctccccgactgattgcgtttggtgaagaaccacacgacgagagggtcaacgtgtatcagaaaatgaaaaccttatgtggtgttatcaatgccctagacgatggagagcggcagttcattgctcgatctttgttcagtcgcttgttggaattccccaaactactcgcgtg

SEQ ID NO: 189590 - DNA, 400 bp, Arabidopsis thaliana landsberg
gagaatgaatggtagagagctcgagggtatgacttccttcgacctgtccatacttcacattcagatattacgagctctacgggctttgattgaccaaaagttgggaccaagacaagaacatagggcatggcagcgcggagaggtaaaaatttatctatcagtgtatattatatgtttttagtaactagtgtatctgaatcgtttcttctattcacacattttcttagcttgtttgccacaccgacaaggaatcagtctctgggttagctgagcccgggagatgttcgtcggataatgacaaggatgctgactcttccttgcaatgtagacttcttctcgtttcaagaaagctcagaagattccataattcttatcagcggaagagcatgccggagaccag

SEQ ID NO: 189591 - DNA, 72 bp, Arabidopsis thaliana landsberg
aattctcatattgtctatccaatttcgtttagtgtgtctgactcaaaaacactcgagtatcgtcaaaagtaa

SEQ ID NO: 189592 - DNA, 160 bp, Arabidopsis thaliana landsberg
atgaaacacatgagtgttccaaattacttgtggggagaagcgataagacatgcaacatatctcattaacagagtgggaacaagagctcttatcaaccaaacgccctatgaagctctcaagaaaaagaagccaaatgttgaacacttacgcgtgtttggtt

SEQ ID NO: 189593 - DNA, 189 bp, Arabidopsis thaliana landsberg
agaggaggactctcaaccctaagagcttgtattcaagccctgcaaggaggacttgcaaaacctcgtcgatatctttaccgatctcaaccctatccctattgcttcttcgtcaagtttcgacgttctaagcaagatccgttcgttagtccgagttttcatagagatcttgtgttttcgtccgttatttag

SEQ ID NO: 189594 - DNA, 280 bp, Arabidopsis thaliana landsberg
agcaaaacaaaacgataccgcttctggtcttcaatcactgaagaaaacgatgttgggccaagagcctgctaaagaattgaagatgggccgcgagcctttgaagaagaagcctatgtcaaagcccacttggattaaacggtcttcttcttcatgtgaagacaaaaccagagctggcaaaagagatgcagtgacgtcggagacccgtacgaactcagctgcatttacggtaaagctcaccaatcgattcctggcccttgatgaagaagactcaagcggatga

SEQ ID NO: 189595 - DNA, 257 bp, Arabidopsis thaliana landsberg
agaaccgagaagatagattgattagtgaggaacagaagcgagaaattggaactgaaccctatgcgatggagctagagtcgatagagaaagctttcaaaaacaaagaggacataatcgaggaaatgaagaaagaagctgagatcatgaagcaatcaacggaagaggcacacaagaagcagaccttctggactctcgtttcgtctgtaacaacggtttttgctgctgcatcttttgcctatgccgctagggctcgttaa

SEQ ID NO: 189596 - DNA, 555 bp, Arabidopsis thaliana landsberg
atgtcaaagaggcagaaccggaaaaccaaaccgtcgacaatccaaattgttggacaaacgaaatttgtaagtaatatcgcctatttttttttttttttgcttaaaaatgtaaatattttataaaataaaaatggtttaggtttataatcaagattataaacttatacaaatggtcctatggcaaaaaaataaaaacatggaaacataattcgtaaacaaaatttcagtccatccactcaacatgagcaaacactaatagagttagatgaagtgatttgacgattttgctgtttttcccaaatttgttgctcgagaccaatacacaaacactagaaacctttcaccagagggccgagactgagccatcaacggtagggtactcagagccctcgatcacatactcctaccaagtcatgtgagagcgggtcatcgaacgctttcatgagctctcccagaatggaacctcacaaaccaaatattgtgaacaatgtgagctcaccctaccaaggtcattctccgaagtcagctagaacagagctagaatttgcaaattaa

SEQ ID NO: 189597 - DNA, 346 bp, Arabidopsis thaliana landsberg
atgtttgaagcccacaacaatgatgacgtggaatatgataggatggaaaagatgcttcaagatttaagggaggatcctgattttgtgtttccaccacatagtaaggagctacctccagatgttaaaaagttcttcgacctccttaaagctactgaagaaccattgcatgaacacacaaaagtttccattctcgctttcgtgactcgacttatggctattaagtctaagtacgtgttctcgaacaattgttacaacgagctcttgatcttaatcagcgaagtgtttccaccaaatcacaagatgccgaaagacgtgtatcaatgcatgaaactgctctctggtctag

SEQ ID NO: 189598 - DNA, 177 bp, Arabidopsis thaliana landsberg
atggcgatcagacgagggattcctgcattgctttttctagaaactgtagcgggttttccgaagctagtggaactttgtaaaggcctcgtagtgttaccatgcctcgcttccttggtagaggtgtatggggcccgtacaaccccgtggcagatgggtaacatgacttgtgggtacaag

SEQ ID NO: 189599 - DNA, 373 bp, Arabidopsis thaliana landsberg
atgggaggctggggggtttcggatgggtacgagggatcaaagaggacacgaatgatgatggaatcgaatccctacttcgcagtgaacgcagggagtccattggatgtctcaaagaggtctaggattgttgaaccaggcccgccctattttggggccatgggcagcaacactggtggtgccagtggtggcttctaccagcccttcaacagcagcaacttagctggtgcaggggctagcactggcatccaaaactttccaggtgtacggctgcgaggtctcccttttgattgcaatgacattgatatctgcaagttctttgtgggactggacatagtggactgcctcctggttaacaagaatggccgcttcactg

SEQ ID NO: 189600 - DNA, 137 bp, Arabidopsis thaliana landsberg
tcaaaatcgatcgaggtagaaagaagtacgaacctgcacgaagatctttgggtggcactaagaaaacgacgaaagatgaagaagaactggcaaagaagcccagggaagatgaagaagaagaagaaaaaaaaagctga

SEQ ID NO: 189601 - DNA, 1233 bp, Arabidopsis thaliana landsberg
gtgaagtcatcagagaatctctacggcgggagtttgagcgagtttgaggtgcagaccgcgcctataactgatggtgtgctagcaggagttataagagaccttgtcatcgagtaatatgttagaccattaagaatgttgattatattcgtctgtgtttatggcctgatcaaccaataagatttgcttttctgtcagagtgtgtttaagcgaggggattccataccgcgagagagcaccttcgtggtctgagcgtgagctttgggaagaagccttcattacaagtagatctttccatatccataatctgttttttcatcttctcgcatatatattggcctgaacactttcaatgtgttgtgtgatgtttgtatattttaacatcccaagaactcactgggttcaggtagtctgaggattttgcagcatgtagggacgatcaaagtacccgttggttcaatggagggattggcttgtaacaaacctgaggagattcaatggaaggagaaaaggtttaaggaaagacctgggatgatcactgaattaatcaaggtaaagcttgttacttttattacccttagaatcattggttttgttcttgtcttttgagtcaaatcaaagatagaaatcactttaaagtttttgtttgtcactgatatgttggagtagaaagcgataatggagagaggtattaaagaagggttcccgttgaaggccttttagtgctcttcatgattttgccaaatagctgaaatgttgattcgtctatggtttgtaattgtattgacgccaatatcttcccaaatcatcactcattataattttaaagaacctaatgtttaaaaggttctcagttatatatatctgtataattgatcagtagaacatattatttaacggattttatggagatactccggtaacttattaaacagatctcatgaaagtaatcagtgtcaagaaatgtcaagactgtatacatatgttaatatgctaaaccacaacgactatcacttcccaaaacatggttatgatgttgatatgaccctccaaatccacaagtgtgtatgtgtatcaacgtcaaagtattgaatataaagagttgtgagtactaaaaataaaagcaaactaaaaatatagtccgtatggaatgcctttaaaactgcttgtagtggaggaaaatagaaatttggaggacacaaaattttcccccttttttttttttttttctagtaa

SEQ ID NO: 189602 - DNA, 1017 bp, Arabidopsis thaliana landsberg
atgaaatcaaaggtggttgatgtgaaaaccggaaagagcatcgacagcaggttctgtactctaactagtgttgttgtttttacctttcagcttaatttggaaagattcgagaattctaaatttgcaaatccttcgttatgcagagtacgaaccagttcaggaccttttcttaacagaggacatgacgaaatagtggaagagattgagaataggatttcagatttcaccttcattcctccaggtaatgtttatatctgtttctctgtcttggaactcattgtggagttaatgtaatggaattacagaaaatggagaggggctgcaagttcttcattatgaagttgggcagagatatgagcctcaccatgactatttctttgatgagttcaatgtcaggaaaggagggcaacgaattgctacagtactaatgtacctgtgtgtagcctttaaacccttacaataatctttcttattagccacaatgtgtttgttaatcttctttctttgatttgtacttattagctcggatgtcgatgaaggcggagaaacagttttccctgcagccaaaggaaacgttagtgatgtcccatggtgggacgagctctcacaatgtggtaaagaaggactctctgttctgccaaagaagagagacgctttactcttctggagcatgaagcctgacgcgtctctagacccttctagtttgcatggtgtgtctttcttgaaacttttttaaatctcaaggaacccatttgatatctgaaaccaaacctctcaaaatcttttctgattggtataggtggttgtccagtgatcaaaggaaacaagtggtcatcacctaaacggtttcacgttcacgagtacaattgagttgaataaaaaagaagatagatagcttttgaagatgtaaagctcttaaacctcactttagtgatgaaagctttgcattgtctcaagattgtttcaatgtttctgtcgtcttcggcaggtctctatgatctcaccaacatgtactaa

SEQ ID NO: 189603 - DNA, 965 bp, Arabidopsis thaliana landsberg
atgattctggattccttgcaagttaggaagttcgaaatcgttgtggtcactggtcatggtaaatactgatccaattaaaactatatgagaaaaaactggtagctataataaaactaggggctaaactcgaattatcatatcattaagtttttatttttgtttgctctgcgtcattgtgatgggaccttctctttgcgttagatggtttcgtttacctcaaaaagtcaaaaatcaaaatcctcactaaaaccctaacatttcccagagcttcgcaatcgctgttcttcagtctcgcttctttgtaaactgtaaaggatcaagcttttctattcagatcaaatccacttcactatacccttttgtagtttcgttaacccagctcaaatccgagatgagatatcaacaatggcgattgatgcttcttcgaagctaccatcgatctcatcttccttatctatctccttgttctcaggtaacctccatttcatcgcgatctttctcttctttcattcaccctgggatcggagctttgcaacaaagtgaacaactttgtcccttacgatccccaatgacgagctctggcaacttagtgaaatcagtgggtcgaagcttctcgtccgagcctgcggttgaagagaaatcttctgctgaggctaccgtgattgatatttttagtagattgagtggtgaggatgagattaggaaagagttggaatcgagtggtgtagtgattagccaagatttagctttgaaggttttgagaaagctcgaatcaaaccctgatgttgccaaaagttttttccagtggattaaggaggcttctcctgaggaacttagctcgaagaactataacatgatgctgcggattctgggtggtaatggacttgttgatgagttttgggggttggttgatgtgatgaagaagaaaggacatggtttatcggctaatgttagagataaagtgg

SEQ ID NO: 189604 - DNA, 84 bp, Arabidopsis thaliana landsberg
atggagatggagacgaagatggaaaaagaaggaactggagaagaagatcggagacggagacggagacgaacaagaatggaaccg

SEQ ID NO: 189605 - DNA, 297 bp, Arabidopsis thaliana landsberg
ttggattcgaagaagagcaagaaggcaaagcgcgacggagaaagcgattacgagtttccatcccagccacacgacgccgccgcgacgggacaatggaggcggaatctgcggctgtgatttcttcgtcattgtactacgatcactcaccgtcgtacgatcaacattcgagttagagaaacgaacaatcacaagtctttttagggtttttgaagtcaataaatttctcaggagagaaacggaaactgaagaattgcaaattacaacattttggattttgagagaaagagagatagaaag

SEQ ID NO: 189606 - DNA, 315 bp, Arabidopsis thaliana landsberg
atggccggaaaagattaccagcaaacaaaatactatcaggacagcagcaagcacctgggctttcatgccatggatgccatgaaactgctgtgcaaggcttatattttgacaggggaccgcaggtatgcaaaccggggagtggccattgcgaaggatgtggccagctgggaccccaatggcctcagcggttttggcgattttggcgacggggcatgcatgcttaccatggcgctgggctttgatacctttgacagcctgttaagcgggcaggaaaaaaaggccctgttgcgaagcattgatgtgcgcggccagcgg

SEQ ID NO: 189607 - DNA, 320 bp, Arabidopsis thaliana landsberg
atgaggaattcaaagcgcaagcctgagccgacgccgttcgccgggaagaagctccggtcgacgcgattacgccggaagagagcacagatctctcccgttcttgttcaatcacctctctggagcaaacaaatcggagtctctgctgcttctgtcgattcctgctccgatttgctagctgatgacaacgtttcctgtggttcgagcagagtcgagaagagctcgaatccgaagaagactctaattgaagaggtagaagtttctaaacctggttataatgtgaaggagacgattggtgattcgaaatttcgaaggattccgag

SEQ ID NO: 189608 - DNA, 270 bp, Arabidopsis thaliana landsberg
gagagctcaacgcatccaagcttgatggaggtatccatggaacctttgattggtggggcccttcgccagcaaatctcttcgcggagctcgccccttcagagaagcagtaggttaacccttaaagggagaagtccactgccttcttcaccttcgaaggtggagtgaagagccttaagcctctgtagtcatcgtgaaggcatagcccccagcgcttgccttcgttatctccctagttgttttcgctgcatcggacactttgacaaatattag

SEQ ID NO: 189609 - DNA, 932 bp, Arabidopsis thaliana landsberg
ggcccggaagttctccgccgctcacggtgtcgtgtctgcaaagagctccatcacaatccgaccacactctgctgtccacgctcaaataataaaaaaactttaggattagcttttactacttgttcaaagcgagcaagcgtccacatccggaggaagcgcattaccgtgtaatcgccaccacctctatcagcgggtgctacgagtcgtgcaacaggtgtcaacgttgattgtaaaccacattagccggaacgttaattgaacaggtgcattggcttcattaaagctcaaacttacatagtagggtttaccggagatttaccgtagatttttacgtatttctctaatatataatggattatcctaacgatatctaaattattaaatctaatgatatctaagtcacaacattacactatttttttttttaaaacgaaccgttatcacaattcacattacaatgagattcaattaagtattcacacttgcatttcacacttgcatctattaaactcgaacagaataattaaggaacggtattaaccgtcaataactcccatcctaaatctaaactgccattgcatcacaaaattcaaaaactatccgactcttttgagtttttgacatctcttgtcgcttcagacataaactacagtctgaacttcataaactaatcgtcgtcgattcaacaatgacgaaagataagaagaaaaaggacaatgtcagagtaagatcttacttaacattctcctttttgttgttaatcctctgttttcaatacgttacttcatttgttttctcaattttcttcgatatgttgtagtatatggatgtcgaattcaatgtatcgatgcattgcaacgactgcgagagaaaaatcgctagagttatttccaaattcaaaggtataaatcaaagtaacgtttccttcaaag

SEQ ID NO: 189610 - DNA, 1364 bp, Arabidopsis thaliana landsberg
  unsure (1)..(1364): unsure at all n locations
atgatcgcagaaatttacttgaacaacacctatagaatggaacgcgaaggagcatccaccgtctgtcccctcgaccccgggagtcccttgtttttgtccggcgatggcttcgagcccgccggcgccctctttccacacgcttgtttccactttccttcgaaggaaaagaaagaggcgtacaactttatggacaaggtaaagtctctcttgttttctttttcggaacgagttctacttgttttctaaccagtccatactttaggtcatcgacaagaatcgccgcctatgcgatgaaatgtagcgtttgcctaaacgcttgaggcccgaattgctcgcatcgagaggaagataagggacatggagagcgacccttttcagtgggagtggaggactttgactgcgtggcgaagatcccgcacatgctctcgatgtacctccgtgctcgaggccaagtccccggtcctgtaaacgctccggttcaagtgatcccgtctgacagtgaagaccgtgaagattaggaggaggatagtaacccctggaagcgcgtgaagtgaacccgacgtggacgacaaaaacgaagcgtccacttcgaaccccgaaccggcgatgaaggagcctgttcctgagccccttcactaaatgttccccgagactaaaaaccctcttttttattttcgcttggacctaactactgggcttcggcccatttatttaagggaactttctaattttccttgattcatcaaatattcgttttggagatactctttgaatgcagggcgactaaagcgacgtgaatgcttccgcgaatcactccgactttaaatggaatcgcatctctgaaagctaagagacctccctataaattccctctttagggttcttttcactccttactaaccataccgctcttttcttttgcagttatggccttcaacctccgttgctcggaatccatgccagacttttcgaggatcggnnnnnnnnnnnnnnnnnnnnnnnnnnnnnnnnnnagaggacgccccacacttctcagcttcagatcccagatccgagctccgtgtgcacttatcaaggacctttcgagcagagaccaagacatcgcgatgtccttcatcaaggctctcgcgactcaacacaaaaaacactcagaggaaaagaagaaactccgagagaagatcaaccaaatgctgcgaagagtcaccgtgatatcaagggagttacacaccctcaactctcaccctggagattggatcaaactcggaattgcagaatttcctcgcatcccggattgtatgatgcccattcttgacatcgccagtcaaggggtcgaagtgttctgcaagacgaggaggatttcctag

SEQ ID NO: 189611 - DNA, 704 bp, Arabidopsis thaliana landsberg
agactatcaagtacagaaacgacgtcgtttggaagtttttgcttttggttctcctatttgtataagtttatcgttgtcttcgtccctgaagagagagagatggcaacggcgtcgtttaggtggatcttgcagcttcacagagacgtaccaaaagcggctcgattctacgagaaaggtctcgatttttccgtcaatgtcgtcaccttacgttgggctgaacttcactctggtcctctcaagctagctcttatgcaagctcccaggtattgactaaatgcctataacctgttcgatcatttgcctcaatgaaactttttttccccatggagagttgtttttacttggttgtcttcagttcactgtcctgtctgattgaaaatgtggaacttatagagattctgtgttaaattataaagccatcattgtttttgatgcagcgagcatgtgatgagtgagaagggatactcttcgttactatcgttcactgtagcagacattaatacaacaatctctaaacttatggaattaggagctgaactcgatggctctatcaaatatgaagtccatggcaaggtaaaaacgcaaccacttcctgcaaatgctttcttttgataacaattcaaagctttctttttcttgataaccaggttgcttctgtgagatgtcttgatggtcatgtgctcggactctatgaaccttcatga

SEQ ID NO: 189612 - DNA, 88 bp, Arabidopsis thaliana landsberg
atggctcgttcagtcgacacagaagcaatgaccactcgcgatccaagcagcaagcgcggtggctggaaaacgtttccattcatgatcg

SEQ ID NO: 189613 - DNA, 74 bp, Arabidopsis thaliana landsberg; identical to SEQ ID NO: 188179

SEQ ID NO: 189614 - DNA, 297 bp, Arabidopsis thaliana landsberg
agatgaagattggcaggacaatgatggagcactgaacacaatatccatgactcacccacgaattccggttgaacattctagtctcattcttcgtagtgactcagactgtctccctctccaaccaggcatttggttagtcctcttctcgctataaccatagatttgacctggattagaatgtcttggaaattcagtgaaagcttaacggtcttactggggctttcttgaaatgtttcaggtactacaagatcgtggaggcagatcatataatgttcattataaaccgagagcgagcag

SEQ ID NO: 189615 - DNA, 546 bp, Arabidopsis thaliana landsberg
aagaaacttccctttaaaaaagactatccctccggggctaatgaagtggctctctctgttgttaaccttccttcaggtgctgggatttcagaaactagtgtcattggttcagcttcagctaatccacctgagctcccttggtccaaaccaaaaagaaggcgttcgagatcaaagaagcgctctctcagttctccacctcggattgttgacccgttgattcccatttctcagcaggtccctctattgcccaagccttcggctagtaagaaatgggttgtgagaccaggtttgaattcgccagttcctactgttgtcattggtgcagattctggaatttctcaacctcctactctccctaaaaaatctatgagagagtctatcaaagatccggatccaaacttccctcttcccctgggctgggcagtgatgtctactaaggcaaaaaagaaagaacttaagaagtggcacaaccgtattcgtccccccgtgacagagcttcaaggtttcgtcgatggcagggccggtgacggtccttcttctcattga

SEQ ID NO: 189616 - DNA, 16 bp, Arabidopsis thaliana landsberg
atggtaatggcccaag

SEQ ID NO: 189617 - DNA, 99 bp, Arabidopsis thaliana landsberg
ccatacaaaaatgtcagtaaaaaacgactcaagcgacaatacggaagaaacagatatgacctatccatcgttctagaatttgccaataatttcagataa

SEQ ID NO: 189618 - DNA, 185 bp, Arabidopsis thaliana landsberg
tggatccacgaagggatcttcaatcaaaaactggaaacaaaaaagaagggaagagacagggagagtgatttctactccaccgtcggatctaaggtaaggcacaggatccgaaaccctagaaatacaatagcacggaaggtgcgagcaaagaagaagaagaagaagaagaagaagaagagatctga

SEQ ID NO: 189619 - DNA, 517 bp, Arabidopsis thaliana landsberg
atggtctgcaccgtccacgtattgcgggatggtggtgttgctgtgcgctcacgggactggtggattgcgcgctcagggtgttcgacataatgactaatagggggtgtcaggtagacgatcgcatttgcagctcgatcgtttctggttctccagaaccggaaaggccggagcagggctgcatttctacgagaaggtgaagcgtcagtttagtggatttgatccaggccttgtgacgttgacatcagtcgtccatgctcttgggttggaggggagaactggtgagatggcagagcttatgcgggagatggagtgtaaaggcatgaatgctgatgctgtgttttacggcagcatggttcatggatacatgagtcgtgggttcttgatggaaggtcttcgggagcatcgatccatgctagggaagggaatcacagctgatgtgattaactatactactgttattgatggactctgcagagaaggtagtgtggagaaagtaacgggtttcttggatgagatg

SEQ ID NO: 189620 - DNA, 259 bp, Arabidopsis thaliana landsberg
atggttcttctctctgaaatcgtccaaaccttcattctagccgacttctgctactactatgtcaagaggtaaatcattaatgctttcagtcatcgtcatgtttgttgatacattggttgtagttatgtgatgattgctgatcttaaagacattgtgaagggtgttgtaagtattttatgtttttggtgtgtggcagtttaatgggtggtcagcttgttcttcgtctcccgtcaggtgttgtgtgaaatttggtgtataa

SEQ ID NO: 189621 - DNA, 511 bp, Arabidopsis thaliana landsberg
tcaagtatgaagctcggcttgagggtggggggattgttggaaagtctgatggtgtacagcttactgtcaaggagggttagtatttttttttctcaaccggatattattagctattcgaggatctaaatacttctcgtgtaataggccatttctgtcctgcgctttctaaggctgtcaaaaccatgaaaagaggggagaaggttctcctgactgtgaagccacaatgtgagtattttatttggtgtttgtccttatttagcggtgaatcagtgaatttagattgatgtgtgacactctgacttgtacagatggatttggggaatttggaagaccagcttctgatggtcttcaagctgcaatcccaccaaatgcaacccttcagattgaccttgagttggtttcttggaagactgtggtggaagtaactgatgacaggaaggttattaagaaaatactcaaggaaggagaaggatatgagcgtcccaatgaaggagcgattgtcaaatgttag

SEQ ID NO: 189622 - DNA, 596 bp, Arabidopsis thaliana landsberg
atggcgtcctctggcgacgacctccgtcttctctctctcatcgacgtcggcgataatgtcttctcttccttctccgattaccttaaacctttctctactctatccacttcccggaaaaaacaagaccgagcaaccacgattcgagccctagctaagcaattccttcctttcctcaacaaatcgatctctctcctaccgaaacgtctctccgtcgcgaattctgataaggaagctcgtgaatcagcattagatctgttccgtgcttatgaactttgtttggactgtttagaattggtctctgctcaattagcttgtaagcctcacactgttcaatctcagaggctaaggatgattcattgtctcgatgtttggggtttgtatgagaatgtgtatactgaagcgtttaaggttctggagaagctaagaggctctgatagcaattcccggaagtcccggttgttgccggaggttcaggatggagatgcggagatggctttagttgttgttgatgctgtggcggccatctttagggctgtggcaatgagtcagcagttagatgataagcggtatcggaaagttcttcttttgcttaggaa

SEQ ID NO: 189623 - DNA, 352 bp, Arabidopsis thaliana landsberg
atggaggtatcattgctcaattctttccaaattcatttgctgtgattgtaaactcgagttgcgatgagaatcattacgagatttcatcattccgaacatcaggagattgttgttggaattcattgttatagctggtttggttgttctgcttgttcagtgttttggtattccctgtcggaattttttttgcttgtctccaattaaggtttcagtgattgagttaactaactccaatgtcactcaagtttctgtgatgaactacacaaatctttctgatgatgatgatgaggaacttgaaaataaaaaggaggatcttgatagcgaaaatgatgtggtgattagtaaggagaag

SEQ ID NO: 189624 - DNA, 100 bp, Arabidopsis thaliana landsberg
atggagtgggttataattgccacgtgtacgagccgcgatggctcatggctcgagatgatgaaaatagaatctcagggttcgttggtggctgatgaagtcg

SEQ ID NO: 189625 - DNA, 1106 bp, Arabidopsis thaliana landsberg
atgtccgatgcaccagggaactccaagctgaattcaacacttcgggaattctcagaaccggcgcgctataattcaccggactgtccggtgtaccaccggacagtgtctggtgctccaacgaagacgctgctccggaactcgccagccgcaggatttcatgaaggctgctccgctataattcaccggacatgtccggtgtgcaccggactgtccggtgagccagcagacaacggctacttcggcgccaacggtcacctgcaggcgcattaattgcgcgccagcgcatgtaacgtcaggcacgcgcgcgatggcacaccggacactctatagtgcatgtctggtgtgccaccggacatccaggcgggcccagaagacagagctccaacggtcagaacccaacggcatcggtgacgtggctggcgcaccggactgtccggtgcgccatgcgacagacagccttcaccaaacggctagtttggtggttggggttataaataccccccaaccacccacacttcaatgcatccaagttttcagccatcaaacctcatacaagagctatagactttattcaaagacacaaccaaagagatcaaatcctctcccaagtccggaatcactccaaagaaattagtgactagagagagagatttgcttgtgttcatttgagctcttgcgcttggattgcttttcttcttccttcttttttgtgctcaaactcacttgtaatcaaaacaagagacaccaagttgtggtggtccttgtgggaactttgtgttccaagtgtttgagaagaagaagctcactcggtctgagggaccgtttgagagagggaaagggttgaaagagacccggtctttgtgaccacctcaacagggattaggtttgcaagaaccgaacctcggtaaaacaaatccacgtgtctcactcattatttgcttgcgatttgttttgcaccctctctcgcggactcgattatatttctaacgctaacccggcttgtagttgtgattatttttgagaatttcagtttcgccctattcacccccctctaggcgactttcaaaggcgctgtgtccatgcgactatccttagtcacgtggtga

SEQ ID NO: 189626 - DNA, 1280 bp, Arabidopsis thaliana landsberg
gttgagttgatcataagactccatgatttgcttgctgaatatgggctctgctgcgctggtaaaaattgtgcgggggaagaaggagcttttcttagatttgcgattaagcatttattggcagtggacatgaaagtcaaatccagtattaactccccagatggtcttggacatgatatgggactgcctgacaaattatgcagaaatgaagtaaaatcatttctcgaagaggtgcatgttgagaaaatcgaaatcatcaaaactgagtctaagaaggatggttctgaagaacaagttggttatagggagaaagaacagtcagatcaacaaagcaaacagattccagaacacacagaagaagttgctgaagaagaaaaagatgaacttgagttgttaatcaacaacgctttagatcaatgctttttttgcctgtatggtctaaatctgagagtcgatggttcctacgaagatgagcttgctgtgcacaaaaacactagccgcggagattatcagaccaaggaacaatgtgttgatgtcttccagtacatactaccctatgccaaagcttcatctgtgagtgatctttccttaacttggtaggctcattttcatgtgtgtgatatgtgcgtgccaaagtttagtttcttgtacttggtgcatttatctatatagaatcaaagttaaattgtagtggtagcactgagaaggtaacaactattagcacaagtttgtagctttcaaggtttttctattcgagtaaaaaaaatgtattgcaagttaccaaaacagctattcacttctgtaactaggctcacatgtctactggtgtttatcaatcaatgcatatagatttaagcatgcatggcctacctacatggcacacacaaattataatgtgttgccagttgtgttcagtacatatccgacattggtttccgaaacacctattgtaactcatgtaacttaaaattgcagaaatatttggtttaatgagtaagttataagaatgcactctttaaaccacgtgggcactcaatacagaatgtgttgcgtagcagtattcaatacatgtgtcgtgttttcaagatagtctctggtaatcttatgcatatccttcttgtctcagagaactggactagttaaactccggagagtcttgagagcaataaaaaagcatttttcacaaccaccagatgatctcctaattggcaatgtgatagataaattcttagatgaccctgaattatgtgaagacaaactctcatatgaggctggttctgaag

SEQ ID NO: 189627 - DNA, 57 bp, Arabidopsis thaliana landsberg
atgctgtttgcgaatgaacaaacagagtgtgtcttcatcaccatggcccgtttgcat

SEQ ID NO: 189628 - DNA, 175 bp, Arabidopsis thaliana landsberg
atggggtcgacgttgcgcggtgcgtgcggacggagctgcttacgcagtgcatgttgttgcatgctgtcgctgacagatagtgagcttcaatcacgaacgccagttctaccaacaaacctccctctgacggatggctaccacgcaccgaagccagaaccgataagtaacgcgccga

SEQ ID NO: 189629 - DNA, 144 bp, Arabidopsis thaliana landsberg
atgagtatccaaatacctgacgagttttaccaaatatgtgagtatgaaatgatttctatatacccgtgtgtacgttaataggcaacaacatctgacccgttgggtaaacaggagtacggatgtgtactacccatacccgcataa

SEQ ID NO: 189630 - DNA, 97 bp, Arabidopsis thaliana landsberg
atgtgcgagggactgactgacgcggaaatcgcttcagcgctgttcgtttcggaaaacaccatccgcaatcatgtgtccaggatttacgaaaagatcg

SEQ ID NO: 189631 - DNA, 673 bp, Arabidopsis thaliana landsberg
atgacatccgaattggacaaccaggcttgtaggttaggacctccttgcgaaacaggcagggcccgatagcctgggggcggttctaaggaatgggaacccgttccatggggcggtccggagcctgtgtggccgcttagcctggtcctgtacccaaaagcctacacactccaccgctccgtgacgggtaccctagtacttggaactataagtcctgtgggtccgacaacctgggggccgaaactagagaaggaacacttgtctcctagggtggtccggagccgtgtagccgctcagcctggtcccgtaccatgagcctgcacgctccaccactctgtgacgggtatcctagtacctagaaccaccatccagggagtccgaacgcacaacctggctcccccagactagaccctgcaagtcccgagcatgtatcaaaggatgactagtgtcagatgacgggtcctgtgtgtgtactactaatgctccctagccgaagctgtgtgcaagcccaggtcccagccaaggctacctcctaggggccattgctaactctttcttaggtatgctggtctgcagcctcgacaaatcgagcctacatcacaagggggccaggtaccaaggaggaatcggttacaccacacacaacagggacaagtggtacacagataagtgctaa

SEQ ID NO: 189632 - DNA, 100 bp, Arabidopsis thaliana landsberg
cttggcgcatgcacggaacaataccagcaaagtcagaattcgcttcgcaagtcagagctgcagatcactagctgaccggtttagcctgcatcgacactaa

SEQ ID NO: 189633 - DNA, 409 bp, Arabidopsis thaliana landsberg
atgggttcttctaaattgttggttgcattcactctcatcgtcatgatgaccatttcctatgacctcttcaccggtatgtctctttacataatacagatttttttttttttttacttatttcatactgattttttattttttctttctttctggtatatttaatttctaattacttcttatgatgatcgtaggaataggaatagatgcgagaactgtgcctccgacatgctatgaaagttgtaacgcgacatttcaaaatccagaatgtaacaaaatgtgtgtaggattggcttataaagatggtagctgcatttatcctcctcatgaggttgatggtcttcctcctaaacgaccttactttcctcgttgttgttgtaatcctataattctttcacctccttctacttga

SEQ ID NO: 189634 - DNA, 78 bp, Arabidopsis thaliana landsberg
atgaatgaggacaaagtggacacaaaaggctcgtgttggtctttgaggacgatatatgatcctaaagacctgctagga

SEQ ID NO: 189635 - DNA, 343 bp, Arabidopsis thaliana landsberg
gtttctgactcatataaacccgatttcccgcaacttgatgctcagacagagcgttagtcttttggagagcttgcaatcatgctggaaagaagatgttctcgttttctctgctgctggcaaatttcttcgcttgacattgcagcttcgttcgaggtttgtgaaatttgactttaatattatcatcaatattgatagacatatatctagtgaagataacgtgaaaacttgcttgttttaccttaatcgaagaagctttttcacgtttatggactttaggcccatatcttacgacataatcactttggaattttggatacttaaccattttatgttaggctcgtaa

SEQ ID NO: 189636 - DNA, 483 bp, Arabidopsis thaliana landsberg
atggctaattcgactcaatcaacggatcaatacgacaatccgtactttctacatagctcggaccacgctgggttgattcttgtttccgatcgtctaacgactggtgccgactttcattcatggcgcaaatcgactcgtatggctctcaacgtgcgtaataaacttggtttcattgacggtacaattcttaaaccatctgatactcatacggattttggttcttggtctcgttgcaatgacatggtagcgacttggattatgaattctgtatcgaagaaaataggtcagagtctattgtttatccccacagctgaagggatttggaatagtttgatgtcaagattcaaacaagatgatgcacctcgtgtttatgaaattgaacaacgtttgggtaatattcaacaaggagctcttgatgttagttcctattatactgaacttgttacattgtgggaagagtatcgcaattatgtagaactccat

SEQ ID NO: 189637 - DNA, 321 bp, Arabidopsis thaliana landsberg
atgatatcaaaacaaacagagattcaaagaccaaaacgtatgagacgaaaacaaaaactcagatccaagctaacaaatcgacgaagtataacaacaaggagaagattaaatcgattcaatcataaacgaaaagccagtgaagatcaaaaagcgaaactactcggtcaaagatcaaaaacatatcaaacgacaaggtcaataacaccgaatctaaagcaattagagactaatagacgaaaatgtttaaaacttgagaggacgagagacaacgttctaaagcatcgatcgaagacgaaaatggaaaaaccgagatccagtaat

SEQ ID NO: 189638 - DNA, 1403 bp, Arabidopsis thaliana landsberg
atggctgattccaggaaatctgttaacactatcactactttggtggatgattcagggacccaaattgactcgcaacaaggcatcgctgaccactgtgctctttattttgaaaatctcctgagtgatgataacgacccttattcgttggagcaagatgacatgaatttgctgcttacttacagatgtccctattctcaggtggctgatttggaagccatgttctctgatgaagatatcaaggctgctttctttggtctccctagtaacaaagcttgtggcccggatggctttccggttgagttctttaaggcagcttggagttgcattggtgctgaggtcaccgctgctgtgagagaattttttatttcgggtaacttgcttaagcaattgaatgcaactaccattgttctcattcccaagtttcctaatgcctcttgtacttcagattttagacctatctcttgcatgaataccctgtacaaagtcattgccaggcttctcacagatcgtcttcagaagctgctctcttgtgttatctctccttctcaatcagcttttctccctggaaggctcctcgctgagaaagtcttgcttgccactgagatggttcacggatacaattggaggaacatctctctgagaggtatgttaaaggtggatcttcgaaaagcttttgattcggtgcgttgggaatttatcattgcagctttgcttgctcttggggtccctactaagttcattaattggattcaccaatgcatttccacaccaactttcactgtctctgtaaatggttgttgtggtggttttttcaagagtgctaaagggctgcgacagggtgaccctctttctccctaccttttcgttcttgcaatggaagtcttctcaaagttgctcaattctcggtttgactcaggttacattcgctaccacccgaaagcttctgatctctccatctctcatttgatgttcgccgacgatgttatgatattctttgatggtggtagttcttccttgcacggtatttgtgagactcttgaggactttgcttcttggtctggactaaaggtgaacaacgacaaaagtcatttttttgtgctggtctagagcaggctgagagaaactctttggcggcctatggttttccgcaaggctgcctccctatccggtatcttgggcttccgcttatgtgtaggaagttgcgcatcgctgaatatgagcctctcttggaaaaaatctccaaaaaattcagatcatgggcaacaaattgtttctcttacgcaggtagagttcaacttattgcttccgttatctatggtatcgtcaacttttggatgtccactttcttgctgccaaagggttgcattaagaagattgaaagcctttgtgctaggttcctttga

SEQ ID NO: 189639 - DNA, 719 bp, Arabidopsis thaliana landsberg
atggctaatctgttgcaaaggcttcgtagacgaaccgggccaaagccagattatattgaagacaagttggatgaatacattcgtgaagaacaagttgaagaaacaggcggaagtaaccaggtatgtctttgtcttgttgtgaaattatagatctgcagtgacttttaattatttgatccatttcaggattgtcctcttggcgagattgaaaagattttggaccgtgaatggcgtcctactgcatctaacaatccgaattcttctgacaacgggacaccaaccctagttgtcgtgaaacaatatcttgtgaagtggaaggggttatcgtacttgcactgctcttggtaaattcccagcaatatgcgatatcgtgttgtatttaattaaacatgtcgattattatgtttttgttgcttctcttgtctggttatcttatcatcacttgattattaatgtcaattcttagggtgcccgagcaggagttcgagaaggcttacaagtcccatcctcatttaaaactaaaattaagggtgaccaggtttaacgctgctatggacgtattcatcgctgagaacggagctcatgagtttatcgccattcgtcctgaatggaaaactgttgaccggattattgcttgccggttaagtgattcaagtcttgtcctttgtttttatgtccttcacttgatagacctcgttgtgacaattatgttaaattaa

SEQ ID NO: 189640 - DNA, 289 bp, Arabidopsis thaliana landsberg
ggtgttggagctgttgttggagcaatttcccgcaatcttcatgagcttcaagaaaatgaaggaagcttttattcaatttatgaccaacccgttcttccggctcaggtactacatttcaaatatatcaaatcagaatcctcttatacaggcttttgtaaatcctaatcttttcctcaaaactccacaggatccagtggttgaggcaataaataacgcggtggacaagttaccttctcgacaattttctaacttctggcacaacatgctctatcatgcagatgattggtga

SEQ ID NO: 189641 - DNA, 121 bp, Arabidopsis thaliana landsberg
attaccaatttacggtgagggtgggtcaagtgcacaaacgtttactgataccatccgtaaagaacttgcaattcatgcaaaggagctaaatagtgcaaatgcaatgattgatggagacttg

SEQ ID NO: 189642 - DNA, 381 bp, Arabidopsis thaliana landsberg
ctcagtatcgtgaaaagatctcaacttggaaggattttcgtgacaaattcaaggtccgtttcaaaccagcccgaggagcggccaccattgatcaactgttcacgattttccagagaggaagtgttgaagagtaccgtaatcgatttgaagagatagcagtggagcttcctcatgtgacagacgatgtgcttgagtcagcttttctgaatgggttgaaacgaagtttgcgggatcaggtgttgagaagcagacctgcaaacatgactgacattgtggagatggcgcgaatcattgaagcacagaatcaggagaatgcgagttatcaggctagatccttccagaggaaccaaacgacagtgatgtcaccttattctggacacg

SEQ ID NO: 189643 - DNA, 319 bp, Arabidopsis thaliana landsberg
atggctgacaaggtgaccatcgttccgccgcgcgacccgtggccttcctctaccgttgtcgtgggggatctggaggcccttgtcgccgatggtttgctccgtcccctctccggtgggccacagccggagtggatggtcccgagcgaggccgacccaactccaccaccggggtacatggtcagctttatccccttccacgagcgggggtttggagtgccagcgagccgcttcatgtgggcgctcctgcactactacggggtggagctgcataacttcaaccccaactccatcgcgcaagcggccatctttgcggtggttt

SEQ ID NO: 189644 - DNA, 1962 bp, Arabidopsis thaliana landsberg
atgtccttgttgagcaactcgttgaaacttgatatgacttgttcttgcattgctgatgggaatggaattgtgtcagcccaaaatataacaactcggaagaacaagcctttgatactgcgtgaattctcagtagatcggttggaaccaaaagagttcgtcactcagctgaagaatattgcgaaatgtgttttgaatgctggggtactcgagtcgacagttatgcagagtcggttatcagctttttatactctctttgggcataagcagataccaatggcccaactacacgaaaatgagggtaggaaaagtttcactgcgaagatgagtgacagtaagttcattggttctccatccatttgtgcaggtaatagcaggaagaggtttcggaaagaatggtttaggaaatttgtaagtgaggttgataatgtatctgcgagagacgatctagtaaatgtgcctccttctgatttgatatctaaactcaagctgcttgctgtgggctacaattgttcggaagagactgaaaatattgggctctttgagtggttcttctccaaattcagaatttctgtgtatcatgatgaaaatgcttacaagatgcagttggctaacatggctggtttcaaggatttgatgttagcaacaaatgcaaatcgtggtactgttcagaaaaccttaaagtcaaagaaaatagggaagtcaaagatggagcccctcaatggtgtttcagttgctgatactgagcagaagacctttgagttgcagatatcaaagaagtccaacatcgaatctcttaatggtgtttcagttgctgatactgagcagaagacctttgagttgcagatattagagaagtccaacatcgaatctcttaatggtgtttcaactccaaatattgaccacgaggcctccaagtcaaataattcagggaagacaaagatcaatcatatcattggtcactcaaattttcttagttctgttgcaaaggtgcagttggcgaaagattttcaagacaaactgttggtacaagctccagacaggaaagctatgacggcagatacactcagcagacctgctgctatacttgtaccggacctgaacagcggaggcaatgctttgggtactgcagagtttgaccatatgcaaagacctgagactttaattcagcataatgtctgcccacaagaggagaagacaccaagatctacgatacttaactttcaggtgacagctcatcagggagtctcaggaactcagtttgtttctagccagccaacttcatacaaacacttcacgagtgcagaccttttcacttattcagggaagaaaaagagaggaaggaagaggaagaatgcagaagagcttccaatagttgcacatgccagtgccactactgggatacctgacttaaatggaacaaatacagagccaactttggttctgcctcaagttgagcctactcagcgcagaagacgtcggaagaaagaggagtcacctaatggattaaccagaggaatcacaattctcttcttgaaattttcctcccaagtgtcaatgccttcaagggacgacctaacctcgacattctctgcgtttggcccgttggattcttcagaaacacacgtttcagaagaatttagtggtgcacaggtcgcctttgtgagtagtgcagacgcgatagaagcagttaaaagcttagagaaagctaacccatttggtgaaaccttagtgaatttccggttacagcagaaactgataaccgttcaaaggaacattgccccacgaatgccggtaatctcacatgttagtccagttctgaaaccgaacaatataccaacaagtatggatgcaatgaggcagaatctgttgatgatgacagcaatgctggagaaatccggggatagtttatcaagagagacaaaggcaaaactgaaaagcgagatcacggggcttctggaaaag

SEQ ID NO: 189645 - DNA, 237 bp, Arabidopsis thaliana landsberg
atgaaaacaaaagacggtaaagcgacaacagatccgtattgtgttgccaagtacggtcaaaaatgggtgagaacaagaaccatcattgacagctctagccctaaatggaatgagcaatacacatgggaagtgtatgatccttgtacagttatcacactgggagttttcgataactgtcaccttggcggaagtgagaaatcgaacagtggagccaaagtggattcgagaatcgggaag

SEQ ID NO: 189646 - DNA, 210 bp, Arabidopsis thaliana landsberg
ggcattctcttcgacaaggacggcacgctggtggacttcaacgccacctggttcgccatcgccgacctgatggcgatggaggcggcggaaggcgaccgctggagagccgacaagctgcttgccgtggccggctacgacttcgcgacaaagcgcttcaaggccgattccatcttcgccgccggcaccaaccgcgacgtcttggaacttttg

SEQ ID NO: 189647 - DNA, 693 bp, Arabidopsis thaliana landsberg
atggagactgatcagattgaggaaatggatgtcgaagttttgtcttcgatgtggcccgaagatgttggaactgaagctgacaaacagttcaacgtcgagaaacctgccggagatttagacacgttgaaagaagttactatcgagacacggaccattgcggatatgacacggttaccaaacctattgaattcgactcatcaaggctcctctcaactaaccaaccttgtgaaacaatgggagtatatgcaagacaacgcggttcggctgttaaaagaagagctaaagaatctcgatagacagagagaagaagctgaggctaaagagttgaagatcattgaggagtataagtttgagagcaacgagcctgagaatgttccggttttggatgagacgagtgatttgttccgcaggtttaggcagaaaaaacgagatgccttggtcgatagcaagaagattgagatctatgaggagtttgacactgttgcatattggaaacagaaggcgttgagtcttgagaaaatgcttgaggcgagtactgagagagaaaggcgattgatggagaagctgagtgagagtttgaaaactatggagagtcagtcagcaccggtccaagagcttactcagaatcttaagagagctgaaggtttcttgcatttcatacttcagaatgcacctattgttatgggccatcag

SEQ ID NO: 189648 - DNA, 412 bp, Arabidopsis thaliana landsberg
atgggagccaccggatctaaaactttgcacttagttggaatggatcttgctggcaacagtggggattatacccgctcgttcaatttagttgttgatacaacaccaccattaatcacatttaatcccgatccttctactgtaaccaatcagtcctcgtttgtactttcggtgaatgtgatagacgaatctcctgttattacacaaattaaactgaatggctccgcggtttctaacaatagcaccgtgactctaatgcacggtagaaacatttttgaggtaacatccacggacgctgccggcaaccaatccgttttagagaaggaagtcgcgctagacgatgttcggccaatattgcaattaggagtggatgatggcctgctgacaaatcagcctagtcttttagtcgactctc

SEQ ID NO: 189649 - DNA, 201 bp, Arabidopsis thaliana landsberg
atacggcggtatatttgttgcaaacccctgctttggccagcattatttttacggttaccaatgatcttaattacgaccagcgcatgcaccgtatctgcggctctttgcgcgaagcgggttatgatgtgctgctcgtaggccgcaggatgcgtcattcagtggtgctgaccgaaagacctttccggcagaaaagactgggtt

SEQ ID NO: 189650 - DNA, 2731 bp, Arabidopsis thaliana landsberg
atgaggaaaggacgaaaaacctttgcgaaaccacaaaaactacaagaaaacgtaatttgttgggctcgggcccaaaaaaaaatgtaaatactcggcctagttgtattatttactcggcccagctgtattatttacagaaaaaacctaagttctcccttttcacttctcgacttcttcctcttctctccgtcgtcgtcttctctcgtctccgacgataccactttcaccggaataatcaatctcttctattcttctttcttctccgttttcgttcgtctttgtctctttcatatccgcaaatttattttccaatggctagagtaaaagactcatctggagaatatgaatcaactagggttgaagcgaccggcgaaattcctccatcagtcgaagagaccgccgccgagattccccaaagagatgaagaaggcgcagagcttcttacaacagaagaggaagccagaaaattcagcctacaaccggcgattgtgacgccgccgatttgggtaattcaaacgccgtcgcatgggaatcaattgacgatctttcagacccaaatgccgattcttgtgcagaagaagaagagacaacgaatgcaattgttcaacatgatgatggagcaaataaggtatgagagaagaccgttattttttggattaggctcgttttaggatattatgcattggtaaatgattggatttgtgaatggtgcttcagataaaacaagtagtacaattaggtcgtaaatttgtgaatggtcattcaggaacaagtagtacaactaggtagttaatgtggaattgaaagtattttgaattgaatatgcaggatgatggtgatgatgataacctgccgcagaatatgcaggatggtgatgatgataacctgccgcagaatatgcaggatgatgatgatgatgatgatgataatcaaccattgccgccagaagttatgtactttgatccaactacctacacgaaggtgtgtaagataggaacgaggtgtcagttggtacaaacagtggaatttatagagactttggatgcagaactgaagtggtttaggaatcatgaccaatttaagcacatattccacatgcctaaggagcccaatcacatgattcaaggcatgtggatgcttatggttcgcacggctaagacagaattggcgagagagtgttggtttgttgtcaatggagtacctataaggtactcaattagagagcatgcattgttgaccggtttgaactgccgtgagtacccaaaaaactataagactttaggcagtttgaagtttgttgagaagttgtttaagaggactgaggacatcaagattaaagacgtggaagagaagctagaagagtttaagagtgagaagtctactgctaggttgaagttggcaattctgttattcttagctaaggttatgaaagctgattctaaaggggattcgaagatagaggagttgcttcttaggattgtggacaatgtcagagcttgtgagacattcccgtggggacgtttttcctttgagaagtgtatggaaggggtgcggagagtaatgaagaacatgaaaggtgtggtgaaacccaaggcacagactgctttttatggatttattactccaggtaagtagtcgagtaaattatatgagtggctagattttgttattgtgaacttgcatttacttttatgtttttgtgtctagattcttacatttgagtgcattccgcagcttgggaagagatttagagaagttgtacgtgcagacaaggaatgtccaagaatgtgcaagcacaagttcagtgaaagttgcatgaagggatttactttggaagaaataaatgaagcacttggagatataacggttagctttgttctcttgaaatctatgtttataatctttgtggtgtttgaaatatatgtttacttgacaggatatttcaagcatcttggaacctgatatggatgagagaaaaatgttgtcacgcgttgtagagaagcatgttgatgatggtattggatatatcgatccaattgttgatagttggagagagaggcttatcgtagagaaaaagaagattttctggcgtagtctctaccaagcagacattgatggtagacgtattgaaactgttgatgatgttccagctgtacctgaaatccctgggacatctattctctcgttccaggaagctatggagaaaggatttgacaagctcacggacaagcttgctttgatggatagcgaaatcaagcggatttgtgtgagagtacaaggaatagaggaatatgtggcagatcagcttgggaaagaggcagaaaaagacaaatatgaagatatgcgtcctggttcagctgctgattttgtgccaccgtcttatcagccaagggatactcagagcaaggccttggttattcacagtggaatccgtgacccagcacctccaactattgagtctctaagtgagtttttgttgaacttttgtgtagtgatgctttcacaatagttcttagatgtttggttacatatttttgtaggtgatggcagcgatgagtccgatgaagaggataagaagaagaagaagaagaagcagatatcgaagaagaagagaaagcatgttggtcctactctggaatctggggaaaaacgtggaaggaaaccttccaagtataagggggaagagtttacaactgaggggaagcaaacgaggaagagacagaagaattag

SEQ ID NO: 189651 - DNA, 321 bp, Arabidopsis thaliana landsberg
  unsure (1)..(321): unsure at all n locations
atgaggccgagccgcaccgcccacggnaacggagagaaagccgggacaagcgcccaaccacaaaagggggcgagcgacaacaaggcgaaaacagccgcgcgaacgcagcagacaaagagcaacggaagcaagggcgggacacgggcggagagcccggccggagacgcccgaagaaagaaagacaaaggaccccaacagcaaggaggggcggctaaaccagaaaaaccgcggaccgagaacgccaaagcatctccacttaatctgcaaaaaccggcggacaaaaacaacttcgaagactcaccgcagaaaccggaggggccg

SEQ ID NO: 189652 - DNA, 124 bp, Arabidopsis thaliana landsberg
cacatccgcacgcagtcgccaggaagctcccgaccaggatcatcgccgcaatcaatatctccacatcacccaataaaaacggccggcaggatcaggtttttcttgcatccgatggcctgcaaag

SEQ ID NO: 189653 - DNA, 398 bp, Arabidopsis thaliana landsberg
ctctttatattatctccgaccaagcaacgaagaagatcaccaagtgcacgattagttacttcggtttgaccgtcggtttgaggatgatatgcggtactcatgtccaagctagtgcggagcaatttccacaaagaacgccaaaaatgacttaaaaatcttgtgtcacgatcacatacaatggaagtaggcaatccatgtaaacgatatatctccttaaagaagagtgaagccactgtcactgcgtctgttgtctttttgcagggtataaagtgagtcattttggagaacctatccaccaacacaaagatagaatcgttcccccgctgcgtacggggaagacccaaaacgaagtcgatgctaacatcggtccatggttgagtaggaataggaaagggaag

SEQ ID NO: 189654 - DNA, 238 bp, Arabidopsis thaliana landsberg
atgatcacggtggctctcgtccttttagccctttcctccgtcgttcaattcgaagttgctgtctcctcaggtaaagagatatacgtactactgtccctgcggtcgctggagatgcgtttgctactactagttctgatctcgtggttagtgttgttgggtttgcgtttatgtaaataaatgatttcgtatatatttaggtattcttgatgtttacgtgaagcaaatatgtgtgaggtga

SEQ ID NO: 189655 - DNA, 190 bp, Arabidopsis thaliana landsberg
aatcttgaaagctagaaacaatcttgtttttaacaagtacagagagagtccttcgaagataatcgcacaaactgaagcagaagtcaaagaatggattgaaaacatgagacagggaggacgagttcctatcacaaaaatcccaacatcaactacaatacacattggacgaaaccctcgtcttcctttgtga

SEQ ID NO: 189656 - DNA, 357 bp, Arabidopsis thaliana landsberg
atggtcctcctcctcctccttatctcgtgcatgctgtaccgtatcatccacctccttttccacctatggtgcctctgccacatgctgctggtccagattttccatatgcaccttatcctccctacccggttcctgtgcctcctgttactgagtctggcaatgagaagcaagttcaggcttcccctcttccacctgtgttgccagctcctcaaggggatcctggaaagccttggccgcatcagaggggttttgaccccagaaacatgccacaaggtgctggaccaagaaatttcgggagacctccgtttatgggtccagctcctgggttcctggttggtccaggtccaggctttcctg

SEQ ID NO: 189657 - DNA, 132 bp, Arabidopsis thaliana landsberg
atgagacgcgtcgccggcttccttgtcgtgttggggttgtgtgtcgccgcgccatcgcgggcgcgcgggcaggtgatcgtgccaacggtattcggcacgtcgaacggcgtctacatcgacgccgacagcacg

SEQ ID NO: 189658 - DNA, 48 bp, Arabidopsis thaliana landsberg
atggcgagtctagctagaaccgatcgaaaacgttggtttacgatggag

SEQ ID NO: 189659 - DNA, 168 bp, Arabidopsis thaliana landsberg
aaatatggaagctacgttgtggatgtgcttttggagacgaaggagtcaatggttgtggtggtggaggagcttatggaatgtggaggagatatgttgatgaggttggcgaggaatgagtatgggaatttcttggtgtgcaaggcactgagagtcacgcagaaggagatg

SEQ ID NO: 189660 - DNA, 126 bp, Arabidopsis thaliana landsberg
ttaaacgccagcgccaatatggtccaggcggctctgaccgcctatactcatagtgtcaaagtggatgatgagaagagcacccgtctgccgctggtcaccatcatgggccacgttgactacggctaa

SEQ ID NO: 189661 - DNA, 160 bp, Arabidopsis thaliana landsberg
agaattacacttggcatcggacttgttgagaaaaacacataattttcatcctccgagaaaaatctgcgtagcgatgaaggccctagtgagacaaagttttcgtcttgtaattgagagagctcctctttccactgaagttgtaaagcgttccaacacataa

SEQ ID NO: 189662 - DNA, 54 bp, Arabidopsis thaliana landsberg
tatacaaatgtgattacgtaccgggaaagtgaaactagtacagacatcaaataa

SEQ ID NO: 189663 - DNA, 243 bp, Arabidopsis thaliana landsberg
atgaccgaaaatgaagtctacggtgcccgtgatgaagcagtcacggtaaaattgtctgtatgaatgggcatagagggtatcctgataagcatcaatgcgacaccgctagatgactacagcatcaccgctcactcgaagagcaacagcctgtccctttgctggtccagccgtgttctgtatccaaagatcctgggccatgaaccaatttccatcgatggctgcaagtttataaaacatatgtga

SEQ ID NO: 189664 - DNA, 45 bp, Arabidopsis thaliana landsberg
atgctggatatggatgaactgcatatgacgctcgaaaaagacaag

SEQ ID NO: 189665 - DNA, 132 bp, Arabidopsis thaliana landsberg
  unsure (1)..(132): unsure at all n locations
atgaaaagaacgatcatgctcgcaggcctnnnnnnnnnnnnnnnnnnnnnnnnnnnnnaaccggccaaagaagaaaaagaagaaacaggcaagtacacagccaccagtcccgtgaagatggacacttctttc

SEQ ID NO: 189666 - DNA, 749 bp, Arabidopsis thaliana landsberg
atggatgatccagtaatttcctctccaaccaacaagcatttcttcgtcatagttcttcatggacacaaatccagtcccgtaattactctcttctattcgtttctttatgtttctctctgttacaattgttcaaaaaaacttataactggtttatatatcatccttgttaatgttggtgtcgtgcagatgattcctgctgagtttttttcgacttacgtggaaggtaaaaaccaccagtctacaaaactgaaactgacctcggacgctttcgatagaaccctgggaggggaaatggaccggccgcagattcgccggcggctgggaaaatttctccaccgtacactctctccaagatgacgacgttgtgattttcagggaaatcggggacatgacctttcacgtcacagcctccggtcgcagtttctgtaagttacagtacatatcctctgacgaagatagggctgatgaagatgatgcatggaacgtgtattcagattccaagaacattgtgtcgaagaagaagccaagaacagaagcagagtcttcatccaaaaactattatcttgttgcgcatgtcacgccttcgaacctaagccgagatagattggtaaattacttgactgttctcttcttataatttgagagcatagtctcgtaccttcacactaattagtattaagcgttacgcttttgcagtatcttataaaggcttttgcgaggtcaaatggcctgaacgagagatgctgtga

SEQ ID NO: 189667 - DNA, 102 bp, Arabidopsis thaliana landsberg
ggaatggatcgcattttggaacacatacttaaaaatgaatgccaccttctgttgaagaagaagagctccaaacaatatctggaggaccgaatgagactatga

SEQ ID NO: 189668 - DNA, 594 bp, Arabidopsis thaliana landsberg
atgccctccataaaaaaacgtcagcttgttcacctgacaattcaaccatctatcgacaccaagcaggtcccctcttggcgacttgattgaggatcgtcatttgctttacctcgtttgtacttaaccatttcgagataagaataaaagaaagttcaatacttaatattactctttgcaaacaatttcgatacttaatatcactctttgcaaaccaatcgctaccactgcgatttaaaactcattcgtaatcttgcgatacctaaagcccaacacttgaatgttgacgcaaccatttttgtgatctcgcttctaaaaagttgatagttaaccttatccttaaaagcacgtcacttcgacttcatcggagctcacctacgagaaccatatctaactccttccttcaccatcaaaacattacaacttccgggacaggagccatggactccaccctctcttcccctaaaggggggacctcctggtcaatcacggctagctcagctgctgagtgccactccggcaatgtccgagctctattcggcaaggcggggagccactgaccatggtagctcggatgaccagagacgtgaattactg

SEQ ID NO: 189669 - DNA, 274 bp, Arabidopsis thaliana landsberg
atggttctggaaatcatttatattcctgataatgatcgtaatcgtatcgtgaaattgaagtccaatggcagtcaattagctatctttactactacagctccttcattatctggtccttatgccttagcgttggatggttctggtaatatttatattgctgagattctcaataatcgtattgtgatattgaattcaactggcagtcaattagctagcttcactactgcaactccttcattggattttccatctggtgtagcatccgatggctctg

SEQ ID NO: 189670 - DNA, 178 bp, Arabidopsis thaliana landsberg
atggatggaaacgacaacaagtttcctgctttcagacggagcgagtgtggctacgaaaatgctcctacatttagccgccccccgccgtgctatcaacaacctccggcggtagtaccaccatattggactagccacggtttggcgattcagcgtgttcatgtaaaccaagctcgtacac

SEQ ID NO: 189671 - DNA, 110 bp, Arabidopsis thaliana landsberg
aaaaatctcagtacgagacaatggtccacgaacgcatctcctatacattaatacgactcaactgtacatccaacggtccacactcttccgcctctctaccttctctttag

SEQ ID NO: 189672 - DNA, 265 bp, Arabidopsis thaliana landsberg
attgtttctgcaaggattgaaaaagtatggggaaggagcttcgacgttgatatcaacgaattttgtgaagacaaagactccacggcaagtgtcaagccatgcacagtattacaaaaggcaaaaatcggacaataagaaggagaaacgccggagtatttttgacataactttggagtctaccgagggcaatccagattctggaaatcagaaccctccggatgatgatgatccgtcccaaggtcaaggcacttgtcttggagtttag

SEQ ID NO: 189673 - DNA, 191 bp, Arabidopsis thaliana landsberg
atgcacgaggatcatactctccaaatcatcgagagtgggaatatgttatgttgtttttgtgaagaaatgtttatgcctaaagtcgaaatcagcctatcccgcaaagcagcatcatgtggaagttgcaagcaccccaaaacttgtgaaactacttctgtagtaggaaccgttccacctgaaattgtctcgcg

SEQ ID NO: 189674 - DNA, 141 bp, Arabidopsis thaliana landsberg
aatttggagaattggattgaagactgttcaagaggggatgatgaactcagcgaccgttctaaagaagaggaggattatgaagagttcaaagacacctactcttgcatgacaactagactcctcgatgaagatactccctga

SEQ ID NO: 189675 - DNA, 143 bp, Arabidopsis thaliana landsberg
atgatgagtgggagaaaagcaatgaatccaaggacgaaagcggtgacagtgattccggtgagtaaaaggagtattccaccggaaatgaagaatgcgaggaagccgaagagttgaccggagtgattaggagactgcgattgtag

SEQ ID NO: 189676 - DNA, 1208 bp, Arabidopsis thaliana landsberg
atggggttcccttacctcgccaacaaaagtcaagtaagtaccaatattaagagcacgcccatgacaatttttgctatctttttatttttttgtacgaatactcttcagatctttttcagttgatgtcaatccaaactttaatcatgagtctatcacaatgttgttgaagtacataaaacaaggatttataaacgagttaggagaattttaaaccacaaaagtaacatagtttcacagaattgtatcaaaatatcattattgttgttatatgtattcatgaagtgaaaaaatattaaaatcttataaataatcagctttatacacaaaatatataaattaatatatataatctcaaatgaatctaaccataaaaattgtaactacatattatggatctaattttattaacaatacaaaaataaataaatagtaaatataattagcataaataacaatcaatgtaattttttctttaataattttcacaacaaatccacgcgtagcgtgggtacccatctagtttctagtaaaaaaagaaatagataacactcttgcccaacacaatcaataacagttcaactgaacaacatatgaggaaacaaatcatacttgccgttttgctatcgactacaaacttcatgtcgtttttcatttagctagtgaactaaccaagattctagagtgtaataaaatattaaaatctataggcaaactcacatgaccaattaaacaagttaacgattactgtccaattaaacgtcacaagttaattttctaccgttaaaatattgccacgtaggacgcgtacgttaattaactcgtaaaatccgcgcagacaaaatcacattgaccgttagatatagatttggcggctagttcttcaatcaatataaaccgtccgtcaaaaatcagaggtaggcttttgacggtgtagttttattttaaaaacataaaataaattagtgtaagaaacttttttctctctctctgagtcttcgacttcgtttttatctccagctttttttttctcacgcgaaaagctcctgttctttaaaggatttgattacgagagtttcaggtttggatttcgtagtcaatttccagattctagggttttggttggtcaaaatcttctacttcgtcccgtgtttgtggattggttcacggatctttggagattccgaaattggaggcgatctttattctag

SEQ ID NO: 189677 - DNA, 247 bp, Arabidopsis thaliana landsberg
tccatgtggttgctcggatgctgatgctcctaccgtaagtttgacttttctatcttcagttgaattcttgttaacccatgccattacttacgtgataatgctgccactcatttcaacattttatgtatcttcattgcaggtccaaatttgggcgagcagcgacataaacaaggaagcacggactttgatgggaaagtgggatgtacagtcctttattagatcttcgcctgagctttctggttcataa

SEQ ID NO: 189678 - DNA, 1441 bp, Arabidopsis thaliana landsberg
cttcaaagatcgatgtttctgacgatgcacgaggcatcagaatcgacggtggccagaaacgttttctaactaattctcctcaacatggcaaggaacatgcagcgtgtacgaacgaagaacctgatctcggtccgctgacgcgtatttcttgcaatgaacctggatatgttattacaaagatcaatttcgctgattatggcaatcccactggtacatgtggacactttagacgtggcaattgcggtgcacgagctacgatgaggatcgtcaaaaaggttaaaaaataagctaacaaaaatcaacattaacgtgtgtatagttaatactaatagatatttttatgagtcttatagttagtaatgatttgtgcagaattgtcttggaaaagagaagtgtcaccttttggttacggatgagatgtttggtccgagcaagtgcaaaggagctcctatgctcgctgttgaaaccacttgtacaatagcttaggtttcatcatatattgcctgcccctatatagagagatttcttcaagtgtattgtttttgttcatcttttctcgttttggtcaagctgttttttagagtttctttgatgcatggatctatatgttgtcgtcttgtcgattatgtttcaagtgctttaattttacataatcaatgtagtcatgtttttgtttcaacgcagacattaatggtttactatcacttttttaaatatggaagtatatccatggtgaattttacgaatcaaactcaagattgattataagagtcagtacttcactctattttatactcaacgttagcacttggcagtgcatagatcccacatttattaagtcaattttcttattactaatctagatgggttaacatgcaattatggaaattgtcaaaaaaaattatccttagattggtttgggaacaaacaaaaaaaaaacaattatggtaaagtaaaaaatgaagaagatattaatgacttattatgttcaattatgacttaaaagctgacgtcataaagaactggttggagttctacgaagaagtagtttcgaatccttgacgtcaacctaaagccaatacgaagaagaagaagaagaagaagatcgtgagccactatattcgcttccttcctctaatttccgattccaatggacctgaatcgcaaacacaaggtatatctcctccttcttctctcgctactgttgaacttgaaccatttcgatgctgtttctgatcatcgctttcgaattcgatgtaaaatctcttcgttgcattgaattttgttttctttttttctctctcaaaattggtggttctaaaggaacgttatcgttttgataccttgttcgttgttaaattataacacttaggattcttaattcttatagcactcagatttgttgggatttgaagctcctcgtagtgaagaagaagcttga

SEQ ID NO: 189679 - DNA, 457 bp, Arabidopsis thaliana landsberg
  unsure (1)..(457): unsure at all n locations
atggtaacgagcgtatagctggagggagtaacagtagtggtggtcatggctacggcttggagaggtttgttgttgttgttgttatcttgagaaggaatgtcacgagaagatccagtgagtggattacggaggaggaagtcgccggagatggagcagcggtaacagagcaagccgccggaagaagcgacggggatgaaatcttgacggtggtggtggaggnnnnnnnnnnnnnnnnnnnnnnnnnnnnnnttctcagtggagtcgaaaacgaaggaggaagaattggaatcgttgtcgatcatgaagaaccaaggatctcgagtagggatttgagagcaagcaagcttgaagcttttcgaggtttggcttgatttccatcttttgcaaacagagctcatacgaaagaagcaagaagttggtagccatgagaggactctctcgagaacgtcatcgttga

SEQ ID NO: 189680 - DNA, 425 bp, Arabidopsis thaliana landsberg
atgaccatgaaccgcgactatgaccatgaactgcgatcttcacgttacttctttaggtctcaataactttctttgtttatattctagactgccacattggtttactcaaatctacggtcttatacggattaaccagcattggaagaaaattgggtcacattgacataagtataatataaggaggaatttataagactttagtaaaatggaggacttgcttttgtaaattttagatacttgtctgcactctttcgttttctgcagattgcagaatttgggggtaaatgctctgatgcttcatagcaactttttatcacagacttgaagaagctttcttcttcgcagtttctcttctcagtgaatccactatcaaccgttatgcgccaattttggagattttcttctgggatcaaaccatcggctag

SEQ ID NO: 189681 - DNA, 61 bp, Arabidopsis thaliana landsberg
atgaagaaatactttcaaccctcgttcgtcattttgattatcttcaccgttcttgtgttag

SEQ ID NO: 189682 - DNA, 161 bp, Arabidopsis thaliana landsberg
agattgtgattgtggccagagcattaacaggaatcggaaacgcgattcggttaataaagaccctcgcgtactggttgatgataaaccggagtatgtttcaacttacaaaaccaaaccggagcatagtgaaaagactcagagaacagttaaccgggctggag

SEQ ID NO: 189683 - DNA, 429 bp, Arabidopsis thaliana landsberg
atactcttacgcgtactgggcctcgaatgggccctcgatgcccacttcgtcacgggtggtttcaggcccaccgtttcgagcccactgattgatgatgatggatctcgggtcggggtaaactgacgagatccgacatccacagcactaagggacattggtcttaggtatgccgaactccagcacatctgtgtgctctatacaaagaatccgccaagggaaaaggaaagaaagtgaacctcacagaacatattgaggaaatggatcacattacaaatggaacaatatccaaggcaaaccttggagatatttgcataccagatagtagaacaacgcacactattctaaaacataaaaaatatttctctgatttgaaatcaacaaaagttggagttaacatatcaggtcccacagacttaattgaagggacga

SEQ ID NO: 189684 - DNA, 362 bp, Arabidopsis thaliana landsberg
agtatcagatgtcgaagagggagtacttgcgattcttgcaagctgaccgttcttcccttgtgaagagtttctcaaagactttaaatgaggagataggaagagcctcgtcagctacttatgaaaatttttgttgcgtcaagcataaggtaaccattgagacaagcaacattgggaactacttttatcatttcatcaagactttacaagaaggtttggatgacgtgaaggtgaagtcctacgacgactatggtggtcttttttggctctgtgatcgctgcacatatggaaacacttggttccataaagagtgtttgatgtgcagtgatcctactgcgtctaagatggacgagctaagtgattga

SEQ ID NO: 189685 - DNA, 828 bp, Arabidopsis thaliana landsberg
gtacagttgagaccattgaatctgaggaagaagggactcgtcacttcatggtgaatgtcattgagccacagtttaatcttcactcagaagaagctaatgtaagtaattattgccgcgtaagaatgcacgtttaacacctattacttattttagagcgttgtaacactataagtcttggctgaataagtttaccttacttgcattcaaactttagactagtcatatattcaagcagtgtgcagaaaagaatatatcatttaggtgtagaaaagaattcgagcagaaaaaaatatattactggaatctcttactattaaaaaaatatatattcgagctgcatgatgatattattaaccaacagaattatttttgttattgtctttggtgtagaaaagatttttctgactggttaataaacctctctttgatcaataccagggtcgctttctgcttgctgctgttagcggtcgtgtcctagcacgatcgtttcattccattatgcgtgttggtgtggaagtgattgagcaggctcttggcactggaagtgttaaaattccagaatgtagtcctgaaatgacatggacacggatggaagtttcggtaatgttagagcatgtgcaagcccatgttgctcccactgatgttgacccaggtgctggattgcagtggctcccaaaaattcgcagaaactccccaaaagtgaagcgtactggggctctacttgaaagagttttcatgccttgtgacatgtattttcggtatactagacacaaaggtggaactcctgatctaaaggtaacaccattccttctgcatctgctcgcatga

SEQ ID NO: 189686 - DNA, 245 bp, Arabidopsis thaliana landsberg
tgaccttcaacctcttttcttatgccctcgatcacgacgtcgaaaaatcaagtcgtattcagacacttatccgcttaattcttcccccgagtacgtcctttctacaacgacgacctctcatgatcatcatgtactccctttgttttggtgcaacaataaagaatttgatgctgatggtggatgctacatatgcgaaggctcaaattccggcaccgactattatttctgcaactattgtagcataa

SEQ ID NO: 189687 - DNA, 268 bp, Arabidopsis thaliana landsberg
atgagtgtaattcctggattagtggctggatttaatcaaaatatgcaacagtctcctaaggtcagtttcatttccatcaatcaaagagcccaaaagtcaaaaataagctaaattatatggttaatatatcttattaaatttcatggactaaatatagaaattagagtatatatgtatatgtttgttgttgtaggccgagttcaagaaatctgagaataatagatctaagtcagtgtcagagatgaatactaataatgtcgacgatgag

SEQ ID NO: 189688 - DNA, 898 bp, Arabidopsis thaliana landsberg
agaaatctccggctgaaatggcagattcgacggcggacgagtcaacaaacgctgatactctgtggcgggagttacacaaggtactgccggagatttggtacgacggaggaggcaaagatcactgtgagattgatgaggctattagaatcctgacttgtctgaggaaaatagaatcgaagaatccggaatctgatatatctccggtggaagttccaaaagagtttatatgtacactctcgaacaagatcatgatcgaacctatgctcatcgcttctggccaggtttgatctcttgtgattcttgcttcagttttcgatattccatttattcgtatgagcatataaagttccatttaaagtttcagtatcaaagaaaaagaaagatccatatatatgattctggtgtgttcatttatgtgttatgcaaatacagatagttaggatccaagacacagattctctggtttttatatatgctgattttactcttttgtttttcgttcagacttttgaaaagagctatatcctagagtggctgaagcatgaacgtacatgccctagaaccaaacaagtcctttaccaccgttttatgataccaaaccatttgatcaacgaggttattaaggaatggtgtcgaattcacaactttgatcggccaaaaacatcagatgaagtcattgacctgttcactggtgaccttgaatcattgcttcagcgtatttcctgtcctacctcggttgaagatcagacagaagctgcaaaagagctttccctcaaggccaagagattttccagtgtttgtgtttactttgtcgccaaaatccctgattccatcaccaggttgctcactccgctctctattttggaggactcgaatcctcgagtttctagagaacatc

SEQ ID NO: 189689 - DNA, 1063 bp, Arabidopsis thaliana landsberg
atgggttgttgttcatcagattgcttcgtctacttcatcctctccattgctttagctttcatggccatctccaccactctacgttcacctccggattccgaacccacaatacccattgctttttcttcctcttcgccttctctctctttaaacgcctcaaacactctacggcaatctaatttcaaagcaatagccactcttctcctcatctcccctgagatcttcctctcttcttctcccaacacaaccctctttgccatcgaagatgcttccttcttcaacacgtcatcgcttcatcctttgtttctcaagcagcttcttcactatcacacactccctcttatgctttcgatggatgaccttctcaagaagcctcaaggaacctgtctcccaacgcttctccaccacaagagtgtccaaatatccactgttaattaagaatcaagaacagctgaagtcaatgcatgtgcgtatcacacaccccgacatgtttcttggagattcattggtcattcacggagttattggaccattctctcctctgcaacctcacagtgatcatcttatccacacacctttatgtcaatctgatacaacaaacaaaaccagtaacaacgaagaagttccagttagcatagactggactcggattgttcagcttctaagttcaaatgggtttgtgccatttgcaattggattacactctgttctcaacaggattgtgaacgatcataatcatcacaagaacttgaccggtgtaacgattctagctacaccgaatctggtctcattgtcatctgcttctccgtttttgtatgaagttgtgagacatcacattcttgttcaacggcttacatacaaagattttgcttcaatgtctgataaagccacagtgaagacattggatccttaccaagatcttacaatcacgagaagaaatgttaattcgtctggaggagatttcatgatttctggagttgagattgtagatccagatatgttctcttcttccaactttgtaattcatggaatatcacacactctagagatcccacatgtataa

SEQ ID NO: 189690 - DNA, 184 bp, Arabidopsis thaliana landsberg
atgactcaaaagacctatccctccgccctcacaaccgacattgagaaccctcggttgaggttcctcaacaagatcaaggcgggtgaataccccctgatgacctttgtggccatcccctctgtccgccaagcccagatcgttgccctgaccggcctcgacggtgtcattctcgactgtgaacatg

SEQ ID NO: 189691 - DNA, 200 bp, Arabidopsis thaliana landsberg
agttcacggggagttctaagagcccagagcttgagattgacatcgaacttgctttcatcaaacatggtgctaacggtgtcgttttacaatgtttgaataccagaaagagaaaatgtgaagaaatcggcggaagaagaagaatgaaccacccagaccgtggcgtcagtgaagacgttagtcgtgctctctcggtattttag

SEQ ID NO: 189692 - DNA, 246 bp, Arabidopsis thaliana landsberg
  unsure (1)..(246): unsure at all n locations
tggttagcgatgaagagaagccgcatgatcttcgtgcggcctttgtagagagccgcgtaggcctcgatgtcgagcggttcgccacttatgataggtcttcgattagannnnnnnnnnnnnnnnnnnnnnnnnnnnnnnnncatcggtccactcgcttcttcgtctcgctccattgattcgtttgggattagggtttctagctttgggatttcagtgtttgttcttcgtttcgtcttcagaccttaa

SEQ ID NO: 189693 - DNA, 526 bp, Arabidopsis thaliana landsberg
  unsure (1)..(526): unsure at all n locations
cggctcctctcccgcttctaacggtaccacaaccgcttctaacgccgcagcaaacgctttagcctcggagattggtcaaggagatggtaatttcttggaacaaatgaaacgaatatgtgaaatcgctcagccaaaggtgcgtgtacacaccgagtgtatagctatagatggcgtcaaagctacagcgattcttcttcatggtgacaagcttggtgttgatgttataatcataggccaacgccggacaatctcatcctctcttctagggtatgtgttctcataactcgttnnnnnnnnnnnnnnnnnnnnnnnnnnnnnnnnnnnnnnnnnnnnntttcggatggtttttggatttgacagaactagcaggcctggagggtcactaagaggttcaaaaggagtagacacagcggaatatctaatcgagatcagtaaatgcacttgtgttggtgtaacgaagaaaggtcaaaatggaggatatgttttaaacacaaagacacataagaacttctggctcttggcatga

SEQ ID NO: 189694 - DNA, 711 bp, Arabidopsis thaliana landsberg
atggagaccaagcacctacgcaagcttctccagctctaccaagcttgtggtggcgaacaagagctcacaaaaaccgtccaaaacgtcacatcatcaccattgactccaacgccaccaccacagccaccttcggcattagactccactatggctctcaccatctttatcctcttggctgctctcttcttcatgggtttcttttcagtttacttccgccacttcgcagacagttcaagttcaacggttgatatttcttccatgccaagaacaagatcctctaggatgtctccacgtcgcctttccacatccggcgtcgtatcacggccgtatagtttccggaggggtcttgattctcaggtaaatccatttctttaattatctttctcggttcttatgttaaccggcaagattgggacatttcaggccgttcgatctctgccagtgtaccgttacacgaaagcagcgaagcagcggaacgaagattgcgttatctgcttgagcgatttcgaagaaggtgaaacagttaaagtgataccacattgtggtcacgtgttccacgtagattgcgttgacacgtggctgagctcatacgtaacatgtcccttgtgccggagtaaccagctgttctcggataaggacttgggcatgcaagaaccgcctgatcaggactcggcagaagaacatgacacgtgtgatggtgtggacacttgt

SEQ ID NO: 189695 - DNA, 494 bp, Arabidopsis thaliana landsberg
atgattatgaagtttgttttcggaatatggaagtcatcccctgagttgcgtaagcgcgagtaagctgcaccggcttgagccaccactgactttagccgatagctccgttagtagggtatagtggtcaccctgggttaagtaagcgtgagcatgttgcaccgccttaagtcgttgccgacttaagtcgattgctccgtttgtagggcatagtggtcaccccgagttaagtaagcgtgagcatgttgcaccgccttaagtcgttgccgacttaagtcgattgctccgtttgtagggcatagtggtcaccccgagttaagtaagcgtgagcatgttgcaccgccttaagtcgttgccgacttaagtcgattgctccgtttgtagggcatagtggtcaccccgagttaagtaagcgtgagcatgttgcaccgccttaagtcgttgccgacttaagtcgattgctccgtttgtagggcatagtggtcaccccgagttaa

SEQ ID NO: 189696 - DNA, 342 bp, Arabidopsis thaliana landsberg
atgattaggtttaatgttagggttgagtttgtaggagaaaaagaagaagaggatgatgtgaagaagtggattgtgagaagtagagagaaatttagtggtaaggttatggaagagatctttgatgctgttgttgttgctactggtcattactctcaccctagattgccctctattaaaggtatattattgttcatattattttcgcatttaatcatgttatgtgtatctatggttattgatttgttttttcatgtttctttgatggttataggaatggattcttggaaaaggaagcaaattcatagccatgtttacagggtgcctgatccatttcgtaatgag

SEQ ID NO: 189697 - DNA, 305 bp, Arabidopsis thaliana landsberg
agaagcatgtgttagtgcaaaagaagaggacaaagtttcttgttgcctttgttttacttatgtctctaatgctacgccaaggcttcttgatccttttgacatataccaacaatttgagatacatcaaagaggctcatcaactcgcaagtttttcgctacatctgttgcttcagatggaataccacctcggttcctgaggagaaaaggctggaccgttcctttctctgcttcccaagactatggtttgattgatgatgcaaagggtgtagttgatgcaaagctgcgctatgagcttcccgatttcg

SEQ ID NO: 189698 - DNA, 1045 bp, Arabidopsis thaliana landsberg
aatcatcaaatggaaccgtgtgaattatctgccaacactgtgatagctcatcctcgagctctcaccgataagatgactctaattcgtgacgcgggtccttccaaattccaggtctttcccactcctatctccgaagtttttttttttctcaatgcttaaactttgtgctgtgttggtctatcctgcgaattttgtaaaggtaattgcagatttcgatgcgactttaacgagataccgagtcaatggacttcgaggaaggcagagtatgtttcatttgatcaattatattcttctcttctcactaaaccaaatgcaatcaaagttgaaacctttatatatagccagtcatggcctcttgcagcaaggagacgcatattacgatgctaagaggcaagccttatatgatcactatcatcctcttgagatttctcctgtgattcccattgatgagaaaaccaaactcatggaagaatggtatatactcctcttcttatcaatcacatttggcttgtcttttgatactctagtttggacaaacaagtgataaactttttgttgttgtgaatgatgaggtggggtaaaactcatgagcttctcattgagggaggtttgacatatgacgcaatcaagaaatctgttgcgaattcttccatagcttttagagaaggtgtgtctgaacttttcgaatttttggaggtaaataaatggaattcaatcatgttttgtagagttatactttaatggtgaggaacaactattagtatcttaatccaccttatttgcaatctgtttcagaaaaaggagatccctgttctgattttttcagcaggacttgctgatgtcattgaagaggtgactctaaagagtattagtttattagagttactctcctacttctgctgcctctataatgaatatgcttttgttgcatactcacattcttaccaggttttgaggcagaaccttgatagaactttcaagaatgttaagattgtatctaacaggatggtgttcaatgatgatggacagctcgtgtctttcaaag

SEQ ID NO: 189699 - DNA, 262 bp, Arabidopsis thaliana landsberg
tcgcatcatcgacagcttcctgtcgttccccgccattgtgctggccattgcggtcaccggcgcgctcggtatcgggctgaccaacggtatgatctcggtcggtattgtgttcgcgccgcagcttgcgcggctggtgcgtgcgcgcacgctggtggtgcgccacgaactgtacgtcgatagtgcgcgctgctttggcgcctcgacgagccgcatcctgtggcgccatgtgttgcccaataccatccagccggtgatcgtgcag

SEQ ID NO: 189700 - DNA, 244 bp, Arabidopsis thaliana landsberg
gtcgaaagccaatcaaaaaggacttgcaccgctttatatgcgtatcactataggcggcgcaaaaacagaggtagctacagggctacaactattagccaagtcatggaacgcaaaatccggctcaatacggggcgcaaccaatgaggctaaagaaatgaacaggcggctcgatatactcaaagcagccgccttaaaagcgtatcactgggtgattgagcagcaactacctatcacacctaaacag

SEQ ID NO: 189701 - DNA, 281 bp, Arabidopsis thaliana landsberg
tagcacgctggctggtgccggatgaagacgtatacggacgtggacgctgctgcccgtggcccactttgcccacctttacctctactatttgctggtgctaccttaccttacctccaaacctacctgcgaagcagcagagtgcgtggatcgtgaatctacaaccccctcaaaagtccatcactagagggtcaccaagacatcgagacggcgatcgtccattgcccgcgatatctttatcgtcgccctatatcggccgacgagcccccggactgaggccccag

SEQ ID NO: 189702 - DNA, 517 bp, Arabidopsis thaliana landsberg
aatcaaataatccatcataaagagaaacgcgacaaaacaagctatgaacgaagaacacatcctaccaaactcctaggttacgggaacatttcaacaaacctcatcgagatccacaagatccacgatatagcaaccaaaatctacactcgatcacagcgtaaaacttacaacaaacgccaaatacaatcacatctcagaaacagaaaaagcgagagaaaacccaccacattccctagggcaacgacgttgagagaagtagctggccgtctagaagaagaggtctcatcgggatcttcgtcagcgagcagagacgccgcttgtctcatcgaatccgaaagctgagacaactcatcgatcgcctccatcgtaacttgcacagcgaatcgaggtcgaatgaagtacgagatctggacgaagaaagggagccgctagatccgattagaatcaatatcggtagccacgagcggtggatttttccggcaattgggttaccggaatttcgaattcggtcgcgacg

SEQ ID NO: 189703 - DNA, 83 bp, Arabidopsis thaliana landsberg
atgagagattctcgagcaatggagagtgaatcatcagaaattgcagacctgatccagattgcaaaatggcatcagatgctgag

SEQ ID NO: 189704 - DNA, 1459 bp, Arabidopsis thaliana landsberg
  unsure (1)..(1459): unsure at all n locations
atggacttgccgatgagatctttgaacatcctgttcactaagcgttggtaagttgcacccgcattttttaacccgaaaggcattactttgtagctatacgtccctcgtttggtgataatagatgttttttcctggtcatccggattcatcataatttgattatacccagaaaatgnnnnnnnnnnnnnnnnnnnnnnnnnnnnnnnnnnnnnnnntacgagtagttcgatgtggagaagtgggaagcagtcctttgggcatgctttgttgaggtcagtgaattgaacacaaacacgccatttgccattctttttcttaaccactacggaatttgagagccagtcggggtatttgacttcgcgaattaaacctgcctcgaaaagtctaataacttcggcatttactgcttcttcgcgatctgggccaacctttcgacgtttttgtttgactagtttaaaggttggatctacgttcagctcgtgcgagatcacctttgtactattttggtcatttccccgacagtctaggcgaaagtgcttttatttttctcgagaaattggattagtttacttcggaaattttcgcctaggttggccccgatgctaacaggttgatctggatgctgaatgttgataaccactttttccacgagggtatctccgactattttgatcgggttcagagctgcctcaagctgtggttgctatttgattttgagcttgtgcccaatcatgtagcacatcctcgaagtgcgctgactcccaagaatttgcttaactccaattggatttgggaatttgacgcattgatgataagttgatgggactgccttcatttcgtagagccacggagtcctgagaatcatgttgtatgcaattggatggtcgaaaacggtgaatttgatcatcttaacaactccttgtgcagtgacggggagcgttattgtgccaagtcacatcgaagtcttgcttgtgaaggagacaagtgggcttggggcacctcttatatcattcttcaaaatccccattcgcacgagggtatcgagaaaaatcaggtccactgaacttccggtatcgatgagtaccctttgtgcttcgcagttcgctatatccaacataattacaaggacatcatcgtgagctttgttcaagtcactggtctcttcctcggaaaagataatttcgggcctgtcagcttggcttgcttttgtatttttcgctacctttccactcgtgctgcttactcgaactaatagagtaacgagaaagtttcgatcctcccataatcactttgaccattttcttagggcctttggaggtttcggaagtggattcactcttctgcttcatatgctgcttgtgcctgctcgattgttgtgacattgacttcgggaatttcccctgatgcgtacttggcagccaaaagtcttcccagagctttgcaatccttggtggcgtga

SEQ ID NO: 189705 - DNA, 148 bp, Arabidopsis thaliana landsberg
aatttttggacctggacagacgattgcaacccatggtcgacaaatgcttccacccgttcgacaattgctttggctgttcggccattcctcggacctgatagattctaatcgacgatttgcactcctgctggacaaattctttgacccg

SEQ ID NO: 189706 - DNA, 960 bp, Arabidopsis thaliana landsberg
atgggtctttgttggggatctccatctgattctcctccaacaacaacaccttcctctactggtaacatcagttcaggtttgtcctctctatatctacggaatttcccatctgagtttggcttaaacttgcgtgatacgttgcgagttctgtacttggttgtttgatgcataaaggttatgcttttacatctttgtgtatcgtttgtgactcttcttttggtgttatctcgtatgggttctatgaaagttttgaccttttgattaaaagactctgttcttcttgtgtttttgttgaatcagattcattatcatacttaatgctgtttgtgatctgttatgtgactctctgttttgggcttgactttgttttcttgtggttgtaattgaagtagggacttttaagtcatcaaacaacacgacgactacaggaacatcaaggggaagtaacatatctagcaaaagtgggttctctgtggcaagtggtgaagatgcttaccccgatggtcagatacttcccattccgaatttgaggatattcagcttagcagaacttagagcttcaacaaggaatttcaggtctgagaatgttcttggagagggaggatttgggaaagtctttaaaggctggcttgaagacaagactccagggaaacaaagcaacggaactgtgattgctgttaagaaactgaatgcagaaagcttccaaggattcgaagaatggcaagtgagtaaagtgaacaatgggaaactagttttctaactttgatatacaaagtgaagttttgtttgctgagtggatagattctttgttggttgttgtgcagtgtgaagtgaattttcttgggagggtttctcatccaaacctcgtgaagctgttgggatactgcttggaaggtgaagagttgcttcttgtgtatgagtatatgcaaaaagggagcttagagaatcatctcttccgaa

SEQ ID NO: 189707 - DNA, 251 bp, Arabidopsis thaliana landsberg
tcttcttcaattatgaagatgttgatcatgtgacagccatgctcgcaaaaagtaacttggatgttagacttgggttgaaaatcttagccaataaatatctcatacacatagatcacgaccgtgaaagtacagtggtaatgcatcggttgctacaagtaatggctgaacaagtcatttctaaacaagagccatggaagcgccagattctagtagatcctcgggagatttcttatgtcttagaaaatgaagtg

SEQ ID NO: 189708 - DNA, 2673 bp, Arabidopsis thaliana landsberg
atggaacccactgattctactaacgagcaactcggagacactaagaccgccgctgacaaggaagagagtcgctcctttctcggcatcgatctcaacgaaatccctaccggcgctactctcggcggtggttgcaccgctggtcaggatgacgacggcgaatatgaacctgttgaagttgttaggtcaattcacgataacccggacccagcccctggagcccctgccgaggttcctgaaccggatcgggatgctacgtgcggagcctgtggaagacctgactatatagagctcgttgatacctgcgatgcctgtgagcgaggctgtcatatgaaaagagtcaacaacagagctggggcaagtacttccggcgattggatgtacaccgactgacgaactggccgggaaaaggacttaactgtgaacattgggggttaagaccaagctcattctggacatgaacgcctcgccgcccagtgatgctgagggatacggagctgaggagacgtctgattcgaggtacgttcccctgcttctggtattcgacgatgcgttagggttttataagaattgaatttgggttgagatcgagaacatagttgcaagacttggttaagctgtctttacatgtattgcgagtaatgtattcgattttaaagcgataaactattgaagattaagctggactaggatttggtgttgttgaatttaagtttcagtataagttgagcgttctgtgctaccgttcgttggagtttttaaggagcctttgatcttctcttatgaattacttatacatacgatatattttcaatcagttgtttagactttatttgattggacttgtctggccttatataacatgagtatgtctgagaaaacacatagccgaaattgtaaagcactgatggatcatgtggttgcttgtttcttcttctccagaaagcatatgctcgccagcagctcttgcattggaaactcttttgattatgcaatgatgcattcaagcttctcaagtctcggtagaggacatgctagtctcgaagcttcagggttaatgtctcgtaatactaaaatgagtatggatgcattgggttcacataatctaggttttggattcccattaaacttgaacaatagtagtttgcccatgagatttccatccttggatccaagtgagttgtttctgcaaaatctcaggcatttcatatctgaaaggcatggagtattggaagatggctggcgtgtcgaattcagacaacctttaaatggttatcagttatgtgcagtgtattgtgctccgaatggaaaaacatttagttcaatacaagaagttgcttgttatctgggcttggcaattaatggtaactacagctgtatggatgctgaaatcaggaatgagaattctcttcttcaagaaagattgcatacgcccaagagaagaaagacatcaagatggccaaacaataaattccctgagcaaaagggtagttcagtgagtgctcaactcaggcgttttccattcaatggtcagaccatgtctcctttcgccgttaaatctggtactcattttcaggctggtggttctcttagctctggaaataatggatgcggttgtgaggaagctaaggtaagcgtaaaattgaaatctctcctgattgattgttttttccaatatttttgtaattcttaccctcatgtttgtgtatttgattttcagaatggatgtccgatgcagtttgaagatttctttgttctgtcgcttggacgaattgacataagacagtcttaccataatgtcaacgtgatttatccaataggatataagtcctgctggcatgacaagatcacggggtcactatttacatgtgaagtatctgatggcaattctggtcccattttcaaggttacacggtcaccatgctcgaaatcatttattccagctggatcaactgtcttctcctgcccaaagattgatgaaatggtggaacagaacagtgacaaacttagtaatcgtagagatagtactcaagagcgtgatgatgacgctagtgttgagatccttctttcggaacactgcccacctcttggagatgatatattgtcttgtttacgtgagaagagtttctccaagacagtcaattccctgcgctcagaggttgattcttctcgagtagattttgataaaaatttatcctatgatcaggaccatggggttgaaattggtgacattgttgtggaagaagattcattgtctgatgcatggaaaaaagtgtctcaaaaacttgttgatgcatgttcaattgtactgaagcagaagggtaccctgaatttcctatgtaagcatgttgacagagaaacaagtgaaatcaactgggataccatgaatgagaaagacaatgtaattttatcgttgtcaaaattttgctgttcgttggctccttgcagtgtcacgtgtggtgaaaaggataaaagcgaatttgcagcagtagttgatgctttgtcaaggtggctcgatcaaaacagatttggacttgatgcagattttgtacaggaaatgattgaacatatgcctggtgccgaatcatgtacgaattataggactctgaagagtagaagttcttcttctgttcctataactgtagcggaaggagcgctaagtggtcaaacccaaag

SEQ ID NO: 189709 - DNA, 517 bp, Arabidopsis thaliana landsberg
gtctttgaacgataaccttctctctgaagagctacccgacgtgtttcaaaaccttgtcgggctgattaatctgtatgcttcttcttgtttgtagttttgttaacagttattgtttctatggattgttttgtgatttgatatctttgtgcagtgatatatcatctaacaatataagcggcacattgcctccttctatggagaatttattaactcttacaacattgtaagttttgatcattacaatgttgaatctcttttggcttctttcttcacaaagctgatagtctgagttttgcagacgtgttcagaacaatcagctctcaggaactctggacgttcttcaaggccttcctcttcaagacttgtatgtttctttctctcacaaagtataagtacttaagcagtgagtaacttttccaaaatcttagtttttgttgtcttcttgaaacagaaacatagagaataacctcttctctggacccataccggacaaattactaagcattccgaaattcct

SEQ ID NO: 189710 - DNA, 168 bp, Arabidopsis thaliana landsberg
tcaaacatctctccccggtaattggtcgcttcgtatcactgagcccgtcggggatccccttgatcagcgatggggatgccaatgagggtgtccaggacgtcccatttttctcagccgataggtcgggtcctatggatatcggcgatactacagtggctaaagcgtccg

SEQ ID NO: 189711 - DNA, 142 bp, Arabidopsis thaliana landsberg
ccgtggggtgcctcgggcggggtttgtggctgtttctttgtcgcaccttcgttgccgcctgtggcggcctgtccggggctcctcctgttccgggggtgttggtgcttgttgtgtctttggctgtgtccccggttcccgcccg

SEQ ID NO: 189712 - DNA, 65 bp, Arabidopsis thaliana landsberg
atgtttggccttcgtctgctgacagccaagcccctgcgaaaccccacccctggcctgtgcaaaag

SEQ ID NO: 189713 - DNA, 49 bp, Arabidopsis thaliana landsberg
atggccctcttaactcctatctacgggttttcagtagcatcggattatg

SEQ ID NO: 189714 - DNA, 157 bp, Arabidopsis thaliana landsberg
gggcgaaccaaccttggcagagcgagccgcatacaccaagccccatcaacggcacgactgcgaagcaaactacaccccagttcctctaattactcagctaagggcgttccactccaccctcatggttgcactgtttttccgggcggtcatccaataa

SEQ ID NO: 189715 - DNA, 111 bp, Arabidopsis thaliana landsberg
agccgacatttggtgtcggcaacgccaatatattattgaagaagttgaaggaagactcatgttgtgtagcttcagagaatgatgccaaaaatacgagaactagacagaccc

SEQ ID NO: 189716 - DNA, 424 bp, Arabidopsis thaliana landsberg
atggaagagtctagggctcacagagattggcagtatttggcagacttggaagaaggatatttgaaacagaagtcaaagcttcacttgatgaatgtaggagaccacaataactcctattttcaaaaggctgcacaggtacgaaaaatgcaaaactcaattcgagaacttcatggcccgactggagaagtactaaagacgagtgaagaaattaaagtagaggctgagaggttctttaaggagtttcttaacaccttgcctagtgatttcgaaagtatgacagtggaagatctgagggttctcatgccatttagatgtttagaatcagatcaagcgatgctcacgcagtcagtcacaggggaggaaattcagaaggtcctgtttgcgatgccaagtaacaaggctcctggacctgatggctatacaa

SEQ ID NO: 189717 - DNA, 171 bp, Arabidopsis thaliana landsberg
gggtcttgtctcaatttcgtcgatgctccaaaaagctgcggcacgataccaagacgcaccggaaccaacccaagacgcaccggaaccgacccaaggcacaccggaaccgacccaaggtgcaccggaaccgacccaaggcgcaccggaatcgaccgagacaaccactgagag

SEQ ID NO: 189718 - DNA, 422 bp, Arabidopsis thaliana landsberg
atgccgttgcagatcggcgcgcccgacgttgcgtttccgcggctcaatgcgctctcctactggctctacctgctgggcggcatcgaggtgctgtccggcttcctgacgcccgacggggccgcggcgttcggctggttcgcgtactccccgctgagcggcactcagtattcgcccgagatcggcgggaatctgtggaccatgggactgatcatgagcgggttcagcacgatcttcgggtcggtcaacttcatcacgacggtcatctgcctgcgtgctcccggcatgacgatgttccggatgccgatcttcacctggaacaccctcatcacctcgctgatggcgttgatcgcgtttcccgtgctcgcctccgcattgttcggcctcgccgccgaccgagtgctgggagcacacgtcttcgacgc

SEQ ID NO: 189719 - DNA, 102 bp, Arabidopsis thaliana landsberg
aaatcacagaaacaccagaccctaaagccaacgattaacgccgctctgaaatttctcgtcttctcttctaatgatctgaaatctcttggatctgcttggtga

SEQ ID NO: 189720 - DNA, 256 bp, Arabidopsis thaliana landsberg
atggatttgccacaatgggtagcttcgattgtgaaagaagagtggactaatgaagtttttgatttggagctgatgagagagacacaaagcgttggtgatgagcttttgaatactttgaaattggctttacattgtgttgatccgtcgccggcggcgaggccagaagctaatcaggtggtggagcagttggaggagattaggccggagactgaagtggagacggagacgacgccgtttggatctggtggtgaaggag

SEQ ID NO: 189721 - DNA, 1082 bp, Arabidopsis thaliana landsberg
cttattaaacaacatcataagtctattgtgtgaacatcgagagcttagtggaattcgacccttaagtgctaacgacgatctcttaattgagggagtaagcttaaggcaatttgagctatatcaaatttggcgccgttgccgaagttctctttgattcaccattagactaggtgtagaatttagactaagcttttatttttctttattttgttactcacgcgttttctttcttctttttcctgtgatagggtaattacaagatggaacgcaacaaactgcaggcagatttcgccgagtgcgtcgaccgacaccaacagggtgtcgatcgacaccttctgcataacaaaccagctaccataggcgacttcaacaacgctgatcttttctactccaatcgatcagcgatccaactacctccttttgcaagagaacactttgctattcaccctgcatactatactcttgtttcacgcggaaagttttgaggacattctaatgaatccccactagatcatctagaagtctttgaagacttagtgtcctcaatcaaagcagatggtgtacaagctgattatcttctttgcaaactcttcccacactctctcgcgggcagaggaacatcatggttgtgacaaatagaagcaggttcattgaaaaattggactgacacaaagaacgcattcatgatccacttccttgatgattcagtgacaaaattactaagggagaagatctcttcgttttctcaagctccaacagaaggtttgaaggtagcttggatcagattcaaatcctatcagagggattgtccacaacatggtttctaggaaagcaaactaatcaacatattctttcgtggaatcgataagcagtatcggttatgttttgatgatgcaagtaatggcaatttcatgacaaagactccaactgaagcatcagttcttgtcaacaacgctgtcacaagtctctccacaaaggaaatagactatgatcgaagaaaatttgctgaggcttccgacaatcacagagaggaacaaggatctacacgcattgcttctccacctaggaaagatcgtggttga

SEQ ID NO: 189722 - DNA, 334 bp, Arabidopsis thaliana landsberg
atgaaaatgaaagcaacaataacgtcattctcaatcaatcatcaatcacaatacacaacaacaacaagtcgccatcgatgcacattggataatcgagggaaacagatccgaagtaggtgaaagattattagaaaacgaaccggtgagaatcggtttagagatctggagaagaaaaagctagattccagctccgtcgacaacccccgaaatcttcagcagtgttgttgcgatatggagagagagagagatggatctcctccgtagattgatgatggctcgagctgggccgatttgccggatacgccgtacgcggcttattatgtccgttacataa

SEQ ID NO: 189723 - DNA, 699 bp, Arabidopsis thaliana landsberg
atgaatcctgacagcatccactctccactgtttcttcataacgccgaccacccagggatatcgattgtctctgagcagctagacggctcaaactacaaccagtggagctccgcgatgaagatagccctggatgcgaagaataaaatcgcctttgttgatggatcttgccctcgtcctgaagaaggtaaccatctctctcgaatctggtctaggtgtaatagtatggtcaagtcctagatccttaactcagtcaatagggaaatctatggtagtattttgtcttttgatgatgctgctcaagtctggaatgatctgcacaatcgtttccatatgacaaacctgcctagaacctttcagcttgttcaacaaatccaggatctccgccaaggttctatgaacctttcaacctactacacaactttgaaaaccctttgggataatctcgatggtgcagaggctagtgaaccctgccagtgttgtaagaaatcgaactgcgatggtcaacttgctgctaaatccaaagtgaacagaggacggattatcaagttccttgctggtctgaatgagaagtactcaatcattcggggacatataatgatgaagaaacctctccctgacttagcagaagtttacaacatcttggatcaagatgatagccagagacagttcagtcacaatgtcccttcagctgtctttcag

SEQ ID NO: 189724 - DNA, 383 bp, Arabidopsis thaliana landsberg
atgtccaatggtttcaagtaccagtgtgggtatggggtgttagatgttctgtgctgttcagtttcggagccgtttgtccatccaagccaccctgatcatcctttgtattacattcgacaagtgaaatatagacaatgctatggttgcaacggtcgaacgtataatgtgctgacgtgcattgaaagttgttgtggatttgtcttatgcttctgttgtgccacattaccacaagtggtaatgcatagagtagacgatcatcctctctcactatgctatggcgaaaaggcaagtggcaaatactggtgtgacatttgtgagaaagaattgaatccaagtacatggttctacacatctaaagatcgccgagctagtttgcatacaaa

SEQ ID NO: 189725 - DNA, 604 bp, Arabidopsis thaliana landsberg
atgaagttgcacttgcaaagaacttttctagctgaaatgttagccaaaaaagacataaagatagatcagataggtgcaatcgaaaagatgctaaagaaccagaaagttcttatctttgttgatgatttagatgaccaagatgtgctagatgccttagtgggtcaaactcaatggtttggaagtgggagtagaatcatagtggttacaaagaataagcattttttaagggctcatgggattgatcacatttacaaagtcggtgtcccatctgaagacatcgctcttgagatgttttgtcggtatgcttttaggaagaaatctccacctgatggttttatggagctttcttctgaagttgcattgcttgctggcaatcttcctttgggtcttaacgttttaggttcatatctacggggtagggacaaagaggaatgggtagatgtgatgccgaggcttcaaaatgatttggatgggaaaattgagaagacactaagagtctgttatgatggattagataacagaaaagatgaagcattatttcgtcacattgcatgtcttttcgatggtgagaaagtaaatgacattaaactgctactagctgata

SEQ ID NO: 189726 - DNA, 367 bp, Arabidopsis thaliana landsberg
atctttgcaaaaactctcctccaagtatggacctctcctctatcttcacgtcttcaatgttcccatactccttgtctcctctccctcaatagcctatgagatctttagggcacaagacgtaaacgtttccactcgcgacttccctacgaatgaggggtctctcttcctcggatcatttagcttcattaccgcaccttacggagaatactggaagttcatgaagaagctcatcgtcacaaagctcctcgggcctcaagcactcgagaggtcacaacgcatccgtgcaaatgaagtagagaggttttactcaaacctattagataaggcgatgaagaagaaagtgttgagattgctgatgaagctatga

SEQ ID NO: 189727 - DNA, 72 bp, Arabidopsis thaliana landsberg
atggacactatggtcaccaccatggtcatggctatggctacgggtatcacggtcacgggaagttcaaacacg

SEQ ID NO: 189728 - DNA, 502 bp, Arabidopsis thaliana landsberg
atggctcgtatggtggccgactggcaggcccagaatgatggcctgaagaacgcgttcgcgccctacgccatctcgcgcagcaccgacggccaactgatcgcaggcaccgcggttctaagcaagcccgccctctatcgtcgcctcgcgacggccgctgccgtgggtttcatcttcatggtcggtggccttttcggacatttcgcacccatgctcatcgaaaagccgtcgacagaaggtgaggggctggcgcaggaggcacgcaacgcctacctcatctacgccagcgaggtgcgccatccggtcgaggtctttgccgaccaggaggcgcatctggcaagctggctcggcaagcgcctttcgattgccgatcttcgcattccgaacctccattcgatcggcttcaggctgattggcgggcgtcttctgccggtggccgacaagccaggtgcgttgttcatgtatgaagacaagacgggccggcgcgtgacggtcctggtcggac

SEQ ID NO: 189729 - DNA, 393 bp, Arabidopsis thaliana landsberg
gaaaccttcttccaactctacaacatgatcccaatccctgtaagccttagcttcctcctccatcagagctgaagaaggattaacaagggtggccaactgcttatcacaaagaattttatgagcctcctctaccctgtgtgagtttagctaggaaatgctattcatgagatacgttgtccgaatggttccatagctacatcgcaagaagacattaagtccgaagctgtaaggttttttgaggatttcatgactcgtaaacaggtggactttgaggatattcccaaggatcaaattggagacttgttggagtttcggtgctctgtttcagaacatgatgatttggtgaatcagttttcagaggaggagatccaagcggtcctattaagatggcgg

SEQ ID NO: 189730 - DNA, 748 bp, Arabidopsis thaliana landsberg
atggatagagaaggatctgatcaacctcagagaaactcgtcacctaccttggagaagaatttgagcacactttcaaatgattctctgtttagtctcagcataggtgataacacgatagcaagagatgagttgtttagttaccgtgatttcaagtctggagagataacaaaatcgggagagctgttatcgttctgccctgctattcatggtccggctgattcttctgatttaggaaagagctttgatatggaggacaaagcgagtggagaatgtgaggataagtcctcaaactcaaatatatcgtggaggaacattggagattgcaataactcagacgaaacaccaagcagcacacagtcattttcatatccaatgtgagcttcgttactttataccatcatctcattgtagtagtcttcaaaaactttatttttgattaattgttgttttcatgaagaacgaaaaagaagaagaagaaaaagaaagcaacaaagaagaagatgacacagcagcagcaacagcagaagcagaagaagcgatgttcttggttgtgttgcaagaacactggaccttgtttctcctgctgcagattgccaagttgtggttacaacttcttttgctgcaaacggttaaaatgttgcccgtgcttctcctggtgcagatggccaagttgtgattacaattcttcttgtggctggctcttctgctgccattggagctgttggagttgctgttgctgttgttccag

SEQ ID NO: 189731 - DNA, 117 bp, Arabidopsis thaliana landsberg
cttggagttccagctttcacagtgccccaacctgatgaagccatgcgtgtccttgaagagaaagcttccgaaacagaagtacgctcaattttaattaatgagcactatggtcattaa

SEQ ID NO: 189732 - DNA, 458 bp, Arabidopsis thaliana landsberg
gaatccgcaacgttgtggatccacctttgcctgatggatactacagtaatgcatatattgatatgtatgtgccattaaccgcaagagaagtggaagagtttacgatctcagatatcgtaaagctcataaaagaagcgaagaggaatgctcacgataaagattatctccaagaagagcttgcaaacactgaaaaaatcattaagatgaacttaacgatcaaaggaaaaaaagatgggttgttttgtttgactgattggaggaatattgggattttcggatcgatggatttcgggtgggatgagccggtgaatatcgtacccgtggttccattggagacagctaggacggttaatatgttcatgcgaccatctaggctggaatcggatatggtcggaggggttcaaatagtggttccattgccaagagttgcaatggttaagttcaaggaagagatgtaa

SEQ ID NO: 189733 - DNA, 1174 bp, Arabidopsis thaliana landsberg
atgaatgaagcgttggatctttgtgagaagggattaggtacagcaaaaactcgggaagatactacggagttcacggccatgagaatcaaaactctgcgtttcatatcagcagtgcatttgcagaagggagagttcgagaatgtgataaaatgtgtgaaagttctaaggaatggaggaaatggtagtgatggagctgatcaacatgcttcattacctgtgttggcgatgaaggcttggttaggacttgggaggcatagtgaggcagagaaggagctgagaggtatggtgggaaacaatgatattccagaggcagtgtgggtatctgctgtggaagcatattttgaggtggttgggactgctggagcagaaactgcaaagggtgtgttcttaggtctgctgggaaggtgtcatgtcagtgcaaaggcggcacttagagtggctcatcgggtgcttggtgagagtaagggaggtgataatggttcgagaattagggcgaacgttgtggctcagctcgtgtcagatgagagagttgttgctctctttgctagtgaagctgtgactaaggagaggaaggcaatacattctgttctctggaacaggtatgtttttgccattgaactttcatctcccttggttaacattggtgtgtcatatttattgcatcttagttaactgagtgattcagcttggttacagtgattgataggttttgttgttgttttcttgagtgtatgtcttggggatctaatctgggtattttctgctgtttacagtgcttcagatcatttccgtgctaaagattatgagacaagtgcagagatgtttgagaaatcaatgctctatattccacatgatatagaaaatagagttttcagggccaaaggcttcagggttttgtgtctttgctaccttgggcactctcagctggatcgagctcttgaatacatagaagaagctgaaaaggtatacatttatccatggaacttctattttcaacggtcctagttggatctttcaactcagaattgctaactagttttctgtctctgcagcttgagcccaatattgcttgctcctttcttaaggtagactgtcttttcccccacagtacatgcttattcaacatatggtcttcggctacctcgccatatatatgtatctggagattgtttga

SEQ ID NO: 189734 - DNA, 506 bp, Arabidopsis thaliana landsberg
atgaaaagggagttgaggaatgcttcatcgccatatgggttatctgaaagtgaggactcaggagctggagacaataaaacaagagagcgtgcttttgcgagtggtgacttgttcacaactcctaaatcagggtcgctattacttccgacaaggaaaaacaagattcaaaccagtcataaaggaggtggtgcatggaagcaaggaaagagtgaaagtgtctcgtcgttgacaactcctggctttcatcctatcatggttaagtcagagaatttaccagtagagaagccttttcacaatatcaagattgcctcagataagaatagaaggtgatttatacataattagttcttttacttaccacttcttctcaaatacacgaaccaattgttctaacttgtctctctctctggacagcaaatatgggcgtccacctgcaaaaaaagttaaagatcgtaaacctgctactcggcttgcctcaaatgcaaatactccttcagatattacag

SEQ ID NO: 189735 - DNA, 98 bp, Arabidopsis thaliana landsberg
aggatttcaggggagaccagggagctacaattagagaaaaactcaatccaagaacgcctgcaccgatcatatgctgttgtggatgaaatggttacaag

SEQ ID NO: 189736 - DNA, 1014 bp, Arabidopsis thaliana landsberg
gagctaatactcagtgaaacagaacagattaatattcagcaggttggtttggttattaaaaatattatgtttagcttccaaagtctcttagctttttataaatgattttgattagtgttcctctattcacttaatcgaaacatgacttcttcttttttcaaacagggccaagccagttatatgcaaacattgaagagacaagctaaagtagatagcggcaaacgcatgtcaaccaattttgtaattcgaagagaccctacaggtcagtgcatctttcgacctattccttttaaaggaatgagaaaggttcgaaagcatgttgatgatgatgaaggttggtctggtggttccaaacaagtcaaagttagaggacttacttcttcttctggtgatggagatagtctatcttacccatttgaaaatgaaactaccattcgtaacagagaaaaagatcgtttaatgcttgaaatttttgggcctgaaagcacggatgatagtgatgaaagtggcactgaagaagaattcatggagaccaacttaatgtccttggtgagtctgcaatggggaaaacgtgggaaacgcagcatgcgtaagggcacatggaaaagacacatactcgaaaatcatgttggacaacacaaaaatactcaagatgaggtaaaaaactgtctatattgtgaaacattagttcatagtttttccattttgatcggtgttgtttccatgatgcagatgggcattcaagtcttgcttgtttcaatggatgcgtcagtgataccaaatttgcagaatcctcaagtcagctgcaaacctaacgtgacattgaagtcattatgtgaggtatgtttaattttaacctaatccaaaacaaaaacaatgcatgcttatcgatttcatgagtctaattaaaacttttccataatacagatgtacgttgctccttacgttgaggcacaagctgaaaagattgagatgatgtggttaagagttggtggcagagttgacaatgattga

SEQ ID NO: 189737 - DNA, 169 bp, Arabidopsis thaliana landsberg
tgatggaggggtaggggaaggggatgcaggtgtagtcggttcggctgggggtggctttgccggtgatggaggtggtggaggttttggtggtggtggtggtggcggtggggatggaggtggaggcggaggaggaggaggaggaggaggcggaggcggaggaggttgctga

SEQ ID NO: 189738 - DNA, 104 bp, Arabidopsis thaliana landsberg
atgatacttgatgctataacttggaatctgaaagagccaatcaccgaattttgtcgacagggacgagagaaaaagggagaaaaagatgctctttttctcgaagg

SEQ ID NO: 189739 - DNA, 350 bp, Arabidopsis thaliana landsberg
atggctgaagaatgcagcaaagcccgtatagagtacagggtaggaagttagtctgaccagtgttcatgacctcatctactaatttgcttttcagaatcagctttttggtatctattgcgcaccacgttggtttttccttttcccttgctctctctctctctctctccctggggccgtatccgggtgctccgtggatagttgcgtttcagaaacttgaactgtatctggatgatctatctggtttctcttttgtgcatagaaaaaactgtaaaatcttctggttctgttctgctagatgagatctatggccggacatatcgaaaatgatcttgtgatggtacctggtagtg

SEQ ID NO: 189740 - DNA, 353 bp, Arabidopsis thaliana landsberg
ctgacgatacgcgccgataccttgtattcgagctaccaggtcgacccgctggaacacgagttcgggcaatactggtatacaccgggaggaggcagtcgctgacgaccgatgccaataataccgtgacgagcttcacgcgcagcggcacgggatcgggcgtgatggccaacgattacgtgatgtcatatacgccggtctacgaaaagagctatcagaacgggctgaacttcagctacgacatcgacgagtcgaccaacctgagcctggacgtctccaactccaaggcctggaacaagcagagtcccaacggttacttcctggtgatcggcggcaagaattttggcgtcaacccg

SEQ ID NO: 189741 - DNA, 409 bp, Arabidopsis thaliana landsberg
  unsure (1)..(409): unsure at all n locations
atgcgccgnacggtccggatgcacttggctgctctgcctgcgtcgcggccccgatgggcgtcgctcgtggccgccggcgttgcggcggcgggcgtcgccgcattggtcgtcctgaccgnnnnnnnnnnnnnnnnnnnnnnnnnnnnnnnnnnnnnnnnnnnnnnnaccaccacgcaccagcgtgcaacggtcacgttgcctgatggatcgcaggcggtgctcggacctcagactacccttcatgtcctgcgtcgcgcgacatccaccgaagtcagcgtggtcggtgaagtgttatttaccgtggcgcacgacgcgcgcgcaccgttcatcgtgcggacacatcacgcggtcatgcgcgtcttaggaaccaccttttccatgcgtgactacgacggcgaacattcggcgc

SEQ ID NO: 189742 - DNA, 347 bp, Arabidopsis thaliana landsberg
atgggtaagagcagcaaaacgggaaagagtaagaagtacaagggcattatcaaggagactttggttgaggaggaaacgatgatcaacgagaaaaccagagtcgggacgatgctcgatgggatagacttggccggacctgaggccgggaagaactccataaatgaggaagcaccaaagagtagcggtgcaagggacaacacggataaccggaacagtactccaactgcccaagaacagtgggatttgatgaaggggatgatggcgcaactagccacattaaccaaggccgttgtagcggattcggttgtccaggagtggataccgagaaggatgatgcctttgaagtt

SEQ ID NO: 189743 - DNA, 3770 bp, Arabidopsis thaliana landsberg
gggaattcagtcgtttattggaaacgtgtacgtacacgggtgttagtgtacctggcggagatacaggggaattcagtcgtttcttggaaacgtgtacgtacactggtcttagtgtacctggcgaagaaacaatttctccattgggttacggtacacgctgcgaagggcaaagggattccaatcttatttgtatagacgaagtcaccggggatgaagtgattgacggtattggagcttcctcaactgggacacaaaatgataatggggtagttaccgcagctgaggcttaccaagtgtataatgaatttcctaagttacatggtggcgagttggcgaatctcggtaacgatgctgctcctgtgttcgatgacttactcaattttcgagctgatgagacacaggttgaaatcagcaccacaggcgaaactttgtttgttggaagtgtttttaagaatagaaaagtcctgcaacaaacaatgtctcttcaagcgataaagcaatgcttttgcttcaagcaacctaagtcatgtcctaaaacattgaagatggtgtgcgttgatgagacttgtccatggcaattgactgctcgcgtcgtgaaggattcagaaagtttcaaaatcacttcgtatgctacgacacatacgtgtaacatcgactctcggaagaactacaataaacatgctaattataagctcctcggagaagttgtgaggagcagatacagttctacgcagggtgggccgcgagctgtcgacttaccacagctgctcctaaatgatctgaatgtgcggatttcatattctaccgcttggagagcaaaagaggttgcagtggaaaatgtaaggggggatgagatagcaaattacaggtttttgccgacctatctgtatcttctccaattagctaatccgggtacaataacacacctacactatacaccagaagatgatggtaagcagcgcttcaagtatgtctttgtctctcttggcgcttctatcaaaggtctgatatatatgaggaaggtagttgtggtagatggaacgcagctagtcggaccttacaaaggatgtctccttattgcatgtgcccaagatgggaacttccaaatattcccaatagcttttggtgttgttgatggtgagaccgatgcttcttgggcatggttttttgaaaagttagctgagattgttccagacagtgacgatttaatgattgtctcggacagacattcatctatatacaaaggcctaagtgttgtttacccgagagcgcatcatggagcatgtgctgttcaccttgagcgaaacctctccacctattatggtaagtttggtgtgtctgctttatttttcagcgctgccaaagcttatagggtcagggatttcgagaaatattttggactgttaagggaaaagagtgctaaatgcgcaaaatacctagaggacataggatttgagcattggacaagagctcactgtagaggagaacgctacaatatcatgtctagcaacaactctgagtccatgaatcatgtgttaacaaaagcaaaaacttatccgattgtttacatgatcgagttcattcgggatgtcctaatgcgatggttcgcatcgaggaggaagaaagttgctaggtgcaaatcttctgtgacacctgaggttgatgagagatttctacaagagttgcctgcgtcaggtaaatacgctgtgaagatgtctggaccgtggagctatcaagtgacaagtaaatccggagagcattttcatgtcgttctggaccagtgtacgtgtacgtgtcttaggtacaccaagttaagaatcccatgtgaacacgctctagcagctgcaatcgagcatggaattgatccgaagtcttgtgtcggatggtggtatggccttcaaacgttttctgattctttccaagaaccaattctacctatcgcggatccgtaagatgttgtcatcccacaacatatagtggatttgatactcattcctccatacagtagacggccaccaggaagaccactgtccaaaaggatcccatctagaggtgaaaaccgggtatgtactaacatcgttcattcatctacttgtattttgagtattaccatgcggagatttttaacttcctgtctttgtcacttcagaaaaagagacagaaaagacttttaccaaatcagtgctcacgctgtcgacaagcaggtcataacaagaagacgtgcaaaaatccaatctagttccggtgacaagtttctgagccggccaatatagtgtacgcttctgtgttttctcggtgtacgtaagtttatatataatccacctgtaactatgtacgttgtgtacgtacgtttaaactctacgttcgtataactatgaacgtttttgtctgtgtacgtgttaaagttcatgtaataagggtacatagaggtggttgctcaatattttgagtaatttgaaataagttttttgaaaatctaacttattccccctcttaaatgaacggagttggagacatggttgggtatattgtggttgtgttggtatttaatggaaaggacgtaactgttgctgtttattgtcaaatcaacgttataattaccctatatgacggttaccaggctattaccaaaaatttgaatcaagtgtagttgtaaccgcattaataactgtagccgttccagatttcctctatttaagtctcctcccttccttaattttatccacaatcctcattctaaacccatttcttgtgccggcagttatatcattcacaaaaaaaaatttagtctttcgaatcgcttgttcttgctatccgtgagatggaggggtttcatacggtctcagaattgtgtcctctgatcactgggtggcgaatttatgtctttgtcgtgagagtcttcaagaaggttatatcgccaaacgtcttcgaactcggcctaatcctggcagattacgcggtaatttccgttaaatcattatgtgtttttctcgttcattcgcttaacttgtatattaaactgtctactatcatgttctgtatgtaaagaataaccgtattgaggccaccgttgatcgtcgccttgctccgttttacgaagaccgattcgttgaaaatgagtggaagacgatcacctctttcttggtccgtaagtcaactgacttagtcagagcaacaaagcatgaatacggcatactgtttatggatcggaccgtcgtcgttcaggccccaccgagatcaccaccagttccagatttcgatttcactcccttcgactacattttggagaaatctgcttacaagaacgttttagtcggtgaggaggaataactccgacgcttcatttattacatttttgaaattttttgtttattatctttgtttctccatcatctagatgtcgttggagcgttggttgatgttggcgcattgactacagactattacggtctcaaactgagtttcaagataaaagatagatagtaagtgttcttttcatttgttttatttacaatgtcactctaaacgctaacagtccttatttctaacgtagcaatgaagtcttggagtgcgaagcccgcaatcaacaggcggagtacttggatggttactttcagagtttgggtaagggaaattttgttgtcgcactcagcttttggcgtctaaccgaactgtctaatccgaagcttgagagccatggtgctatttcaaaggtggttgccaatccggacagatcagaagttgcggatatctcgatggtggttttttag

SEQ ID NO: 189744 - DNA, 133 bp, Arabidopsis thaliana landsberg
atgttggaggtcaagaatttgcttgagaaaaacgagcaagatatgcctgttttaccagatcctatacaaactgaggaatacattcccgatgaaggttcaccttctcagtttctgcagctagaaaattttgaag

SEQ ID NO: 189745 - DNA, 339 bp, Arabidopsis thaliana landsberg
atgaagccgccgtcgatccataccctcggcttgctgcgtcctgggtgggtgtcctgggagatccaccataatactgtgattggtcgccggtgtaaggatctaaccgctgggccgcgggtcacgtgcgcagggcacctcgcagcttgtaccaaggtatgatgactcccccattatgctcacttccgctccctcttgcatctgcgcttggttagccgttgatggacctgggagcaccgtcgggcgtgactgtgatgtgctcgcggccgtgggggtttgggcgccgcgtgtactgatcgggggaggaagaaaggctcctcgccatccaatccgtgatgaagg

SEQ ID NO: 189746 - DNA, 198 bp, Arabidopsis thaliana landsberg
gtcgaggcacgcctgaacacgttcctgctgcccatgctgggtgccgaccctgaaacgttctacgccgagttcaacatctcggagaagctgcagggctcgctcgacgagcaggcgccgtcgttccctaaggcgaacggtggcccgcggatgctaggttccgagggtcgctccctgtttagacctcccacaaatcgacgg

SEQ ID NO: 189747 - DNA, 134 bp, Arabidopsis thaliana landsberg
agaagacggaaggaaaatctccggttagatgcggtggtgacggaggaatcgagccgatctccggcgaggagagagatttgggagagaggctaattggacctttggatgaaaaagcagacaaggcgaagagataa

SEQ ID NO: 189748 - DNA, 429 bp, Arabidopsis thaliana landsberg
acagtacatttatcagtgaagttgacaggcttgagaaagcaggaaatattgatgctgagctaattgtccatgtgaatcaaattggggaaggtgcaaaagctgcatctgtatctgaagagtcatctcagcaagtgggcgacattgagcaagcctacactcaaaaggaagcgtcagtcagtaatctacccacagagatagaaaccttacattctgatgctataataaaagagttgcctcggaaggctccagataatatgcaaactgatatacccacgaccccaaaacagagtcacaatctaggagataatgctgtatttgaagccgtcactgaagtgccaagtactgcacaagatcatagtgaggatgatgttggggatgaagttccagaagagcacactatatctcctgtgttacaaagtcaaacccctg

SEQ ID NO: 189749 - DNA, 125 bp, Arabidopsis thaliana landsberg
atgaacgtgaagagcaagttaacgcagaccgttacactttgtcccgcggaacgtgtctctagagggaatgtctcactagggattaaccacccgagcggtccccaagaccaggcgaaagcagcgac

SEQ ID NO: 189750 - DNA, 746 bp, Arabidopsis thaliana landsberg
atgggcctggttctaacgcaaaagttgctgaggggtgtaatttcttctgatgcggatgaaatagttaatggtagttgcttaggccttatggatgttaaagtcttgattgacacttctattatacaagaagcattcctttggagacctgcgactaacatgttcaccattgagaaagttgttggacatatgattgcatggcctgctgttatgtgtgttaccttagaaaaggagctccaacaagaagacattgtaaccgtggtaaagttaattatttagtctcatactcatatatagaataatggtcttctattaacataatcagattttgggtttgaatgtttgttgttgcagaaggacgttggcagacaaaagaacaaaacgcattagtcaatggacttctgatgcaagaattagagctaatccatcatttgatcacttgatgatcaggagttccaaacttgccacgcggaaggtgggatgatgaaggtggtgatctgacacgctggcgatcgcttctctcgtgtgggatcaattcaagggcaaataatggatagaagggtgattgactcgctcaatcagtggaataattgattcactcgatcaatgaacgaatgaaggatgttgaatcactcaacaaacttaatccgcagatcctgaagtacttagtgactcactcacaaagaactacagaacaaatgacaaagactcaaactttgacaagtagaaaacgtttctattacttttaa

SEQ ID NO: 189751 - DNA, 105 bp, Arabidopsis thaliana landsberg
tgatggacgagctccatacagcagtggcatacctgctgtgcgtgcaattccagaggacagaagacagacgtcgcctgtccatgacgtgtgcggtcaaggccacgg

SEQ ID NO: 189752 - DNA, 139 bp, Arabidopsis thaliana landsberg
tgcttgttatggcatgtataccaaacagcagaacagtacgaggtacatgaattatatcactcaggcgcataagtggctacatagcatacatgaacaagagttcgatttacatcattctgccgtggtgaatatggagtga

SEQ ID NO: 189753 - DNA, 334 bp, Arabidopsis thaliana landsberg
atgaacagggtcatcagaccggtcaggcccggcgtgatcgaacggcgtattcgcggggcgccgagccagcctggacggatcttcgggagcaatttcaatcgatctaaaaacgagtggaattttgtcgtcgaatgcatgatcggaagctctcctcgtgggaatacccgggaaagggatggaggctggattgccccatctttccatggccagatcagtggcttggcgccatgctggtctggaaaagtgcacgtgtggcgcagtcttcagggcacaagtcgacgaagctggcaggcccgtgcgcccgatcgagtattgccggaggatcttcccaata

SEQ ID NO: 189754 - DNA, 49 bp, Arabidopsis thaliana landsberg
atgcttcatgatggagatgcgaataacttggtagatccacaactacatg

SEQ ID NO: 189755 - DNA, 314 bp, Arabidopsis thaliana landsberg
  unsure (1)..(314): unsure at all n locations
atgacccaggacgcgcagagcgtaacgcaggagctcaagccttgcccgtctggacacgtcaacatcgagattggctatgatgacgaagccgatcagcacttcatagcgtgttccggggtgcttggttgtcgatggggaatgtnnnnnnnnnnnnnnnnnnnnnnnataaccgcatggaacctccgactcgccagccagcccaccagtgcagaggatgcggtggcgcttgaggcataccgcgccgccgtccgctggatcgccgccgatagctgggatggctgttccgagtgcatcaagattttgcagcttgcccg

SEQ ID NO: 189756 - DNA, 49 bp, Arabidopsis thaliana landsberg
atgcatcccggaatatccatcacggatgacaaacattttgttatgtcag

SEQ ID NO: 189757 - DNA, 359 bp, Arabidopsis thaliana landsberg
tcgatatcatctggatattgtgggccggcaacgacgaaccgcctgtcgggaagctgacgtgcaggttcgagaagcagctgctcgagcgtcggttgtcgatcagcgctgtaggtgcccagatatcccatctcccagatggtgggatcatcggtcttgccgtatcggtccgggtcaaccgaacaataaagcgcaatggcacgctgagcgccgtatcgggtctccagttccttgagcacttcgccgcccgaaaacgagaaataagcctgaaaaactgcgatctgacggcgcgcaagatattcctcgtcgccacgatcgagtttggaaagcgttacgggcgtgtcgatgtcgtaaaagcatag

SEQ ID NO: 189758 - DNA, 2594 bp, Arabidopsis thaliana landsberg
atgcggcaaccacacggtgaggcgatgattataaccgttggatgaatgtcacggaccgttatatataattccaccactctcgcgtcgttaaaattaattaaaaatctataaaggtaaaagatttcatctttctcctgacgcgttttggcggttcgttctgcacagtttcttcttctgatgctctttttttgtttttaagaattaagggtttctactttaatcgattggagcacaatggcattgacgagataccagatacggaacgagtacggcttagcggataaggagctctaccaatccgccgataaggaggatcctgaagctttgctcgaagctgcttccatggctggtctcgtcggcgttttgcgccagcttggcgacctctctgagtatgttttttttttttttttttttaattcaatttcggtccaatataccctaccgtttgaggaattttactgtagagaatgggacactgaaggttccgtggaattgaatttcgatgctatatactctgaatctagagaaaacctgaatctagggtggtctctttgttttttgcttaaaaatcttattcggggtagtgcaagtttcttgtgtgctgatgagatgatttttcttcttttggtatctaattctaatgaaacctctatgtcgctatggaatcaatcccttggcatttatgttcttttgtctcttttcatactaataaggtttgctgctgaggtattccattgcctgcatgagcaactaatgacaactgcagcacgaggtcatggtttggcgatgcgtctccaacacctcgaagcagacttcccttcagttgagatacccattctctctcaaaccgatcattctacattcttttatgagccaggccagtcatctatcttactctaatgtttagtataagagatataagctgctattggtgatcccaagcactgaattgttagttaggtcctcaggcttggaatggcattctgatctgcaaacaaaagaagacttgatttccccacggaacttgcctcgttgtataatggattcgtacgaggaatgccatggtccgccgcagcttttccttctcgacaagtacatttcagtatatcatgagaattttcaccataaggaaatatccatttgcagtttttaatcatgtttctgctgttattcaggtttgatgttgctgggtctggatcatgcttgaagcgttactctgatccatctttattgaagacacatactacatcagcagtagtagcaacatccaaactcgggaaagataagcgactacgtcaatcaaaggtattcaatcatgttacacatttcctaattctggttttactatgcccactctgccactgtctgtaaaaataagcatctgaaaaatgcacatttgggtattatgtgttacatatgatcaaatctatttcaaatacagaagaaaggatctcacacaactattaaagagacgcctgaggattcacggacatcacatgccaagtgagcactcttgctctatatctacttctgtttctgtcattcctatgtctaaagttcatatatgtgatcggcacttgatttggtgacatgagctactttttggatagtacaggttgcatcagctattctttttggagcatgttgagaacggacacagaaatcctgaattccatgtgaaactgaagagaagacagctgaatggacctccgattaactcaagctctggggcaagttacatggagaaattcctcaagaattcttcaccatactgtgaaagagttcatgggactatggatcagtcatctccggcaatggaaactgaagttacagtatgcagtgaacaagaagacttaccaataccttccttagtttattccaacagtggaggcactagaaaatacaatgagatggagatagaatccattgctggtcatgaaatacttgaaattccttttgttcctcacgagattacggttaatgagaagtcaccagtggtttgtttagaaagtagctcttctgtgaatttgtgttgcaagacgaacaatgacgcagattcacctgcttccacggagtcagaggtaaaggaagcagggagtgatgacaaggctggatgtgaccatggatttccaggatttggtcagccgcagatctgtactaatgcagaagtgaatcaaacagaggttctgactcagttttctaatgttttgcgccactcaccggaggaaggagaatctagtcttttgtgtactgatatccagagagcttctcctgaaagtaaaccacataaagctgaagaggctgctgtagatttagacgagtcattttcccagatgacaccggacatagattccgcaggcatggggactctggagatcttacaaacacctttcagtttgtcttgctacgagagtcctgcaaatcttcccgaagattctggaagtcacttggagcttcagtccaataaagcaaatgctgaagcttgtgaggtctttgaagtcagaagggatcccatgcttaatatttcccctgaaactcatcttttaaaggttacacaagtgccacaggacgcatatgaggggtgggaccaatga

SEQ ID NO: 189759 - DNA, 156 bp, Arabidopsis thaliana landsberg
gtttcactgataacccatgtccttgcaagtgttcttgccgatctatttacaaaaggatttggcatctccaaaaatgaagaagatgatgactctaaagttgacaaatcggaagctgcagaaggtactggtatgggagatggtgtgggggcaaaagat

SEQ ID NO: 189760 - DNA, 665 bp, Arabidopsis thaliana landsberg
atcaacgtgctacacctccttctggtggctcagatgttcagactatcatgaaatgcatatgcccccgaccatttagccggtcactgatcactaaagggatgctacattctgattttcttgtgaaacatgggaccttgagatttctcttggagacgctgagggctgtggattcgtttcttactgcttggaacctttgttcatctcatagatgctcggttgagcaaattcagatttctcttgagcggaacgtcatgggtgaagtgagcagtttttttccagattcccaggtgttattgattgtactaaggtctctggacggttctagtggaactcaaaagctgtcattgaagagagaagcagagttggatagtggattagtaggaagaaaaaaacgcattaagcgatcggagaaggatgttttggaagaagaggctgttgatattgtcattggtggggtaggttctgataaagatatctttttggctgaggataatatggatgctcatatgacagatcaggaagatgctgaaaaagaatatcttgggattgtttcagatatttggatttcagagctttgttctaaccctattgattcggtcgaagaagcagagatgtgttttcacataaagcttctggatgccctcaagatttatgtggtacgttga

SEQ ID NO: 189761 - DNA, 389 bp, Arabidopsis thaliana landsberg
atgcgtgacacctacctccagcggatatggcgtcagccccacgagcagcccgctcagcccactctcgctcagcagcctgttgctgcgcctgccgacgcgtccattcccaccagtcggccgtcgaattcgcctcataccactgccgctggcatatcccagcctggtgttgtatcatcgcagagtccgcagatgatgatgacggcagccccctactcccagtccatcaatgcacagagtgcgctcggtcaagctcctattagaggtatgacccctttgcctttaacaaccaagctgagtatccgtgaaccaacacctgctgcaggctctactggtgccatcaacccttcagccgctggctacagctatcaacaaccaagccaagccatgtg

SEQ ID NO: 189762 - DNA, 363 bp, Arabidopsis thaliana landsberg
gtggagattgcaagacattaatgtttgtccagattagtccgagttctgccgatctaggagagaccctttgctccttgaactttgcaagtagagtccgaggaatcgaaagtggacctgcccgaaaacaggctgatgtctctgaactccttaagtcaaaacaaatggtaacttgattcctcgaactccagttcatctaagctttaacatatcttaaggttatttcattttttgttgtatcctttgtaacaggccgagaagctgaaacacgaggaaaaggaaacaaagaagctgcaggacaatgtgcagtcactacagctacgcctcactgctagagaacacatatgccgaggacttcaagataag

SEQ ID NO: 189763 - DNA, 497 bp, Arabidopsis thaliana landsberg
atggatgagattttccggtaagaagaaccaaacatagaccaatgaactttcatagatgtttccaaaggttgctttttctataaatagtcgaaacacctatacatattgaaacatcaaaaaattactactagagaataaaaaacggatctagagagtagagatcctaaggatagtgggttctaccgagggagtagaccacttgatatggcataaacttaacgatgacagaatgtcatccaccttgagatacattgtctcacgaaacgtataagatttcgtgtggttttgaagttccaaacttttggctaaagtgtcaaaacacttgtacctaaaacaggtggtcgcaaaaaacaggtggtcgcaagtacgcagagaaaaatatctcgcgatccattagccgtagtcgagtcttttgtggaaaaactggtatcacaaatcttgaaaccgaaatccttaaagaaagcaaaggattcgagaatcatcgacgcccaactaaa

SEQ ID NO: 189764 - DNA, 196 bp, Arabidopsis thaliana landsberg
agcattgcaatgaaagttccagattcttcttcaccgaccggagttctcgaagaattcttcagaaccgaagaattcaatagctcctccgagacggtcaagaacccttcctcttctcgtttccgcaagatggttcagcttctcagaagcaaatccaaaaagtctcttgagaatgtcaagattccgtttcacaacaatg

SEQ ID NO: 189765 - DNA, 192 bp, Arabidopsis thaliana landsberg
atgggaacaaacggtacaacatgtccaggaccaatgaaagcaacctctaatggagtctttcaaggagagaatcctctggaacacgcgttgcctcttctcatactccagatctgtatcgttcttcttctcactcgtcttcttgcttttctcctccgtcctctccggcagccacgtgtcatcgccgagattgtc

SEQ ID NO: 189766 - DNA, 249 bp, Arabidopsis thaliana landsberg
atgatgagttattataagcctaatactgacataggaacaccatcatcaaccagtgaccgtggtggcggtggtaatggtatgtccctcctcttttcttattttacaatttttatcaactttctttttgaaacttttctacaaagtacttattcatctaaataatatgtcgccgtgttgaaattagatattactctctattaatgtttgctgctttttttattaggtaggcgattgattaatttactttaa

SEQ ID NO: 189767 - DNA, 120 bp, Arabidopsis thaliana landsberg
atttttgccattatcgatagtgtaaacaagattgctgatggtgatccatccaaggaccacaatattcctcgtctaaccaaagggaccatcaatacactatgtaacatgcatatagagtag

SEQ ID NO: 189768 - DNA, 1108 bp, Arabidopsis thaliana landsberg
atgtttagaggcgagtttgttagcgtggtggacttggtggtcgcagccgccgcagagagatgcttcgtcggccgtgcaaaacaccgacgcttcttctttatcgcagacgtcgcacctgatcatcatcgatcgattaagagagagatagagatggtggtagttgaaaatgataggagagaagatgtgagatcttcttatggagtagtaatgtaagagggtacttatgtaatatcagctcctctttttttccttctttcttgtttctcaaatcatatcttttttttttttttttaattatatctctctttttcttttcttttttattcctagaaaattatttcttgttttatatgagatgtccatgaagtaaaaaaataaattaattattactttgttggattaataaaacacagcgatataatgagagcttgactgatgagaagtaattatgcccatgatagttcggtagttcctcaatgtaaactaattatattttccagcaaaaaaaaataagaatgatatattcaaataaatttattggcattccattcgattgtttgatagcattcaaaaaaacaaaataaatagaacttaaatagtagcaatgaaaaattttctgtttaattctcctaacttggaaacaaaaaattgaagtagacaatgttttcataatgaaactaaaaatgatggaaaactcacttatataccatcgaatgtaaacaacattaactctttaaaacttcacttttcgattgactaatttaacttaagaaatgtgaacaattagacaggtttaaacttgtatttttactagtatcatacctatacgtacgcttatgtcaaaacatttacatcagaattaagatgatcgatataacacaaccttgcttttagccgattgatctcatgtttattcaaatttccatctatattatacttcatggcatgcagtcacgcacgccaactccaaaatagaggatcggataagattatatttgaatatatcatcttgttatattttattgtgttatctttgtttagaagattatatagtggaagcccgaagaattttgcactggacgtggatggtgtgaaggctgaagcgcgg

SEQ ID NO: 189769 - DNA, 1815 bp, Arabidopsis thaliana landsberg
  unsure (1)..(1815): unsure at all n locations
gagagagctcacgagaatccctcttcagatcagaacgccacaaaacaaggatgcgtgtacactccacgcgctctcagtcaccttattcctccttctcttctatgccgtgtcaccggcgaaagctcagcaaccgtacgtcaacaaccaccagctcgcatgcgaggtccgtgtctacgacaacataaccaacggattcacatgtagcggcccaccttcttgccgctcatacctcactttctggtctcaaccgccgtacaacacggcggactcaatcgccaaactcctcaacgtctccgccgcagagatccaatcaatcaacaacctccccacagccaccaccagaatcccaacccgtgaattagtcgtgatcccagctaactgctcatgctcctctccagcggaggattttaccaacacaacgccacttacaatctctccggtaacagaggagatgaaacctatttctcagtggctaacgatacttaccaagctttatccacgtgtcaagccatgatgtcacaaaaccgttacggcgagagacaactaacccccggcttaaacctccttgttcctctccgatgtgcttgtcccaccgccaaacaaaccaccgccggatttaaatatctcctgacttacttagtcgccatgggagatagtatctccggcatcgccgagatgttcaacagcacatccgccgccataaccgaaggtaacgagcttacatcagacaatatcttcttcttcacaccggttctagttcctctcacaactgaacctaccaaaatcgttatatctccgtcgcctcctcctccacccgttgttgctacgccgcctcaaacgccagttgatcctccgggatcttcttcttctcacaaatggatctacatcggaattggaatcggagctggtttgcttctcttactctcaatcttagctctctgcttctacaaacgaaggtctaagaagaagtcattaccgtcgtcgttgccggaggagaacaagctctttgattcatcaaccaaacaatctattcccacaacaacaacgactcaatggtcaatagatttatccaattcatcagaagctttcggtttaaaatccgccatagaatctctaacactatacagattcaacgatcttcaatcagctacttcgaatttcagcgacgaaaacagaatcaaaggctctgtttatcgcgcgacaatcaacnnnnnnnnnnnnnnnnnnnnnnnnnnnaaaggagatgtttcttcctctgagatcaatcttttgaagaagctaaatcattctaatatcatccgtctctcaggtttctgtatccgtgaaggaacatcgtacctcgtcttcgagtattcagagaatggatcgatcagtgattggcttcactcgtcgggcaagaagagtttgacatggaaacagagagttgaaatagcaagggatgtggcagaggcgttagattatctccataactatataactccacctcatattcataagaacttggaatcaacaaacatacttctggattctaatttcagagccaagattgcgaatttcggtgttgcgaggattcttgatgaaggtgatcttgatcttcagttaacaagacatgttgaaggaacacaaggctacttagctccagagtatgtggagaatggagtcattacttcgaaactagacgtgtttgcttttggagttgcggttcttgagcttctttcggggagagaagcagtaacgatacataagaagaaggaaggagaagaagaagtggagatgttgtgtaaagtgataaacaatgtgcttggaggagagaat

SEQ ID NO: 189770 - DNA, 369 bp, Arabidopsis thaliana landsberg
tcatttatggatttgcaaattccaaacgggcaattgacatatgtatctggcgaaggactgacgacaagtgcttttgtgcctttttgtggtggtcttcttcaagcacagggtcaatatccaggcgacatgagatttagttactcttgtaaggttagataccgataggaacttgtcatgatcagtgtggagcttattctcatgaaacttaaatgtgatttttgaaatctttttgtttgtggaacagaataaatgtggaacccgaatcacaccaatggtacattggcctgataaatcatttgggttggatctttctcaacccttggcttggcgtagatccggactactgatgaaaccgacaattcaagtcag

SEQ ID NO: 189771 - DNA, 277 bp, Arabidopsis thaliana landsberg
atgcgaacaggacagctcgaccctcgtgtcctggtgacagtggtataatttgtcctgatgatgcaaacacttgctgttttgaaaatggtgaggagaaggatcatgtgactgcttatgaacctccgacaccaaaatactctcatttcattgtcatattacaggtgcctgccctgttccccaattgtgccaaaatgaaatcgattcaccgttcctgcagtcactcaacaattcaatcaccagcaaacgcaatggacgcagcgaggcgactacgttcgtg

SEQ ID NO: 189772 - DNA, 483 bp, Arabidopsis thaliana landsberg
tcgcgtggtgaacagcacccgacccctccacgtgggcggctccggggccgcacgtggccagagcagacgatatactccaaggtggcgacagtgggtccggaccccccacgggaaagtgatggacccctggatgcatagcccggacctccgggtaaggttcaagacctccacaggtacaaaccgaacccctgagacgggttccggacccctcagggagggtccgggccgctcatagtagggtcccgggattctaggacaaagaatacccagaccttaatcaaggccaggcgggggtccggagccgacacgtgtccggaccataccgtatacgcttctgctccccgctcaggcggagccccgatgctgccacgtggccgactgcccgtgacgtaagcgaacgagcggagcatgacgtaaggcttatgggccacgtgtcctctgcatttattgcagataaggcgcgccgcctatccattccactga

SEQ ID NO: 189773 - DNA, 243 bp, Arabidopsis thaliana landsberg
atgcctggagttatatcagcatcttcagttgatgggaaaattggcatctataaccttgaggtagctctttgcagtttcgttttggtgtttgaaatttgtgttctagatcaagatcaataatatatgattgtatacaaataatgaaccagtgaattcagcacaagttcatttttcctattcattgttattttaggagttaggttcctgttctgtcatggtactgcttagttctgaagaatactt

SEQ ID NO: 189774 - DNA, 262 bp, Arabidopsis thaliana landsberg
atggtggtttcgatataccaaacgtattctcggagatcatcaggactcaacagcgagcttcggaccccgatcacgccgcagtattttttttatcaatttaccactctctgcgttggttacctcgccgaagacttcaagatgtctgattccgacatggacattgatgatgatgaggtcgaacaaaaggtgcaagtacatacaattgtaagagaatctgaattgtttgataaaccaccaattcaagcttccaattcccacaacg

SEQ ID NO: 189775 - DNA, 1040 bp, Arabidopsis thaliana landsberg
atgaaagagtggacaatgccaaagcttaaaggggaaaagaagaagggggaactcgtccgactgccctaccattataaattcaagaaatactttaaagtaccctgccaagaatggcttgatacaattgaaataatgagcaatgaaattcttgggaattactctaagaaagaggaccaactgatgacagcggccttcggcactcggccgaaacgaaggctgaacagggtgcttgatgccataggatttgaatatgctgactacggtcgactaggcggaaatgctgggggcccgaagcgataaaggattgctagcaccactgacgaagaagtcatcaagacagcaaaaaagaaaaagaaagattctgataacattagtgttgaagagttaaatcctgagccgaagtggctacggcaaaaaagagaaaaagtgcatccccagagccggaaacgccggttcaagaagaagatactcctgcttctccttctgctgttgaagtagaagagattatgaaggtaatgactgaacctttcgctttcaggctaagtccgctggcactggaactgacgaagttttttcagaaggacaaggctgctccggcagtagaaagtcctgcgaagccgaaaaagcggagaattattcaagtaacagatgtgatccatcagacgccgcaccggcaactgtgtcaaaaattgtttttgctgaaactgccgaagccgaagctactggaatgaaaactactgaagctgaaaccggtgaagccgaagctaccgggaccgaagccagggccaccgaagagttgaacctgggaaccacgctagaggttattgacaatatactcctaaaaatggctgaagaggaagctactgtggctgtagtggatacagcaactgagaaggggaaagagcaaattgatgaaatttcagaagaagaagattttaactttcaagatttgctcggacaagaattaatagacgccgaaaaagaggagttgaaaaaatatgccatatcttgcggatacaaatcaggggctatgctatttg

SEQ ID NO: 189776 - DNA, 288 bp, Arabidopsis thaliana landsberg
gtggcggcggagaaccagggcagcgcaaccgacccggtggcgccagccagctggtcgcgcaccggccggatcacgtagtacgcggccagcacgcagaaaaacgccagcgctgccagcacttcgtcaccgcgggcgtgcaagatctggcgtgtcggcatgcggcgctgtcgtccgtgcaagcgcgcacactagcacgcgagcccggtggaaacgcacccgccgcgccatgccagaatacgtccaccatggtgagcaaagcgagcttcgaccacatcatcgtcggcgcgg

SEQ ID NO: 189777 - DNA, 218 bp, Arabidopsis thaliana landsberg
aattatgcctgccaataaggctgttgttaacaagtttcctaaaggtggcattggtccgcaatttgtgaacagatacatgcacaagtttgagcaatactggctcagtgaagggaagtaccctgacgatgtgtggattatctcagaatttggcttctccaaggaccagtgtcttttcctcaacaactcaaagttctggcttcaaagtcttgaccgacgag

SEQ ID NO: 189778 - DNA, 369 bp, Arabidopsis thaliana landsberg
atgtctacttttcgcgaactggtggttgccggcatgggagcccgcgaaccggcggcagtgttcaacgtgcgcggcctgcgcgagttgcacgaaagcctgggccgactgcccgtgcgggtggatgccatcgacccctggcgcatggggacaatgcgcgtggcacgctgggggctgcgtcgcttgcagctggatgccttgcaggcattggcgccggattttcgtgccaccgtgacggcacagttgcgcgtcatggccgaccgtctggatgcgggccaaagcctgtatttcgcgcccgagggacacatttcgatggatggccgtttcggtcgcatccgtgccggtacctggcggctcgggcgcatgacgaag

SEQ ID NO: 189779 - DNA, 719 bp, Arabidopsis thaliana landsberg
atgacgaatcagcggaagtgtatgctgctgaaatggtttggccaaaacaggccaaatcttcggcttgtccctacttgcagccggttcaaaagaaacggcaagaggaggttaagtttacgtttaatgtcggtaagtgtgataaaatatttgacgagttactcaaaaatggcaatattaaaataaatcacactgttccatccgctgacgagctaaaacgtcgtgcatacagcaagtggcataactcattttctcatgccactaatgattgtaatgtattccgtcgacagattcaatcggccattaacgaaggctggttgatttttcaagatgtgcaatttgacaaacaatcattctccatcaatacactcgagatgaacgccaagaaggtcttggttcggcccaaagtgaccaataaaggtaagggcaagagcataatcaccgatgatcctcgcatgtccaatctgtcacaaggagaggtttcttagaaggctccaggcaagagagaaattgtaaggaccactaatgaggctaggggcaccgaggagcaagcatgatatcccattaggccgatatcttctatccagcacccatcggatggtccggctacctataaaagatggtctggactccacgcgaatggttcagctacctaccacagaagttccaagaatggccagtgatgccagcgacctcggacctttagaccgcgacatgcagag

SEQ ID NO: 189780 - DNA, 373 bp, Arabidopsis thaliana landsberg
atgggctcggcagaatggcaaaggaccactagcgctttttccgcagccgtatgttttgcatctcgctcctccaccgtgcttgacacagaattctgttcttcccaagcagatcgtgtgcaatcttcatggttgcatcttcgaccacctccatgagctatacaaaaatcagtactgccttctgcgcctttggtgcatccaagatattcacatctgcgaccacctccgtgggctttacagtacactgttttaccttcagctcccttctggcaatcaggtttctggcatctacgtccaccgccatgggaaatgcaacgaccagatgcatctcttgctcctttttgacatccttccacttgacataacttggaactag

SEQ ID NO: 189781 - DNA, 475 bp, Arabidopsis thaliana landsberg
atgcctagtgaagctatgtcgattgttgtggatgttagtagagtatcagattcggtagctcaagatgcaaatttgagtcggagttcgggtatgagcactcaagatgaaaacatctatgcaagattgaagacggtggctcaagttggagatatagaaagactctacgagttgatagcagaagatccaaacattttagaccactttgataaagtgtctttttgtgagacgccactacacattgcagctgaaaaagggcaaactcatttcgccatggaactaatgactcttaagccgtcacttgctttgaagctaaacgtgtcaggtttcagcccactgcatttagccttacaaaacaaccacattcgaacggtgagagggttagtggcaatcaacagcagcttagttagcatcaagggaagaggaaggattactcctttgcatcatgtggctcgaataggcgatgcggaattgttga

SEQ ID NO: 189782 - DNA, 508 bp, Arabidopsis thaliana landsberg
atggttatcgagaatttcgagaagggggcgggttttgttgtgataaagattggggatggtctctatgaggttagagacaaaagaggcggagggtttgcagttaacctattggagagaacatgtacatgcagagagtttcagcttctaacgattccttgctctcacgcaatagcggcggccatacaagaaggactccgagtggacacactggttggggttcatcacaccacgccacagctacagttgtcttaccaagccctaataatgccggtgcctgacacggagactcttactccgtcaccaaacgatgtggggggggggggggggaactggctccaccgtatgtttcaaggcctccgggaagaccaaggaagcgatgtgaaagcattaaattattaaacgctaatcaggatatctgatatataataactatacaataataacttctgttacttttgtagaagacttcaaggaaaagatgttcgcgctgcaagtcgttgggccataa

SEQ ID NO: 189783 - DNA, 460 bp, Arabidopsis thaliana landsberg
accggcttgcgcctgcccgtgctatcgatcgcgctgccgatcacgctgctgttcgcacgcgcgcgttacttccgctggctgtgggcgcctgcgttcgtcttcgccgttctcctcggtcttggcccgcacatgggcaagatcggtgacgacatcttcccgcccgtgcgcgcgctcggcacgctacaaaccgtcgcggcgatgggcatcggtgccggcgccgtcattctcggcacggtgctgtggaacttcgtcggcaagtactcgctcgcgtactggatgcgcacgtgcatctccgcgattgcggcggcgctcgtcgtcctcctcgtcgtgcccggcagtcgcgcactcggcgctcgcattcgcgtcttcgcagacaccaacgctccgcgtcgcctcgagctcctcgacatcagccacgagctcggcacgcttgccgcaggtcgcaagcagcccggtcccg

SEQ ID NO: 189784 - DNA, 265 bp, Arabidopsis thaliana landsberg
gaagcttcgaaaccattgaagcagcagcaatgatactacgtcgtttcatctgctacaacgcttcttcaactgtttcatctatagctccatcaccgaagaagaagcctctcatcttcttaggctctcctcaggttaaaagactttttaacatcttcatgggtttagggtttaagcttaatctaatcccctcccgcgaaattaggtctccgtgactgtgcttgaagctcttttcaatgcatctaatgctccaaactcttccttcgag

SEQ ID NO: 189785 - DNA, 195 bp, Arabidopsis thaliana landsberg
gttggaggtgaccaagcgacggggagagagacaacgaaaccgtgtagacttcgactcgatcttcgaacgaccgcagaaccacaaccggagctaatccacacaatgcgaggcagccgtactggaactcacaaggcacgaactagtggatcccacaggaatgtcttcacaagtccaggagaacaaggaagaacaggg

SEQ ID NO: 189786 - DNA, 82 bp, Arabidopsis thaliana landsberg
atgaaccttcccacagaaatcgttcaccagtccaatcggttatggtaccaccagcgccttctatttcaggccccagagcaag

SEQ ID NO: 189787 - DNA, 176 bp, Arabidopsis thaliana landsberg
gactatgtcagtatagtcaacataaagggttccttagccaaccaccagaaaaaaatgggttcgatagccacatgaccttcatctaccttttgaaaataacctcttttggaaagaaaataaagagtcgtgtggcagaaaaaacgtttgaaggaaaatataccactcaaaagtgttaa

SEQ ID NO: 189788 - DNA, 197 bp, Arabidopsis thaliana landsberg
ccctgctcgcccacgcctgcccgtccctgcgccgcgtcggcgcgccgccgctacgaagtgtccgcggcgcccctgctcggcacgaattgtggccgcccgttgaagtcccgctgttggtttggtcgcgccgccccggccccactgtggtcgctcgtcggacctctgtggtcgcttgtcggacctctgtgtccgcttga

SEQ ID NO: 189789 - DNA, 746 bp, Arabidopsis thaliana landsberg
ggaaaatgagaccaatgatgtggaagaagaggagattcgccgtttctgcatccatctcaacaaagaggacaaggcactcttggttaagctgttgagaaggaacaatgaacaaggcgagacgcttctcaggctagaggagtccctcatcaaaaccaacgaacagcctagagaagaagaccaaagaacatgagaagctaaagcactctcatgatgatttggtccaaaggtatgaatatgttttaattgagcaaagaaatagtcatgatacattatctgatattgctcaacttaaaacggaaaattctatgcttaagagtcaagtagaaacaatggacctagaaaaacgtgctctaggtaaaaaatatgatatgttatcttattctcacaatgaattagttgatgaccatatcatgcttgatgttgctcatgaggttgtaattgcgaacttaaattcatgtgaacctcattcttgcacacgtgcgcatttagataatatatcaccatatgctaacccctgttgctcaaaagaaagccaatttttgaatgagcatcaagctgcaggatcaaaagaaagaaacaagaaagcaaaacaactaaggagaagacgcattgctcaacctcttcaagttatccacggacgcgtggtgaaggagcttgagacgggagaaaccgcagcaagtgttaaactccataagaaggatgttcctaaagcaataaatgaagaaatcaacatgaacaaggaaaag

SEQ ID NO: 189790 - DNA, 114 bp, Arabidopsis thaliana landsberg
gttatcgaggaatttatcgaatgcgtctacgagaatccgccagaaactagggaagttactgaggtcggaatcgtggaaaacgacgacgtcttctaccgccggcgagagagatag

SEQ ID NO: 189791 - DNA, 214 bp, Arabidopsis thaliana landsberg
ttcttcaataacccaacactgggggattgttgtgaaaaagcaaaaaagagcggagcaaaagttcatttcatcgggctcgtttcgaatggtggtgcacacagctgccaggagcatttgcatgcgtcgctggacatggccaaaaagcatgaattaacccatgtatgggttcatgcattcacagatggccgagattgagatccgaaaagcggcctga

SEQ ID NO: 189792 - DNA, 125 bp, Arabidopsis thaliana landsberg
gaaggcttaaacgtcactcttctccttacaacgtggattccaacatcgatacatttgttttcatccaagaaaaaattgcgaataacacaaacaaaaacaaactgaataaactaatcggtcgataa

SEQ ID NO: 189793 - DNA, 105 bp, Arabidopsis thaliana landsberg
gagatatgattcatgcaggagaggtaaaaagtgttctagaagacatgggaataaaaatgacacacaaagaaaacgtaaaattccttaaaaaactacccgtctctg

SEQ ID NO: 189794 - DNA, 360 bp, Arabidopsis thaliana landsberg
aagagaccacgaacacagcaccaaaaaccgctgggcctaatacgcgcgcgagaaaacggggcccacgagaacacgcaagaacccaaccaagggaaagccaaaaccaccaacgaaaacgggaaaaaaacgacacaagacttgggaagaacgctaccaaaagccagaaccaaagacaaacgaggggagaagacgaaactgactgcgcccaaacgcaaacgaaccagcccccacaccaaccgtccgcggggaccccacaaaaaacccaaaggggcgaaccaaaggccaaaacccgagggccccagacccaaaggcacactccaagggcgccacggaaccaaacaaaccaaaccagaggattga

SEQ ID NO: 189795 - DNA, 378 bp, Arabidopsis thaliana landsberg
cgtgaactgcgggaccagcagcaggccgccgccggtatcgcgcagcgagcggttcatccgcccttcggcatcgctgaacacgcggtagcccagcaggcgctcgcagatgcgctgggcttgcgcctcgccgtcgccgggctcgaccgcgaccagcaccagcagcccggcgtcgattgcgccaatggttgcaccatcaacgacgacgctggcttcggtgacgcgttgcaaaagggcgatcacgtttcaggcgcggcatccggaaaccgtagagcctaccaatattgtcccttgcgccggcgccggccggaatccatcctggtggtgcctgactacaggcaaggcaaatggatcccggcctgcgccggcatgacgccgtga

SEQ ID NO: 189796 - DNA, 523 bp, Arabidopsis thaliana landsberg
atgacgctcgcctccctcgcccgcgccctcggccggtccgcgcgctcctcccgcccgcgccaggcgagtatcccttctcaagttctcatcccctcaccggcccccctatcctcgtctcgcaggtctgacctctcgctgctccttctagggtttccagctcggggcgtccggcagccgcccgcgccacacgtaccgccgcccgtccacggcggtgagggtggggcggcaggatttgttcgcagctacctgactgcggcctcgtcggcagctcttgggaagccatccgcgggcaagaccgtggattggagatatgtcctcgccagcccacatttccgacgcctcttctcggacgggtccaagaagagtacgtcccctcgttttgatgagattattaccaatggtttttggtggctctgtttctgaaatggtgccccttttctgattttagactacgagaactattaccccaagggtaagaaggaggtgcctaaaggagatggtacaaacaagtctgaatctaagc

SEQ ID NO: 189797 - DNA, 94 bp, Arabidopsis thaliana landsberg
gtagaaccaaaccaagaatttcgtgggttagtctgtgaaaatgcaaatgttcttccttccaagttcatacatgaagctttccgagatgggtttg

SEQ ID NO: 189798 - DNA, 313 bp, Arabidopsis thaliana landsberg
caaagactccatttgctttcaatgtatagcaatcttgtggacaagaaatacatgttcttgttatgcaatgggattgtgggctttatcttggggagtttccatgggaattctgaatccctttcgcacggtaaagccattaacatcattgaacaaacgaaagaagtagggatcaaagacttgaaagaaacaaaactcaagaaggtagtggcattacttgaagaaaagagtgtttctaaagaagaagaagaagaagaagaagaaggaggaagagttgttttatttagaggaatcgaagaagagaagttcattgttg

SEQ ID NO: 189799 - DNA, 671 bp, Arabidopsis thaliana landsberg
atgatcataaaactgaaatctccatgtatgaaacacagatctccatttacaagaagaggcaatggtagatcatacggagatttaactgttccagaatcagacatatccttcatcagttccggaagaccaagcattgaccgtatcttcccttctctatatgacaacaatgatccaagccgaactcctcctaggctttcaaatttctcagacatggattatagttctagccttgatcagtcttccaactatggaaggagatcagtggatatgaactcacctactgatttcgagagcgaaagattttcatccgcctctcagtcaatagtaagaccgataaaatcttcttcaatttgtatataactagtgttattgacattttgacaattaccaaaagcaggatgatgtagaggctgagatgaggaggcttaaactggagttgaagcagactatggaaatgtatagtacagcttgcaaagaagcactcacagcaaaacaaaaggtaagagtttctgtaaaaacaagtgtttatggttttcaaaaatctaaaacatgttttggtaattgtaggcgactgagcttcaacgttggaagttagaagaagagagaaaactagaagaagcgagaaatgcagaggaagcagcattagccattgcagagaaagagaaagcaaa

SEQ ID NO: 189800 - DNA, 1497 bp, Arabidopsis thaliana landsberg
agaggaacaacagagaaagactgtgcacaacccgatttgaagggagatgaagaagaaagagaagagattgagagagttgacagaacgcaaaacgctccgacgatcggaaaactccgtcgagatccgattagcgccgataatctagtggtcagagacgaagccatcactgtgtatctcagccgtctctaaatgtttctggaagctgcgaaatgtcctttaactgtaataatgtaatagtttaggggtctaaaatgcaattgcataataataataaaaatttatctgaagaagcccacagtgacgagaggaggaaaatcgtaaatttgaggaagcttggaatcgtttgttcgcactggagaatgtggtgttccgattggggagacagccatggcttcgattttttcgatttcgaggattacaaggtaaacaaacaaaaaaacaaaaatttgataattgtttggttttgaatttgttaaagttttggtttttgtgaattgggtgttgcaggatcactataaagttctggaattgaactgtgacgcttctgatgatgagattcgttccagctttatccgtcttgctctggttccttctcttttccacttcattttcccactaatttgtgacagtctctgagtgtgagttcttcagtgatgattgtgttggagttgtgttgcagaaatggcatccggacaaatttaaacaagaggattctgctacgtctaggtttcaagaaatcaacgaggcttatcaaggttttgcttctcttttcatcatgtagatgtagttgttgagctaggctttgaagtagtagtaagcttagaatgtggatttgtttcattggtcttcttctaactatgtaatgcagaatatatagttgaagaaagaagtttactagtttaggggaaaggaatctgttttcatttagccattgattgtgtggactttagcaataaagaatttgatcttgtaactgaacagtgttgagcgacccaattgcaaggcaggagtacgacaagaaaaggatgcgtcgtatctatgagcacaacaaggtaaacgagtgttagttatttcattcgagagagaaactactttcaatgcttttgagtttgataagttcccttgtgtcgtttgttgcaggaactattgaatgagtacaaggaactcatattgacttgcaatggccttgggatgaagcattatctttggtaattgcttaactaagattaggtgatatgtatagattgtagtgtacggttgagtttagggacacagcattagggttatgttttgagagcatcaattagaacgaatcaggttttagtttctctgcttccacaaaaaacattttgtcgtctccttagcaaccattatatcagttttcaactttatctgaacattgatgtcgaagataatcggtttcgtttgcattaccagaaaacttcatgttggaaagacagaattagtgtagttggtttaatccctaatgatgaatga

SEQ ID NO: 189801 - DNA, 74 bp, Arabidopsis thaliana landsberg
aatcgaattatttaccgagaaaaccccacccattgcgaaaaccagaagggcgagaaaacctattttggattaaa

SEQ ID NO: 189802 - DNA, 322 bp, Arabidopsis thaliana landsberg
gaggaatgggtagtgtgtagggttttcgaaaagagcacggcagcaaagaaagcacaagaacaacaacttcaatcttctcaaccatcttttggatctccatgcgatgcaaactcatcaatggcaaatgagtttgaagatattgatgagcttccgaatctgaattcaaactcatcaaccatcgattacaataatcatatccatcaatattcgcaacgcaatgtttactcagaagacaacacaacaagtacggctggtctcaacatgaacatgaacatgaacatggctagtactaatcttcagtcttggacaacaagtctccttg

SEQ ID NO: 189803 - DNA, 115 bp, Arabidopsis thaliana landsberg
atgatgacttgtctggaactgtacttggcgatgatgttccctttgacaaagctgacgatcttggtggagtttgtcaaagtcaacttgaagcagaagccacagaggaagttaacag

SEQ ID NO: 189804 - DNA, 15 bp, Arabidopsis thaliana landsberg
atggccaatgaacat

SEQ ID NO: 189805 - DNA, 321 bp, Arabidopsis thaliana landsberg
atggtgagatcaatccaagaaggagtcttgatgtcttcatcttcttcctcaaccacaagcaacagcaacgactccgacggttctctcagcccatctgcgtccaccaaaagcttcgtcctcaacactctccgtccgcctatcaccggcgcgtacaagccactcgctgttctctctgctcatgtcggctctgtttcttccttagcgctctgtggtgagttcttgctgagtgcgtctcagggaaaagatatcatcgtttggcaacagcctgatctcaagatctttgcgaaattcggacaaggtgatgggtctgtgaaggctttg

SEQ ID NO: 189806 - DNA, 1284 bp, Arabidopsis thaliana landsberg
atggcagcaattctaatgatcccaaacacaaggtgagtagcaagaattttttgtcgtctgctcgaggttagcgagaggcaagcattcacctctcctcctgagaggttgtgtgaccatgtcatgactgcaactcgagcgaatgttttcaaatcacttcatgtgtagagaaaatattgaagaaaagatgttatggttcgttctacttaattgttttgttctttgtaagatattggatcacatttaaggaacacattttggtctgggatctgtttctctaacttttcctaaatactcaatggaccttgtgagagattgttcttacttatggtgtagtatccatattttacatacctcactgaaattataccaaaatagaatctagaaaccaatattatgcttactatatgtagcactaaattctgtgttcatttcaaaagttggagttggatacaaacactagctagcaaggcagagagtccgggagtcgatgagaatggtaattcttttgaccatacaaccaaattgctacatctcgcatggcatccaacagaaaactcgatagcttgcgccgctgccaatagtttgtagtattgtacatgtactatgcttaaagaaaaaataaacaaacatagtactcaaatgaagaagaagctttggcacttgtgaaactgaagggtcagagaatgcttatataacaacatccatcatcagcatcttcatatgacagctaaaaactatgctctcaatttgcatcatccttgacgacttctttttttcttttggggacattcacttagaaaaaattgtttacgaattaattaacaattaggacgataaaattgctatatttaaagctaatgtctttattacgtaacttcaaaaattttgggaaaaatatagagcgacttaattttgtgtctcgtagcattactccaatatgatttggttgtggaaatatgcttaagggaccacattgaatctaagccgtccatgcgtcgaaacgcagccacaaatcgtagccgtagaaatgacgcgatgatgggaattgagaaagggaagtggagtgttagtcccacgtgttggaggaaacagaacacacgcacgccaaatggtcagctcttacggcatcttaacgctacgacaatatccttaatctgtttccatcgacacacgcacggttctgattcattctcaattctcaacggctacgattcgaatattctgaggtgtaatgatctatctcatcgagtgcaagcatacatacttgcttcacaagaacgctaa

SEQ ID NO: 189807 - DNA, 75 bp, Arabidopsis thaliana landsberg
atggggaatgaggggatgatcagccgagaggagaggatgattggttggtcggcaccacaagaaggatggattaag

SEQ ID NO: 189808 - DNA, 502 bp, Arabidopsis thaliana landsberg
atgcaaagccctgatattgataacctgaatttggagaagcatccatctgataaggtggtagtagatacatctgataacacaatgagaacacagggtaagcaaagacgacaagaatgtttatgatgagaagcatctatttatgatcagtttactgaattcttgatatacttgcaggcactgtgaacacagatatggtacatggtattgaaagaactaacattccagaagaagaggcctcccatatcgttgctgacattgtcccggtttctcatactggtggaaatgaagaggaaggcagtattggtgataagcaggatcttcgagaaatacttgagcgtgtaaagatgaatgatgtgcttgaatctcctattactacattaaaaggagtttttggggattctaatgaaccaatctccaagaaaggattgaaaaaaggagaggaacagttgaggcttgtttttagtgagttctatcagaaactccgccgtttgaaggaatacag

SEQ ID NO: 189809 - DNA, 299 bp, Arabidopsis thaliana landsberg
atgcctgtcgtgcatgctaatatggcagaagagctgcgggacgtaattctccaggcccgggccgtttcaccccatcatattatcctggaattggaggaggttacggagatagatgagccggttattgaagtattcctggaaatacagaagacttgcctggccgaaaaaatatcttttgtcattacgtgcctgcagccgcctttgacggaaaagttaaagccgcatcgtttaaatatcgcccccacaacagctgaagctattgacctggtgatgatggaacaattggaacgggagttgca

SEQ ID NO: 189810 - DNA, 87 bp, Arabidopsis thaliana landsberg
atggacaccaaaaaaccatccgatccatatgttcgagaacaaacatgttctcaaagatcaattcaaccaccaacaaatcaaggcaag

SEQ ID NO: 189811 - DNA, 402 bp, Arabidopsis thaliana landsberg
atgcaggtggatacagagccctttccaatgaacatgatcgacttcaagggcaagaaagtcctggttcggccaaacaccgccgataaaggcaaaggcaaggagatagtcatcggcaatgcaagagacgccgatgagaatcataaaatttcttgcaggaaagtggtggcagagaagactcccgaggaggggaaactcttaaggtgaccatcacgacctctggcactggagggcaggcatagaccaaggagcaggaacccgtgctgtgcatcttggaaggtccgacgcataggcgtggacggtccgggaccacgctggacgatccggagaattccagtggacggtccgatcatactcaagactcgcaacagccgcgtaccttcaaaccacgacgaccagagatag

SEQ ID NO: 189812 - DNA, 819 bp, Arabidopsis thaliana landsberg
aaactgtcgagcatggtggaagattggatatctcaagcaaatgcaagacaaagaacaggaagagctggacgcgtcaaacctgggatttgcttttcattgtacacacgctataggttcgagaagctaatgcgtccctatcaggtgttttcaataggtccattcctggtcacttgttcacttggttttagccatttaactcatctattccacactttttttaaggttcctgaaatgctgcggatgccattagtagagttatgtctacaaatcaaattgcttggcttgggtcacattaaaccttttctgtccaaggcaagtgacaccatctttactgataaaacaaagaacattatcatccatctgattctaatttacacactgtctttaggctttggaacctccgagtgaaggtgctatgacctctgcgatttcattgttacatgaggtaatatgtaatggatataagtcttttctttctgtagaactctaagttcctgggatcagtcatatttggtacatccaacctgtcacttggacatatagctgatgtgtttgaggctgtcctgcagtgtggctgatttatcttctttacattgtagccttagggtatactttatgctttccaatccctcattttagttccgattgatggaatatcaactaagtagagagttttgcatacctttgagagtttttttgtcctgagctttctcgtgtgaaccctgtcgtctttaggttggtgctgttgaaggggatgaagagttgacaccacttgggcatcatttagccaaacttcctgttgatgtgttaattggaaag

SEQ ID NO: 189813 - DNA, 142 bp, Arabidopsis thaliana landsberg
gcgacatccagatcctgttcccgggtcaaagggaactttcacacacatgttatatgtagggatgaaaacggacataaacggtcgaaacccctctttcacttcagataccgtattgttttatcaaaaacagaagcgggagtga

SEQ ID NO: 189814 - DNA, 55 bp, Arabidopsis thaliana landsberg
taaactcgccgtggataaggattggccgccggcgataaggatgtcgcgtgctcgg

SEQ ID NO: 189815 - DNA, 142 bp, Arabidopsis thaliana landsberg
atgatctcagctagtggtgttcccggaggctttcatcggggatatccacgtggctctacctttgaattggctattggttctcgtaccgctaaaggacgagatgactttcgcaagtaccatgcttctgccattgatgttcctg

SEQ ID NO: 189816 - DNA, 89 bp, Arabidopsis thaliana landsberg
cttcgccgcacgcggtcagcgcggcactagtgcaggagcagacagttgagtgtgcggtcagacagtgccctgtttactatgtctccgag

SEQ ID NO: 189817 - DNA, 269 bp, Arabidopsis thaliana landsberg
gaatatcggcggcgaaggttctcgtcgagaacggagtagaagatgtattgatactggaagcgacggatcggatcggaggaagaatacataaacagaatttcggtgacgtgccggtggagcttggcgccggttggattgccggtgtcggtggtaaagagtctaatcccgtttgggaacttgcctcgcgttttaacctccgtacttgcttttccgattacaccaatgctcgtttcaatatctacgatcgaaggttaaaactgatcccctga

SEQ ID NO: 189818 - DNA, 265 bp, Arabidopsis thaliana landsberg
atgccggtatctactcgatctaaggtgatgaaacaggagcgaaacgagcaagagaacacaaatctgaatcttccgttgagaaatccacatcaagggttgaaggaaaagatgagagctttgactctcttgtacgagcagcaaaagagagcctctttctctctcaggaaccctaatcataatcagtctccgaaacctgaagatcagagattcaagactcagctgcttgattcttccaagaaaggagacagatttcatcgcctggacg

SEQ ID NO: 189819 - DNA, 101 bp, Arabidopsis thaliana landsberg
gaaacggcctgagttttgtgtcctcgaagcttggagggcgtttaaacgataacccgcaatctctcgtggactacttgttgtcacttgagcatcaaggagag

SEQ ID NO: 189820 - DNA, 228 bp, Arabidopsis thaliana landsberg
atcaccggcgacctgtgcgcgccggcagccgggcccaaccgggctgtccttctactggtcgcaggcggcggcgagaacgccgactactggaatcttccggcgctcccgtcctacagcctggtcaaggccgccgccggcgccgggtacgcgacgttcgcgatcgaccggctcggcaccgaccgctccacgtacccctcgccgagcccgctggttacctacgacgcctag

SEQ ID NO: 189821 - DNA, 935 bp, Arabidopsis thaliana landsberg
atggattctgtctttggttccggaaaagatttactctatgcacaaccggcagattcttcaactgcttatgtttcaaaagctggcgattggttgcaagatgatttatttggtaatgtcactggtgaggcccaaaccaacgactcagccgtccatgacaagaatgagggacagattgtcggtggcaatggaaattcatccatggatattgattggatcggagatgatctatggcaaaccaatgaaaaaaaatccattgagaagacccctacagatgttaatgatgatgatgacgatgactggaatgattttgcaagctcggctaactccaagactcctaataatccactttctcaaaccatggaaagttcccaatttgagattttttatggacatgcgcaagataagaacggtgttaaagaacagagcgtggatgagaagcagaatactgatacaagcgtgatgtctgacataggcaaatgtcaagaagatgatctctttgggacttgggatagtttcacatcctcaaccattctgcagacatctctgcagcctcccaccattcatgcgaatccctctggtgaaaaaaatccggaaatgaacttgtttggggaaaataacaataacagagaccttgattttgatagcatctcacgttctgatttcttttctgaaagtagtggcggcaaaaccaactcagaggaagtcaaagtcataccttctggaacctcaaccttagacaggtttcttattttctagtcgattccttattctctaaactctctaaataaccttcatttcatgcttacaaggagctttagtaacatgttccggattttttttgtgtttttcgcttttgatttcagaccgagtgatcctgatggtagtaaagatcaaacagttgatcttgttgtaggcacaacgacaacagttcccaa

SEQ ID NO: 189822 - DNA, 123 bp, Arabidopsis thaliana landsberg
aaacgcatgagacttgatgacgaaccagaaaacgccctagtggtttcgtcttcaaaaaaaacggttgtggcttctggcaatgtcaagtacaaaggagtcgttcagcaacagaacggtcaatag

SEQ ID NO: 189823 - DNA, 2364 bp, Arabidopsis thaliana landsberg
tatcaaagagattctcgcttttgtctaactttatcgtctctcttcctttttgcctccgattggctgattttttctatggccgcttcttaccgaagcaccgactggtttcctcctactactactactggtaagcctcgcttgcttctctttaaaaatgataaatgttgaacctttttcgttttattttcgtgggttttattgtttcgtcactctaacgaagagattacgttgtctgttgatgaattttgcccactcttgttgtaatttctcgtaaagccttaacctttttgggattctctcacttactaggctttgttagattcttccacttcaccttgatcctatgattattctctcatgtttagctttttacttatggtggttgtgtctgtctgctttttatggattttttaggttcatttacgggcctaaatactgaccagagtgttctccaagatcaggtgagtgattagtggaattgcttgtgtcatataatgtaagctagcaccaatatgacacattgtgttatgattttacaggacatagttagcagtcgccctttttgtggacagggcacagaatcatttcacattggaggttagatctatatgatcctttcctaatcagttctattgtattttagctgtagtttagtggttacaactaatcttctgctggtttgtgacctttgttttgttttctctctggtattttggcattttcatttgcaacttgattttggtttttggagaagaaaaagctactgttgttttatgttcttaaaccaagagaactgattattctttcttataatgaagtccacctacttatgtggactattccaaattgttatctttgttttggattattctcatatgtgcactagaggaaacattgccgcatacccatgaaaatctttaccactttttttatttctgcttcgccatgtttgtcttgtgaccaaaattgtggattttattgcttcttagctgttattgtagtactgttttgaaatttccttgttgctctttaatgtcgtcgttctctcaatgaatatgcagctgatactccaaggtcgaaccactcacactcggatgttcctagctttgacaaagtctctcctgtgcgtaaatcatctaatctacgccttccacactacttgattttgatttctgatattcatgatgtgttcatttatttcctatctcttattaaattgatatagggcatgataaatgaaatgttttaccatagtaatggtgtaccatcagattttcagaggtcatctctttctaccagaaatcaatcatcactgcagcattatggcgacctctatgctgatgattcaagatatttcgttccttttcacttatcaaatcagcagtatccaacccctgaagatattcatctttctccggagtttcacatgtttcaggcgaactctagacattttgataggcatgtgaatgagagaaacagtagtgagattgataatatgatgcgcgctaggggaaattctgtcttaagagataatctcaaccccttcagtggagaaaacatgtttcctccattggcatctaccagtccatgtatgagacaccttggttcagcagaattgctggcaaatgattttaatatggtttgtttctgtaatcactacctctacctcttttaacggacaaagtacatagaatttctatgtagatctgattgatgaaatctatgcagggtccagcacatggaggtttgcatgatgcttttgaatctgctgcaaacttaagttacagagagcaagcatatgctcaatgcaaaagaagccctttctctgcttcttcttctagcccaacttgggagaatgattataacttgccaccacttgatgaagcaagaagtgaaagctacaatgacttcagccactgccctgccatgcttgatatgcttaccgagagtaacagaggtccgagagcatccaggctaaacagtaaaagtaaaatgatctcttatgatcgcgttgatcgtttttgtcagcaagaattgctctcccaattcagggacgcaaagttcttcgttattaagtcatatagcgaggataatgtccacaagagcataaagcattgtgtttgggcaagcactaaaaatggaaacaaaaagttggatgctgcctatcgtgaagcaaagaaaaaggacgtggcatgcccagtctttctcttgttttcggtaaatcgcctatttttcttcattacaaatcaaaacttgttggaagctctgagtgttcagactgataccttgcttggaagatatatacacttgcttgtttattcaaccatgaaactgcattgtcaggcctttgtcttcctagattaa

SEQ ID NO: 189824 - DNA, 329 bp, Arabidopsis thaliana landsberg
ctctctcaatcgccgatttaggtctgcaatcgtgatgtggcgtcctaagactttgacatccagacactgtaggtacaaatcgttcatcgcgtcgaggacttcctgtccaatcgtgatgatcgcttcaccttctgccctagtcagaaactcgacattcatcctcgaagcgacaaactctgcactcaatctcgtctcaggaattggaattcctccacagtagcaactttgaaccttatcgacccactacggcgaccccgttaaaccccctgccggcggccggccgttctcctccatgtgctcatcgagatctcctggattcacgaccctag

SEQ ID NO: 189825 - DNA, 347 bp, Arabidopsis thaliana landsberg
atggccatgggtccgatggctacgtacttaccgaaaacgaagaatcccactaagagaagcgaagggttaagagatggtccacgtttcctactaaacattttcctatccatttggatcgcccacgagcccaccttgaaaccaacccgacccgattcgacccaatcacgaactgcctactttggctgctctcgataatactaacaggaacttgtacaattcagttagggtttggttatgatgacggacccaaaaaatatcggatttttctgatcctagtaaacaataaagatggtccagtccgacaaatagcattggtgatgtttttgctgacaattaccgaacaataa

SEQ ID NO: 189826 - DNA, 459 bp, Arabidopsis thaliana landsberg
atggtattcgctaacgctggcagcgctacgcgattcgcgacgacgacagcatcgatcatcgttcctacactttctgcgtgctcgacgaattgcatacgtcgttacgccggcgcgacgtgttcgtcgcccccagttggaagtatgccgacccgcgcgcagggctgttgagcggcaacgaatgggagactgcgcgccccatcatctgccgcacgctcagcttgtctccaacgccctcgtcggcactcgtcgcgatcaccaaagaactcgatgagacctaccgcgcggtagcgtcccgacttccggacaatcctgcggtgcggttcgaaggcgagaacgacctggtcgtcagctccctcgacaagcttgaagaaccagcgtctatgctggccttgcgcgctgcggttaatgagcgttcgccacgcgtggacattgaagaggtattgttggagattgcagccg

SEQ ID NO: 189827 - DNA, 1832 bp, Arabidopsis thaliana landsberg
atgtttgatgattacaggggtttttggatgtcgaaacaagagcagattggtcaagttttgatgattattgtaggtatgacactcaagttttacatattagcgcatatacttttactttatatatcagcttcaatattttcttttccatatgtgaacactatcaatattttcttacataatctagtcatttctgtttctatagtagttttagtggaataaggaaaacttaaggaagtcataacttgagatatctgttagtttgtcttgcttatgtgaaaggctataatatggtctctcaaatattttctcttgtaatttagaaaaagagatagacattactattaagatctttgtattggcactgaaaatgtctacattcgattatctttttgtaaggacgcataacttcaagtacccgcttatggtcaagaggttgtgttgtatgataatatcaggtgcccggcccgctgactgtcttgacatacttcaaccagctgctttatcttctgagatgatttcaaaggtgagttattgaagatgacaaataaatacattagtaactgattttgaaacgtttgagtcaaaatacactgggctgatctcatacatgacaagttatgcaaactttgaattacgtccccggagtttcttgtattcaatttgattgttcatgcattacaccatgtgaagctcaccttgttatgatgaattcattggctccactgagttgattggtcgtatagtcactggctttttaatgtttcagatagaagacgggtatggtttattatggaatgccttcaggaaggcaaatttcaaggatgacgatgttgcttgtatccttagagctatattttacatcaaatccattttatctccaacgttctgttttctgttatctctttgctatttacagttcttaacatccagaagttctgacaaaacaatggtatacggctatactcgctcggattcgtatcaatgcatttcgtattgacctggttggaggctcatgtggcgaagaccttctttcactagctgcagcctctgttgaaggtgaaggtgcagttggtcatgccgtttatatgctaccatccttctacaatcatgactgtggtaataatattcactttttgatcttttttaatatgtcgggttttcgtgaagaaattctttaatgtaccaacatcataagccaaatagtcttataaatctttttcgttagacaattagcaaattttttgaagtaattgcaaggtaagagaaaagaataggagtagaagattataacagaggtttgtatagaaggagagttatactgttagggtaaagaacatgatcagataaagttttactgagaaactagcaaagtatttttttttacttagaaactagatagttcaaatccatgtgagtctttacctgaattgtttttgtaaactgttgagttcatctattatgcgggtacgacatctattacgccacaaaaatcttcatctatttatgaaaaagaaagtgatgactagtttgaatgtccacagatcccaacgcgcacataatttggttgcataatgcagatgcaaggttgaacactctacgcgatgtcgaagaaggtttggtcttttatacttataacaaagatttttaattagcatttcacttcaatcttgtgtgcatttcacttgattggtaacactacatgcatattttcaggtgaagagcttcggatatgttatatagatgcaagcatgggatatgaagcgcgacaaacaatactctctcaagggtttgggttcctctgcaactgtttacgctgccagtccactgactaa

SEQ ID NO: 189828 - DNA, 152 bp, Arabidopsis thaliana landsberg
gctatatcctatgtttcagcgatatagcgcgtttcaataatcattttgtggatgcagaagcattgcaaaatttcaccttatttgaaatggaagaacaacttaaagtcgtcaacgaacatgcagctaaaatcatcaaagtccgtttaatttaa

SEQ ID NO: 189829 - DNA, 326 bp, Arabidopsis thaliana landsberg
atggcatctgatttgtttagtatcccaatcacaacagtagcatcagagtctgctttcagcgttggaggacgggtgttaaatccttttaggaatcgtcttcttccccaaaatgcgcaagcattaatttgcacccgcaattggcttcgtggatatgcagatcttgaaggtaaaattgtaatttgaagttataaaacttacataaatcattgtcttattttaacttgtatcattaaaatgcaggagaaatcgaagaactttttgctgaagaagataatgatgctacaaagatgacaagtagttcaggagttggagattctaacatatga

SEQ ID NO: 189830 - DNA, 122 bp, Arabidopsis thaliana landsberg
gtaacttggatgctcagactaagaagcattctgtccaaaacgaagtacaaatgagcggaaaggacatctacagacgcatcgagatgttgtacaacgtcacgtttataaagtttagtttataa

SEQ ID NO: 189831 - DNA, 2691 bp, Arabidopsis thaliana landsberg
atgacttttaggcaagttgttttgcggcagctgtggaacttccagctagtgttatttgcacctggagctgaaagagaaatgggagatttcgaaaaccctcgagaggttaacttcgctttgatgtgaatgtttctagtgatactggccttgcaagtgggaattgatactgataggttcagttttcttattcatttggtatcagcaggtttctacatccttcactcttagctcatcagatgaacgggttatatctgttattgcagaagttatatgcatctccgctcttcaaagcaccgagaagcatttcctcgatgattatctgggaaaagctaagtttccgtttatgaagtggttatctaaacgcaggaggattgcttcaagagactgctcggttgtcctgcataagttatttgatgatgagcagaataccaaacttttgcttgagtattaccagtcaaggaaggaaaatttcaaacttgcagacacaaagcaaagaagccggtggtgggacttatctgccaattccaagttggaaaaaattggtggccctggatttagtagttgggcaagtgaatatttacccgcatatcgactggaaatggatagtacaatacttgcagacttaaagcttgagggctggagaaagtccagtgagaataagtgggaagttcttctaactcactcccaaatggtatgacgttttctctttatttatgtaacctacccgtctatgcttttgctgtgtgtaagactagaaattgcaatgttgctctcgctctatatatttgtctggctagcagtctaggttgttgctgctatatgataacatggagctatgttatattgttctgtttagtatagataaagacgtcgaatgttgttcaaagtttatggatagaccgtctttagacaatgttgaatccgtcataagagttgtcattcccatttacctatacacttaacgagatgctgatacgttgtgtgggaaggaacctagcaagatgaaagaatattatcaatcatgggaataaaatttcctgtactgctgcattttgtgtgctctgtggtgactaaggtgtctgtttttgtgcatgttatttcttgaggcctctacattcctgagacttgtataaaactcttaggttggattagctgaagcattggatatttactttgaagacacatattcacttcccaggaaacagctaccatgtgatgttcctggaaattatgcaaacttacccaatgaaaaggtaatgactactggactgctaaaatttagccaatctttctgatattatactttggtgtctgttattgtgtatgtaatcagaaccaattgccagtccttgctatattactgtctgtatataatccgtattctccatgataatcacttgctctgtctaatcgtgtgcttcattacagctgcctgatgaaatatgttaaatatatttgtagtctgcagaatatattcatgtttactattagagtttttaccattattttggagacatgttatgagttaataagattggcttctttggtagctttttacctgtcaaacttatgttcacttctttggtttgctcattctctattgacagagaggattgtctttgttgaaattcatatctgtcaccatggccagtggaatttttcttcttgctgtgagtgctgcggcccaattctgtcttcctcagaaaagcgagaggaagtatcccggaaaacgccaagagattttatggtcagagagtgaattgttatctcatcaatcttcagattcctctgaggtatggattaccaaaacacgttgtattcatatagatgtgtacgacaacaattgcacgtagacattaatagcttttcaggacagctctagttcatttgatgatcacataagattaagtactggtgcagcctttttttgtaaatcccttgccatgaataagttaacccatccaaaaagtaaagacaatccaagacctatatatatttcatgtctaatgttatttggttaataatttttgcatgagtatggactctctatactgagaatgagagaatgagatcaaccttttattattttttgtggtgctttttcctgtttttctcggaaactaaattctgaaacctcaaatgagcagttggattcattctgcggattactcgtcaacaagctcaaggatgcctacagctgggtaggggagatcacactagaaagcagcataggtgcctggataggggaagtacctgactacttgaaagaaaccagcagagctaagtctgttgaagatcacattgttacaagctcgtctcttctggaaatactcaatgaagacgcaaaggcatctgcgcaagatatagctacttaccaggtaattccagtgaattatgatgaattgaattcttttaagtggactactacttcatcttcgtctggttctttaatggaagcaggtagttttatcatccgaaggtaaaatcatagggttccaaccgacaagccgggtggctgtgaatcactgggctgctaatcctttagctagagaactttatggaggaaaaaaactcaagcctggtaacacaccatggttcttctttcaattccttaaattcaatgctattcgtatccttttaagtttatctgattatgtgttgtgtcattctttgctttgcagggctgattga

SEQ ID NO: 189832 - DNA, 65 bp, Arabidopsis thaliana landsberg
atcttcgtcctttgccgcgactgcgatcgactgcgactaagtgttgttctgatcgggactattga

SEQ ID NO: 189833 - DNA, 250 bp, Arabidopsis thaliana landsberg
tgcagatatccctgataactggacccgtaagctggaagatgtaaccagtgaccgttaccagcaacaggttgccaaggcaacagtattgaagggtgaaaaagaaaaagaaggcaagcacttaggtttttatacaacgtttgcaacaaaagcagatgaacaggtagaaatgaaagccggaatttcttttgtgagcatagatggagcacagcaaaacctgcaagccgaaattcctcactggaacttcgataag

SEQ ID NO: 189834 - DNA, 1782 bp, Arabidopsis thaliana landsberg
gttggttgcatttgggatcgcggttggaaataggcttgcacgctatatctcacttggcatgtgatttcccgcgtttgctgcatgcaaaaaatgtagagtttgagccaatgaaaaagtttttcggagacgagaggcctgaaaattatggatggttcatgaaagggacagacgggtggaccggtgttaccatggtggttcttatgttagtggcctacgtcttggcgcagtcgtggttcagacgaaaccgggcaaacctaccaaaatcgttgaaacgattgactggtttcaacgcattttggtactcacaccatttgtttgtcatcgtttatgttcttctcatcgtgcatggctattttgtttatctctcaaaggaatggtaccacaagacggtacgtatacatatattttttcttgcgtcttgattaatcacggagtgttcagaaaatcagacgaaaagatcatatgataatttttgttgatgaaagcatcctttgttattattacctttggacagacgtggatgtatctggcagttcccgtactactatatgcatttgaacgattgattcgtgcatttagaccaggtgccaaggctgtcaaggttttgaaggtatttctatgatctgttcacaataatatacatgcattcttgttattatagacaaaaatcaaggatatatttcacttttttaatttctattgacatcaaactgattttcaggtggcagtatatccaggaaatgtactttcactttacatgtcgaagcctaaaggtttcaagtacacaagtggacagtacatatatattaactgttctgacgtctcaccattacaatggtatatcaacaatacaatgccactgaacttgtacaagcataagattttaactttattattaacctattttcaattttgtgtaggcatccgttttcaattacttcggcttccggggatgattacctcagcgttcatatccgcacactcggagactggacatcgcaactcaaatccttatattccaaggttactatttttcaagagtaacatttgtgaattaatgatatatgtacttgatttgtttaattacaaaaccataggtttgtcaacttccctcaacaagtcaaagtgggctcttcatagctgacataggtcaagccaacaatataaccaggtacagtttttgatttataatttgagtaatcatgatttaaaaacatgagcaatttttctaatgaattttacatggaaaggtttccgaggctgttaatcgatggtccatatggtgcacccgcacaagattaccggaactacgatgtattgcttctagtaggtctagggatcggagcgacgccattaatcagcataatcagggacgtccttaacaacatcaagaaccagaattccatcgaacgaggcactaaccaacacataaaaaactatgttgccacaaaacgagcttatttttattgggtaacaagagagcaaggatcattggaatggttcagtgaggtcatgaacgaggtagctgagtatgatagtgaggggatgattgaactacataattactgcactagcgtgtatgaggaaggagatgcgaggtcagcactaatcaccatgttgcagtcattgcaccacgccaagagcggcattgacatcgtatcgggcactcgggtccgaacccatttcgctcgacccaattggcgtagtgtcttcaagcacgtcgcagtcaaccacgtcaatcaacgagttggtatgtcactagctattacaacaattccatag

SEQ ID NO: 189835 - DNA, 3181 bp, Arabidopsis thaliana landsberg
atgaagaagaaagttaaatcaaataccgcagcttccttgatctttgacattagtaacagctcccttctttctccaatcaacagaatctggaacctttacgctaccaccgagactctgtcccttactagccattatcaccgacggagcggaaacagagagaccaagacgagaagctttgaactcgtggtgagtcagatccgcgaaggcattgagagatagagaataagtagcgttagtgatgagattgtgttgggtaacgaagtcgttattatctttaaagatttgaatcctctgttgcctctcttcttctgaattgtacgttttgccatgtttctggcaccagtcgtcgaatagctcggagatgtcatcggaagatgacgataaagaaacgagaagaaggaagaagaaagtgagagagacaaaggaggacgatgagattgacatttctgtaatttttgtttgttagaatcgtggagatagttttggcctagaaataaggaatagcctggagatttgttttttcccatttcttttgagatttagccaataagattacaaaacgctggttttacgttggcgtttttaacaaaaagcgtttggcgttgaaaaattaccgaacaaaatgattcaggcagaagaagtgaaccacgtgtgtaaataggagggatgtagctagaattatccacaactttgccaccagaaaatttgaaattgctaaatttaattatacatactgtgaaatatgcattacaaacataatgtaatgttaataagtacgttcattatcttttattttttctcataagtattgtactttatctaaaactggtgttgcaaaatatacaacagtggaaacttccacttacattttgacatccatcttcacaacattaagcttttaaacacatgcccaaattaatgaaagcccaccagagaaaactaattcctgtaaggaagtaatagtcgtcgacaaagttgagacccgaggacagatgacgcataagtcgtcgccgttcatcgacgatttgataagcaacgaaaggcacctccaaaaccaccggaaaccgccagaacttcaagcacagaagtccatcggtttttaattagagaaacccataatcttcagcatcaaatctgcaatcttccccaggcaattgtttctcaaaatctgaaggacatcaacatagagagtaaaccaactgaactttcaacaacacccacacggcaaagcaaccatgttggcaaaagaaatagattttccggagagaacgaagagagacgataacagagacaactttaacaagcctacatcgtcaatcatatagattttgcattagaaactctcccaatctgaatctcgaaaaccaaaagcttgttaaccatgaagattattcataaaaaacaacaactatatcggataaaagaaactgaaagcaaagcggcaaggaagcgccaaaagcaaaccaatcatcgtcactatgtgagccgaacgatattggacgaaagccgatctaacaccacaataaagtcattggttgtcataagacaacccaactaatcgagatcttaaaatcggacggcaaaagaccaaaacggtaaactgcaactgctagaataagtaaaaaaacaaacataaactaaagaagatcaacgttggtgctataggagccaccaaacgttaatctccgaccaaaaaacagcgaagacttgagagctacttgaggagagagaagggagaaaacttcagaggaggttttcacgtctatgtgcgtcgccttagctttccgcttttataattaaatctagaggatatgcataaacttagaaaagaattaagaatctatctatgaactagaaaaacatgtcggagagatggaaaaaatgacatatataacctctattcgctgattctaaagcttcaacattttatattgagatggagttacgtagaaggtaaagtttaaacatttatgttctaatatcaactaatttactctagtatcactatttttttattttcacacattaatttttttcttatcacaccacccttgacgagtttttggaggacttttatttcttagataacgcttttgtatggcgagcaatcaagcaaattgtagaaggtataaagcaaatccatgaagcaaaaaatcatgcatcgggacattaatccgctaaacatttttcgggatgcccataagaatatgaaattatcagacttcagattgggtataatctttaacttatttatcttaagttttatccatttcagattttggttccacaataagacaatcatgttaaaaaaaaaaactttttaggcaagtttaaaaaaaaaaaacttttggcgatgctactattagcaaagatgttggttcctataatgaacgaggaacaaactttgataaagctccggaaattctagataaatcggatatgattgatgaaaaagcttgtccttgtgtatactattttacattatggttatactatatacattaagtttactcggttctcttaagtgatgtatttgtattgcaggccaacatttacggtttcagcattgtattctttgagttttggcaccgttttaggtccagcatggagaggattaaaaccttagaggctcttacactgagaagtgaattaccctcgaatgggaaaaagatcatcatgttcaggctgagctgtgatatgtctataatttgcatgttttcagtgtctattcatcatcactttgagtctagtttcgtatcattcatcactgttttatattatttctcatcattcttgcacactttgcatgattaggatagctttgcatacatattgcatttctgagttgttttcaggtgatttggagctgtttgcgagcaaattggaagaaacgagccagaaccagaagacatactcgaccccaggccgagtgactttggagccattcttcccgtccactcgaccaccaggtcgagtaacctcagctcaggccactggacgacgttactcgaccccctggtcgagtgccgtttcgccacgccacctgaccacactcgaccattcactctaccaagttactcgaccccctggtagagtaccatctctcatcaccatcactcgaccggacactcgatcacgtcttcacagtctactcaaatccgcactcaaccagacaagctga

SEQ ID NO: 189836 - DNA, 57 bp, Arabidopsis thaliana landsberg
atggagcgtgtacagcgacatctgccggtaattcgcgatggtcacgatcggcaggag

SEQ ID NO: 189837 - DNA, 320 bp, Arabidopsis thaliana landsberg
atggtgttcccaagagatcttctccttatcctagctctggctcttcgggttcttcttcttcttcatcttcttcaggtgaaaatttctatttctttttatttgtttattattttggtggaaaatttcaataccaacgttctaatatttgctggaaaatcttgaaaaggtgttcattaaaaagaaaatgattcgatgttgaagttaataattaatttatttgactatcttcactttaattcaaaaggttttcagtgtgaaacttgttcttttgttttcaggctccaattgtgatttttgtttcttttcattttgatgaataa

SEQ ID NO: 189838 - DNA, 168 bp, Arabidopsis thaliana landsberg
agtctccgggaagacctggaagtcgactcactcacgacgatcgaggtcgcggtagcgattcaggatgagttcgacatcgaggtcgaagacgagaagctgaaggaaatgcagaccattcaggacatcgttgacctggttcagtccgcgggagtcgccgcggcttcctga

SEQ ID NO: 189839 - DNA, 53 bp, Arabidopsis thaliana landsberg
gtcggtcagtggagcggcgaagtgactgcggtcacatcggctctgtcgactga

SEQ ID NO: 189840 - DNA, 146 bp, Arabidopsis thaliana landsberg
atgaaggtcactgatggaggagatatgtttgcgaacttgcgatgtgggagtgtctccatgggaacgagcattccgctctctccatatgcagtggaacgaagcttggaaaacgcaatagagcaagaacaaatgtgttcttttcaaag

SEQ ID NO: 189841 - DNA, 406 bp, Arabidopsis thaliana landsberg
  unsure (1)..(406): unsure at all n locations
gttcctgatcaccccggtgttcctgacgcgtggcgctgacaccgtgctcagcctgctgctgttcgggggcaaccccgagctcaaacccgagaccgccaagacttggacggcgggctttgactggacgccacaggccctgcccggcttgaaggtgtcggcgtcaaccttcgaaacgcgcttcaaggaccgtatcggccaaccggccaatgataatcttggcannnnnnnnnnnnnnnnnnnnnnnnncgcctttcgccggttcgtcgatccggcgggcaacgccagcgatctggcgctcgtgcaagggctgatcgacgacccagcctcgcgcgccaagggcctctttccggccgtcgcctacggcgcgatcgccgacgcgcgctatgtcaacaccgccgccctcacg

SEQ ID NO: 189842 - DNA, 526 bp, Arabidopsis thaliana landsberg
atgcgaatcgacgtgcggcgatgcgcctcagtcgcgtcgcgccggcatggtgccggcatagttcgcgcgggggcggatcaatccaccattttcctgttgctccagtgcatgcgccagccagccggccatgcgtccggcggcaaacagcgacaacgccgcatccgcgcccaaggcgtacaccgaggcaatcgccgccagcgcgaaatccaggctgggcgcgcggccatcgttgtcgttgacggcatcgaccaggcgctgtatgcgcgccgattcggcggggcgcgggcgcgcgtcggccagcatgcgcagcagcagtgctgcgcgcggatcgccgtccggatacagcgggtggccaaagccgggaagctcttcgccacggcgcaggcgttcgcgcacataaccggcagggtcgcgttcgagcagggtttgctggatcagcgcgtgggcgcgcgcggtggcaccgccgtgttgcgggccggacagcgccgccaggccggcacaggccgccgcgtgcaggctggcgccg

SEQ ID NO: 189843 - DNA, 796 bp, Arabidopsis thaliana landsberg
ggggctcgagcggtttctcgagtgcctctccgtaaggacctgttctatggatgaccgcccgggaaaacagtgcaaccatgagggtggaatggggtgcccttagctgaataattagaggaactggggtgtagttcgcttagccgtcgtgccatcaatggggctcggtgtatgcggctcgctctgccaagtttgggttcgccccttggggaggagtgcggtgcatttaggaaacctaacgggcggctacagccccggggaatctttgtaaaggctacatagtgatgccctgctgggtcaccttggtagtgtttaagggtttgatcggcccgaggcaagagggaatcacggcttgtgggtaaagtgcacaacctctgcagagtgtttgaaaactgatatatcagccgtgctcgcggttatgagcaaccttgggatcctcttcgattagaagaactttggttacttttatgatgatgaatagcaatgatggttataaatctgatctctggtatttcctcttggaggaagtgcctctgggtaataactgggttattactaaaatttggctctacttatagtaataaaatttgaccaactaaaagcaactgcttaaccttaactccacatacagctagtccactttagccaaacgggacatttgctgagtacgttgatgtgtactcacccttgctttacaaaccaccccaccctaggttgtccccattgtactcagtgctcaggaggagatgttggcaacatggaggactttgaggagttccaggactacgacgagttctag

SEQ ID NO: 189844 - DNA, 622 bp, Arabidopsis thaliana landsberg
gctataaagtgggcatcatcggcctcaccacacccaccactccggcaaaaacgctgccgatcaacgtggtgcccctcgaattccggaaattcctcgagcccaccctaagagaagcgaaagcgctccgggcccggggagccgagatcgtgctcatcaccacccacgaaggcagcgagggcggaaccgcgctccgcacgatgctcgaaaaaatcgccccgggcacgatcgatgccgtggtctccggccactctcaccaggaagtgcacgagttcgtgaacggcacgcccgtgattcagtcccgcacccgcggccttttcttcggccgcatcgatctctacgtgaacaaggccacccataaggtggaccgagccctctcgcatatcgcggggatgacgcccatttgcggcacctggtatcacggttcggaggactgcaatccccgcacgaaagagaaggatcttttcccgctccgccaccccacttacgaaggcgtggaagtgcagcccaatttgaaagtgcgcgccgttcttcggccttatttcgctcgcacggataaattaaaaaaagaagtgctcggccacgctaaaaagaatttcaattttatcccacgagggagagccag

SEQ ID NO: 189845 - DNA, 554 bp, Arabidopsis thaliana landsberg
atggattcgacacttgttggaaagaatctcttatccaaaggcgatgaatttaacgtaatgtgagtccaggtcttcaggcttgaacttcgaaatattcaaaataaaaactatagcgaataagggtacaaatggttaattcaagtatatatatactacgaaaaaataaacctaaactaatatgaattcaggcaaaggtcaaatccgggattgaatattttggctattttggagatattttcattaattttacaaggttagttagtcctaatggataattaggatatctgctacatacataacatgttccattatatatccttaataaatagaaaatgtatcgtgaaatggataacctgtctaaattggattattgatcaattaattaaaactactatcaggtggattacattcttggagacaaccctagagcaacaagttacatggtcggatacggagagaactatccacgacaagttcatcatcgtggttcgtctattgtctccttcaatgtcgatccaaagtccgttacttgccgtggtggttacaaaacatga

SEQ ID NO: 189846 - DNA, 91 bp, Arabidopsis thaliana landsberg
atgcagcttgcaggaggaaaaaacgacaatgcggctcgccggagctcgccggaggaagaagcccgaagaagaaaacgagctcgtgctcgag

SEQ ID NO: 189847 - DNA, 661 bp, Arabidopsis thaliana landsberg
atgacgacttccattaaggagagggaagttgagcagctcgctacaacttgcatcgccgttcaaggttttctgtacgcattgcaacttgtggtattggaagcagcacctgttatacaagaagggcctcaaattgacgagatcgttggctctgattctgatgtagaccccaccgttgtcgtaggtcctcgtcagggtgtagcactcaagctcggtaatgccaaggatgtgaatgcaaaatgcgaggtaaccctaacttgcagtacaacgttaatagatgtgttaacaccattcaacttttgttatcggcgataataaatctgttaatattttactatatatgcttagtgtttgataacaagtttaattctcggtgacctcgtatcgcgataatgttttgcataccgcgtatgttatttattatttgtgtactcgccataccgatatacttagctgataagcatgtggttaacgcgctgctaattttatttgccgttggttcatcctatttggctgcaggcttatgttgatcctatcatatatcctgattcccggatgaatccatcggaagacttatcttggtcagatgatgaagatgacgttagggtggagaatttggtgaagatggcggaagaagggaaggcattctcgaatgaaatgtttg

SEQ ID NO: 189848 - DNA, 751 bp, Arabidopsis thaliana landsberg
atgccaatttctgtcttgcggggacacactggagctgttaccgcaattgctttcagttccagacaggcgtctgtttaccaacttttatcgtgagttctgatcaatatgtatctattttaactagtttgtttcgcttctattcaagacccctggatctttagtttggatgtttcatactgcgtctggattggtaatcagttattcgtggtttttcgtaatctatgtaggtcatcagatgatggaacctgtcgtatctgggatgctaggtattctcagtggctcccacgaatctatgttccaagtccttcagatgctaacactggtaaaaagtggtacatcatcatattttgttcaatgttaagatatatttggttatagagctcattggaagtttctctcttaggcgaaagcacttttacatcttccaacacaggatccacgagcaatgcatctcagagtcatcaaatattatgttgtgcatacaatgctaatggaaccattttcgtcacgggtagctctgacagcaatgcaagggtctgtgttaaactttcaactttagttatcctccttagtaatgcagaaactgtgggatatgtggtttttgtttacttttagtcttgattgtcagtatttccataatcttgcaggtttggagtgcctcaaaacctaacttggatgatgctgaacagccgactcatgagctggatgttctacggggccatgagaatgatgtcaactatgtgcaatttag

SEQ ID NO: 189849 - DNA, 14 bp, Arabidopsis thaliana landsberg
atggtggttgaaag

SEQ ID NO: 189850 - DNA, 128 bp, Arabidopsis thaliana landsberg
cttcaaccacaatattgaagagtcctctttctcgactcagacatcaaattcgacaactgaccgacccgactcgacaaaatgttcgcatgaacccaaagcctctctccctttgccttttggcacaatga

SEQ ID NO: 189851 - DNA, 88 bp, Arabidopsis thaliana landsberg
aggtcacctatgtgtcttcttgaagtgtcaacttatacccttaccaagaaaatgacatataaagtgatttcatcagtgattcttacac

SEQ ID NO: 189852 - DNA, 707 bp, Arabidopsis thaliana landsberg
gtcacaaagcttctgatggatacaacagttttgcggttttatcctacagtctttgtcattgtcactgacatgctagatatgcttggggatatggtgtgggagcggatcaaacagaaagcagaacttgatatagatggaacagtgatctgcgccttaccgagtatgcatttctattctaatcgtgtgtttctttctaacaaaataatatttagtcctgagcatagtgttctcgagaataaaattacgtgacctgggcatttgttcatgattacaatcaaacacatacatttgatgccaacaggtagcgttatttctagttgcagcttataatttattctctaacctgtgctaaagacagatgattttcaatcaagtgatatctgccttgaagcaagagagacttgctataactggttctgcaaagttggttctgttcgagaacttctccctcgcatgtaaagccccatcaattattatttttcttattctccctaccttcctctgccttagcattggcctttctttgtatgcccatagttatctggagcttgcgatcttgccttgctggcgtttcctcattaatcagcccatggaagttctggatcgtttagtcatgatggtgagaggtctcgcagatccactgacatctttgtattgtcgtctttatatggtgcatcgcatgcagaagtttgggttctgcagttcag

SEQ ID NO: 189853 - DNA, 91 bp, Arabidopsis thaliana landsberg
atgcgcgtggtctggtctggtctggtctctgcaagcacgaaatctgtctacctgactggcgtgaggcggcgcgaaagcaagagggataacg

SEQ ID NO: 189854 - DNA, 162 bp, Arabidopsis thaliana landsberg
atgcaaagtgagacagacgaacagctggccaaaaataacctgaataaaattatctaccaggctgttgctgatctgaaagctgctcaaagcacctttgaatcaacttctaaaacttttgctgcccgcaaagaatcattttcagtaatagaacagcgttataat

SEQ ID NO: 189855 - DNA, 122 bp, Arabidopsis thaliana landsberg
atgctcctattcctcctgaacttcctgtgcctaactgtgactgtggcagactggcttgggtatgtcaatccaaacatccatacacggctgctcgctgtttctacctttgtggcggttttgac

SEQ ID NO: 189856 - DNA, 105 bp, Arabidopsis thaliana landsberg
tgtaaatacgtatttgtgtttcgatactcaattaccggaaacaacaacaaccggaaccggatcaaccatatcggaagaaggatgaaagaaattgaagaagaatga

SEQ ID NO: 189857 - DNA, 1838 bp, Arabidopsis thaliana landsberg
atggaagaaaaactcattttggtttggtttatttctttcatccagaaccttcctgcaatatttgtttcacaaaaggttagttgttccgcatacaaactttatcaagaagaaatagctcgcttggacaaatttgatacatacacataataatacaccacaaatgccgatcccaagccccaccaaagaaacctgataaccagcctggatatagccattcctcttgccatgctgtaggcgccatacataagtacaacatcaagaagacctgaagaaatgacaaacatgtgatactcaacaagaagatacacgtacatttgcaatttaatctgaattttctaatagtaagccaacagagtcaaatcagaaaaatttacattcaatgaagttcataatagcatatgtaggcccagcactgagtaagatcttgaaagtttcgatattgagatgttcattcctgaaggctataatcgtcaaagactgtggacaagtaagaataataataataattaggaacattatcaaatatacgcagaacattgttcataaaaaccacaccaacctggaacataataaacatgaagatccaaagtcgaataaaacttcggaaaaggtgaaggtatgtccgatgctcaacaaagctacttttagcagtctacattaaattcaaagaaaatggatcaggcaaagttgttgcagagacatggaaatatgataagaagacagaagttgaaattgtgggacaataattctcattggagtaattcccctacatagacgtcggagagaaatataactcccaaactatcagatataacacccgcaactggacaagacccattaaatgcaatcgtatataatgaatgtaagagttatcagataccatccaaaatgaaaaatacgagaatcagggatagcttccaaagtaaaactcacgaaaattgaagccaagaagaagtaagtggtcacagatgattgaccaaacgaagaaggaatgaaacataaaattcatggaatctatccatatgaacaaaactcacccttttccgccctttcggcttgcttaaaaagcgtgactctgttttcataggccagcttaactcaaagcaagcaggtgtcctgaacataacaaacagttaatggaaactccttgaaatgagtttatactagcaaatgtaatagtataagcaaactacaaaccaaaagtattcattgaagtcatcataattccgccattcagaatgtgcagctttcccaccattgtttcgaacagtttcctacatgagtatcaatttcaaaaccaacttaagggctcacgcaaccatataccaaaaacattaatgtaagacgcgtcaaatccacattaaaacatgctaaaattcctcagaaacatagaataagatctgatctcaaatacgaagtagggatgtacttcaaatataggccagaaccacctaaatactatgtcaagaaaatgattagaagatctttaacgttgtactcaaattaacttaaaataatgatacttcccagacaactgctactaatttaagtaatatgggtttaacacaaaaaatcataacaagggtttagatactctatatacccaaaagctctggttagtgaaagaaatcactcttaaaactatcatttttgcctagcattaaactgttgaaatctaatttccataatagaaaattaagatgcacaaaatcattgtaatagcggaactcaccgctgagattgtttcatatatagggcagataattcgctcaagaaatgatacagaaccggtatccgttccagttaagcaactgtcagcacgaacagcttctccatga

SEQ ID NO: 189858 - DNA, 50 bp, Arabidopsis thaliana landsberg
ttacttactctcgggacgaatggcgaattgacacaaatccacgaatgtaa

SEQ ID NO: 189859 - DNA, 200 bp, Arabidopsis thaliana landsberg
atgaggtttttcgataccgtttactttggagggttttgtcagccgagccgagacatcaatgtggtcaacacaatgcatgctaattgttgtattggcttggacaacaaagtgaataatcttaaggcagctctcgaagattggaaacgatatgtgtcactaaacacgaccgtgtccgagactaaatggaatattccgcctag

SEQ ID NO: 189860 - DNA, 115 bp, Arabidopsis thaliana landsberg
atggacaaggacggagacttaacgcagctagaactagccgctctgatgcgttctcgcggtctcaaacctcgcggcgagctgatctctcatctgctaaaccaaatcgcccgtaccg

SEQ ID NO: 189861 - DNA, 399 bp, Arabidopsis thaliana landsberg
atgacaagcttgaaagagcttcttcttgatggaactgcgataaagaacttaccagaatctataaatcgcctccaaaatcttgaaatccttagtctaagaggttgcaaaattcaagagctacctttgtgcataggaacattgaaatcgctggagaagctatatcttgatgatactgcgttgaaaaatcttccgagttctattggagatctaaaaaatctccaggacctccatttggtacgctgcacatccctttctaagattcctgacagtatcaatgagctcaaatctttgaagaaactattcatcaacggaagcgcggtggaggaattacctctaaaaccgagttcactgccaagcttgtatgacttctcagcaggagattgcaaatttctgaaacag

SEQ ID NO: 189862 - DNA, 222 bp, Arabidopsis thaliana landsberg
cttcgcaatctcccgggacacattaggcgccaactcggaccccttctggaacatctggaacatagtataacaaaccaaacatttctttttcaacaagtaaaatcaagagtaaagcaactgatgatgcagaagaaggatacatacgaagccaaaaccattggtggtagattgtgtcttgaccatgagaaaatgtccaggattctcgccaaggaggattttcag

SEQ ID NO: 189863 - DNA, 373 bp, Arabidopsis thaliana landsberg
atgcccaagcaaagaatggctagtcttcaagaagaggcaaaagcaggtatcaacaccactcatctcgatctttctaaaattttcacttatcttgattctgatgtaagcacaaatttaataaatcaagacagtgaatgggtcaaagcatgagatatagccacctagcatactagtgacagcacaaaaggatttcaaacacatcctacacatgctaggtgccaatctcaatggtgaacatattttggattcaacaagtaatagtcaagttcacaaatatgaagacaatcttagctcaacaatattgtatcaatacgagaaaatagatcctaagcatgccatagcatcatcatgtacacaaagaacatactactag

SEQ ID NO: 189864 - DNA, 235 bp, Arabidopsis thaliana landsberg
atgactgatggcaattccatgccgagagaagacgagagctatgcttccaaatcccacaatgtggcacaatcatcagtcatgtttccttatcgccattcgcgctctcggtcagctcatatagcaggtggtattgatatcaaaagtgatgaacgtcaatcaaaaggcaggaagaaagagctgtttccatcagacaagaaacaagccttgacaagccctccaaaaccggtttctgcag

SEQ ID NO: 189865 - DNA, 216 bp, Arabidopsis thaliana landsberg
acggcagcacaagatgaagtcttgttggttattggcgagtgggtgagggttgataatttggcctgacaatttgaacctaagactgtggaaggatcgtcgtacatccgcttccggaccaacatgacgtatagagagctagctcagaaggtgaaagagaaactttctttccgtgcaagagacatcataattaaaatggcttaccaatatccagagtga

SEQ ID NO: 189866 - DNA, 67 bp, Arabidopsis thaliana landsberg
acaaaagtgatatcctcatttggagaaaggcgatattgtacccaagagaaatatggtaagacaaaag

SEQ ID NO: 189867 - DNA, 345 bp, Arabidopsis thaliana landsberg
cgagttttcagatatatttgatttagagcaattcaagagtgttttagcaaatgatgtgaagattgtttcgttgcttcccgcaagtaaagtaatgactagaccatcggaagatggtagtatgccctttaatgcctcccctcaatggatccgttcgcactatccaaagcgtgtaagatcatacaatatcccttgaagcaatttgtgatgaacaacatatgagaaagaatgttcaatggtctttgttgtatcctgcagttcaatagggaaggtgttctgcttttaaggagattggattcaagattgtctaaagacttaccctctgatctccagaagctggggtgtaag

SEQ ID NO: 189868 - DNA, 350 bp, Arabidopsis thaliana landsberg
atggtcttttcacaaatggatgtgtccaatgcattcttgcatggagagcttattgagatcttcaagagtattcctcaaggatacaccccacctgcaggtgtatctcttccccctaatccggtatgtcgattactgaaatccttatatggccttaaacaagcttcacgtcaatggtataaaagattgtcatcagttcttcttggtgcaaacttcatccaaattcctgctgacaacactttattcatcaagtttacttctgcatcttttgtggcagctttggtttatgttgatgatatcatgattgcaagtaatgatgataaggctgtggaagaacttaaagctttgttaag

SEQ ID NO: 189869 - DNA, 208 bp, Arabidopsis thaliana landsberg
atttcgtccggaggaggacgagagttatcgatcgccattgaagaagaaggttcacgaagatgaatcgctcgaattcgaaaactgcttgttgagatctaatcgtctgcgaaatcggagaagaagcaatttgctgcaatttctcaagaagtgtgtcaaagaagcaataaaagtgagcatgggactggcttttataagcagcattgagtga

SEQ ID NO: 189870 - DNA, 1062 bp, Arabidopsis thaliana landsberg
gacgatgttatccagcatttggagcctggacctgtacgatccacaatagatcccgactcactttcacagaagaagccacctcagcgtcaacaagtaaggatcaatccatggaagctggcaaaacttgactcaaaagaagcatctaaagcagctgcaaaagcacgtgcatcttcatcagtgcttcttcctgtaagttcgcggcaaaacccttacaaaaccagcagcaatgtaagcgggagaagcagccccggaagaggcaaacctgctgattcagagtcttgtagccttagtagtccaggtttgacgagagatcacttcaacccaatgtacatgtcatcaccagctaacgagtcacctttaaacgaggaagaaagcagaaatgctgttgttgcagctagaagaaacttgccgtcaagcgatgagagttcagtagtttgggatccagaagctggccggtttgtatcgttgtctcggattcccggaacagatgttggaggtcctcttggtaatgaatgtctcaacaccataacttctactgggactgatcgtagcagaagggctagaggaaacccattgactggttattttcaacaggttagatcacagagaggagaccaacttccagtgtttatgcctactgattctcaactgcacagacatttatctactagattccattagaaacattttgtagatcaccaacttatatgtttccattcaagttttgtttcttatttctctttttattttcttgccaattaaggagacagttttattggtttaatggtagggaagaaatttaaaacaagatttagaactagtttgtaacacctggttattattgaaaattgccaagaaagaaagaaattaacagtattgccgtgagaataaggatacacatgcattacgcagcatctcggaatagctagatgagtgatgttgcatacagaacttggatctggtttaggtaaataagtagagttgatgcaaaaatgtatctcctctaccatcgtcgccattttttgtttttttttcaagaatgaacaaagatctttggaataa

SEQ ID NO: 189871 - DNA, 2489 bp, Arabidopsis thaliana landsberg
atatccgtcgtgaagctttgctagccattcaggacatcatagcgtatcttgggatggagagtaccagcaagattataaatacagtctctcctctacttgttgatgctgaacttgatgttagattatgcatttgtgatcttcttgagtctcttgcaaaaatcgacttttcactggatgatgtggtacgtatcatgtctctgtttgtagctgggtcatttgcttctcttgtttctgattttgcaattgtaacaaacaattggttcctaacctgtaggcaaagcgtgtccgcgatatgaatgccatctcagctatggaagttgatgaccttgactatgaaaagatagttaatgcctatgtggagattaatgcagatttctttattaaatcctcagagcagcatacgatgattatactctcacagtgtatatacaacgtatcatcagaatccattatgttaaggggtagcgcacagaagctcttgtcttctttcattgatttttcagcctcaatactttgccgagaagctccagctcactctgaatttggaaaagaggtcaaaaacgctgatgtaagctggacaggagatcgtgtactgtgcattttgagaaattttattttgaaacacattggagatgcaataaacagagggggcattataataaaggtacattaactcttctaaatcatagatatgcctggaagaaagaacataagaattttactaaacgcaaggtcaggtttagtaacttgcgaatttatgatgctgcttatggttagctcattgtcatgacttgaattttacatcatattgtaatatggatattcatggccctcttcttgctctgacgattatctgaaacatattattctggcacaggaatggattcttttgatacgcgagatggtgaccaaacttccagatgccgcaaatctttctgcattcagacctctatgctctgaagacgagaatgtagatttttttaaagctattgttcacattcaggtaagttattttttatatgattcctgagtctatgatttgtattcgagcggtggtgataataaagtctatatcataaccacacaggaaccaatccaagttccaagttttgattttgttttgttcttctttttccctctaactcaattcagtaggtttgttaaggccttattatagcatataaaatgaagtggcatgtagctcatgcagatgctagaaaccttacggtgattaatttcctttcaatatcttgcaggcacaccgtagagctagggcaatttcacgtttcagtaatgtggttaaagatagcagtctgcctgaggtgaccccttgaatttcaaacatttttcaatgcaactgctgtactgtgatagacttatccaaatgttggtgttgcagggagtagtgagaaaacttttggtctcggtctttttcaatatgttactcgaaggacaagatggaaaagataataatgtcagaaatgcatgcacagaagcccttgcatctatatctgctcatatgagttggacatcgtactatgctttactgaatcggtgtttccgagagatgaacaagcacaccaaaaaaggaaaaattctgctgcgacttatctgcttgattttggataaatttcattttgcaaaagatggctacccacatgaggctgaggaaattaggacttgccttcagaaaattgtgttcccgaggatgcagaagctgatgaattctgattctgataatgttaatgttaacagtagtgtggctgcgcttaaggttctaaagctactccctgaagatgtattggactcaaacctatcatctatagttcacaaaattgccagttttttaaagaaccggttggagagcacacgtgatgaagccagattggctctggttgcttgtttgaaagaacttgggctggagtacttgcaagttgtagtcaacattttacgtgctatcttaaaacgaggatctgaggtgcatgtgctggggtacactctcaattctatcttatcaaagtgcttgtccaatcctacatgtgggaagttagatcattgtttggttgatctccttgctgtggtggaaaccgatatccttggagaggttgctgaacagaaagaggtggaaaaatttgcatccaaaatgaaagaaacaagaaaacggaagtcatttgagactctgaaattgattgctgaaaatgtaacgttcagaagccatggattaaagttactttctccggtcactgctcagctgcagcggcatctaactccaaagatcaaaacaaatctggagaagatgttaaaacaaattgcagctggtattgaaggcaatacatctgttgaccaaggagatctttttctttttatatatggcctagttgatgatggtattaataacaggagtggtcttggagatcaagtgtctttaccaccctccaaaaagaaaaagaaatcaagagatctgaaagagacttctgggttgtgttttg

SEQ ID NO: 189872 - DNA, 116 bp, Arabidopsis thaliana landsberg
tttcagcctcttcgattacgaattcttgatgctgatcatgactgccaataatggaaaagcaacggggaggggtccaattaatctgttattcgacaaatccaagtttgcctccacag

SEQ ID NO: 189873 - DNA, 151 bp, Arabidopsis thaliana landsberg
atgatcgtgatgattacagagaccgtaggtcaccaagacgcgactattcacctcgtgatgaaagaaggtctagaagagatcggtcttactctcctcatggaagaagcccagagagaagatcagagagaaggtctgagaggtcagagagaag

SEQ ID NO: 189874 - DNA, 269 bp, Arabidopsis thaliana landsberg
atggaccaaaagacgaggaacatacgttttaggacagaattagcaactgggaagttgaaagttcatgttagaggtttgtataatgatatatttgtaagacactacttgtatatatgagatgttcttatagttaacatgattctggtttttagatttagatgggaatattacagaagaaaatgtctcaagagagcaagtgtggagcattcaaaatcgtcgtgtcatagttgatttcaataggaaaggacaacctatcaaagatttaggtg

SEQ ID NO: 189875 - DNA, 1023 bp, Arabidopsis thaliana landsberg
  unsure (1)..(1023): unsure at all n locations
atgaagaagatcatcgatttctacagaggatccactgaaagccctttggccactctctctgatttgcttcggttcatgcttggtttcatatcaaaagctcccattgagagaaagactgcaatggcactagtagcaatgtctttagatcatgtttcatatcctactcttagagctgatgagaacactgaggtctgcacatcccctgatcaggaatcagatgataatggatatgaatctggcagagacactgtccttgatgatcataatactacaacatcgggcataaaacctcctcagtattactcatttgatgatttgagcaggagagaacattctagatggcctggaaggaggttgaatgatgcagcccaagcggttctcaaagtgtttaaagagcgaaatagcaccattagtcgccaagaccttcgggaggctgttagaagtagcattggtgatacgggattgattgatttcttgctcaaacacattgacaaagttctaataggtgaccagatagtgcagaggtccacaaacccgaaaagcaggatgttacagttctccctccggacaatcaattcccgtgttcaagagcaaaaacggaaaaagaaaaggaaagtgaagccgcaggaaaccagtgaatgcacatctaccactcctggactgagtccgtacgatgatattctctatctatatcagaatctcttgttaacttatcctgattcagacttatacagtgaagcgtctcaggttatcttgaagtgcaagagctttgtaaaagaatggtcttaccaggaacaaaatcatttaacagttagctgccaggttcttcccaatcatgaagaactactcagagacttcactcggttattaccccctggtgacctcgtggctgttccggaaaacgcaaccatcagagaactgaaatctgcagcagagaaagttctgagggacacttactgcataacagagacattngaagtgttggagataagaaacaggtatctcgagaagctaagacgacac

SEQ ID NO: 189876 - DNA, 76 bp, Arabidopsis thaliana landsberg
atgtgttacaatcatgattttgattctaagaatgagatcaccattgttacagagataaaaatgaactttgaaggag

SEQ ID NO: 189877 - DNA, 345 bp, Arabidopsis thaliana landsberg
  unsure (1)..(345): unsure at all n locations
tcattcgattgatcgagaacccatgcatcccagcccttcccaaccgacgagcgacgcgacggcccgcggcagcgatcaggcagccgccttcaccttcgagtcgttggccgcgacctacaactacctcaccatcaagagtttcgcccagacgttcgccgacgtggtagtcggcgaagccgataagcgaggcgagcgatcttgtcgcattctcgacattggctgcggcagcggcattgctcgcgaaaccagccaccaatggcgcatcaaggatcatgcggccgactactggggcattgagccagacgaagggatcgaagcgattccagggctgctcgaccactntaa

SEQ ID NO: 189878 - DNA, 523 bp, Arabidopsis thaliana landsberg
atgcagcggataggcatcggctcgcagcaggcgcatgtccagctctgctgcggtggcgcgctgggccagttgttcggccacaggcttggcgtttccggtctggcttctgtgcagcacggtgaggcgcaattgcgcatcgctggccatgcacggcgcgcttttgtcgctggcagccttgcaggcaagatgttgcgtggccaggccggcgagatagccggacagccagtgcagctaaggcgcatccagatccttggccaggcggttggccagctgttgcttgtcttcgaagagcagggaaagggggccgacggtcatgtcagtgtctttttgtgggagtttgtaggtccatttgtaagagcatgtgagcagggccttagtcgggctggaaagcatggaatggcatgcggttatccggggtcttcatgggcagtccttcacgggccgcctgggctgtctgtccacgcccccggcaggtcaacggaatggagcctcgagccggcataatgtcggcatgatcgtatag

SEQ ID NO: 189879 - DNA, 265 bp, Arabidopsis thaliana landsberg
atatatttgatgtgatcatcgaccaaatagaaagtaatacgttcaagaccaacaatataaacggtatcatttctttgtacgaagcgtggtatctttccacgaaatcggatattaaattgcataaagtcatcagaccttttgcaacagaacaaataagaaaatttgttgatgatgaagatactaaaaacattgaggtacgagagaaggcgtatcatgctttagaaatgccgtaccattggagaatgagaaggctagacacgagatg

SEQ ID NO: 189880 - DNA, 470 bp, Arabidopsis thaliana landsberg
ctgagtgaggactaccgggtctctacgccgctgccgcggcccggcgaggtcgacgacgtcgccgacctggcgcttttcctgctgtccgacgcggccggctacatcaccggccaggtcatcaacgtcgacggcgggcagtgcctgcgtcgcggtccggacttcaccgcgatgctggagcccgcgttcggcgccgacgggctgcgcggggtggtggggcagtagccgctggggaagaggtccgtttgtaccactaccgcaccaaagacggtgtggaggttgatgcggtgctggagacgaacggcggccggatagccgggatccaggtaaaggcatccgccaccgtcaggagtgcggacttccgcggcctacggcacctgcagtcgcaaaccggcgacatgttttgcgcgggtgtggtcctgtacgccggcgacgctgccctaagcttcgaacaccggctgaaggcactgccc

SEQ ID NO: 189881 - DNA, 332 bp, Arabidopsis thaliana landsberg
aactgcgcgtcgcctataccgagcagatcatcggcctcatcgacggcggcgcggacctcctgctgatcgagaccattttcgacaccctgaacgccaagacggccatcttcgccatagaatccgtcttcgaagagcgcgccatccgcctgcccgtgatgatctccggcaccgtgaccgacgcctcgggccgcatcctctcgggccagaccgtcgaagccttctggaattccgtgcgccacgcgcgccccgtcaccatcggcctgaactgcgccctcggggccgccctcatgcggccctacgtcgctgaactgtacaagatctgcgacacctac

SEQ ID NO: 189882 - DNA, 124 bp, Arabidopsis thaliana landsberg
gctcggcatacggatgaagacaggcgtctaggagctttatcaatggttatgggcttaagtgaaaaatcaagtaatcctgatactatagaagcaatgtttgcgtcagttaaagccataattggag

SEQ ID NO: 189883 - DNA, 137 bp, Arabidopsis thaliana landsberg
atggacggaagcaaaagtaagcccttgtgtggtatgtctgatctagcaaagcctcgcaaacttggctgtcgatttgatccaccgctcaccgtttgcatctcctgcaaaggccatcaatacactgggaataggcgtgg

SEQ ID NO: 189884 - DNA, 472 bp, Arabidopsis thaliana landsberg
atgtcaggaaggagaaacaaagtgccaacgcaaaggagactgaaactggagacttcttgcaacaaatccgaacacaagtgagtgcaaatagttcctttttgtgaaagaaagttatattctgatgcttgatttgttatatcatcttttgctacattcttggtttctttcaaatcaaagcaattcaaccttaggcctgtggtcatgacaacgacatcatcggctactgcaacaactgaccctatcataaacactaagatcagcgcgattttggagaaagcaaactcaatacgccaggttcatcctctaacttctgcatctatatatatccaaagcaaatctaatctttatttcagaatctaagtaccttttgtcttaaatccaacacaacattatctatcactcactcttttcttcttttcaggctgtagctagcaaagatggagatgaaagcgatacatggagtgatacgtaa

SEQ ID NO: 189885 - DNA, 1147 bp, Arabidopsis thaliana landsberg
atctgttaatgaagtaatttgtcatggaattccggatgctaggtatgctctaactatctagacctatttgagcctttctgacaaaatagctaaatgacctaggaaattttacgctaatcactcgtgctttaattgcttaaggaaactagaagatggtgatatagtaaatgtggatgtaacagtctgttataaaggttgccatggtaagttattctcctgctgaaaaattgatatttatatttgttgcttgttgagatttgccgtctcatggaatgatttatcggtaggtgaccttaatgagacatactttgttggaaacgttgacgaagcatcacgtcaactggttaagtgcacatacgagtgcctggagaaagctatagcaattggtaggtgctaagttcttacctgctcttagcttttatgttttgactgtaatatattcaaaaattgagaagagatgctaagactttctatgcttgtctctttcagttaaacctggagtaagatttcgtgaaattggagagatagtcaaccgccatgctacaatgtctgggttatcagtggtaaagtcttgatttctttataggctgtttaggataatcacagcacctgtctgtatacttaaaaactaacttgtagttaaacaggtgagatcttattgtggtcatggtattggagatctcttccattgtgctccaaacattcctcactatgcaagtatcctttgttacttcagaatttcgtgagatggtatgttgttgtcttgttagtctattccagtgtaaacgtccttaacctcaaaatcaggaaacaaagcagttggagtgatgaaagcaggtcagactttcacaatcgagccaatgatcaacgcaggtgagttcaatgttaaatgtccttaacctgcattcgttaaatgttttaaatttgttactccatacttgagttatctatttacaaccataagggcattgtcatgataggggggtggagggatcgaacatggcctgatggatggactgcagttaccgcagatggaaaacgcagcgctcagtttgagcataccctattggtaacggagactggtgttgaggttttaacagcgaggcttccttcatcgcctgacgtatatccttggcttaccaagtga

SEQ ID NO: 189886 - DNA, 2161 bp, Arabidopsis thaliana landsberg
atgaatgaaaaggaccaaaatgtggacagaaatcaaccaaaggccgaggcggccaccaaccaccgaacgtgggaaggtctggttcgggcaaacattcgaaaagaccaagaagactcggataaacaattaaaaaaatcagatattggagaaggcaaatatatattggtgttgaggtcaagacttagagttttgacgttatccaaaacaatatttttgggtaaagactaaagagtttgacgctatcttgaggtttatttattcaacgtagactatatactatggggccgttctgaattggaccttttaagttttgattttattaaaacgccatgttgtttagtcgagagataaacaaaagacgtgtctctagctaagctgaccttcatatatgctttgacataatacattaattataatctctctttttggtgtgtgtaaaaaatacactctatattttattatgtagacacactacatgcagaagtgttcttacctctgcctctacgtgctgtcaactcctacagatcttcaagtaccccaaccgttatctaacagattaaatataatatacccctaactatattatatatcacaattgttcaaaccagtgtatatagactagacgattccttgaaccatataattccagctttactgtaagagtcttaaggacaggggaaagtgagtcgagaaacgaaaccgaatataagtcttgtatgatatagtcatatagttaaccgtcgtcatatattaaagaagaaaatggcaaccaccggtcggagactccgtcctccatcgcccaataataaccggagccggactataagctcttcaatctctctcccagtgtcttaaacgccctcgttatctgcttctacttctccatcttcttcctcttcgccttccaattcaagcatacgagtgtgataaccagatcacagtccacaacaagatcctccagacccatcggatcatccgactctaaatccggcgagaacataatcccggcgagatacagcgcatcaagatctcaagagataaacaacggtagaagcagagagtcgtttgctcggtacttggagcaacgtacgcgtggtagtcctcgtagtaacgcttcatcgagaggggtaaagccgggagccagctcaccatcggcgtgggcgttgtctcctggaagactttcgactatgaagacgcctctgtccagctcagctccgacgacttcaatgtgcatgacgccgcctgagtcacccgtaagcaaggccaagataagaagcggtggcggtggagcggtggcaggagttttgaagtacttcatggcgcagaagaaagtatctccggtacaagaggaggattatcaccggtttaggatttttcaaaacagattacttcaatggaggtttgttaacgcaagaactgaagccactatggctaaccttaagatcaacgttgaggtacaaaaactatatgaaaaatatttaaatttgtatcttataaatatctattaatttgtttctgtgaatggtttcaggatcagttgttttgggtttggcttaggatatacaaaatgaggaactacgttgtagaaaatttgattgaaattcaaaggctccgtcaagatatcaaagtacgtgaagttctcagcctccaaatgcctttacttaatgagtggtcaaaaatagacgcaaaaaactccgaagcgttgagcaagctaactcgaaaactccatgctttgtctgtccgattacccctcgtacatggtgccacggttagaatttctctctttgggaaaccaatttgtttataaacattttgtgtatttgtcaagaaagcagaaactaataatttggaagttacagatagatatggtgtcgatacatgaagaaatggtcatagctatagaagtcatggacgagatcgaagacgtcatcatcaagtttctcccacgagtaagtccactttatctatacagatcattttcctaactttttttgtatagatacatgtaaaagaaattaatttaagaatgtcttgggtgattaaatatcagcaggttgaaataatcctctatgagctgacagaattgatcggcatgttcaatcaagaattgttatattttgaagaaatggacgagagccttttatccattcctctcttcacg

SEQ ID NO: 189887 - DNA, 114 bp, Arabidopsis thaliana landsberg
atggcagaaggctttatatcaattttaaagatctcatgttcatcaacatgggtgtgcattccagtcccagtgtggctgatcatcctctcggaccagctactgatcatcgccttg

SEQ ID NO: 189888 - DNA, 104 bp, Arabidopsis thaliana landsberg
gcgaatttcaggaatccctcgtccgaaaagctttatggacagtttgactcgagacctccctatactctgcagcgacgcctccctgcttgcccctttcggataag

SEQ ID NO: 189889 - DNA, 170 bp, Arabidopsis thaliana landsberg
gtaattttgcatccggggaggcttctagtcaactgtgcttcaatccttgcactcctcaacttggcagtaccgagtgcaatacgatttgtgtaaacaagaaatacaaagagggctcttgtattggttttggaattccccctactttcaattattgttgttgtaaaaattaa

SEQ ID NO: 189890 - DNA, 2815 bp, Arabidopsis thaliana landsberg
  unsure (1)..(2815): unsure at all n locations
atgcgtcgtgggaggaaaaccgagtaccttgacatcccactcaaggacagcatcaaaggatggcgcctggaatggattatcatggagaatcactggaactccctcccccctcggtcagggagacagccagatgtgcgcactccaagttggactgaatcacccacagacctggaggtagctgaggccgggggtctgcttgctgaggttgcattgttgaaggagaagggtctgactgccgaggctgtggttgccgattttgttttcaagaacattcagccactgaaagacagggcctatccagcatatatgtatcgagggctagccgactcaactggggttaccaataggagaattccttctgtagacttggtaagccgacttaaaatgatcctcaggggtaaggtgtcaaatgttggtgctccagtggcatactcggcctggaacctgcctccttccaaagccttcactcattttgttttgaatccacctgttgttgatggcagcttgggccttagagtgcgtatgctgaagaagttaacgccttggttgcctcacttggggaaattcctgatgatgaacggcacgtccactttgaggtacctttggatcctagtgacgcagaaataagtgctatgcttgatttgctggctaaggactcttctgatgctgctcctgctgggacgttggtggtggcgcctctcctagaaactgatacaaccttggatatccagaagcctgccagtactcgctcgagatgcccttgccgagccaatcaacttgatccttccgcagatgagcagaaaaagaaaaagagacgcctccggcgagtatctagtttggatcgggacgttggtacttcggttcctgctgctgaagaagtgcctgtgcctgaatttactgacgctgaccccaatggtgtgctccatctgttgctgatcccaatgggtgtgctccatctgctgctgaccccaatgaggatgctgtatgcgctgctgctgtggaagatgaggaggaagagaatgaaactccattaactcggaagaacagtcggcagctcgtcgctagtggtggtagtagtggggttccttctcctgccttgtctgctcttattggtctgcaagaactgtccatgaccaattttgatcaagctctagaggatatggtccctgagaacttgctgttggaacctgcagacgttgatgcaacaaaaacttgtgcgggcgtgccagatgctgggttgaggtcgtcccgtgcctcgtcgaccttagagcacgatctcgagggccggaatgatgacttggatcgtcctgatcctgcggaggtagctgaaggcccgtcgaccttagaggtggtcacggcagagagcttggatcctttgaatagtgctgacatgtgcccagcccccgagggtgtcgccggggaggactcagctcaggtgaggagcgtaggccactacccagcccccgagggtgttgccgggggtgacccggctcaagtgggcagtgccaaccttgacccagcccccgagggttgcatgagcagggtctccttcctgcacttctatggacgttcacgtgggttcacctccacactctggcggcatggtggtggctcaaactccagatcagggggtcgctttagagggcagcatccccactggtctggtgttaggctctgctgaaggcactgagctcgtttctactggtctattgcaagctgcttcgagtggtggtctggcatctgattatcagctgatttctcctgatttgggatcccttcgttcttttccaatctccaggtactgtgctgtacttttagcttgatctttgcgttgcatgagcttttgtcattatgttcatctgttctttttatcaggctttggtggatgggatggctagccagctgagatcacagggtgctttcatcccagaagtcgcttcgtctcttgagcgttggaatccagtgtcgcttcatcgtcgtgtatccgagttggaggcaactaacgctggttagtgccctttttcttcttcttctttgcctttgttcgtggactgttttaccttctgacctatttcatttgaatacctcttgatagggatgactcggcagattaaagttcttgaagaaaaaaaattcccaagatcaagctgagatggctcgacggtgcgctgacttcgaggataagtattctcagagccagattgaattgagtcaggtctctgcggctttggatgacgccaacgctctgagttcttctcttcatgctcagcttgactctgaaaaggtaactcacgaaaccgtcgttcgccttatcatgcttttggattctgaatgggttgatttttgattgtaggagnnnnnnnnnnnnnnnnnngcttctcgcgataacttggacagattgtaccgagattccagcaactcgctgaccatcttggagaggagccgccgttttacgatggaggagcttgacaatcagcgccgtcaactgcaagaatcctcggatgaagtagcccgccttacacagttgctatcggtgaaggacgccaccatcaagggactccgggcttctaagaaatccattgctcaggagttagaaactgctcagcaggctgttaaagttgctgaagaagctgctgtcgcttttaaaactcagcgcgacagggccatggataaggccattcgagcgggacgaatcttgatgaggagacctggtgtagtcgttcctgaagatataagggctgatgtgaatcgtgcgcttgattcctcaagtcgcccctcctcgtcggttgctcctgagaaagacatcacgaaatag

SEQ ID NO: 189891 - DNA, 383 bp, Arabidopsis thaliana landsberg
caaaactctgtaaaatctgatcctaataacgttcttggtaactggaaatacgagtcgggtcgtggttcatgctcttggcgaggggtttcttgctctgacgatggtcgaatcgtcggattagatctccgaaacagtggactcaccggaaccctaaacctagttaacctcacggcgttgcctaatctccagaatctttacttgcaaggaaattacttctcctcttcctctggaggagattcctctggttctgattgttatcttcaagttctggatttgtcttcgaactctatctcagactattcaatggtggattacgttttctcaaaatgttcgaatctggtttcggttaatttcttcaacaacaagcttcgtcgggaaattag

SEQ ID NO: 189892 - DNA, 410 bp, Arabidopsis thaliana landsberg
  unsure (1)..(410): unsure at all n locations
atgaagaagaaatacacttccaaaggtgagcgataaccncagctcaatgggccggatcttttcgtttttagcccaatcaaatgaaagcgcttgtgtcatttgtagcccaataaaataataagccgtctgtgtcatagaaaaaaattgtttttgaatattagaatgaaatttaggatttaagatgattcataatttcatataatgtttctatcggctactttttagtctttgtactttatacttaagaatcaaaataacaattgaaatacctaacttttcagctgaccaaaaccaaagactattgttataaaaataaaacactagatcccaattttcatattttgtgggcggtttgtcgactcttctcattcgcattctttgtcaaaggcctcaaagttggactcgtttga

SEQ ID NO: 189893 - DNA, 555 bp, Arabidopsis thaliana landsberg
atgtctgacaacaggcgccgatgcaacaggcgtgctcagcaggagcagcatgaccagcaggaggaaaatcagaggcagcctcccccaccacccccgatgtcagtggagcagatgttcttgatgcagacccaggcagtgcaggccattgggcagactctggcagccatgcagcaggctcaacagcaacctcaaccccaattgcaagtgcaaatgccccagatgccccgagataagcgtggtgaattcatgagagggcaccctcctaccttcgcccattctgccgaccccatggatgcagaagactggttgcgcgcagtggagagggaactgcgcaccgcccaatgcgacgacagagagaaggttctgtatggtccccgccagctgaggggagcagcccagtcctggtgggagtcctacctcgccacacatgctgaccccgaagccatcacttgggaggaattcagcgagagtttccgtcggtaccatgtgccggagggactgatgatcgtgaagaaggaggagtttctggctctgaagcagggaccatgtctgtta

SEQ ID NO: 189894 - DNA, 141 bp, Arabidopsis thaliana landsberg
atgggcgaaaccgaagacatcctcgccgtggcgcgttacgccaaaacgcgtttcggcgaactgccgctgctgctcgccggattttccttcggcgcctttgtgcagacacgggttgcacagaccctgtcctgcgaaaaaatg

SEQ ID NO: 189895 - DNA, 62 bp, Arabidopsis thaliana landsberg
ccattgatggtctatttatagacgtagactcagaactaaccccactcgtgccggcttcctaa

SEQ ID NO: 189896 - DNA, 288 bp, Arabidopsis thaliana landsberg
atggggcaaccaacgtaccccacttcaggcactacgagagatgcattacccgcgcagcagttgcataaatatgcagataccctccattcagagtacgcggcgtgtcagtgcctaatgcttacttggtatttaggccgggttcccagtgacacttgttccgagaccagcaagcatcgacagacctacgtgaaaaacgactcatggctacctttgaagaattcgacgaaatacgcttcttctctctctctacccttctcagcgtgtgccaaggacagcaagaaccttgag

SEQ ID NO: 189897 - DNA, 638 bp, Arabidopsis thaliana landsberg
gacgttattcgtacgacagttctaaaggtacacattcattgcgcacagtgtgacaaagatcttcagcacaaactcttgaaacataaaggtaagattgagtcgttagaaatattcaaaataattaagtggggaattcgcaataaatttcagaatcttattttgactcattagttcagggcttggattctaacttggttattttggcagctattcacattgtcaaaaccgatacaaaggcgcaaaccctaacggtacaagggacgatagaatccgcaaaactcttagcctatataaagaagaaagttcacaaacatgcagagatcataagctcaaagaccgaagaagagaagaagaaggaagaagaggataagaagaagaaggacgaagaggataagaagaagaagaaagaggaagagaagaagaaagaagaggagaataaaaagaaggaaggagaaaaaaagatagaagaagtaaaagtagaagtgaccaaaacgattactcaagttgtggagtataaagagatagtaaaagttgagggccaaaaagataaagatggaaacataccttactttgtccactacgtatacgctccacaattgttcagtgatgaaaaccctaatgcttgttgcattgtctag

SEQ ID NO: 189898 - DNA, 187 bp, Arabidopsis thaliana landsberg
gcggcagcggcagcggcggcggcagcggcggcgggaaactctaccgcagcttgttgttcgtttcgttagtgctgtacctagccctatccctgccgctgacgctttatttatgttcgtttggatgtcgccgacgctgccgttgccgctgccgcaagtctctatgttcgtttcgccgccgctgcgttag

SEQ ID NO: 189899 - DNA, 278 bp, Arabidopsis thaliana landsberg
atgcacgagtacactagctcgttcttgagccaaccttatgcgacatgcccgatgaacgttaactccgaatacttctgggttcgggacggcaccaccctcaccgaacaggttgagcagcgcggtcggccatgcggcgtttgtgacagtctttgcgggcggtgcgcttcgtcagccagcccacttattcccaccccaacaggacggctagcgctgacgagcgcgacacccgcgacggcgagcgccgcagccccgcctgcggcaaggaacgcggcaattga

SEQ ID NO: 189900 - DNA, 354 bp, Arabidopsis thaliana landsberg
atgagcgtgaaggttcgatgctttgtcatcgaatgcatgatcgcgggggcgatctcctcttacggggggcgcatctcgtaaaacgcggtctggcttcccaagatgccatacctgggacacgagacgctggacgtctcaggttctgacggcgggtcgagtgttgatctctctgccagccaatacgccaacatgctcatggttgatgtcgaagccgggaaacgtgtacgttacgagatgtcaaccaagaacctggtgctccgagacgccgctacagacagtcctgttctttacagagaaagcctcattgcctttgggcagggctacaggatcagctctatcgaggacccgacatga

SEQ ID NO: 189901 - DNA, 87 bp, Arabidopsis thaliana landsberg
atggtgagagattttacggtgaagctatcatctccggtgaaattaaggttggcaattgatggtgatagtcgagagtcgaagcaaaag

SEQ ID NO: 189902 - DNA, 96 bp, Arabidopsis thaliana landsberg
atgaaactcgcatgcgatttttcgctgcgtatgggagttgaacgccgaaactccacttcaataccatcctatatatctgatccagttgtatgttga

SEQ ID NO: 189903 - DNA, 381 bp, Arabidopsis thaliana landsberg
  unsure (1)..(381): unsure at all n locations
ggatcgatcggggctgcgaagagcagcaagccgtacaggcagccccagatgatctggctgtattggaacggggctacgaccgatgcctcgccgacgcggaaagcccggacaaggagagcatggccggtaagnnnnnnnnnnnnnnnnnnnnnnnnnnnnnnnnnnnnnnnnaaatccatcggcaaaaggcccgtgctgccgagtgccttcacgagggtcaagggtcccatgacaacgaacaaggtcgccaccagagcttggtggttttccgcacccttggcacgtcacagcagcagaagggaaagcgcgaagaagattgtcgaggcgaaggctgtggcgtgaccgatgccaagtttggccgcgccgggcctgagcgccacc

SEQ ID NO: 189904 - DNA, 290 bp, Arabidopsis thaliana landsberg
tataacacctttgcaacatttggcaatatcggatctgacggctgacagagcagcagagagccaacaatcgaaccgttatgattacgacacgtggatgagtgagtgtttgtacgaaagatccaaagttgaaatgataatgtaatgatggtttaataatatatgcttttgacattctgtggacttcgtgctcttctgttcgtacgacagtaaataatatcgaccagtgtttcagtctttgcctcaaacgcagagaagaaagagagagagtgacagaagcaagctcaaaataa

SEQ ID NO: 189905 - DNA, 382 bp, Arabidopsis thaliana landsberg
  unsure (1)..(382): unsure at all n locations
atgttcgatctggagcagcgcatcgcggccatggatgcggcaggtatcgacgcccaggtcctgtcgctgtcaccaccgcaggtctatttcaaggaaggtcaggaggccgttgacctggcgatcctcacgaacgaccacctggcggaaatggtccagcaacacccgacgcgctttaaggcgctcgccagtgtaccgctgaccgccgacatcgattcggccatcaacgagctggtgcgctgcctcgatcagctgggtatgcccggcttcctgattggcggcaatatcgacggcgcgccgatcgatgatccgcgcttcgatccgctcttcgaggaggccaaccggcgcggngccgtcatgtgcatccacccgatgctgccagccg

SEQ ID NO: 189906 - DNA, 927 bp, Arabidopsis thaliana landsberg
atgattgtgcatggaatggaattatatgataacagcgagaaacgagttttgcatttgggttctctcagctggtacatggaaaaacaaacagcaacatgccgaagtggaaactgctcagtaagttccaccaaaaagcaacagtttaaaaccattaatccaataagctgagcagacatgatcttttgtttgcagaatattaaaacaatctacaacaaaagcagtaactgaggaaggtacgctctttactttcactttcccagcaatagtttccaactttggcttactatcagaatcagccaagatgcaggcattatcatgaaatgttgtctgataagtacctccaacatcaccaggttcacacgaagaaaccaatgacgagttaactccgtgtcagtacaacgaaccaaaatcaactagaatacaataagtgagagagagctaatgcaacaagcaagctatcagcttcactatacccatatacagaaaataatgcatatctttattgatatagggacatgtaagatataccccatcaacgataagtcatctattctatttcacaccatagaattctgtctgttccaaaagatttcccttttcttcgcataattgaatatcataacttgcacataccttcagagaaagtgagcatcctaaatatatagaaactcttggtgttacagacaagccttctcagttgcatcaacaactcttttctatatgcaccttctactgtattctaattatgaagcagcaaccaacaaaacataaacagtgaggtatactgagaattgtatgagctgtggagtgtcaaccacctttaggtcacaattattctgtgtttctatatacttatccatgttatagtgttctgatcgttataccatggaacacaaacgcaaagaaacaatcgtggcattgattaaa

SEQ ID NO: 189907 - DNA, 450 bp, Arabidopsis thaliana landsberg
atggacgccacgacttctgttactctggcagtaggcagggcctatttaaaaacgctagcgattgccgtggcaactgccgtatcggtgtctaaaacaaaagcactgctcagcgcactatcgataaacgcggttacttctgctgtgttgtcaaaggctgtaaccaagacaccacttgttatacccgtcgcatcagtcctattcgttgcgaaaagaggggtaaaggcttttgccatcagcgctgttaccagcttggcagccaatcggtataattacagagcgtttactgtaactgcagctactacggcgtcgctggctaaggctagatcagttgtaaaagcgttagccgtagcagcgacaactgcggtatcgttatccaaagcgaaaatactgctaaaggcgctgtcgattaattccaccacttccgctgtgatggcgaaggctcgcgggaat

SEQ ID NO: 189908 - DNA, 403 bp, Arabidopsis thaliana landsberg
atgttcccgttagtgtcagcttttgcgggagggttaaccccaaaatactcacaaggtactaattaaatagacaaaatacttatacatattacatattactattgtgtatggcactaatgttcatttgagttgtgataattctgaacgttttcttattgcaactaattatataattttttgtactttgttcttcctgattttccgtaaatgatcaatagagacgatatcgccctctgctgtcacgtgcaaacctcccgagaacgcggccatgtacgagccctctgctgtcacgtgcagacctcccgagtgcatggcggccatgcccgagccctcgaaaatgctggtgaatcaattgatttacggcaaaatatttaacattataaagataaaatccaaagtgtag

SEQ ID NO: 189909 - DNA, 422 bp, Arabidopsis thaliana landsberg
aaaacccgaaatctccttggatttcgtttccggtcttaatcaactcgatatcaaagtttctaaatcaatcgcaaatccgtctcattcataaacactataaagaacatcaagtaagtccactttctttggctctctgttttacatcttcatcataatatattctcattgttggttcctttgctactcacaggataggagaatctcgcggtgtgagttgattcaacgcctgagaagtataactggagatagcttattggttcaaatcatcaaatctgttggacaaaaggtacataaagacacatgaatacaaaccatttctggttttgtttctcatacataacttccacaatgctggttcttcgattatgtttcaggcaccggaaggatcaagaccgataaatgtacagtcacagcgtggctaa

SEQ ID NO: 189910 - DNA, 567 bp, Arabidopsis thaliana landsberg
atgaagttcgtgaaccggtttctcgaaccagaaacgacaatgtcaagcaaactcggaaaccaaaacggctcaagacgggacagtagaagttataaaaacaaaacccaaacacacaatccggtaaaagttaaacaccaaaattgattcctctgtttttttctttaaatcattttatctcaaaaagggattataatttattattatagttatatctttgatttttttcttttgtacatccgaaatcctgttatatatatctcgtgggtccataatcgtatgagacctaagaagactagggcgacccggttatgctaaccgcattttagaacatactcttttgaggaatatatcgttaaggaaggctttcaaagttttctggaagcttccagtgttaagtgaaaacatttttcactctcttatatacttgatcatctcacactttttatatttgtttcttcctcttactttgttctatggttttcaatgtaatactagatatcttttatgtatttgactaaaccaaagcgcatgaacgattttgaaaaagaaaaagagaaacacacttaa

SEQ ID NO: 189911 - DNA, 172 bp, Arabidopsis thaliana landsberg
atggttgatctcctctatgtcaagcatgagtctcgctggatagatccttcgttcgtcaagctgaccggagaccttatccatcgtgtcgaagaacggtttactaccgcgtcgaaccaaccttcccttctccaaagttactcacaccttgacgagccgtactcaacggtggaac

SEQ ID NO: 189912 - DNA, 464 bp, Arabidopsis thaliana landsberg
atgcgtacctgtaaacatttcggttttcccgacctgtttataaccttcacatgtactcctaagtggccagagatcacaagatttgttaaagagcggaagttgaatgctgaggacaggccgaatatcatttgcaggatttataaaatgaaactcgacaacttgatggatgatctaacaaagaatcatatctttagcaacaccaaatcaggtactacatgatttcatatttttatacatatatttcatgaattttaatttacaagtgtcattaactcataattgatatgttcaaacagatatttatacagtagaatttcaaaaaagaggtcttccacatgctcacataattgtttggatggatcctagatacaagtttcctacagctgatcatgttgacaagattatttttgccgaaattccagataaagaaattgatccagagctatttcaaactgtctcggaat

SEQ ID NO: 189913 - DNA, 116 bp, Arabidopsis thaliana landsberg
tggtccatgacagatcgtctagtaaaatttatacgtctatcaattgggtcaatcaatatatccggctcgagtttgatccgaacttagttcgaaaagaattatcagattcaagttga

SEQ ID NO: 189914 - DNA, 408 bp, Arabidopsis thaliana landsberg
tacccgctcctcgtcgatccggtgatccgagaaagcagggtaaaaaaggtactagtggacgggggaagcagcatcaacgtcaccttcccccggacgctccaaggcttgggagttcccctcaaagagctccatgagtcggacactcctttctttggcatcgtgccgactgagggagaatatccactgggacacatctacatgccggtcaccttcggaactccggaaaactatagaaccgagttcctgaggttcgaggtggcaaacttcgactatgggtacaacgccattttcggtaggccaggattggcaaagttcatggccattccacattgtacgtacatgatattgaagatgccaggaccacaagaaatcataactgtgcgcgctgactttcaaggcgccgcataa

SEQ ID NO: 189915 - DNA, 131 bp, Arabidopsis thaliana landsberg
gctttgggttgcttcatttaagaatgtcaatattacagggaacacttatagtgaagaagacgattcagaggtaggaggtgaaggtggaggaattggaggtggcggcacaggatgtggcggtgtagggactg

SEQ ID NO: 189916 - DNA, 647 bp, Arabidopsis thaliana landsberg
agaagccgagaattctgttcagctcctgcatctgataatcacatcttcctgaattcaagcttttccgatggactcaatcattggtctggaagaggatgcaatcttatgttacatgagtctctagctgatgggaagatactaccggattcggaaacttgttttgcttctgcatcagagcgcacacataagtggagcggaatcgagcaggatataacagaaagagtccagcgaaaactcatttatgaagcatcttctgttgttcgactatcacatagccatcacaccgtgcaggccactttgtatgttcaataccttgaccaacgcgaagagtatataggcatttccaggttaggctctccatatgacgattttttctttttcttcccacatgttactgtaaatgtgaatcttggcccaaatatattgtctgatacaaagaatttgaagaaagtttgttcccttttccaagtgttcagggaacacacgacgattgggtagagttaaaaggaaagttcctcttgaatggatctccagctagagcagttgtttacattgaaggaccaccaccagggattgatgtttttgtcgaccattttgctgtaaagcctgcagagaaagagactccttcaggacgaccatatattgag

SEQ ID NO: 189917 - DNA, 271 bp, Arabidopsis thaliana landsberg
atgtatcgtataataaatcctcgatttttgtggttcggtgtgtcgtatccaaagcataccttttagtctgtggaactcttctggtttatacattgtttgtcccaaataggattcaaaccagaggccagtgctgtcattagtgacgcatagcaacaagctattgcagtgaaagacgttaacaaatgaattacatatctcctttatagatgaatctaccaagtctttgtggtcatggattccatggaggttgacgctcatcaaacaagcctaa

SEQ ID NO: 189918 - DNA, 126 bp, Arabidopsis thaliana landsberg
gtctctaacggcgacaccgtcgaggacgacctctcccccagatgggatgttaatgtggaagcggatgttaacgaggttagattattaatcaaatattggtttctatttttttctcctccagatctg

SEQ ID NO: 189919 - DNA, 131 bp, Arabidopsis thaliana landsberg
atgccgggctccgggcgcgccggcatgctcggctgcggcgccgagccgagatgcggcgcgggcgcgggatcgaccggaggcagcggctcgcggctggcgagcctgccccagaggctcggcaccgggctcag

SEQ ID NO: 189920 - DNA, 53 bp, Arabidopsis thaliana landsberg
ggaggcggacgtctgcatcaccacgaatgagcaggcccaggacctcatcggag

SEQ ID NO: 189921 - DNA, 278 bp, Arabidopsis thaliana landsberg
atcgagagcatttacacccattaggattgacaccttaaatgctgtaatgacatcagatgcatttaggggattgacacaccgaacaacccttgcatcaatttggcgccgacgctatgtgagtgcttttgttgatacatctatgatttctaagtgattgagaccaggtggtaacactttattgctggttactgactcgtttgtacatacgcttgagattgtcttgcaggttctcttactcgactagcacagcgagtacgtcaatcgagttagagcaaaac

SEQ ID NO: 189922 - DNA, 66 bp, Arabidopsis thaliana landsberg
atgtttgctctgcgtgagaggagagtacacgtgacacaagaagactttgagatggcggtggccaag

SEQ ID NO: 189923 - DNA, 283 bp, Arabidopsis thaliana landsberg
atgacctacctggtggatttggtggcccaaggagagaggttagggtcgatgcgctgcagctccaataggatgccacgtggcagagtaacaacccgtcccgtggtacccgcccatgtggccacactctgccacgtggcatcctgttggcgggtcccacgggacaggttgttacacaatgtctctttattgttttagatcaatgtgtgacataatggaaacaagttatggattacaacctacgttgaatgttagcattgaagagtgtgttgccgtgtttttaccg

SEQ ID NO: 189924 - DNA, 366 bp, Arabidopsis thaliana landsberg
gtgaagccctcgaggaacaactttagagccttcatcgaagaagaacccccaagagttattactctgcctagcaccaccagggaatcaggggaagcagaagacgaaaatgtgacccggcgacagaaagtggaagacgatctagacattggagacgatctaatgaatctctcacggcgttgtaatgcagaagatgccaacaacaatcagcctcatcacacattggacatagaccatgagagagcaggctcgataaggacagaagcaagacatgaaagctggggaagaagaagtgggagctgggatgtagcagcaacagatgtgagggaaagtcgaagctacgcaacagcaaaggatggaaggggataa

SEQ ID NO: 189925 - DNA, 174 bp, Arabidopsis thaliana landsberg
atggagaagagattcaagatatggacatatagagaaggagaagctcctctgtttcacaagggtccactcaacaacatttacgccattgaaggccaattcatggacgagatcgagaacggaaacagccgttttaaggcggcttcaccggaggaagccactgtgttctacatcccc

SEQ ID NO: 189926 - DNA, 1279 bp, Arabidopsis thaliana landsberg
  unsure (1)..(1279): unsure at all n locations
taaacgataaccgggatattcactatccggtggtggaattggctggtcggtcaaagctaagtagtttatgttggaacagctacataaagagccaaattgcatcaagtaactttgatggtgttgttcaggttagttttacattcagctctagcgttattaaaaacttccagtttcataaaaccaatttgggatacatatgtttttgttttcagatatgggatgttgcaagaagccagttggttacagagatgaaggagcacaagaagcgagtatggtccatcgatatttcatcagcagacccgactttgctggctagcggaagcgatgatggaaccgttaagctctggagtatcaatcaggcaattctaatttgaaatgtcggctattgaaaactgaaactgatttctacaataatgcaaacatcttcattctcagaatgtatgattaagagtttgtttttcttggaaatgttttcagggagttagcattgggaccatcaagacaaaggccaatgtatgctgtgtccagtttccatcagactccggacggtctctagcatttggttctgcagatcataaagtgtattactacgatcttcgaaaccccaagattcctctgtgcacaatgattggtcatagcaagacagtgagttatgtcaagtttgtagattcatccactcttgtgtcctcttctactgataacacactgaagctttgggacttgtcgatgtctgcttctgggattaatgaatcccctcttcactcattcactggacacactaatttaaaggtaacattttaccctgaaatatgctttcaagactctcttcggtctccggtttctgagatgtaatgttcttgtgatgtgttgcagaactttgttggcttatcggtctctgatgggtatatagcaacaggctcagagactaacgaggtaaaggcttgatacagaaagaaaaatgaactttctgacagattgtctcctaaaaacttgattatctgagcttcttgttgttgtgaatctattacaggttttcgtgtaccacaaggcattcccaatgccagtgatgtcgtacatgttcaacaacactgactctatgtctggtctcgaagtggacgatgcatcacagnnnnnnnnnnnnnnnnnnnnnnnnggacagtcgtctacgttagtcgctgctaactccaatggcaacataaaaattctggagatgatgacttgagcctctcatagatctcttgttcttcttctccgcaagagatatgctctgctggagtga

SEQ ID NO: 189927 - DNA, 328 bp, Arabidopsis thaliana landsberg
ggctttcctggcagtgtaactccagattatgtagggtttcagttatgggacacattacaggtatgtgagaatatgcttgtatgccttatagctactgtgaaatttgaattgtgactctcggctatgtttgttgcagggcctctcaacttatacaaagatgatgctttccactcaggtgagctaaagctaaagtttttgagcttctgagttctctattttggtccaatttgtctgctgcagcatttctgatttggactattttcaggctcttttgagtgcaattggcgttggtgagaaatccgcaactgttataggtgctacatttcag

SEQ ID NO: 189928 - DNA, 634 bp, Arabidopsis thaliana landsberg
ggtcatgattgctatgacgaggccgcctggcacgccgcgcgcggcaccatccacgtcgcgatcgatcatgtcggggtgggcgagagcagcatccccgacctgtcgcggatcagcttccaggcattggccgcgacccacgatagttgcgtccgccaggtcgccgcgatgatcgagcagggtggtctcgcgcccggcttcccgccctgtccgggcctgttccgcgtcggcatgggccagtcgatgggcggcggcgtcaccattctcgcgcaggggcgcttcgccaccttcgacgcgatcgcgccctgcggcgtcagcgcgatccacaccgcgctgccgcagcgcagcgccgaggagttcgaactcggcaagcgccgctttgccaaggtcagcgtcggcgacgccagccagagccacctgaccaccagccatgagggcgtggactatgtctaatcccttccactgggaggacgtgccggccgacatattggaggctgacatggagggcggctatccgatccgtcagacggcgccggcgttcggcagcctgaccatcccgcattgcgcggtgcacatgatgacgcccggctgcttcgccgaggatgcggtgcggatcgccgtgccggtgctgggtcgg

SEQ ID NO: 189929 - DNA, 539 bp, Arabidopsis thaliana landsberg
ccgttgcaaacactgagcgagaacggtaaagggcgcacaaactatgtcgttgcgcggggatgcgattcaccaagctgggacaaactaagccgtccggggttggtggggcggattaggaatgcgaaggcctttacttcgaaaggagacccgcccactattaccacgaaaaaagccctgcccttttccttcgctactaggaaagtaagcaacctctattagcgccggaccctgagtcgaattgatcgtgtcatgtgcaacgtccatcaatgatggttcattaatgtccatagatttagactccttcccccttccctactacgaaaaagatcgagaggagcccgaaccaaaccaagaactaaaacggaagcctttcgattcgctccccattctctcttaaataaagctcgccctcgagccctgggcaggtcggccccgggtctttctttccctggtggtctgtacctgccacgagaaaagacgcaacggaagagggatgcccagtgccgcggaggatattgataagaggggcttttgtcttg

SEQ ID NO: 189930 - DNA, 378 bp, Arabidopsis thaliana landsberg
ataccaccattgaggtgtttccggggtataccaccacagtgcccattaccaaggccaaggtaaacaatgtgaccggtcaaccggcaggttttacctatgcctgcaatcccagcaactgtgaatttcctggtggagagacccattgcgcggtcattaccggaacagccactgcgggacaggaaggctcctacccattgaagatctatgtaacgtattatgccggaagcctgacgcgtgatgatactgttgacacctatacgctggaggttggggccttaggaatttcagaattacacaaggccaatgctttgaaaagccgtgtatcacccaatcagaacacaaacaatgccggcattaattttacggctgttacggccg

SEQ ID NO: 189931 - DNA, 429 bp, Arabidopsis thaliana landsberg
  unsure (1)..(429): unsure at all n locations
atgaaaacagccattctcgcgactacccttctgttatgtctgcacgcagtcatcccggctcgcgcgcaatccggcggtaaagtgcctgatgcgtttcatgtgaacaccagaaagtctgccgctgcggctcctgccggtaccgctgccgtcgccaccgccagtgtcatccaggatcccaggatccagctcttgatcgagaaacagatttacgtcaacacgctcgccctgagaaacatgcccgggttccgggnnnnnnnnnnnnnnnnnnnnnnnnnngccaaggcctccgccgccaaggcgaagctcatggaactgtttccgcaatacaggacttatctttcctatcagtcgccttacttccgggtcaggatcggggacttcccgacccgcgagaaaaccgagcaaatgcagccccttctgggcgtttaa

SEQ ID NO: 189932 - DNA, 319 bp, Arabidopsis thaliana landsberg
atgaaagatccgcaaaatactcctaccactatccccgatccagctaagcctaataactggggaagtaccgcttatgccaatgcaaatacagattggtttagcgtattctataagccatgggcaatgaaccagacgcataacctgagtgtaagtggaggaagtaaaaatgttagctattatatttccggtggttactacgatcagggtgggcaacttcgctatggacatgattcctataagcgatacaaccttatgtctaaagtaaacgctgatgttacagattggctcaaaatggactttgatgcaaagttttataatg

SEQ ID NO: 189933 - DNA, 228 bp, Arabidopsis thaliana landsberg
atgaccgggtgcgtcccaagcggatgaactgggaccgatgtacgcctctgcttgcagatctgcgatttggagttctaattcagctaagtcagtgggagccaggcggtatggcctctttccgatgggtgccgtaccagggatcagatctatgtggatctccacatctcagtctggcggcatttctggcaactcttctggcaatacatccatgaattcgtctaccagtga

SEQ ID NO: 189934 - DNA, 96 bp, Arabidopsis thaliana landsberg
ctaataactgatacgacttttgcatattatcagaaatcattcgaagaagcaatggaatcaatcgagaaatcaaagtcacataaagatgaagggtga

SEQ ID NO: 189935 - DNA, 204 bp, Arabidopsis thaliana landsberg
aagataattgttacgcacttgcaaaaaatgatactttttacacacttgccaaacacgttgtgtattgggataccgaaaattatggtatctcaaaacacgttgaccccgttacgattaaggcggttggtgaccctaatgaactttttttcggtaccttcagttactttgattctacctatatcgactctacctcagtcatttcag

SEQ ID NO: 189936 - DNA, 3338 bp, Arabidopsis thaliana landsberg
atggagtggtgtcccagagttcatgggaatccagatgctcaagctaaatgtgaggtgattaggtcatatttttttgtttcattactccgtagaaatgggaatcttaggttttcattgttgtgaactttactgttgcagtttctagctgtggctactcatccgcctgactcatacagtcacaagattggtattcctcttataggtcgaggcatcattcagatatggtgcattataaatgccacttgcaagaaagatagcggccaagtttcagataagggtaaaaaattgacaggaaagtctcgaaaacaaccatctggtgaaactactgaaacaacagaacctaagaagccgagaggcaggcccagaaagcatccagtagagacaacagagcctaagaaaccaagaggtagacctagaaagaagagtactgccgagttacctgttgagcttgatgatgacgttctgtacgttgaagctctgtctgttcggtatccagaaaattcagttgttcccgcaactcctcttcggatactacgagaaactccagtaacagaaactaaggtcaacaatgaaggttcaggacaagtgttgtcttcggacaatgcaaatatcaagcttccagtacggagaaagagacaaaaaaacaaaagtactgaagaaagttgcacacccatgatattagaatatagtgaagctgttggaaatgtaccgagcaaaccgtcctctggtatttctgaagacatagtagctcttccaagggttgtcttatgcctggcccacaatggaaaagttgtctgggatatgaaatggcgtccctcatatgcgggtgattctcttaataagcatagtatgggatatttagctgtcttgctggggaatggatctctggaagtgtaagctagttacttcttctcttctttttatcctaatgcattctgtgccctgcacgatttttcccttctgctttgatttctatcaccgtatgccatctgcaatgatgtagcacctttctagactgcatatactctgcaaaataatgaacgaccttatgcaggtgggatgttccaatgcctaaggcaacatcagctctatatttatcatcaaagaaagctgcgactgatccccgttttgtgaaactggctcccgttttcaaatgttcaaacttgaagtgtggcgacacaaagaggtcagtaaatttcttcaatatttccagtttttgcttgtttggtggaatgaaaaacaaagcagtccttctatgtttttaagagttgaatatataattgattttcagtttccttatgctttatctattggctttctcttgatatggtgctcctctatttttatacagtattcctttgacagttgaatggtcgactttagggaaccctgatttcttactggctggttgccacgatggcacggtaattagtaaattatttcactttcttcactgactctatcatatttttgtctctgttttcttgcatatgtgtaaatgtattcaggaacaagaattgcagtgcttaattgcgttgacccctttatttttgttatcttgcatcaggttgctctctggaagttttctacaaccaaatcttcagaaggtaagacctgatatgtttgtcctgatgccagatagtttcttttcacacggtggccagagaaagtgatttcatctgttgatttcatatttacctttcacgtttttttgtgcagatacaagacctttacttttcttcagcgcagatacagctcctattagggcagttgcatgggctcctggtgaaaggtagtgacgtaaaatcacacccataaaatcaaactgtgaagaggattcgcttattaatcaaaagtaatttctgaaaattttccagtgatcaggaaagtgcaaacatagtagcaactgctggacatgctggtctgaagttttgggacttacggtacacttcattaaccttatcagctattacataattttctttaaactttgatgctcatgcaattaattaacaagactgcactgtttattgttttatttggctctccatagcttcttgcttacttcctatgttttttctgcagtgatccgttccgtcctctgtgggatttgcacccagtaccaaggtttatttacagccttgattggttacaagatccaaggtatcaatcactgttctatcctcagttgattatacagtctttagatcaatggtttgaagtcctgcttaaacatgtggtttcaaatatctgtagctgcgttctattgtcctttgatgatggaacattaagaatcctaagcttggtgaaggttgcgtatgatgttcctgctactggaaggccttatcctaatacaaaacagcaagggttaagcgtttataactgttcaacttttcccatctggagtattcaagtatcaaggctaacaggtaaatgttctttatgggcttgtctttgtgttcaaattcgtaatcatcggttcatcataataaataagtcaaaatataacttctcaggcatagcagcgtattgcactgcagatgggtccattttccatttcgaggtttgcataaactgcacaattacttcacctcttatgttctttgtcaatttctttgagatttcatattgtcttgttgggattccttacagcttacgaccaaagcagtggaaaaagacacgagaaatcggactccacactatctctgtggacagttgacaatgaaagattccaccttcatagtgcatagtccagttccagacatcccgatcgtattgaagaaaccagttggtgagaccggtgaaaaacagagatgccttcgaagtctcttgaacgaatctcctagccgatatgcatctaacgtttcagatgttcagcctctaggtcagttgaaaccagtctaaattagactgtctaatagatcaatctccggaatcacttagtccttaccttgaactggtttacttgatctttttcagcttttgcacacgttgaggatccaggtttagagtctgaatccgaaggaacaaataacaaagcagcaaaatcaaaggctaaaaaaggaaagaacaacgcaagagcagaggaggacgagaacagcagagcactggtctgtgtcaaagaagatggcggagaagaagaaggaagaagaaaagcagctagcaacaatagcaatggaatgaaagcagaagagttcccgcctaaaatggtggcgatgcatcgtgtgcggtggaacatgaataaaggaagtgagagatggttatgttatggtggagccgccgggattgttcggtgtcaagagattgctccaacctcagattgccaacctcggagataa

SEQ ID NO: 189937 - DNA, 111 bp, Arabidopsis thaliana landsberg
atgcaacaagttgaaaaaaataaacaaaaaggaaatgcaaaaacaaagaaaacaaaattgagaaatgatttagagagtgaaagagacagagagacaaggcacaagatgaag

SEQ ID NO: 189938 - DNA, 995 bp, Arabidopsis thaliana landsberg
agatattgtttgcgtacacagatccgtaggaggctactggaatttgtactagctgcatttcagaggtctccaaatttcattgccctgttgaaagtaatgtctgcctattttattttatttttttgtgcgagtaatagctttagaatttagataagaagatttcacagtgcattattagatacatagtcttatgattaccgcttattttctcgagtaatttgcaagatatgcattctcaacttcttaaataatacagaagcctattactgcccgacttggggaagcttacgatgatgttgcaaaggtcagtttctaatatttagacggatgctttgtaagataatctcctctaagcattttcttccgtagagagagttagccttacagctatgttgggcaattggagagtatggtggtgggggagaatctcacaaggaagctgctcgagagctttttgaaagtttagagttgcttgtatatgagaatctctcatcaaggtattacaaacttttgtttgtgtatcatcaatctgctttcttggacagaaaacataaatggtaattacaatgttttccctatttgtttccaacgaccaaaaaagccgcctaggtttgaggcaagaatctgggaatggttcaagaagaacaacacagtcaagacttctgtgttttgtagtgacagctatcgcaaagctcgcaacatatcaccgagaattattaccaagagcccgcgtcgccttgggaaaggtacacaggaaataattgaatctattaatgcacttaccaatgattagttgattactaaacatctggaatctgagttccacaattatgtacatgtgtaggtagtaaagtctcggatatctgatgcaagggtttggagacgagcacatgattacttaggactaatgaacgaaccaggaatctgttggtctgtgttaggaccttcacgggtttcagaaaaacggtttccaggcacagttaactggagcgagg

SEQ ID NO: 189939 - DNA, 236 bp, Arabidopsis thaliana landsberg
atggacgggttcgggtcgcatccaagaacactcgccgttgatcaatggatggatatagttaatggtaaaggttacggcgttggtggaacaacccaagtctactcaactcgacccgactcaccaaagtttcaaccgtatattccgcctccaccagggtttacatcgaaaacacgtacaactgctactccatggagattaatcgatgcggaaacgaagagaaaaaaaagaatcgctgg

SEQ ID NO: 189940 - DNA, 336 bp, Arabidopsis thaliana landsberg
atgtacgagttcgcgctgcggctaatcgattctggcgatgcgtacgtgtgccatcagactggtgatgagattgagcgatcccgcgctttggctcagaagcgacatgaacctggctttgatcccgcaaaccctggagagagcccggagtctccttggagaaatacctcacccgctgaaaatcgaaagaagttctttgatatgaagcgaggcttgtacgcagagggcgaggcgtccttgcggttgaagatggacatgaaccatcccaatccaaacatgtgggatcctgtcgcctatcgtgtcatttatcacgcacatccacacgaaggtgacgacaag

SEQ ID NO: 189941 - DNA, 510 bp, Arabidopsis thaliana landsberg
ctcgaaccagatcaactattaaaggacttcagcttcatggctatgtcgttaaatcaggcctttctcttatccctctcgtcgctaacaacctcattaatttctactccaaatcacagcttccgtttgattctcgtcgagcttttgaagatagcccacaaaagagtgcgacgacttggagttcaatcatctcttgttttgcccagaacgagcttccatggatgtcactcgagtttcttaaaaaaatgatggcgggaaacctttgacctgatgatcatgttcttccatcagctacaaagtcgtgtgcgattttgagtcgttgtgatattggtagatcagttcattgtctatcgatgaagactgggtatgatgctgatgtgtttgtggggagttctttggttgatatgtatgcgaaatgtgaagaaattgtttatgcgaggaagatgttcgacggaatgcctcagaaaaatgttgttacttggagtgggatgatgtatgggtatgcacaaatgg

SEQ ID NO: 189942 - DNA, 564 bp, Arabidopsis thaliana landsberg
aaaaaccattgcatcatcaaatatgcaacatcaaagccaaacaaagatgaacaacaagaaagagtaaccaatgtaaggactaaaaaggcctcaactttcactagttaagaaaaacccaaaaatcactataaagtttaagacttgaaactaaaactcaaagttcccatcaagcctctaaacattcagcaagagcaaacacaacatagcattgttaaaaggttaaaaaagacatactcgctggtgacgaagctgatgaattcagagacacattcctgcacaatctccttagcatctttagcgattttcccattagcaggaagacctcttttcatgatacggcttatgttagcaatcggaagaaacctatcttgctcacgaacatgtaacgacctgggactttgatctccaccactctcatggcttccacagcctccgggactcttggcctgcgactccgccatctcagaaagaaaaaaaaaaaccctaactttacaacaattaacacaaaatagacaaaacccatcaacagaaaacgaagaaaatcagagacaaaacacatcctaa

SEQ ID NO: 189943 - DNA, 386 bp, Arabidopsis thaliana landsberg
agccaccacatcgccgctgttgacgcaaagctggtgacgagcaccagcccggtcatcggcgagaacggcatttccgagaaggtacggcttgacaccagcaccgcctctcccgaggcagatgatgatgaacagcgcgcaacgctcggccatatgggcgcccgagacgtcccagtcggcggtcgacgtacttgccaagccccggcacgaagaagcccgaggccggaccggcatattcgatcgccagcgcaatcacccaggcgatcagccgcgcctcatgctccagcaggccaccggcgatccagaagacgccggctacggcgagccatatgctgatgcgggtgaagtaaagaaagttcgaatggctcgaatggcggacggcataggcg

SEQ ID NO: 189944 - DNA, 439 bp, Arabidopsis thaliana landsberg
atggcgtgtgtttctgaatcaacgccttttcaacggagtaaaagaaatgtgttttggagaaatgaagattcatctgtgtctgtttctggtaaagacagtactgatcaaatggtgaggaaagctctacaccgtgctcaatttaaggatgaaatgtcgctgccgggttatagaaacagatccgaatatcataagaaggtgttgcatagagaggaaaggtttcctccggaagctcgatctttcgccttaccgagtaacagaagttgttcttcacctgctaatgctatcaacagtaaagagaaggactttatagctatgaatagaggttcaactagtaggagtcatcactcgaagtccccggttaaatttgaaaactctgatttgaatctgcagagaaaatctcatactagagataaggagtcttgtaatagatcaggattaa

SEQ ID NO: 189945 - DNA, 323 bp, Arabidopsis thaliana landsberg
atgatcagtaacgccaacctcatctgcaaggccctcggccgatctattcccgaggctattgggaatcaagttaggagaaacaggagggatcttcaactcctcttttagctctacgacgagcttgttgtatgtcgcctcggcatcagcgtattcctttttctatgccagcacttgcttcttctcctcttcaaggcttcccccgccttcaagctcggtaatcaactcattgttggctttcgcctagacaaagagcatataccggtcgcttacttgttcgaagagaagcgtcttcgcctcgactctctcagcaaaagttgccgaat

SEQ ID NO: 189946 - DNA, 396 bp, Arabidopsis thaliana landsberg
atgtcgctaatccaactcgtggtatccccgaccgaattatacaggttggcaaaggcaatgcctgccatgaaggtaatggacaaataaagaatcagctttttcatttcctgtgtattaagatacttaagtttcgcacttaatttagcctaaaattatttttgcttccggggacaagagctcaaggacgccctgcattttattttgattgataattttagttatggcgacatcaaggtcatcgatgacaatatccagggctaccagtattgttttcataataaggatcaacagctcccacagtcggatatgcagtcggcgttctcctatttgttcagttgtgtgcttgaagatttctcctcgggtccatatggtgattttaattatgtcaaaggatag

SEQ ID NO: 189947 - DNA, 92 bp, Arabidopsis thaliana landsberg
atggtggagataccggagtctctaagaatgagcaaagacgtaagagattctcgagaagcttctgaactaaaggggtatcgctccaaaaacag

SEQ ID NO: 189948 - DNA, 870 bp, Arabidopsis thaliana landsberg
atgaaagttgatgtactattggatcgagaactcggaactaactacgataagattgaagttggagagatgttgcaagtggctttgctatgcacacaatatctgccagctcatcgtcctaaaatgtctgaagttgttttgatgcttgaaggcgatggattagccgagagatgggctgcttcgcataaccattcacatttctaccatgccaatatctctttcaagacaatctcttctctgtctactacttctgtctcaaggcttgacgcacattgcaatgatccaacttatcaaatgtttggatcttcggctttcgatgatgacgatgatcatcagcctttagattcctttgccatggaactatccggtccaagataacacaatgaaagaaagatatcatttttacgatggatcaaacaatccaatgaaaaaagctctacacttttataatatagacatgtatatggtggtgaaaattgatgaaaaatatctctacagtttgagattatgtgttcgttatgttgctgatgtatatattaacttttaattgtgagtttctatgatgattttgcttcctttaacattatgatgatgacaaaggaagaaactatgagactgatttgtttgagtcttttcttttgaccagaatctgatttgctctctctcacacatactcaaaatcgtatcaaacaattcctgagaatttatcttttgtagttatcataagctgctgctttgtgtttgtggtcctttaagcttaatgtgttgcgacttttgtccaactttgactctcatgtgtcattttcagttctcatcacaaaccaaacaaagcttatcccactcaatcgaaaacgtcgtcgttctgaaaagtaa

SEQ ID NO: 189949 - DNA, 270 bp, Arabidopsis thaliana landsberg
aacgaagataaaactttgaagatgaagaaactgaagaagctcgttctggaatctattgtggattcaggccgagacaaatctgagcttaaggcagagctagaactaaaggttagatatacctcatcagtctaattaatgtacaacaatctgttctgctgttgagagatcttcacagtagagtctttttgtttttctacaatcttacaggtgaatttgagctccagattcacagttgatgggaagtatgtgaaacttgtggctaaagattga

SEQ ID NO: 189950 - DNA, 116 bp, Arabidopsis thaliana landsberg
gtcagttgcaattaaatccacaaatcaagtcacatgctttcaaaaatctaatactgttagcgttaagtaaggcccctcttgatgtttgtggatctacgccgaaacactcgtattaa

SEQ ID NO: 189951 - DNA, 244 bp, Arabidopsis thaliana landsberg
ttccattctttgcgatgatccttgtggagcggatatcagagacgtctcgaacttgaaaaagaagctgcctccggagttgatgaaagaaatgggaacgatcaggtcatctcatgactgggtagctacttcaaaggacgatggagttctgcgtctccaagatgacttaaactcggttgcgtcggacagagatccaagacgcagcttgcgacctcatgcctcattgccaaaccaacattgttactaa

SEQ ID NO: 189952 - DNA, 81 bp, Arabidopsis thaliana landsberg
atggatcgaaagaagcactctcttgtcgcccctatgcattattcaatcatcgagtttatcatcaatactttcggaactaag

SEQ ID NO: 189953 - DNA, 370 bp, Arabidopsis thaliana landsberg
cttttatgcccgacataagcaacccgcctgcttacgttttccaaaaggtacgtaaaaacgatgattattaacttcacggtgtgatctcttcaatgtgattctgatatctgcctgaaactagcagctggtcaaagacgttacacaagaggtatggatggatactgtgtttgggaaacctgatcgtcctctagagtttgctctttttggaccagagttcatggccaagtatttgtataacctatctcccctccaagtaagactccaagcctcataaaaactaaaatgggattgcttgtaaacctcagttaaacttttgttaattgttgttgtgttggtttaggattttgaattggcgaaaatgtcggtgagg

SEQ ID NO: 189954 - DNA, 471 bp, Arabidopsis thaliana landsberg
atggcgtttcttgagtgtttggaatcaaacaagcgtgtagttactaggggagatgctcaagttgctcacttttacaaaacaatgtgcattacaggtaactacaatctccttatgcttttatatcaatgtgggattatttcataatttaccttattattcaggtagtaatatttgataatggccgtttccatttggtgatgtactgatgtatcttgaaaccatctatctcgaatgctttcaggtctcaagagcatactaataccctacagaagttaccttgtgaagatacaatacgggcaaaatctactcgactttggctggatagtgagcaacctcagcaagagaagctggagttttcagaaaaactgagacataaggaagtatatcggaggtactctgtcatcccgttaagcctttgcgggtgtcttcactttcgttttgtacatagaagtcataaagaaaggaatctga

SEQ ID NO: 189955 - DNA, 331 bp, Arabidopsis thaliana landsberg
ggtttagttgggtgcttgaagaggtttttaaacctgaatttacagaggagattgtgaggaacgcttatgagagaactcaggctgatcttgatttgggggtgaagctgagactcttggaagatgaatttaagggttttgttacgagtagaaagttttcgagatgcacaggttctgattctaaatggaaaatcaatcaggtagttattaacttattattagcttaaattttcacaaagtttctatttttctttgactgattcgaagattacgtttctaggatggaccaatgttgaactcaaagtgtgttctgtacaaatctgccattgaagag

SEQ ID NO: 189956 - DNA, 142 bp, Arabidopsis thaliana landsberg
atgcctaaactacctcggaccaatatttgtgccatgtttgaacaaagaaaaatatcacatatcaagaggaattcagaagtcatgaaacccggagttgcctcaggggagaacactcgatacaagtctttatcttccgaaactg

SEQ ID NO: 189957 - DNA, 154 bp, Arabidopsis thaliana landsberg
atgctacacaagaaagttaacactcaagcttcatcaaagcaaacatcgacaaaaaaatacttgcaagacaagcaacagctctcgttgaagaacgaggaagaagaaggacgaagcagtaacgatggggggaaatgggtcaaaacagattctgatt

SEQ ID NO: 189958 - DNA, 152 bp, Arabidopsis thaliana landsberg
aagaagaatcatcggagccgactattcagtgtctgacgacaccaccatcgctgtttaaagacacggaactcgcgctcgacgacaccgtagattgcgtgggggggggggggtgcgagggccatctgagttctgatctgacgcagctgtaccaa

SEQ ID NO: 189959 - DNA, 150 bp, Arabidopsis thaliana landsberg
atgagtagagtcagagaagataagaatttaatcgtagggctggatatcggcacctccaagatcgtggcgatcgcggcagagatattgcctgaaggcaccttgaaagtaatcggtgttggccagcatgcttcacgcggcctgaaaaaaggg

SEQ ID NO: 189960 - DNA, 314 bp, Arabidopsis thaliana landsberg
ggatgtgacaaaagattcaatgttttgggtagtggcaacagcaagcggtttccttggtttagccatcagcttcacttcgatgtggttcctgcatcaaaccggacccacaacatacaggtaactctctctttctctctggacaaaaacaacatttttgattggattttatgtttggtgtcaaatgttatgacattctttctattgtgtggcagtttggtgggttcattaaacaaggttccgatatcactagctggtcttgtactcttcaacgtccctctcagtctcccaaatctgttcagcatactgtttggtaa

SEQ ID NO: 189961 - DNA, 353 bp, Arabidopsis thaliana landsberg
aaaatatctctatcaacgtttaaattccaataacagcatcctaccaaatggtcaagaatttaaatctcgagcagcatatcaaacaaccacacaccaagtaagttttgaaaatgaatctgaagaatgagagagagagagagctcacgagtaaagagcaagagctcttttaatgacgaagatggcgttattgtacttagtcttcaacctcttatcgtcactttctccgatcgctttatcgatctccatcttcttctttctctcctgaaaaggtcccaaaatgcgaggatgtcaaagtctacggaagtgcttttgcaattcgaaaccaaatttcggagtatctgcagtcagattga

SEQ ID NO: 189962 - DNA, 359 bp, Arabidopsis thaliana landsberg
atgacagttgtagaaacggtgctgctccccttagttgtcgaggtccatacaacaccttctcaagatcgttgcactgagcagtgtgcaactcacgttctatggtacatagccaatcttcggcgtccatgggatcagcaaaatgggcaaagacatgaggatggcccctcatgaattatgcccgcttgtctctgggcacctgtggcatttggacttgcacctaaggttgaagtggtggtggctgctgctgcacctgctgcattgctgctaaggtctgaccaattgcttgaactgcttgagtctgcattaggaacatctgctcaacggtcatcgagggtggaggtggcaactactgctgctga

SEQ ID NO: 189963 - DNA, 400 bp, Arabidopsis thaliana landsberg
atgggtacgtcggtagtttagcccagcattgcatgtgtcaacctagataactaggccatctgtcggtagggcataggctagataagccagccacgtcagcattcagccaagcatccgtccgacgaaggtacaaccgagcattcacatgatacggcagttcatcaagctgggtcgtcgcaacttttcgacccacggtttgtgtttggcacggtgagcaagaatttttacgtcatgaggggaacgcagcgtgcatgataccgtgcggtacggtaccttgcagctgcagcaatgccgcccatgcaaggggatcgtgattgattataattcgtttatgcacgagcactgtgctcctacgagtgcatccgtccgagcagaccgtccgagcagaccggccaactga

SEQ ID NO: 189964 - DNA, 233 bp, Arabidopsis thaliana landsberg
agactcgagaggtcatactcacaaatatatcaaaggctcacatcaaaaccatatgcgaccacatcaataaaatgacaccgctttacaccattgccggtttacttgtcattttcaagcccaataggctcatgagtattctttcaagcgtaagacctaccagtttattttcggccttttccacaacatttacttttgtcgaagtacacactcttttaaagtttcgatacatgtga

SEQ ID NO: 189965 - DNA, 586 bp, Arabidopsis thaliana landsberg
atgatgacaccagtttctgctcctaggttcgctatgtaagaacccaaaaaaacttgtctacagatccagatcactgttgcatattgtaaaatgtagtagttactccatgtaagaggtttgaggaaatcagtcttagtgaaatatccaaactttgaatagccagaacatattaggatcataatacaatacactgttgtctcaagattacttccttattcaagaagagatgtttataaactatcagatcttaactaatttagcataccaaggttcttactgtgaaacaaatggctgaaaaatgaatctataaaaggaaacaggaaaagtaaaagctcctagtgttacaaatggatattacaaagaaaaactctgctatgaaagtttacactaaagtaactgagaaaaagttttcaactaaaaagcttaaatcagatcctggtcagaagttttaaggaattcagctacaggttatgttctcctctagaaaactgcaggtcgagtatatagaggctgcagctgctttaatgactaaatccttatctgagatcagcgcgtttgcagctctgcaacacaatttggacagcag

SEQ ID NO: 189966 - DNA, 113 bp, Arabidopsis thaliana landsberg
atggctgatcaaagacctctaatgacctggtcagaggccaacaactatgaatcattccttcaagaagacatattctcgtttctcgatcaatcacttttcgtcgatcctcacag

SEQ ID NO: 189967 - DNA, 100 bp, Arabidopsis thaliana landsberg
atggaaaggagatctaatctcgcctacaaacgagagagaaccggaattagtcggagacaaaagtccgacaagtatgccataatttatttacaccataaag

SEQ ID NO: 189968 - DNA, 424 bp, Arabidopsis thaliana landsberg
atgatccacttccttgacgattcagtggcagaattactgagggagaagatctcttcgttttctcaagattcaacagaaagtttgaaggcagctttgatcagattcaaatcctatcagagaaattgccctcaacatggtttccaggaaagccagctcatcaacatattcttccgcgcaatcgataagcagtatcggttttgtttcgatggtgcaagtgatggcaatttcatgaaaaggactccaagcgaagcactggtacttataaacaacgctatcacaagtctctcaacttaggacatagaaagtgatcggagaaaagcggctgaggcttccgacatgcgcagagcagaacaaggatctacacacattgcttctccatatatcccttcttacatccaagcccacccaccaaccgttgctcaga

SEQ ID NO: 189969 - DNA, 114 bp, Arabidopsis thaliana landsberg
aatagtagtgatgaatccgtgatcaaacgctctgagactcgaatgcaagctttcaaagaacctgcaggattgatcagattagagagacagtggagaatggaaatacaagcaaag

SEQ ID NO: 189970 - DNA, 499 bp, Arabidopsis thaliana landsberg
atgaccgtcgccgccgcagccgaagaaccatctcagagacctctcaccgacaaagatatcattcgtttagcacagtaccaccattgtcaaaccggattctctctcccaccttaccttctctcaccgtcttcccacgattcccttctctcatacctcaaatctcgctcttcttcaccatctccgtcgaaacaagtttctgagtatgtaatcgctcttctatctctaatatctctctcccctactactccctctctctgctctctcctcgcttctcttctcatctcctacacccaaatcttcaattcctgcaaaatcccaagcgattctgattctatcaagacgattcagctcttcggtactctcttacgatacttacacgttaaggaggtgaaatctgtagttgattcgatcttatcaggtgtgactagagttatcactgttgatgaagcccaggtgttcgatttattgcctgtgtgctttgatttattgcgtagagaag

SEQ ID NO: 189971 - DNA, 350 bp, Arabidopsis thaliana landsberg
atgaccccaacgggttactgtattgagatattcgaagctgttcttaagaagttgccttactccgtcattcctaaatatattgctttcttgtctccagatgagaactatgatgaaatggtataccaagtatacaccggggttagttcgtctatttctactatggttcttttacttttactttaactttcaccgtggatcatgtcttttttctttatatgtgatttctaacatatcattaacattcgggtcaggcctatgacgcagttgtgggagatgtaaccatagtagcaaacaggtcattgtatgtcgatttcacgctaccgtacacagagtctggagtgtctatgatg

SEQ ID NO: 189972 - DNA, 464 bp, Arabidopsis thaliana landsberg
atggttcctcatcgattgcaagcagaagccgttcaccctataactcgaacaagagaacgtaatcctttagataggtgggtggtcatgtttgtccctctgatcttcttagcatgggtatttcttcttgtattgaaactatatcgtttccatcaagagatgaatcttcttgtatatcctcatgatcatttttatcttcttcatctttctctgcttattgatcaacactctcgtctcttatgcctttatttccaaaaactccaaaactgacactaaacattcttggatcattgtctctctcgtgctcagttttgtcccacttccagcttttgtcttcatcaaagactacatctcgacttactactattttccgctttgttggatccaaaagacgatatgcttttgaccccgactatgttcctaaatgcactaacatccgagatcgatcatcaagtttcttcaaatga

SEQ ID NO: 189973 - DNA, 840 bp, Arabidopsis thaliana landsberg
atgcctaatggagaaataatggccgtgaaaaaactttggggaaaaaacaaagagaacggcaaaatccggcggcggaagagcggcgtattggcgaaggttgatgttctagggaacgtacgtcaccggaacatcgttcgtctccttggatgttgcacgaatcgagattgcacgatgcttttatacgaatacatgcctaatggaagcttagacgatcttcttcacggtggggataagacgatgaccgcggcggcggaatggacggctttgtatcagatcgcgattggagtggctcaagggatctgttatctccaccatgattgtgatccggtgattgtacaccgtgacctgaaacctagcaatatcctcctcgacgccgatttcgaggcgcgtgtggcggacttcggcgtcgcgaagcttattcaaaccgacgaatccatgtccgtcgtcgccggttcgtacggttacattgcaccaggtacccttaactttttttgattattctttactttccccaaattttaaattttgtacttttttgtccctttgtttttattattcgaattttgtccgtttgttaaacattctttttgttgggatgacaacatctgacaaatatgactaaatttttaattttgtttgttttggttacagaatatgcttacactttacaagtggataaaaagagtgatatctatagctatggagtgattttattagagataatcaccggaaaaagatcggtggaaccggaatttggagaaggtaacagtatcgtggattgggttagatcaaagttgaagacgaaagaagatgtagaagaagttctagacaaaagcatgg

SEQ ID NO: 189974 - DNA, 705 bp, Arabidopsis thaliana landsberg
atggaagtgaaaccagtgcatgtgctaccgactgacagccctaccttggatgcggctttggagaacctcattgcatccctcacaacgatgcagctgcgtcttgcaggtaagcctctttctctcaccttacactctgttatctgttgagaatggtcttttatgtgagtgtgcactaaagtagggggagtacttgatgttacgtactctgttccggatgatatgggaggtgagaatgtggaggaagaggacgatgatgatgagttagatgacaatgcttagatgcttagtccttgtcggtctttaaaagtgtatcttgatagggggagtttgtcactcattgttttgtggttgtggaaactccctgttctttttctttatcggtttttctgtgtgtttaatgttggactaatgtatggaaccaagaactcagatgtgtttcaggttttaatggttatgcccttggcagtagttgtttaaaatcgggtttttgaattctatgttggtatggaatattgcttagcttgtatgtggttgtctctaatcttttgcaggttacttgtggtgtcacagtcagataaaaagggggaaattgaagaaacaaagtgtctgaagttcaacaggcatgtccgaaacaatacagagcagaacagaggaagcgggaaagcaacagttgcttttgccaatgtggcgtgttggttggagtga

SEQ ID NO: 189975 - DNA, 365 bp, Arabidopsis thaliana landsberg
ggcatcaccttcggcgtcgtctgggatccgttcgagggcacctcgatggcgctcgatggcttccgcatcaagcgcgagaacgagatcaacccgctgccgtacaccgaagcggcggccctgccgaccgcgatccgttcggacaacaacctgatcgacccgacgacccacgccgtgatcccgaactcggggaccctgctgatctcgaaggcgccgtaccgcaactcgtcgtacaccgagatcaagggcgtcgacctggatgtgaagcagcgcttccgcctgggcgactggggccgcgcgaccgtgggcctgaactggacccacgtgatctcctggctgcgcgcggagtccgagaccaagcagtacca

SEQ ID NO: 189976 - DNA, 62 bp, Arabidopsis thaliana landsberg
atggatgcaaaaccgctgcaggatatgttgttggctgaacctgagctctctcggttaggaag

SEQ ID NO: 189977 - DNA, 114 bp, Arabidopsis thaliana landsberg
gggcctgaggccgtcacgggggcccaccttcagagccacgaagcttccattgagttcaggctgtatgtaataaataaggagaaggtggacagtttggaagcacgattgttttag

SEQ ID NO: 189978 - DNA, 58 bp, Arabidopsis thaliana landsberg
ctacgttctgagtccgtttatcggtggacaaacctccgatacaaccgagctatttccg

SEQ ID NO: 189979 - DNA, 118 bp, Arabidopsis thaliana landsberg
aataagttatgcaggaatatctccttggaatagtacgaatggggaaagacgtacagaaaaattggcaagtgtgccacgagaccagagaagagtgtccggcgaggacgattctgtatga

SEQ ID NO: 189980 - DNA, 191 bp, Arabidopsis thaliana landsberg
cactcggcaaagaggtagcttttaccgagtaccgcctaatacgcttgacaacggaactggtaaaaggggcccacgaggagcttctttgtcgagtgtcagtacagcggacactcggcaaagagggagcatttgccgagtgtcactcagtgggcactcggcacaggctccgtcgccgtcacctggcgccgtga

SEQ ID NO: 189981 - DNA, 64 bp, Arabidopsis thaliana landsberg
gtttcgaatggagaaagcgagtcaagcgtatcaagcggaacaagagcggatcaagcggttttag

SEQ ID NO: 189982 - DNA, 79 bp, Arabidopsis thaliana landsberg
atgcgctgtcctcaacaaaagcaccatcagaatctgataccagtaaaagccactaaatggactctgtttcatcaaagag

SEQ ID NO: 189983 - DNA, 247 bp, Arabidopsis thaliana landsberg
ggcttgggccaaaggtccagagatcggtgtaattcgtcgtgtggccgccgacgctgatttctatttgggcacgccagttgatcgccacttggccttcgttgtagtagaagaatccttcccacgcagtcgcttggttgggggtaaaggagatctgaatcgattgtcccggagtcaggccggtcagatcactgagattcgagctcgaaaaccttcagtgctgatcgtgctgagagccgctccgctgtag

SEQ ID NO: 189984 - DNA, 214 bp, Arabidopsis thaliana landsberg
atggtaacaatgctgcaaattcatcttccggagctaagatcagatcaagctaaaacactcgagaaatttatggatctagcaagtatactacactaaaattagggtttctgatgaagtgaaagctgattcaacactctgtgatgcacacatcacgaatgaatttgccggcgaaaaactcgagattttgcccggagatcggaaatcgaaaatttag

SEQ ID NO: 189985 - DNA, 73 bp, Arabidopsis thaliana landsberg
atggccggcttcgaggtggcggctgaaggccgcttcgaaggggctttgcgagcagggggtttgcgaacagcgg

SEQ ID NO: 189986 - DNA, 81 bp, Arabidopsis thaliana landsberg
ttacattcgcagtcggtggagatcggagttggagagaagacgcgtcggagacgaatatctttgatggtggctcgtggatac

SEQ ID NO: 189987 - DNA, 38 bp, Arabidopsis thaliana landsberg
ttgacagtgtgcgccgtctcgaggtgtggggctttagg

SEQ ID NO: 189988 - DNA, 28 bp, Arabidopsis thaliana landsberg
gtgtataaacatggatgatggatcttga

SEQ ID NO: 189989 - DNA, 690 bp, Arabidopsis thaliana landsberg
atgagtccaggagaagaaacaaaccacgtagcaaccacaagtaatgtttggcttgctcttcttggacctgataaagccgggaagaagaaagtagcattagctcttgctgaagtcttctgtggtggacaagacaacttcatctgtgtggatttcaagtcacaagacagtcttgacgatagattcagagggaaaacagttgttgattacattgctggcgaagtggcgagacgtgcggattctgttgttttcatcgaaaacgtggaaaaggccgagttccctgatcagatcagattgtctgaggctatgagaactggaaaactccgtgactcgcatgggagagagatcagtatgaaaaatgttatagttgttgctactatttctggaagtgataaagccagtgattgtcatgttcttgaagaaccagtcaaatactccgaggaaagagttctcaatgccaaaaactggacacttcagataaaactagcagacacttcaaatgttaacaagaatggtcccaataagagaagacaggaggaggcagaaacagaggtgacagagcttcgagcccttaagtctcagcgttcgtttcttgatctaaatcttcctgtggatgagattgaagcaaacgaagacgaagcgtatacaatgtcggagaacacagaagcttggcttgaggattttgtggaacaa

SEQ ID NO: 189990 - DNA, 733 bp, Arabidopsis thaliana landsberg
atgagatttgtagagagagctaaacttagaggatcaatgcaccagaggtaatcagaagacgaatcgccgatgatacctccttcttcaccaagaataagatgatcactaaaattcttcttcactacttccaaaatagcagcctcgcttgctttatcagtactgcaaattcatcaaaagtactaaaactttaatagcttcagccaatcaagtcaacatgaacatagttaaaacctcaagctaacaactttaaaaggtgaagaagtccttactcagttagtaagtcactgagacctttataagtaatattccttggcttatttacagcttccataaccacctaacgaaccagatgattcaattcaagttagttttgttattattctccttgtgcagttgtgccctatgaacccaagaacttgattctagtaccattgaacacaatttcaagtctcatcaagagtttttgtttccaataaacataaattcagatattgtattctacagacatgaaatttcgaacctcagcgccggttttagcggcgagttcaacgacttcaaggaggtgtgccggagatatagttccggtggttttagcgccgattctgggatatcgcgtctgatcagaaacctcagacagaacagctttggtttgaagtctcgttgtggacttgaagctattagacaaaatcctcgtacaccgatatcggaaagttctgttcactgtccggcctga

SEQ ID NO: 189991 - DNA, 1805 bp, Arabidopsis thaliana landsberg
atggctttatctccgtcgtctcctccatgtctcagatctctttcgccttctttttctcgccaaattggcttccttgttccacgcgtacagtctctagtctttggtagcgtccggaagcatgagttgcggaggccgagcgcactcagggaatggcgggagtacgaagatgctgtgaagagaaaagatctcgccggggctcttagattcctcaaatctattgaaaatgatgaacagcgtgattcggttgaatctattgtcacggctaagttaagcggcttgggagctcttgaattggagagggattggcaagttttagatgcgtgtttgaatgcagatgatatgagacttgttggaagtgcgtttaggtttcttaaggagagaggtcttttggccaacttcggcaaattcaccagtattggtactctgttttctcttctttgcgccttcaaaatcaacttctgtttagatagatgtacaaaagtaatgtttagctatgtgtgcgagcatttgaactgattaatttgtatcgtttcataagtttcttgcttctgtatcactgtgatgcagttttggaaggaacaagagaggtaacacctactgtcctgaagtctgcaactggcttggaaggtatgtagctcaaatttctctcttcagtcatctttgattactcagtgtgtggcgatggaaacttattttactgtttatattggttagtgactaaactttcaccgaagaagtggggactttctggtggttctagcattgctctggctgctttgctgggtggagtctcctatcttctttcacaggagattgatgtgcggccaaaccttgctgtcattttgggtctagcttatttggattccgtttttcttggtggtacctgcttagcccaagtatcatgctactggcctccacataagcgtagaatcgtagttcacgaagctggtcatcttcttgttggtaagacattcgtgatcattagtatttttatgaaatttctttctcgttttgtggctaacgattgcagcttatttgtcgtgcagcatacctcatgggctgcccaatccgtggtgtgatattggatccggttgttgccatgcaaatgggggttcaaggccaggtattatttagattcactctagtgttatactattctattttgtagtgctgtgattctatgttcttttagctacatatggaaccgagtacataaatggattatcatgtgtttctctaggctggaacccaattctgggatcaaaagatggagagtgagattgctgagggacgacttagcggtagctcatttgataggtgattattagtcaaggtgttgttctctccctctgagttttctctcattcacaaacctaatgctggttcagtttctcttaggtatagcatggtactatttgctggtattgcagctgaagcgctagtttatggtgaggctgagggtggagagaatgatgaaaatctgttcaggagcatctcagtccttctggaaccaccgttatccgtagctcaggtcaggactaatgaaattcatatatatctgatttgactagtataatatgtgcttccacttttcttgcacaagtgtacagattgttaagcattgcgaatctgtgcgtttgatcatacagatgtcgaatcaagccaggtggtctgttctacaatcttacaatctactcaagtggcacaaggcagcacatagggccgctgttgaagctctccaagtgggaagtcctcttagcattgtgattagaaggattgaggaagccatgtcttcaagcaaatga

SEQ ID NO: 189992 - DNA, 512 bp, Arabidopsis thaliana landsberg
gtcgaaacaaagaaagtggtatatcagcaagatacaaccgctgtttctccgttctccattctactttttggcggcttagtgaatgttcatcatcaggtacttatttttaataatgtagctttttaacggtgcatgttggatactctatatatatgtcgcttttggtttgtcatatgtgctctttacctgaaaaccttaccattcattgcagagtggatcagtcaccactgatgggtggttaaagctaatagcaccagctcaaaccgcggttttgttcaaagagctccgcttaaccctccattccattctcaaagatctcatccgaaaacctgaggttacatgttcaatcctttgttttatctacttagcttggcgaagtaaaagtagctcaggactaaactctcctctctcttcacgtttgtgtttttcagaaattatgtattgtccacaacgaaatcgtcaaagctatggtccatcttcttatagaagaaggcaaaccgcaacacacatga

SEQ ID NO: 189993 - DNA, 387 bp, Arabidopsis thaliana landsberg
atgacgcccgctaacagtcagtggctgaatctgcgtatttccggccaggacgacatgagcgcagcagggcattacctcagccagtgcgctgaactggtctggcggaatattcacagcgccaactacgacagcgagatttacggttcaatgctcgatttctgtattgctggcagctttgtgctgtacatcgatattgatcgcgagcgtggcggcttcgtgtttgagcagtggcccatttccgaatgctggtggtcgagcaccacgcgcgccagggtaaacatgattttccgcgagcacgttctgacagcggcgcaggcttatggtcagttcggtgaaaaagcgggcgagaaggttgttgcgacataccagcgtaacccgatggaaaag

SEQ ID NO: 189994 - DNA, 2322 bp, Arabidopsis thaliana landsberg
gtaacaatgggagtatcgatcgacaccaccaccagtgtcgatcgacaccagatgctgcacatagccgatctgtttacacaccgcattggaaggcgagattgcagcataagtcccatgttcctccatccaagtcctgaactccgccaagttaagctattgactataaacaagcgcttagtaggaggcaacccactggtatggttttctttttcttttattttttgtttttctttaatttttctcgcttactccggatttgaatgccactggggacagtaacgtttaagtctgagggaggcagttactaagtgcatttttctgtttgagtctttttcttatttatgagtcattttattgagtcaaaacttttgttcaaaattatgatctctccttcgagtttattgcctggattgcttaattactccatattcaaatcaattcgactaatggaaaatccagaaggccaaccaacaaacttaaggacattcgttcccaacataatccacaaaggctgaagctaatctcactgctcttccttttacctcatcaaaacggttagagttcgtaggacttgactaagaaagtatttctctcccttgataaaaaatatgtatactaatgagagattaaaaggattttcagataatgtatatgggtatgaatgtttcctattatcccattattatacattgtttgaaatgatcaattacaaaggttggaaaaatgccgagggtgtcgatccagtatgcgagttcctctttgtttaccctctaaaaagaataagtttaggggagagaaagagtaccggaaataaaaagaaaatgagtggtcgaattgttatggtatagtaaatgaataagtctagaaggtttattaaacgttaccctgattgatgagaaaccaacgatgaaagcctaatgtattaacgactcaacagagtttgcggaccaagtcatgatcccaacgatcacctaaccatataaggaagttgctctgtttttgatacaatctgtatacgattgatacgattatgattatgcattgattgtaatttaggattttctatgatctcttttgtagcctataaaagacatgtaatatgcatcaaagtaaatacaagaaactgtttacagtttctaaatctttatggtatcaaagcgacaaagtttttcttcaaaaattctttgtgatctctgaaacttcgaatgacaaacccgaaccagactgaagctccggctgcgactgtggaggtgagaagaaccatctctccttacgagttgacctctgccgacaatcccggagcggtgatatcacaccctctctagaagggagttaattacgacgaatgggcttgcgggatgaaaacggcgttgtcattacgcaagaaattcggattcctcgacggctcaatcccaaaaccggctgatggatcacttgacttggaagattggtggacgattcaagcacttctcgtgtcttggataaagatgactatagatccatcgatgcgttcaacaatctctcacaaagatgtggcaaaggatctatgggatcacttgaagaaacgatttggggtgatgaatggggctcggattcaacaaatccaagctggattagcttgttgcaaacagagaggtgcagcaatcgaagcgtactatgggaagctgacccaaatgtgggatagtcttgcgagttaccgaccaatacgtgcgtgtaagtatggtttgtgtacgtgtgatcttgcgacggcacaagaagcagatcttgaagaagataaggtgcatcaatttctttgtggacttgatgatcagtttcggacagtccgttcaacccttgttgctcgtgttcctgtgcagccattagaggaagtctacaacattgtgcgacaagaagaggatcttcgcataaatgttgaggagaagcctacagatgtgacatccttttcagttcaaacctgacctcgtttcaaacttgacgacaaggaaaaaggagttatgtgcaacctttttaatcgcattggccatagcccagacaagtgttatgcggtgtttggctatccaaaatggtggggtgataggccaaaaggcagaactttgcaaggacgaggtcatggcggtactaacggaggagctggaagaggttgtgggagcacctcctacgccaatgcagtccaagtcaatccactgacaagctatgagcaagctaactacgttgtgacagaaatggacagtgacgaagtaacgggatttatcgatttgcagtggaaagcaattaagaatcttctcaacaatgggaagactaacgaaactgaaaaactgacgg

SEQ ID NO: 189995 - DNA, 1699 bp, Arabidopsis thaliana landsberg
gtttccagatgattgtgataaacagcagctgcagcttatctatatttccctgtaccttttaatatggggtgaagcctcgaatgttagatttatgcccgaatgtatctgctatattttccataatgtaagttttctcatctgtagaatcagatatgcatatttttcataactttcttccggttctggatggtttaaaattcttttcctgtctgttttttttgttcttaagatggcaaatgacgtctatggaattctgtttagcaatgttgaagctgttagtggtgagacatatgaaacagaagaagttattgatgaagaatcatttctgagaactgttataactccaatctatcaggtcatacgcaacgtaagtatatcaaagtcaatcatgttgtatatatttataagtaactgtacactatcttttgaatgaaaatgataccttgaaggaagccaaaaggaacaagggaggtacagcaagccattcgcaatggagaaattacgatgatttgaatgaatacttttggtgacgttctttactatattatttgacacatgcctgcttgatctagtctctgactgctgacatctttatttatttgaaggtctaagaaatgcttcaagataggatggcctcttgaccttaaagcagactttttcctaaactctgacgagataaccccacaggacgaggtatatttcatttgcttctgagtagctgtaatcttggttaaaaatttagtagggtatgtgatacaaaattcaactaatatgatgctaatgagtctacatataacttccacaatatatgctatcaaggtgttctttaagttgtagatagctcatatatgataaaacagcattatgaacgttttgatctctctgtaagccttcccttttttgtgatactacagaaacctgatcttgtatctctaatgtattgcagaggctgaatcaagtcacttatgggaaaagcaagcctaaaaccaactttgttgaagtccgcacattctggaacctcttcagagattttgatcgaatgtggatatttcttgtcatggcttttcaggtaaatttttagtgttttaaaagagttgtgttagtctgaaaactaaataagttatattatcatacttatccttatcttttgtaggctatggtaatagttggatggcatggttctgggtcactaggtgacatatttgacaaggatgtattcaaaacggtgttaactatttttattacttcggcgtatctgactcttttacaaggttgtgatgtcctttgatatttcttgtttttagtgacacgttttttttattttgatgttctaatggtgttccttgtcctctttttccctcatgattctttacatagctgcactggatattatcctaaatttcaatgcctggaagaatttcaagttttcccagatattgcggtaccttttgaaattcgcagtagcatttatgtgggcggtactgcttccaattgcttactcgaagtctgttcaacgcccaactggagttgtaaagttcttcagtacttggactggggattggaaggatcagtccttttatacgtacgctgtttcattttatgtgttaccaaacatattggcagctctgttattcctcgttccaccattccggagagccatggagtgttcagacatgcgacctatcaaagttataatgtg

SEQ ID NO: 189996 - DNA, 120 bp, Arabidopsis thaliana landsberg
atgccaagatccaggtcagaaacttgtgtcttccagcctcaagatgtggatcacaggtgagccctccaattctggattttggtttattccagatatagtcaacgtgaccaccaggaatag

SEQ ID NO: 189997 - DNA, 74 bp, Arabidopsis thaliana landsberg
atgaggctgacgcctgtgctcatcgagtcaaggatttctgagaatcgacaagtacctgacgataactcatcccc

SEQ ID NO: 189998 - DNA, 398 bp, Arabidopsis thaliana landsberg
atgaacgaagttaataagcaaaaggaaaatcgtgatggacatgaaacacttgtaaatgaagaaggatctgctgctcgaacaagacctacaagtgttgaggagattaggctaaggaggaagaggaaagagtccttggaaaatgtgaaggaggaaactgtaggagcagcacagttactgggttacgatcttgttgaaaaggcttctgactatcatgagtccaagaatttgaggcgtgaagaacatgttgaagacagttcaagaaaggaaaaagaagccatttctagatgtagggaagaaaaaatagaaaaaccaatgaaagaggaccctgtgggagcagctcagttacccgataaaaatcttgttgagaaggttcttgactgtcatgagtctgaaaaagg

SEQ ID NO: 189999 - DNA, 538 bp, Arabidopsis thaliana landsberg
atggagaagatcctccatattcttcctaaagatacttttgagacatcttttgccttactcaacaggtatgtcaagcgagttgttgacaatggaattagctcacataaagctaagctgcttaccagagacattagtgcaatcatgctgcctaaggaaagaaggagaaggcatagagagtagacatagctgagtacatccgcaccattactcctggtcagaccattgcgaacgttcctgatccaggtagctttgttcttgattgctctatctccacaagcagattcagtcgctctttgtgtgatctgggatcaagcatcaacctcatgcctaagtttgttgctgagagactaggaatgactcactacaggcctactcgcatcacttttctcttcgcggatcgttccaagcgaatccctgaaggaatccttgaagattttcctgttaaggttggtaactctgttatccctgctgattttgtggtcatggactatgagaaggaacccaaggatcctcttatccttggaagagcatttctaag

SEQ ID NO: 190000 - DNA, 291 bp, Arabidopsis thaliana landsberg
tacaagggtcaagcagtctcattagctgcgagaagcagacgattcgaatcgagtttttatccttgcaaggtaacctaaacacacgacatgtcagggcactccgtccccacacatgtcaaccgtccccatcgattccctgttcgcggccagggctcaccgccttggcatacaatgctccacagaccccaggctgctgccgtgcagtgaccacacttgtacccaccatagctagcatgggagacccagtctcaggacgagtgaggggaaaagtccacgcccggcttcactcag

SEQ ID NO: 190001 - DNA, 408 bp, Arabidopsis thaliana landsberg
gagctggccgtggggcgccgcagttcattagcacgctgagcctctgctgcacggcggccgagattgttagcgacacctccttctgggagaacgtggccgcgcgcgccgccctcgtgatgccgcaggccgtcgacgtcgccgtgcccgcctcggcgcgccgcatcttcccggaggagtggttgaacgcccccgacgacgtcgtgctgcccgagctcggcatgttgggggtcgggcgcccgcggccgctccccttcgcgctgccgtcctacgcgttggcgggaggctcgacgccgacgccgacgccaccgacgccgtctcccaagtacctcaagttcccgaccaactatcaccgcttcgcggcccaggagatgcgcaagcggctggactcggcccacttcagctccgccg

SEQ ID NO: 190002 - DNA, 374 bp, Arabidopsis thaliana landsberg
atgaagtttcggcagccacagggtaacttcggtggcaatctgatgagatcctcccaaggactcgacactcttaaggttagcaaaggatactagtggttgtgaagccgtgatgatggatagatttaaatgaatcgatggatatcacagaagcttgcggaagggcttcaagatatcgagacttagatcctttggatatgcgcaccaaaagagactaaggattttgctggatatacacaccaacaagatgatcttcttagaaaaggtttctcattaaaagaaagataagttctcagcagagaatacaagagtatataaagagaaggagaagagaagatgaagaggcaagtcttggaacatactccaaggctacctag

SEQ ID NO: 190003 - DNA, 394 bp, Arabidopsis thaliana landsberg
atgtctccttctcctctgcttggtccacctgagctcagagatcccaactctctcctcccaaaacccaccacaacttctggtcccagcgaccctttcatggacgctatggtttcaaatttcaacaactcagctagagtcaacaacgtcaactctcctccgatgggctacaccgagaataaatccgccacttacctctcctcaggcaacccctgcctcgacttcttcttccacgttgttccaagcacgcctaaacactctctcgagcagtggttacaaggtgcttgggaccacgacgccttgaccacactcaagcttatctgtaatcttcgtggagtccgtggcaccggaaaatccgacaaggaagggttttacacggcggctttatggctccatg

SEQ ID NO: 190004 - DNA, 171 bp, Arabidopsis thaliana landsberg
atgaagcgatctgggttggtggcaccggaagacgtccctgctgctgaagcagagcaagcagatattgaagagaccgattctgaagatgattacaacatcgcagtaccaagcaaacctagccacctggacttcggaaagtcgaccatctccaaagctgattttcctaagatg

SEQ ID NO: 190005 - DNA, 373 bp, Arabidopsis thaliana landsberg
acaaagaatcacaagaatcgagaagaggaaaagaaaacaaaccctagaacatcgaaaaaaggaggtggcagaagaagctttcgagatggtttgcatatctctctatggatcgatgttcaaagagaattatctctctatggatcgacgaatttctcttcccctctcaatctctcagagaattctctcttggatcaaaacgatcttcgaagagaattgacggagaaagagcgtcagcgagaagaagaagaagccgtacagagagagagcaatgtgtcgcctcctagaacatcctaaaccggaacgaaccggaccgggacaagtggtgccgaatactaaaccaaaatattaaacagcgaggcatctctgaatttag

SEQ ID NO: 190006 - DNA, 54 bp, Arabidopsis thaliana landsberg
cgcttgtggcggctctttgggggctttcgatcggtctttcgggcgcttctcttg

SEQ ID NO: 190007 - DNA, 87 bp, Arabidopsis thaliana landsberg
atgaaagagatccagcacagctttcgtttctcgttgattgagcttcttcaggctcgatttgatagtaaagctgccaatcagaagcag

SEQ ID NO: 190008 - DNA, 157 bp, Arabidopsis thaliana landsberg
atggcggtcagacaagggattcctgcattggagcttcctataaactgtagcgggttttcggaagctagtggaactttgtaaaggcctcgtagtgttgccctgccgcgcttcctaggtagaggtgtatgggattcgcgaccccttggcagatgggtag

SEQ ID NO: 190009 - DNA, 560 bp, Arabidopsis thaliana landsberg
atgcagatatttcttgtagtgttgcctgcgtacaatggtcggagagttctcggtatggacgtgtaatgtgagcaagcggaacgagtggtcgtggatgggccatgatgtgagctggttgtgcagctatttgtgtaaggataaggatgggcgttttgatgaggataagaacaagattggataatgataagcttgaaagtggataagataaggataagccttatcctttgagtgacttgcactccaagtaaccgaaacttgctctccaagtttccctagcctatataaacccatgtgatcccattcattagttcttcacaccaaaacctttagcctaaaccgttagatagctagttagtccgtgggagtccgagtcgggtagaagttggtcgagtcgagagtcgtactcgggtaataaggtaagtagttccgcccttagtcatcttttattatttttagaattatttttcttaattttgttttcggtccgacgcttagatccatcgttagtacgcgttggagatagctcggtcggatcaaaattattaggcggtcaagggtag

SEQ ID NO: 190010 - DNA, 320 bp, Arabidopsis thaliana landsberg
aattagtgaaggaaatgctgagagtcatgagagtggaggtgagaatgtttgtggtcaagtggatgaatcgaagacgcgttgtatagataaggcatcactacctggatgttgtgtacatgactcgcctgactctaatgagagtgttcagctggaggagaagaaacttacacttgataagaagtttcttcttgatgggtttcttgaggatgtttttatggcgaaagcgtcaaatgtgtcaaagaatgtcgagtggattgaatttgcttgccctgagtgttcctctcctcttggagcctatccttctggtgttgggagcaacg

SEQ ID NO: 190011 - DNA, 454 bp, Arabidopsis thaliana landsberg
atgcaccgcttggttccaatgtcctttcatgttcctctccaacgcttcaaagattatcggaaagatcacgtctttgttctgagctatcagccctacgatatgttcattgttccacaagaagagcgctctctctgccacctgcactcctcaccatctcttatcaacaattacactatataagccaaaacaatgtattcacttaggttttgaaataacgaacctggaagtgtgcactattaagacatttcccaatctgtgtaaacagaggaacaacacattgctgaaactcagagggctctgtagcatccaagacttcttccaactctcccaagaagagaacctccttttgacaattggtaagcggccaaaacttcaacaacccgaggatcacagtatcagccaacttataatctttctcaacaaactgtgtcacgctttacgccaactgctggtg

SEQ ID NO: 190012 - DNA, 170 bp, Arabidopsis thaliana landsberg
atggtgggagacaacacattaagtagagatcctgttattgtggagttggcaacagagatggcatctaaaactatggtacaagaatgggagcatgcaatcgatgttttgactacatctacatccgctgcagatttttctgacatggaaaataaaaattttaaaattctaaa

SEQ ID NO: 190013 - DNA, 122 bp, Arabidopsis thaliana landsberg
tatcggtggaaaggaaagtgatctcaacggtttctcaacacctgcagcagggtgagcgcctcgcgaaggatacgaatgtggtgctcacggaggtgaatggcatacagaagaaattcatcaag

SEQ ID NO: 190014 - DNA, 172 bp, Arabidopsis thaliana landsberg
gtatcccagaaatcactctctcgacgacaagcttcaaccacaggttctcaggacacagtatcctattcgcttctagacgcaacaaaacaatctgcgttcttgagctcccttgacaaatcagagttcaaaacttcttctgataagctcctaatagcttacaagcctcgacgag

SEQ ID NO: 190015 - DNA, 630 bp, Arabidopsis thaliana landsberg
  unsure (1)..(630): unsure at all n locations
atggccattgttgatgacgcagagatgcggttaaccgaatccgaagctgtttcgagttccgatgatcgtaagatcgttgcagatactcccgattttatagacgaatcctctctagtcatcagaacaaccactggagtccgaatctcagctctaccggcggagcaaagccttgttgactccgatggatctaagtcggaggtcacgcttccggcgaaagacgaggtaattagtgatggttttacttgtgtgaataaagagattgtagaatctgattcatttagggagcagaatctagagattggagaacctgatttagatgttgagaatcgcgaagaagtgatgattattgattcgctagaaaattctgtggttcaaattgtttcaagtgcttcgggtgatgattgtaatgttaaggtagaggtagtggagcctgaattgcgtgttgagaatctggtggttgttaaagaagaagaaatgattgctgattcgatagcggaatctgtggttgaaactgtttcgagaggtttagattatgagtgtgttgatgtcaaggctgaagaagaacctgatnttaggtacaagttggaagaagattctgttttttcgaatgtgctcgagaagaaggatgag

SEQ ID NO: 190016 - DNA, 98 bp, Arabidopsis thaliana landsberg
atggtttccatcaaccagagaaaagcgtcgcaagatgaagaacaaggctatgtctgggatacacttgtagaatttgttgcacatgaaaaaattaattt

SEQ ID NO: 190017 - DNA, 261 bp, Arabidopsis thaliana landsberg
  unsure (1)..(261): unsure at all n locations
atggacgtggtacaggtcaaaactccccaaaccctgtgtgttacgaccaagtcaccccctatcaaggaagggctcaattttatggttatcaagcggattacgccgacggatatcaaggaaatcnnnnnnnnnnnnnnnnnnnnnnnnnnnnaaacatcgacggctatcaataaatcttgccagtccagcggttatcaaggaaattttgccggctccggcaataaggaaatcctcctggttctggcggttatcaaggaattg

SEQ ID NO: 190018 - DNA, 59 bp, Arabidopsis thaliana landsberg
tgaaatcggacagcgaaaatcatcaggaatcacaggtatcttctgactcgctgccgtag

SEQ ID NO: 190019 - DNA, 93 bp, Arabidopsis thaliana landsberg
aaaaaagagagccatgcatgcaattatgcaaaggaacgttttgtgtattaccgtattagccttttaggcaaagatcggacaaataaaaagaag

SEQ ID NO: 190020 - DNA, 329 bp, Arabidopsis thaliana landsberg
acaacagagggaagcagaatattgatcagctatgtgatgttaatggcaatctccacaaagatgaggcgacaaaagggattattgctgaagcttatttcaaagaactgttcacatcctcggaccctcgcagctttgaggatctttttgcagattatccttctcgggtcactgatggaatgaatacagtgcttacagcttcagtctctaagaatgaagtgagggaggcagtttttgggataagaagctctagtgctccgggagctgacggttttactggttttttcttccagaaatatcggagtatcaccggaaatcaagctcctttggag

SEQ ID NO: 190021 - DNA, 317 bp, Arabidopsis thaliana landsberg
gcataaaagcctcgaatcgactgatcaatctacccccgacaggattaggtgcagtacccctagctccctggatcttctggaccatttggacagcgcgaaacaagaaactatttgaagatagaaccatctccccaccaaaagctttgaacaaacaatcatacaagctagagaatggagtatcactcaacaaacctcctccaagccatcccctcctacccgagtacaaaccacaaggaaaatcgacacaagttatactcagatttatactgatgcggcttggaaagctgaaactaaagaggcaggattcggatggataa

SEQ ID NO: 190022 - DNA, 1264 bp, Arabidopsis thaliana landsberg
tgttaaaccctacaaaaacaaacaaacgcaaaaacgagctcccaactctctcgcgtccgccattgaagatatggttgtaccgcagaagaaatttgctaatggaaaacgtaatgattctacaaagtcctttaaaccaatgaagaaaccgtttaagaagaccaaggacgatgtagctgctaggtctgaagccatggctcttcagctcgaagatgttcccgactttcctcgaggtttgattttccccctcataatttctattgttatacaataaactattcaattctgcttccttttgttattactcggtgtcacgaatcccaaacatttgattaggtagctaaaaatgaagttgctagcttcattttctctccttcagttacttatcgttaatatgatttaattgattttcaggtggaggtacttctttgagtaaaaaagagcgtgagaaactttatgaagaagtcgatgctgagtttgacgctgatgagcgtggttctaagaagagtaaagggggtaagtctaaaaagagaatccctagcgatttagacgacttgggtttgctatttggcggcggccttcatggaaaacggccaagatatgccaataagattaccactaaggtatattactcgcaaccgtcttagtcagaattggctaagagacttatccttgtaacattttacattccacatcgttcacttttgttactttcattgggttttagtgatttaaatcagattcatttcttttcttcatcctggaacaaattatttgtgtacattctactaaacttcagaatttatagcttgatcaacgttattggaaaacaaccttaacctagattgatcaaggtccatagattacattgactagatttctgaatgaatgtcctctgacgctttatctacatagatagttcttacatcagttgctgatgcctgctttacaatttttaaacacttgtgcattcttcagatgatgccataacctatgccattttagctttctattgacatccatctatactcataaccatggttgcgtggttttactgtcctagaagatttcttaatcatattatacctgtacttttcatgtgctgacttttatgtgaatatatgttcagaatatttccccaggaatgaaacttttgggagttgttactgaagtaaaccagaaggatattgtaattagtcttccagggggcttacgaggattagctcgtgcaagcgaggtatcagattttacagataaaaggattgag

SEQ ID NO: 190023 - DNA, 154 bp, Arabidopsis thaliana landsberg
atggcggctgtcgattcaactgatcggcgggacttcatagtgaacatcaacggccaagagagtggagccgccggtgctacagggtcaagcagcaatgctgagggaggtaatatttggaaagagtcaagctatgacttttgggatggtgaaaagg

SEQ ID NO: 190024 - DNA, 201 bp, Arabidopsis thaliana landsberg
aggataacggagaaacagaaccatgtggtgatcacagacaggatgtgggcaaggctactctcttcgacaaaccagccgagtttcttgggccccaaagatgtctttgataataaagagaaaccgatgtcggctctccttgacgatggtaactgcaatggcgtggtggatgttcctccagtcaccaaagagatcaccaagtga

SEQ ID NO: 190025 - DNA, 117 bp, Arabidopsis thaliana landsberg
tttccggaactgcgggtaatcatcatcacgctttcatcttatgctgcattcttcatcgatagttactattcatatgtcacacgtttaatcgaccctgtgtcttctgtttgcagctag

SEQ ID NO: 190026 - DNA, 415 bp, Arabidopsis thaliana landsberg
atggggagaccagtttgggaagagatgatcaagacaggaatctgtcccgacgataactcctacacggttttgatcagagggcttataggtgaaggcaagtcgagagaggcatgcagatacttagaggagatgcttgacaaaggaatgaaaacccctttgattgattataacaagtttgcagctgatttccacagaggggggcaaccggagatatttgaggaattggcacagagagctaagttctcaggtaagtttgctgcagcagagatctttgcgagatgggctcaatgctgatcggatgcatacagagattatggaagatgacacttgcggcggcagactggatcatgtactactcactcgagaagctatctgcgatggtatggttttcgagccacacctattacttgaatga

SEQ ID NO: 190027 - DNA, 444 bp, Arabidopsis thaliana landsberg
atgcatcgaccgcttcttccacgagaatctttgtgtcacatgcactccgtgctgcgcaagaccacgtagcttatcagcaacgcgctcgccatcacccacagcctcggcggcatcctgaagaagatggacctcggcatgttcagcaaggactcgcgccgacgactgctgtcgtcggagcaggatgagaagggctggcccgtgtggatgctgtcgccggagaggaagctgctggcgtcgggcaaccagcccaagccgaacgccatcgtggccaaggacggcagcgggcacttcaagagcatccagcaggccgtggacgccgtgcccaagggccatcaggggaggtacgtcatctacgtgaaggccggcctctacgacgagatcgtcatggtccccaaggacaaggtcaacatcttcatgtacggcgacgggcctaagcaaagccgc

SEQ ID NO: 190028 - DNA, 403 bp, Arabidopsis thaliana landsberg
cattagaaatacgggcaaaagacgcgaaagtaagttagatagattcgggaggagtactgtgattggataaggtattgaccaagtaccgatgatccgaccgcctccacgtggtcacacagcttggctttcactttcatgctctgaccttttgaccgcacgtgacttttgtctgtgcacgtgcggaccaagctaacgtgtccggttcaagtacattgcaccgagccctgactcgccaggttacgccgatgaaaacgacggttcctgggtcccacatgccatgaggatggacggttccgatccatttcctactttcctactgagattggtcccaccatggttcaggccacatgcgtccacgttgagggagcttaggtgttactatatgggtgcagttaaaaattaa

SEQ ID NO: 190029 - DNA, 486 bp, Arabidopsis thaliana landsberg
atgtcagcgccctcggggcgcatgttggtttcggatgtgttggagttggcgttcttgcttcccaaactgtgggcgaaggttcaggccgggcgggtggcctcgtggcgggctcgggcggtcgcggaccgtacccagggcttgtcggtggaggcggccgaatacgtcgaccatcaggtggcgggttttgtgaacaagatgagcttcaccgccatcgacaagctcgtggacgaggcggtcgcccggttcatgccggatctggcccggcagcagcgggagcgggcggccgatgggcgccacttcgacatcaaccacgagcaggtcttcttcgccggcacctccttcatcgagggggaactggacctggctgacgcactcgaccttgacgccgcggtggccaccatcgccggggagttgaaggacctgggctgtgacctgcccctggaccaacgccgcgccctgggtgcaagagagctcgcccggcgccag

SEQ ID NO: 190030 - DNA, 247 bp, Arabidopsis thaliana landsberg
attcaagtggatgaggaagtgggagcgatattgatcttgaattcgttaccagcgagtcatattcagcttaaacacacgctgaaatatggaaacaagactcttacggttcaagatgttacatccttggctaagtatctggaaagagagctggcagaagcagttgacttagacaaaggacaagcagctgtgttgtttactacagagaggggaagacctcttgtgagaaacaatcataaaggaggtcaag

SEQ ID NO: 190031 - DNA, 410 bp, Arabidopsis thaliana landsberg
  unsure (1)..(410): unsure at all n locations
atggacgccgaagagtttgtcnccgcctcgatgttgaatagggacgcggcaaacttcttgatggaacattcgaggaatctgcggataacgcttgaacctaaactcgtgctcaataaggagagggaggacgccacaatacttcttcgccgggacttttctgaacttggctcggtggtgacgggcatctgtcagttcatcctcgaccaagtagaccgccatgacctcgacggggtgccactcgcagagttgttccccttcggcctgtgcgagcgagaaggatgcgggcgcttctactatgtgcagcgggttgggcgaggcaaattctgttccgataggtgtcgagcggcggttgcgaaagccaagaagccactagaggccacccccgcatacatgaagaaataccgagcaaa

SEQ ID NO: 190032 - DNA, 251 bp, Arabidopsis thaliana landsberg
gattcatgcaaccgaacatttcctcaatgtcgctattgagtggaggattaaaacggcaagtacatatatttggttgcgcattgtactccaacaataaacatatctttgcagaatcatttctttctcttgcattcatctaatattgttagtgagttttgaacaggaaacacatggatatgaaagtgatcaccacaatcttgtccacatgaaccatgaaaccggcactgcacctgatcatgaagatacaacag

SEQ ID NO: 190033 - DNA, 2507 bp, Arabidopsis thaliana landsberg
tagcattatatctcttttaacatattatattaaagcctctactttcatgtggactggtgcaacatgtgaagcttttcgggtcttaaaggaaaagctaacttcagcgcttgtgcttattttgccaaattttgctttaccttttgaacttcactgcgatgcctctaaatgcggaattggagctgtcttaagtcaaactggtcagtctatagtttttttagagaaaagatttttaggatcatgaggcatcataacacatatgacgtagaactctatctcgtggtgcaagtcatcaaagattggagacattatttatttcatctactgttgttctctttaccaatcatgacgcgttaaacacacggggtctcaaaatagttttttcgacatgcttcatggtttgcttatttgcaaaaaattaggtttgtaatcaagcatacaacagggatgttgaacaaagtgtccataacattgaatcgatgtcaaatgacttttttgcagtttacaaaacattctatagctgatttatcattggactacggttaaattatgttattgttacgccgtattcatcagatttatctttatatatttatcagtactaaaagtatcagtattttataaaatatttataagcttatatcagatgttgacttctcagacaagcttttatgaaaaaaatttaataaactaaattataagctctataagctttataagcttccattataaaacgtttcatcagatgttgacttctcctataagctaataaaatttttataagcttttataagatgtttataattaagaaaatatttataaggtttataagatgtttataagcttttatcagatgttgacttcttagataagtttttataagaaaatttaaaaacttaaattattgaagcttataattttttttttataaaagaatcctataaaagcttatgaaagcttataaatatcttgttaaaaaagcttttttatttttaaaatattacttaaattttcttataaatgcttataaacaatatttttttatccggccattcaatttgacttcccaagtgattttgaacctttcagaagaagcgtgactcatttcgtacaatgggtaaataaaggtttttaaatttaatcggggtcaattgcacccctactttgaacgtaagtctgcggcctcacgtgctctgtattcatcctttgtgtctttagataatctaagactattgtcaatttattctcataccgagcaaatgagttgtcctacttcgttttcaaggtagttttcaaggtaatctgtaagtgcttttgtagtagttgattccccaaacccactaatggttacttgtgaaacaaccaagttcttcatgtttccctctgaccccattctcctgagaaagtaaaacaatcaagtcacaccatcatgacaaaatctaagagaaacctttcaacagagtctaagcagaagtcatgcaaaatacactagaatcatggatcgacaatcaaacaggtgaaaccatcatagacccaatttttgctaattttaaggtctttttaaggtattttgggtaaaatgtttgagtttatagaggtgtgggatacgggctttgccctccatgcccaattcggcccaaacacaaatagaacaagtcaataaagctcctaacaaggaagaacggcccatcagaacaacggcccatcagaatgactgctcggcccatcacagctcggcccatcacggctcggcccatcacggctcggcccaacccgataaattcagaagggcaaaacggagatatcgcaagagagactaagagaaccctagatcagctccttgcctataaataagaggagatccactactaagaagggattggagaacctaagtcaccactcagagaatttaagagagaattgctgcctaactctttatatcttattttctggttttccattctgtacgtttggttctccgttctgtacttttggttatctgttctgtacttttggttgtcggctttgtattttctggttttccgttctatatttcctggttctccgttctgtacttttggttttctgttctgttaattactattctcgttcatcattaataaagaagctgctctgttttccccaaaaccccttagttatttattgttacaacctcagtacaaacaattagcgtccaccgtgggcctaggcaaaactttctttttctattgacgatcagatacaatgttgcgagtaatctcggaaagctacgacgagctgacgaaaacctcgaacgaacaaggagtctagtccagcgcacctcatgccgcaccgccagctcggccaacgacaccacctctagtcgcagctcctctcgtattcccgctgaactcaaaaaaacaacaccacaaggaaccgatctcgacgaagtcattcgatccttccacgaccgactcgacctacatgatgcaagaactgccaaacgtatcaacgcaatcgtcgctgcctag

SEQ ID NO: 190034 - DNA, 1269 bp, Arabidopsis thaliana landsberg
atgaataatcacttggaattagcgataaaggatgcattccccgcgaatgatcttaaacgtgtggatcaagaaagtcaacaccctttgttagctcaggagcttgatcttgattccttggagaatcctcctcgggccacaactcatacatatcggttatactccaagggtttggtgagtgaagagcttattaaggatgatacgatgctggtcgttggtctaggtttgtccctctgtgactcgcacgataacacgaaacaggagattaataaagctctgagaaaccaaaagctggcggcacacccagaagctgcggaactggctgccatcattcacggcttgaaatgggccttggaacttggtatcgaacgtatccaattcttctgtgacgactccaatatcttggcctacgtatgtttctctctctttcttcttttaccctgaatccagtatcctgtttgtacacctctcatgttgtttttacaggttactcgtaaagctgcacctaacgagtccattgtagcaaaacttttggagcatgtgtctcttcttcagacaagattcacgtcatgtcaggcacttgcaactgtaagcagagacgacatcgtttctgtcattaagctagcaaaagatgctatagcttcccaaactagatggtgtgaaggcgacaccgagtatgagagttgtccagtctgctacgcttacgtttcacctaatgataagtttgaggtgcaaggctgcttccaccgcatctgcgttacgtgcatgaggaagcccttctcatccgaacaaatactacgagggaacacagcaatctgcccttacccggattgcgagaatgatcttgtgccagaggattgtagagcttttgctgatgctgatgctattactcttatgatccagcgcaagaaggagaaggctatccccgttaaagacagagtctattgtcccaacccatcttgttcttttctgatgtcggacctcgacctcattaggcacataagcaaaaatcctcggcactcagaagaagcacggaagtgcatggagtgcggcttgtctttctgcaaaaaatgccatgttccgtggcactacaagaagacatgcgatgagttcaagaagtcggagtcttacctgaaatctgacgcggcgattttggagtcttttgtgaagacacaaggatggaaaaagtgttcccagtgtcagagcatcgttcaacatggtggcggctgccaacaaatgacttgcaggtattggacatttgttatttattga

SEQ ID NO: 190035 - DNA, 21 bp, Arabidopsis thaliana landsberg
atgactaaagctgtaataaaa

SEQ ID NO: 190036 - DNA, 354 bp, Arabidopsis thaliana landsberg
atgatgaccatttcctacgacctcttccctggtatgtttctttagataatacaattattacaatatttacttattcatagtgttttttttttgcatttttaattacttcttatatatgatgatatcgcagaaataggaataagtgcggcaacgcttgtgattccaacatgctttgaaaattgtaacgcgacatttcaagatccagaatgtaacaaatggtgtgtattattggcttataaagatggtagctgcctatatcctccttctgaggttgatgatcttccccctattaaacgaccttacattcctcgttgttgttgtaatcctattactctttcacctgcttctccttga

SEQ ID NO: 190037 - DNA, 95 bp, Arabidopsis thaliana landsberg
atatacacagtgcacaacagttcaaaatagtatttgagggatcaaatccacatataccagattctcatactaaaaatattcgagagttgaattaa

SEQ ID NO: 190038 - DNA, 844 bp, Arabidopsis thaliana landsberg
atgcatgtctgcggctatcagatcaaccacctttgtgaccgattttacgtccatcgtcgtttccaggacgattccaccaacatgcccatcttaggcttcacgtcttcacctcgccaccgatggtcttcaatttacgaaagcttgacatcatcgccacacttcatcaccacggaccatgtgtcatggaggcatggaacgcaacatatatctaagcaaaattgtcccttcctcgccttggagagcttctgctttatcttccttaatcacaagacgttgttcagatctcacaaaatcatgtcgtgtaatgagaattcaaaggaacgagcactaaagaagaacgatcaccagaagtcagccaaagagtaagcatcactggatactgcctcctatattcactgaggatcgtatgttgctaccggagcaaccgaaaccaaaaacaaatatagcaaaggaagaaaaattcactttgtcacagcaacttcataagttggtagaagcctcaggcaatatccgatctgactaaaattcggacaaaatcttcgtgggactatcagctaaagattcaacggtgggatcaataatttaacggttcaaacggaagttatcagttcttctataaatcagcaaaaggaagtacattacaccaacaagtgacaatggatcatcactagcaatcgctcaaggcttccactcattcatcaatgatgcgatctccaattctgtctccgtctcgacgacctcccacataaaagataagttcaattactttcttacatattagttaagcttgatcgacattttcgcttatagcgctagctttcatccttatatcactaacagatga

SEQ ID NO: 190039 - DNA, 207 bp, Arabidopsis thaliana landsberg
atgaatttgaactgtaagattcctgtcgctggcctggcgttgctgatcgcaacgggcggagcatttgcacaggtaaaaaagaaaccggctgcatcacccaagagcaagccgacaggtgttgaacaaaaacatattgcaggcagcaattcgctgcccgctgatccggatgtgatcatcggcaaacttccaaatggtcttacttactac

SEQ ID NO: 190040 - DNA, 121 bp, Arabidopsis thaliana landsberg
gttggattgatcattctcagaattcgagttctactgaaggatgaaaattgccatgaaggtatgtatacctgccatttaggttatcataaaattcttcctgtaaaaagcggacttgttagtt

SEQ ID NO: 190041 - DNA, 48 bp, Arabidopsis thaliana landsberg
atgggtaccggcttcaacgcacagaccggactcatactcaaatggcag

SEQ ID NO: 190042 - DNA, 273 bp, Arabidopsis thaliana landsberg
gctctttcattttccaaaattttaagtcgccacccggactttgaagtagatttcgtgccaaagtaccaggagctactaccagtgtacttgactctcttcttctgcctcatcgagacactgagcaagtctccacagagcttgtctgcggatgaactaaccaatgctcaaaaccaactgtccgagctcacaaaagtaggcttcaagctagactggttgaagtctaagctcgaggagctttccttggagaggaagaaagcaggtcccgatgcttga

SEQ ID NO: 190043 - DNA, 614 bp, Arabidopsis thaliana landsberg
gtgtagaggaagtggagtataacatcgaaaaagggctcatgacagtcagaggtgacgtagaacccatggctctggttcgtaaacttaataaacatgacagaaaaacagagcttttctcagtcaagtaccagcttgatgatgatgatctaaacagtgattcagaagactactcttcttctgactctactaattcatcttatgatcctaaacccatggaacgtcaattccaagagaagatgatgcagcagaagaagaagaagtctgggatactaaaaatgctttctcttttatggtgtttcagcagtaaatcaaaggttgttcagcctttaccgatgcgaaaccgaaactggcatgtcccatcaaagtttgagaatgttcctcctggctttggcttcaattctactacatcgtcgcagttgcggcctccgcatccaatgatgccctatccaccaatgatgcaaccaccaatgatgcagcaacaacgaccactaatgatgcagcaacaagcacaagttccaatgccacctaatgttaacatgttccagtcagcaccccaaccgtttaagatgcaccctaagttgcattacggggagcagaaacaggttgtcacctaa

SEQ ID NO: 190044 - DNA, 802 bp, Arabidopsis thaliana landsberg
  unsure (1)..(802): unsure at all n locations
atggctcagccaccgcccatttcaacccatcagccgcccatctcaacacatcagcagtacctcagccaaacttgggaagtcatcgcgggcgaaaagagcaattcacattatatgtctcctgtgagtcaaatctcggagccagcagatttccagataagcaatggcaccacaatgggtggatnnnnnnnnnnnnnnnnnnnnnnnnnnnnnnnnnnntacatggaacccgagaacacaagagcttatgactcctctcctcaacatttcaattggtctctttgagtctaatctctttcaccttttaagatcttcatcagtttgttactaaaatcttatcaactatctcttgtgtgctactttaaaaccaggcaatgatgcccgataatgcctttccgtttggatgtttttttcatggctttttatctttttaagaactttggttttattgatgatctctacgatagtttacgatttgcatccaacagaaactcaggttacatacttggagatcaaattgaaacatcaacattatcatcaatatattgtcttatcaaatcagagttccacatgcttttatcatcctactatctatttaaaagcatgagaattagcaagtccttaagattctaagtgtgtacctcaactgcaaacacagtcttccttctgtatcttgcttcctcttcagccacatcaggaaattttcaacctgaagcttctgcagacatggattgtgtttgtgtgcttccatactagtgtggcttatctagtgatcatcctcatttacgccaggacagttggatag

SEQ ID NO: 190045 - DNA, 489 bp, Arabidopsis thaliana landsberg
atggaggctcgatgtgacttttgtggaaccgaaaaagcattaatctactgcaaatctgattcggctaaactttgtttaaactgtgacgttaatgtacactcagcgaatcctctgtctcaaagacacacgcgatctttactctgcgagaaatgttccttgcaacccacggcaatacactgtatgaacgaaaatgtttctctttgccaaggatgtcagtggaccgctagtaactgcactgctttaggacacagacttcagagtctgaacccttactgtgattgtccttctccatcagatttcggcaagatctggtcttcaactttagaaccttctgtcacaaatttggattctccattttctgataccctgctccaggaattagacgattggaatggttcatcaacttccgtggttacacaaactcagaaccttaaagactattcttctttctttcctatggaatctaatcttccgaaagtgatagaagag

SEQ ID NO: 190046 - DNA, 139 bp, Arabidopsis thaliana landsberg
atgtatggtggttcacgcgagcccagtgacgcaaggttaaggcagttggtaacgtcatcaccgggcatcacccgtattcagccgcggtgtatagcggccgcatctatagccgtcttaccgcagtctaattcctgtatgg

SEQ ID NO: 190047 - DNA, 427 bp, Arabidopsis thaliana landsberg
  unsure (1)..(427): unsure at all n locations
atgccctggcgcgcgcctggacgcggccgcgtcgccgcagtcccgccgtcgccaaggtcgaggccaaggtcgaggctaagccttgaaannnnnnnnnnnnnnnnnnnnactgctgttcgccagcgcgccgctgctgcttggggcgatcgccgtcagcgtcttgacccgcgatgcgtggctgatcctggcccacaccgccgggatcgtgggcgcggcggcggcgattatcggcgtgctgttgctgctcgtcgccggagtgcggcgattggcgccgggatcgtcggctctcgcgcctccaagtcaggcgggctcacggaagcccgatctcacgctcgctgaacgtcccggcgcctcgaacggctgatcatcatcgcaggcccggcgctcggcctactccaccagggccaggcagtcgtcgccgtcggcg

SEQ ID NO: 190048 - DNA, 109 bp, Arabidopsis thaliana landsberg
ttccaaaattgggttagaggagaagaagaagattgatttgattattacggcggcaatagaaggagagtgtatgagaaaccttaaaccctaccggtggttgagtcggtga

SEQ ID NO: 190049 - DNA, 273 bp, Arabidopsis thaliana landsberg
atgacggcggcggcgatgccgacaccaatcaatatgactcagccgctggagctacccgtgatttctcctctcttggccctcaaacccaccatcatccgccaccgcagcggcagcagcagcatcagcagaatcccaacctcgtcggccattatttaccgggcgagccatcttccatcggattcgattccaacgcttcttcttcgtcttctttgttccgacacagaagctctccggctggattctacgaccaacatcttcccactgatcccaccg

SEQ ID NO: 190050 - DNA, 119 bp, Arabidopsis thaliana landsberg
cgcccggttattgcctggagagaagtcttcttgacactgattcttcgtcgagtaaacagcgcgacgatgaatcatggacagtgaaccaaattactgtctcggtccttgatgctcggtaa

SEQ ID NO: 190051 - DNA, 1004 bp, Arabidopsis thaliana landsberg
atggagaaacagaacattatctcaaacacttcttcttcttcgtcttcttggattcgtggttcttgtgttggaagaggttgttttggtacagtaagcaaagctttgagtaaaatcgacggtggacttttcgccgtgaagtcgatagatctcgccacgtgtcttccttctcaagcagagtcgttagagaacgaaatcgttattctacggtcgatgaagtctcatccaaacatagtgaggtttctcggtgatgatgtgtctaaagaaggaacggcgtcgtttcgaaatcttcatttagagtattcaccggaaggtgacgttgctaacggtggaatcgttaacgaaacgcttctcaggcgttacgtgtggtgtcttgtctctgctttgagtcacgtccattctaacggaattgttcactgcgacgttaaatctaagaacgttcttgtttttaacggtggtagctccgttaagctagcggattttggatcggcggttgagtttgagaaatctacgattcaggtttcgccacgtggaagtccgctttggatggctccggaggtggttagaagagagtaccaaggaccggagagtgacgtgtggtctttagggtgtaccgtcatcgacacgctccccggaaaaccagcttgggaagatcacggtttcgactcgctgagtcggatcgggttctctaacgatttgccttttattccggtggggttatcggaactcgggagagatttcttagagaaatgcttgaaacgtgatcggagtcagcgttggagctgtgatcagctcttgcagcatccgtttctgtgtcaagatcatcatgactcgttcttcactgagtcgtctccgcgttgtgttctttgactagggtcaactcggagtttgacgaagaagaagagagcgacgaatggagaccagaatccatggtttcggcgatggcaaggataagtaaattagctataaccggaggagcaaattgggaatctaatggttggactgag

SEQ ID NO: 190052 - DNA, 1297 bp, Arabidopsis thaliana landsberg
ttctttctcccggaaaactgaaacatcccgtttcagagataacgaagatctttactctgtttcacaaacccaacaccgtaatgctctgttcttcttatctccttctctttcgtttcaatattcaattcaatttcgtgattcttactttttcgtcctctgattcttgttatagggtttcacaagatgaatgatctgatgacaaaatcgttcttaagttatgtggaattgaagaaacaagcgaggacagatatggaatctgatcgagatttggagaaaggtgaagactttaacttcgatttcagtcccgcagatgaagaaaacctctctggtttctttcaagaaatcgaaaccatcaaaaccctaatcgaagagatcactcatctcttactcgatctccaaaacctaaacgaagagaccaaatcaactcacagcaccaagatcttacgtgggttgcgagacagaatggaatcaaacatcgtcaccatctctcgtaaggccaacacagtcaaaaccctaatcgagactctggagaagagaaacgttgcgaatcgtacgagtttcaaggaaggatcttgcgtggacaggacaagaacttcgatcactaatggagttagaaagaaacttagagatacgatgagtgagtttcatcgattgagggagagaatctttgctgattacagagaagatctcaaaaggaagtattttttagcgactggtgaagaaccaagtaatgaagatatggagaagatgatctctggatcagggtcttgttctgatttggttaaaacatttgaagtgaagccagagatggatttgaagactaaagagagacatgaagcagtgaatgatatcaagagaagtcttaataggcttcatcaagtgtttcttgacatggctgttcttgttgagactcaaggagatcgtattgatgacattgaagctaatgtggctaatgcagggagctttgtgagtggaggtactaatagtttgtactatgctaatcagatgaagaagaagactaagagttgggttctttgggtttcgattttgggtgttcttattcttcttgtgtgtgtcatctcaatgcttgcttctcgttgagatttggttgctttcttgtgttcttttgccattgttctagttttattttcattagatgttttcatgatttgtgtatcagaatgaaacttcaggttttgtattcatgaatctttgtccacagatcttttgtgttgatcatgttaatgtctatatacgagaggaacaagtacccgttataatgtttctattggattag

SEQ ID NO: 190053 - DNA, 381 bp, Arabidopsis thaliana landsberg
atgacgggaacaggtttatattacagaaaaacagtctcgaaatgtatccgagaaacggatggcagtttcgtcgtcattggtttgctcttgctggtgattcctcagtttgctctttacgcaatctgttgtcactcaaaacgtatgttcacaatctacatctatgcaatgatattcgtaagcattgtccttggtggctactctttaaagtgtttcatctacaacacaacctttggaatcgccaagaacccggctgaggaaaagcgaaccgccaagcaattggtaggcaggctagtccctgaaagtaaacttgcaaaagtcacggagtgcatcattcataaccatgactgtaacttcaatgccagccaaaacagcaatgtttgg

SEQ ID NO: 190054 - DNA, 883 bp, Arabidopsis thaliana landsberg
atgtccgccaaaattctgaaattgttggccatttattgtgtaatgcagggtattcgaaggcggaaaataatccgaaaatgcaggggatatacaattatacttgtaagtctaactctggactgaccaaatcaaacactctgaaccaaaacatggttttatcaacacggaagaagcgtaagagttcaacctttttacaatcaccatggcacaaagtatatctacaaggttcagagttatgtcacaacatcaggtcatttcgtcagaccaatttaataccacattcaagatgatgattatgttatattgttttcgccatatttgacgtttaaacatttgctctctatagaattgctgaacaagaatggaaccttgcgacaaatacactaagtgagaaggtttcaatactcttatatttatcattaagtaattttccatgtcgatcttcacatggatatttgattttgttgttgttaccgccttatgataactaaggtcgatacaaatgaggcgatatctccatcaaagagaaggcttctttcatctacacatcttatgcaacagcttctccaaccagcaccaacgtttgttttcttgggcgacaacgcagctcttaactacgaaatggtgctttactttgtgtcgagaatcaacctcgctaattcatgttctctaaaatgtcgctcggatttggataagagcataaagtgagttccattatggttttagtttgatctcagtttcttaagctttgctcacttccctaaaaagagtttttgtgcagtcgtcaaacttcgaagacagctagtgatcaagatcagcaacattctttacttgtcaatgctttcaatgagaaaatacaaaagcttgaaagagacttcgaaag

SEQ ID NO: 190055 - DNA, 243 bp, Arabidopsis thaliana landsberg
gcatctctccctgccacctactgggcagaggcccttaccgccacgcatctcctcaaccgtcttccctcgaaggcggtgagccaccctacacctcacttcgccctgtacgcacagccccttcctacgaccacctgcgcgtgttcggctgtgcctgctaccctaacacttccgtatcgcccctaacaagctctctcctcgctccactcgctgcctcttcctcggctactcccctgaccacaaggg

SEQ ID NO: 190056 - DNA, 471 bp, Arabidopsis thaliana landsberg
atggagaaccggaaagagcaaaaagaaaagaagtttggaatcaactttcaacaagaggccagaatagatcagacccttggtggctaactggggacttcaatgatattgtagactcttctgaaaagcaaggaggcataattagaccggaaggtacctttgtagacctgagaactttaatctcagaatgtgacctctatgatctccaacatgctggtaattttctctcttggaggggcaaacgtcatgatcacctagtcttctgccgcctagatagatcgatgtcaaacagtagctggggtgaagaatacccctctggaagaagtgaatatctcctgtttgaagcttcagatcataggccacttgttacttattttgacctgcaaaagaagagaaagaaaggacttttcaggtacgatagaaggtacaagaagaataaagagataacacaattaattgtgcaaaactggagag

SEQ ID NO: 190057 - DNA, 385 bp, Arabidopsis thaliana landsberg
ggagaagcctctctagatctacgcgacgaccaggcttattcgagaggtttcggagtggcagcgcttgtggccaacgacggaagctcaagtgtagcagacagtaacatctagaggtgaaagaagaagaagatttgttccctcaatcttacaaccaatcgatccaggttttgcgacgattcttcaattttacgaatagaatttagagttttgttagattgtgtaaatatcttattcatattagcgaaattgtgtttgtaaagacgatgagatcggttgcagatcaaaagttcctctttccttactctcctttgtttcagatctgttgcaagaaggcgacgagagaggcggtgataacataacgtgggacgtttctcgacttacttaa

SEQ ID NO: 190058 - DNA, 143 bp, Arabidopsis thaliana landsberg
atggtcacatccattgttgaagagattcgaacaagctggattagacatgactctgaggagaagacaaagaagaagaagaagatcaagaataaaagcaccgtatctatatggtttgatgggtatgtgctagagagagatgagat

SEQ ID NO: 190059 - DNA, 643 bp, Arabidopsis thaliana landsberg
atgcagagtgaagaacgtgtggggtcgagaaacagcagacaagtgtgcgtggaccatcaccgctctgtttttgtgttgttcgtgaaggtcgtgccctaaccgcaaccccaagccgccattgccgctaactttaacacgtggcgcttccccatgtgatttgtcttttaccgccacgtcggcctagcccacaatcgttcttcattgtggtctagataaagcccaacagcctccgtgggctctacccggaattgccgggacaaaactttaatttctcaaaccaaaaccaaactaacactttgtgcctggctcttgtagctcgtgtggtctgtgaaggtgcaacatatgatgtgtgtgatgctcgagcaaggcacagaaagagaaagatagatatagaccaaagaaaaaaacagaggataaaaaaaccaacactttgtttgcaaaccgattggttgtgcctacataagccataataatcatatccgcatctaagcaagttcacggacaagaaaagaaaatggaatatttacattcaattaaaagcaagaacaccaaattaagtcattgacgatccaaaagtgttttccccactgtaggtaacatacaagaagccgtcttcttccttattctcatcgtaaatggttga

SEQ ID NO: 190060 - DNA, 751 bp, Arabidopsis thaliana landsberg
atggctgagaaagaagaagtgaagcttttggggatatgggcgagcccttttagccgtcgggtcgagatggctctcaaactcaaaggcataccgtacgagtacgtggaagagatactggagaacaaaagccctttgcttcttgctcttaaccctattcacaagaaagtccctgttcttgtccacaatggtaaaaccattctcgagtctcatgtgattcttgaatacatcgatgagacttggccacaaaatccaattctccctcaagatccttatgaaagatccaaagctcgtttctttgctaaactcgtcgatgaacaggtaattgaattggttcaaacatgcatgtcaaataataaacaattggttctgctttgttaatttatcaaacaagtatttttctattaacattagcgattatatgtctctgtcattgtagattatgaacgtggggtttatatcaatggcaagagcagacgagaaaggaagagaagttttagccgagcaggtaagagaactgattatgtatctcgagaaagaacttgtcggaaaagattacttcggaggcaagactgtcggattcttggactttgtcgccggaagtttaattccgttttgtttgcagagaggttgggaaggaataggattggaagtgattacagaggagaagtttccagagttcaagagatgggttaggaatttggagaaggttgagattgttaaagatgtgttccaccaagagaggaacatgtag

SEQ ID NO: 190061 - DNA, 56 bp, Arabidopsis thaliana landsberg
gagttcttcagccttccctcatcaggattcatccagtggccgtccgagtaacataa

SEQ ID NO: 190062 - DNA, 61 bp, Arabidopsis thaliana landsberg
atgatcccccccgaatatgaatccatcagtccgggccataatattcgtcgaccagcccggc

SEQ ID NO: 190063 - DNA, 167 bp, Arabidopsis thaliana landsberg
gtcaaattttgctctcgcagagtctatggcttccttcttgtcagatccgtgaagagaataatatgttccggctgattcgcggtttgcagaaacaagattctcgagctacctcaatcaaagcctcttgttggagtggaactcgcctaattgcagaggttgtgagatag

SEQ ID NO: 190064 - DNA, 115 bp, Arabidopsis thaliana landsberg
ctggccgggctggggcccgttccgggacatctatatcgcctacctgtgcggcaatccggccatggacgacgacacctacgcgcgtatggtcgacgccggcatgtccatccggtaa

SEQ ID NO: 190065 - DNA, 63 bp, Arabidopsis thaliana landsberg
cttaaaccggaccatgaaaccgtcccttaccgaaatctgatgaaccgaaaaaaggttttctaa

SEQ ID NO: 190066 - DNA, 114 bp, Arabidopsis thaliana landsberg
agagtctcagtggtgacgatgacgaacacggtgaagaagattcgaaattacacccacattcgctacataaacgacagcgtttcacattctaaaataattcaaaagcccacataa

SEQ ID NO: 190067 - DNA, 1236 bp, Arabidopsis thaliana landsberg
atgtccagtcaacgtgcaaatgactgcgttttcttaggttacgcatctgggtataaaggttacaaggatataaatcttgatactaatctcatttcagtctctcgtaatgtggtgactcatgaaactgtctttccatatgatacactgcatctgacagattcgtgtgatgtcatccctgcatctattacaccattacctattcctgttgcattagattcatctgacatacatactgcgcatcattcatcaccatcatctcaaacacatcatacacaaaatccacctagtacatcatttggttctagggagactgttactacagatactgcagtgatttcagtacctaaggtcagaccgaaacaccctactaaggtaccaagttacttatctgaattgtctcattcaaacttctaagcctccatcaccgataaaagtcaccacaccatatcctctttcatctgttctcccttatacaacacttaaatccccttttcagcaatttatcttttcaatatctcttgaaacataacccaaaacttttaagcaagccataatatcactacaatggacaaaagctatggatgtggagcttgaagctatggaacttaataaaacatggagtgtggtttctttgcctgaaggtaagaatgttgttagctgtaagtgggtttatactattaagtatactacagatggctcgtagaaagatataaagctcgtcttgttactaaaggctttacacagcatgaaggagtcgattactttgataccttttctcttgtggctaaattggctagtgtgaagttgattcttggtttagcagcaaggtttggatggagtttaacacagatggacgtcactaatgctttcttgcatagtgatttagatgaagagatatacatgagtttgcctcagggttatacatcaccgactggttcaaatgttgaaagatttacacattgctatggattttctccgaagcttttttgtgacaacaagtcagccctgagtattgctggaaatcctgtttttcatgagatgatcaaacatgtggaaatagattgtcacacaactcgtgatcaagtgcagaatgggtttatgagtgttctacatgtatcttcgggtaatcaacttgcagatgtactgaccaagcccttgcatccgggtccattttattcgattcttggtcgactatctgtttcaagcctcttctcacatttggttcctttggcttga

SEQ ID NO: 190068 - DNA, 83 bp, Arabidopsis thaliana landsberg
gcacgcccagcgaccacaccgccgtgagagcccgccacctcaccgtggaccggccgacccaagcccccaccgtccaaaattga

SEQ ID NO: 190069 - DNA, 480 bp, Arabidopsis thaliana landsberg
gtgcatttcgccggagctaaacaaaccgccggcaacatcacgtcatcggagaatccattcacaccaaaagcttctttgattcgttattggaacaatcatatcaatggcgattcaccaaaaccttcttttttcctctcaaaggcctctcctctaaccgccgtggactccacgcgtttcgcctcactcgcttctaatcacgcgcttaacacgcatcactctgatttctgctccgccgcgaaactcttctgcttccctgagctcgccgctcattccctggaaaaacacggcgatgacgtcaacttcgccgcttacagcggcaagaacttcacaaactacggctccgaccgtctctccggagcagactcattcaaaaactattccggcggtgataacatcgccgtagactcattccgacgttacagccgaaactccgccggacacgacgatggatttacaaattacgccggagaagtaacgtag

SEQ ID NO: 190070 - DNA, 247 bp, Arabidopsis thaliana landsberg
atgaagccagagcacccgtcgttgcctctgatcgtccaccgtagcgctctaatttggaattcccccaaatccactctctgcgccgccgtgagcaccccctccgtcgacccgctgtcctggccttccacccgccttcctagcgaccatccttgggttctggtacgttgcagaagctcaccgtgcccccaatttgtatgttgtcatactatgtcgtcgggaacacgacgggaaagactctagttccgcg

SEQ ID NO: 190071 - DNA, 280 bp, Arabidopsis thaliana landsberg
atggtattgtccctcaacgcccacgtggtcggtagagtgaaatggaagccgaaccattgctgccctaatgcagcggctaaagcaagaaacgtcagtgacttcgcagtttcggctgctctaggccttgctccatggaaggctatttgcaaaaacgttataaactatgaaagacgtaaagaggatggaatgttcaacgctacggagatgactcgacctcgacgggatggtgccatcagggtcaaagggactgtgtctctgtccattgaagagttctcgaact

SEQ ID NO: 190072 - DNA, 642 bp, Arabidopsis thaliana landsberg
atggataacaacttgtttacggggaacatcggaggtggtttgagtaactccacaatgttgcggattctagacatgtccaacaatgggctctctggtgctattccaagatggttatttgagtttccttatttggattacgtattgatatccaacaatttcttagaaggtacgatacctccttctttgttgggaatgccttttctttcgtttctagacctttctggaaaccaattttctggagccttaccgtcacatgttgatagcgagctcgggatatatatgttcctacacaacaacaacttcacagggccaattccagacacattgttgaaaagtgtccagatacttgatctgcggaacaataaactctctgggagtatcccgcagtttgacgatacacagagcataaacattcttttgttgaagggaaacaatttaacagggtctattccacgggagctttgtgatttgagcaacgtcagacttctagatctttcagacaacaagctcaatggtgtcataccttcatgcctctctaatttgtcatttggacgcttacaagaggacgcaatggctcccaatattccgccctctttcttgcaaacaagccttgagatggaattatacaaatcaacttttttg

SEQ ID NO: 190073 - DNA, 48 bp, Arabidopsis thaliana landsberg
atgtttagcttatcatgtggtaaactctttgaaggcactcctaagcag

SEQ ID NO: 190074 - DNA, 1116 bp, Arabidopsis thaliana landsberg
atggagagaatgaagagggaacatggtttgcagatgaagaagcaaaaagacgaattaatgaaagatctttgtagtagaaagagcgagaaaactccagaaagatgcaaagaaacaaggaggattgtcacaagagggagcttgagaccaaaggagaaggaaaaggaactgaaaagtccgagtcatcggtttgcatctccagttgcagcagctaaaaagagaagcttttgggacataaccgttgctaatactagtcctgcgttggatagaaggaaaacgagaagccacggtcttgttcatcaagaagctccttcaaaactgcttcaggtaactttactacaatgatgctataatcaaaacactctaaaacagtgaagttgttcatcaagaagattctgtgtacatacacttcactaatatgcttgtttggtttttggtgcagcccgggtttgctcgtccacacatgaagcattaacatgtttgaacacagatcagatctgatgttgtctcttcactacatttatttttttgtttgtttcctccactattttccaacatctgtattctataggaatatacatgacaatcacacaattattttctccttttcactaattttatttttactattatttcatcatttagcaatgcctctttcactgtttttcttcttttaaatttataagttagtgtctttattttttaaacgtaaatgttaaaaaaaatacttttatgtcacaaatgttaaaatattctaaacaaggatgatatgcactaaaaatatctatgaaccattttgtcttattgttctcttgtaatttattttcttaatatgtagatttatttagtgtatcatataagatagtaaaatacatgaatatgtttttttaaaaaataagcatagttaacaaaataaaaaattacacaaaataatttgtttttaacagaattatttgcatgccactagaaacccatatcaaaccattaagggtagggaaggacgctatgcagatgtgcaattcacatcggagaaccatgcagccaagattgatcagctagcccgtctatcttacaatagaaacaagttaaaggtttataatttggagttagatttttgcc

SEQ ID NO: 190075 - DNA, 271 bp, Arabidopsis thaliana landsberg
tcttgtaacatggacgaagcaggagttgaagcggctatatcaggatgcagctcactcgagacattggatcttcgtttctgtccaaaggtactaacaataaacgagtgttaacttcgatattgaaaacttagcaagtaatccatttttatgtaacaattaaaaccttgtcttggtgaattaacagatatcctcggtgagcatgtcaaagttccgaacagtgtgccctagtttgaaacgcgttttcagcagtccaaatctcttgcaagattag

SEQ ID NO: 190076 - DNA, 447 bp, Arabidopsis thaliana landsberg
atggtgagattggatcttccatgggatttggtagatgaaatactctctcgacttcccgcaacatctctaggtcaactacgatttacatgcaaacgatggaatgctttattcaaagatccggaattcatcacaaagcaatttcataaagcaacaaagcaagatttggttctcatgttgagtaattttggggtttactcgatgagtaccaatctcaaagaaattcccaacaacattgaaatagcgcaagtttttcattgcaacggcttattgttatgttccacgaaagagggtaacaagactaaactcgtggttgtgaatccgtgtactggtcagaccaggtggatcgaaccaagaactgattacaattataatcatgatatcgctctaggttacggaaacaacagcaccaagaaatcgtacgacagctacaaaaatcttgaggattac

SEQ ID NO: 190077 - DNA, 153 bp, Arabidopsis thaliana landsberg
atgtttaatatagttatcgaaattttagataaaccgtcgaagaagagcgagaatcacaagcaagagcgggagaaacttggtttgggtgcaaaaggacgatcgagcagtcaaccagcattagatcaaccaacaaatgcgtcgcagaaagttgag

SEQ ID NO: 190078 - DNA, 312 bp, Arabidopsis thaliana landsberg
tgcatgtaaaaatcacccttagcaataagccttcggtgttcgcgccttccggaggcccccctcggtggggtgaatgcccggtatatgaagtttcggagttgcctggtgtgtaggcgtcgtccgcgccagggcgcgggagcgcgattccgtgtactcgcaggtcctcggtagcgttccggtatgaacgagcggaagttccgtccggaactgcgcgtgctcgcgatcctcgccgtggcggtggtgctcgcggcctggttcgtgcgatcccggtcgacttcggccccttccgccgggacgggacccgggatccag

SEQ ID NO: 190079 - DNA, 94 bp, Arabidopsis thaliana landsberg
atgaagttccgtaatgcgagagataggatccaggcgagcacgaatagtaagctggatgtccttcaggaccgaatcaaagacgcgagcgactccg

SEQ ID NO: 190080 - DNA, 86 bp, Arabidopsis thaliana landsberg
atgcgatgtcgaaatgaaaaagcaactggaatcccggcgcctacgagcaaagacttcaccggcgtcggaaaggctgtttggataag

SEQ ID NO: 190081 - DNA, 171 bp, Arabidopsis thaliana landsberg
ggtggcaacgatgccattcatgagggcatcccaaccagaggggtcaagactgggaacacctgcagcgcgctgaaacagcatgccgaggcgcatggagcgaacaaaataaaggacggcttcaggatcgagcccgtcggccacagagccatcggacaacgcctgatctactag

SEQ ID NO: 190082 - DNA, 2814 bp, Arabidopsis thaliana landsberg
atggagaacccatctgtagcaccaattcagagactacttccaataacatcctgaatccagtggatgttcagtttccaaacaatactacaggttcaggacgaccaacgtacgcaagctctagctcgcatgttgttcaaaatcataactggtggagttttggtgaatccagctctagattggggccttctgatcatttaaattccaatggttcaaagactgatcgacagcttctctcagatggctatggatttgaggaagggcaatcaggtatgttgttacctggagagtcctttttgcgtgggtcaagctctagtcatatgttaagtcatgtaaatctgggcaaggacatggacattggtagtggtctgcagacttctggggtcgttatccgccataataactgcgagacttcattgggaagctcaagtcaaaccgcagaggagagaagcagtggtccaggttcttcgttgggtggtctaggttcatcctgcaaaagaaaggctcttgaaggagctcctagccattctttccctggtgaaagtcatggttgcttttttcaaactgagaatggtgcttggaatgagggtcttgctcaatatgatgcttcaagtagcttaagtttgtctatgccctcacaaaattctccaaatgttaataatcagtctggtctaccagaaccaagatttggattgggtggtgggagagcagttacagcaagtgcttttccttctacaagaagcacggaaaccatctctagacccggcaggcggttaaatcctgggcagccaccagagtcagttgcattcagcttctcacagtccggtagttctgtgcgtcagcaacagcagttaccagcaacttctccttttgttgaccctctggatgcaagagcaataccagttacaggtagctcaagcagtggtgatggtcagccaagtatgatccaccttcctgcattgacaagaaatatacaccaatttgcttggagtgcttcgtctagttcgagagcaaacagtatgcctgaagaggcattgtcaccatgggacgcgccaagaataaactcagagcagccagtctttactacacctgcaaatgaaacgagaaatccagtgcaggatcagttttgttggagtttcactcgtggaaaccctagtacatctggagattctccctttgttcctcgagcaggatcgagttcagggatccatggtttgcagccgaatcccacttgggttactccccataatcaatcaagaatatcagaagttgctccgtggtctttatttcctagtatcgaatctgaatctgctactcatggtgcttctcttccattactacccacagggccttctgtttcctcgaatgaagctgcagcgccgtctggatctagtagtcgtagtcatcgctctcgacaaagaagatcgggattattactggaaaggcaaaatgatcatctccatttgcgtcacttaggaagaagcttagctgctgataatgatggaaggaaccggctgatttccgaggtctgtatgaactctttagcagttttagctgatgtggcatctgtctcagtggaagtcaattatttgttgatggtatttgctgatactagtaatgtcagtcactcagttggtactctcttgtttattggcagatacggcaggtgttgagtgccatgcgaagaggggagaatttacggtttgaggtatgattttgtcacataactgatttcaatcattccctcttaattacagttaacaggtaaaatcacattgcactttttgccttcaagtgttagttttagatcttcagaatgttggtatactatatgtgatctctgtcgacatctaagttgtgtaccatctttttagctgtatcgtatctactgctgctaatataattggtctcacattgtagtaaacgtagtgagaagcagcaattctctatcaacatatcttattggcatttgtataaacaaaacgtagtgcaagttcatccccaatagcattttatttttggatcatgattttcatttggtgatctgataggattatatggtattcgatccactgatctaccaaggtatggctgagatgcatgataggcatcgggatatgcgtcttgatgttgataacatgtcatatgaggtgagtgttcatttttcttttaccattttatctctatgtaccaatttttttaaacatggttcgtttgggaatgtaggagctattggcacttggggaacgcataagagatgtgagcactggtctaagcgaagaggtgatcctgagagtaatgaaacagcacaaacatacatcatccgctgctggctctcaccaggacatggagccttgctgtgtctgtcaggtaagacatgaaattactcttacaccaaggtcttttatgcggctccttggacctgtttatttgtctcttatggctgtgttgtttgcaacaaattcacttctttaccgtagtagatgtggtcaagccaaaacaggagtaatgtattatcacgtagatagaaacctgccacaatttatcacattttatcttgacattacactaaaccgtccatgtgtgtaacatgggttggttaggttcatctatattcccatttttgagctgatactcagctttaactcggaagctgatgtgaaaaccttgatgcatttttaacaggaagagtatgcagaaggagatgatcttggaacactgggatgtggtcatgaatttcacactgcctgcgtcaagcaatggctgatgctcaagaatctctgcccaatttgtaagactgtggctttatcgacataa

SEQ ID NO: 190083 - DNA, 188 bp, Arabidopsis thaliana landsberg
atggaatcgagccttgagcaccccaaatgctctctttacacccttcagtgtgccctcttggtatgtagcaaacatctactgatttagaatatatggaagatgaatggtcttcacaaacaacaaacaccgagggtagatgtcatcggcgaggtagtacccttggttgcactcatgaccattcaccataa

SEQ ID NO: 190084 - DNA, 169 bp, Arabidopsis thaliana landsberg
ctatagtttgcaacttaaaaatgacctttcaaaactatggaatgacgaaggtagactagttattagaccgaaaagaaaaatcatctacacgatcgtttttgtgatcgagtatccttggttaggtttacttaacttgtatttgacttgtaaacgacaacgacttgtgtga

SEQ ID NO: 190085 - DNA, 135 bp, Arabidopsis thaliana landsberg
gtggccaaaaatgagagttgcaaaagaaggcagagctatagttcacggcttgctctcttttttggggtcaaagatttagacttaagagttcacaacgtgtttccccactcgaacactagtcgacttcttcgctga

SEQ ID NO: 190086 - DNA, 25 bp, Arabidopsis thaliana landsberg
gaagaaaccttttcgctatacgtga

SEQ ID NO: 190087 - DNA, 65 bp, Arabidopsis thaliana landsberg
atgagccctggcacggagggagaggttttcggggagcgagatgcgcggggccgggcgggggcacg

SEQ ID NO: 190088 - DNA, 1029 bp, Arabidopsis thaliana landsberg
atggagacaggtttaggtaagcaactctactttgcaagagacagaatagtggagaattatttctggacgattggacaaatccaagagcctcaatacggatacgttagacaaacaatgacgaaaataaatgcacttcttactacaattgatgatatctacgatatctatggcactcttgaagaacttcagcttttcactgtcgcgtttgaaaagtaaagacccatacactcttaattttctacttcaacttgttatttcgtaatataattaattaaatatcaaataagatttattttttgtcaaaatatatcatagaaattaaaattactgattgaattgtctatatatatgttgcagctgggatataaatcgtcttgatgaactccccgagtacatgaggttgtgttttcttgttatatacaatgaagtcaacagcattgcatgtgagattctcagaactaaaaatatcaacgtgatcccattcctcaaaaaatctgtaagtgtatatatatactcttttcaacaaatacttttggtgaatctattgttcttacaattatttacaaaaaaaagataaaaaaaattgatgtaaaaaaaaaaaattcccttgacatttttttattatttttaataatttatacatctcgttaataaatttattaaaacataaaaaccattcttacataatttcaactatggatactttacataacttaaaccatggaaacttgcatgtgttggtacctaatgctaaattttcaattatcttaaatttagtggacagatgtatccaaagcgtatttagtagaagcaaagtggtacaaaagtggtcacaaaccaaatttggaagagtacatgcaaaatgctcggatttcaatctcgtccccaacgatatttgttcacttctactgcgtattctccgaccagctctctattcaggtcttggagactttgtcccaacaccaacaaaacgtcgtccgatgctcctcttcagtgttccgtctagccaacgaccttgtaacctcaccg

SEQ ID NO: 190089 - DNA, 162 bp, Arabidopsis thaliana landsberg
atggttgataatctccggtggagcctctgcgcactctttgtggaagaacaaactagtagaggaaggctcgttgcaacggtagccgccatagatgggaccttttatattgcaacctttacaagaatcattaacaaaacgagtcgaaatggtcaaaggatattt

SEQ ID NO: 190090 - DNA, 905 bp, Arabidopsis thaliana landsberg
cacacgcgaccctatggtttggtcggaagctggtggtttaagctgtacgcaagagtaccggggcaaggtcaaggtatggtttggttataaagaaggccgagttgtttttctttccaatagccatgagcatgatattcaccctgacctgatgcccagtttcttcgaggtatatataattagcgtgtttcgaaattctaatacatatataaatgttagaaaagtttctttctctgttaaattatttttgcatgtcaagggatttgcttcggttatgcagtgcgctaagactccacgtcgatttgtagaggactttacccaagaggaagttgaagcctttgggcctaacttgcaactacgtacttgtagcagatataaatacaggatcactggtttatgtctcgaaagatgaaagaagactacgtgtaaatgatgttggtcatggtgttcataccatttctgtatacggatttgatgcctgcattctcagggtattatagtttaaaaaaaaaacttgttaggaacaatctattgaaggcaaatattttctgaaaaatcaaaccctctttttggtcttatatgcaggatgatatgctgaaagtaaaatttaatgagatgattgctagacatgcaaaactgccgccaattaagaacattgttgaggatcttatgatgaagtctccattttttatcgacagtgtcgatggtgctgtaagaaaattaaacctgcatgcattgatgttttcgggctcaatcctctcataccattttactttctattattttttcgttctatttagggcaagaaggtgaggtatcgaacagtacgtacattgggaatggacataaaagccaacagaccacaagggcggttctatgagaggcatttgaatgataatggtgaatgg

SEQ ID NO: 190091 - DNA, 310 bp, Arabidopsis thaliana landsberg
atgaaaacaaagaaactcgagaagatttctatttcagtcggtgagacgatatgatcgacctctgaatgctgtgtttgaactctcgggtggggcacgagcgcttgaataagctcctcctcctcctactcctcctccagctccgggtcctgctgctcctacaccacctgcttgtcgaacacttgcaactggagctccaattcgccatcttgctacgattttattactgttgagaatgtcaaggtacaacagcaaaacaaaaactgagaagcgagagaaacaatcatctggaaataatcgagaatttgaataa

SEQ ID NO: 190092 - DNA, 438 bp, Arabidopsis thaliana landsberg
atgtgggtactcgacctcattgcctttgtggcggccagcactaccatgagtatgtacagagatagacatgggatttgctcccaagtgagcttgttttaagtctctaagcttgccttctcatactcattaggcttagggtgggttgtagagaggaaatgaggtctcctctccttctttagtagagtgatcatcatactcattagggtttcttgacagatctgcaattgggtactcagtggccatgtcctcacagtaagcttcttttttatcaagatagtcttctcctctagaccattccgatgtgaattcacatccttctttgctgactagaatagtggctccatcgttaggggcgtccttgatgttgagtggtactcgattgacttttccattgagctccttgatttgatccttcagctctttcacaatccctgttag

SEQ ID NO: 190093 - DNA, 290 bp, Arabidopsis thaliana landsberg
atggcgagtacgagccctaattgccgcgccgctcgccgcgggatgcagtaaccacgatccacgcatgcaccgactcgcaacttatcggtgggcagctcagtggggagtacgcagcaaagaacgagaacatcgacgcctatctcaagatcgtccaactgatgacgaaagatttcgaaaacttcaaactctcaaaaattccccgaggtgacaacgcgccggcagatgcgtcgccccttagcgtcaacttccgaacccgatttgcgacgaatcatcccggtggaaagtattga

SEQ ID NO: 190094 - DNA, 285 bp, Arabidopsis thaliana landsberg
ggtaatgtagctctagatgttgctcggattctcttaagaccgacaacagagttggcgtcaactgatattgctacacatgctttatctgcgctgaaagaaagttctataaggtcccatttaaccgtttaactagttgaatcttgttcctttccatctttcctatagttgaaaaccaactacagtccctgatacaaagttgtaatgtgttcaggaaggtgtatctcatcggaagacgggggccagttcaagcagcattgactgctaaagagcttcgagaagttctcg

SEQ ID NO: 190095 - DNA, 614 bp, Arabidopsis thaliana landsberg
attcgcatagaattcacgaacaacttttgggacaaactgttccaccgcaacgacagtctgagccatacccgagtgttccagaaaaacctttggtggcggtcaggacctcaggatctaagggcagagttttctggaatatgaaatcgcgtttagcgatgtgtttgtacctttcagcagcagcgggagacaaaaaaacgcttggtgtgtggcggcaccaaagggcgacgaagagttctatccagttcatctctctcggcaaaaacctgacgatgagctgcagcacgagcagcataagagacagccgcatctggcacactagcaccctctgcagtctcaacggtgggcgaaatcagaggatcaggcatcgggacgtctgcgaccggtgaagcaaccagagtgatgtttttgggagccaacggggacggaggagcagacggattggtgagaccagcgggttcggcatccttagaatcgctgagaacgagcggtggagcggacggtggtggaatcgagacagacggaggctgagaagacgtcgtcggcggaggagaggacgacagaagctcgcgaatcgacccaattccaaaggcgaaaagcggagtggagagaacctg

SEQ ID NO: 190096 - DNA, 116 bp, Arabidopsis thaliana landsberg
gatgattctatctttaaaaggtgaagctgctagatccgaagatatgtttgcgcatattgaagaaattctgatatctgttagacttgcctttttgaactgctttctggattttgctg

SEQ ID NO: 190097 - DNA, 439 bp, Arabidopsis thaliana landsberg
actggttctgcgtttggacagactggttctgcttttggacagttcggacagagtagtgctcctgcatttggccaaaatagcatttttaataaaccttccactggatttggaaacatgttttccagttcttcaacattaaccacgtctagcagctctccctttggacaaacaatggtgattttcacattcgctattaagcctaagcacttcgttttttttttttttttcatttcttttggtgatgcctgttctcttcatagtttgcagttcttttgcatctcttaaatgacaccggcacctagtttccttcttttctaattttggccttcaaatctcgcattatttctgtagcctgctggtgtgacaccctttcaatcagctcagccaggtcaagcatcaaatggttttggtttcaacaacttcggtcaaaatcaagcag

SEQ ID NO: 190098 - DNA, 756 bp, Arabidopsis thaliana landsberg
atggacactgtagtcaatcaacacggtcttgacattgaagctttgaagtcctcgtgtcttcctcatcctggtggtacccaaacggaagattctgggtctgcacatttggctggtatatcctctctcctttgtttcagttgagtgtttcaattgtctcttttatttatttatttattatcttaagcttcttgcatcaatgtggaatacagggtcttcccaagcggttggagttagcaatgagggtaaagcaactctagttgaaaatgagatgacaaaatacgatgcattcacttctggtaggcagcttggtggatcaaacagtgcgtcacaaaccttttaccaagggtctggaactcaaagtaacagatcatttgatcgtgagagtccatccaacttggattctacgtctggaatttctcaacctcacaatcgtagtgagacaatgaatcaaagagatgtcaagtcgagtggaaagagaaagagaggtgaatcatcactttcatgggaccagaatatggataactctcaaatatttgatagccacaagattgatgatcaaactggagaagtaagcaaaatagaaatgcccggtaattcaggtagggatatttgcttcaacattgtttcttacagaacaaagcatatcttttttaatctagaatataagaagcaccctacaattgttgccattaaacctcaggtgacattaggaatttgcatgttgtgttgtcctcagatgcattcacgactccacag

SEQ ID NO: 190099 - DNA, 1351 bp, Arabidopsis thaliana landsberg
atgggtcccactggcttatccacttcgccgcgtttttcggttttagctcataaggtgggacccacactcttaatggcctgatcctcatcttctcaccgacgaaatattaccataaacctaactgagttgaccaattgggcatttttttttcattttttcaaagtttctactttttttataggctctattttaaacgtaaagataattattatgcgaataccttaatttagaggattactgtcaagttactatcaatgcaaggcaaccaactatcttaatttttttgttaattatattagctatttaacaaaaaaattaattgtttgcagttataaaataattagaaattgtcgttcaatatttacggatataactggtagacattattagagtatgataatttatttttggtggatttatacctttctttgtgttgtttttcttctgttcattcattcctctctattacaatgtaattactctagtatcttaccaatcataacctctacatttttttttacacaacgatacacatcacgaaatttgaagtctataatttacgtgtgtaatatttaacaaggagtcaaagaaaatcttacgcagacccaccaaaagagattctaattaaaaatttcttaatcaatggtctgatatttatatacagtcacaatcaccacagatcttacaatatcaactttatttgtctcttaccttcctaattctttttgtaatgaaaatttacttaattttaatatatatgaaaaactttaaaatgacagaattataaaaaatcaggaaaataatattttaaaacaaattattaaaataatttcctaaataatatgtcaaaattttgaacatcattaaaaaaaatgagagagagtatataaacatgatacgtgtacggtgtacccaaccctagtcggcaatggtgacaccaggaaagaaacaaataaagataaatgttcatcttttcaaaaggacaaaaattaaagaagatagcacatagagataagaaaaggaaatggaaagttgtgaaaatgacctaacgagtggataaatattaaatacagactaagcaggaatcataaattgtcttggaagttatagacaaccgtgcaagtctttttattatgggcataaatcaaaggccacttcaattgttctagttccaacctttgtccgcaagtcgacaaaactaatatcatgtctattttttattttattttttaaactgtgggttgtgtgttggtgtaagattactatttttgatcaatcatccttttttggggaccgataggtatggaattcggatcggatttttggatttgaagatcttgtctacttctag

SEQ ID NO: 190100 - DNA, 381 bp, Arabidopsis thaliana landsberg
atgatacatgaagtttttgtccagattcaagcttcatatattccaaccaacaggcagaatttaaacacacgattagatattataacaatgaggtaaccttttaaaaaggctgatcagtttggtgccaatatagttgagatgtttacaacttttgctttctaaacctctttgtaaatccattatagggaaactttactagcgcaactttctctagtaatgcacgcacctagtgtaccgtttcaagacactccatcaagcagtcaagccactgaagcggtaaaatctttattcattcgttcattactactttatctttctcattactggatatgttttaatttgtccaatgaggttattaagattcgcatgacatatctttag

SEQ ID NO: 190101 - DNA, 193 bp, Arabidopsis thaliana landsberg
atgacgagccaggacgacgaacggtggatggctctcgcggtcagtcaggctcacgagtgcccgccgtctgagaacgcgtactccgtgggggcggtcatcgtcgccgccgacggcaccgaactggcccgcggctactcgcgggagaccgacccccacgttcacgcggaggaatcggcgctggccaagctcgcgg

SEQ ID NO: 190102 - DNA, 145 bp, Arabidopsis thaliana landsberg
ggacgctccctccctgtggctgcggttgctgaccggtagaaagctgctgctggcgttctcggcgtttagcggcaggaacccacgtgctcttcacgtgagtgggacagtcaaggccacggctcttgcagcaagtcctacatctcat

SEQ ID NO: 190103 - DNA, 109 bp, Arabidopsis thaliana landsberg
gaagcaaaatcatgaaaagaaagaacagctagctacacgaaacagatcgttgtgtagagtaccaatcacctacgggcaagtgcatggtacaactatatttgggccttaa

SEQ ID NO: 190104 - DNA, 887 bp, Arabidopsis thaliana landsberg
atgatctttgtgtctttggttgcatcagtggactcggtatgtacttgttcctctttgctattcctgtttttctcctaaaggtgtggtcttacggctaaaatgttggacttggtgcacttgtaggttggaacatatcattctgcatctatgatagtgaatgctaagcgcccgacacggggaattgtcagtagaggtattgcattagaaggcttttgcagtttattagcaggaatctggggttcgggtaccggatcaaccactttaactgaaaatattcatacgatcaacatcactaaggtggctagcagaagagctttggtgatcggagctatgttcttaatagtattgtcatttttaggtaagcatcatccaatgaatgatccaaagtgtaaaactttatcatacattttacaagaaacttctttaaatttgacaggaaaattaggtgcaattctagcttcaataccacaggctttggctgcttcagtattatgctttatatgggcactgacagtgtctctaggtctatcgaatctacggtatacgcaaacagcaagctttaggaacataaccatagttggagtctcattgtttcttggattatccatccctgcttacttccagcaataccagccgctatccagtctaatactaccgagctattatattccctttggagccgcttcaagcggaccattccaaacgggtatcgagcaagtaagccactttccttcccttgccttgattagcattttcctggacaatgatgactgactgactcttctaatgcgtactgcagcttgattttgcgatgaacgcagtgctatctttgaatatggttgtaacctttctactagctttcatactggacaacactgtacctggta

SEQ ID NO: 190105 - DNA, 260 bp, Arabidopsis thaliana landsberg
acgaggcaacaagcgcattggatttagaatctgaaagggtggtccaagaagccttagacaatgcatcagttggtcgtacacctattgttattgcccaccgtctctctaccattcgtaatgctgatattatatgtgttctacataatgggtgcattgtagaaactggatcgcacgacaaactcatggagatagatggtaaatacacttctctagttcgcttacaacaaatgaagaatgaagaatcatgtgataacactagc

SEQ ID NO: 190106 - DNA, 65 bp, Arabidopsis thaliana landsberg
gtatctatggaggaaacattgatttggacattgatatggactctacagctgcaacatctcagatg

SEQ ID NO: 190107 - DNA, 214 bp, Arabidopsis thaliana landsberg
gctcaacatcttgcgcctcgatgacattaacccgcagataccacaatttgggagatacatagactttagacctcacgctttggacaccttctccttgaacagaggaagcatccgaatgccaagcatcaggaaatgcttcatcggcttgcgtcccaagccaaaccgctaccataacctctcctcttttcttactctcacctcgccgatcttctaa

SEQ ID NO: 190108 - DNA, 433 bp, Arabidopsis thaliana landsberg
atgtctgatggaagtagaagaatatccgggattgatgaaatctgtatcgccttacgagcgagtgaggaatcataagggaggctctcgggcggtggatacagcggatagaacctgtttcatgagaatccaatctctgagtatttggtagctgagaatctaaatggatctagtgcacgcaaaagttaccttcgctgactgaggagatggctagcgagtctggacatgcgatcagtggggactccactaggattttttgacatctcctccccactcagctgtattagtacatccaccgtgcagcaacttaccttcacctgagaatacccagttcacattctatgttgcacggactagacagaatatggcttctcataagagaactgtcacagcgattttcctaacctggttatgcctcataggtccccggtgttga

SEQ ID NO: 190109 - DNA, 539 bp, Arabidopsis thaliana landsberg
atgcatggctgtggtcgggtagtagaagtagctaccgatttgatcctttggctggaaatggtatgtaaagttctgacccggagggatcggacacattgttccagctgttccatcttgccagcagttcttcctgtgctggattccggccctatttataaattttccaaataaaaccccaattagaaaatattggtaccgttggacataatttcatatcaaaccatatatggttgctcgtataaaattttaagaatggtcgtggaatatattagatatgcgtaccaggtgatgaggaaaggctcgtcgaggttgttgaagacattaacgatgacgttgttgttagaagtcgagttgatgttaggaccagggaattgaccgttgatgaggatgacttgttgtggaacgccgagaggagatgcggttccgtacgtcacgttccacacgtggtggaagtaagggtcctccgcttggaccatcatgacggtcgccgtggccacgcaaaggcacacggccaaaagtttaacccctcccttcattaa

SEQ ID NO: 190110 - DNA, 496 bp, Arabidopsis thaliana landsberg
  unsure (1)..(496): unsure at all n locations
atgggtttgatcaaaacccgaaaacgtgtcaacaccaatgatgctttcaggcagttcaacaataacgaggtagatgttctgctcatcaaccagtctggttccaccggtgcttccgctcatgccattcccacttcaaaggttccggccagtgaagtaaaacaaagggtcatgctcatcgtccaggcagagctggacattaataccnnnnnnnnnnnnnnnnnnnnnnnnnnnnncaccgggcaaatccataaaccgatttatgattatgtgatttctgccattcccgctgaaatgcgcctgatgatgatgctccagaaaaaactcaaatccctggatgcaaataccaccagtaaccaaaagcaaagcaccaaaatcctggacgtgccggattttctcaataagatcggtgacaaagtcgttaaagaatatttgctggaaaaccccgaggtcaacaggctcatcggagatccctttaaactgaaatcttccaacagtg

SEQ ID NO: 190111 - DNA, 1070 bp, Arabidopsis thaliana landsberg
acccgttaatggatccgacttcaaaatccgacccgcgccgtcaattattgggggtttaaaagcttccgactttctttctttctcatctatcacggcggcgtcgatgaaacgatccgttagacctctcttcagtgctcttctcttcgccttcttcgccgctacactcatctgcagagtggcgattcgtcggagcagcttctccttcgcttccgccatcgctgagcttggttcctccggtctcatgactgaagatattgtattcaacgagacattgctcgagttcgccgccattgatcccggagaacctaacttcaaacaggaagtcgatttgatttccgattacgaccacactcggagaagccaccgtcgacatttcagctccatgtcaataagaccaagcgagcaacaacgccgtgtgagtagagacattgcttcctcctccaagtttccggtaacgcttcgttcttctcaggcttatcgttactggtcagagttcaaaagaaatttacggctttgggctcgtagaagagcttatgaacctaatatcatgttagatttgatcagattagttaagaatccgattgatgttcacaatggtgttgtttcgatttcgagtgaaagatacttatcttgtgcagtggttgggaatagtggtacattgctaaatagtcaatacggagatctcattgataagcatgagattgtgattcggttgaacaatgcgaaaacagagaggtttgagaagaaggttggatcgaaaacaaatatatctttcataaatagtaacattttgcatcaatgtgggagaagggagagttgctattgtcatccttatggtgaaacagtgcctattgtgatgtacatttgccaaccgattcatgttttggattacactttgtgtaaaccatctcatcgagctcctctgcttatcacggatccgaggttcgatgtcatgtgtgctagaatcgtgaagtattactcggtgaagaagttcttggaagagaagaaagcgaaagggtttgctgattggagtaaagatcatgaaggctcgttgtttcactattcgtcgg

SEQ ID NO: 190112 - DNA, 307 bp, Arabidopsis thaliana landsberg
atgaagatgaagtcatcgccttctccggctagttctctctcaaacggaaaaaagactcggtcattcggctgtatctctatcattcttcaaagatttctctgttccggcacctcttctacctacccatctgatctaattactgaacccagtttcaagtctcgtgatttcatccccgagccactcagaggcagaggagatgggccaggagctgtggcgaggctcatgggtttggactcaattcccgtgatcgacaaaaccagatttctctcaaggagccattcagtgaatcatttgaagagggacgggg

SEQ ID NO: 190113 - DNA, 491 bp, Arabidopsis thaliana landsberg
accttgatccggagatccgatctgcgacggcgattgaactgttaacccaaggacgagaagatcggcaaacgattgtgaccaagacgaaagcgatgcagcaaaatagaagaaacttagtactcctcgccgtcacgaacttgcgtaatttctgatctccacgacgatacgctaatgaacaagctcccatctctttactaacttctcctcctcccatctaaaatcacgaattcaagtttccaaaaatagataagcgtatgattgaagaagatgaagaagagaaagacgtctcagaagtcaactgtgtcaaaagcgagtcgactcagtcttctttagtcatcatcgccttttttctctataggcgaataatctcgcagatcagagacgacgaattcttttctggtgtagcacggtgcacagtaagagaaaaccataatgccacgtgtgatagtcacaaccgtcgacgttttcctgattccatgatgacgtggtaa

SEQ ID NO: 190114 - DNA, 102 bp, Arabidopsis thaliana landsberg
agtgtgcatgtacatgcacgtgttcaaccagagcacgttaagaccagtttagctctagcaacagactcgttcgttccaatgttagagtcaccttatcattaa

SEQ ID NO: 190115 - DNA, 482 bp, Arabidopsis thaliana landsberg
aatttaatatcaagagagtaacctcaaaaaatccgcacaaaaggtacaattcatcattcaacaacacaaaaagttcaatgtacattctcacatcaaagagccaaactcaaatctccaaaatgcaaactttaacaagagagcactaatgaaacctcataatcaccaaaaccaataaaaacccacattacagatatcaaattcaatgaccgagagcaacggcatttactccggcagatccgtatgattgaatcaacaagataaaatataaagacgatcaaatgcgaaagatgtgaaattcgtggaatagaaaaggatcggggaagagaaatgattgtaccggagataacaatgaggacacagagcataatcggagaaggctctatcgaggaaggaggaggaagaagaagaagaagaagaagaagaagaagaagaagtacgagggacagagagagaggaaggtcacgtgggaaggaaggagatag

SEQ ID NO: 190116 - DNA, 228 bp, Arabidopsis thaliana landsberg
atgacagattggtcgaaaccagacttagatattctaacaacaaacagtagcaaacaaggatggtgcaatgtggatccagaagatgcatatgctatgaaggtgaaaatcaaagaggaatgtgactgtaaatatgattgtctttggggacggttctgcgaaattccagtacaatgcacctgcgttaatcagtgctctggacatggcaaatgcagaggaggtttctgccag

SEQ ID NO: 190117 - DNA, 80 bp, Arabidopsis thaliana landsberg
atgatgctctggttccttgtgagcatgctccggccgttgggttgtgggttggtccgccgcgctgtccgtactagtggctt

SEQ ID NO: 190118 - DNA, 742 bp, Arabidopsis thaliana landsberg
acaatacgtacatacgaaaacccacgaaaagaggacgcaagacaagactttcttcaaagttggattgcgtcaaaataatcaaaaaacgaaccaacagatgcgaaaaggcggcccggcccgataacccgagtaaaccgggtatggagttttgtaacactacataaaaattgctcagcaacctctcacacaacaacaaactcccacgtttgacagagaatagaggacgaaggagccttcactctcctctctctctcttcaccttccttcgcgccggcgaagattattactctctgttttttaagagaaaagtaaacggagagagagattttttgaaagtaatgtctaatctactaaaggatttcgaggtcgcatctaagaatccgtcgctggaagctcgtcaacgatggcgatcctccgtgggactcgtaaaaaatcgggctcgtcgtttccgtatgatcagtaatctcgacaaactcgctgagaatgagaagaagagatgccagatccaggtctgttgtttcctccttccatcacttttctctgtttcagttaatttactcatctcgactacagttttcgatcatttccttttacgctatcagatcacgatccttctatttaggaacttttttgccattgatgaatccatgtgtttgtttgctattgttaattagttttatgtttcttcttcttctaatgtacagtcaaccaaacgcaaaatgacgcgtaaatttagtgttga

SEQ ID NO: 190119 - DNA, 71 bp, Arabidopsis thaliana landsberg
atggccgagctggcactgggtcaccggagtccgagcgggcagtgtcagggccgagtgcttgtaaaagagtg

SEQ ID NO: 190120 - DNA, 194 bp, Arabidopsis thaliana landsberg
atgcaagaaaataaagacaccgaattttatctcgtggtatcggtgatttgtcgatcacccctaatccacgttgaggtggacttcaagctctcacttgctcctctatcaagacacgacttgatctttgagccaagtggacaagaaatcactcaatacctcgattccactaatgtcacctttgccgctccggcgag

SEQ ID NO: 190121 - DNA, 208 bp, Arabidopsis thaliana landsberg
agatattaccgagctgaattcgcacgtccaacggcaatatcgaattgccaccctgcactccgtgatgtgcagcggcatcacccccgacacaatagacgatcaatacgtacacagtctggctggtgtcctgaacgggaagccataccgctataccacgccggcttacccgctgaaccgggaaggaaaaaacaacggcgttctggcctga

SEQ ID NO: 190122 - DNA, 116 bp, Arabidopsis thaliana landsberg
cctgcaccaagacagtgcaagcctccaaattacctcggatggcagcccaatgcagaggagtgcaacctgataacagaatcaatataacggagaagatgttagaaacgtatagttaa

SEQ ID NO: 190123 - DNA, 441 bp, Arabidopsis thaliana landsberg
atggctttctgctttatgcagctcatacaggtgcaaagcagttttgaaaaggattccttccacccctatccggagcgcacgttccgcgttctcaccgacgctaccgataatgtcggcgaaaagcattcgctcgcttcgacgccgtttcccctgggccaaaagctggccgatgggcagagtgtaatcgaaaagatcgtgcgcattaaccgctcgttcggttcgaatctcagcaacggcatcaaaacgctccgcacctatgggctttacgtggaaccggcttactttgaaatcttcggattcccgctggaaaaaggaaaaccagccgtcgaaccctggacggccgtgctcacgcacgacatggccgaacgttatttcggcgatgccaacccgattggcaagacactcacgaacagcgaaataggcacattcaccattaccggc

SEQ ID NO: 190124 - DNA, 291 bp, Arabidopsis thaliana landsberg
gcgggcttggcggtaaacgattatgtgttcggattgaatgacagcggtgcgatggtcgaaacacgcgtcttgcagtttcttgatcgtctcccccgcggaaccagcgagttctattttcatccggccacggaacgatggccgggcgtcgacaatcttccagaccattaccggccagtggatgaattcgccgccctgacaagcctcaaagtcaaggcgaaggtccaggtgctcggcgtgaagctcatgccctttcgtgaagccgttggccgcccccgcaaagccgccgcctga

SEQ ID NO: 190125 - DNA, 825 bp, Arabidopsis thaliana landsberg
gatatttggaaatattccaccaggtgtattgcgctgcaaatctctgctgcagcttcgtgttgttggaaaccgactcactggtcagtttccgactgagttatgcaagcttgtcaacctttctgctattgagttggatcaaaaccggtttagcggaccactacctcctgagataggcacgtgtcagaagctgcaaagacttcatcttgcagctaaccaattttcctctaatctacccaacgaaatcagtaaactctccaacctggtaacatttaacgtttcctcaaactctctcactggaccaatcccctctgaaatagccaactgtaaaatgcttcaacgacttgacttgagccggaacagtttcatcggttctttacctcccgagcttggaagccttcatcagctcgagatactcagactctcagaaaatagattctctggcaacataccgtttaccattggaaaccttacccatctaactgagctgcagatgggaggaaacttgttttcaggaagtataccgcctcaactcggtttactctcgagtctgcagattgcaatgaacctgagctacaatgatttcagtggtgaaatacctcccgagatcgggaatcttcatctgctaatgtacctatctctgaacaacaaccatctcagcggcgaaatcccgaccacattcgagaacttatccagtttactcgggtgcaacttttcctacaacaacctcaccggacagcttccacatacgcagatctttcaaaacatgactctaaccagttttctcggaaacaaaggactctgtggcggccatttgagaagctgtga

SEQ ID NO: 190126 - DNA, 38 bp, Arabidopsis thaliana landsberg
ataaagaagaaggtgagaaagcggagttctctatgtga

SEQ ID NO: 190127 - DNA, 858 bp, Arabidopsis thaliana landsberg
ttaacaacagatgatttgcttcaagctgcccaaatagaagaaagaggaatgttagatagaaaagacaggagcttggagacatggcgacaagttgcgatcaatgaagctgcaatggctgttgtagcagtgaactttcctgatatgaagaatatagaatttgtaggtttcttaaatctcttttccccttcatacattgaatgaagcttcaactttctgttttaccgcaccgtgacatttcgatgaccttgaccagctgacaatcaaccctagagctggtagagaattgggttatgtccgggtgaagatggatcatatcaaatttaaggaaggcatgcttaggtttgtggctttcatcatacagatttactttcatgattacacgggttctttatgttaatctatatgtcctttggtggtctactatatgtagtcgacaatccatcttggatcacatcactgttcagttcgcaccccgtgctgcagatgaactatggtacggtgaggatcaggtgagagatatgatatatcattttactcttctctaataactgtggtcatatttttttttagtttaccaacctttgctaatgatttgttacagttaagcacgatatgggctgaaacatcggataacgcaagatcagctgctcgatcattggttcttggtggtctttctgataagcatcatggcttgaataacttctgggtagctgatcgaattaacgtaaggccatatcttgacattgttttcacttcagttttcagagaacagatatcatcttctgatacatggatttgcaggatattgatgtggaggcattgcggatattgaacatgtgttacgagcgtgctaaagag

SEQ ID NO: 190128 - DNA, 574 bp, Arabidopsis thaliana landsberg
atgaagctagatcgtctcatttgggacatcaagaacaataatgtctttggtccttcaagagcaggtaccactcattcttttatatttatctttctatcactattataatttacttttataattaatcaaaaatttataagtattttactttgcagtgctttacacgatcgaatttcagaaaagaggtttaccgcatgcccatatacttctcttcctagagaaggaagccaaaattccaactaccgcagacgttgacaagtttagatgggctgaaattccagataaatacacacatccgattcttcacgaagttgtcaaagagatgatgatacatggtccatgtggacttgccaacaaaaattcaccatgcatggagaaaggaaaatgcagtaaaaagtttccaaaggattttacgagcagcacacacatcaataaagatggttttcctatctacaaaagaagagatgatgggagatttgttgagaaaaatgggattcttcttgacaaccgttttgtcataccttacaatccaacactactgctcaagtatcaagcccatataaacgtggaatgg

SEQ ID NO: 190129 - DNA, 430 bp, Arabidopsis thaliana landsberg
gtggggtcccactcgactgtccaacccggtggcaaggtagatggccaagtcactccagcaaccatatcctccaaagaacctgtaaaaaattatgccacaatcaaggctgagtatactaatactcaactagacttacccggtgtgaggagtctactcctctacctctagacatgcagctgtttggctgaagggtttggtttgccaaaagcactagctaagtctacaatcaagttttagctattcaagtttttgtgggatcccttaagactaggtgagtcctagtactgatagatggtatcaaacattattgcaatcaaaatcttctgaatgtcacctcattccacttctcactcgatgcagcagcatggatcaagcagtctcattagctgcgagaagcagacgattcgaatcgagtttttaaccttgcaag

SEQ ID NO: 190130 - DNA, 3450 bp, Arabidopsis thaliana landsberg
atgacctcgtaggtttgccgcccattcgactctatttatattagattaaaccctcgggaaatcattttccgccgcttgcaagaagaatctaaggtagctctcagctctctcctctgcgaattactgagtactctcgattcatttatcgattgatccggcaatgggtaaggttgttcttgtctctcggtcttttttttcccgagagagaagtgtcgttagttctccgaaactctcggttaaccgggaatccaagtaacctagctcagtctagtcgatctaaccggatcgagattccgacgttgcttgatgagccagatcgggaaggttccggtggacatctcgctgctcctgaagatccggtggatttcttagctcagttcgacccactcatcgacctggaggatgcttataacacgcagccgcagtatacagaggctgaagttaatgcgcgattacttcatttggatcatgttgaatttgacctcgacccagtggttagctggaacaccgagatcaccgcgaaaaagaccctttcaacaactgagtcagtcgcggaagtatttgccttgtgtggctccggagatcgcccgctcacttattagctcagttcgacccactcatcgacctggtggatgcttataacaagcagccgcagtatacagaggctgaagttaatgcgcgattacttcatgaggatcatgttgaatttgacctcgacccagtggttagctggaacaccgagatcaccgcgaaaaagacactttcaacaactgagtcagtcgcggaagtatttgccttgtgtggctacggagatcgcccgctcacttacatgattcccggagaaaatgagcgtccatggaatccccctcgagggtacgtctgtatgtatgaagtctacttcagacaatgtcacctctggtttccaattacgtctctgatcatctcctttctgaatcgccgtcatatggcgttctcccagcttactccggcggcgatctgcaattttgttgccgctctgaccttcggcgctgaagaaggttacctggtaaacgttcgttgttttgaggaaatgacgacgttgaaagctatcaggtcgctcggctattaggtggtgaacaaccgcccaaagcataactttcttcccggtcccaaagtcagtaacttcaagaactgggaagaatattacttctacgtcagggtcgacctcgaatcgtatgagcgtccgttctcggggaggaaaaggatgtggacggagtttcctggtagatttcttttaaatagatagggtaaagacatgtcgatccgtactagattctcatagccgtttcttttgttgcagatcggtacaggcctagtccggagtttcccgttgagtacgaaggagttttagaggggatctaccgagctcggcgtcgcgcgtggaaagacatcacgaggtcgcgcgtcaacaggataatggggaaggtccggaaatccttcattagctttgctgccgggcttttaaatatgccacctcccccagctcccatcgaagagactcggcctttggacggagaggcggctacgtcaaatcttgatagtctcgagagtcttgatattcccagatacttggttgaattcaagaaactttggttctgccgccttcgtatcgtcaatatgagctttaatacgatccaatcgcttctgaacgagctccgccatcttatcaagggccgatctccggacaaattcagcatattcaagtcgacgttctcgaagcctcttcatctccgaaagagcgcgaccaagctaactcgtcatatttcctcttcatctccttggcgtcgtcttgagaccttgccaggtcggccagcgcctgagctactttttccttttcaacggccaaagcctcatgggcatctttcgcgttagtagcctctacggaaaggctccgaacacaacgctcgtacaaataagtcaaacgatcccattcggcgatcgcctggacaaagagcgtgtcaagcgaatgcaattcaaagaaaaaattggaatcaaacccagaaggtgagcatacctcgatcgacttcctggccgctccggcgaaaacttcaggagcaaccctccttttggtgatgacacatggccttatcaccatcattcatctccaggctccctcgtcttcgtgaaaccaagtatcatcattgtaagtactaccagttatatatcataattatagtttagtccatgtttgtcgattcgggaaatcaattttctactattttgtttcgcacgtctctttttgtggttcggccaaaattatgagatttactaaaaccttgaggcataagagtttttcttacccttatttcaggattttttttctctcattatgagagagtttgtatgagctgagctatttggtattctatgtgggatgtatttactagtagatacttgaacatttcttctcaataactcaagttcacaaaaaaaaacaaaaatcccaaagaggaaagtacatttattcgctcaattaagttcacgtactaaaatgcaacacagtgtatattataagactgtttatctctagaaccctttcatttaatatggagctctcattgtactgttgttgttagtttctaagaaaaggatataactcatacctaaagttacagctcgtacccaaaactctccctccttgtttaccgtcacaacactctggaaacttcctcaaaatcccttccaaacactcaaagcactttgtaaatattaagtctttcgtacactgcaccattgcagacaccttctttgtcccaattctcttctcccctgctgcgtacaacaccaattgtttaccatccaagttgtttctatcggaggctttatttgccagcttctccaggagagccgacgtctccttgttgaacaactcccgatcactcatgttttttgggttggacaaatagaaatcgttctcataatctatcttattgaaggaggcgactgaagatatctttaaaagacattggtcataccatattattgctcccttatttcttggacatctcctacgaagctgtcacatacatatacatatatatcaagaacaatattgcattgtttaatcagtatttttgaattagcctttaatgtctatcagttttgtctcaactcaatcatttatgtaaagtatcaggatcattggacacatatttaagatttgacagaaaaaaataaccgacgtgtgtgctcatcgtaatttttacatgtaactatatgactgctaatttataatattgaagtcacaattaccccagagacagcggtgctaatgcaaggggggcacttggaccagtaggagtcgccgcgacactggaacatgacaaagacgttattgggatcctcaccttcttcggtgtagcggaaaccgtcacgaaaatttccaatcgaggtgatggtactgaggactaa

SEQ ID NO: 190131 - DNA, 239 bp, Arabidopsis thaliana landsberg
ggacaccgagtagacggagaggagtcgccggagaattcagaggagagtcgccgggaaagacaagggagctagaggagcaggaggaaaaagatgagaaggaagaagaagaagataatgatctccgggatgaaatggatgacttcgccggaaagttgatcggatcggatcttttggatacatttcgagttcttaaagaatccatgaggaagaagaagaagaaaaagaaagagataatgtga

SEQ ID NO: 190132 - DNA, 1214 bp, Arabidopsis thaliana landsberg
agccactaacgttagtagctctgtcctctgacaaaacagaagataccacagtgagagaccgggaaacattcggcgagaggcggatggagagggatctggaaggtaggtgaggagtggacgagaatagtggaaatgctgatgcacttagtactcttgatttggtgttgatacttagaggaagagaattggcatgaagcggcatcatggctgctttgccacctgacaccactagagccattgattttgttttgccacctaaagaaatgttctcaacaaaatgagatttttcagccttattaatatgctatgatcagccttaggttagttatgtgtcttggcttgtaaatgagcttgcattttctctaaatctgaaacctaagcatctatctatgaatcaaaattagtcctagccttgggattatatacaacaagattctgaaattcttttctaattagcttacgaatatacaattagctttgaagaagacggtaatagcctaaattctccacctaagctaatttgcactaatcaaaattgaacccagaaattcatacaacatcatatgggatgagcaaattaacagaaaaatccaaaattaaaactttcaaacattgattcagtaacagtaaaaacccagaaaagtattaaatcagtagctcaactaatcaaaaacacacaacacaagaagaagaagaaagaacctgattttagagttgaagagagactgtttggtgagggtggtgagtgttttgtctgtccccaacacacaaataatcaggaaaaacaaaattggtggttaagagtgaatttcacgacttcagctacaaaacgctgcgtctaggaagattactggtctctctccccttgcccggacccggtttaccaaaccaataaatcaaaatcacggatatgctttttagggtttcgactcgattctgagattttttgcttgcaagattcgttgcttttgtgttctccgtcaccggagttttaccatcgtgaaatggtgcgattgtggtgtgggaagctcagactttggaaaccctatttagcgttagctacacagagtagaaacagctggttctgttcgggtggtggagctccctctcatcatcttcacatcctcaaaaagtatggcagctcagagatcacagagatgatcaatcggtataagcgaaacgtagccggacacacattgacgcagaattcaatg

SEQ ID NO: 190133 - DNA, 197 bp, Arabidopsis thaliana landsberg
atggctgaaagagaggttgtggtgttgtgttactggaattgtcatatcaagcatggccctgatggcgtctactttgaaggatcgactcctaaagagatgagagtcaagaaaaatgctgactttagcagatttctggatgagctttatctaataactggatttgataagcaaaaatcaaagcttgaaatagtcgctag

SEQ ID NO: 190134 - DNA, 122 bp, Arabidopsis thaliana landsberg
atccatagccaacaaagtggtgagtaccatcttgaggcagctggtgacttgtctttattccaatggaattgacctgatcagaaggacctggtatggagctggattccccaaacctccaccag

SEQ ID NO: 190135 - DNA, 314 bp, Arabidopsis thaliana landsberg
atggtgccttcaactgaagaaagtcgagagaggataagacacattgaggcactggtgagagtttaatctcctccatctctggaacacagtcaagttcctagtaacataaaacttttgataagttttcttgggatatgaatctcaatgtaactacgtgaaatatagacaaataaatgaaactcactatgacgagcgaatctagattcatgcagcaactaagaaaggctggtaaaacttcccaagaagattcgactaacgaagcatccaagcgaaacaagttagagaatggagggaatggtcccaccttggagtag

SEQ ID NO: 190136 - DNA, 141 bp, Arabidopsis thaliana landsberg
gtcaaactcgtcatagaaacatacctggaagtaatgcacgaaaccatcccacgatcgaatcatcaaaccgtaacagatcgactaagcgcaatcaaaggccacttgctggatgacagcacaaccgatcttgattcgacatga

SEQ ID NO: 190137 - DNA, 242 bp, Arabidopsis thaliana landsberg
atgcgggtcaccccggtgggaccttccgtcccctggagagctccatgtccgccgtgacgtccgcacgaccacgtccgctgcacttcgcggctttcgtgatgaacacaactggccacatcatccagggcacctggcgccgcccgggcgcccgtcaggccgacttcaacgacctcgggcactgggtgcgcctggccaggaccctggagcgagcgaagttcgacgccatcttcttcgccgacgtg

SEQ ID NO: 190138 - DNA, 216 bp, Arabidopsis thaliana landsberg
gcggcctcgccaataggtccacctgtggaagataagggagtggtgcggttctacggcagtccccaggaagccaaggacctgttcttcgacaaagaatcgttcattcacttagcaaccaactacaaaatctcaagcacgaacctagaggaatcttgtgaacataattatcaagcagcgaaggctgtggaacaacatcaaatagctcatacgtgggag

SEQ ID NO: 190139 - DNA, 72 bp, Arabidopsis thaliana landsberg
attttggcttttgatttttcaaccaaacttcgagccaattacggtttttcgttttatattcctgttgaataa

SEQ ID NO: 190140 - DNA, 298 bp, Arabidopsis thaliana landsberg
tattgttctggagacggatgcaaatgtaatagcaggtaaagcagggatcaatagcactgaccctaacgctcctctatccgagcaggtacagtggttttgaaattgtgatcatatttttcttgataattacatcatcttgatacaaactttgaaatagttacattgatccgaactctcaagtaacaccatcactaatgaacttgatacatttctctgcggtgttttttttttccttcagacgataagtcaagcactcgcgactgcaagagaacatttgacaaggtcacttatgaaatga

SEQ ID NO: 190141 - DNA, 403 bp, Arabidopsis thaliana landsberg
ggtgtttcatcattctggtgacgatggaaataggccgtacttatttcacttatctggtgaaaactaccatttgattggtgatctttttcctaaaccagacgaagtgcctgcattcttgcagctgtacatacacaacacattaaatgagataatcaattgtaagactgcttacgggtacgtatcatattatacgtaaatatatgaacacacatgtctatatatatatatatataattttttgtaaaagcctaatttacatattaattttatttggtgtttaggaaatcgttgaaggagatgttagatgctcataatcctcatgttaaagctttcagaacatcaagcgagaggtttgcagcaagcggtaataatactggtctgaagttggtgctctattttgatc

SEQ ID NO: 190142 - DNA, 141 bp, Arabidopsis thaliana landsberg
cctcacttgataattaagagtcttcagaagaaaaaccttgggataccttggatggcgggacggtggaatctcggcaaaaacatgcagagaccgtcggaattgccggaccggatgtgtcaaccaatggacgtgaaccggtaa

SEQ ID NO: 190143 - DNA, 1611 bp, Arabidopsis thaliana landsberg
atggatttttacgttttccttgggactgttgctgctacgttcttcactcttttgagtacaatattttatatgatttatggaaaatttcgagtccaagaaactataataactacttcttcttcacctcctacatctccccaatcttctttgtcttgcaaccagaaacacgatgtcttccccagcttccacggggcagatgtgcgcaaagcatttctcagtcacattttgaaagagtttaaaagaaaagggatcgatacgttcattgataataatatcgagaggagcaaatcgatcggtccagaactcattgaagcaatcagaggatctaagattgccgttgtcttgctctcgaaggactacgcttcctcgtcgtggtgcttgaacgagttggtggagatcatgaagtgtaggaaaatgttggatcaaacagtgatgacaattttctatgaagtggatccaactgatgtaaagaagcaaaccggagactttgggaaggtcttcaagaaaacttgtatgggtaaaacaaataaagttattcgaaaatggattgaggctttgagtgaagtagccacaatagctggagagcattcaagaaattggttagttctttttatcacatcgtgctgctttttttttgtcaaccgatattaattaggatgcagttcagtacgaacgatattaaataggatacatttttttgttaacaactttattagctcttaatatacttctttgtagctacgatttaaataatttccagccagaaatatataattatgtgtactttattatatgaattctataatgagtatttacttacaaatatattttatcttcccttttttagggataacgaagctgccatgatcgaaaaaatctctactgatatctcgaacaagttgaataaattcacaccggtaagggattttgacggtttagttgggatgggagctcatatggaaaagttggaattgttgctctgcctagactcttgtgaagtgaggatgattggaatttgggctcctccagggattggtaaaaccaccatcgtcagatttttatataaccaactctcaagcagtttcgagttgagcatcttcatggagaatatcaaagcgatgcatacaatactagcttcttcagatgactatagcgcgaagttgatcttacaacgacagtttttgtcaaaaatactcgaccataaagatattgagattcctcacttaagagttctgcaagaacgtttatataacaagaaagtgcttgtcgttcttgatgacgtggatcaatcagtacaactagatgccttggccaaagaaactcggtggtttggtcctagaagtcggattctcatcacaacccaagataggaaacttttgaaggcacataggatcaacaatatttacaaggtggatcttccaaattctgatgatgctcttcaaatcttctgcatgtatgcgtttggtcaaaagaccccatatgatggtttttacaagcttgcgagggaagttacatcgcttgttggtgaacttcctttgggattaagggttgtgggctcatattttcgaaaaatgtccaagcaggagtggaaaaaggaaatatcaaggctaa

SEQ ID NO: 190144 - DNA, 215 bp, Arabidopsis thaliana landsberg
atggattgcgtaggttgtgaaaaatgccgactttgggggaaacttcaggttcagggtcttgggacagcattgaaaattctcttctctgttggaaatcaagacattggtgaccaaacgagtgagtttctcaaacatctatctgcgtagttttgatgggaggtgtcactgacctgagattattttcatgtttttcagctgcaactgcaacggaatga

SEQ ID NO: 190145 - DNA, 813 bp, Arabidopsis thaliana landsberg
atgattttaaagaaattttccgcaaaaattgtaaaaatcgaagacttgcatttttccgacaaaacggtaaaattgtgtttttcttaccaatacaataaaatcacgattttggcggaaaaattatggaattgtttttttctgccaaaactgtaaaatcataaaattgttttttcccgccaaaacggagaattgtgttttctcaccaaaactgtaaaattatgtttttttcgccaataaaataaaatcacgattttggcagaaaaattgtgttttcccgtcaaaaccataaaatcggagaattgcgttttctcatcaaaaccgtaaaattgtgttctcgccaattaaaatcgcgatttaagaggaaaatttacgaaattacgtttttcggtcaaattcgtaaaatcggagaattgtatttttcccgtcaaaaccttaaaatctaaaaattgcgtattccaaaaaattgtggaatactatcttttccttcaaaaccgtaaataatttaataagaaataatttattaaaatttaaaattttcataaaaatataaacttataaatgtaaaatatgtaatttaaaaattatttagttgtaattgtaattaaaattataaaaatataattaaatgaagacatgtctattgactcaattcatgcccatgggcagcccattatccatatggtcaagctcatattatccgcggacaaaactggtcatatgcctaattagaccatttgttttttggtccagaatgtaacccacacatcacatgcatttggactggacaagtccatgggcggcccgtccaattga

SEQ ID NO: 190146 - DNA, 67 bp, Arabidopsis thaliana landsberg
cctaccaatgggtcattccacccatgagaaaccacccaagcccaccttgacagaaagccgtacatag

SEQ ID NO: 190147 - DNA, 649 bp, Arabidopsis thaliana landsberg
gagaaagaagaacaatgaggaagcatcgaaagctataggctacgtgaaagtgagcatggatggtgtgccatacatgaggaagattgaccttggttcgagcaacagttatattaatctagtcacggttcttgagaatctcttcggctgtcttggcataggttagtaatggcatggactaatttcccgtaacgttagttaatagttacatgaccatgtttataattgagctataaactttatatatacgtattgttagggtttctatatatattggaagtgtgaagagagtaaaacacatatattagttggaactttatgaaatataacacatgtatatataaactatgcaggagtggcgaaggagggtaagaagtgtgaatacattattatatacgaagacaaggatagagactggatgctcgtcggagatgtaccttggcagtaagtttatgtttagcttgcattacaatgctcaattatcaaatttaccaaaatgaatataattaacctcttacaagtcaaaaatttgtaattttattttttaaattgtaaatttttttttgtcggcaggatgtttaaagaatcatgcaagaggctgaggatcgtgaagagatcagatgcaactggttttggtctccagcaagattaa

SEQ ID NO: 190148 - DNA, 472 bp, Arabidopsis thaliana landsberg
cttcaccaggcgcagcttcacccgcgaacccccgcgcgtgctggaaagcaaggccagcgccgtaagtttcggcgccaaaccccgcaccgacctgaccctgggccagcgcatcttccaccagaagttcggctatggggtgatcgccaaaatcgaaggcaacaagctggagatcgatttcgaacaggcgggcaggaagcgggtgatggatagtttcgtgagcgtgggttaggctcggtcgggatgatgcgcgtgctcgaaaatccttatgacatgtccgggcaaggcgcttctttacgccagcttcccctcgggctcgatgcaacgcgcgaagagaatcccgactacctcacccaacagctcatcacctatatcggcaacaaacgggcgctgttgaacttcctgcgcagcggcctcgatcgcgcgcggaccttgttgggacaggacaccatctcgttcctcgatctgttcgcag

SEQ ID NO: 190149 - DNA, 276 bp, Arabidopsis thaliana landsberg
atatgttttggctttactgcaggagagcataagcagaccaatatattggcagatcatgacaccactaaggtttgtcttgtaatccttcttcaagacttatagatttagtctctttgttatcttatctatatatcttgttcaaaaagtttcttatatatataaatttatatacagaatacattttgtaagaagatgatgatcatcgtcaatgatcttaccagcgtaccgacacttgaaccatctacttcaacgaatgatatggagaactggccgctt

SEQ ID NO: 190150 - DNA, 42 bp, Arabidopsis thaliana landsberg
atgccgtcccttgtcgcggagagcgccagcgaaccgcctctg

SEQ ID NO: 190151 - DNA, 772 bp, Arabidopsis thaliana landsberg
atggcctatagacatctatctagagaggcgagctgtgtgagatgtccagatagtagagaaacagtgaaccacctattattcaaatgtagcttcgctagacttgtctgggctatttcaccgatcccagcatatcctgaaggagagtggactgattctctgtacgccaatttgtattgggttcttaacttggaagtggaaattccaaagttgggaaaaattggcaatcttgtgccttggctcctgtggcgtctgtggaaatcacggaatgagctgatgtttaaaggaaaggagtatgatgccccggaagttctgagacgagcgatggaagactttgaggaatggagtactagacgggagcttgaagggaaagcctctggtcctcaagtggagagaaatctttcggtgcaatggaaacctcctccttatcaatgggtgaagtgtaacacagacgctacatggcagttggaaaatcctaggtgtggtattggatggatcctccgtaacgagagtggaggagtcttgtggatgggagcaagagctctgccaaggacgaagaatgtgttggaagcagagctggaagctttgcggtgggcagttctcacgatgagcagatttaactataaaagaataatttttgaatctgatgctcaagctctagttaatctgctgaattctgatgacttttggccaacccttcaaccggctttggaagacattcagcagctgctccatcattttgaagaggtcaagttcgagttcactccaagaggcg

SEQ ID NO: 190152 - DNA, 21 bp, Arabidopsis thaliana landsberg
gcgccttcttgcgtgttttaa

SEQ ID NO: 190153 - DNA, 120 bp, Arabidopsis thaliana landsberg
aatccaaaagattatgagaagaaaatcggaaaaaaatattcgaaaaaatatttgaagtttggaagaggagaaatcgctcagttcagcgggattatcgacacacgcaagactttccactag

SEQ ID NO: 190154 - DNA, 2581 bp, Arabidopsis thaliana landsberg
  unsure (1)..(2581): unsure at all n locations
aacaaaaacttttattatttctccccggatcgctattcctgcgtctttcgacgatccttgcattatccgggggagggatccaatagacctgatcccttggaacatgcactacgtaggtctcgatctctgggattggatcaggaggaggcggcgaagaaggtgatacgtgtggggagagattcaaagaacgattacgtaaatgttgtggaggtgaagaaacttgggaggcagaggaagggaattgagggaggctgctggtgggacgatgccacgtagaaggatcattaccggtcttgttttcattgtcattaatggaggtggaggtggaggtagaggtcggaggtagcggtggcccgtccatcggaataacggcgagaaggaaatgtgtggtggtggagggagtgtcgagagagaagagaagagagacaacgcggaaatcagggtttttgcatggagtggcagcaagtggctgtggttgatttgcgtaacttcagttggtctctttcggaccggaattttgttttgttgaccaactcaaaagttttccccttctcttcatgtccctcattattagtatcaattntttttctttctcatttcctattttgatcaatataattgtaaattttatatagtcgcaagtgaggactaaaatgatggttttgactaggaccgatggataaatcacactactcacccaacaaganaacataatctcattgcagattttcgacacaaaatatactcaaattgttgaattaaagcccaataaaactcaaattgttgtatataaagctcaataattttttgtgtgtcaattatgaagcccaataatttattagtaagtcaacccatagataatttaattactttacacaaaattaaacaaataaaaacattaaaacacacggaaatgagcttggccaccaagaaaaaaacaaaaactttttttattttgttttggttttggctcttcaccaagaaaaaaagattctatagtacggaataagttttcttttggatgaaactgaaataatttatcaaataaacagagaagaagaaccaaattcaatgcttccttgtcgccgtcttgttctgtcctgcaagaatcaagctgccagttttctccgaaggttagtcttcttatccttaaaccccttataaaccctaattttaagttgcttaggggattttactttatctgggttttttaagtagaacaattgttactctatctgcgaaaaaagtctctctttgttggaattttgatggtcttgtgaatgtttcttgtttggtttatcttctaaagtatcgaaattgttgatcttaaaacattatattgaatcttagcgttgattttttttttaggtgtggaccatcgaaacgaattcaatcagtcaattactgtaaatcaacaagacagggccatgaaattccagatgtgaaacctctttttcccacaggaggaggaactcaagctccttctcgttctcgtgctcgttatgctgttgtatagatcctaaaaactcttgttgccttcacttgtgttcttgaattggatcgttcatttgggacttatgttcccttttttgtctgcattttcagcctgcgattctacttggttttgccggattcgtcggctttcttcattacaacgacgaaaggagagcagttcctagaggtactatagactttgatgatggttttttgacacattggagtgatgaagctgagatgtttcatgcttctacttttgcaggtcaagcaagcagcaatagcggttgtggctgcggttctaatacaactgtcaaaggtccgattatcggaggtccgtttacgcttgtgagcacagaaaacaagatagtcacagagaatgacttttgtggtaaatgggttctactctactttggatactctttttccccggatgttggacctgagcaactaaagatgatgtccaaagctgttgataaactaggttgagttacttatacaaagctccagccatttcattagtttcagatctttcttgttataatatatgatcttcttttagtaatgatgtcttgtcttgatggaaacaacagagtctaaacataacgagaagattctgcctgtctttgtcactcttgaccctcaacgagacacaccttctcatctccacgcatacttgaaaggtctcggttttacttcgtgcccttgtgttccagctattttgctaaaccctctgacgtttggttgcttgtatctttatgcagagtttgatagtagaatactaggactaaccgggactgcaagtgcaatgaggcaaatggcacaagagtatcgtgtctacttcaagaaggttcaagaggacggagaagattatctcgttgatacttctcacaacatgtaagggttcatcatctcaaatcaaatcttgatatgttcgtaagaaaaagatgctaaatgttgatatgtttttgtgtataggtacttgataaatccgaagatggagattgtgaggtgctttggggttgagtataatccagacgagctctcacaagagcttcttaaagaagttgcttctgtttcacagtga

SEQ ID NO: 190155 - DNA, 211 bp, Arabidopsis thaliana landsberg
atgctcttcatcatccgtggaaaactggaaagctcgacgactaatggaggcagaaccggtttcttcaactcaatcacactgagaccaggagatttctgtggagaagagcttcttgcatgggcattgctaccaaaatcaacagtaaacttaccatcctcaacaagaacggtgcgagccttggaagaagttgaagcctttgctttacaagcag

SEQ ID NO: 190156 - DNA, 857 bp, Arabidopsis thaliana landsberg
atgggagattcccaaagttctagtggatacaattactttttcggagaggctgatgaaatcacgaggaaaatcgaggaatatcaaagagaacgtggtagagtcaataattctccagtgcatgtgttagacaattctccaatgattacttatcatcatcaaaaccaacctacaatgtctacacattattataatcccaattcatcggaacattatacttcacaagacatttctcgttctggttatcatcatcagtttcaaaaccaaccaaacactcgccataggcaatgcttcaaatgttggatatcgtggctaatgttgatgccaaggcggttgttcgtaccacgatcaatacccacacttatgccttataacgattctccacattcattctcaggatatggtatgacttgattttgtagcatgaccaatagtatcgtctttatataataagtaaagactatttgatcagttagtcaatcatggtatatgctgaaccaaaacccggttaatctcttaccagttaataaacctttaatatacgtttgcagaacacttggaagatgaatcaaaccaacattcactcgatgtaaggaatatccaaaacgatcataatatttttcaagtatcatttttctcgcctgaaattttaatattaactctcaccgttatgtctagaccgaaactggtccaatatttattttactatatatatatattattcttattgtatcacaggaaataatagagcggatagaagagcgtgaaagaggaaacacaagtgtaggtgaaggattaacagagggacaaatttctcaattacctaccatcaagtttaaaccttctctagaagataaaat

SEQ ID NO: 190157 - DNA, 598 bp, Arabidopsis thaliana landsberg
atggatttgaaagagacatttagatttttagttgaggatgatgacatggatttggtactagaggaagagaacaatatgtatgctcttgtaaaggaattgtatggagggaagaatgtgaatattgaaagacagttagtgaggacaaacagaggtggaggctggcgtcgtgttcagcggttgatggtcgagtccaaggtagaatgcttcgatattttacgcatgcaccagtcaacatttaggagtttatgcaagattctttcagaacgatacaagttagaggagtcctgcaatatctatcttgaagagagcgttgcaatgttcatagagatggttgcacaagatttaactgtacgggtcatagctgagagatatcagcattcacgtgagacagtgaaaaggaagctggatgaagtattaagtgctcttttgaaactcgcagcagacatagtgaaacctacaagagatgatgtcacaggtattagtccctttctagtaaatgataaacgctatatgccttattttatagattacattggtgcccttgatggtacacatgtgtctgtgcgtcctccatcaggggatgtggagcgatatagag

SEQ ID NO: 190158 - DNA, 240 bp, Arabidopsis thaliana landsberg
gatagtgttttaggtgtaattgatcttaaaatcctattatcatcgagtattcgtgaggcggcgctggccgcagcagaaaaagagaggtcgagtattcaggaggcggtgcttgccgcaatagaggagatgaggttgagtacgcacatggcggagctgagacacaacatggagatttttcaatggcctagcagcaatcgcagacagccatcgacgatcaactgcgttccttcttcaactgag

SEQ ID NO: 190159 - DNA, 815 bp, Arabidopsis thaliana landsberg
acaagtaactgcataattttgaatcctagaaatctatttcgtattggcttcttcgaggcgacgtttggaggtctgaaatatgccgatcgggacaaaatttggtgtagagcttcatggtactactggctagataatcaactgagggattaaaacattaacggttcattgaagagttattaaggcgtctttaaggcagctgaaacaagtgttctacatcagcaagtggccaaggtgagggtgtgatctgcggagattcgattacaagtttctatttttatgcttcatgattcattgcataggaatagatctgattgcttagtaataatgaattgttatttaggattgatgatatgatgactgttctagtaatataggatgattgaattattgtacttgtcagaacaagtaattatatgtgttatatgagaaagtggaatcaccaacttttgagatgatgaaaagtggaacagtggataagagaaaaagtggaacagtggaaatggtctacattgaattgacggattctttgtagctcaaagactaacgagtccagtggaactagataggttcaaaggtcaaggagatgaacgaacttggaaatgatgtggagatcttgcttaagcaagaatgagttgtgtgttatagttttgcatagtgatgcggactatatgagtgttgtgtctatttctatgtgattgttgagtgtggtttaaaggtggaatcgtgtatcgtatttccagtggacggaaaggatcctctcactgagtaattcattactcaccccctttttctcatttttccccaggtcacggtga

SEQ ID NO: 190160 - DNA, 314 bp, Arabidopsis thaliana landsberg
agacgcggttctgcgacttttgattcaagaacagaggtgagttattattacctgatgatgaatctgctttaggaactttcttttgtctatagagcaggagtgtaatgtgtgtgttttgtgggcagatacggagacaatcaacgtgggagctgcaagcttttaaagaacggtggaaccaagcggttgcagaagacaaatactgggtggagcggtcttcaccgagccggaaccgaataggcaataaccggagattaaaaagaagtggtgtgattccaagtttattgcagaggaaagctgaagagactacgacataa

SEQ ID NO: 190161 - DNA, 105 bp, Arabidopsis thaliana landsberg
atgaacaacgtaaaaagcgtggccgtccacgcgcgaactgcaaccaccaaccacgtggcccatgaacgttatgaaaccacgtcaagcaacggacgggctgcaaat

SEQ ID NO: 190162 - DNA, 635 bp, Arabidopsis thaliana landsberg
atggatttcgattccgagtatgcttttcggttacagatggaggaggcactcgcggcttctctatcttctcaatctcgcactcctcaacgaccaccgtcacctccgattgtggctacgtgtggtgtccttatcgttgaaaacaatccaaacgattcgaagacggcgaaaacaagtagcggttacggtttcgattttaagagagccgtcggcggtggaaactctaaagcaaaaggcaaaacccacgagtctgtcactggtgtacgtacagatgaacgaaaccctaacattgggctcggtaactcccggagtacgtctaccggacatggcaatacgaaacccttgcctcaggaaactgttcgtccggcgcaattagtcggtgagggaagttcgagggttaacactgctgccggaaaaatcaatggaaacctcttgtataggctttactttaagggtttggttagcgatgagaacgggaaggggaagatgacggacgtagtgtctgggtttggggttgctatttgtgaccagagggataatttgttgtttgagatgaagggaccattgatagacaatggcatgagtcgtcagggagcagagcttaaggcattgatccgaggactaaccgaagcattgaa

SEQ ID NO: 190163 - DNA, 750 bp, Arabidopsis thaliana landsberg
atgcagaaaacagaaaatcaaacagaaagagtaaaacactcgaccaacacagctctttgcagagcactaggtgaggtcgagtgacaggtcgagtaacagacagaaaataaaacacagatactcgactgcacagtctgttgccagacaactgggtggtcgagtataaggtcgagtaacaagaaagaattgcagaaactaagcgacagataacaagatgcagtaaacaacagtagagtaaacaaagaattcaatccgataaagaatttccgaggatagggtaattgagtagtttcgtttcctcagtttacaggtgattgacatgctcaataaattaaccctaggcaacaagttcaataaccaaatctgagtgccaccgcaacagagactctcaagttaacctagtcccagactcaatcaccattgacgagagctaacctaataggcattacgaatcaacaagttaaagccaaaacgctccctgcaccaataccttggtacatggtcacgaatctctggaattagtggttctaagctgcaagatcgaattctacttaaaaacgttagccatgcctcatcaatcaatcattcagactcatatgctcgacctacacaagttttcaaatctaccaatccctttaacattcattagttctggaacgtgaatcaagcaatgcatcatcaaagaactcatttggctacggtaaaaggtcaagagacaaagatggtcccttacagaataggcttcagtaa

SEQ ID NO: 190164 - DNA, 378 bp, Arabidopsis thaliana landsberg
atggaatttgcttcgccggaacaacgtcgttcgaaaccattcgatctcacatcgatacttctccgaccaacgatcaatcatcatctctattcctcaacgccaccgcttcttctgcttcacctttctttaaaggtaaagcacctgaaagttagtctctccataatttgaaaatttctctgtttcttgagttttaaaagctttggattgttttctctagaggatagctacagtgttgtgcttccagaaaagcttgatactggaaaatggaatgtctacaggtttcaacccaccattacccctccaacttccgccgtggacacagcgcgagacgggcggttgagcgtagagctgtcaaagcgggctgtccgtgtccactag

SEQ ID NO: 190165 - DNA, 267 bp, Arabidopsis thaliana landsberg
acacgacgtctgcgtccctgacgacaccttctccgatttgctctcgtcgtcttcccgagagaaagtgtagctacggagatacatctgtcgacaagatatgctatcaactacacgggccgccggtaggccgcctccacgacgtacggacctgacgaactcggcgtcggactccggccacttatagagattcacgtaggaggcacgaacaggacgcaccggcacgcgagggtcatgtgcatcattgatgcagctggagatacacactga

SEQ ID NO: 190166 - DNA, 209 bp, Arabidopsis thaliana landsberg
caagacaaaaacgagggagcacagagcccaaagcacaacagcccgagaagaaacaacccagcaagctggagaacgacccctaccaggaatcaaacgcccgagcaagcagcccacggctgaccccaacggaaccgcaaagagcacggcgcggccaacgcgaaaagaccaaaacaaccacgacaagggaaaagaaccagagctctaactaa

SEQ ID NO: 190167 - DNA, 26 bp, Arabidopsis thaliana landsberg
ggcgtgatgtaatcacgggacggtga

SEQ ID NO: 190168 - DNA, 336 bp, Arabidopsis thaliana landsberg
atgaccggcgcattatttagaaacgctgcctctgacgccgctcggatcttccggttaaagctaactacgacggcgaatcctttcggaaagctcaaccctttaccgataggaggaaacatccgacgattgcagtcgaggtctttttatcgtacgcctcagtttctcgggaaagcaaaggaaactagagtctctggtttctgtacttcttcgtcttcttcgacggtctctacagcaggattcatcggatggtatttgggaatggtgaaatcgcggccggttctgaccaaatccgtcacgtcctcgcttatttacatagccgccgacttgtcttcgcag

SEQ ID NO: 190169 - DNA, 738 bp, Arabidopsis thaliana landsberg
atgaaccaagttgatcgactacaagctgagtatgaaacactatctcaagagtctcgcgaggacgatttgattaactctcgccattctcttattggactgatagcagaatatgctctgctcaagtgctcatcttccaggtcgtttgatcagctaattcaagagaagagtgagctgagagaggagaaagcgactttaaagtctgatatcgagattcttaatgctcaatatcagcatagaatcaaaccatggttccatgggtacctcattacagttatcatatccccttagtagccataactcagggtcagtccagttttataccttattcagcctctgtcaatcctctaaccgaacaacaagcatcggttcagcagcattcttcttcttctgccgatgcttcaatgaaacaagattccaaaatcaagccgttagatttggatctgatgatgaacagtaaccattcaggtcaaggaaatgatcaaaaagatgatgttcgtttaaagctcgagcttaaaatccatgcctcttctttagctcaacaggtgagtgatctcttcaatagttttgccaacaagctctttcatggactgaccagagtttacttccatgcaggatgtttctggaaaagagaagaaagtaagcttgacaaccactgcaagctcatcgaatagttactcattatctcaagctgttcaagatagttcccccggtaccgtaaatgacatgttgaagccataa

SEQ ID NO: 190170 - DNA, 411 bp, Arabidopsis thaliana landsberg
atgtacagagattgcaagtggctacctgttgagcttaaggaagagagtttcctgcatgccaaattggttgaaaaatctttgctaagagcggtatgttgccatgattttttatttttggacttttagccctttctatcataccaggacagcattgcgagacgattaaaaaagtattttgttatattgtgttaggttagtgagtgccgatatgggagagagcatgtggttccaagtgttattcagtttggctttatgttgctagaatctgttgaagaaggtagatccaatgagtttggtgattcgaaaggtgtactcggtattgagaagcttagcattcagattctgggaaccctatttgaagtccatgatatgacgagaaacgaggttgattactactgccttaattattaa

SEQ ID NO: 190171 - DNA, 217 bp, Arabidopsis thaliana landsberg
atggttcaaaggaaccacaacaagggcaaaggaaagccaaaatctaacaagcccaacaaaactaccaacttcaagaagaagaagaacaaggctgaattgacatgtttcgcatgtggcgaggcggtcattttgccaaggattgtcccgatcgagcggatcgccgtggcaaaaagggcaatgtcaacacagtggtcgctagcaatgaggaagacaaagg

SEQ ID NO: 190172 - DNA, 253 bp, Arabidopsis thaliana landsberg
atgatttcaggctctctggaaaggtaagattcaattattatttttctgtaaacgtgattataaaagggtaaagccctgttcttttcattgtcgctgcatcagcgatcggcgaccaagaattataactgagttgagacacgtgtctatggtgagtaacaccggcaacaccattaaaacagtcgcagcgactccttttcaccattccaactgtcgctcatttttccagcgacaacggcgatacccgtggaagtga

SEQ ID NO: 190173 - DNA, 2740 bp, Arabidopsis thaliana landsberg
aatttctcagaatgtgaaggatatggaaacatacacaggctatcacttactagctctgcttttacgtcccaagatggcgctatttgacatgcaatgtttggagatatttttccaaatatctgcatgtgaagctttcttttcagagccaaagaagttggagagtgggcaaactactattagcatgtcacctacggagattatacctgaaaacaactatgaggatcctagtctgtgtaaatttcaatatgaaacttcttcagttggatctcatggggatatggatgatttttcggggcgaaaagattcttttagtcatttatctgagcttgaaatgggagataatcctgttgaaacttcaaactgcattgtcttatccaatgcagatatggtggaacatgtcctcctggactggactctctgggtgacagcccctgtttccatccaaatcgcctcacttggttttctagagaatctcatctcaatactctggtacaggagtcacaatcttgcaattctgcgtcaaatcaatctggtgaaacatttgttagtaacacttcaacgaggggatgtggaagttcttgtcctagaaaaattagttattcttcttagatgcatcttagaaaacgggttccttactcctgagcttgaagatgtggttaggtttgtgattatgacctttaatccacctgaaataaagtcacaaaactcatcaatgcgcgagtcaatggggaagcatgtaattgtgagaaatttggtattggaaatgcttattgatctccaggtaaccataaaagcagaagaactgctggagcagtggcataagacagtttcatcaaaattaataacgtacttccttgatggagctgtgcatcctagtagtatgagatggattatgacccttctcggtgtttgtctcacttcttccccaaatttttctcttaaattttttgccagtggaggttatcaggggctggtacgggtacttcaaagcttttatgattctccagacatatattacattttgttctgcttgattttcggaaaacctgtttatccaagactaccagaggtccgaatgttagactttcatgcactaatgcccgatgatggaagccatgtagagttgaattttgtagatctgttggattcagtggttgccatggctaaatctacttttgacagattgatcatgcaatcaatgcttgcccaccagtctggaaacctttcacaggtgagcgctagatgtgtagctgagcttgttgagggctatgcagatatgactggagagcttcaaggggaagctttaatgcataaaacatatgcggcacggttgatgggtggtgaagcatcagctcctgccactgctacatctgttatccgtttcatggttgatctagcaaagatgtgccctcaattttcagctgcttgcaaaaacacagaatttctccaaaagtgtgctgatctttacttttcttgtgtcaggtttgcatcacatgccttttgcatatatatacatttttcagtaccacatactgaacatagatatgtatatccttttctgtacattcagaattcatttttttctgtctgtatcccttttgtatagtcgcggcatagagacattggaaacagtatttttgttccactaatcatatattcctgcatgtcagaaggtcctagataagaccagaattttttttgtttttttgtagttactgtgacctgcaagatgttttgcaaatattgaccaaaatctgggtcgttttgcagggcttttcatgctgttaagctggccaaacagctctcaatgaaagcagaagagcagaatataactggtggtgatgatagcagcgtagaagggaatttttgtagagtgtctcaccaggacatgtccacaaaaacctccataagtgctggaagcttccctcaagatcagactagcagtgtgatttctgtagacatgtatataccttcggattatgtggctgttgataaggtggagaactttcttacaacaccgccaggggaatcaaacaaatcatttcaaggtcgcgaatatattgcgaaacaagatggtgatcatgttggctctgtgtcagcctccagtgaaatgaaatctctagatcttacaggtagttcgagtcaagttcaaccaatagattctcggagttctgaatctttctcgatgttagaatctccccttttatctgaaaaatcaagtcttgaagttccattcattccatccccatccaaaagttctacaatttccactcctcatccgtcgcatatctcagttagtgaatttgatgcatcttcagatcaatcatcaggttcacaaggttcatctgctgtccatacattatttacaattagcccaaaagttctcctcgaaactgatgagtctgggtatggtggtgggccgtgttctgctggagcaagtgcagtgctagattttatggcagaggtctgtgctgacataatgactgagcagattaaagcagtacaggctttggaaagcattttagaaatgcttcctttatatgtggatcctgaatgtgttgtagtatttcaaggcttatgccttagcagagtcatgaactatcttgaaaggcgtttcttgcgtgatgacgaagaggatgacaaaaagctagacaaaagaaaatggtctgcaaacttggatgctttttgctggatgattgtggatcgtgtctatatgggcgcttttcctcaaccaactgga

SEQ ID NO: 190174 - DNA, 851 bp, Arabidopsis thaliana landsberg
tcccagagtggcaatgcagcttcgtctagtgttcctaaaaaggcaaaatctggtcttgcttcctctggaaaccccaaaaaatcagtgaaatctaagaaacctagttccagtgccagaatggaatctgcaactaagaaaccttgtgtcttcagtaagcagaattctctgaagcttcggataaagatggtaccagatggtttatctaccgaaaagaatgctgctgcatatacagtggccttggacttgatgtgtcaccttctttgtccttagataacaatagtctttcaggtagtgaagggatgaatgaggagcctcagggttattctccaacggagtctcccaccagtattcttaatgtgagattttcctttgttttgtttcacaatactgaaacagtttcctttgttttaagatgcttatcgtgttgatatattcttatatgcaggtaatgacttcacttcctgtggatcattgtcagttcctatctcctctctctgaggatctgattcgattcattgaaagggaaaaatccgaaaagggatataagtatacatctccatccaggcttttcactgcgagttcttctgctatggcatacggtttggaacctcagaagtctggagagaaaccatcagtagagaagaaaaaaaagatggtggagaggagcagcttttctgctgagacaaatgtccgcagtaagaagggcctgtttgattcaactgatgccattaccaaggagtcaatggaaacaaacacattatatcctacatttgcggagaaagaaacagccagtagtaaattatttgatgcatccaaagaaaactaccatggcactgttaggggccgaaaag

SEQ ID NO: 190175 - DNA, 195 bp, Arabidopsis thaliana landsberg
gcgattgccgcggaaacgttgcgtatcggctatgcggacggcggctttgacgcggctgaccttgaacgcgcgctgcaagggctggatacggacaatgtcgttggcatggtctacggtagcggtttcgacactgcgcctgaattgctggaggtggcgagccgctatctgccggtcatcggcaatacgccgcgtgtg

SEQ ID NO: 190176 - DNA, 540 bp, Arabidopsis thaliana landsberg
atggccgaatcaagctcttggctcattggtccatccgtcctcgaaacgtacgccccttcgctgccatggtggacgattcagccctcagcttatcgaaccatccatgtttccgacccggtcgtttactacgaccgcccacagtttactaaccgtttatccgtccggtctatggtggtcgataaagctttcggcttatctatccatccttacaatccgaacgatattcttaacacacccaagggtctgtggattcatctatcggatcatcgtaggctagcccatgaaatccttcttccgtcggccttaggtttgataacactagattttaacctttttaagcccttgtttttcatgcatttagcttagattcaagtctctttttatgcattcttagtctcttttccttcttttgaatattttgcattgcattgcatagcatacttgcatttggagtgttttgcagatgaatcaggtacttttggactcaacttggaggtttctagcacaagggatggacagactcgagttcgggggacctaa

SEQ ID NO: 190177 - DNA, 424 bp, Arabidopsis thaliana landsberg
atgactctaagccgttcatcagccgccgattcaaccaataacgctaaccgatcttactccgccgtggctggaaccgataacaaacgaaaacgagacgaggactcttctgattacgtcggcgttgctgaaagtctcgagatgttgaagaaacaagaaatcgacgccgatcatatggctgcgtcggctcaacagactttaatttcatggagatccggtgagaattcccggtctctatcttcttccggtgagtgttcttcgtcgaatcgtcctgagtcgactcggttacaaatctttgtgaggatgatgtctggaggtaaaacgattgtgatccacgctgagaaatacgatactgttgagaaacttcatcagagaatcgagtggaaaacgaagattccggcgcttgagcaacgagttatctacaaag

SEQ ID NO: 190178 - DNA, 73 bp, Arabidopsis thaliana landsberg
atgattggtcccggtcctggtctctatggtcctagactgagagatgtatgtttttttcttaatcatgaagaag

SEQ ID NO: 190179 - DNA, 138 bp, Arabidopsis thaliana landsberg
accaataataacggattaatgcaggaagggaaggattacaatagcgatttagttttggaagacattaagtcggcggccacggtcactgtatcttctgtcactaattctgtttacaaatacaacgcgggttttggcaga

SEQ ID NO: 190180 - DNA, 304 bp, Arabidopsis thaliana landsberg
atggtcgaggaacggaccaaaatacttagtcggaagaacgagaaagttcaagctgaaccagctaggtgagctggacaagctagatgaactagctagctaagctaggtgagctaaaccagctggaagactagctagctcagctaggtgagctgaccgacagctcgactgagctcggtgagctgatcgtgtactgacccagctgggcggtccagtcaactgacccagctgggcggtccagtcagctgacactcgagctggtggactgtggtacctcactggtgaagaggtgtctcggccaaaaagt

SEQ ID NO: 190181 - DNA, 442 bp, Arabidopsis thaliana landsberg
gtcaccggcagcctcgacatcttcgcagcgtcccgcaccacgggactggagttccgcctcagcaagcccggcggctccgcggtcaccggcccgttcatcctctactcgtgtcgcgccgagaacctggatgcgaaggcagggatcagcttcactaccctctacggcatcggcggccagtcgctctatgacatggcctatcagttgctcaacgtcagcccgacgttcctggccaaccacgtcatcgaagtccttcggctccaggtcaattcaggccttgagcctgccgcgacgttcgcgtggtggtcggcggcgaacgatcgcaacgaaacggccgcgccctcgctcggcccgaacccggccagccctgggaatagcagcgccgcctacgtcgacaacctgaccgccatggtcagcctcatcgaggacctgtggacggcgcaag

SEQ ID NO: 190182 - DNA, 398 bp, Arabidopsis thaliana landsberg
tccatctagcttgttggacgtggtatgcgccgtatatggcgaggagtccgcgagcttaccgctctgcgggctctacggcgatccggcgtccgctcgtctgacggacggggtgaggcagtgacctcgcgcgtggcaggtggccttcatccggcgcgccgcgacgaggtccgcatgacgtgtccgctgtttttttttctagagcacggcgccgatcgaacctccgcgacgcgaaccagcaggcagcagcccgtccgcgcgcggggaccgagcgggcgggtgccgccgggcgagcgagccgcgcaccggtgcgtttcctgagtttccgtacgtcctgtccgagtctgccctgttgcccgattggacgccgcgaccactcgtgcgaggggcaaaagtttagg

SEQ ID NO: 190183 - DNA, 129 bp, Arabidopsis thaliana landsberg
ccagacaacgacttttggagttatgttgacagcattgagaaatttgttcctttcaagtttgacaaaaaatatttacgacttgggcgttcaaataaaaaagggacagcaaatatgttttcaaaattatga

SEQ ID NO: 190184 - DNA, 492 bp, Arabidopsis thaliana landsberg
atgggagagcctgattccgcggcttcagaaattcaaaagctgattgacatggacccgggcaactcccgattctatgggttgctggcccaggtatattcggataataaccagccggataaagccatcagggtttaccagtcgttactccacaaataccccgataacccccaggcaatggttgccatcgggctgttttataaaaaggaagggaatgacagcgcctttaaacgttacatggcatcagcatttggcaacccgcattttgatattgagaaaaaaattgcttttgtgtatccctatttaaaatatgtggagatagactccaccaaaagagaggaagccctcactttatgccgccttatcgtaaatgcccaccccgataacccgaaggcacatgcgctttacggggatatgtttttccagagtaatatgcccgacagcgccttgaaggaatatcaaaaaacgctggaaattgatcattctcaatacgaa

SEQ ID NO: 190185 - DNA, 477 bp, Arabidopsis thaliana landsberg
  unsure (1)..(477): unsure at all n locations
atgatcttgaagattgcggtgagcatcgttttattctgtnnnnnnnnnnnnnnnnnnnnnntcgcggcggcgtcaaatgagaaagtcgttcttcaagggcgcattgtcgatcctggcggcgtcgcggtcacagacagtnnnnnnnnnnnnnnnnnnnnnntttattctcccaccacgggctctcccggctctcactgtcttctttatgaagaaacccaaattttggacatgagctcttccgccggaaccttcagtcttcaagttggaacaggaacacgcgtgggcgtcggccccactttgcgcgaaactttcacgaacgcctcggtggcatcatttggatctctgacttgtggagtggggacgtcttacactccgggtgccattgatgatcgaacaattgaaatgactatcagctttggcgccaccaacttggccttggccacaattcccgtgaaggctgtgccttatgccttttaa

SEQ ID NO: 190186 - DNA, 572 bp, Arabidopsis thaliana landsberg
tccttgcacgctgtatattcacagatatctcctcagagacatcaacccaagctggtggtaatcccactgtaatcgcacctttactaaaacatgaccaaaaaaatatctcagtaactactaactctcagcttaacatagctcacagacatttacttcaactacaagatcaatgatgtattatcattctcattgctaagctaatcatttccagttaaccctaattgatcaaattgttcaccattttcactgataaagagagagaagagtacctagaagttccaggatcttcggtactaataggagcgtaagagcgattcggattcaataacgaagtactcgccatctcgatcaccggaccaacgccgccggatcgtgttcccgtcaatgaagatgacgacaatggagctctgacgcttctcagagagtttctgtacttcctaaacagcaacgtacgattcctcgtcgccatgatcgtcaaaatttgaaatccctagaatctcaattttcacatccaaattcgaaatcagctccgatctgaacacaatcgcggcttcatcatcgaccgagaataa

SEQ ID NO: 190187 - DNA, 62 bp, Arabidopsis thaliana landsberg
gtgggttggttactaaacgcatctaccggagcaagcatatattagatgacgtggcccattga

SEQ ID NO: 190188 - DNA, 109 bp, Arabidopsis thaliana landsberg
aatcgtcaaagctctgagggttccttctttgtcattcacacccttgcctacgaagtgcgtgccatcgacacgattaggtacgagaagatctgtatcgggacccggataa

SEQ ID NO: 190189 - DNA, 411 bp, Arabidopsis thaliana landsberg
atttacatccaggacttgagattttagcaattgttattcaagactcttcttcaaacagcaaactctcgagtcgtgagatgaaagtcatagttccaacaggaaaccacggtttgcctgataccgaaaactcgtgtcctacgccgatactgcaaagatggagatcaggtggaggttgtgactgtagcggatgggacatgggatgtcacctttttgtccttgaatctccagaactcatcaacaatcatcatggtttggaacttttcatagaggtaagaatttgttcattgtgataccaaaatgtgttttaacttgtctcccttaatcttgaaatataaaaattctatgttgcagagtgggaaagagatcacaccagcaatgacaatgacatgtatcagagaaggacattatgag

SEQ ID NO: 190190 - DNA, 82 bp, Arabidopsis thaliana landsberg
tttctataataagtggaccgacaaaactaaaaaagtgatccgtgaatttcgctatttaactaatttcacgtttgttcggtaa

SEQ ID NO: 190191 - DNA, 1123 bp, Arabidopsis thaliana landsberg
caatatccttatcagctaccccttcaactcgatttaaggcaggttcagtggcccctatagcacctgcagctggacgaacctcacaaggttctggctctaagtctgtcaacctgatacccctgccctaccggcagcagttggtcttggaggtgccgcacctttagctaaagcagcattcccccttcctctaccaccacctcttctccttgttgcagtctgaggaggaagtacgatattttctgcttgttcaactagcggagggttaggctgctcgtcaaggcgtctcgatctccttgctccacttcttaactctggcattcttactccatgcaaaacgtaaaagttttcttctttcggtcacctctttagattaacctgtggcatagaaacattggaagtatagtgtaaggtttgagcagtaacagacaaataagagcaatcaaccggataaaacagattctttatcaggaaagtgcttaaaatgaatcaatagagatagcaagtaatggcaatgtcatacaatagaagaaaccatagcttgcagtacgagcattcctttttcacaaaaacactcttaatggtgttgcatatttcaatcaaaagcatttttggccaaatttatatcttatcaatgatactcgtggctccacaatatcatattaatcaataatctataagctccctaatggaaaacaacgacgccaatagaccaacaaaatcaacaaaaaagctaactacctccatagatcgatcaacacaagcttctattgattttcattttcacacatatacaaatcgaaagcaaaagtaataagatggattcacaaaaagttgtaaagtataaacatttgcatagtcactttaatagaaacatgttcaatcatcgtcaaaaatcacgatctttggcatagtgataacaaaatgtagcaagaaagtctcagctcaacaacatagaaatcgaatcgagatgtcaaaaggatgtttaccagaaaaaaaatcgattttgtttgtagagagcttcgaaaataacgatgatcggaagatgaagagagtggaacaggaacgatccagaacaacaacaaaaaaaaaaactttcagatctctcctcaaagttccaaaatga

SEQ ID NO: 190192 - DNA, 373 bp, Arabidopsis thaliana landsberg
caccgccaggcctccgcccaagcaagaacaggcgatcctgcagcagtcctccggcagcaacagcagcaacggcaagcgcggcaaacgcgtcgggaagaaaggcgggcgtgctctcaaacaagctgggcaggcccccacgtctacctggcccagcttctacaatccttggtctgggtccattcaaatgtggcccggaccacggatgacattatctacccgcccggtcactcctgcgccggctgcgccagctcctcagctgccccagtccatactcacgggcatccagggcccctggccagggacacaacagcagccatggacgttgcctcaacctcaactgtggtctacgccaccaccaggcttccctcatcag

SEQ ID NO: 190193 - DNA, 138 bp, Arabidopsis thaliana landsberg
cggtggaaagatgatgaatgggatggcgacgagatcgagtggatgcagcggaatgaaaggggaacgaattgtagttccaagagtgatgaaagactcttagactacgagcttggatccaacttagatattacacactaa

SEQ ID NO: 190194 - DNA, 231 bp, Arabidopsis thaliana landsberg
atgataatcggtaataacgaagttacaactgaatttttgcaggtacattatgactatggtagtgcgtttgggtagagagatccaaaaataagcaatgacaactgcttctactatatatggttacctcgagaaaacaaagggaaaacgccgaacttcaatcggaaaaacggttttgaatatcggaggaacaaaacgggaaaacaacgaagaaagatagaaagagaaccataa

SEQ ID NO: 190195 - DNA, 937 bp, Arabidopsis thaliana landsberg
atgactttctccggcatcttgaggtggctcgcttgatccttaaacgatcatcttttccataaaaaattgacatttttattccatataacttatacaatcatttcctgtagattgaagctcatataggttctgtaactaacatagctttttcgcatccccacaaaaacaaccaagtatagttagttgtggagatgacaaactaatcaaggtgagacacgaacctaaaggtggtttggttatcctaatgttaacctgtcagttgtttaactatttggtgtaaaacaggtatggggatcttgagggttgggtttattatacttttcatggtcatgaagctcctgtataatgtatattcaatttgtctacatgaaagagaaaatttttaaggtatgtagaattgtactcatagtttagtgcttcttggatgagtcaaaattaatattcttctcttgatttcagttcattcgttcaactgataccaatgggaacataagggcgttgtattatgatacaaagtgttcaaaagaaaaatagaaatctccaagtggctgatgtacaacattgctctacaatgctgatgggaacaggctagagttgtgatttataagatttctcacttcaaactctttcaacaaacttcatatctatccacatgtaactataactattatgcattttctttggcaggttgttttgttgtgtaaccagtaaactgggagactcatccctcatgcagatcacagaaaagaaaggaacagtaaagagaatttatagtgggctgactaataacctgggaggcgtggttcagtttcagtcttcaaaagaccttcctagcagctggtcaagatggactgatcaagttttggcatatggacagcgtcgatcttctgagtacatcagatgccaatggtggactgcaggatttttcgagattgcg

SEQ ID NO: 190196 - DNA, 132 bp, Arabidopsis thaliana landsberg
ttacaacatgcttcctcttgcgacttgtcttccaagcaacagtccactccatttggcttgaaagaaaccgtcgtcgacaactcgacatggacatctctcaaactcatcggatcacttaatcaagtctcttga

SEQ ID NO: 190197 - DNA, 209 bp, Arabidopsis thaliana landsberg
atgacggatttatggattcttcttgggcgattagtttgtagagcggagactggaaaagtgagagagagggatgaatcaacaacgcctaaccaaggattcgtcaatgcttttcttgtagagaagaagtataatggagcagatagtttcttcttagagaaagaatcgatttgtgagatgatcggattcgtcaaagcaaagttgcaagaaga

SEQ ID NO: 190198 - DNA, 350 bp, Arabidopsis thaliana landsberg
gagaagcccctaagaaaagaaaacttgatgagataccttctgtcgaaccgaaggtagatgaagcgccgaaggagtccttgaacccatcatcgcccactattgtcaaggtggcagaaattctgaaggtaatgactgaatccccaccattcaagctgataagtcctctgagattggaactgaccaaccttttacagaagatgaaggtccttcggctgcggaggagaaggttggagggcaaaagaaacggcggattgtgaacgtaatgcaagctattgagaaaatgccaccttcagcttcggcggtgaaagaagcaattcctgtgaatactagagatgctgttgacaccccag

SEQ ID NO: 190199 - DNA, 325 bp, Arabidopsis thaliana landsberg
atgatttcacggagatgcatctacaacaaccaaattagagatcttctaatcaaaaccctgattccaggtaagagaagtctcacaatcctgcaattttcaaaaaaacccaaatccattgaatcactgaatcgaaaaaacacactttttttttatttctgatgatgagaaaaaataacctcaaaaatggcatattcggggaaaattaggattagggttttgttccgccacctcccctgcagctaaatctgaagcctttatctttgtttcttcgtcttcgtcttcttcgttgttcgttttctttttttatttcttcttcttcgtttag

SEQ ID NO: 190200 - DNA, 75 bp, Arabidopsis thaliana landsberg
atggcggctgtaatgggaatccgagagaaggtggcgcatgagaagcaacccgaaagtggtcccagttcgacacat

SEQ ID NO: 190201 - DNA, 48 bp, Arabidopsis thaliana landsberg
atggtccgcaccgtcacgcgcgaggtggtcgtaggctttgcgtttcaa

SEQ ID NO: 190202 - DNA, 457 bp, Arabidopsis thaliana landsberg
  unsure (1)..(457): unsure at all n locations
atgttgaaagccgcttatgacgcggctgaaaaatatggaacgaattatcacctgtccggcaacgacggcgtgcatcccggttgggccggccatgcgatcatggcctacgcgtttctcaaggcgatgggggtggatggcgaaattgccgatttccagctcgatctcgcgaaaaagaagctgacggtttccacggggcacaagttggtttccgcccgtgacggcgtatttacgattcgcagttcgcggtatcccttttgttnnnnnnnnnnnnnnnnnnnnnnnnnnnnnnnnnnnnnnnnnnnnnnnnnnnnnnnnnnnnnnaacggcgacagcatccgctcgggcatgaccttcgttccgtttcaagaggatctgaatcgctttatgctgaccgcgaagaatgccacggacggaaattatcgtgtgagctggggcgaacagagccagctgttcactg

SEQ ID NO: 190203 - DNA, 71 bp, Arabidopsis thaliana landsberg
accgtatgcgtatggagcaggtactgaagaacctggtatctaatgccatcaaattcacatcacaagcccag

SEQ ID NO: 190204 - DNA, 1327 bp, Arabidopsis thaliana landsberg
atgtggcaaccagaaaatgcaggtgcggctgaggcggctgtgactcctgcctcattatcaaactccggaggaaaccagcaagtaaataatttgtacagtacaggacctgtggctgaacagtttaagccatatgagagtggcgttcagagcttcattcctcagcatatgaatgtggctaatctcacgcagaatggacccatgagtttctcgaacggtttttatagtagacaggaatttgttgatgatgctccacagtcatttcagagcagtcagcttttttccccaagtgcaggaagatcatctgatgggcgtccaccacatgcacttgtcaattttggatttggcggaaagctcattcttatgaaggacgatagtggttctctccagaattcatcatttggaagtcaggtaatgaagtggtattttttatattatgcttactcgcttatttttcttatattatgcttatcggagaacttgtatgaaagatattctccaattagaactttaagtgaatcatgaaaatcttttcactgctaacctttttctatccgactcagaagggaactgggggaagctccatctctgtcttaaacttggcagaagttatttctgggagtgcctcttattcaagtctcggagaaaactctttgagttacttcagttgtctggatcaacaatctcttccaggacccttggttggaggaaatgttggaagtaaagacttacataagtggcttgatgagagaattttgaattgtgaatcttcctacatggacttttcaagagggaaacttttaaagatgcttctttctttgctcagaatatcttgtcagtattatgggaaactccgttctccttttggttccgatgcattgcaaaaggtgagcaatccatgagatgtcttatcacttctgttttgtaagaaacattgatatgtattacaattttctcattcttgaatatacactgcaaacaggaaacggactctgctgaagcagcagtcgctaagctttttgcaattgccaaggaagatggcgtacaaaatggttatgctcctattagccaatgcttacagcatttaccaccggaatcacaaatgcaagtgagtattagacatcatatctggtatttatctttcaaggagaatgtttctaaaattaacatggttttgcttattaactcatttggaagaattgtccaggtaactgcttcagaggtgcagaatcttctggcttctggcaggaagatggaggctctccaatgtgcacaagaaggtcatttatggggaccagcgcttgttatcgcagcacaacttgggcaacag

SEQ ID NO: 190205 - DNA, 216 bp, Arabidopsis thaliana landsberg
atgctggtgtcgctgacgctgacgccgatgatgtgcgcctacctgctcaagcccgacgaactgcctgaaggcgacgacgcgcacgaacgccatgccgccgccggcaagcgcaccgtgtggtcgcgcacggtggggctgtacgagcgctcgctggactgggtgctcgaccatcgccggctgaccatgctggtggccacgatcacgctggtcgtcacc

SEQ ID NO: 190206 - DNA, 931 bp, Arabidopsis thaliana landsberg
cacatcccgccgagtgtttggcaccggtttgttgctggtttaaatgctcagcttaggactgtgaggcacggatcaattcggtcagcattacttcctgtcattaggtggataaacagccatggaaatcctcaactcgaattccatggagtaagaattgaacttggatggtttcaagctacagcttctggatattaccaacttggtatcttggtttttgttggcgattttcctctgaacactgtaaacagatcactgtcgttcagcagaagtgacgacgagtcccctgggtgagccatgatagattgtgcttctctttgatctaaccttgctgttgtctctttcttagaaattaaaggcattcaacctgcttaatcataaatctatttctaggaacaactctgcatgtccaagcaaatctcttatcgagttgcagcaaaacttgatccaaccaggacatggattatctcggaagaggatcaatgggggaatcaatggaggcctcatcaatgagatttcactagaatctttggagtatcgaagggatttactttttccattttctctcttattgaacaacactcgacctgttgggcgtcaggttacattttaatctctcctaaataattcgtcttatgatttgtttttactattgtgttaacataagcaaaaacaattcttgtggtttatgcaggatactcttctccgttttatttccatccttctccttgctgatctttcagttacgctacttgcattacttcagttctattggcttgcccttgcagcctttcttgctatcctcctgattctccctctctcccttctttgcccattccctgccggccttaacgctttattaagtaaagaaatgagaagagcctcacttactcgtatctacggcctgtggaatgctacatctctaacaaacgtc

SEQ ID NO: 190207 - DNA, 203 bp, Arabidopsis thaliana landsberg
gcatatattcaacaccaatcttgagttctcaagctcgaatcctccgtacatatcgccccacaaccatgggcgatatggatagtcaggttctcctacgtgaactcgggattgatctctctaagttcaaaggtcaagacgagagacggtttttagtggattccgaaagggtttctccggggggtcctgatccacaacaccattga

SEQ ID NO: 190208 - DNA, 80 bp, Arabidopsis thaliana landsberg
ccggcaacatcttcatcaaaacggaatttgtcaaagcttcacaagaggaagcatcaaatcactacagttacggatggtga

SEQ ID NO: 190209 - DNA, 188 bp, Arabidopsis thaliana landsberg
ctctctcgctcgttctctgcgatgttgagaagacccactcggatctttttctcatccggaagatagtttctaatgagtcggagccatatcggagtccgtttaaccggttccggcaaagaataacgaatctcaactatcgaaggagaagcgatcatgcggttgagcagaaacagaggtttaaagtttaa

SEQ ID NO: 190210 - DNA, 380 bp, Arabidopsis thaliana landsberg
  unsure (1)..(380): unsure at all n locations
agatcgacgcctcacaacaaaaacatcgaagtgctatccacattctaatcttgacctctcatcctttgaccaatgtccaggaacccatcgcctttcttcggtcacacaccgcggtggggctggccctccacggtggtgccctcaccgatgcaaggtgaacctcctctatggtatgccgcttcctacccagnnnnnnnnnnnnnnnnnnnnnnnnnnnnnnnnnnnnnnnnnnnnnnnnnnnnnnntgtttcatgcagcagtcatcctttcccatggagacgggcggttccacgacacatcttcaactttggcgacaaattcacttctccctggctgcaaaccatgtgtggcgaggctgggaacaccatcagcgtgtggag

SEQ ID NO: 190211 - DNA, 377 bp, Arabidopsis thaliana landsberg
ttttcacaagtcaccaggacaacatctctgatgctgcaatgcttgagaatgtggatcatatcatccatcaaagcagggaagaacctcttcagcctcagaggcatgctgaaacattggcagaagcctctgcttcagatcctagagacacaacaacaatacaaccgcctcctacaacatcaagtgttcaaaacccatcagtggtagatttaggtgcttctcaagcatttattcctgtggttagttttgtgaacgccatcacaccaaagcacattggagcggccattgatgcttcggaatacgcacggatgttcacagctcttgcgattgcacttgttgtcatactatctcatctcggtttctcttccctaggcaacatt

SEQ ID NO: 190212 - DNA, 247 bp, Arabidopsis thaliana landsberg
agcccggtcggcccgttcttcatggcggttagggtcatggacacccgggctggcgcccatccgcgcgagcttcctgctcggcccggtcgccagcccagacaccgcggatatggagcttcgggcgctctgcggtattccggtcgagccgggcgaggtcaagttcgtgcgccggcacgcccgcgtcatgggcacggtaaggaaagacggcaccaccatccccgactgcgccctggtcaacccaaatccg

SEQ ID NO: 190213 - DNA, 145 bp, Arabidopsis thaliana landsberg
atgaaaagcctagggtctgcaaccacagcctcatacgttgcttcaggggtaacacaaacattgttcattggcactgacccttgcttgagacaagagcttgatgccattcctaacacagccaaaagacaaaaaagaaaacaaaaag

SEQ ID NO: 190214 - DNA, 130 bp, Arabidopsis thaliana landsberg
atggatcctattattcacctgaatgacatccgcaaaagctatttcctggggaaaaatgagttgcctgtgctcaaaggcattaaccttcagataaatcctaatgaatacgttgcgctgatggggccttcag

SEQ ID NO: 190215 - DNA, 181 bp, Arabidopsis thaliana landsberg
tgtcgtaaaccagatctccctctctcaatacttcaccttcacggtggtgatgatctcttcttctcagcgagtcagcgacgtttcggcctccatctccgggttcttcttctctcctttcatcttccctttcacgatcaatctttccctttcatactctctcgcatcattcataggctattag

SEQ ID NO: 190216 - DNA, 229 bp, Arabidopsis thaliana landsberg
acggagacccgtaaatctgaactgggttcaattcgaaactaaaggaagtttcgtgtgtaaagcgattggtgattcctcgactccagatgaagatattcagaacactcaaagtgatgataatgttgttgttgttactgctacgactcagagtgacattccccatgattccgagtattcaatttcgaggtttcgaagtatggttaccacactccctcctgttgtcttcctg

SEQ ID NO: 190217 - DNA, 494 bp, Arabidopsis thaliana landsberg
gaaaaaggagaatcatggggttgagattggcaagatagtaacagaacatgaagtctctcgggaaacaggggaaataggagaaagaaaagaatcagcagaaggagacgccatagtgttaaaagagctacctattgaggggaacataattttaacaggaaaacaagtaagggaaaacgagacagagaacacattggaagatggggagaggctttggagcacacaagggaaggttataaggagtccagggaaaagtaatgagttacggtatggagaggtctccattatgacatactctttttcatgtctcagtgataagggagagacaggggaggatgttaatgacatagaaacagagaacgatgaccataagaaagaagaggatacacaacgtaaggtcgatgcgggaaataaaaatgaatatcaagaagctggagggatgctgagacaaccaattcctagagcttcgaaagatagtcacaagttcatctcgacaa

SEQ ID NO: 190218 - DNA, 182 bp, Arabidopsis thaliana landsberg
tgggaatagcccccacatttcccctgaacacgctccgatctcgaaaccctttagctctcaccaaagcaatggactttttgctacacattctggtagtgctgacgctgctggtggtgctgatttacttgatgatcagcagcttaatgattgcctttggtttctcaccgattcttgttctataa

SEQ ID NO: 190219 - DNA, 220 bp, Arabidopsis thaliana landsberg
atggatcagcatgaaaccgccaccgccgatattgccgcagcacggatgcaccaccgccagcgcatagccgacggcgacggcggcatcgatcgcattgccgccctgcttgagcacgcgcacaccgacctcggtcgccagatgctgggctgcgacgaccatcgcatgcgatgcgaccacgggttttgcatcggccagcgccgccaatgtcgtcggcggcgcg

SEQ ID NO: 190220 - DNA, 268 bp, Arabidopsis thaliana landsberg
cgggaacaaacaaaaacggggaagcccaagaaacaccagcccaagagacagaaaggagcgcaacgccaaagggcccacgcaggaaaaagcaggacagacgagcacgaggaaccagagcaaaagccagaacgaacaagggaagaagcgaaaaggggccaaactaagccaagacaagagagaagaaaagaggaatacgaaaccaaagaaagcagagcacgcacgacgcccagatggggacgaaagagaagaacccaaccactggcactga

SEQ ID NO: 190221 - DNA, 126 bp, Arabidopsis thaliana landsberg
atggagcggcgcctgataggagctaatactctgtgtcaggttcggacggctaacatgcggcaagacttaaatcataatgtgaatctgccttttgaagacaattcttaccaaggaataaccaatgcg

SEQ ID NO: 190222 - DNA, 126 bp, Arabidopsis thaliana landsberg
aggagagaagatgatcaagtactcgaaggaggagcttatggagagagatggagaatccggaaatgtaaccaaggaggagattatcgaatccaagtggctttgattgaaatctggagaatcagataa

SEQ ID NO: 190223 - DNA, 264 bp, Arabidopsis thaliana landsberg
gtcaggcgaaaaaaaaaccatgtccgattggactgcatacatacggaaaatgtgggaccgacagagctaagttttgttttagtgaaattgaaagtaagttatcattttccaaacaagtgctcaacactatttctagttgccggtgcgatgacgataggcaaggaaacaaggactatcattggtgccaatgtgatagaagagaaggccgtccttgccccgcaaattgatgaacttcacggttcggaaatggtgttttttctttga

SEQ ID NO: 190224 - DNA, 125 bp, Arabidopsis thaliana landsberg
atgacgtcatctcatcgacgtcgtcatgtagaatatccgagagagagttttacacgacgacttaagaaagatctttggtcggttttcttaataggtcttatgatcagacttattactccacatag

SEQ ID NO: 190225 - DNA, 196 bp, Arabidopsis thaliana landsberg
attaagaaaccaataccgttattaccacccgattatgagcaaccctgccgacagaaagatcaatgccgttatgccttgttgttgtataccactggagatcgtcaagctttatcagaccgtgcgcatggacgcgagtccccaagcacacctatctacgataggagtctttatcaaccgaatgcatgtgtcaagatga

SEQ ID NO: 190226 - DNA, 75 bp, Arabidopsis thaliana landsberg
gtttttaatcacgggaagcagtatcgactgaacaactactacaaaattctacaagtgttgtcgtgtgttgattga

SEQ ID NO: 190227 - DNA, 791 bp, Arabidopsis thaliana landsberg
atgaagttcttcccgcgtttcttcttgctgtacttcttggtgttccatatttatttcttctcatatgcatatggtaagagatgtggttttacgttatatttgtctcattaactactgaaactgcagacgcgttcacttactgcataactctccacaggtttttcttatctcgccctaatgacaaccgctgcattcatgcaacacttaattttatacttctggaaccgttttgaggtacgcgtttgattccaacaactcgaagattggccaaatccagagaagctaagcttcaattcaaagtttttatcacaaaattacaggtaccagctcttcagaggttccttcaaagccgacagtcacaccttcagcaacacccagactttcacatcgcttcctcaacaatcctagcatcaactcttcacatcacaaggctgaacagaacaacaagaaaccgaactccgtctggtcctaaccacacaaccccaaaccaaaacacggaaacaagatcttttacagcggatggaggaggtgtcgggaatccggcacaatatcaagagcagcaagaagagaatgaagcaaacaccgttcctgcagagcctaacccacaacaagcaggcgcaatgagctcgttcagctcgatgcttctatggattttaggcggggcttcgtcagaaggacttaactcgtttctttcgatgtttagagatgtgagagatgaagatgaagcacaagtgtttgcagatactagtccacctcaaaacccgcatcatgatcctctttcagttgattaa

SEQ ID NO: 190228 - DNA, 901 bp, Arabidopsis thaliana landsberg
atgcaagcatctcttgaaaaagctaagagattgaacatgctgtacaagagtgatatcgcttctaaggcatgtggagatgaagaaatggatgaagtttgcaagcaagctgaagctgcaactgctgaggtgattgtctgtttgcagaatgagcttgaagttcttcagaaggaggtcaatgatttccagtcaaaagaaaacgtgactgaaaagcaggtagagattttagaaactcagatggaggagctgcaggataaattacgagacacgaccatggataatgagcagttgcaagagcagctcagaggcaaagacatggaattactgatcatatcaaatgaaatggaacttctcacatctgagcttgaagaaattctgctgaatgggaatgaaggccttacagatgcgtgttaccaggctgatcttatttcgggttccttaccagataaaaggatatggatatctgaacaggttggaggattaataagaacgctttctgagagggaattaatgattgaagatcttgaaagctgtttggaggatgccaataaaaagcgatgtgatatagaatccatgttgaagtctcttaaaggggcagcaatagtaatgaatgaagcgcaccagagagagttcgaggaaaaggagacagatgttctcctcctgaaatcgcagttgtgcacaaaaacagagacaatattaaggcttcaagagaagctgaagatggctgaaaggttgatttatgaagcatcagattgtgcaacagcttctctaataattgtcaaccgatattctgaggtaaccgaatcccatacttttgagttgaagcaaaaggattttcaggttgcggaatctactggaacaattctttctctgaagcaacaagtacaagatttggaagctacct

SEQ ID NO: 190229 - DNA, 142 bp, Arabidopsis thaliana landsberg
atggattcatcaccatttccaagcaacagtgatgtggggaatgagaaagtgactgaacctgaaagcaatgctactaacaaaaagaaggatgttcatgaagatggtggagctacttcacaaccacctaagtcaaagaaaccaa

SEQ ID NO: 190230 - DNA, 61 bp, Arabidopsis thaliana landsberg
atgaccaagatccatggtacgagggccagaatcggcgtggggtcaataagaatttcgagat

SEQ ID NO: 190231 - DNA, 64 bp, Arabidopsis thaliana landsberg
atgatttgtggcctggagggatatttgcccagaaattcgctggaaaaagaaaacgatgttccag

SEQ ID NO: 190232 - DNA, 34 bp, Arabidopsis thaliana landsberg
atggatggccgatcggactatgagaccatgagag

SEQ ID NO: 190233 - DNA, 162 bp, Arabidopsis thaliana landsberg
atgcctcgtaacttcaacttgttgttagttctggtgatcattgctctgtttattactaaaaactcacttggcaggcttcttgagggatccactggtattatcaatggtttcctgacgtggacaaacaccaagaagcccgtggacgctgaaagctgtgtcgag

SEQ ID NO: 190234 - DNA, 419 bp, Arabidopsis thaliana landsberg
atgggcagctttgatgagatgatacctgagtacctcaactttatctgcagtgcagttgactccaaggacctgtccctgaacatctcccgagaaatgttccaccagagcaagatcctgaaagtcatctgcaaaaacatcgtgaagaagtgccccgagctcttctctgagttggctgaagacgaagagaactacaagaagttttgtgaagcattctccaagaatttgaagcttggaatccacatggattccactaactatttccacctctctgagtcccattgctttcacacctctcagtctggagatgagatgacttccctgttagaatatgtgtctcacatgaaggagacacagaagtccatctactataccactggtgaaaacaaagagcaagtggccaactctgcctttgtgaaaga

SEQ ID NO: 190235 - DNA, 85 bp, Arabidopsis thaliana landsberg
atgaaaggacttgatccagataccaatccagattcaaatccaactggtacccgttattcagctgcgcgtaacaagttagtggagg

SEQ ID NO: 190236 - DNA, 103 bp, Arabidopsis thaliana landsberg
aacaaattcagccactttgtatcttgcaacggcgttgctttgttctttactaacaatcgggttagcgactgatcatacaaaggaagtcaatggagctaacatg

SEQ ID NO: 190237 - DNA, 72 bp, Arabidopsis thaliana landsberg
atgttggaggatgtcacgttggtaacgcatgagtcgactatgaatgtgactgtggtgtgtgacatacgacag

SEQ ID NO: 190238 - DNA, 999 bp, Arabidopsis thaliana landsberg
  unsure (1)..(999): unsure at all n locations
aacttggtgctaacgagacccggaaatttaagttggtgcagccatactttcctgactatagtaatgcagtggtgaacattgcagagaatgccaatgggagctatactctctatgaacctagctatatgaatgtgactttggattttgttttgacgttctcatttgggaagactaaggattctacgcaagggccactcctaaatgcaattgaaattagcaagtatctaccaatatccgtgaaaactgataggagtgacggtgagtactacaggctactactaccttgtaaattcttctatgaatcttttccngtctatgatgctgctggaaatgtgcaaatcaaaatttgttgataaagagtttacagaagttttctaatcctgcagtgtctgttcttgatgcaattcgttcgatgtcccctgatagcgattgggccagtgaaggaggagacccttgtatcccagttctttggtcgtgggtaaactgtagctcaacttcaccaccaagagtcacgaaaatgtaagatctattaaacaaagttttacacaagtaaaaaaaatttgtgaaactttttattcataattgacaccgttgtgtgcatcttacaacagtgctctatcaaggaaaaatctgaggggtgagattccgcctgggatcaattatatggaggcattgacagagttgtgagcggttcaatgctgcatttgagatatcatcttgtattagtctctctgtcattcttttgttgagtaaacttgttctttgataggtggcttgacgataatgaattgaccggaactcttccagacatgagcaaacttgtcaacctgaaaatcatgtaagcttgctaatcttgaccaatagttttcttatagttgatgacactcgaattccagaaggctttactttgcctcatcttccctgcaggcatctagaaaacaaccaacttagtgaaacactaacaccataccttgctcatctgcctaacctacaagaact

SEQ ID NO: 190239 - DNA, 2679 bp, Arabidopsis thaliana landsberg
tattatgctctcctttcaacttccgaacaccaagatccttcatcatcataaccagttttaagaccttcttcaggagattctgcacgctggctttcctgcatctcttgttggtgttgctgttgttgaatcatgtgagtcaacaaggtctgaatcatccccaacttctcttgagtctccggcacattttgaacattacagccttccccatttccttcattaacttctcttggctgcgacggatttgggtgtacggtatgttgattcacaggaacatgtggtctcgtccccgagtgtgacccttcggatgtactatagtgcatagaccttggtaaggagtattccggtgtggttccgggaacatcctaatcaggcgctccatacatattgggataatagtatccctcatctccttctcctccaacatacggtacccagtcttccggaccgaaatgctgactctagttttcataaactggtgagaaatttatcgacacactcctctccgttctttgaccagacatctgcatccattcaaccaaggtaaacttaacccatctacctaataatggtgaacagaccagattatcctaaatgccttttgcgactcatttactcgataaaacattttgaaaaatacgagtcttgtagcatcattaaccatgctcttatacaacaaattgtaacgcccccgagacgctctatgaccagacaagtctcgggcgccctgaaaacgccacattgagattgatcattaacatccaaccgaggttcgggaaccaatatcccaacccttggccgttgtattgacgaccactctcccatttaaaatattgtttaggcttgccaaccctttcgatattaagtgttgtgccgactcagactaagtcattatcagtcattactcataagtttgtacaagaaacccgatttatttcataagtataaatattacacatcatgttaccaaacatttctaagttttatggccagggcctagtgctaaaagcatcgtacataataaaaacatacttgttttacaaaaggcacaaaactacttcgggttttctattgtccaccacaccctatatttcccactacgggtttcctggaaaacaagtagaatcatgagtaatctaagattactcagtgagcttgggattcccttcaacagatattaatttaccccaacccaaatatccaacatgaaacacgcaatagagagtggcaatgtaaggtagcttgttgaagcaactacaaaaaaatatgcacatgcattaaggctccaatttttattaagttttaaaggggccgatatgctgccttctaacctaacaccaaacacacacactcccgtgatctcccgcattacaacgacaaaggtatgcaaccaaagcatcactaccaaacgctacaccgtcgtgtagacactcggccagggtagctaaccccgtctctcctagttctttgcactacatggcgatcaagtaacaatgttacaagaccccacgatagtacgaatcactatgaaggtcagacatatcacgatcttggcacgcttatggtctttgcctcctaccacaagcaccacgtaccaagaccccaaagtttaagatattatgaaacatatggttaaatcaaacacatagaatcatcaatatcccaacacaacctcccaaccataaataatagcataagaatctaaagatcacatatgcattccaatataaccatttccacgatccatataactcacaaaatcaatcaagaatacatgagaatatgattatgaaacttaaaccattatccagaactcactcagtaaccaacggaaagcttccaacgattcgggctgagttttcggctacgggaccttaacttgaatcaaacggacggtttaaactcggcagcctctcacttccgctcaatttctcttcacaaatcaattggggtcgagttgggtttttataggcaagggaatggcgagtcagcatgtccacgtgtcatgggtatgggagagtcaccaatccacgtgtcatctacccgcaatgacactctcgctactcaagcggataagtgacacgtggccacccaaactttggctccaagcaactaaaattcggctccaagcaactttgcttgggcccaagttagccgagtcacgcgtccttggcgcggtcaacggtcggtcaacgcaaggcggggcaaactttcgcccgtggcacgcccgttcttgcccaatcttgcccaaacttgcccatttgtgcccattcttgcctaaacttgccctttggtattctatgttgttttgggctcctaaggtcaattggccatgcatttaggcaactttcgaaaattcggactcttgcccgtggccgatgtccttaagcgggtcactacattctcctcctaaggattagatggtccggcttcatcctctgtaatttcctggttcgaaaaactgtggatattttgttcggaacttttcctcatctttccaggtagtaactttacgattttgccttcccagaacacttgaatttgcggaatccttctattctttagctcccgcattcgtctttcaccaatgccaagagggacttcgggataggtgagattcgttctttactcttgtatcggctcgggtatgataacaataggatccggaacatgcttccttaa

SEQ ID NO: 190240 - DNA, 537 bp, Arabidopsis thaliana landsberg
atggtggtgttcaaggtcgaatgtgtttatcctttccctaagtcttctgttgaagcagttgatgttatcgttgaaaaggaggttctggttgtgttttgatctagtttgcatacatcagagttgtacctggatcaagaagacaacaactgaaaaacaaagttagtaaccgaaatgaaaattaaaatagaacttgatcaaatcaagtccgaaatcttaaatgtaacaaacaaacacctaattagcaacgacgccaaattaataataggtttttatgatcaaatatcctaaaacaccaatcatgtcgttgtagtattttaggttgtcaatccaaatgggtgtgatgctagcaatcaagatgcaatccgagttcacagagtcaagccaagcaataccaggttttggggtgttctaccagtcctaagtgaacatgcaggaaacagaaaatcaagcagaaacaataaaacactcgaccaacacaacttgttgcagagcactgggtgtggtcaattgactggtcgagtaacagacagaaaatga

SEQ ID NO: 190241 - DNA, 42 bp, Arabidopsis thaliana landsberg
atgtgcatggatgacaccagctccccatgcgaggttgccaac

SEQ ID NO: 190242 - DNA, 196 bp, Arabidopsis thaliana landsberg
acttcttgttctagatccaactcacctcaccagtacactcacggtccaatccagacacgcgtgaatccagttccaagttccggacttcaccgacccagatttctcgtccagagtctagacactagcggttccaatccagacacgcgcagatccagaaatccagaatttttcgtcggcatgagttcatcttctggag

SEQ ID NO: 190243 - DNA, 259 bp, Arabidopsis thaliana landsberg
atgttttacggcggctctctttttaatcaaataaaccctagaaaacgatttatcggcgcccttataaaaagtataacgaaaaacagaaaccctaaacatcgttcaggtgggtttttcaaaacgcagcctagtaaccaaaaatgagaaaatacattatttgcaatatgcccatgtcccgttaaaatataaggctggaatgacggaagttttgttctctctctccttctcaattgatcgctctttaggtcaagaaaaatga

SEQ ID NO: 190244 - DNA, 1152 bp, Arabidopsis thaliana landsberg
cgatatcccgtaccgataccttgtccgcattcgaaacatggtgcatcacattcacagtttgttccatagaatcaggctctgtcttttgactcattgacttcttcccagcaacagtgtctcctagtggccatgattcttgagaactcgcactctccgctggagactcgcgacgcggctcttgatctgaagagactagtgaaagagctgtttcaagtcctcctccacttcgttgttgttgacgtggtggtaacatttggtgaggatgattcgaaccagatgatgttcccatcaaatattaaaccaaaatctgaaattcagagaaaaccctcataaatcataatatcaccatcacaacatgaatccaagctttgaattagacttaaacccagaaacaagctctgaagttgactttaacccagaaattgaaaaccctaattatttatcaaactctcggtaaattagtcaaagaagaatcttaaggaattgattaagttgatagttagatgatgctatatctatatatatgaaatacaaatcgtaagtaaaattgatttctcaagcatcgatctttagaactagttttgaagttttataacttgattaagaaagatcattaattttacctcagagagcatgaaactgaaagagaagaaatacagatcggagcagagagaggaggactcaccggaacgagagagaggcgtcgggagatgtagccgaggaagaagatcagtgggagagagagtgagacaagacaaaatgtgaggacaagtattgttttattgtaagaaaagaaaaaaagagataagaattgttgactagagaggaggaaaaaaaacaaaaaacttgacgccgaagcttttcctcttttctctctttaaaaatctttcatagaggagaaacttatggttcattggttatttattccagctttggtaatttaggtcaataccttgatcttgaagatttagtcacaagtgaccaagagttatcaacatatcaaagtatcatcttttgtctatataacccatatgagacctttactaagaaggtatcgacaagtttttctactgttgccatacccttcaaaaattttgacacatgcgactatgtgcacaatgacacgaacaaaataccagacttcacattcag

SEQ ID NO: 190245 - DNA, 169 bp, Arabidopsis thaliana landsberg
atgggattggctgatgtaattcttggaattagaattaaaaaagagccaaatgagtattcccttactcaatctcattatgtggagaaagttctaaagaagtttggtcactttgatgatgcaccggtagttactctgtttgatccaacgtgcaagctttcaaagaatgaag

SEQ ID NO: 190246 - DNA, 503 bp, Arabidopsis thaliana landsberg
aggaggaaatcacaatttttcaagatcgactgactcgggaagaatcccggattggtgggaatattggacaaggcccaaacttgcattgccggagggcactcaaagagaaggtgatttatagattcagaaactccgccgcatctcatacacgtacgatctgatccacaatgtcggtctacgagtctgctagaggtcgctaggcatcctgagagagcttgccagaggaaatgtttaatttttctagctgtttttactttccacacttgttttttaaggatctttgtgctcggttcagtgacctcattctcctcatcattccattgcgtcgctcgaagatacccagatttcacagtatagtgacccgactttgtgtaaatccaacaaaagtcatcgacttggaagcgtctgctcggtttgaggctcagaataagaggtatatcgctaggatcgataattgcttggatgagctccactttccactcttttgtgtcaaaatcaattag

SEQ ID NO: 190247 - DNA, 189 bp, Arabidopsis thaliana landsberg
tgtattaaataccccatacgacgtcgtatatctgaagtggaacccattgataaacacataaaaatgaccgatcaaccaccacgagctggatttaaaaaccttgatgagtcgaacagtctagatactgacacgtgtcgttatgtaacgccgtggcagcacctggattatactgggacccactgtaaatag

SEQ ID NO: 190248 - DNA, 201 bp, Arabidopsis thaliana landsberg
atgcgcaccgcccctctccgcgcgtgggccgcgaccttttccgcggggcccacggcgtgtgttccatgttagcgcctcctcaatatggggacccccgcacatgtgttccccccctccccagtgttgggaagcgcggagcagcgtgttcaatggttcggggtggcctatgtcttgtggtctcgaagaaatgtagaaaaataa

SEQ ID NO: 190249 - DNA, 503 bp, Arabidopsis thaliana landsberg
atgcatctgtactacaacaaggtctatgagttggtttttcctcttgtcgaaggttacagagttcctctaccgttggaggagagagtaactagtgtgacatcattctttcgtaagagattgtggagactagagaccgagagtagtacagagaattttttttaattgttccatatttgaattagaactctatcaagtgtttctttttgtgtctaatctcaatattaagcagtgtcacttccatgtcggctgctggataaatccagctttttccgtttgggtcgaaaactaatgggccaaattttattgtaacgggcttggaagttgggacttgacaatgtgaagtgttgtttttcttctacatgttttcagacagaataagcctatgagtggtgtctcatcttcttcctttttttttttctccatttttctctcttgtgctctcacaagtcgcagagatcgaaacggaagagacgatagataaacaatctgttgatgaagtatga

SEQ ID NO: 190250 - DNA, 1214 bp, Arabidopsis thaliana landsberg
atgttttcgttatcgttaatccaaccgcgtctccggatttcagagattccggtgactcaatcctacaaatctccgacgatatgttacagtagcgattcaagaactaagcgagaggaacagagacacgtgagattacctgggtttcgattagtttctggaaagagagcatctttcgattcgggttttagtggtttcaaaggagagaatgtgaatcaggatgattcgtcttctttcgatagcgaaagagttgattatgctctgttagcggagtggctacagtcttctaatgggatgcgactcattaaaaggatccatgcgatggcgttgaagtgttttgatgatcaagttatctattttgggaacaatttgattagttcttgtgttagacttggtgatttggtttatgcacgtaaagtgttcgacagtatgcctgagaaaaatactgttacctggactgctatgattgatgggtatttgaagtatggtcttgaggatgaggcttttgcactgtttgaggattatgtgaagcatggaatacgttttacgaacgagaggatgtttgtgtgtttgttgaatctgtgtagtaggagagcagagtttgagttagggagacaagttcatggtaatatggtgaaagttggagtggggaatctcattgtggagagttctcttgtttatttttatgcgcaatgcggtgaattgacaagtgcgttacgagcttttgatatgatggaggagaaagatgtgatatcttggactgctgttatatcggcgtgttcgagaaaagggcatggaattaaagctataggcatgtttatcggaatgttgaatcactggtttttgcctaacgagtttacggtgtgcagtattttgaaggcttgtagtgaggagaaagcgttaagattcggaaggcaagtacacagcttggttgttaagaggatgataaagacagatgtttttgtgggaacttcgctgatggacatgtatgctaagtgtggggagatttctgattgcagaaaagtgtttgatggaatgagtaatagaaacacggtcacatggacttcgattatagctgctcatgctcgggaaggttttggtgaggaagctatcagcctcttccggataatgaagaggcggcatttgattgctaacaatttgacagtagcgagcattcttagagcgtgtccatctgttggagctttattgttgggaaa

SEQ ID NO: 190251 - DNA, 661 bp, Arabidopsis thaliana landsberg
  unsure (1)..(661): unsure at all n locations
atggcagaagaaagtgaagagtgtgaagaggaagtatttgttttcgtttgttggaggtccaagacctaaattggatggatctattaggggagagattataaagcagtgccttgcatctcacggtaaatgcaactttcttaactgctttgttaatgactgcgataatccggttaagataatgaaggtgtttgaaaattctgtcttctgtttacaaccttcgggagattcgtacactcggagatcgatattcgattcgnnnnnnnnnnnnnnnnnnnnnnttttcttcagcccaggttcgggttacaaccaatatatttggtattttccaaaggattataccaagtactcggtttacataccagagaatgaaatgagaaatggaacggttagtctcaagaatattttgggtatgatcgataaggagaggattttgaggatgagaaaagaggttgtgaagattataccaaaaatcatatataataaaccagggtttggaccggagaagattgaagatgcgtttgacattgcagtggataggatgcttgagagggtagcaatggttaagaggatgatggaagaagggaaagatgttcaaagtcagtattattcacagacaaaggatttgaaaaaacttgagattatacatgaaaaaactgcttaa

SEQ ID NO: 190252 - DNA, 141 bp, Arabidopsis thaliana landsberg
cacgagaaaaaggaaacacacacactcacgacacaacgaccaacgactatatttcttgtcattacccacgtggcatttttgtttccacgtggactccctcaaccacaacatgtacattgtacaatggatgcgtgccttatg

SEQ ID NO: 190253 - DNA, 207 bp, Arabidopsis thaliana landsberg
accgattatatctccgatgagtgtttggtccccaggggatcaagctttggtcgctgccatcacggctaacatcaaacctaaacattttaaagaagctgcttatatcaagattaataagacttgggatattggcgatttgccaccaggaaaggttgctattggcagtcaatgggtgtataagactaagtatgattccgatggcacagt

SEQ ID NO: 190254 - DNA, 395 bp, Arabidopsis thaliana landsberg
agggttcgccagcggacgcaacgaccgtcgtcgctcggatagccgccaagatcgcgaagattgtggcagcccttgatcgtgaggtgccgccggttcgtgtcgggtgctgcgctttgcggttcgatcatcgtcatgcggcctcggtggcgtcgactgatgccatatcggcgcggcgcagtcgaaattataaagtcgaaaccgattcattatcgacagaaatttgagtcagtgcgccggacgttggcggacgctcagctcggtggtcgccagtttcgtacgctgcacagcgctgcgcttgccagcggggatatttcgcggtccgccgccgtgaacagggcaagtgccgtcgatgtcggggccaatgtccggatggatgtggcaaggcgacaagatca

SEQ ID NO: 190255 - DNA, 1333 bp, Arabidopsis thaliana landsberg
taactgttaaaaaaatatttgacaagtaccttcttgagataaacaaggaactctcatatgttcactttgagttgaaggcttgtagagatcagtatgatggccaagtttgttatggagtcgttaacaatgtggctgatgatcaatccaaactcgggactaaatattctgttccccagattgcattttttaaaggcattgtaagtcactctcttggactctttttctctctggcttttcttctgttgttgatcaaatatctcaagttctattcatttgtacgagttatcattatctggatttcactcttctttgccacaagtttatataacatataaatttctcctttgtcattcccttttcttgctatgtgtgcactcagtggatggatatctgtgctacttttctgtgacattgatgactttaacttctggcagatagaagcaattgcacaggatgaagctgctcaaggttgcatatcgagctttgatgctcttaatattcgattggagaatcaggtcagtcatagtctctgacttatgtctatctaatatttacctcttcatttattgactaaatgaatccatccatatccattgttcaattaactgatcatggtgacttcaatactggttctaccttacagagtcgcttgaaagtatagtattctgttctgtatgagatatgatctcaaacgataatcaactttgtcacttgtgcgcttgtggataaaattgcatgcactctgagttgtgttttttgtatgaagtgttttatccccgtttatgattgttgaatcaatatgaataaacgaatctcaaatgtctcagatattctcatctatcagtgtggtgaagactattaatgaattttaaagctattattgctatggactgtataaatgtattctctttgtttcggttgacagatcttgtgttaatatctcagatatcaagtgaagccagcagcagtcaacagcaagtccctcctgctttcaagaacttttcaatgacacagaaggaaaaaactctcgatgaacttgtaagggacaagtggctgtgccgcacaagagagagaaacattggacttggtataagatctcttcttgaccttcgcagttggttcagaaacaatgatgttccttcctgtgaggtctgcaatgaagctggagtaaaggtctgcattctgaaaaaacctgattggattagaactcacattgtgatgataaacttattcgctactgattcaatatctgatgctttgttttctgacactcgtatccaacttttcaggcggatttgtgtccaaccgaaggttgccctgtccggatacacaa

SEQ ID NO: 190256 - DNA, 774 bp, Arabidopsis thaliana landsberg
atgtcacaaaacagtcgctttgtgcaatttttttgcgacgacaccagaacacagtcgcacgttgcaacgtgtgtgtaactgttttgtgactaaattgtgacgattgtgcaacgttttaaaattttgttaaattgattaagtgtttctcgagtaaatattgtgcgaccgaatagggactaacgagcatttttatttgtaaaatgtttcaaaaatgtcacaaaacagtcgctaggtgcaacgtttttgcgacgacaacagaacacagtcgcacttttcaaccaattagctacttattaccaacgctcgagttttgaatttcgaaatttttaagttctggtatctttatatgttttcttatacgttgacactttaatttggtcgatattatatataaaaacataaccaaacacttcaaatctgaatattacaaaccaaacattcaaaaaaaaactaatctacatgataaggttcatatgaattcattttcatgattgatcttttcaaacaagttctcaaataagtttgaaaccaatcatttgtatacctacagttctttatgtaataaaatggttgtttttcagtaatttttatcaatagattggatcaaactatcgtggatttcaaaagtttgtgttctgaagttttccaaaacgtcacataccagtcgctctttgcaacttatttgcgacgacaaaagaaaacagtcgcactttgcaaccaactaccgacgtattacaacctctcgatttttgcatttcgaaattttaaagtttg

SEQ ID NO: 190257 - DNA, 1096 bp, Arabidopsis thaliana landsberg
atcattcctctttcagctcagcactgggtgtctgcatgatgtatatgatgtcagcagagaaaggtgaaatcagtaagctgcatgcagcaacagaagaaactaccaaagtcatccaagagctaaaagatgaactttctaggattaaatctttacagggtttcaagtttcgtggctgtgcagcaagttctgagaaatctggccagatagatctcaatagatcagagatggtgagtagagtatctctcgatatcaagtcaggcaatgatggagaatatgctagcagcgtcctaactgaggagccagaacaagaggcagtagaaatggaacaattagagatggaacttgaatctgagctgcagaaattgaacttggctgaggtgagtgtgcttttatctttttccattgacatatattcctagagtctcctctcaaatctattaaggtgaatttcatctggattgtttttccaacaattcattatgctgttgggtgggttcaatggctgaagcttatattcatcttttattttgttttccccttagacaagtgatgttatggaggaatgtaaggatttggttaatggagctgagtcataccaatgtggtggaatatcggcatcagagctggacaagaaactaagccaccttctcatcgaacaacaagaaggacagatcaatgagcttgaagctgaactacaaactactcagtccaaactccaagagaaggaagctgagcttcaagcacttaaggtctgcgttagacgcctaacagagtttcctctcttggaccgttcaggtgcaattgaaatctcattgtgaatttttctcattgacaagaacttttctttagaaacgttccaaatcatttgcttgcttgcatttcttttggcggtgatcaaactttagattatgcaaagacaagcagtctctcacagcgtaaaacatttcttgatgtttctacagatgatgagcatgaagaggacctgaatcaggatctctcagtctcatggagccaacataacaaaactgatcacgaggcaagaaagcagatcattgggatgaaaaggcctatggagtcatcatgtatccatgtttaa

SEQ ID NO: 190258 - DNA, 1734 bp, Arabidopsis thaliana landsberg
atgcctcagccagaaaagtcaatattggaagaagtaaacaactccttacttcggcaagagtttcagatcaacattgacaaggaaagagaaacacatgcaaatttattcagcaagctgaacgagcagcaacggataatttacgatgatgttctcaaatcagtgacaaagaaagaaggcaagttattctttctatatggagatggaggcacaggcaaaacatttttgtacaagactattatctctgctctgagatcaaatggaaaaaatgtcatgcctgtcgcatcatcggctatggcagaactgcacattcaaggtttaagataccaatcaatgtgcatgaggattccatttgtgatattaaaataggttcaatgctagccaatgtacttagtaaagtggatcttattattcggatgaggcaccaatggcacaccgccataccttcgaagcagtagatcgaacattgagagatattctgtcagtgggtgacgaaaaggcactaaccaaaacttttggtgggaaaacagttcttttaggtggtgattttagacaaatcttaccagtgataccacagagaaccagacaagaaactgttagcgcagcaataaatcggtcatatttatgggagtcgtgtcataaatacttcctttcacaaaatatgagagtgcaacctgaggaaataaaatttgctgaatggattttgcaaataggggatggagaagcacccagaaaaacccatggtatagatgatgatcaagaagaagataacatcataattgacaaaaatcttcttctaccagagacagaaaacccactagaggtgttatgccaatcagtttttccggattttaccaacacattttaagacttggagaaccttaaaggtacagctgttttaactccacgaaatgaaaccgttgatgaaatcaacgattatttgctctctaaagtgcctggtttagcaaaggaatatttcagcgctgacagtatcgatcaggatgaagcactaacagaagaaggatttgagatgtcataccccatggaatatctaaattcattagagtttccaggattaccagcgcatagactatgcttaaaggttggagtaccaattatgctacttagaaatcttaaccaaaaagaagggttatgcaatggaacaaggcttattgtaactcatttgggagacaaagtacttaaagctgagattctttcagatacaacaaaagaaaggaaaaaagtgttaatcccaaggattatactatcaccacaagattccaagcatccattcactctaagaaggcgtcagtttccagtacgtatgtgctacgctatgacgataaataaaagccaaggacaaaccttgaatagagtggcattgtatctaccaaaaccagtcttcagccacggccaactatacgttgctttgtcacgcgtcacatccccaaaaggactaacagttctagacacatccaaaaaaaaagaaggcaagtatgttactaacatagtctacagagaagtttttaatggtctaccagcaattacaggtaaaaaatcctaacaatgaccgtccatatatgagcaggaattagttaaaactgcttattgtcttcaaagatagaaactgacaactatttacatactcttatgtaggtcaacagaatggtgaacaccacaaaaagccagatattttggaaacctgaattagaagcagacacttatgcaagtaaataa

SEQ ID NO: 190259 - DNA, 66 bp, Arabidopsis thaliana landsberg
atgaaccgcattatcaatgctaaggacttgatcatcaaagtggctacaaatgagatcgtagatcat

SEQ ID NO: 190260 - DNA, 134 bp, Arabidopsis thaliana landsberg
tttacatcaaccagatgtggcaactcgaggtgctactaacaggaattgtacaaacgccgactcacaaaggtcgtgaggaaatcgcaacagctaacgcgagccatgatcccaaaacgttacagaacaccgactag

SEQ ID NO: 190261 - DNA, 188 bp, Arabidopsis thaliana landsberg
aatcttccggaagttggagatctaaagaaggttatttcataggaaggttgtggaaggaatccaagacccgagctaagttctccggtgtcagagttagagtctccgaagttgaaaaccgccggaaagtcattagaaatccggaaagaaccggcgagaggggacagagtatgagagatggcgacgtatag

SEQ ID NO: 190262 - DNA, 536 bp, Arabidopsis thaliana landsberg
actaaatggtacctaaaggcagcagaaggtgggtatgtacgagcgatgtatacatttcgctttgttattcggttgagaaggcttaccacaaaaccgcaagctagcaagaaaatggatgaaacgagcagctgatcacggccacagtaaagctcagtttgaacacggccttgctctattttctgtaagcacctcaactcaactactgcttctgagagtcatcttctcttagtagtaatagggataacttatcgacttatgtatatccagaaacaaacatattacgcaatgagttcattcgattttaggttatgagaaggtttggatatgtaagtaatgaatgtaatgggttgatgcaggaaggggagatgctgaagtcagtgctttacttagaacttgccgaacgtggtggcgaagcagctgctactcccgtcaaagaagttgtacaccaacagctttctgcaacttttggtggtcaggccgtacaccatgccatacaccaagccaataactggcgtcctctaccagttactcgatga

SEQ ID NO: 190263 - DNA, 233 bp, Arabidopsis thaliana landsberg
agattaaaatccgatcaaattcaattcaattaggtaaagtaataacctttgttggcgttcgaattctcgagcaagaagcggcaggaggagtagcgatctccactacgttgggctccattgaacgatcccaaactcaaagaactaaaaacggaaaacgagataattttccagaagaagaagaagaaatcgatcaaagaaaccttggcgccgtaatatataccaacacacagtga

SEQ ID NO: 190264 - DNA, 857 bp, Arabidopsis thaliana landsberg
agtctccacaattttgaagaattcgtcactccgatctcgatacgacgattgcccatgccttgccgacattattcttcctccaattccttggatctggactctctcagaagctaaaatcaagcaaaaaacgttgagattcaaacgaaaatggatgcgaaggtgtgcttaatcttagagatgaagaaagaaaaaacgaaatcggaagaaaagagctaaaaaccgatcaacgcgttggcatgatatttatcattttgtcctttgtgtttctaaaatgttacattttgaccttttactttttattgtttaaatggtaaatttagatcgggaaaaatgtcaaaatttttttgcaaactttcaaatttgggacagaaaaacatgaatttttaaaatgttaataaaattttaaattttggtttgactttataataaaatagtaagtttcgttgattgaatcattataggcatatcgataaatttccgttaacaaaaagacgacagagttaatttttcgttacgtttgggaaataaataaatcttatatacatatatgatgtcattaaagagtaaaaccatcacaacgtaggatatcagaatgcttataatgtatctttctaaatacatataaggtatcgttctaaacccaaacgttacggaaaattccgtaatgtcgccaaacgagaatccaagtaagattcctcttcatgtctttgatgtatttgtccttttagaaattgatcaaggtatataagtaccttcggactcttaggtttatcgagttgggtgacatttctcggttcatgcagagacatgacgcgttaaaggctctaaacctttttcggagaaaagaaggaagatga

SEQ ID NO: 190265 - DNA, 2031 bp, Arabidopsis thaliana landsberg
aagtgcagaagaagaaaaaagcatctaaacttttgcaagatatccagaccttaaaggatgatattaaggaggccgagcgaagatattcttcaaatgtatctctggtgagatctcatggagctattgaaaaaagggtgcaatcatctcccctagacgagcactgtacaacttccagtgccttgtttgtaccaactgctaatacagacaggctgatgagtaatatccgtcaacttgaagatgcatattttttcatgcgatcacaaatcaacttatcgagttctgctgctactgcccgttctgacaaaacactaaaggacagggacagatgctctgaaaaccaaaatgaaaatcaggatatgagtaccaaaggaaaatcttcagatcaactcgaagtgtttttcgaggggttgtgcaaatttgctcggtatagcaagttcgaaacctgtgggacaataagaagtggggaccttttaaactctgcaagtgtggtctgctcgttgagttttgaccctgatgaagaacacatagcagcagctgggatatcaaagaagatcaagatttttgacttcaatgcatttatgaatgaatctgtcggtgttcattatccactagtagagatggtcaacaaatctaaattaagctgtgtttgctggaataagtacaacaataaccccttggcctcggctgaaaaagatggtgtagttcaggtacctatcgatgtcaagtttggaatctttcttatttaccatcatatgttgcacggtaggatctataggactagcctcatgtgctttctcttcctctatgagatgtgtacatgttaatcttgtgataagatagagatatagaagcgtctatttcatggttttcacttgccattttcttactgtatggtgctaatgaatgtagatatgggatgccggcactggacaaggattttcgcagtacacagaacaccagaagagagcctggtcagttgatttttctccatctgacccgacaaaatttgttagtggaagtgatgactgctcggtgaagctttggagcatcaatgaggcacttctctttcctttacctcctgatattgcaagaattttcatgtccccgttgtttttattactccagattatagctccataaggcatgattctctgtttatacttgtgaatttccaaatctagtgaaacttatattcttctctgtttggtatgcagaaacgttcattaggcacaatctggagtccagcaaatgtgtgttgcgtgcaattctcttcttattccaatcacttattggcatttgggtcagctgattacaaggtctattgctatgaccttcggtatgtcaaaacaccttggtgcacattggctggtcatgagaaagcggtgagttatgttaaatttatggattcagaaaccattgtttctgcttccactgataactctctcaagctttggaatcttaacaagacaaattcctctggtttatctcctggtgcttgttcattgacatataaaggacatacaaatcagaaggttagtcccaaaaacttttctatctacctttaacatctcatccaacatcattagttagttctgatgtctaatcctttacctgtgcagaatttcgttggattgtcggttttggacggatacatagcttgtggttcagagaccaatgaggtatatatcacatcataaaacaaaatctcaacctttagaatacttaatttcagattatcaaaggtggtatatgtcaatcgcgtttagtttgtttatgaagctgcctaaaattagttgttataacttactaaaaaaactttactttgattttgcgtcttaggtatatagttactataaatctttaccgatgccaatgacttcatacaagtttggatccgtcgatcccatttctggaaacgaatactttgatgacaatggacagtttgtgtcgagcgtctgttggaggaaaaaatcgaatatgcttgtagctgcaaactctactggaaacatgaagctactaaaacttgtttga

SEQ ID NO: 190266 - DNA, 92 bp, Arabidopsis thaliana landsberg
atctgaaggaactgagaaaaatctttattttgtatggaatgataggttcaatatccgcgtaatacagatctgggttctgccgacaattcatg

SEQ ID NO: 190267 - DNA, 134 bp, Arabidopsis thaliana landsberg
cggttcacgcatcatctactcatcagagaaaccctagcttcttagtcttcttcttcctctctactcttcaacacaatcttcgaaatggcattcgattacggattagggtgaaggaagaagcgaaatcgaaatga

SEQ ID NO: 190268 - DNA, 136 bp, Arabidopsis thaliana landsberg
atgaagaagaaactgagttttcccaatcgagtggacatttttggcgtcttattggataaggttaattagggcttcattaatatatagattttttttttctttttagaaatatattagattttgtattgaagatatt

SEQ ID NO: 190269 - DNA, 289 bp, Arabidopsis thaliana landsberg
atgtcgagacgcgtgcgtcgacagggccgggcgcggacgtcgccagcattccggcgcccccgatctcgccggatgcgagtggtgccggccgaggccggtccgaccactgctggccgtacggagcgagtggccaccgtgggacctgtacgcacggacggagcctgctctctgggaaccctgctgcactgggccgcatgtggtgaaggtgactgcgtctgggtgcgtagcacgcacaggatggcaactgcccggactgctggactcgctcgggtccgaggggttacacatg

SEQ ID NO: 190270 - DNA, 856 bp, Arabidopsis thaliana landsberg
attgtacgtcctgctgtaggagagtcgatcaggtatctactacaccattggcagaacctttacatttcgtatttctgactagaaaaagtggtcttaactattgtttattttttccagggagatgtctctttcagagttgaaaactaaataccgaaaactatcttctctggagaaggctcgtactggttgggaggacgagtacgaagtttcatcaaaacaggtatgcttcccctatcaaaaataaagttgagaatacatagaaccaaagcagaaaaatagattagcacagaatcatcgtggcgtggtatagtttaagcctcacaagagattcataagtcataaccattgatatagcgctgttcattaaatgagtttccatctgagtacagtgtatgcatggacccaagtgtaagcttggggagtattgcacggttggacgtaggatacaggaagtaaacgttgtgggtggccttattcttcccatctggggaaccatcgagaaagctctctccaaacaagtaacaaagaccattcaagaatttgtgagactctctcttagtgtgttggcatggaaacttatatgtatttggatcttttgcaggcccgtcacagccacaagagaattcgagttatacgcatagagactacaacggataatcagcggatagtgggcctctccatcccaaatgcagctgtagaaactgttttacaaggtattgcgagcttatctcatgatcttgagacatcatatgataaatccgacaaggaaacagaatggttatctcgacagtcgttgatttgtgtctgtctttttgtttctgcagatttagcatgggttcaagagattgatgattaa

SEQ ID NO: 190271 - DNA, 1994 bp, Arabidopsis thaliana landsberg
atggtacgacaaggaggttccaacatgatgcctggtccgtccatgggtgagctcatggctgggtgtggtgggagtttgccttcagatttcaggccaaatggtcgggatatgggttttggtcagctggattcagttggtaggccaggccgggaaccacatcctctacctccagatgtatccaacactctgtatgttgaaggacttccttctaattgctcaagaagggaagtatcccgtatcctacctaatgactcattacaattattaatttcctcacttaagaatgtttgagctattcattgtccttaactgaagtctagatatatttcggccttttgtgggatatagagaagtaagacttgtgacccaagattcaaaacacgtaagattcactggttccaatttgaagaattgttgaaaatgaaaacactcagtcccataatttcattaatattgactttctaaggggttttatgcagaggagtggagatcctactgttctgtgttttgttgattttgaaaactctgcctgtgcagcaactgctctgagcgctttgcaaggtaaccgagattctctctactttggggattgctaatatttgttccaacacattttgagtttgttttgcattggtttcttgatattactatcttcatttcagttataaacactatgctagaacatatactgtatcaaagtttgattttgtccgatgcaagccaacactcgtccgctggtttaactgatacaactttatatttgacagactatcgaatggatgaaggcgaacccgattccaagattttgcggctccaatttttcagaaacccaggtccaagaccaggacagcgtggaggaagaaggtgatcagtaggtgacattttaggcccatcgaccaaatggtgactgattgtttcgtgcttcatggttccctccgaaaactagattctacatgaacccaaatacacttgatcatatgctcaaatccttaggagtagtttcactcaaagaaacagagatgtatggagagaccccacggagattaagtgattcgaacctaaagtctttctctttcacttaatttttctttccatctcgtggatagatttagtgcatcatcttattactgttatctatcaaagacagaaatttttgtcacaatcttttattttctatgtgggaattatacggaaatgggacttcaatagtgtactcagggatcagtacgtagttgtatttgttcatttatatttttgggacagaatccaaaacagtggctcatataatccctagtgtgaggatttgcctatcgtaagtgtatattgttagcaattaaaaaccatgagtgcttttactttcaaagaaaagttacaatcttctagagcttgtagttgctttagcttcctcgtaatatgatacttttaaaaaagttagaactttatatcaaaaagcaaatcaatgtagaaaatttacaaaaagataagaaatcagtgacactacaaatttatttggttgaccaaacatgtcaacactgatgggatcggcgatgaagagaggtgagtatattcgatatccaaagagagcagatgctttttttcgcgtccgactttagatttttttgtttttgttttggcttttatgtgcatgcataattcaagaaacttcatgcttctggccacgttaaataagttagtaggcaatgtacaaatcaatcttttcctcttttgttttatccatcttttacgaagcagtagattgcgacttttgagacaagatgtaattttgtaataaactgatcatattgcacatgtctttgtgaattattgatattgggtaaagccgtgaagcctttaacaaaacaaaccaaaaccaccagggtaaaaaaaagtacgtcctctataacgtcaacaaaaagtacgtcccctatctttttttctctttacgtcccctatctagaatagctatagaaagcaataatacgttactaattcat

SEQ ID NO: 190272 - DNA, 353 bp, Arabidopsis thaliana landsberg
gtatccacagaagacgatatttgattcgcttcatagcaacgacatcgacttcggaatatactttcagaatattccgaccacattattctaccgtaatctccgacagctaaagtacattttcaatttgcatcaatacgatttgaaattcaagaaagacgcggccaaaggaaagttaccgagcttaaccgtaatcgaaccgaggtatttcgatctcaaaggtttaccggctaacgatgatcacccgtcgcatgacgtggctaacggtcaaaagctggttaaagaagtgtacgaggcacttaggtcgagtccacagtggaacgagacgctcctagtcataacctatgatgagcatg

SEQ ID NO: 190273 - DNA, 124 bp, Arabidopsis thaliana landsberg
gtatgagcctagacgcctgttggccttcgattggaaccagggaactcgaatcgtcctcatcgtcatcgcttatgtccacaagatctacaggaacccgattatgaggagtggagcggttcggtaa

SEQ ID NO: 190274 - DNA, 337 bp, Arabidopsis thaliana landsberg
ggcctgtcccggctccactgagggcgtgtgtgtaagtatacagggcccgttacctacccggtctgatttgagcgttaaagtcacggattccttttcattgtgggaaagttcgaggctcttctggtcataaaaaccaatcaaataagggtctgaatgctctccagcctgtacttcctcgtctctccaggggccgccgcggccggtggatttgccgagtttacacatgtcggacatcgctccggcaccatacggccgcctttttgtcgccccaatcaatgatatgcgcgctgttctgcatcgacttatgatcgactcccgtcatgaccagaataccgtg

SEQ ID NO: 190275 - DNA, 112 bp, Arabidopsis thaliana landsberg
atggtagctggagcacgactagaaaaggcagagacggtggaagagcaagtggtggccggtgctgtcaaccgcgtggaggcggcaactggtgttggtttcttgacgggtgcag

SEQ ID NO: 190276 - DNA, 255 bp, Arabidopsis thaliana landsberg
atggagaaatctggaaatcaccatcacgcaaatgaatcatcggaaaatcatgatcacaaatctgaagatcatgagaaaaaacatcattccgatgaatcggaacaacaactgcattcatcaacgccggaatcggaatcctccgaacatagccttgtcgaggtgatggaagccgacgacgatttcattcaaaaaatttcttccgagaaggatccgttaggagagatctcaccagcggtggagtcattcccggagacg

SEQ ID NO: 190277 - DNA, 141 bp, Arabidopsis thaliana landsberg
aatcacatgacgtcgatgctatcttgcttttctgtgcttgtgcgaaagctccataaaacctttgctgctttggagagaggcgagcagcgagattcaacacaagggtctaaagtagcaaccggcttttctagttgtgcgtag

SEQ ID NO: 190278 - DNA, 1198 bp, Arabidopsis thaliana landsberg
atgcagacaatggaaggacgacaatataattaccaagacagcataaacgcgagctcctccatggtggtgcctcactcgccttggcactctccggttccttatctcttcggtggtttggccgccatgttggctctcatctgcgtcgctcttctcatcctcgcatgttcctactggagactctccggctccgctgagagagatcttgaggccggagatgatgccaaacccgacaacgacactaacaaaactaagcacacagaaatgccggagaagtttctcgtcataatggccggcgatatcagacctacttacttggctacgccagcgactcggtctgagcaaagctgtacttgcggcgatcataacgaagaagaaggaagaagagggtagtgatcaggtggtatagcagagcaccggaggttacggtgagccctccctcatattttgaaaacagagcattcgttacggagtactccggaatcgatccgtccggtctttttgtgtcggttcataattacgccaaccttacgtgagctgatgggatataaattagagtcgtatttatttcgtatggttttagttatattatggttgtctcagtgttcttcagatttttcccgtttatggttcatgaaggaatatccggtacatgtaaattttaagagtttgaatagatgattgttttggactagcgattaaagatagaactgaagcttgacagacaaaataaataaaagatacaactaaaatcgtgcgtccttaattcagttttcgtgtatagagagacaaaaatgttttcccagtgagagatgtacagacatgatgcttacgaaagagggaaagagatgtgttgtgaaaacttctagtgatgtgccaacaatgacgcatgccgaatattaagctaattcgttgtggcgaaccgaagttgagaattattctctttgtacctttattcctaaatttctagatatattactaaatatcatcaagttttatcaaagaacaaatagcctctcaactatacatttctctctttttttcttttccaggcatatccatttatcattgtttaccattcactgaaattgaaagcattatcgtttatcgttggacaataaattgtcgtcttttggatgatcagtacaatgtgaacagtgacacatataatggatggagactactgcaactaactgaataa

SEQ ID NO: 190279 - DNA, 236 bp, Arabidopsis thaliana landsberg
aatcaacaaggtaaagagtgaagaaatcagaagaatagaagcaaaccttttgatcaacgcgtttataaatcggagccaagatattgaaagtggtacaagaaatattcccttccccccttgaagaagctaagttggagttgagtctctgcactaacaaattacacaatcggcgaatcaaatctcagaacaaacaaaataaagaaggaaagtggaggaagagcgacgacgaaccataa

SEQ ID NO: 190280 - DNA, 469 bp, Arabidopsis thaliana landsberg
  unsure (1)..(469): unsure at all n locations
acctgtgatgtgggaaggggtaactctcgagtcggaacaattataacagctgcgtacaagaaaggtattgacggtaaactaagttagaaaggaagcagtaaacctttaagaaacatattaggctactgatagaagcaatgggtttagaggctcaaaggattcattacgatttacattcactaagttttatacagtaactagtgtttattgtggatcaataatctatttacgacgccagctttggtattctgttcttattagctatgaaaaatcactagctagacgatgtcaaaacttcagattctttaatagcattgcaccacgtgaaagaatcaactaacaacatggtccagtacacagttacccngaataacgttgttatcttggtcaattttttccaagacaggaatacaaaaggcggcggtctttccagtcccgttctttgctctggcaaggatatctttaccag

SEQ ID NO: 190281 - DNA, 416 bp, Arabidopsis thaliana landsberg
gaaggaaacgagagaggaaggtggggctttaaagagagacccgtggaggctctactgaagcgatgcgtggaacaaagctgacacaaaatggccacaccaacttctccttctccttcttcttcttcttataacagcaagtgatacattctcaatctctgattctcaaaaccctaatttccacacgctttctttcatttccatccaaaaggtaacgcgctttttatttcctttcctgcattcataaatttgtctcctgcatgttgaaaaaaaaaaatttacatcgagattcgtttttattttttagagagagatatgacggagacgacgaaggtgatgtacatagtggtggtcgatggaacggatacggcggcgacggtggaagaagacgggaccgggacttggaaagattcgtttag

SEQ ID NO: 190282 - DNA, 353 bp, Arabidopsis thaliana landsberg
atgcaggcgcatggccgcttccgggatgagcgcgacgccgatgccggactggaccagcgcaagcatggtgtggatttgcgcaacgtactcgacgacatccggagtggccccagcttgatcgagaatccggtcgaccaggttatgaaaatacctcgcctcaaagggggaatactgcaggaagggccggccactcaagtccccgggcaccggacgctcgggccaggatgttgcgtccggctcgggaatcgccagcaccagcccttcgcgcagcagttcgatcgtctccagttcgccgtgttcggcatgcgggcgaagcagcgcgaaatccagttgccccgccgacaatgcttcaa

SEQ ID NO: 190283 - DNA, 629 bp, Arabidopsis thaliana landsberg
atgagtacagacactcaggcagaaatacaggataacactaaagacgctctgtataactcagatgctggacattctctaacaaccctctcaggcaaaatatctccaggcactcgtacaagccaaactgccaaggtacaagatttgagtgaaaagctaccactggatccgtcccacaggttagaaactttatgagtactttgtcattctgccagtaatttttgaagatgaaatatatatctaactgcagtatactgtaaactgagtgcagcatggcagggctcgataatttgagggccatgcaaaacaaagatttaggacttatcagatccagattttttaagaagccagaaaaacctgaatcccatgtgcttgagtcttctccaattgaaacagagattcagccagttatccgagaaaacattgggtcaagtttgaaccctacaaatgatacgaggtagtatttcttttcttcttcacctgtgtaactatatcttttcactctttcctttatcttcaacatgcagacatgatattaaagacgcgttaccaggattaaagactagatcatgtccaattgagcttgtcaatacggattccgccaaaaatacagcaaatgttaatactagaag

SEQ ID NO: 190284 - DNA, 956 bp, Arabidopsis thaliana landsberg
acgaaagtcaaaggaagcaaccgtgcctaagcccgctgtgcaggaaaatgttgggatcgaactaattgaagaagtcatctccggcgctaaaatggaagctgaaactgatccgtgggttggcgaggatatactagcgccaaatgaacatcccgaaccagaagctgtggtgtttctcgaagttgaccaaattcctgctaaagattggggggcttattgtagggagccaatacagcattacatcgtgacaggcgagctcccaaagaataaatggcaagctaggaaaatgagaatcgttagcgcgaaattttatctattgaaggatgctttgtatagacgaggtgtcagatccttatctactatgcatttgtggacccgaagtcgagatcgttatgaacgaagtgcactaaggtttatgtggcactcattcttcaggaagggctatggctttcaagattaaaagaatggggtattattggcctactatgatcacggattgtgttaagtacgcccagcggtgtaaacgttgccaactccacgcacctctcatccatcaacctacatacttattctcttctatttctgccccatacccgtttatgagatggtcgatggatatcattggacaagtcaacccgaggtgtacaatatctcttgattttaactaattacttttcaaagtggattgagatcgaagcatacgtaaacatcaatgactcagcggtaaaaacctttgtttggaaaaatatcatatgtcgacacggcgtcccgtacgagatagttagtgacaacggagcacagtttatctcacatgagtttgaggctttctgttcggattggagaattaaagttagttactctactccgcgatatccacaaggaaatggtcaagccgaagccgcgaacaagacaattctaagcaatcttaaaaagcgtttaaatcatttgaaaggaggatg

SEQ ID NO: 190285 - DNA, 3181 bp, Arabidopsis thaliana landsberg
acctaattcatttcttcactctctctcttcttcctccatcggaaattgtgaatgtcgttgaatcccatgccgtcggaaatagtgagtttactcgccgtgaaaacccatcttcgccgtcgtaagtagagctgtgtgtcgtcgtcgaatctcttgcgtttcccaggtttgattttataatgttagcttaaatcttcgttttcgaattggtttattcgatttttgttgttgattatgtgaattcgttatttgaatcatgattcaatcgacagtttgacatttgcttcagcttcgaatttgaattttgtttgagatttgatgattgaatttgtttctaaaatccttgtacattcgttatactgttctaaaatccttttgaatttgttatactgtttcgtgatagatttgcttatgtgaattcgttatactatttcgtaatagattttggttctgatttagtgtttacctcttttgcatatgctttcgtgatagatctatgccacttacgctttaaaacgatttgtaaaccatgttaaccacttttcaaagcttttaaaatcccttgtaaattattctatgctacttacttacgctttaaaacgatttgtaaaccatgttaaccacttttcaaagcttttaaaatcccttgtaaattattctatgctacttacttacgctttaaaacgatttgtaaaccttgcttctctctgtggtgacagtgtttttgtgggtgttgattttgctgttatttatcttatcaggttataatgctagaattgtattttgtttgtggcttgtggaagttgacaaacaatatgacttgagaatttaaattagacattgaattgggagcttctttagtgctcattgatgagcacaatacctatcacgcgttggttgatattcttgtagaggattttcaaatagatagttcaaccaattctttgaagcttagttacaagttagtctccacgtctacaaccatacaatctcatcctctttatattaggaatgatagacagcttgcaacttttatgcacaaattctcacagagtggaggattgcttcagttatgtttgactgtagagcaaatttctgtgacagttgagcaggtttttcaataaccttcttgtgttataatttaaaaaatcccttgtaaaatcattattaagtcagtaattgtgcttattacaggctgagactacttcaaatccttttgtttctcattctgtccctaatgctcaggtacttatcgttttaaaaatccttgtaaaatcattattaacgtttttaaaccccttttaaaaatccttgtaaaatcattattaacgtttttaaaccccttttaaaaatccttgtaaaatcattattaagtcagtgattgagtttattgcaggctgagacgacttcaaatccttttgcttctcattctgcatctactactcaggtaataatccttttaaaaaatattgtaaaatcattattaacgtttttaaaccccttttaaaaatccttgttaaatcattatttaagatagattgatgtttgaggtaagctttttattttggcagccgaggttaacctctaggattattgaggcgtgtgtatctgaaacatctagtattcttgatcaacagtattctagttctgcgttttcaactggtctaagtgatgctgattctttgtttattggaaaatttttcaaagccaaagatgaaatggtattcacgttgcagatgtttgcagtgaagcacagctttgagtttcatacagtgaaatcagatcttacgaggtatgttcttcattgtattgatgaaaactgtagttggagactacgtgcaactagggctggtggatccgacagttatgttattcggaagtatgttagtcatcacagttgtgactcttcattaaggaatgtttgtcatcatcaagcatctgcaaggatattagaagattgataagtaaccattttgaaggaggaaagcttcccctcagatttaaacagctgatggaaatatttagaaaagatcatggagttgggatcaattattcgaaggcttggagagttcaagaacatgcaacagaacttgcgaggggtttacctgatgatagttttgaggttttaccgaggtggttccacatggtactagtgacgaatccaagttctatcactttttttcaaaaaaaagtctgctaataagttttagtatgcatttatggcttttggtccatcaataagaggttataagttgatgaaaaagtcatatctattgatggtgcccatctgacatcaaagtttaaagggactttgcttgctgcctcagctcaggattgaaattttaatttatatcctattgcttttgcaatagttgattctgaaaatgatgcgtcataggactggtttatgaagtgtttgctgaatataatccctgatgagaaggatttagtatttgtgtctgaccgagctgcttctattgcaagcggactttcagagaattatccacttgctcatcatggactttgcacttttcatttgcaaaaaaacttggaaacccatttcagaggttcttcacttattccagtttactatgcggcttctagagtttacacgaagacagaatttgattctttgttctgggaaatgactaatagtgataaaaagttagcacaatatctttgggaggtagatgttaggaaatggtctcgagcttattctccttcaaatcggtacaatatcatgacatctaatctagctgaatctgttaatgccttgttgaaacagaaccgcgagtatccgattgtttgcctatttgagtcaatcagatctattatgacaagatggtttaatgagcgacgtgaagagagtagtcaacatccgtctgctgttactataaatgtagggaagaaaatgaaagcgtcatatgatacttcaacacgatggcttgaggtttgtcaagttaatcaagaagagtttgaggtaaaaggagataccaaaacgcatttggttaatctggacaaaaggacttgcacatgctgtatgtttgatattgataaatttccttgcgcacatggaattgcttctgctaaacatatcaatctgaacgaaaacatgtttgttgatgagtttcattctacttacaggttttatctctattcttcacaactttacaggcgtttttaa

SEQ ID NO: 190286 - DNA, 340 bp, Arabidopsis thaliana landsberg
atgttcgtcaagctcaagctcatcttcttcttcttcctactctgtcaaattatgatttcttcctctcaaaatctcaacttcacctacaatggtttccatcctccattaacagatatctcactccaaggtctcgcaacagtaacacccaatggtctcttgaagcttaccaacacatcggtacaaaaaaccggtcacgccttctatactgaacgaatccggttcaaagattcccaaaacggcaacgtatcatccttctccacaaccttcgtcttcgcgatacattctcagatcccaacactaagcggccatggaatcgccttcgttgtagctccaacgctag

SEQ ID NO: 190287 - DNA, 363 bp, Arabidopsis thaliana landsberg
tgctaatataagcggtgataaaagcagcgtttgtgtgaaagattttgagaatctttggcagcattgtgcttatgtctatgatggtggtttacttccatcggaccgcgcaggatctacaatagtcgatctgactaaagttggaaagtacaagatcattaggcccggaaggtatgtttagatcagtaaatgcgaattaatggatttagagtttgaatctttgtggagttgttgagctaaaatgacttataataatgttgcttgtgttgttaattcagcgcgaaacaagcaacagtggcaattcttgagaagtatttgctggaagaagaagaagaagaagaccataaagagaagagagctagttaa

SEQ ID NO: 190288 - DNA, 484 bp, Arabidopsis thaliana landsberg
cgacgacttcggtgctctgcgcggcaagatcgacacgctgtcgccacgactcaccgtgggtggctacctcgaatggcagctcgacaaacaggtcgacgcgggtgtcgacctcagtcacgacacccagggtgcgggcgcctatctcaagttgtatgcggaatgggatctgccatcgatccggctgctgcaaccctcgctgcatctcacctggcaggcgatgaacggcgccgcgatgaatcgtttcttcggcatcagccctgagcaggccggcaccctcggggtgcgggcctggcagccgggcgccggcagccagcttgccacgctggagtacgacctgttcatgccgaccagccagcacaccggcttcgcgctggcactggcctacggccaattgctcggtgctgccggcgacagcccgctggtgacccggttcggctcacgcagccaatggaacgagtcgctcgcctttatctatcaccgctga

SEQ ID NO: 190289 - DNA, 59 bp, Arabidopsis thaliana landsberg
ctgttcaggttaatgcatttgctgcacaaaaagaacttatgaatcttgaacaactgtga

SEQ ID NO: 190290 - DNA, 169 bp, Arabidopsis thaliana landsberg
acacgttaatctgtttcagtcagaaaaagcctttgacctacaaaaagtgctcttcagtgtccaacggcttaaacaggacttttggtggtcatttaccagtagaccacttgatcatctgcctgaatttctgccagtccgagcaattccacctttggtgcattgggcttga

SEQ ID NO: 190291 - DNA, 517 bp, Arabidopsis thaliana landsberg
cacaggtttatatccggctgtaagcagtttaccctttacttcaggagaaacctacgagttcgatcatacgccgccgtctgtagtttccattgttcggacagatccaagcccgatcaaagaaaatgtgctggactttcagatcaccttcagtgaaccggtaacaggcatagatttcaatgactttacgaccacaacaaccggcagtatatctacctctggcgtatccgttacgccgataagttcaacagtagcaaatgctacaataaataatgtaacaggtgatgggaccctgcggctggatttaaataattccggaacgggaattattgacgcagtagggaatgagcagaccactggttataccagcggcgaaacctacctggttgatcagacacctccgtcagcgccatcaacaccagacctggcggcagccagcgatgcaggaacgtcaagcacggataacgtgaccaatgtaacgaccccgagatttaacggtaacgcagaagttggttcaacg

SEQ ID NO: 190292 - DNA, 2316 bp, Arabidopsis thaliana landsberg
gcaagagagagactacaaggctgtccgactgataactcgtccgtaaccgagaaaaacttgcccaaattcagtaaatcttgcccgtggtcgaagaaactttgtccgttactagagaatctttgcctgtggtcgagagaacttgacggtgagtaaggtatcatcgaccgtgattgaggagttttgcccgagacccaaaaaactttccggactaccgaatccgtgagttgtggtcgaattgtgtgtttgtttacatgctttctagagctagtctttagatcatatgcatgcttactcacttagacttaactaatcggaagtcggcttaagttaaaaattgaatcttaaaatgacatgggcgtatgaggaacttgatatcactaaggaatggaatggactagtatttgactaggctaaggtgaatatggacttaactaattttacttgatgaattaagatatgattcgagggcttacttgccttgttagattgttatacttatatgagatatgctatgaggttgtgaataagtccttgatatattatgtataactataaatacgtgaattagttcttgattgtattataattgtttggggtgtggtaaaatacttatatttagttctgcatgaggttattgtgtctaagtggtattcaggggtttacctaatacaatcatgcttagagtaagctgttgccttcctttttgtgttgtaattgtgtcagtaagttttgatcttgagtggtcacttacatgatggtacaatactcggagcgtatgccaggtaatgcatgacgatgcattaaaatgatgttccggttataagcctttgtggctatagctcgggtgttcacagttgtgtacgtacgtgtggtatgggtgtgcacgtacgtgtgtgtggtagcatacgtgtggagaacatgtatacacgtatgcgggagtttgtgctgatgttgtggtgcacctttttggtaaggttggcagtatgctgggcccaaggttcattcatttttctagattggctgcatattctggtattattataagtatatgataattcgtttattatgtactctgtgatccctgatggatacgtttacctattaagttgcttaacccctagagatttatttgtgcatagacccaactcactgagtaatgttagattactcatgattctacttgtcttacaggtaaccttagtgggatgaccatagcggggagacgaacactatgaaatgccggaactaggatgatttacgtcgcttctgcaaaattacttgttattatgtaaattttaacgaggatccgatataaagatatattcttgggtaaatctttgccaagtataagctatatactatgcataaaatgttttcttaaaggcagccgagtgtttaatgatataagacctagtccgggtcgctcaacactataatatcacgagggttggcaagcctaagtggtgttcctagtgggtggaaggtcgattataatttggttaaagaaccggattcatctggaacctctactaagttgtgatcgatcaacttcactgtagcgtaactgtgtcacccgtggcttgtctagccatagggcaattcgggggcgttacaatttttgttatcagagcatggttatgcgatgctcgtggacacttgggttttcgatgattttatcgagtaaatttaagtcgcagaatgcaacattagattccggttgttcgtcttttagatggctaagtgggggataggtttacctcgttttgcagatgttgtctagcaaaggaagcaacacagtcagttcgttgcacggtcttaatgtgcccaaccccgaaaactttgctccgccgagcagtacggacgatgacagtttgtctgtggccatgaatgatcaaattatggccgaagatagtaaatctactaagtccgatatgtcaattgaatctgatccgtctgagtgttcggagaatgatgatgatcatgatgacccgttatctagtgaagaagcgaaccatgttgagtggatgatcaccgatgatggcaatttatttcgggctatcaataaaccaattttcaccgattttatctatgttttaggtataagattttgagtctttatgttatttctcgagtctttttagtctcttttcaagtattctatgcaatgggacaacaatggagataaggagacattttggagcaaaagctaaggaaaaggaagctaaggacgattttggttcagaaatcagcgaggagtgtcgatcgaatcactctttgtgtcgatcgacaccagtttcggcccagcaaaaaccctag

SEQ ID NO: 190293 - DNA, 102 bp, Arabidopsis thaliana landsberg
gcatggaggatgcctaagggaggttctctgaaaccgaagaagaacgccattgtacatacacctcttgtcaaagaaggactgctagtgaggacagaacatact

SEQ ID NO: 190294 - DNA, 855 bp, Arabidopsis thaliana landsberg
atttgtagagtattaagggcttactacttgtcggccttggatcttgttcgcgatgggtcaaatcaagaaggtagtgcatatgaagtttctcgtgggcacctgaaagaagttaggttgagagtggaagaagctctaggaacatgtcttctgccatcgttacagttagtacctgcaaatccagcagttggtcatgagatttgggaagtgatgagtctccttccatatgaggttgacttgctactgtttatttgttccaaatatctttgtgtagaatgtgattttcaatattactgattaatttcgtatttaggctcgttatcgcttatatggtgagtgggaaaaggacgatgagcagaatcctttgttgttggcagcaaggcaagtggcaaaggtatagtagtatgactcctttgattctcatataatacaaatggaaagatacatcctccagatcctcatgagactactctcgtatgtcagttggatactagaagaattctgaaacggcttgcaaaagaaaatctgaagcagttaggaaggatggtggcaaaactagctcatgccaatcccatgacggtgcttcggacaattgtaaatcaggtgtcgatctactacaaactgttgcgttgcttctattttgtaattgaattgttctgacggggctaactgtcatgttcttgttacacagattgaagcatacagagatatgattgctcctgttgtggatgccttcaagtacttgacacaggtccgtgaccccttttcttttgtcttttttgtatgatatgctcatttcaccttatgcccttactctcccaggtttttgtccatttggtcgaaaaaatgcaattttga

SEQ ID NO: 190295 - DNA, 485 bp, Arabidopsis thaliana landsberg
atgtctgctggatataccagatgccacctatggcactgctacgagctggtcacccacatgaaggccgatccgcgcctgcgccaggtgccgatcatcatgatcacctcgcgtactggcgaaaagcattgccagcgcgccttcgacataggggccgaacgttatctaggcacgccgaaccaggaagcggaactgctcgcgcaaatcggcgaaatgatggaacaacgggccatggaggccggtcaatgaacgattgaacccgtactgccgtcggcctgttgttcgatgatgccgagctgtgcggtcaactacagtctgcgctgagcgaacgcgtggcgcgcatcgtgcacgaggggacgctggccgatctcgatcatgcgcgcctgctcgacgcaggcgccagcgaggtggtggtcaacctcgatgacgaggccgatgacgaggcgctcgaccggctctaccgcatgctcgatggtcaccggccgcgg

SEQ ID NO: 190296 - DNA, 249 bp, Arabidopsis thaliana landsberg
gagcggttcagctggcgggggttggagtttccattgccatattcaatcaagcttctagaattacgatattcccacttgtgagcctcacaacttcatttgtggcagaggaagacacgatggagaagatgaaagaagaagcaaacaaagccaatcttgttcatgcagaaactatacttgttcaagattctttggaaaagggcatttcttcacctacaagtaatgataccaaccagccacagcaacctccag

SEQ ID NO: 190297 - DNA, 531 bp, Arabidopsis thaliana landsberg
agtgcaatttgggtagcaacaagcttcagtctctaccttcaagagcatgtttatttacgtatttcaacgaacacaatcaggggaagtttgtccttgatataattgtccggatctccttgacatcgctcacatcttaccctggtgaaaaggacttgcaggtagtaatcttttgtccttctaaaaacgttatgagttttgataacccttgagtttatacaatggtattttactgtgtacaaatactatttttggtctgttggatggaaatatcattcagttagttgtttgactttacaaattttgataactaaaggactttaggccatggaatccatttagctacagcgagatttcttttagggtttaatgtgaattttcttagaagcggtaggttacttaactcccatttcttcaagaatggtattcccctaatctttttatctttttcgctctctgcaggagttaacatgttttcagttactgcatgcacttgttcgacgaagaaatatttgttttcaccttctatcactg

SEQ ID NO: 190298 - DNA, 108 bp, Arabidopsis thaliana landsberg
catttgagaatgccatgagcagcgcagaacgccgtgcgatcatccatatcgaaaagcagacacaggtatggatcagcgatctctccggcatcatacccgctatcacag

SEQ ID NO: 190299 - DNA, 408 bp, Arabidopsis thaliana landsberg
atggggacattgctgaaagaaccaaaacctttccatttcaaccaggacgagtccatgaacaccgaccgcgataaggcggcatgggctaaaaataccgacgagctgaacgacacctggcgtcaatacctgaaaagcgaggcattagacctcaaactgtcgggtaaagcggacactgcggtgatcagcaccttgcgcgaccgctacaaaagccgtgaccgcgcgttgggccgcattcgtacggaacaggtattccagatgttcatgaacgcttattccgagtcgctcgacccgcatacgagctacatggcacctacttcggctgatcgctttaaacaggagatgagccagtctctggaaggtatcggtgcattgcttcgtgaggaagataattatatcaaaatcgtggag

SEQ ID NO: 190300 - DNA, 547 bp, Arabidopsis thaliana landsberg
ggttttgctaagcttggtgccgaagtaaatatgagaattgatctttctgttccaaaggtgggggcagagttagaactcaacaaggttctcggaaaaggttcgtctggttcggtgagtctcatcaagtacaagagtcgactcgacggccatacactttacgccgccgtgaaaacctccaacataattcacgccgactctctcctcaaagagtttcagatcttgtctgaattcaaaggctgttcgagaatcgtccaatgttatgggacaaaagtacaagagacaatcaacgaagaaggtgacgtagagttcacgattcccatggagtatgcatctggaggaagcttgagacaatttatgagcagattcaaggacatgaaattgtctgatgctttgatcagaacgtttacgcgtatgattctcgagggtttagcagttattcatggacacggttatgttcactgcgatctaaaacccgaaaacatcctcgttttcccgagtttcgagttaaagatttctgatttcgggttgtctaaaagagaaggagata

SEQ ID NO: 190301 - DNA, 182 bp, Arabidopsis thaliana landsberg
tatctgtttatggtcgacttttgatggtaaagaatatggaagcagcttttgaagagttacaaaaagtgaagcttcctcctaattctgtcacttacaactttctaattgcggggtacatgactgcctggaattgggataaaatggaagctacttttcaagaaattgaagaggggtccagttga

SEQ ID NO: 190302 - DNA, 253 bp, Arabidopsis thaliana landsberg
atatggcccccctcagtatgcgaaatggttttttattaggactcacataggaatcattcagcctcttttcaagaaggttcgttgcgcgggggtgctgcgccgagaacaattccgcaacggaaccgccgattacgagaatatcgtagaagttgggatcgttcgtaaaaggaaattccgggcccttgagactaatgttgtttatgccttcctgggagcagggctgcccccggtgataggcatagctcaaataggg

SEQ ID NO: 190303 - DNA, 480 bp, Arabidopsis thaliana landsberg
ttttaggacggttcgggggtattacagtcgtggtcgtagggaattggaatgacgaaggacctcctgagcatgagtggaatgagattttttttatcgaaaacgttcagtacgttgttgtttattatatctctaccttttctttattgttttagctaggtgcttcgttatttaaacaagctgttaaagttgtaatatttctttcaggggtgataaactgacatgccgtcttccaaaagcatatgcgaacgacttctttgacaattggcgccattgtggtgacaagatcataatatgtgtcatgaggtttgcgaagttggaagtggatcaaggtattcttatatatatccaattattattttgtattttttctaaatatttgtgtatgtatcccaaaactattatgtcctattttatagaggattagcgagccacgacggtgcacgattgtacgagagttttattgaaccctccatgtgctga

SEQ ID NO: 190304 - DNA, 84 bp, Arabidopsis thaliana landsberg
atggaggattttaaccaattcaacgacatgtctcttttcatagaccatccaatcaagataaggaacgttgagcgaacatcccac

SEQ ID NO: 190305 - DNA, 938 bp, Arabidopsis thaliana landsberg
atttaaatgctttacatggatatgatgaacagttgagagtggaacaagaggaactctttgatctcaaaggtgaattacaaatccccccgtgctccgttaatgactccatcagacatggtgcaaatatccattccaagagtaaatattcttgccatcaacaaagtccagtggataagcttctatagagatcatatttaatcctgatcaaaagaatttagacagatttggtggtaacagctttgcgaggagggatgtgaacagagggaggaaagagagaggagtcactgggtatcttctttgtcttctataactgttgtttgagctttgtttgaaactttccaggagaacaaaaatattgaaatgagtgagatatggaccaaaacgagactaaagggataatacaattacaaaagttgtgagcaagaagagacaaattcttatgttggcgagccaaagcttcattgggttcagaaatcaaggctagggtagctttctcgatataaaagcatgggagcggtttctattttttcctaaaatctcaattattatcttaaatttgttgttatttggacaaaaattagagtaaaattaccatcattttaatgaccaaatttgttatttcgaacgaaaaatttactattgattgttagcgattatgatgaataaacgataaatgtaattatttaaaacaatatatcatatttacctggaatgtagatttatttaaatcaatgtccacagaattgatttttgttgctatattaatgtaaaccccatttatgacaaattaacaacaaactggatcgttattatccttgtatttcctgtagtccaaaaagaagataattcaatccaaattttcaaacaaagttttatttcaaacctgaccgtaatttatcggttaagcaaggaagatataagcattgtaagatatccat

SEQ ID NO: 190306 - DNA, 384 bp, Arabidopsis thaliana landsberg
atggaggccattatcagaaagttcggtttatttgaagaaagcatgcaggtgctgccgttgcaccaggggttgatcaacaagacctggaaggtggaatcgggagggaatgtatatatcctgcaaaagatcaataacgaagtattcaggcaaccggaggcgatcacgcataatattgagcagatcgccgactatctccgggaaacacacccggggtattcctttacagcgcccgtaagggcaaacgatggcagggccatggtatatgaagaagggatggggtacttcaggatgttcccgtttgtacagggatcacataccaaagacacggtaaaaacacctgaacaagcttacgcagccgcgaaacagtttggcaagttcaccaag

SEQ ID NO: 190307 - DNA, 95 bp, Arabidopsis thaliana landsberg
atttggttgcagtagtggctgtggcaaactaccgtagaggccgacaagcggagcaggtggatatagtgttggacgaaatggttgtggcaccatga

SEQ ID NO: 190308 - DNA, 179 bp, Arabidopsis thaliana landsberg
taccatttagcagcacaaaacaaaactctggtattgatgtccctaaagaacttctaaatcatcgaaagacttgtctcttgtttagtcgtgtgtgttgtgttgacttgttgttccacttttagcttagcttaagaagcttttttcctgtgttcattgcaaaagggttacgagaagattaa

SEQ ID NO: 190309 - DNA, 308 bp, Arabidopsis thaliana landsberg
agacttacacgatttggctccctgcgtcacttcacggaacagaacatgccttaaacgctgagacttcttctcagcagcatcaggtcctaaaaccaaaacctggatttgctaaagaacgtgtgaacatggacgagttggacggtatgtctcagcttagcataggaatggcgacaagacacgaaaccgaaacttccccttccccgctatctttgagactagagccctcaaggccatcagcgtttcactcgaatggctcggttaatggtgcagatttgagtaaaggcaacagcgcgattcaggctatctaa

SEQ ID NO: 190310 - DNA, 351 bp, Arabidopsis thaliana landsberg
atggaactcaaggaatctagaaaggtgaagtaaaggattcgacactacggcaaggtggagttttgtgaggttttgcctaaagtgtctaagagtatctaacccaagtagaaggtttcagccaaaaggaacaaaaatgtctttatttaatttccagatgtaactcttctgaagaaagtggtgtcatggatcttcggctgttgattctaaggcactcttaatgtttgtttatatgtccataaatgttagtgagatcatattcttataaatgttattgcttccatcattttgtaggatggtttggtttttgatgatgatcaagaatttgacattatcaaggattttggttgttga

SEQ ID NO: 190311 - DNA, 407 bp, Arabidopsis thaliana landsberg
atggctcgtattagatgcactgcacgtaagtcagtgatcccctttttgccttctcgcctggtggagcgtccactgcgtcgcacgatgctaggtcggtctagccacctggagagactgcatcgtcgcctgcacgaggagcaggagcgttggcgacaggagttggagcagcagggctctgcttcatcgcttcagcaggaggtagtctgtgaggagctactctcctatagtcccgctggaggcgccccctgcaccaccactgggcgtcccggccactggactagctgctggaggagacctcgacgacggagatgacgacagcagctcgagccacagcatcgacctttcagaggagcaggagcagaagccggagggatgggttgcccgacccatcactcgtgacgccgctc

SEQ ID NO: 190312 - DNA, 110 bp, Arabidopsis thaliana landsberg
atgcagtattcaagtcatggatggaatgctgaatcacgagttctgtttgaaactaatccgttaaaaccgcttggagatctgcttgaacgtaaggcccttttgacaaacag

SEQ ID NO: 190313 - DNA, 1358 bp, Arabidopsis thaliana landsberg
atgaattttcaagatttttgtgataaatccggaatcacaagacacttaaccgcaccttactcaccacaacataacggagttgatgaaaggaggaatagaaatttgctagagatgacaagaagcatcatgaagcacatggatgtaccaaatatctatggggagaagcagtgaggcatgctacctatcttattaatagagtcgcaacaagatcagtggttaaacaaactccatatgaggtattcaagggaagaaggccaaatattgaacatttatgtgtgttcgggtgtatcggatatgcatagaatgagagttcacatttaaagaagctagataacaggttgagaaggttagttcatctgggaacagaacctggctctaaagcttatcgcttgttggatccatataggcggagaattattgtgagtagggatgtcgtttttgatgagagtaaaaactggtcttggaatgagacagaaaacgatatatgtgagagtccatgaacgtttaaagtcagctttggaaacaatggtattgagaatgaagactcagtacaagaaacagaggagaacggagccgatgagaataacgagggttcagttgaagaggaagaagacattccaaatgataatgatcaagatgaacagactaatgaggtcatcttaaggagatcagagagacaacgtcatagacctgctcatcaagatgacaatattttgtttcctcaacttgaagtcgaaaaactcttgatgacaatcagtgaagaaccatgggattacaatgaagcaaaagagctaaaggtatggagagacgcgtgtaaagatgaaatcatgtctattaccaagaataaaacatgggacctagtgtagtgacccgcgtaaggacatcggccataggcaagagtccgaatttccgaaagttgcttgaatgcatggccaattaaccttacgtgcccacaacaccatagaatatcaaagggcaattttgggaaagaatgggcactaatgggcaagttggggcaaaaacggacgtgccacgggcgaaagtttgccccgtcgggcgtttgccaaccgttgaccgcgccaaggacgcgtggctcggctaacttggggtccaagaaaagttgcttggagccaagttttaggtggccacgtgtcactcatccgcttgagtagcaagcgtgtcatcgcgggtagatgacacgtggagtggtgactcgcccatactcacgacacgtggacatgctaactcgccattcccttgcctataaaagcccaactcgaccccatttgatttgtgaagagaaattgagcgggagtgagaggcagccgagtttaaaccgtccgttcgattcaagttag

SEQ ID NO: 190314 - DNA, 1481 bp, Arabidopsis thaliana landsberg
  unsure (1)..(1481): unsure at all n locations
ttccttccaactggcagtgtcatggatttgatcggcctatctatacgaatgtggtgtaccctttcccgaatgatcctccttatgttcctgaggataatcctactggttgctacagaacctacttccagattcccaaagaatggaagggtatgtaaacatatttaactaatgaaaataaatattattttccatatcttttcatactctccgggggaggcggagagacttcattatctatgtaccttcctcatattatgattanaacaatgtgttttcatataatttggatggaaatagccaactttgaatcttttcatctttcataagattagtttaccaagttttattctttgacattcttacatgaccaggtctaatgtacagatatatattttgtcgaataacagcaacattactattaaatggttaacagtactgtttccttattaactgcattgggccatgatttgtttcgataagcatgcctctcgcatttcgagccttttccaactatcttgctgctagagagactagtgaactatattttaaaagttagtgttataggttttgaagactttttcgaactttcagcaaagctgctaaattcagcaagttatgcaaatgaccataaatattgtgccttttcacatgttaggtataagtgaaaatgtgaacaactttcccaggatactacttttgtatgatctttcattttcccttgcttttctgaactgaagttgtgtctttttggcagacagaagaatacttcttcactttgaagctgtagactccgcattctttgcttggataaatggcaaccctgttgggtacaggtgagaaatatgctctaagaggactaacctccattttattgatcttgttctgtccttgtctttagtcatctactagtatatagaggcaaagtctgtcttctgagcccagcttgagtctaaactgcttagtcaaggaaacgtatagataagaattgatagaaaatatagtctatacttccaatcgatttctcttttttaagaacgtagccagatttacttggaaacataagacataagaaataatactgcatttactgaaaaaaaactagtgttttgtgctctgttataaaaaacatctaacttagaatactatctttaactatagccagggttctagtcaaatcatgagatacaaagacttgtctcatttcaacttcatttatgttctagcacctattttctgtttggcagtaaagttcagaagtaaccttaccaaactaattttcccttttctcttaaaccagtcaagacagcaggttacctgctgaatttgaaatatctgattattgctatccatgggactcgggaaaacaaaatgttcttgctgttcaagtctttagatggagtgatggttcataccttgaagaccaagatcattggtggttgtcttggtttcatcgagatgtgcttttggtagcaaagcccaag

SEQ ID NO: 190315 - DNA, 346 bp, Arabidopsis thaliana landsberg
atgagcgactccgaagctgcccaagcgcggatccgaccgtccggaccgctgggagcgccgccccaagcgcgggccgacgacaacggggaaccccggcaagggcgccaagtccaccgcgggaggcgcgcgtcccggccgcgccgacggcgcggggggaccccgtcccgtccgctccaagggagacggtgcaccgagtggaccccgcgccggcagcctcggccccggcagccccccgcggcccgcccgctccggcgtagacaaggccggcgccgcgccccgcgccgcccaggaggtagtcgtccgctcgctgaaccacggcgcgttcgccgaccgtgcactgcacggc

SEQ ID NO: 190316 - DNA, 192 bp, Arabidopsis thaliana landsberg
agattagtaataaataatggcaagggcttaaagttaatgctaatcggtcaattggttttggatcctcttctcgatactacgaaacggcgtcgttgtaacatcaaagcctacttgctaaaaacatccttccaaccatcattgtcttctgaccaaataacgagcatccaaccatcattgtcttctaagttctaa

SEQ ID NO: 190317 - DNA, 83 bp, Arabidopsis thaliana landsberg
agagctccgccgattgttttgaccgccgacgtttctggggtggtatcgttgacggagaagaatatacagagagcggtcagtag

SEQ ID NO: 190318 - DNA, 127 bp, Arabidopsis thaliana landsberg
gatatttacacaaagagttgttgcatcatcgagaataactaatgactacgaagatgttttcatatgttttgttacattcattgatgatgtttgctatcatcctttcttccatgggttcaccaggtga

SEQ ID NO: 190319 - DNA, 177 bp, Arabidopsis thaliana landsberg
aaactctttaagatcttcaaaattagataaatctgataatcagtatcaaattctgtttaaaaccccaaaattgagttaccgcgttaacgatgattcgagtcgagatccattaatcctagaagagacaccattatgggttatctatggagacaagctaaaacttactaatttagttaa

SEQ ID NO: 190320 - DNA, 98 bp, Arabidopsis thaliana landsberg
gcatgggaagatgtctccatacggacagccttactgggaccaaaagtgaaaagagatcggagtgcgagcgacacgtgggccgtcagatccaaccataa

SEQ ID NO: 190321 - DNA, 139 bp, Arabidopsis thaliana landsberg
atgggtctaaacttgtttgtgaagtttgaagagaaggttgatacaccaaatttgagttgtgaaacactaggaggtagtgcaaaacggaaagttgaaagtttgtatgatacagctagtggttcgagaaatgctgacacag

SEQ ID NO: 190322 - DNA, 492 bp, Arabidopsis thaliana landsberg
gtggcaagatcagaggtgtttaagaagatattggaatcagacgagttcaaggcttcatctaaacagatggagacagtcaccctctcggagatgaaacacgaagaattggaggctttcgtggagttcatctatagggttgatggctccatttgttctgctagtctcaagaaacatgctcggtcactctttcatgcagccgacaaatatgagattccgcatctaagagacctatgcagaaacgagcttatatcatctttgaattcgtcgaatgctcttagcatccttgagctcgcccaaatcccttttgacaaagccctcaatgatcccgccttcactactatcataaccaatataagtacgattgctagtggtgatgagttcaagctgtttgtcgccaatcacccaaatcttgccgtggatataatgaaggcttctataactagattaagtactagcagaaaaatctgtggttactgtaatcgctactactaa

SEQ ID NO: 190323 - DNA, 790 bp, Arabidopsis thaliana landsberg
atgtgattgatcctcacgctccctcgaaccgcgtgactctctctagctcgttgaggtttgggcctttgggtccattttccgaggtttcttttgtaagtttttacctaccacgcaaacattctccacacatttcgatagatttcatcaatctagtaaacaaaagacggcaaacaaaactatttgcagatttaaatatttggtcattcgattatcgatggtggtttgatttttactttttactttagatttcgatagttttgatcagttttggatacatttggaatacaaaacattaggatacgagtatcatttctaactttttgattatttgtagaacactttacattaggataaacaaattatgacagtttggaacaaaacatagtgctttatgtagaactctttagacgaacgagaacaaagatattcaaaggccaaatactcttttcatgaaaaattaatgattggaagaataaaatcaataatcaagagttaggcaacacataaacttatttacattgcttagccctgaaattctcatgatcaagaagcctaaccatgagcttctcaagcctcttccaactaaccgttggtttaacaacatccgaagtcttcaactccaatccagtatcggtttgacctagtagctcaatgtcaatcttatcgagtacaagatcatcctctcgaaactcccttgcgaatggagcccgctttggaccatatcgcggaaattctcaaccgttacattcagggtgcgctgttgaagcggatcccattttgtgtaatgcag

SEQ ID NO: 190324 - DNA, 452 bp, Arabidopsis thaliana landsberg
tggaacaatcctgcacaagaagtgcctagttggatcagttactcagcttccattgaccagtgcatttatggtatgtatagtatgaagctagccctcaagaaccttagcaactaactagtttattttcatcgaatctcataaccaccaaacccttttgttctttccaattaggtattgccattaccaaacataccattcttctgggtcttattccgcacatattctcactggcgggctcttcaggtctgtcataacttctcgatacatacttccattatctagaggtttatataaacccgaaatcatctttattgacacttcagggaagtgagaagctgcttaagctcatctcaaacgaggcaaatcctgataaaccagactcaactgatgatgcagatgaaagcaagaacaacaacaccaagccggaacaaaaatctcaatctcccacttgt

SEQ ID NO: 190325 - DNA, 33 bp, Arabidopsis thaliana landsberg
gttagtgactatgaaactggagatgagaaatga

SEQ ID NO: 190326 - DNA, 93 bp, Arabidopsis thaliana landsberg
aaaccttctctctcatcgaagaattggaacccacagaaaccaaatacacaaaatatctggatattttaatagaatacggaaatacatgtgaca

SEQ ID NO: 190327 - DNA, 90 bp, Arabidopsis thaliana landsberg
atgttgtaccggctgggtctaagcgacgatgttgaagaatatctaaagaagaagaggaatagctttgaaagcatcgaaagagaacttacg

SEQ ID NO: 190328 - DNA, 351 bp, Arabidopsis thaliana landsberg
atggcgagcacggggcggtcgatgctgctgtcactgctcctcttcgcagtgacgctgtcgctgctggagatgtacagggccaagttcgcctcgtcggagctcatgaccattgccggtggattcgtctgctccctcctattcctgctactcctcacctttattggaaactatcaagaagctagtggagatagaactgggtggggtgcagttgttgtagcacaacttgtagctcttattgtagccggcactgtccaccgtgtctgtatcacaacatgcttcctgttttccgctggactcctttacgaggttgacaagctctctggcatgatccttgcgaggagtgagtctaag

SEQ ID NO: 190329 - DNA, 127 bp, Arabidopsis thaliana landsberg
atggaccaatattgtaccatcgccgatgagaccttttgtattatcataaaagaagaccgagcccgattgttctcatgccacactaaatcagctgatgaacttgagagacaatccataccgaatgcgg

SEQ ID NO: 190330 - DNA, 118 bp, Arabidopsis thaliana landsberg
tattccaataatgcaacataacaaccagtctgacagtataccggattataccgaatttgtgttagatcggattggtgggaccataacaacccataactcgcacgtgctggccagctaa

SEQ ID NO: 190331 - DNA, 182 bp, Arabidopsis thaliana landsberg
gtggaaaagagcccggcctggttcttcggctatgtggcgacgactgtcgacgaactgctgaagtaccgcgtgatcgccgtgaacctcgcccggcagtacgcggccgagaccgatccggcacggcggacgcagatcgagccccagctgcggcgagtccaagccgacgcggcccgcgccgaacc

SEQ ID NO: 190332 - DNA, 959 bp, Arabidopsis thaliana landsberg
  unsure (1)..(959): unsure at all n locations
atcagctttcaatacagttttcagagatatcactaatttgccactcagttttgatgttaataatcaaccatcttcttctacacaaccatttgattcagcaacttctatacaacattcacatggtactgtcattactatacaatatccaactttcagattctatccgctttagaagattttaaaaatggttgtcacagttattaagaatgtgtttgaactactcgcaggttcagttgaaagatcaggacttaactcgattggcagagaaaattttcatcggcataagacagcttctactagaccatttagtgatctcaccaagccaaatcttcaaccatcacctcaaaatttatatgcaatgatgacaccagctactgcatatacattgaacacatattagttgntatatatgtatcttttagttctccaaactactctgtctattatgtaatttttaacttttaaatatttgaatcattaatctaaatctgattttatgtatgacaaggacaagacctgagtaatccatattcatgtataagcatccaaactcaaacaccagtaatgtcaacagagtattctcatgtacgaaatttacaagcagaatttgagaaagcatcaacatttgctaccaatccgagtaagaatatataggtttcttttcatttatattaaagtatcattttatataaggtgtgttaatcttatagatattatatttgatcataggagcagaagctaaaatcaattcagatactagcagtgatgatgaaaacatggccaatatgatgtttgatggtgcagtatatgaaagtgatactgatgtggatcaaaattactctcttagtagcactgacgatgaaagtgaagacccaaccacaatgcaaacagaatttgaatcaatggctaatgtcttctacttcatgagtagatacttgatacattcagctcacagatag

SEQ ID NO: 190333 - DNA, 200 bp, Arabidopsis thaliana landsberg
atgacaacgacatttgctcaagaagatggtggaaaggacctggatgtaaagactttgtaagaatgtcagcatgctgattctcagtcgggaacatgtaaggctttgagatttccagctttaatttgatcccttcccgtgtgacaatcgatctcaatgtgcttagtactctcgtggaagaccggattcatcgagatgtgtag

SEQ ID NO: 190334 - DNA, 226 bp, Arabidopsis thaliana landsberg
atggaagtagatcttttaaaagcggtgagtactcatgtgaagctcattctaaaatcgtgacatgttaatggacttcacaagctatgcttatatctccagtattcaaggtcactacgttctttatcaggaactcaaaaccaaaaagaatggacaaactaaactcgatgacaatgtattggcggaatgttgttatgtggtggaggaatcatttgacgcttcttataaa

SEQ ID NO: 190335 - DNA, 29 bp, Arabidopsis thaliana landsberg
gccacttggcatttcctcccgtcatgtga

SEQ ID NO: 190336 - DNA, 459 bp, Arabidopsis thaliana landsberg
atggtgcctagactcgaattcaaagaagatgacagcgagagcgtggggtggtttattgaaaagtcattgcaactccataaggcaccgaaactagatagtttggttgtggaactcggtccacattgtcctgttgacgtagatgtcggaaagtgggttgagaacgtagttaatagaggtgtgaaagagttagatttcaatctcctctggaccgcagaacccacaggatttcctaagtgcctttacacatgcaacacgctcgttgatttaagtctatccaacaagattctagtgaacgtttcttcccctgttcgcctaccatctctcttaactctgagtcttcgctttgtggtgtacaaagacgaagaatctcttgttagccttttatcaagctcccctgttctcaactgcctgaaggtggatggacataaggatgacaacttgacaaaatttaccgtgaaa

SEQ ID NO: 190337 - DNA, 626 bp, Arabidopsis thaliana landsberg
cttattaaataacatcataagtctattgtgtgaacatcgagagctcagtggaattcgacccttaagtgccaatgacgatctcttatttgagggagtaagcttaaggcatttagagctatatcagaagcctttacccgatggtccgtaagatcatctaggaagaatatagttaacttttcgcgtaagtatagaatcggctgagtcatagcgaaattttgtttgtaaatatgctaaggcttagaacttgttgaataatatataaagactaagactaaaattcgatacttataacttgtatgaaccttttgaatgtataataagttaagtattttcttgcttttgtgtggccgaccattatatgagtgagaaataacttctataagcatcagatgagttcgaaaccccatcggaagtgcctcaccaacgttcggccaaatgaagaatcagagaaaagaaattgaacttagttgggctcaagatttgtctagatcgggcatacttcagggaaataagcaaaagaggggaagttcggttcgaggagcaggcaattgtataattagaacaaggaaattcaaagcccttgtaaaaatgttgggagaattcatggaagttggaaatgaccgaag

SEQ ID NO: 190338 - DNA, 475 bp, Arabidopsis thaliana landsberg
atggcggaagaactcgccgcccgcgcggatcggccgcaggaaggcctgtgggcccggattctggacgtcctgtttggcgccagccgcccggagcctgcccaggcataagccggcaggcggtccatgcgatcgctgtccggacggccccgcctgtgagcggggctttttcgtatcggcggaaaaccggcagcgacggttggcccgccatcgcaggcgggcgcggcaggcgcgtcccgcatccccgggacatcaaccgcccacggcggcaagcaagcccagataacagcccagttctccgagctgctgggccgccccgaggccgtctccggtatagcctcccaggcgccgcgccaggatcctggccatccacgccgctcccagcgcgccgaccgccaccgcacagacgacgctggccggcggcagcaagcccgtcacacccagcatcagcgcaggcagcccaacgcataccgccgcg

SEQ ID NO: 190339 - DNA, 422 bp, Arabidopsis thaliana landsberg
gcatccacgatgccattgcacgcaagttgaatgccgcacacgagacgcgggaatccgttgccgagggcatcatcaacaacgtgcgcaagacagtcatccgcgaaaaacttaccgatccgcggttttatgcgcagatgtccaagctgttggacgacctcatcaagcagtcacgcaaggatgcagccgagtacgagcgatttttgcgtgatgccgaggcaatggcacaaaagcttgctgctcatgagtcgcccgatggcagcttgccgcctgaattgcatggcaagcgcgaagcctccgtcatttatcgcaacctccccgaaatactggaacgaaccgggccggcgacggcagaggaggccggaccgctggatggtgacaggctggctctggccatccagatcgaccgtgccatgcacgaggac

SEQ ID NO: 190340 - DNA, 13 bp, Arabidopsis thaliana landsberg
atgaaagatgtat

SEQ ID NO: 190341 - DNA, 52 bp, Arabidopsis thaliana landsberg
atgggcacaacttatgatgtggttatggccatgataaaatcatcctatgcag

SEQ ID NO: 190342 - DNA, 1012 bp, Arabidopsis thaliana landsberg
tcaaggttacttgcagcaaggacacaggccatccagggtatcattgataatttgcagatatccacacttgaatatcgaaatgagagtgaccatgatgtttgcccttatgtccacgacagaaaattagaagtcatcgaggttcaagctggtttctgcattttccatttgtgttcctttccaaattgatgtctaataattttagtatctttctggcagagcaggttcccttgggtcaagatgcagatgatgtatcgaaacgcctgtttcatgttatacgtccatatgcagtcaggcttaaaaactttggggttaatctaaatagagatatacaaactgtatgtgcctcaatgcttatatcttcaccaatagcgtcaatgctcacattttcttatctatgcaaacatcaactcatgtttgacagttaagtccacacgaagtacttatggcaagggataagtttcgtcaagcacctctaccaggccttccccatgtaaatcacggagatgtagaatcttgctttgcagctcttatcactctttatcatattcgtaagctcctttctagtcatggaataagaccagcgtatgagatgctagaagagaaattgaaagaagggtatgctcttactttcttctgttgaactgatttttgggatggcttcagtggttttaggtataatagcttttgatatcaagagcatcgcctaaaactatcaccctttgcaggccatttgctaggttgatgagtaagaatgaagatattaggatgacgaagcttttgatgcagcaaaggttgtcacatggagcaccaagcccaaaattgtcgaagatgttagaaatactagttgatcatttcagtatgttttctttttgaattttgatctggagttgatgttagtactcagctggttttacaactgaacattgatatgatcttattctatgactgcagaagtgaaagatccaataacatcacgggtcattattttctcaaatttcagaggaagaaaaag

SEQ ID NO: 190343 - DNA, 208 bp, Arabidopsis thaliana landsberg
aaattgagtgcggctacatcgggaaacaagaaagggaaaggtaagagagaggtgaatcggcgtgctcctgtggagaaacctgtgttcatgagcgaagaaggagcggccaaggcagaggagcagagacaaaacgaaaacgcgtttcttcttacttggcttgggcttggtatcgtcatcctcatcgaaggcattattctcgctgcttcag

SEQ ID NO: 190344 - DNA, 744 bp, Arabidopsis thaliana landsberg
atgacgtctgagatggatgatccagagaaagcagcggttacaatcacacgtctcatcgaacagcttcatgccaagaaatcatcggcgcaagagaaagagcttagcaccgctcggcttcttggtttagccaagggtaaaaaggaatgtagaaagatcattagccagaatgtgaacgccatgcctgcctttatatcacttcttaggagtggaaccctcttggcaaaactcaattccgcttcagtcctaaccgttctatgcaaagacaaaaacgttcgttctaagatactgataggcggatgtatcccaccgctgctatcacttttgaagtctgactctgtggatgcaaaaagagttgtagccgaggccatatatgaagtttccttgtgtggaatggatggtgataatgtaggtactaaaatatttgtcacggaaggcgtggtaccgagtttgtgggatcaattaaagacggggaaaaaacaggacaagacagtggaaggacatttggttggagctttgagaaatctttgcggtgataaagacgggttttgggcattaacacttgaagatggcggagtagatatcatcttaaagcttctccagtctagtaacccggtatctcaatcaaacgcagcttctctcttagctcgtcttatcaggatttttaccagcagtatctcaaaagttgaagagtcaggtgctgtgcaagttctggttcagcttctaggtgaagaaaatagtgttttc

SEQ ID NO: 190345 - DNA, 77 bp, Arabidopsis thaliana landsberg
tgaaatcaccttcaaatcaaatttcaaatcaaaaagaagaagaagaagaaagtgataatccaaagctgacactttga

SEQ ID NO: 190346 - DNA, 120 bp, Arabidopsis thaliana landsberg
atgaaagcttcgattcagaagttaaggagattaacatcgcattcacataaggctgatgtgaagcagaaagaagatgtcatggctacaacacaaatcgacgaactcgatcgagccgggaag

SEQ ID NO: 190347 - DNA, 493 bp, Arabidopsis thaliana landsberg
atggcaatccccacccgttggctctttgaaccagaccaggtaaggtaacatcttctgtctaacttatcttacatcaaactttcactcgtattcgctctgttgcttatgtttagaccctgaagccgcttcaaactttgcatcagctgtgtaaacgatggccgtaaatgcggttccctgcataacaatcacaagcttaacctcacctaaaaatgtatgatgaccgattacctatttcaatactgatggtttacactacaaagctaatcataaggatacatgtatcatacagctctaataaggagtagtgaattactttttgctaaattttaaggatttgagttatgaaaatgaacttacgtttgccaacattcacggattatctgtgccacagttagatcgatatcatctgggatttcaaggcgtcgattctggaatcccacagctccaacgacttgcatcgggttcaaacctttccaggggacgcgtgaagtag

SEQ ID NO: 190348 - DNA, 132 bp, Arabidopsis thaliana landsberg
atgggcatatatgggaacaacatccacaaggtgtcccaacgatcaagtggctctgataccaaaggaaggctcgattctgtcaagatagctagaaaagcattagctcgagcagaagtgatggattatgtcgag

SEQ ID NO: 190349 - DNA, 84 bp, Arabidopsis thaliana landsberg
aacttggaagcagaaaagcaggttagatttttccagggttctgtggcagctgctttttctgaaagggataagtcagtaatggag

SEQ ID NO: 190350 - DNA, 552 bp, Arabidopsis thaliana landsberg
atgcgtctatccattgtcaaaccagaagagggaatcagttttcacaagcttgtggtctttaagtcttccaaaaggttcttcaccaaaaggtgagatagtttgcaacaaagttcaaagagagatttagtcaaagtaacggtaattttcagatctgaaaccgttacactttccaaccaccacagttcatcattacaatatgagaaggttcaagacatggcaaaaacaaaagaggaaacttatcaaaaaggttcagacaagaaggtacccgactcttgaagtaaatgttgaggtaagtaaaatactacttcttaaatggacctttgacgagagaaagcccttgtcttcttgtaataactactcaatagtttaccagatctggtggaagagcattcaaagcaggaggaaaacaatacagaaaccataacacaagcacgcccaccaaacttcaagaaaggagcactaggccttcttcacgtacggaggggcgtctcccacgccggactccttcgtgaaagctcgccggaaaagccttcaagactgagttttccttag

SEQ ID NO: 190351 - DNA, 229 bp, Arabidopsis thaliana landsberg
atgcggttcttgcggaccaaaagcagaagcagaagccgttctcgttcaagaagacctatctttttccgtcggaaaaatgcttctgctgcggcggagacacaagaaccaacttcacctaaagtcacttgcatgggtcaagtaaggataaaccgatcaaagaaacccaaacccgaaactgctcgagtctccggaggtgtaacagaaaggcgacgcagagccgtcggtgcgg

SEQ ID NO: 190352 - DNA, 87 bp, Arabidopsis thaliana landsberg
ttagccgtatattagtcgctaaacagcgactacatgaacgacccgccgtagtagtcgcgaacaagcgactattttacgactattccg

SEQ ID NO: 190353 - DNA, 703 bp, Arabidopsis thaliana landsberg
atggcgaggtacatcagaatctgagatgctcccaagaactgagattaataacaaattagcataaggcaacagtacaaccacaaagctagtgaagcagattaacaagcatcaaacactaaattctaaacagcgaattgattaagcatggttcgcaattaccagtaggagagctataaggtttctgactcaaatcggaactttgatctggagtcggaatcgttgaaagggaggctagaagtgatctctctctcttggatacgtaccggcctggaaccggaaccggaaccggaaccggtattgaaaacgacgagctggtttgagattccgaataggaaccgtatgaagtatacggtctacgcggtggtatgtattgtcgctcctccgggactggatatggacgcttagaaggaattgacggtgctgcggcgattttagatgttaatcgctcattggtcactggctcaggttcgtcgtcggagtcattggcatacgaattgcagatgagatccatcggaaagttgaagtcgagacacccgaagcagtgaccggtgatcggaaaaaaaatgaattggccttcgatgagatagagaaggctaaatctttagtgggctttaattgggccagaagaatgctccaggcccacgtgtatgcatttatcaattggaattgttgtttcgggatcattctcactaacaatctctaa

SEQ ID NO: 190354 - DNA, 602 bp, Arabidopsis thaliana landsberg
agtcacaacagtgcttgaatgagctgacgacgatccatgagcgcgtgtccgaagggaaactcatggtgatccccatcttctacaaagtaaacatcgaagaagttaacaatttggagggacgatttggtaaatgttttgatgaaatggtgaggacacaagggagacagaatcatcagttgacccatcacatcgttggatgtctaaggtctattgctagaaagcctagcttcacgtcaggatactataggtaaaataaaagtattccaactcaaaactaattaatgcagtcaagataccatctcacttccaatgtggaatattcctaactagctctaattttcattggcagcaacgatagtgatctcgtggaggcgatcattcagggtattaagaaaaaaataccttatatatcggcaaaacaaacgattggagaagaagtttcggcagagcttctttctgcttcggttgttgcggctttgtgtttttactttatccctatttctgtgttcccggatttgggtttcttcattagcccacgttggtatctagctgttatgttgttgtttgttgtccgacatagtctccgatctattcagaggtga

SEQ ID NO: 190355 - DNA, 143 bp, Arabidopsis thaliana landsberg
cccattacttcagtggtcgacccgacattacgccacgagtagtcacgcacgcacgactccgttcacgtgacattcacgttgatatttccccctctactctcttctgcttggttgatctaaaaaacatgaagagaccaacctaa

SEQ ID NO: 190356 - DNA, 799 bp, Arabidopsis thaliana landsberg
atgaaagagtccgaccagctcgcgacttctttcatcacgcccttcggcatgtactgctatgtcaccatgccgttcggtttgaggaatgcgggcgcgacgtaccagcggtgcatgaaccatgtgttcggcgaacacatcggtcgcacagtcgaggcctacgtcgatgacatcgtggtcaagacgaggaaggcttccgacctcctctccgaccttgaagtgacattccgatgtctcaaggcgaaaggagtcaagctcaatcctgagaagtgtgtctttggggtacccggggcatgctcctggggttcatcgtctccgaacgaggcatcgaagccaacccggagaagatcgcagccatcaccagcatggggcccatcaaggacttaaaaggcgtacagagggtcatgggatgcctcgcggccctgagcccgttcatctcacgcctcggcgaaagaggtctacctctgtaccgcctcttaaggaaggccgagtgtttcgcttggacccctgaggccgaggaagccctcgcaacctgaaggcgctccttacgaaggcgcctgtcttggtgcccccgacggatggagaagccctcttggtctacgtcgccgcgaccacgcaggtggttagcgccgcgattgtggtcgagaggcaagaggaagggcatgcattgcccgttcagaggccggtctacttcgtcagcgaagtgctggtccgaaacaaaaatcggctacccccagttccaaaagcttctgaatcctgtgatcctgccaagccggaatttgcgaaacaatttcgagtctaa

SEQ ID NO: 190357 - DNA, 55 bp, Arabidopsis thaliana landsberg
atgaaatgtttcgtcgtcgacaatcccacattttacggtgaatctatttcccaag

SEQ ID NO: 190358 - DNA, 541 bp, Arabidopsis thaliana landsberg
gagtctcgggagaaagagctggccgcggctcggcagggaaagcagcgggaaggttcagctcgctctgatgttccaccgggatgcaacactttgattgttcatcctggttctgccaacgacccccaccataggcgatcctcgggggccattgaggagatccgtcctgacgcaagggtcgtgaagtccccataacctgcgacgcggagtcttgtgcggatcttttctgcaagatcagctacgggccgactccttttcccgaggtcaaggaattaaaggagatgaaggcctttaccgacgttgcgaggaagacgttcgatgtatgtaatgtgtccttttttttttttttttttttttggccgagatgattccttgactttttccctcctttctcgttttgttaggctgttggctcgatgaaccgtctggcttatctgtacgagcgtcgtttccgcaacatggaagtactgggctcgcaggaccttcgtggggagctgagtgctgagaagaagaagaacgacgagctcctcaagaagttggagtc

SEQ ID NO: 190359 - DNA, 137 bp, Arabidopsis thaliana landsberg
aacccggtgacgggttgacatatgcaagggttaagtgctacatatgtcgtgtgattgcagatcctcaactgagtataattgattcggatcgccgtaacttcgcggacatgaagacttggtcactgccctacacgtag

SEQ ID NO: 190360 - DNA, 253 bp, Arabidopsis thaliana landsberg
atgtgttataacgctgctcataaaaagaaaccaactttgaatagtttagatgaagttgatcctcagcttcttgagtatttcgataagttaggtgttcccttaacagagcagaaacgtttggctaatgttgcggttgatgcggttatcgatagtgtttcgattgctactactcataggaagacttcagagaagtctggtgttatcttctgttcgatatctgaagctattagggagtatccggatttgattaaaa

SEQ ID NO: 190361 - DNA, 531 bp, Arabidopsis thaliana landsberg
  unsure (1)..(531): unsure at all n locations
atgtatctccgaaaaatattccggcagaaagggatctgcccggcgcgatactttctgcacgcgatggtcctggtccagggaatagatattctcgaagcagacggtatgcctgctgggcagcgaaaccacttctatatccagttgctgcagaccctgcacatacgatttgtctgcatnnnnnnnnnnnnnnnnnnnnnnnnnnnncaggcccatattgcgcacggcatgtgaaaaatagtacgcagtcccgcccggcatatgcacttcggagccgggagtaacgatcctgtctgatgtaatatgtcctacgcagcagatatcaaacatagctacctgttaaggtaactaaagtaagtaatctctgttgatgaactctttccatcaaaacacaggcacgccctttgcctcgcaagcggtttcgatagccgccacgatggattttccaaaacctgtgggataatattcttcattaacgggaaaatcgaacaggtcgcgccgcaggttggatgccacgatgaatggctcgggcag

SEQ ID NO: 190362 - DNA, 171 bp, Arabidopsis thaliana landsberg
ggccttatcatatacaatgttttagttattacgataaagttatatacgcgtatgaccactcctccaaactattccctacaaatctacacgaagagacaagagaatgaaaatgaagtagcaaaaagtaggacaagaggatggacatctatatttctgagcacatattgttga

SEQ ID NO: 190363 - DNA, 1221 bp, Arabidopsis thaliana landsberg
cgtgggcatcaccttttgaatttgggtttctgcaaaagccaagaccacctctcagtattctcgataacattgtcaacgggtttttcgctgttgatatagtcttgacattctttgttgccttcttggacaaggtaacttatcttcttgtcgatgatccaaagagaatagcttggagatatgcgtcgacttggctgattttcgacgtggtttccacatttccttacgaaatttttgggagcttgcttcatgagagtattcagggatatggtattttcagtatgctacgtttatggcgtcttcgtagggtcagtaattgttttgccaggtgagttctttggccggtttatcgttccagccaaaacgtttaaattccagctgagtataatattgatgtcttcttttcaggttagagaaagacaggaaatacagttacttttgggttcgctgctcgaagcttctccttgtaagtagctattgtctacttgttttttacactctttttggtttcaaatgaacagttttttagctgtgaatttacagtatttgatttggtaatgcaggttactctttttgtgattcattgtggtgcttgtttcctctattccattgctgcacattatccagatccatccaagacgtttatggcattaaccgatgaaaattggaaagagtctcctattgcagtgcggtataacacggcaatgtattggtccataactactttctccacaactggttatggtgatatacatggtgttaactcaagagagatgactttcattcttttctacatggtttttaatcttggactgtcagcatatataattggtaatatgaccaacttggtggttcatgtgaccggccgcaccagaaaatttgtaagttctatgtaccggtactgttaactgcacttctctgaaaattagtctggtctcagtgaagtttcatgagtcttaagcatttgcattatttcagagagataccatccaagccgcatcagggtttggtcagaggaacaatctgccagtgcggttacaagatcagatggttgctcatttgtgtttgaggtacagaactgattcagaaggcttacagcagcaagaaataatcgattctcttcccaaagctattcggtccagcatatcacattatctgttctatgaagttgttgacaaaatttacttgttccatggaatatccaatgatcttcttttccagttg

SEQ ID NO: 190364 - DNA, 114 bp, Arabidopsis thaliana landsberg
atattgcctccaacaaaggataaagaagaaccggatatgctgggatcacgtttctgcatacgatatgacacgtttacccctagaaaatgtgtgttaggtgaagagttcggaagg

SEQ ID NO: 190365 - DNA, 120 bp, Arabidopsis thaliana landsberg
acagcatcttccaacaacccacaccacacaacattcttcattctctccgaaaacaacaaccaaatgggagaagcggcggagcaagcacgtggcttccacgtgaccaccaccaggaagcaa

SEQ ID NO: 190366 - DNA, 494 bp, Arabidopsis thaliana landsberg
tcaaaagtttgtaaaccactttttggtgaattcgtcgacagtgatcgcgaaattaagctatcgattggactgcagacatgtgtgcgtgagttcttctctgaccacccttgagccggagaaattggagtgattacaagaaatcggagttgaacaaaaagcaacacagacttcacggagagtttctggctttctgctacaacttgtcgtcttgtcagagttgactaagaaggaggggggagatcggagatggaatctggcgttgtttcgaagccgcataggctcaagtatgacgtattcctcagtttccgtggcgcagacacgcgcgataacttcggagaccatctctataaagcgctcaaggataaagttcgggtcttccgcgacaacgaaggtatggaacgcggagatgagatcagttcaagtcttaaggcaggcatggaggactctgcggcctctgtcatcgtcatatcgcgtaactactctggctctcgctg

SEQ ID NO: 190367 - DNA, 144 bp, Arabidopsis thaliana landsberg
gtttatgcatccgggggttcaagctggattattgacagcggatgcacaaaccatatgacgggggagaagaagatgttcacctcctacgtcaaaaataaggattcccaagattcaattatattcggcgatgggaatcaaggcaag

SEQ ID NO: 190368 - DNA, 255 bp, Arabidopsis thaliana landsberg
atgggccttagaatccatgccagaactaaactcaaggcccaaaaagcaattataattaccctcttcagaatctgccgccaaggtaatcttcttcttacccttatggtttttcttattccttcactctataataatggttttcttacacatgtttctcaattaatggtttcttcacgagtttgtaagaaaaaatacttagtggtgaatttctgatttgatctctttgtatttttagggactaaaacggaaacgtag

SEQ ID NO: 190369 - DNA, 765 bp, Arabidopsis thaliana landsberg
gagaagtcttctgttgttcacaaaaagcatattgtggatcgtaagaagagactacgggtgaagtctgaccctcccaaatccaagcatagttattcaactcgttttaatcaagttgtaaggctatctgatgatgagaagtctaggttgatcgttgatctacaaaacaaggtggaagagctatcaaatcgtgtaatgaagcttgaaaagaaaagaaaaactgtcaccttcaagcggtccagaaatttggctttcggttttgttccatcatcttctagatcaaagcgcaagaagagaatggaggtgcttatccaatctgaaacccctgaggtattcaagatttcaaaatatttgaacattatcatattcttgtgcatttttaaagtttatcgcatagtaagtcttttaattttctcatagacttcatctcagtcacacacgctgtgtgagcatgtatttggacagcctgaagttggacagcaagtcccaaacgataatttagataaagctcaagactccagtgatagtaccccattgacaaacacggttagtgtaatagttaacttcaactatttccaaacttggtagaattaacgacgtcaacacatcttattgcaggagattactgatgaccccatggatgtgtttgttaccccactacaatcagagcactctaatcaggctgatgcaaatgaaggcaaccctatttatgacacagatgtcaaagatcaaaatgccaatgaggaagatgttgatagccaaatgcag

SEQ ID NO: 190370 - DNA, 116 bp, Arabidopsis thaliana landsberg
atgagcgtacagatcgaaaagaagtcgacggtccatcgtgttgtgggccgtgtcgtcagcgacaagggcgacaagaccgtggctgcgctcgcggagcgctcaaagcatcatgacct

SEQ ID NO: 190371 - DNA, 270 bp, Arabidopsis thaliana landsberg
atggccgtcaccttctacagcaagatcaacatgcgtcccggatccgtgttccgctttgggacgatctcgtctgtagcggatgaagagggaattttgcaccgtatcgcggatccgccagaaaagaagtctcctccaacaaaccccgaaaatgccggaaaagcgcaacttcctgctcttcggagaaagatcatctccggaaaggctggagctggaaactcgctgatccggaggactccactgtctacttccccgacgaaagagtggacacgg

SEQ ID NO: 190372 - DNA, 287 bp, Arabidopsis thaliana landsberg
aaaagttggattgtggagaagaagctgcgaagatgaaggaggaaagagaagctcagatgaaaggggtaaaattgtcaaattccaaagcccaaagtcccctttttcaaagcacactctcaatgtgcctaaaatcagagtttttaataaaattatttctattttaacaataagcccttaaaataattgatttggcaatctatgtcaccaaagtgcacttatcttttcgatcaaacgttgaagagaacttcaaagctaagcatgtttgggatgcagcaaattcaggatga

SEQ ID NO: 190373 - DNA, 146 bp, Arabidopsis thaliana landsberg
accattgtattcacggtttattgttttctttgaatttcagagagaaaatttcagggcaacagcaacatcaatgggtgtccagactcaactgggtgtgctctcacaggtcattaagacagtggatcctcgtctccatcaacatctag

SEQ ID NO: 190374 - DNA, 131 bp, Arabidopsis thaliana landsberg
ggtctattgtctccatcatcgcatcccgaatctcgcccacagtacacagccagaacaacgaacaccgcctagaaagatctacgaatcggcctctacgacaccgagtcgatggccagtcagaaatccgccag

SEQ ID NO: 190375 - DNA, 259 bp, Arabidopsis thaliana landsberg
aagcgcaccgctaccatcgctgtcgggagatcagcagcgtcgtcggttaccaggagtgcactcgctctgcgagtaggtggggactgccgagctgggtgccgtcgctgtcgctatacgtcggcatcgtggcgcatcgcttcgcccatcggatctacgagctcgggacggtcagtcacttcggaatgcagtacagctatcgcgtgatcggcgtgctccagggtgaccgggcgttcacgcccaacgccctcgcgctgcgcat

SEQ ID NO: 190376 - DNA, 1501 bp, Arabidopsis thaliana landsberg
  unsure (1)..(1501): unsure at all n locations
atgtcgtcggtccgcgtgcaagatatgcagcggctgggttactttggcgacggagtcgctcgtgtccaggggacggaggaagtccccgagccggaaggcgagttggttgtgttcgaggcattcttcgccgctggtctccgcctgcctgcgcaccgatttgttggagaagtcctgcgcagatttaatgttcagatccatcagctgactccgaatgccatggtggcgctggcgaagtatgtctgggcgacgacttcgtacggcgggcagccgtctgttgaagtttttgcgaagaattattgtttgcattggcagaagaggatggttggggacggagttgcccagttcgggtcatgcacattcacgccgaagaccggcaagaccacaatgccagtagtggagttggttccgtgcgcccgcaacaagtggggcaattggaatgaattttggttttacgttgcggagggtactgtcgaaggccataaaggtctccctgtgtctgagatgtgctctcattattattctggtatccgccttttgaagtggcagaagaggatgcagacgaaggggccctccgatgcgccgccagccagagcagcgggcgtgatttagttgaagagttcgtggcatacggggtctgcccttggcgcacggctgggcgttgggcgaagtgtgccctcgccagatgccttttcacggtggaagggtggtgcgaagtcccgccttcgcgctgaatctgcaaagctgcgatccggccgcctttgtgcgtgaggcggaggatggggcggtgcggctcattggtcgttacgtgccgaggacagaggngcagcgcagctgggaaatccgcgggtcgaatgaccgtctgaacagggtttttgaattgaatcaattgccatatgacggctatcctggtcaagacgaagtggaccgccgtgggaagaagccggtggtggagactggagacgaccactgcgccgcggccgcctcatcctctaaaaagagaaaaataggtactgctatgggacgtcttggggtttctgatggttttgctagagaggggatgaggacgtgcgcggccccggggggaaggatgtcttcgcccgagctccgggagtcttcggctcggatgctgagggttaccgggggttgttggcctaggaatgttcctatcccccgcgcggctggcgaggacttttttacatctcgcatggttcgtgaatggagagtttttccttaggggcggaatattgctgttgttgtgtcggcagtgatggacaaggatcgccagggagctgcacaaaagcgccaggcggttgtcacgctcattgaagccaggccgaagaggcagcggggggctgcgaaggcttcggcccccggcggaggcaagccgccgctggcggtgaagtcgggcgtccctgcatctagcaaggcgccggaggcaacggcaggcgccggaggctccaaatcgacgaaggttgtgccgccgtccagcaaagtgccggag

SEQ ID NO: 190377 - DNA, 185 bp, Arabidopsis thaliana landsberg
atgcattcatgattgttgttctcattcatgtgttcctacatgtcaatggttccatgaacaactttgttgtcacccatcatggactaagtgtggtgggagtcgttatggttgcacttcttcactcaggggtctcgagctccgagtgccacaaagtgtcactaccacataaaaatgaccgctcatga

SEQ ID NO: 190378 - DNA, 250 bp, Arabidopsis thaliana landsberg
atggcgaccatccgttttaaagcactggaagacctttaccacagggctccaaaattcggaaacccaccttctgacaaggtgagtgattattatggcgagagcgtttttagcgaattcgctatgcgtcagcaccttacccccgaagtgtattcccgtatcaaggagtgtatcaacgaaggggtaaaactcgaccgcgatacggccgaactgatcgcccaggggatgaaggaatgggccatggccaaaggct

SEQ ID NO: 190379 - DNA, 97 bp, Arabidopsis thaliana landsberg
atggtgccattggatctgatgcaccgccacgctggagaaatcagggctttggatcgtatggagatcgatatgcagcgtatgaatggaatgattgggc

SEQ ID NO: 190380 - DNA, 34 bp, Arabidopsis thaliana landsberg
ggatcaaattgatgtcaacaagatttcaatctga

SEQ ID NO: 190381 - DNA, 914 bp, Arabidopsis thaliana landsberg
atgtattccaatctgcatcttcatcaaaaagcaatcaagaaggtaatgccaggaaaaagattcaattattggtagccactgaaaaagcaacgtgtttacgaattactcatcatacaaacaaattcagattcaaacgattgaatttgggataaaacaaagaggctgatgacaaaacaggagtttctaaggttaccagattgttccatatgtgtggccccaaagtagctaacacaccatagcttagcctattaacaaagactcatgctgcattcaataccttcacatgattcttttttctaaaagaacaaatttcaatcattcaagatatgtcattatcaactctcacaaaactttcatcaattagaatttcacaacaggaaaaaaagttagagatcgtatcttaacctgtttgtaatattcttctccacctttcaacgcagtgagaaccatgcatcttctgcctgttcacaacagtatatagaatgtatctatccaagaaaactccacaaacaaacgaagagtcttagaaagtcaaagctggtaatttgtatcaataatacagttaagtgttcgaaaatgactgaaaagttttagattattgaggcataatgaattgggagcagaaacaacaaagagttttagctggcagcttgctaggagaggaccgcactcacgtagatgtgattctcaagtcactttccacattgtaatctcaaatccaccatgcacgtgcagaagcaataaacaggtaggtgataatgaaataagggtcgtccaatctaattctatgacccacaaaatgtgagagaatgtgactcagtaaatgcacaacacattggaccttgtctaccaatttcaaattccaggaagaccgaagaaacaaacgagtaaagacgaagaaacaaacgagttaa

SEQ ID NO: 190382 - DNA, 432 bp, Arabidopsis thaliana landsberg
atggagcatattcaagaacttcaatccgctttacgtagacgcagaggaaatctctcttccgttcagtccgagatccgaagttacattagctttcacaagaaatccaagaccgaagcagcgagacaagttaaatcccttgcaaggagacaaacaaagaaaaaagcttgggttatcaaacaatccggtggtcttgatgaacattcttctatggtctccaatattctaaggcaatcaaacgcatcgacgatctctattttacagtcactcttgcagtttctttctacttccggtgagaacaacgagaagaaaaatggtgaaattggatgtgtagataactcgatgatccgttctttctttggaagaatcatcggtaggaagatggtgaaggagattgatgcgcaaacaatcctcgggagattagctatggttaat

SEQ ID NO: 190383 - DNA, 188 bp, Arabidopsis thaliana landsberg
atgcatcattcaatcgatgaaacgatgttagggtttccgcttccgatcaatctaactcttacggatgttgcagagatcatcatcggcttctacttcactcttggatcatcatcatcatcatcatcggaactcacagagtctctgtataaagacataatttcctcgaagaagaagcgagaaatagagag

SEQ ID NO: 190384 - DNA, 669 bp, Arabidopsis thaliana landsberg
atgttgatttcacttaatgatctgaaaaactatagtcttaatttcgatgacggcggcgacggtgaagattcttcaccggagaggtttgtagctccggttgtcatcaaagtttaatttttattttatacttaatctttttttttgtataatttttttttatcattattggtcttttatgttaataaaaacatatactccataagggaacacaattaatttcacaccaaaaaaaaaaacatatactccataagggaatacaattaatttcgtattaaattgttcgattgcccactaattagagtaatgtttgattagtataaaactagaacattgcttaatttgttgttttactgattcacttggtttgtatgtttatcttgaatatattggtacttatcccgaatatacgtgtgcttatctaactaaaatacatatatattaaaaataaaataaaatgaaatacaaagctaaagtgtttgcagagtgatcatgtgttgttgaaatgagttgtgatatgaatggcaaaatttgtagcccacgtataaaagtttggattagtcatatagtattacaaagcctctttactataagcgataactcaaaatcagaacatttcgtggagctccaaaatccgaaagtaatacttccatccacttgaaacttgcataa

SEQ ID NO: 190385 - DNA, 1284 bp, Arabidopsis thaliana landsberg
  unsure (1)..(1284): unsure at all n locations
atggccaagcagaaggcggcacctcgttggctgtcgagcgagtcgacggcgccgacgccccaacggggcacgtcgggcatcgacctcgcgtctgagacgaagacgagcgccgtctccccgcaacacgccaatcccaagcaaacggacgacgccagcacgctcgcgaaaggcttgctgggcgtcgcctcgtacctgagacgacggcgcagtcagtccctgacgtgacttcgtcaccgcccgtcgaccaagaggtacccaccgattcccatctcacgccttttggattcagcctcgacccgccaagcgacttcgctttggcggacgctctcgtagaggcgagtccaaaccctctggggtatcgtatgcggtcaccctgggaccggttgacggacgtctcgacctacgggccctcggggtccgaggaagatgacaagcccgacttctgttgggatttctccggacttggtaaccctagtgccatgcgggacttcatgaccgcatgcgactactgctttccgactgttctgacggtagccgcagcctcgggacgaggactgcgccaagtcgtgaatgtttccacgtcgatctagggggtcctccgaagcaaccatctcggtatgtctgagaacggtgatctccctaggcctgtgccacgcgttgacatcctacgggagctagctgtggtccctgttccggcgggggtcatgacccacagctcgagcaaatccgtggggtgccggccaggctcgacgagggagcaggagcgcttgagccgatccgccgggacgtcgggcaggagtgggcgggccaacctccggccggagaagtgcaccatctaccccagggtatccagcaccgcatcaccgacgatgtcagggtgaggccaccacccgcaatccagtggggtcggtcagaacctggctgcagcagtgatgcttctccgcgcgatgccagagccatccacncaccgaggggcggcgaatccagggagagctcaagaatctcctggaaggtgctgcggtccgacgggccgagagctctgcctctcgaaggcagggtacccctcgaacctcatgccgcaattcccgattcatgcgggaagcctcggtctacaccagcggcacgcgcaacaccgcgctctcgccccgggccgcctcggcaacgagcaccatcaccgcgaccgtcgggcccacctcgacgagagggtgcgccgaggctaccaccccaggcgtgggggacgctacgacagcggggaggatcggagtccctcgcccgaaccacccg

SEQ ID NO: 190386 - DNA, 232 bp, Arabidopsis thaliana landsberg
atgggatcactcgtgaatgattttgaggaggaggtagagcttatccaggcgcctatccccaattttttcatggatgatctcgtgttgatcgagtcggagttggctcacgatgggacttggtgggatgattacctagttcttcccaacaatccggactcgacactcgttggtgctgaaatagagtttgatcttgtattgttgtctgatggcgatggggatcagattgtcccta

SEQ ID NO: 190387 - DNA, 407 bp, Arabidopsis thaliana landsberg
tgcgagtcgatacacacaggttcgtcgatctctctctcttattgtttctgctttattccggtttcaattccttatgaatgacgaagctttgactgagattcttctacggtagactattgtttttcgaatttcgtacgatcctccattgttttgagttttttttcttctaattcctggttaaaccctaattttactttttattcaacctattttcttcgtgcttgcttcgccaaacctaatttcttcgttcacaagtttcaaaatagcgccttttggcttatgcatacaagtcaaacaaagcttgactttgctttgttttttttgtttgtttgtcttttgattacagaagtttcgtcttcttgtgtgtgagtgagtacgaacatggattcgaaagcaaaagacgatga

SEQ ID NO: 190388 - DNA, 60 bp, Arabidopsis thaliana landsberg
atggccgtgatacaagacactagaactactacatatatccggggtacatcagcgaatttg

SEQ ID NO: 190389 - DNA, 62 bp, Arabidopsis thaliana landsberg
taaataatatcgtatttggctgcgtctacagcgacttgtattctagctttaaacctttttaa

SEQ ID NO: 190390 - DNA, 102 bp, Arabidopsis thaliana landsberg
atggccctgatcctggtgttgttcagaatgtcgctccttgggcggtttctgtcgcagcttcgacagttgatcggagttttcccaccagaattgttatcgacg

SEQ ID NO: 190391 - DNA, 77 bp, Arabidopsis thaliana landsberg
agagaataaagaataaagtacaaacgaagcaaaatgaaaccattggagaaaagctacacatcgaaacaaaaatgtaa

SEQ ID NO: 190392 - DNA, 203 bp, Arabidopsis thaliana landsberg
cattaaagtcttccgaattagaatatcactttgaaagacttggggggctaattgttggtgtcggatcccgcaccggaagatcaggaccaaccaaagattgccacgtggacagggaaggcccaaaaggaataagccccacaggtttctttaagcgaagagaagatttctggcgaggtggtcgctatgcgagatggatgtggtga

SEQ ID NO: 190393 - DNA, 90 bp, Arabidopsis thaliana landsberg
atgttatcaactgattctcatacctccacgcggcagacgaccacctgggagaccacccaccaaaagaatccatctaccggggaaaaccgg

SEQ ID NO: 190394 - DNA, 404 bp, Arabidopsis thaliana landsberg
atgaaagcacagtttttagagatcaatgctcgttcagcccagaagggggcaaaaggccaaggcccggaaaagcgagctgcccaaaaaagattggaaaaagtgaggaagaaggcaaacacaatatctgacacagcagatatatcagaccgttcaaaggacaagatgatagacaagctatacaagaaagcagcagagccaagaaagccaaggaaagaactggttgtgtctaagaaaggagttggggttaaagttggtaagggacagaagagagtggataggaggatgaagagtgatgataggaaacggggggagggaaagcccggtaggaacgggcagaagggcactggtaaagcaggccagaaaggaaaaaggcctgctgggaaacctcggggaaggaaacccgg

SEQ ID NO: 190395 - DNA, 3245 bp, Arabidopsis thaliana landsberg
  unsure (1)..(3245): unsure at all n locations
gtgtttcggtttgcagaatcggggaacgttgagtttggcggaaccactgcctccatcccgtataccaaagaaaatgggttttccccgtgaccatctaagagtcgtacggtaagcccacaaaatgggttgaagctcatcataccatcctccctttagatgacttaggcgtttttgagattgctcaaaatagtcttgtttgcagcttcggctagaccatttccttgcggatacggcggggtagagtaactaactttgataccccaatccaaacaaatagcttcaaactcaagcgaattgaactgtggtccgttatcagtaactatctcgtacaggacaccatgccgacatataatattcttctaaatgaaaattttcaccgttgaatccttgatattgagatatgctctagcttcaatccagtttgagaagtaatccgtcaaaattaagagatattgtacgccttaggttgacttatgcaatggtccaatgatatccattgaccacctcatgaacggatacgaggcagagatagaagagaacaacttcgaaggttgatggactaaagtgcatgaagatgacaacgcttacacctttgggaaaacttaacataatctgtaatcatagtacgccaataatatcccagtctctgtatcttgaaagtcgtagcccttcctgacaaatgacttccacacagcccttcattcacttcgctcaagacaattttgacttcggatccagaaatgcatagaaggtaagggtcattgacacctcgcgtgtacaaagcacttttggctaaacaaaatgttgggctaatgattctcatttttcttgcttgccacttgtttttcgggagttcgcctgttaagatgtaatgcttaattggctccctccaatccttagcgtaattttgatttgtcttgtgaaatgtccgcggttcaggttcaggatgttcgttgggctcgagaattacttcttcacccgagacgacaagctcttcaagtaagttactagttgttttgccgggtattattttgctctaagtttatcctgaatccttttggattcagacgtgtttgacttctttgattttcttttcttgataggtggcaattccacttcaggttcagctcgggcatgttcttccccacaagacctcgtgacaataagttttttttcttctttgatgctcctctccgtgatgcattccaccgggatgatcctcttcaactaagaatccgatgttaacgccaatgcggcaaccgtatctacagttgtattctctcctctaggtattcggactaactcgaatttttaaatttttttgaataaatccttgaccacttcaagatgtacttccatcattgaaatcttggcttcatagtctccattgaactggttaactactagttgcgagtcacaataaatgattacttcctcagctctgattctttgtgccaatcaaagcccgacgatcaaggcctcatactctgcttcattatttgaggcagtgaatagtaggcggaatgactattcgaggatttccaaagtaggtgattccaacttaattcctattctggatccttgttttgacgaagattcgtccacatgtaacttccaagtttgatttttcttcaaaagtagcaacaaagcttcttttagttcgtcagtcaatgttgctccaattcaaactctctggtcgggttgatctttgtccagtgtcacttcaaccacgacatcatctactttttgtccgcttggaaacctaggaacaattcccttctttgcaggcttcgttaattgctattgaaccttcatccgatggcaagttaaataacatattcgtgacgcttccagaacaatttccttcttcgcaggataatgtgtaggttgatggcctattgaacacaacaaaatcgacgatctttgaaacttttccagctagaactggtaaccttattgtcccgagagacatgactgactcgcttgtatatgctactaaaggagatgggtgccaaatcacttcggtccaactaattctcattctttccaatgtgcttagaaaaatttaagtctaccgagctacccgtgtcaatgagaattcttgacacttcgaagttggcgacaactagggtaatgactaaggcgacatcatgcggtctttcgaggtgacaagtttcttcttcttccaacgagatcgaggcaccttgaaaatagacttcctcgcttcacattgttttaagtagaacatttcgcctatgctttttgatagcacttactgaagtattagatcttcttcgaatctcgaatcatgccacaatccttttcgaagagccgataacgcgggattggtgtgacacccttggaagttttgagagcactcctttaaactttgtaatgaaactacgagatgacttgtttggtccttgcgacaggtttcatatatcggtgtccgaagtgcttttatccataaggatggaatattcctttaaaaacacggctgacagctcgttaaaattaccaatagatcctggttccagctatgtgaaccacatcagcgcctgtccgcaaaggttttcagagaaaaccttgtagtaccatgcatcttcatcgacttcttctagatcgatttgcagtatccnnnnnnnnnnnnnnnnnnnnnnnnnnnnnnnnnnnttactcccggtctaacaactacgaannnnnnnnnnnnnnnnnnnnnnnttcttgattgctctatctccacaagcagattcagccgctctttgtgtgatctgggatcaagcatcaacctcatgcctaagtctgttgctgagagagtaggcatgactcactacaagcctactcgcattactcttctcattgcggatcgttccaagcgaatccctgaaagcatccttgaggatgttcctgttaaggttggtaactctgttatacctgctgattttgtggtcctggactatgaaaaggaacccaaggatccccttatccttggaagagcattcctagttacagctggtgctaggtttgatgtgaagagagggagaatctctctcaaggtttgtgattcggagatggagtttggcatggatggttcaaagcttactaagcctatcagttgcattgcttttagcataggcacacctcctcagactgatcagaatcccaccatagagcaacacacaacgctccaacacgttcagctcgccaatgagagttgtagagcaacggtgtcggggatcctctag

SEQ ID NO: 190396 - DNA, 92 bp, Arabidopsis thaliana landsberg
aactaatagattatatgtgcgggtcggggaactgtttgttgtttttgaggtgcgaagaagtcggcggtcagaagcaagaaaagaggaggcac

SEQ ID NO: 190397 - DNA, 1691 bp, Arabidopsis thaliana landsberg
  unsure (1)..(1691): unsure at all n locations
atgagacagctaaaagtcaagaggcggcaatcatttgggaagtttagcagggagaaactagtggaattgatgctggagaggcttcagggcttacatgaagatcaactttcaagtcttgcctctgtagttgctacttgtggtttaaatgaggccttggctgaagttagtagccagaggggacagaccacaagcttcgaaccaattgtttcagatacaagatcaagaagagattctaaattcgggtccttaatggaaggaaaaacaacaagggatggaacagagacagaaattccgagtttggacaagtatctagttaagcacatgaccaaattagaaagagaagtccatgaagccaaaagggtttcaaaggaagtatctgagaaaaacaaaaaggttcctcaaggtgttgcaagtgatcctgttccagatttgggaagcatccttgtgaaacactcttcaaggcttgagaaagagattgaagaagccaaaaagaacgcaggagtgagttttggaaagtaccaaaagacttcaagcagaaacaaaacaccattggatcttatcccggacttggaaagtttgctagtgaaaaagcatgtttcgggattggagaaggaagttcaagaaactataaagaactgcggaaaaatgtatgaaaacgtgaagaaaccgggaagaaaagatggtttgtctgaagttccaagcctggatagttgtctggtaaaacatttctccaagctagagaaagaagtccaagaagcaaaaaagaggagcaaagaagatcttgaagcaaggaatttagaaacagtttcaagtgtgttgttaacagaagaactgggcaaagaaaacgtagactctaacaataataaagctgagggtcaagaagaaagcctagacatgatcttggtaaagccggttcacagattagaaacagaaaaaattgcatcggaagcagtttatggaaaccggaggattcagaagagaaaacaaggagcaaaaacagagtcaaattatgagagtttggacaaaattctggtgaaacatgttccaaagctagagaaggagaagcagatgttcaaagctggtgtagaagagacggagaactcaaagagacataatgaagggagcttgaaccagggacatgaaagcatgaaggtggcaaacncgattctcagcaggcgccaaatgagggataaagaaatgcaagaancttggggtggtttaggacttggggagtcaaagagcaataaccagaagaaacctgaaagcaagaaaacagaagctactgagaatttgggagaagagacaagaccggtcctaactagacgacaagagagggacagagaaatgctagaagcttggggtggtttaggacttggggactcaacctcgtaccaaccagttaataagaataaaaggaaacctgaaagcgagaagatggagacagcaacaccattgctaacaagaagacaagcaagggatagagaaatgcaagaagcttggggtggtttagacctcggcaactcgattcgaccgagtctgtcaaaactcgaaagagaaaaggttaggttcgttctgtgttttttttccattaacacaccaatcgtttgagctggttttgatattttgtgttctttcatttgcaggctgcatggattaaggccgagaaagaggaaacgactcgaggaaactaa

SEQ ID NO: 190398 - DNA, 221 bp, Arabidopsis thaliana landsberg
atggtcatgtcctcagacggggcgtggtacggcgcgccgctggagggggtgacttgcgcggagcccttgagcagtgtggccacgatgttcaggcagtagtacccctgcaaagcggcgacggcggcagcggcagcaccaacgagtcagtcttcctgagcacacgctacgccaatgcccgtccaaataaccagtcacaagctacgccgacgccggtcccttga

SEQ ID NO: 190399 - DNA, 662 bp, Arabidopsis thaliana landsberg
gatgaatctgttttgatatggttttctgggaaggaggaaaaacatttgaagctaagtcatgtttccaggatcatctctgggcagcgcactgtaagttttgacatccgtagacatgtcatttaatctttccttaagctggctattaaatgttcagaataagttcgttagactagtattatccatttttcgatgcgtttatatggttggatatctaataagagtatcttcttctggttgtgtctgagctctactgtcatgattgtgagtaggatggcctcctaatgtgatctgaattgttgtttatgatttttccaagtggtgtatgttatgcacaaggctcttttcttagagtcgttttatcaacataaactcaaatgaagattacgtgcttatgctatgtttgattggattcatcattttttttcatttcacttcagcgtggcaggtcaatcttgatttgactttgcatgtttcatgcatcatttgcatgagccagtttccatagtcgtaggttgcatatttggaccttgcatatctagtgtgatattctgacaagtcttgcaatggtgtttctcttgcagcctatttttcagagatatccacgtcctgagaaggaatatcaatcgttctcgctaatatatgacgagaggtcactggatttg

SEQ ID NO: 190400 - DNA, 72 bp, Arabidopsis thaliana landsberg
attttcattgtcaatggtgtggcttgcggatcaatcggatggtgtggcgacggtcttgtttctccgcggtga

SEQ ID NO: 190401 - DNA, 35 bp, Arabidopsis thaliana landsberg
taggaagtttcatgagagtcaatgcacaagcaccg

SEQ ID NO: 190402 - DNA, 182 bp, Arabidopsis thaliana landsberg
attggaatgtgattatgaaacaatttctaacgatcggaatatcgcgcgtactcgtacgtttataaaaatataaagaaaagattatttaattaaatcctcatttgatttttctaattctgtcgaaatcaactaaagcgttgaatatcaatgaccgcctttatgttttctatttagtaatataa

SEQ ID NO: 190403 - DNA, 132 bp, Arabidopsis thaliana landsberg
gtttgggatatgcttagcaatgatgaagttgtatcgcttatatggagttccgggaaaaagcaagcttcggccgctaaaatggtggcggaggcggctgaagctgcatggaagaaaaggcttaagtatacgaag

SEQ ID NO: 190404 - DNA, 147 bp, Arabidopsis thaliana landsberg
atgagtatagaggagggcacttggggcattcccgtatgccttacggatcgacggctctgggctcggggtctacggctatgctcaccgtattgccgattgaatggaccgattcgcactgccatatccgccctccaagcgtaccgggat

SEQ ID NO: 190405 - DNA, 85 bp, Arabidopsis thaliana landsberg
atgattaaggtgcttcttcttcatctgaagattcctattaatgagcatgttcgtcaagtccgaatgcatcttgttcagttgtttc

SEQ ID NO: 190406 - DNA, 366 bp, Arabidopsis thaliana landsberg
atgctgctggtggtcgccgaaggcgacggacggcccttaccgctgcgcctggcgatggcctccggcgactggatcgggctggacctgcccgcacgcctgcacgccgccgcaccgctggccaagctgctcgccatgggcggcgccaccgaagcggcgatctggtcgaacctgtgcgaagtgtccgcgccgctgcccgcgcactggcgctcgatcccgtatggccgtccgcttgccaaccagcgctaccgcgtggtcgatgcccagggtcgtgattgtcccgattgggtgcccggcgagctgtggatcggcggcgttggcgtggccgagggctaccgtggcgcgcccgagctgaccgccaagcgctta

SEQ ID NO: 190407 - DNA, 306 bp, Arabidopsis thaliana landsberg
atgagtacggtcgataaaatgttgatcaagggtataagaagcttcgacccagaaaataagaacgttgttactttcttcagacctttaaccctaatcgtcggcgctaacggagccggaaaaactgtaaagttctttaaaccttttctcttctcctcagttcactcccatttcttcgcctccgtaattgaaaagtttgtggctatttcgtgatttttgcagacgattatagagtgtttaaaggtgtcttgtaccggagagttgccaccgaacgcgaggtctggtcatagctttattcatgaccctaag

SEQ ID NO: 190408 - DNA, 299 bp, Arabidopsis thaliana landsberg
atggatatgagagtgaaacatgtaaaagactgcaagatgaagctgcaaagaagaacagaaggtcgaaaggaaggctctcggtgacggcggaagtattcgaagtcgctcctgaagtctctgtcgtggagttctgcaaaacctcgggggatacgttggagtattacctcttctgtgaggatgacgtcagaccagctcttaaagacattgtatggtcatggcaaggtgatgatgatgaagacgatgttaccactaatgataatgttgacacaaatgacaacaaaataaataatgtttcatga

SEQ ID NO: 190409 - DNA, 401 bp, Arabidopsis thaliana landsberg
atgtccgaggccgtctcggacttttgccgggtccttggctccggcgacgtcccctcagaagctcccctcaaagtcgcctgcaggtcttgggcaatcatgtgcgcggcagactctgcgaggcgctacaccacggcgtcaggcgggccttcgtcgtgctcgcttcccactacgttgtggacctagagcgggtcagcgaggggtattgccttcctgacgaagatgaagccgccctggcagaagtccagagactcgatgcggccaccgcgggtctgagcgtagtgctggcgaccacctttgaggcagagatcctcccgcctgcgccgtcgtccgaagccaggacggactttgccgagggcggggacgaagccgaaggcgcggctccttcccggggcgatgcctaa

SEQ ID NO: 190410 - DNA, 78 bp, Arabidopsis thaliana landsberg
agcattgaagatgaaaatgtcaaaaagatcttctcttttgaggataagaagctccttcaaaacaattatacggcttaa

SEQ ID NO: 190411 - DNA, 640 bp, Arabidopsis thaliana landsberg
aaagtctctgcataaacacgaacaacccgatgatcttgtggcgcttttgttagctgctaagctttgcagtgaagagccttctttagctgctgaaggtacgggttatgcgcagagagcgataaacaatgctcaaggtatggatgagcatttgaaaggcgttggtttgaggatgttaggactttgtttagggaaacaagcgaaggttccgacatcggattttgaaagatgtcggctgcaatcagaatcattgaaagcattagatggagctatagcttttgagcacaataatcctgatttgatctttgagttaggtgttcaatacgctgagcaacggaacttaaaagctgcttcccgttacgccaaagagttcatcgatgcaacgggagggtcagtgttaaaaggatggagatttctcgcgcttgttttgtcagctcaacaacggttttcagaagcagaagttgtgactgatgctgctttagatgaaactgcaaagtgggatcagggacctctcttgagactcaaagcaaagctgaaaatctctcagtcaaatccaacagaagccgttgagacttatcgttaccttcttgcattggttcaagcgcaaaggaaatctttcggacctctcagaactctttctcag

SEQ ID NO: 190412 - DNA, 145 bp, Arabidopsis thaliana landsberg
gagagctctaatggtgaagagagcagtgagagtgaaaccacaattgaattcacacaagagattcgctaatgcattcccaaagtattgtgagcttgttgataacgctaggctttattgcaccaatgctgttggtggtcctccaagg

SEQ ID NO: 190413 - DNA, 399 bp, Arabidopsis thaliana landsberg
atgctgaaaaagatcaatgtgagagatggggtgaagatgaaattcttcctcaacctcttagctctgtgtgaatcaacaggagagaagctcttggtgtttagccaatacattgttccaataaagactctcgagagactcatgagctcaatgaaaggttggcgtttagggaaagagatgttcacaatcacaggtgattcaagcaatgaacagagagaatggtcaatggagagattcaacaattcactagaggctaaagtgtttttcggatcgatcaaagcttgtggggaaggaatatcactagtgggtgcatcacggattctgattcttgatgttcatctgaacccatcagtgactcagcaagccgtggctcgagcttatagaccaggacagaagaggaaa

SEQ ID NO: 190414 - DNA, 556 bp, Arabidopsis thaliana landsberg
atggtttcaattgtagaactcatgaagaaacttacggcaatcacagagaacgatattgtgctcaaataccagatcattccagaagatcttgatgcattagtttctgtaaagtctgatgaagatgtgaaacacatgatagaggaatataaccgtcatgaaacacccaagctcagaactttcttgtttcctgcaaacccagtggttcttgagagtcagttaggccccatcgagccacaaaccatagagcaacgctacattgaagccatcaatggcattcttcgcacatccaagagtgctactgctcttcgtgctcccatcaaaacacgaccttccttcaccgtctctacttgctcctctcccaaatcagaatcacctgatggatacagtcacgagccgccagaaacgagttttcagaacaactaccaattgagccggctttacccaatgcatagagtgcatagcagtcccaacatctcacaccagctgcagccacacagccactaccacaaccacaaccacaatgcatacgtgcagcctcctactaactacttaacgt

SEQ ID NO: 190415 - DNA, 1049 bp, Arabidopsis thaliana landsberg
  unsure (1)..(1049): unsure at all n locations
atgatgatgattcgacaagaaaggagacgaagacgaagtgcgggagcggtaggtagggcaggagagagacgacatttttcgaatttgagacgagtgtgagttatgaattggatttggatgcaaacaaatctcacaattgcactaatgagcgaatttgtaaggacaattgtcaaagtttgagccttttcacgtctcccaaaggttatgtctttgccaaatctgtgtggttttgttggtatggtttagtgaaaggttatttgcaaatattattattattcaattcacaagtggccctttgatttctcttgaaacaaggatttgcaactactatattgttgcattttcatgagctcttaaaattgataagcaatactagtagtggccctaagcaaaaaaaaaaaaaaaaaaaaatattggaagaattagattcgaaatttggctataatgtccaagaccaaacatagataaccctatcggcctaggcatgcatttctaataacacacattccgatcaatgactatgtatgtgtttaaaacattgctttcatcatatcacatctaacattcattgatacattgcacaaaagccttgatcttaaacttaataagtttataataattatttatacttgtctcatgtaagtatataatctatttgctaaatatttttccattacaataaaactatatcattgaaagaagcattttaaaaatcatgcattttcgctggagctattgtgatttagctcatttgtgaattgattgaatttgttaaaaaaaaataaaaaatcatgcatgtatatgatgagcgagagacataataatgattaatgagggtgaaatacataaacatgaaaaaaggctctatactctgtttcnnnnnnnnnnnnnnnnnnnnnnnnnnnnnnaacaataatcgcagcaaagaaaactctctcctctgcttctctctctctctctatctagaaaagaaagattcctcaaaatcagccgtgaaagtaatgaagaaaggcaaagcgcacccatctcctcctcttccatctaattaa

SEQ ID NO: 190416 - DNA, 377 bp, Arabidopsis thaliana landsberg
attgtgttgaggtcgttgttgatgttgatcttgaactccaagtgattaacgttgaaggacagaaggttagtatagagacaacgaatgtggatgctaaagggattgtttggttccaagttaaagacaagaagataggtttaaggtcagtggttgtggagaggatggaaagtgaagaggagagtttcgggtggaagaaggtagacggaaaccgagtgacggttaagagattggatcggttcgaaggcggttcatcgcattggaagagttataaatgttatgtattggtagagagatttgaattgaaaagaatggatgagagtttggtgttgacatatgagtttagacatgctgataagttgaggactatccaatattga

SEQ ID NO: 190417 - DNA, 373 bp, Arabidopsis thaliana landsberg
atgacggaagacgaacttcaagaaaaactctttcgcctattgggtacacgaaaggctttgattgtccttgatgatatatggagagaagaagattgggacgtgatagaaccaatctttccactgggaaaaggtaacaatctgttttcaatattcataatacatgcaaacatattggtcataaagcattatgtacgttcccttttgttagtgacttatatgaaaagagatatattttggtataggctggaaagtattacttacttctcgtaatgaaggtgtcgcattacgagcaaatccaaatggtttcatctttaaaccagattgcctaactcctgaagagagttggacaattttccgaaggatagtttttccg

SEQ ID NO: 190418 - DNA, 650 bp, Arabidopsis thaliana landsberg
atgagtcatactttgatcaaaacattaagaagaattggactttcatcttctcataagggtacttgggtttgcagagatgagaaatcacagctgatgttgggtataagacgtgcaaatagacaaactccgactctttcctcatcggtcatatccagcgacagtatgcacattgggatacttgcagctgcagctcatgctaatgccaatagtagcccttttaccatcttcttcaatccaagggcaagtccttcagagtttgtagttcctttagccaaatacaacaaagccttatacgctcaagtatctctaggaatgagattccggatgatgtttgagactgaggattgtggggttcgtagatatatgggtacagtcacaggtattagtgatcttgaccctgtaagatggaaaggctcacaatggcgtaatcttcaggtaatgacatatccgagttatgctaaactgtttatgatggtcatttcttctgaatctttgttcatggtttaaacaggtaggatgggatgaatcaacagctggagataggccaagccgagtatccatatgggaaatcgaacccgtcataactcctttttacatatgtcctcctccatttttcagacctaagtacccgaggcaacccgggatgccag

SEQ ID NO: 190419 - DNA, 371 bp, Arabidopsis thaliana landsberg
atggacaaggcgcagaacctgaccgccaagcagatgaagccgctgatcacgcgcgtcggccccggctcgaagatgatctgcctcggcaacctcggccagatcgatacgccgtatctgtcggaaacgacatccggcctgacgtatgtcgtcgaccgtttccagggctggccgcacggcggtcacgtgacgctggcgcgcggcgaacgttcgcgcctcgccgcctacgcatcggatatcctgtagcgattcgcgaagagccaggaaccggagacgtccgcatgctcggaaagctgggcaagtcgatgaaggaaggcgcgctcgccgtggcgctgcgcgcctacgtcaacgaccgctacaaggaatacggcgaa

SEQ ID NO: 190420 - DNA, 693 bp, Arabidopsis thaliana landsberg
ccaaatccaaatagccttgtcacaaacaattcagtctcctccgggatctagccttgtacaacgactctgcaaaagaaaccgttaccaagccctatgcatctctactctcaatgttgatcctagaagcaaaacctcaaatctacaaggtgacaacttataaatacatcattctttgcctctttcgtttcttctaaaaactgtccactagctaacaatctaaaagaaaaacttgattaaaacaatgttgaaatgattttgctattaacgtaagttttgtcattacctattttataattagaattccaagttatatagctaattcatatttgtttattcattttgtaatccatgaaagggcttgcgtcgatctctctcgatgctacgacaaagaaattcaacgtgacgttaacatattatatctctgtcctaaagaatgtcagaggccgcgtagactctgagagatacggaacttgcatcgaggagtatggtgcggcggttgataggtttttaccggcggtgaaggctgatctaaaggcgaagaaatatcctgaggctatgtctgaaatgaaagacgttgtggcgaagccaggttattgtgaggaccagttcgccggggaatctccggtgacggcacgtaacaaagccgtccatgatatcgccgatatgactgctgacatcatcaaaacgttgtga

SEQ ID NO: 190421 - DNA, 112 bp, Arabidopsis thaliana landsberg
aagttacggcaaacaccgtcgatgtagaacggaggccgatgaagaagattgcggcggcgattggcggctgaaaagagaaggagagaaaatctccgattacgaggagagatga

SEQ ID NO: 190422 - DNA, 190 bp, Arabidopsis thaliana landsberg
atgtcgtgcgtcgcgcaactagtgcggcgctcgcgtttgcttgcgcgcagtgcgtcgacgggactccgtctacgttcgcctacacttcgtctactcccagacgactctcgtcatagctcgtctaccccgtctatgctcgctctaaactcgtgctcgtacgtgtcgttcgccatcggcagagcgtcgcgaa

SEQ ID NO: 190423 - DNA, 202 bp, Arabidopsis thaliana landsberg
atggctcaatacgtctacacgatgaatcgcgtcggcaagatcgtgccgcccaagcggcagatcctgcgcgacatttccctgtctttctttcccggcgcgaaaatcggcgtgctggggctgaatggcgcgggcaagtccaccttgctgcgcatcatggccggcgtcgaccgcgacatcgaaggcgaagccgtgcccatggtcg

SEQ ID NO: 190424 - DNA, 688 bp, Arabidopsis thaliana landsberg
atggtatccaaatatcaccgaagccgaaatgaaaatcataccgttctgggttcaaatcacgggtattccacttctctttcttacgaatgcaatggcaagatgtgttggtaatcgtctaggatttgtgtctgaagttgatttcgatgagaattcgaaccatggtggctttgtaagagtgaaaattgactggaatttagatgatccgcttagatttcaaaggaatttccagtttgctgttgatgaaaacactgtgattaagtaccgtttcgagcgtctgaggaacttctgttccaagtgtggatctctgaaacatgatgtgaaggagtgtgttcttgcctttgatgatgaagacccttcggaaccgagtgatgatgacaatgaggatgatgacaatcagatggataacaaagacaacaacatgagtgacacagatacgcttcagacaatagacccagcgactctcattccgggtcttaacaaccctctcccaaatgcaaaccagggtcagaccactacccacactacggccttcgctgtcccaagcgttttcgaggacacggatcttactgttggaaggctccgttatcttcatgctaaactagcaagggtgagaactcagacactggttaccaatgatcttctcttggaatcatctgacaatgcacagaacccggttatcctcatgtag

SEQ ID NO: 190425 - DNA, 402 bp, Arabidopsis thaliana landsberg
atgattgctttggttcgtctctctggttcgaaagggaatgctacgagaggcctagaaatcctcgccgctatggaaaagcttaagtatgacattcgtcaagcttggctcattcttgttggtattctctcttactactaagactatgtgttagaatcaaatggttgttgcttgtgtctaccaggattgaggttactgagtaatcgtttataatttgattgtggtcttttatagaggagctcatgaggatcaatcacttggaagatgcgaataaagttttcttgaagggtgcaagaggtgggatgagagcaacagatcagctttatgatttgatgattgaagaagattgcaaagctggagatcattctaatgccttagacatctcttacgaaatggaggcagctg

SEQ ID NO: 190426 - DNA, 104 bp, Arabidopsis thaliana landsberg
gagtaggaagaatgtttccacgaatgggggaactcgaattttgttgttcttcagccattttgagtagttgtgggaagcttcaagcacaagatatctatttatag

SEQ ID NO: 190427 - DNA, 130 bp, Arabidopsis thaliana landsberg
atggcccaacccttgactcgactgaccggaaaagacaccgcattcaactggtcggatgagtgcgagaaaagcttcctggagttaaaggccatgttgactaacgcaccggtattggtcttaccggaggaag

SEQ ID NO: 190428 - DNA, 336 bp, Arabidopsis thaliana landsberg
atgtcctctccttacggcaaagtcgacgagcgtgaacatgtaaggctcgaagctcgtcgtaagacgagaaagaacatcgcaatcatcgctgtatcactagtcattcttgccggaatcgtgatcggagctgtgtttggaaccatggctcacaagaagtcaccagagacagtggagactaataacaacggagactcaatctccgtttccgttaaagccgtttgcgacgttacgttgcataaagaaaaatgcttcgaaaccctcggatcagctccaaacgcaagcagtctcaatccagaagagctcttcagatacgcagtcaaaatcacaatcgccgaa

SEQ ID NO: 190429 - DNA, 916 bp, Arabidopsis thaliana landsberg
cacagctatcaccgtcagagttgctgctcccgacatcacaaccgatagtatcttcgttgccactcccgtgacttcgtctgaatatttgatcgtcgcactggccactgccgtcattggaaacgtgtaagcccaccaagctagcgagaatctgatattttttgaataattatgtcagataacatgtatgttatttggtttggtaaattagatccttgcagttcaagaaacagcttacttgaatccccggaaaaggttaatccgacaaacctgaaacaagaatctcaagaagtaaagctgttacatttcttgtaccacaagaaactcagcactagctcactagaactgtgctaatgaaaacaaaaactaccagagagaagtacaagaacaaggagatgaagtatgctagacgcgaaccgagatcgaaagaggcagagatcttggtccaggccatggaagcgacggctggtgcagccacaaagaggaagaaaacagggtgaagctctttaggtaaggtttcattcgtgggaagtctctgatagagagtcacaaataaaaccaaataataagccaaccctatggcaaagaagaatattggtccttctttcaaccccatggatgctcctagaagtgctcctgcaaagttaccgacaatggaaaggtggtttgtagggttggcgactttggagaggcgtctttgtccaccagacatccactgtccgtaaatcttcatctcaagaaacaagatgggagccataaggaagtaccaaagtgtagagggaagatgtgagatgatagagtgtgggattccaagtgccaagaagaggattgatataagaggagcgaagaagaagttgactcggatcggatgccgaaactcacggcgaaccgcctcaaagaagaggatggttttgaagag

SEQ ID NO: 190430 - DNA, 164 bp, Arabidopsis thaliana landsberg
gattcagatgcttcaattcagaaaagggcacttgagcttatttaccttctagtgaatgagaataacgtgaagccactagcaaaggagcttatagaatatttgcaagtaagcgaacaagattttaaaggagatcttactgcaaagatatgctccatagttgaaaa

SEQ ID NO: 190431 - DNA, 356 bp, Arabidopsis thaliana landsberg
ttgctgaatgtgattgatggacagaatgatgcgcagacaactttgggagatttcaggagctcacaggtatatataactgcactgggcggtacaaaaaccaatgcagccgaggattacacttacgataccaatggcaacctgctgcgagatctgaataaggatatagtcgactacagcggaagtgatgggatatcctataaccatctgaatcttccgtcacaaattacggtgcggggacaatcaggcaacaaaggcacgatccaatacctgtatgatgccaatggaaacaagctggaaaaaacggtaccggagggcagtgttgtaaccacagagcagtacctgtcagagacttccag

SEQ ID NO: 190432 - DNA, 373 bp, Arabidopsis thaliana landsberg
atggtgcactcgatctgctgggcgcggccggcgtgcgccgaggcgccacgttgggtgcggacaagggctacgacacgcccgacttcgtggcggcgctggagcagcgcggaatcaagccacacatcgcgcgcaacacctcgggccggcgtagcgccatcgatgcgcgcaaggcgcgcggcaaggggtacgcgatgagtcttcaggtacgcaagcgcatcgagcagggttttggctggatcaagactgttggcgggctggacaagttgccgctggtatcgctgcccaaggtgcgtggttgggtgacgtggacgtttgcggcatacaacctgatccgactcggcggcattggcgagtggtggaatccatcgccaac

SEQ ID NO: 190433 - DNA, 367 bp, Arabidopsis thaliana landsberg
atgagccgggctgacgtcctcgggggacagctggctaaggctacggagcggccggttgagccgtctgctcgggccgggttcctagaggagaccctagctgcgatggcccaggcgtggtgccgacagattccttcgaggtggagatcctccgaccatgttgccgtccgaggccgggtcggattccgctgaagatggagtcgacgccgagggtgctgctgctcccccactgatgtctgatcctgcaggagcagtttatcttgtagtgtgcgtatgttttttgcggccgccgaggccgaaacatatcgtcgtcgtgttgtaaagctgcgtttcttttccccttgtttcgagtatctggacttatttgtcg

SEQ ID NO: 190434 - DNA, 15 bp, Arabidopsis thaliana landsberg
atggcgttcgcgaag

SEQ ID NO: 190435 - DNA, 845 bp, Arabidopsis thaliana landsberg
atgtcacggatcactgctagtcagatccgtcagctttttggattccctgattcgacgactcgccttcacagtctctgctacggcacttcagatcctccacggtcgccctcacggcggtgtggctccagggacagctcacgtcgcggctctgtttcgcccgcctttcacagatgggtcccgacgttctccagcagacttcactactgcagcgaagtacctgtatgagctcgtcaggcggacactcctgcctaggatgggatacagggaggctaccactcacattcagctttggctccttggtgccctggtatcccactctgagtttgatgttgttgactttctgatctgtgagattgaggatactgttctggatgggattcgtgctcgacggcagctaccgtatgctcactacttgtgccacatctttgcgcagctgatccagccacctcgttttcagagtacccttgaggcctcacgccttgtatttggatcttaccgtcctgctcctgagattccagtgccagcttatgctcctgtgtttgacactcaggccgaggatgctgcacttcgtcagtttgactcccagggtgcagcagctgatgatgatgatgatgatgattttggggttcctcttccgcctccgcctccgcctcctatgcctccacgctcacatgatcatgaggctgggagttcccgtgctgcccctgctcctccagctttggaccctgctcttgcttcgattcttcagactctcacccagcagcagcagactctcacccagcagcagcagactctcacccagcagcaggctctcctggcagccgagcaggcccgtttatccgacc

SEQ ID NO: 190436 - DNA, 660 bp, Arabidopsis thaliana landsberg
atgtgcgtagattgtcgtgctattaataacatcacagttcgttatcgatatcctattccacgccttgatgatatgttagatgagcttagtggtgccgttattttctctaaggttgatttgcgtagcggttaccatcagattagaatgaaactcggtgatgaatggaaaacggcttttaaaacgaaatttggtttatatgaatggttggttatgccatttggattgactaatgctcccagcacctttatgcgtttaatgaacgaagttctacgggccttcataggtttgtttgttgttgtttatttcgatgatatccttatttacagcaagtctatagaggagcatttagaacatttgcgtgctgtttttgacgctttgcgtgctgctcgcttgtttggtaacatggaaaagtgcacattttgcacgcaacgtgtctcgtttcttggttatgtggttactccgcagggcattgaggtggatagcagcaagattgctgccattcgggagtggcctacaccgacgacggtcacacaaattcggagctttcttggacttgccggtttctaccgcagatttgttcgtgattttagctccattgcagcgcctctacatgagcttacaaagaaagatgtgccgtttgcttggagtgattcgcaggag

SEQ ID NO: 190437 - DNA, 6 bp, Arabidopsis thaliana landsberg
atggtg

SEQ ID NO: 190438 - DNA, 451 bp, Arabidopsis thaliana landsberg
  unsure (1)..(451): unsure at all n locations
ccttggccttggcatcccgttcctgctggcggcgctcggcatcagccgcgtcttcaaggtattcggcttcgcccggcggnnnnnnnnnnnnnnnnnnnnnntcggcggcgggctcctcgtcctgctcggcgtcttggaagtcaccggagtctggggcgcgtggctggccagtctcaggaccctgatcgggacctggcagccgccgctgtgaaggcgcggttggtgttgtggttgatccggcacccgatggcgacggtcgctctcgcgctcgcgttggtcgcggcgctcggattcggcctggcgaacgcgctgtccgacgggtcccggcaggagactccgatccctgtccgaggagggacggcagcatcgacattgcccgagccgactcagtacccgccgcaagttcgcgtcgaggcggcgcatcgcgcaatgcatgcaatgggccgagcgt

SEQ ID NO: 190439 - DNA, 457 bp, Arabidopsis thaliana landsberg
atgggtgatgatacttggacacagttgttcccaaatcaatttcaaaagtcatatcctttcccctctttcaatgttaaagacctggatactgtaagtgattcatgttttgcttttctacattatgtttgtttctgaggtagcttgtttgtgtagacttttatatatgatacgggttgttgtgcgtttgtaggttgacaatggatgcattgagcacctattcccaacccttttcaaagatgattgggatgttctaattgcgcattttctcggcgtggtatgcggacaattacatcttttttttcgtcatcatcttgccactcatctccttgattcactgaattttgaatatttgcaggaccatgcaggacacatatttggagtggattccagcccaatgattaataagttggagcaatataattcagttttagaggttaactaccttttaatcacctga

SEQ ID NO: 190440 - DNA, 298 bp, Arabidopsis thaliana landsberg
ccggaacctacggcggctacaaaagcttgaaccaaagaagagttctcacgccgttttgtgtgagaagaagcagcgaccaccggagaagagatgtcgccaagtcaagcagcgaccactggagagagaagtcgcctagtcgagaagccaccaccggagaagagaagtcggcgtatcgagaagccaccaccggagatttgctagggtttcaatttgaaatcaaagaagaagaagagacatgcaaaagcggaaaagagagaatcgagaaaagcccaaatcgatttgagttttattcctttgg

SEQ ID NO: 190441 - DNA, 1479 bp, Arabidopsis thaliana landsberg
attatctttatttgctttgaggggcttaatggtttggacgacttaataagaggtgtttgttcttctgaggatctggctttgattgttcaatggtctatttgtctgaatagggatgagctgagtcggtttgttgctaataaacgaagactaacaagccttaagatggaaggatgttccaatttgggaggattttccctctcttcatcaagcctctccactctttggctctcggatcttcattctctctcaaagatggtaattgaagttccctttttctcccatttttatagctcaggaagagaatttgcaaatctaaactgcaatatattttgttttgtcagatcttcaactgtccaaatcttacggaaatatcacttgaattttctcgccaagaagatgattcaactgatcttgtaacaatggttgatggtttgggaaggacttgcactagattgcagaacatccatatagcctctttgaagctttcacatactgttgtactttctcttactgctgtgaatttcaggtttgtcaaatacctctatttatagcttggttttgtttgtttcttatgcacatttagtccactattttcatttgagagcagttgttcttagtgattgatgtcagtttcctttttatccaggaatttgagaatgctctcgctagttcttggaataaatatcactgatgcatctgtagctgccatttcctcaagttacaaaaaccttgaactgcttgatctgagtgggtatgttttgttctcgttcagtatatcctgtctatatttctagaggtttcagaatagtacacatgaagagcgtttttctgagacatgattttttgttggttttagttccagcattactgatactggcctcgggatgatctgcgatgtcttacctgatacactctcaaaattacttgttgctctttgtcccaacattacatcaagtaaattcttgatctttggtttgcatatgtattatattttatgagattatcccctggtttctcatttctattataatgaatattctcgtaggtggcattcaatttgctactgctcaattgccccttcttgagctgatggattgtggcatgactgtctctgatcccaactcagataatccgacctttgtagagaatccaagtccacataaaacaccaggctacaatcaaaagatgtttatcaaacataaacggctgaagaaacttagtttgtggggatgctccagtttggacgtgagattcctctcatcaatgctctctaaacaagttcaaaccttaataccatcttctcatagtttcgatcttttgatgcaggctttgttcctaaactgcccagagctcatggacttgaacttgaacttatgcagtaatttgcatccggagagtctggtgctacaatgtccaaagttacaacttgtgtacgcatcaggatgtcaagaactattgaccggagctatccgaaaacag

SEQ ID NO: 190442 - DNA, 77 bp, Arabidopsis thaliana landsberg
gcgtttctggtggtgttccactgttagctgcagctaaagcggtttctgtgtatgatcttctaggagagctttgcttc

SEQ ID NO: 190443 - DNA, 1396 bp, Arabidopsis thaliana landsberg
atggacctgaacggagtcagcactgatgatttcgccattgagtcgcttagcgagctccatggcaagtctgctctttcctgcgccggtgggcccagaaatcacaatcaccttctccttttcagactttttcttcttgttcccgttcagaggaacagagcaggccgtggtggctgcgcagaatctccggcgcagtacaaggcttggcggttgaagtctcaagtaacaggtacgggtcaaaaatacgccactgccaatcaccattataaacggataacgaagctttgaaatttagaatttggaagatagcacaagtttgctacggatatactgaggttgatagaagggaaggaggacgacccgcgcgaaagctcatctcgaagagagacgaagacagtgagcaagggattagagaactacggttcggttaggtttacacataaaccgaacaagcgaaccgaaattaaacggtttacttaaacctagacggttataaacgatgttatcatgtcgtgttaattacttacacaaccaaaaaatggaacaattacatatggtttttgatcaattacagggtcctatgattaggttttttatggtcgggctggtagggttcgaccggttcgatccatctatatattcgaaaatttaaattataggatgtgtctttagtcaagtgattaagttcatttgattttacattttcttaaatctatttgattttatcatttttatcggagttcgactctattaagccgtataacctcgcctatgtagtaggaattgggtatggatcgggattataaaaccaaacatacataaagaaatatcaagatgtaacatgtaaaattagtcatatacagagacaagtagtttattgaagatgcaccatagtgatcatatatgttgattaagtacacttgttctctcgaataagtcatatcctttgtagccacgactgttccttgatcattggccacgaattagtcaaaagatggacacgaagatcaaataaaagttttacctcttatctttcgtggctattttgaccgtaagagacaaaaaaacaacaagtaaaaccgtgaaagttaacactaattaacgaataaagaatctatagaagcaaatattgtaattaaaatttcaagtgatcacaattcacaaatgaaaaaagttcattcctttatgtggcgtagcttcataggaattatatagttgcacttgagaaaacccaaggcagactaccccatagcaagagaacgatagggactcggtgagtagctcgctctccagtagcaagattgtaactagtgatcagtatagacagatccttcttggcgatgtcgtcgtagaacacgagaccgataggcattgcggtatccgtcgagaggttaatcag

SEQ ID NO: 190444 - DNA, 756 bp, Arabidopsis thaliana landsberg
atgaatttatcaagtttggggatgagtcgttgtggctcgacctctttcgctaatgctggtttccgcaaatttttggcttccgatatgtaagttcttttctttctcttcatcgttccattcggcgagataatagtcttcttcagttacttttttggaagagggtccacaaaacatacctccccattgcggaaagtaaatcaagcatattggtaatgaacatgcgattgacattacccccattagagttatacccgtctctctcgtgtatgtcgatcctttgaagaatatcaactgtgttaagaccgcgcctacattgcctcccgcaccagtcattcccgataccaccccaagagatctgcataaacaaacttttgtaagcaaaaatgttgaataaccaatcaagcaactcaataccaaaatgtatgttaccttctagaaataaagggaacaacgccaaaggtaagtccacaagcggcttggacgaatacagagaagacaagcataacaattatagacactgtcaaggaagaaatctggccaagacatgcgcataatacacctcctgatgtttgcacaatccaccaagcccacaaccttcctctcatcccaaaccgtctcgacataaaatcagagaaaattcctccttcaggtctagcgaaaaaattggctagtccaaaactcgctgctataatccctgctgtctggagctttaaatggaatctatcgaagaaatattctgcgatgatgttgtcaatg

SEQ ID NO: 190445 - DNA, 369 bp, Arabidopsis thaliana landsberg
atggagcgagagattgacaagtccgatgaggagaggaaggttcttgaagccatagcttctagagcctcggagttagagaccgaagttgcacggctgcagcatgaactgatcgcggccaggacggaaggggaagaggctacggcggaggcggagaagctgaggtctgagatttcacagaaaggtggtggaattgaggaattggagaaagaggtcgctggtttaaggactgtcaaggaggagaatgagaagagaatgaaggaattggagtcaaagcttggtgctttggagctgaaggagttagatgagaagaataaaaagttccgtgcagaggaagagatgagggagaagattgacaataaggagaaggag

SEQ ID NO: 190446 - DNA, 362 bp, Arabidopsis thaliana landsberg
gcgtcggcgtcggcctgatcgtcttggcctcctgcaacatgggccacaccgcgccagtgacgtgtgatcaacgcggttgctcggactggaaaggcgctaagcaggttcagacacgacacgcgcgcccgtcaattgacggtaacggtaacgccgtggtcatcggcggtcgtccggctggctgcccgcgtcggtactgcggatgttcggcgtccctgtacgtcttcggcaagatcattcctgaactgaacttggccgcaaactgggctcgcaaattcccgcgaacgtcgcccgctccaggtatggcagcggctcgccccggtcacgtcatgatcctgatgagccacgtcgaagacgacgaatag

SEQ ID NO: 190447 - DNA, 737 bp, Arabidopsis thaliana landsberg
tgctaatggcactcttcacaacgttcataacgacgcctactgtaatggccatttacaagccggcacgtggcacccaccgcaaactaaaagacttgtcggcgagccaagactccaccaaggaagagcttcgcatcctagcctgcctccacggcccagccaatgtctcctccctcatctctctcgtcgagtccatccgaaccaccaaggtaaattacctttcttttatatttttacgttacaataatctatatttaaatttgtaaatctatgataagagttatatcagaaaattaagatatcattgaaatgctcaatgaaaatgtatccttcgtataattacacacattttgtatagttaaaattaaaaatcagctgggtaataatttataatcttggttaataatttaaaaagtcgtatttgttttggcagatactacggctaaagctgtttgtgatgcatctgatggaactaacggaacggtcttcgtcaatcataatggtgcaaagagcccgtaaaaacggacttcctttcgttcaccgttaccgtcatggtgagcgtcacagcaacgtcataggaggcttcgaagcctatcgtcaactaggccgggtcgcagtccggcccatcaccgcagtctctccattacccacaatgcacgaagacatttgccacatggcagataccaagagggtcacaatgatcattttacctttccacaaacgatggaacgctgatcatg

SEQ ID NO: 190448 - DNA, 133 bp, Arabidopsis thaliana landsberg
cataaaggaaaacatcgcctacgggaaagaaaatgcaacagtcgaagagattcgtaaggccacagagctcgcaaacgcgtctaaattcattgacaagcttcctcaggttgagattaaattcacctctcctctg

SEQ ID NO: 190449 - DNA, 88 bp, Arabidopsis thaliana landsberg
atgcaccacgaagcctttgataacataagagataaccatcgcatctctatgcggataatctttgagatgaagatcatccttagagaag

SEQ ID NO: 190450 - DNA, 156 bp, Arabidopsis thaliana landsberg
atgctcatggtgagcgacatcactcctaattgcaccagatgatggacctaaacacccgcccatgctcttacgatgcagcgtcggataagcctggaaactgctgtatatgatgagctaccgggaacactatgctcgtgcgaagttctcaacgaatga

SEQ ID NO: 190451 - DNA, 292 bp, Arabidopsis thaliana landsberg
atggccgttcctccgtttcctcgggcggcgggcgactgcgtggccggatgtctcgcccacggggacgatgactccaaaaacctcgaatggcgaggggttattccccgccgcgtgacttgcgcggcgcgacgcgctatcgcgcgcggcccaaggatcgaacatgaaactgaccctcgaacaggaggccctgcgccgcaggaccttcgccatcatcgcgcacccggacgccggcaagacgacgttgaccgagcatatcctgctggccggcggggccatccgcgcggccggggcg

SEQ ID NO: 190452 - DNA, 756 bp, Arabidopsis thaliana landsberg
atgactgatgcaaaagccgtctccacaccaatggcatcttctcccaagttgacccttacaacatgcactctactctccgatccaacaaccttaggaagcttgtaagtagtttgcaatacctctcctttacaagacttgagtattgcctatgctctcaatcggttatccggatttatgcatcgacgaacggaggatcactcggaaaccgcaaaatgaatacttcgatacctggtgggtaccccaatacatgggattttctaatctagaacaaattctctcaatctccatggttttcagatgctgactaggcaggaaatccaaagattgtgtctccacgggcgcttatattatctatcttggtagaaaccttatatcttgttcagttaagaaacaaaatggagtcccacgattgtctacggaagctaagtactgttccgtcgctaacacagctgcaaaaataagatggatatgtaatctactcactgaacttgggatttctacaatatcataaccggtcatgtactgtgaaaatgtaggcgcaacctttctctctgcaaatccggtctttagttcaaaaatgatatacattgccatcgacatacatttcattttgaacaagttcaacatggtcttctatgagtagctcatgtgaacaccaaagaccaacttgcggatacactaacaaaaccattgacacggcaacggtttcttgagctgagagacaagattgaagtagcatcagaccctctatcttga

SEQ ID NO: 190453 - DNA, 450 bp, Arabidopsis thaliana landsberg
atgttctacgggctcgagctcaaccacatcgctcggcgctacaacgagactgcagacgagctgactaaaatagcctcggggcgaacaacggttcccccggacgttttctcccgggatctgcatcaacccttcgtcaagatcgacgacacgcccgaacctgaggcgccctcggtccagtccgaggtaccctcggcctagcccgaggcaccctcagctcggcccgaggcaccctcggcccagcccgaggtaacctcggcacagcccgaggtaccctcagctcggcccgaggcgccctcggttcagcccgaggtaccctcggcccccgagggtgaggcactgcgcgtcgaggaggagcaaagcagggccacgcctgatcgaaactggcagaccccgttcctgcaatatctccaccaaggagagctacccgtcgaccgagccgaggctcgcggg

SEQ ID NO: 190454 - DNA, 127 bp, Arabidopsis thaliana landsberg
tctaacaacggtgaacggatatattgtagatttgtgtgatgatgcgagtaaaactatccgtattgaagttgtttatgaaaccattcgccttgctacagatttacagagaattagatccgcgttgtga

SEQ ID NO: 190455 - DNA, 463 bp, Arabidopsis thaliana landsberg
atgcccggtgtggattggcatgctcatctggaaaggaaaaggcagtgctgtcatacattttctagtgaatctgagagcaatcttgttggtttggagaaaaatgttgagaaattggttgaagaattggtgggaaacgatagcagtcatggggtatctatcactggtttgggtggtcttggcaaaacaacacttgcgaggcaggtttttaatcatgatagggtaagaagtcattttgatggacttgcgtgggtgtgtgtatcacaagagtttacacggaaagatgtgtggacagccatcttggggaatcttagtcctcaatataaagactcagccgggccggaagacgatattcagaagacactctttcagttgttggaatcaaaaaaagctttgatcgtctttgatgacctatggaaaagagaggactggtacagaatagagcccatgtttccacacagaaaag

SEQ ID NO: 190456 - DNA, 104 bp, Arabidopsis thaliana landsberg
atggcactccacgtggctggccaaatggcactccacgtgtcggctcctggaacgctgcagcatgtgaattccgcagtgaccggggctcgaactcgtgatggcgg

SEQ ID NO: 190457 - DNA, 427 bp, Arabidopsis thaliana landsberg
atggaaatcgacatggcgcccgtcgatccaggcatttacacctgccactggaatctagggctcaacttcaccggcaaccgttacgtcattgccatcggcatcggtgatctcgacagcggcgagtaccaccgccactcgcgcttgccctacgcggggcatgtggatgtgattccggtgccacacacagggcacggctggctggcaccgacacccgaattcgcacttcacaacgaggctgactgacatgtcccacgaccccgtcaaatcacgcttccgagccatggtcatcggctggtacggcgcccccaatgttggcgacgaagccctgctggccgtccttgtagcgcatatccactcgctcggtggtgaggtggttgtcgtcagcgtcgatcccgcgctcactcgccgaatgcacggcattgaggcc

SEQ ID NO: 190458 - DNA, 721 bp, Arabidopsis thaliana landsberg
atggcgacatcagctgatgctcgggcagtaaagtcgctcaacacttccgaggggcgtaagagatttgtggtacgtgtttgtttaattatatagcacatgtcttttcctttcctttgtaaaacttcctctacacctatcatagagtccactgtttctcctcattagtaagctcacttatctgttttcgttgtgctctctaatatggctgtttgtgctttattacttctggatgcagttcaagtctgcttctccccgcccaaatgaaattgacaacatcagcaactataggaacttggataaggtgaagggtgagccttcagaaggatccacatttttcagggattgcctcatagaatggagggtatgtttgattttgttgccttggacctcttttttaaagtttcaatattttcttctggtcttggactgttgtaacctaagattaagaatcttcagtaaatcattgtagtctttagtaaaccgtgcttggttttagttttgcgttattaccggctagaagttgcggtggttgaaacatgagaaggaatggcaatgtttagtgatcgtgtgaacttgaaacccaaccttatggcttgtattgttcacatgatattgtaaagagattgccaattcgctagttcacctctgcactgaaaagaatgttggtactctctcttctcgttagtttgttctatagggaccagagaagcattctctctga

SEQ ID NO: 190459 - DNA, 105 bp, Arabidopsis thaliana landsberg
atgacggtggacgagtggagactcttggacgtctccacggcgtttggcagcggagaaaactccgtcccagatttcggagaaagcgcggatgatgatgccgtggtg

SEQ ID NO: 190460 - DNA, 97 bp, Arabidopsis thaliana landsberg
aatatttagatcagtacacatgcatgaaatagattacaatccaaccttagctcagttgatagagcggaggactgtagtagacgcagattatccttag

SEQ ID NO: 190461 - DNA, 1561 bp, Arabidopsis thaliana landsberg
atgaggtatgtgtttctatactcgattattatagattatgttttgtgaaatcgagattgttaaggtttatgttagggaccgtttatgttatgaatttaactgggaaatcagttcgagtccataatcgatgcttagttgggtttcgatttggttgtgtcattcgaattcgactaatctatttgtttttctcttattgaagtgatgttatgaatgtgcgtatgcactatggtggatttggttctgtgaatgaagatgtctttgattacaaaggaggtttagtgaaggaagacatgatcatggaccccgattatgtgacgtggtccatatttgacgaattttgtgaacaagttgggatttctgggttggtggaaaagatatggtacaagcttcgacatgaagaaactggttcagcaagggttatctatgatgataaagattctcagattaggcagatgtgtttggaaggactgacaacgggtgagattgacatatacattcatcaagtaggtgtcggagaacatgaagaagatgatgatgaggatcatgttgatgcacaagggccagttgaggataagggtgaagatccgattgaagaagtaaatgatgatgtgagaatttgtatgatgattgaagaagagtagcgagaatttgtatgaggtaaaaagaccgcaaagccaagtatgaggtgaaccttagtcataggcattgtggttgtaaccaatgggacatcactggaattccttgtcctcatgcgataactgttatcactgaacacaaccgtgatccggatgagtaagtgtttcagctctcttgatgatttcatatcttgtagtctctgttttttagatctaaatatgctgtcacatgttgcagcttcgttgataaacacttcttgacatcttggtggcaagacacatactcagacaatatcaaacctgtaagaggagaaaggatgtggaagagacaaggcaaagaacttattcatgtgcctgaaagaaggaagaaaagaggaaggcctaagaagtatgcaaggataaaagaggctcaagagtcatcaaccaatccaaacaaggttacaagacacggaagaactatgacatgctccaactgcaagaggactggacataataagggtacttgtactcaacccgcggtcagtcataccctccaagaaagagaggaagaccaaggaaaatcaagtaagtctaaataatgtgtcataacttgtgtttgtgttggttgtgttatcattaattagtttgtgcttttgtaatagaatgatgatccatggagtatacataatgcacctagacggtatagagcagctcaaagtcaatccacaccaaatgttcaagaaagccaatcaacgccaactgatccacaaccatcaacagctccacctactatttccagaggcaggggtcgtggtcgtcctcgtggtagccgaggcaagggtcgtggcaggggacgcggcagagaatctgataaaccaaaacctcttgtctatttcatgtcaccttataccaataatgtctttgatgtttggcggccaaaccagtag

SEQ ID NO: 190462 - DNA, 735 bp, Arabidopsis thaliana landsberg
gacatgctcaagctaaagaaatactagactgtatctgtcaagagatacctaaatttgacgcggctcaacaaaagaacgctggtctaaaccaagctctctttaaggcggtagagaatggaatcgtagagtatatcgaggaaatgatgaggcattatcctgatatcgtatggtccaaaaatagtagtggtcttaacatcttcttctacgcggtaagccagagacaagaaaagatctttagcctcatttacaatataggtgctaagaagaacatcctcgctacaaattgggacatattccataacaatatgcttcatcacgccgcgtatagagccccagcctcaaggcttaatctcattcctggtgcagctcttcagatgcaaagggaactacaatggtttaaggtgatacatagttgtatatatgatcttgctacacaagaaattaggcaataactgtttctgtgaaaaggaacctaggattataactctgtattatttccaggaagtggagaagttagtgcaaccgaagcatcgaaaaatggttaacttgaagcagaagaaaactccaaaggctctgtttacagaccaacacaaggatctcgtggagcaaggagagaaatggatgaaagaaacagcaacttcgtgcacagtcgttgccgctctaatcaccacaatgatgttttccgccgcctttactgtccccggaggttaccgttcaggcggcatgccactctag

SEQ ID NO: 190463 - DNA, 254 bp, Arabidopsis thaliana landsberg
acaactgttgcatctccgggccggttggcgcaccggacagtccggtgcccctaccaactgttggcacgggccacgcgtctcccgcggattgcatagccgaccgttgcgctggcgaccgttggctcaccggacagtctggtgcaccactggacagtccggtgaattatagccgtacgccgccggattttcccgagagcggccttttcaccgaagtccagcctggtgcaccggacactacccggtgcacaggctga

SEQ ID NO: 190464 - DNA, 62 bp, Arabidopsis thaliana landsberg
aaaggtttagtccggtggtgaaagaaaaactgtcgcagaagatgaacgccaatgaagattga

SEQ ID NO: 190465 - DNA, 129 bp, Arabidopsis thaliana landsberg
aatcgttacggctgcttcgaatcttgcgtgtcacggaccgacggaactaaccaatctcaaccgaacccgaacataacctgttcgtttggttttctaaatggtaatcaattggttcattataccggtttg

SEQ ID NO: 190466 - DNA, 170 bp, Arabidopsis thaliana landsberg
gtaggggtcgtgcccctagtctccaccttcggccgcttcacccgcaaggtacgtccgcccaccatgcctccttcgtccctgttgagctacatagttgccatgcttcacataggtcagtccaccatcttgtagttggataaaatatgtcgaggactgcaaggccatgcctg

SEQ ID NO: 190467 - DNA, 440 bp, Arabidopsis thaliana landsberg
atgggaccgaagctctttaagcttatgtgttcatcgggtgtagccataggagagcttggcagcaaattttgtaaacgagcatcacaaagccattgcaaagatgttgattcaaggcaagagtggagtcctcgaccattcgagccatagtattgaagcatcaagattaatgggtttgacagatatttaagatcggacctggaccaagtagttatcggatctggactacagccttcgtaagtgggcctagataagcatagtgggcctaagtaagaatagaggcccatcacacagaaccctagaatcacttcagttggggagatggtggtgaaggagccgagaaaaaaggagacatagacttgatcgacgttgaagcaaacgtcatccgacaaatcaaaggcgaggccaacgagcgatatgtgattttcgaaatgtcggcatga

SEQ ID NO: 190468 - DNA, 177 bp, Arabidopsis thaliana landsberg
aaaccttctccaagcaacccatgtttcagtacaagaagcgattccacagagtgaaaaatccaaacttgttgatgtagatcttcctataccagaacctactgcttccaaaagctacgtctgggttaatcccaaaagccccagagcttctcagctccgtagaaaatcttacgattcgag

SEQ ID NO: 190469 - DNA, 137 bp, Arabidopsis thaliana landsberg
atgaaggctacaacacgaagatgttgcgcaaggctgacatttctggaacaaggcataggtatggcccccatccgaggtggacccgggggccactgttggtaccctaaatatggggtacctaatattgctatgtcaag

SEQ ID NO: 190470 - DNA, 838 bp, Arabidopsis thaliana landsberg
atgagtgtaaacaaatatcagcaagttcgtcccaaaaatgataaattaagcgatgaggtaaagagattcctctaatttaaaaaccacgtagcgctaaacaattaatctaagttttgaattatgatgcagatattgctggtcgagaattttacaactaggcaaccaaagttaagaaatagattgagatttttgattaggttgaggcacaatagggtgtggttatggtacattgttttgtataaggatcatgtatgcgtgggtggtatgggactatgagagaataatacgcgaacatgatcaataaatattgacaaggtggttgaagaaaaaaaaagatgaaactcgggttcatatagaaaaaaatccaaagctgtgaatgatgcatgcaaaattcagattaacccatttatttcttatgtataaaatgattagtgcgtgagataaaaaaatactcatgatagatagactagataaaaaatactcatgatagatagactaagatttttattaggattttgtaaaaaaaaaccttcaaacttgttcatttttgcaattttatttccatttccaacaaatgtaaattaatcctatgaagtataaaataatacgcattataacatttttgcctatttttgctactatcaattttataaaatattgatatatagttttttaaaccgaactcgaaaaaaagagtttaaccttaccttcaaaattttaaaaatataatctaatgtgtgtgaccttataaacgtttataatatacgtataaggatcatattgcgtttcattttagacttcaaatgatgaacctgcatttgttggagatgaaggataa

SEQ ID NO: 190471 - DNA, 537 bp, Arabidopsis thaliana landsberg
gaatctcttaaacaccagctatttgacccagatggcaaaaccgcaggccgggaaatcctcggtggaacaatgtacacttgcgttgtgtgggttgtcaatctccaaatggctttatcaataagttacttcacttgggtccaacacattgtgatctggggatcaatagccttctggtacatcttcctcatgatctatggcgctatgaccccaagtttctctaccgatgcttacatggtcttcctcgaagccctagctcctgctccttcatactggctcacgactctctttgtgatgatcttcgctttgatcccttacttcgtctacaagtcagtgcaaatgaggtttttccctaaataccatcaaatgattcaatggattcggtacgagggtcactccaatgatcctgagttcgttgagatggtgaggcagaggtcgattaggcccaccaccgtcggatacaccgcgagaagagcagctagtgtacggcgctccgctaggtttcacgatcagatctataaggatcttgtcggtgtctaa

SEQ ID NO: 190472 - DNA, 1340 bp, Arabidopsis thaliana landsberg
atggagactgatgctgtggttatcattggtcctcagacatcaataatggctcatgtactgtctcatcttgcaaatgagcttagtgtgcctatgttgtcattcacagctttagaccctagtctctcggcgcttcagttcccgttctttgtccagacagcacctagtgatctctttctgatgcgtgccattgcggaaatgataagttactacggttggtcagaggtgattgcattgtataatgatgatgacaacagtagaaacggtataacagctttaggcgatgagctcgaaggaaggcgctgcaagatttcatacaaggctgtgcttcctttggatgtggtgattacgagtcctcgtgagattataaatgagttggttaagattcaagggatggaatctcgggtaatcattgtgaacactttccctaaaacaggtaagaaaatctttgaggaagcccagaagcttggcatgatggagaaaggctatgtttggatagctacaacttggttgacttctctgttagattctgttaacccgttacctgccaagactgctgaatctcttagaggcgtgcttactcttcgtattcacacgccaaattcaaaaaagaaaaaagatttcgtggtacggtggaacaagttgagtaacgggactgtcggtttaaacgtttatggtctctatgcttatgatactgtctggatcattgctcgagctgttaagagacttctagatagcagagctaacatttccttctctagtgacccaaagttaaccagcatgaaaggggaggagggtcactgaatctaggtgcattgagcatatttgaccaaggatcacaatttcttgattatattgtgaatacaaatatcactggtgttacaggtcaaatacagtttcttcctgacagatcaatgatactgccctcatatgacatcataaacgtggttgatgacgggtttaggcagatagggtattggtctaaccattccgggctctctattatacctccagagtcactatacaaaaagctttcaaatcgttcgagctcaaaccaacatctgaacaatgtgacttggcctggtgggacttctgagacaccacgtggttgggtttttcctaacaacgggagacgattgagaatcggtgtacccgatagagcaagttttaaggagtttgtgtcaaggttggatggaagcaacaaagtgcaagggtatgccattgatgtctttgaagctgcggtaaaactgatttcttatccggttcctcatgagttcgtcctatttggagacggtctcaagaacccaaacttcaatgaatttgtcaacaatgtcactattggg

SEQ ID NO: 190473 - DNA, 446 bp, Arabidopsis thaliana landsberg
cttggagctcggatcttgggcttagctatacagagaaactgtcacatctctgaatctgattacaagaaagaaaagaagcatcaaacttgctgcttctatatactcttatcttctctgaatcagagatgtcggtttatgcagcactcgtcttcattcatagatttcgatttgaggtaaactaaactcatcagatattaaaaatgggttctttacttctttcgattccgggtgtcaaggagaaaccttaattgatgctatcttgctagatagctgttagatcatatgtctaagagaaggtcatattttcaaatggcggaagggaaagagaattcgattttgcgcaagtactggtacaagacgtttccttctgggaaagcactcggtggtcacattagaattcatacgaacgagaattcagttggttacaatggcaataacaaagatag

SEQ ID NO: 190474 - DNA, 126 bp, Arabidopsis thaliana landsberg
gcgatgtggaaacgaatgcgcatttaactcgctacgatactacacatggcaagttcggtggagaggtaacagttgaaggtaatgatcttattatcaacggtgataaaattcgcgtagtcgctgagc

SEQ ID NO: 190475 - DNA, 40 bp, Arabidopsis thaliana landsberg
aaacaacgacaatgaactacataaggaacacatcctttaa

SEQ ID NO: 190476 - DNA, 355 bp, Arabidopsis thaliana landsberg
agtcatacatttcccaacttccagacactgttgaacaaggcaattggccttgaaagcaaaaggaaggagttatctgaccacaaaaggaaatttcaaggtcagtcaagcaggaacactcgcccgaacaacgctcaaggttcgcagttccgctctggaaatcaaggcggaaacaattatcaagtgcaacgctctggacagcaaggccggagaattaatcagagtcagaaccagcaaaggaacaactctcagaccaaccagaggtctggtgggagttcacagaaccgtcaaggtggcgccaataacacgcaggccagaagcaacgcaccagtccaacccaacggctgtttcaagtgcg

SEQ ID NO: 190477 - DNA, 444 bp, Arabidopsis thaliana landsberg
atgagtctgttgtcgtcgatacagtaaacctgctacaaaattatatacttcatatcaaaatggtgttctttctcgtagtatgtcagcattgttggcatttggtaccaaagttaagatttgcttatgtggtgaatggttagttgtttgtattttgaaccatcaattcaaagcatctccttgagtgtgggtgtagtgatctcggattggttctcttttaaggtgattttagaatgcaatgtgataaaagtaatgcttctgcaggtaattgatcttcttatattcaaaggaatggaagagctgactgacattgtggatcacgcaaagcagcgtcaccacatcatcggtcaatatgtggtgggtgaagggctcgtgcagaatactggaaacaaggatcaaggaaagactgattttctcaagaatttctacaccagcaactacttttga

SEQ ID NO: 190478 - DNA, 95 bp, Arabidopsis thaliana landsberg
gagactgtcggcgacgacgcggcggaggagtatcggatccaaatgacgagaaacgacggcttagtggctttgacggtgacggggagtctcattga

SEQ ID NO: 190479 - DNA, 308 bp, Arabidopsis thaliana landsberg
atggttgctatggaatcaatgcttgagagtgcgtggaaccgtctaatggaagaggagattgggattcttggtcttcatggtatgggtggagttggtaaaactacacttctcagtcatatcaacaatagattctgtagagttgggggtgagtttgatattgtgatttggattgtggtctcgaaagagttacagatccagaggatccaagatgagatatgggagaagttgcggtctgataaccagaagtggaaacagaaaacaggggacataaaagcatctaacatttacaatgtgttaaagcacaaaag

SEQ ID NO: 190480 - DNA, 1117 bp, Arabidopsis thaliana landsberg
  unsure (1)..(1117): unsure at all n locations
atcttttaaatgagttggcaagaagagaaaaggacgctgggatttttccagaagctgatgttgatttgttcatgaaggcctctgctgctcaaggcgtcaagagtagtcttatcactgattatactctcaaagtgagtccctctcaaccttaaatacataattgtcttgattaaacgattatatagtgttcatatgttgagatagatgttattgttctatgaaacagattctagggcttgacatttgcaaggacactatagttggagatgacatgatgagaggtatttcaggaggtcagaagaagcgtgtgacaactggtgagatgatcgttggacctactaagactctgttcatggatgagatatccaccggacttgacagctccacgactttccaaatcgtgaaatgcttgcaacagattgttcacctcacagaagccacagttcttatatctcttctccagcctgctcctgagacgtttgatctattcgatgatataatcttattgtcggagggacagattgtgtaccagggacctagagaccatattctagagttctttgagagctttgggttcaagtgccctgaaagaaaaggaacagctgatttcttgcaagaggtaaatatatatattagaccgttagacctaacttggtattaatatttgacccgaaagtgacttacaaattacatttacgtgtggaacaggttacctcaaagaaagatcaagaacagtattgggttgatccaaacagaccctatagatacattccagtgnnnnnnnnnnnnnnnnnnnnnnagaaattccatgttggatctaaactatctaacgagctatcagtaccgtacgacaagtctaaaagccacaaagcagctctaatgtttgacaaatactcaatcaagaaaacagagcttctgaaaagctgttgggacaaagagtggatgctcatgaagcgaaactccttcttctatgtcttcaaaaccgtccaaatcatcatcattgccgcaatcacctcaacactttaccttagaactgaaatgcacacaaggaatgagattgacgccaacatctacgtcggatcactgctattcgcaatgattgtcaacatgtttaacg

SEQ ID NO: 190481 - DNA, 289 bp, Arabidopsis thaliana landsberg
  unsure (1)..(289): unsure at all n locations
gcactaattgcgaatattcggaaagcggaacgtcagactctaatagcgggtatannnnnnnnnnnnnnnnnnnnnacagtttctcatcttcggtttgcgcatgatagtttatttttttgcaaagctaataaagcacagtgtggaataatattgcagactctgaagcaatatgaatcggtatcgggccaacaaattaatttttcaaaattttcgattcagtttggtcataaggtagaagattccatcaaggcagatattaaattaattttgggcattcatacccttggtg

SEQ ID NO: 190482 - DNA, 974 bp, Arabidopsis thaliana landsberg
aaacttaacctccctgtcggtgacaagtggcttgacgactacatggacgaaacttccaagctttgggacgtctgccacgtcatcaaatccgctatctccaccatcgaaagcttttgctcctccgctatctccatcacctccaccctcgacggccactaccaccaccgtcgtctcctctcccctcagatttcccggcaggtatatacacggaaaacaatgttatttttttggactgtcacaaattatttgtaagtcctagtaacaaaaaataataatatatattcaacattattttggtttgttaataaaaaatccaagttgaattaatgaaatgtttttttttttttgttatgttcttgaaaagttggaatatttttgatatgggacaggtgatacgagcgatatctggatgtaggagagaagcggtggggatagaagaagaaaacagagcattaatggagaatcgtattcaaaggtttcctttttggtcggagcaagttactacgacggggatggagtcttccaagatacagaacggtttcagcggtttcagaggagtgatgaacactatgaagaacataaactcgttacttctcgtgatcttgatgcaaggtcttgtttattacattcccggagacacgacggttccgacggggacgatgatgaggttaaaaaagagagtgaaggcggaaatggagaggataggggtgaggaaaggaatgatgatgtacgagtataggagaagcaagacggcgatggaggagcttaaggtggagctggaacggcggtgttgcggcggcggaggagaggaggaggcggtggagaaggggttgagagagagaattgagaatttgaaaggaagtgttgggagtttgaggaatggaacagagagtattgttgctcagattgatgatttctttgatgatattgttgatggtaggaaaatgcttttggattattgtagccacaggtga

SEQ ID NO: 190483 - DNA, 136 bp, Arabidopsis thaliana landsberg
atggtcaagttatcagaagacaaagaaactgagcatcggtttgatgcagggttcatgggattgtcaataatatccaagcctctccgcagacttgcagctagagattctgtagaacctgtgaatatcttgcttccgc

SEQ ID NO: 190484 - DNA, 367 bp, Arabidopsis thaliana landsberg
gagtgggagaaagttgaaacggaagcggttgatctgaagcaaaagctcgaggatgcggctgataagaacattgtcttggaagatagggtaagtcatcttgatggggcgcttaaggagtgtgtgagacaactaaggcagtttatagatgaacaagagaagaatattcaagcagctgtgactgagagcaccaaggagttgcattctgctaacactggtctagagaagcgagttcttgagctccagaaagaagcagaagctgctaaatctgaaaacatgatgctgagacgcgagtttcttacacagcgtgaagaccttgagattgtgatgattgagagggacttgagcactcaagcagcagaaactgcta

SEQ ID NO: 190485 - DNA, 634 bp, Arabidopsis thaliana landsberg
caaaggaaaagatatctatcttgtttacgagtatgtccccaatggaagcctagaccggttcttgttcaacaacgaccgaccagttctcacctggtcagatcggttctgtataataaaggggattgcagcagcacttcaccaccttcacggtgagggtcaaaaacctttgattcatggaaacgtaaaagcaagcaacgtactcttagacgaagagctaaacgctcgactaggcgactatggacaaggaagcagacacagcaccacaggacacgttgcaccagaactagtcaacacgggaaaggtaacacgagacacagatgtgtttgcgtttggagtgttgatgatggagatagtttgtggaaggaaggccatagagccgactaaagcaccagaagagataagtttggtgaactgggtgcttcaagggttcaagaaaggtgatctgttaatgagctgcgacacaagaatcaatagagagaatttggtggctcgagaagtgttattggttctgaaaacaggacttctctgcgccaaccgatctccagaatcaaggccaatgatgaaaaatgtgtttcggtatctcgaaggaactgaagctctccctcatgatttttatttcttttacggagtctaa

SEQ ID NO: 190486 - DNA, 434 bp, Arabidopsis thaliana landsberg
atggccaaacaggccgcccggccggaccgcgccggtgaagcccggtcaaaaaccggccgggcctgctgagccatcgggcttaattttctgtccaagcccggcccgtgcgggctaaacgggccggccggcgtttagcacaaaaatgggccgaaaagcgggctaaacggaccggtaagcacattttagtgtaaaaaacgagcttagaggtaaacgggccgggccgggctagcccgccgtgcctagtttcctgtccaagcccgcccgcttattctaccgtgccgggctcggaccgggcccaaaaagcgggcttcgtgccgggctcacgggcctcgtgctttttggccatctataggggcaaccatgtgacgtttggtgatggtcttgcaggagatttcgaaatagcatatgggttatctccagcaaattctcaatag

SEQ ID NO: 190487 - DNA, 161 bp, Arabidopsis thaliana landsberg
atagtgtgataaaccggtttgatggggatgtgacttcgggtcatgtagatggtaaagctggtaacagccggttcagcaaaccccgtggttttgttgttgataagattttgatcaaaatctctctgttttattttgatctttatatgtttcaaaatttataa

SEQ ID NO: 190488 - DNA, 532 bp, Arabidopsis thaliana landsberg
ctcaggaaagaagattatggagaggctaaagaacgcatggcagacgattaaacgagaaggtaaagtcaatctgctaacgcaagttgcatggatggacaggttcatgaactgtggtggtgagcttgagcatgttgccttcctcgtcttgtggcttggctatttcgtgttgccatcacgcttccatcatctctgtgaaactatttttcctattgctgttaatctttcaagtggtactaggattgctcttgctcctgctgttcttgctcacttgtatgcagacctaagtctcttgaaaacccacatcagcaaatctccgcctagggtcgaaattagattgagtgccttgtttatgttggttcaagtttggacatgggagagatttagggaactacaaccaaaacctaattcgttgctagcaggtaagccaagagtggctatttggaataagctgaaacagcaaaccagcaacgtgagacagattctcgacaactcgaaaatcgacagttttgagtggcgttcatacacaagaagg

SEQ ID NO: 190489 - DNA, 354 bp, Arabidopsis thaliana landsberg
gagtatactggtgatagaccattccgcaaaaaaccaggacgaccgtacctggtgcttctgggaaaaagagaatgggatctttgaagatattgttgcgcatcaatggtcatatgcgcaattcctttccgatacgttttcatcgaagctgctgctttctccctacaaatataaaatgatcaggagcgccgatttgtaccggtctgtgcgggaaagaagccgttccttcccgaatattgaatggctgcaggaggcggttgtttctgtcggtaaccatgaagacaaagccagtgtgcagctgccatcaacaaagattacttctgattatgtgtttaacagtattctttttgatacccg

SEQ ID NO: 190490 - DNA, 56 bp, Arabidopsis thaliana landsberg
aggtagcagtggccactgtgccttccacggcgttgagggcgaagctcgacgttcag

SEQ ID NO: 190491 - DNA, 610 bp, Arabidopsis thaliana landsberg
atgtcagagtgcttagcgcactatatggctagtgccagcgaacctgatagaccgtccccagtctctttgaatgcggaaaggaactggtccagtgtcccaaaaactagtggcatgcaaaaatgcatcagagcccaaagttcggtaagattgttctggataggtgtgccagtaatcaagagacgtcgtggaatgaggaattgctcaagtaagacattatacagaacctgtgacatagccaacttgtatcttagatgatttcccaggataaaatgttcatacagccaggacacgtacaacctaattactagccagacagttttttaactatagaagcctaaagaaggtctattatgatacagtaataccatatgacatctagcaactaaagatctatcattcagtgcacaagtcaatggattgtaaagttagacataagtgaaccatacactgttaggattcttgagtctttgagcttcatcaattatagcatattgccaaggaatttgagaaagaaagtcttgatccaccaatgctatgtcatatgttgtcagcaatacatcaaatggtaagaaatgtccctgacaacaaaatagaagaaggctataaataa

SEQ ID NO: 190492 - DNA, 374 bp, Arabidopsis thaliana landsberg
cactgtacacgagcggtttatactgctccaattaaaaccatcagcaaccaaaaatacagagatttttgtgggaagtttgatgtaggacttctcacaggtgatgttagcataaggccagaggcatcttgtctgatcatgacaactgaaatattaaggtcaatgctttatcgtggtgctgatatcatacgtgatatagaatgggtaaaagagctttctgatgttttacttcttcaaagtttgatattgttctcaaatccctccatttctaagcagcctttgaagttctgtgtgaaacttcaatcacgtttccttgttgccgttcctatgactggcaggttatatttgatgaagttcactatgtcaatgacgtatag

SEQ ID NO: 190493 - DNA, 77 bp, Arabidopsis thaliana landsberg
gcttgatgattgtcgttggttcttaccacgtgggctttcgtagggcatgccaagaaaagtggaccaaaagatcataa

SEQ ID NO: 190494 - DNA, 188 bp, Arabidopsis thaliana landsberg
tggatttggattcgcagccaaagccagagtcggagctcatgtcactcactactcgatcaatctatctcttcaactctatggatttggattcccaaccgaagccgctaaggaagctcatatcatttatttctcaaagattttctctcgtcaactccatagattcggatttggagccggaccaagaccag

SEQ ID NO: 190495 - DNA, 111 bp, Arabidopsis thaliana landsberg
cgaattcatattcacaccaatatatctggatggctccttctttattatcagttacgatcgcaaagaagacatcggcagaagagttgagattgaaggagttggagatgccaa

SEQ ID NO: 190496 - DNA, 608 bp, Arabidopsis thaliana landsberg
atggcaaatcaacatccttttggtaagatatgggttttcattgggtaggttacttgaagtgacgagtcctagaggagtcattgatctcaattggtgatgtactgcagccacgtcgggctagaaggcacataatgagtgttttgaatgacatcaaaacagagattcaggccatccgtcaccgagaaagagaagcagaaaacagagacacttcattatgggaatccttgggggataaattcaggaaaaatttcaggacaaagcacacttggaacaatattaaaaccacaagcctgaaggtggaatagtacaagggggtatggttcttctactccattcctaagtactcatttctacaatggctcgctcttcacaaccgtttagcaaccgatgatcgaataaagaattggagctcaggaaaacagactgaatgttttctctgtgacaactatgaggagacaagagaccatgtgttctttgcttgctcatactcagccggaatctggaaagaactagctcaacgacttctccatgatgactacttcacggactggaaccaattggtagctttgctcaacaaccaaacaccccacgacttcgtctatttttga

SEQ ID NO: 190497 - DNA, 526 bp, Arabidopsis thaliana landsberg
atgaatcttacaacggtgcaagtaagtaacttacaccaaacatttttgttaccaataagatctattaattgtcaggtttgaccatccataaaattaaagacgaagcagaaaagagaagagttaggcgaaaaaagagagaaataggaagtttaaagtaaaaaaaccagagaaagtaaaagagcagatatagaaattatgattttgaccgtaacctctgaaccaaagattttacagctgtccttgtcaaagtttttttttgtttaattctctcatgaagaaacgctggaaaaggcaactactttaatggtcactggtcagccggatataaccgaagaatcctcatgcttaattaaaattattaaaaaaattgatagtagaaaacaacaaaatgccaattacagaaaaataaataaaataaaacatcacatcttcctctctgttctctataaattggcagacaagagtgtgttgggttctgctttgatatttgttttttagtttctccttctctctgcagaaaccgtaa

SEQ ID NO: 190498 - DNA, 90 bp, Arabidopsis thaliana landsberg
atgaagttaccaggtgaaaacagagagaacagaggactctgtctgaaacagagtaatgaagaagctgaagaaagtaaaacaatcttccag

SEQ ID NO: 190499 - DNA, 204 bp, Arabidopsis thaliana landsberg
gtgaaaagcatttcaccagaagccgcatctgatgaagacagttggtgctgggaacttagctccattgatgtgaatgtcggaactgaggatatcaaagggattgaatttgtccagaaaggttactggattaatattatctccactcatgaggtggacgctagaatcgctcatcctgatggatcacctactagtttgaaaatcaag

SEQ ID NO: 190500 - DNA, 501 bp, Arabidopsis thaliana landsberg
  unsure (1)..(501): unsure at all n locations
atgcggacagaccggttcgctttactttgccgccagcaggaggatggggatgttctcgttcacaccggcgacgcggcacgcgtcgatctggcagatgtcgatcgcgccgctggtgatcaactgcttgaaaaccactgcatttgctacgtgttcgccggnnnnnnnnnnnnnnnnnnnnnnnnnnnnnnnnnnnnnnnnnnngccgaggatgtcgtccgggctggtgggctcttcgatccagtggatcccgtgttggcccaggcgtcggacattggtgacagcctcgccaacgccccagcgctggttggcatcgatcgagatgaggatgtcaggaccgacgaggccacgaaccagcttgacgcggcgctcgtcgtcgtcgatgtcggcaccgaccttgagtttcaggtgagtgaagccgtcctcgatcgcctcaccgaccagccgcgtgaccttttcgtcggagtagccgagccagccggagacgtcgtgtatgccggataa

SEQ ID NO: 190501 - DNA, 285 bp, Arabidopsis thaliana landsberg
atgtgctctcattattatgtggcgtacccgccatttgaagtagcagaggatgatgagaatgccagggcccttcggatcgctgcccgtacgagtagtgggcgtgatctagttgaggagttcatagcgtatggggtgtggcccttggcgcatggatgggcgttgggcgaagtacgccctcgtgagatgccctccctaggagggcggaaagtacgaagtctgccttttgctttggatgtgcgagggcaggaccttgccgtggttgtgcgcgaagcggaggatggggcg

SEQ ID NO: 190502 - DNA, 126 bp, Arabidopsis thaliana landsberg
atggagatctggaatcgagttttaatcactcagtgcttggatttggagctgttgaagaatgcggcgttgagtagtcgtaaatcggaaccctacggttggttttacggcggcggaggcgatgaagtg

SEQ ID NO: 190503 - DNA, 78 bp, Arabidopsis thaliana landsberg
ctgtcgaagagctgcatcctcggcctgagagtcaaacacagaagcagaagctggcactggaatctcaggagcaggacg

SEQ ID NO: 190504 - DNA, 1111 bp, Arabidopsis thaliana landsberg
aaaagttggttcatcaagcagcttttgttaaggaggagaatgatgaggctaagcctgatttggttccacaagataaacggtttgatagtgttgatttaagctacgctcttgatgatttatcatctacagctttggtaaaataccaagtacagtcccaatctgcccttgtttttgatgaattaccctttgcttttggcatcaaaccgaggatccatcatgttgtatcccaagtgttcgacaaaatgtttcagagagagcataatttaccgcgaaagagcaagaagaaaaaaggctacaagtgttggaaattcaagttcaaagttagttatggtataagaaattggctaggcgagcatttattgtttgataggagaggagtgattcatcattggaggaagcacaaggttaagctgttgcatgaaagtgaagaccttaaattgctttacttgtttcaagtgaggagggattcaaagagcatgaccaagcttctgtttgtcgttggaaatgaccaaataggtgatgtttataagaatgattataccatgattcaatgcaccgaagctgaggtgttatggtcacatgtgcatgtagactctattagagtttaccaacggatgcaacacacatttgatcaattaagaggaggttttgtaacaaagtttcaagttgtggcaaagagaaaacttaatcaagtagatgtcatgttctacactgtatttgaccagcaagtagccaacatgtctcggtttcgggggcgggtaaccaagttttctgatagctttcatgttttcacacaagttggtcttgtttcttataggttgcagtttccacctctggccaccaaatctactagtgactctgcagcaacaacacactggcatcataagctgctccacttgtcgtccttacaaacccatagaagaattgtggtcacagaagaaatggcggaattggatccttattggtttttgatggcgcatcttaatgatattccacttcaaacagggacagagactgatgcagttcagcaaaacactttgttatgtagtgatacatcactatacgttcatgcgaatttgacatccgcactgttggagaagactaaagctcg

SEQ ID NO: 190505 - DNA, 97 bp, Arabidopsis thaliana landsberg
ctttaaccaaatcgaaatcggcggatcaaatcgaagaggcatgaaccaaattgaagatgaaaacggtatcaaatcgaagaggcatgaaccaaattga

SEQ ID NO: 190506 - DNA, 212 bp, Arabidopsis thaliana landsberg
atacaaaaacttctaggtgttcaccgtttaccatacaagaagttggctatgcaaggtccactgaagcacagcgatttttgctgcctgtttctgaatgtgaatttaacatcacatctgcaatagaggacctgagctccatgtctgcatgtccacgtgggcaccgcccatttaagggaactggcgcacgatttctactgctattgctcatctag

SEQ ID NO: 190507 - DNA, 511 bp, Arabidopsis thaliana landsberg
atgaacagttggacaccccaggggggtaccaacggcattgcctgggtacgctacggggattttaaaaactatgtgcgggaagcctatggtattgatcccctccccaaagccgccaatgtagcacccatgccgctggaatgcaatgtacgactggtcaacaacagcacaaagcagtacattaaattgagatccggtggttccaatacctttcagaccgtaacgcccataaaagtgggtacccgttttaaaatggaagtaaaaaatacaacggactgctatatctatatttttggacaggaaaccaccggcagcagctatgtgctgtttccttacctgaaaccggggcagtcagggtccaaacattcgccttattgcggcattaccggataccggttgtttcctaaatcggaatccatggaggccgataaccaaggtaccaaagaccaaatcgccattgtggccagcaaaaaagagcttgattataacaagctgaatgatgccattactgcca

SEQ ID NO: 190508 - DNA, 852 bp, Arabidopsis thaliana landsberg
atgctttatgctaaagtgatggacaacaacgacaaggcaaaatttttgttatttgatcaaatctgtactgaaattatcggagaaactgctccatcagtcttgaatggctctgttgatgaggttagttttagtaatggttgtcttctatttctatgtcttatttgttagttattattttcgtttagtgattcttatttaatctagattgatgacccaaagaatctccctgacacactaaagaatctgtatggtaagactttccttttcttgctgtctactgagaaagaaatcacttgggatgggaaggaaatataaaaggtttcaaaagtccttcttaaggatggactacatgaggaagaattgttggaggatccaactgatatggtcaatccagcctctattgtgtctagtgatcaggtaatataacaaaacttaatttttctagttgtttttagactttgaatctcttaaactaatctgtatttgtgtttctaatagattccactaatgatagagtgtactcaagagagtaacgactttgttactccatcatctaaacatgtgtatgctgataatcctaccgcatctgatcaagcttctgctttaaagaagttgtgcatcgaaccggttgacttgaagcagtctaatgatgacttcggtgaacagatgtctacaactaaggtgaaagaatatgtgtctaaagaaggtgtgattccaaatgatttgaagaccagcattgctgttattgattctcaagctgttcggcacgcaacagttgacagaaacggtggtgttggagcaaacatagtgaaaaaggaaggggccatcaagaagggagctgtgaaggtcaag

SEQ ID NO: 190509 - DNA, 2290 bp, Arabidopsis thaliana landsberg
agaggcgagagaactgcccattgacactgcgaactgcggcggagggaatcctcaaacctcgtcggagcaaaagacgtctaccggcgactgagggagaggaaattcggcgaagattgcgactggggacacggagagctgccgtcgacgatgtgagagacatgtaagagcgagggaactgacgaaagaagcgaaagaatagagaggacgagctgcgcgaagctaaacaagagacggttcggagcatagctaccggaaaaaaaatattcccggcggagactgctactgacggagacgaaattaaggatattgcaaagaagctaaataaacccaacggcaagaggttttatccttgtgtagttgtgtgtttttgcttgtagaggaaaaaagtaaaataaaataaaatgaaatacctcatttcttgtacaacacacaaaattattgtgaaaaatattctctatttcactaaattggcattttatttttctgaatttttaagtcgggacaaaaaagaggtgctgatttgcaagaaagcaaacgtggttctcatatagccaaatgtgtttgagtgttgcaatttgctatcctccaaaaatataatgactacaaaatatcttaaatcttttttcatgatattaaacttaagtgaaagtattacaaaatctgatcaagttaaaagtttacaccacacatatactttccaggtatttgattcagaaaaaatcatattgatcagatttaaacaaattttaaattatatataagttttttcttacacacaaattaaacctttgatcagtaatagactactggtagcatgcgatgagcttgcagtagaatcaaacgcacattagttatgggccgagagctaggcccatgtccagggacggataaaataatcttccagatgtttctttattatccacgtggcgtgatcacgtgaccacgtctcgtctcgtctagtcctagattagcagagcctctctttcggccagcgggttaccttattatcgtcacaagacgaaactttcagaaaaaggcaaaaatcactgtcaaaactcaaaagccttgagaccaaatttccgattttttctcctctgaagaaatccaacaaattgtaccatgattccagcttcactctacttcttctagggttcgttcgttttctggagctgttgcgcaatgccagtagcttacacatttccagttctcccttcttcttgtctgctttgcggaatctccaatcgcagcaccagcttcgtcgtagatcgcccggagcttcagatctcaggtctcctcgtcgttcgttctgaatccggtgaattcttcggttctggtttatctttgcggcggtttcagcgagaaggacggaggaggttgaatgctgctggtggtggtatccatgtcgtcgacaatgcgccgtctcgtacttcttctctcgctgcatctacctctacaatcgaactcccggttacgtgttaccaggtattttgctccgactgacttacttttcggaatctctgtagatactactatctctcgcgatttgctacttagctcctcgttgaagtgcaagtggaacttgtttttatccttctaaattttgttgaaatagaaacattttcctccaatttgtagtctctagcgcgtagaacgagatggatgtattgatttggcaatttaatattgtatcatagttcatttctgcaatagagtgtaaagaatgtagcgtttcgtttgttagacattattccaggatactgttaattgtattgattttgcagcttatcggagtttctgagcaagctgagaaagacgaggtcgttaagtcggttataaatttgaaaaaaactgatgctgaagagggttatacaatggaagctgctgcagctcgccaggttaagacctatagtatcactagagttggacagggaatgtggcttcagtttcttgatactttgttcttaatgtgtaggatcttctcatggatgttagggataaacttctttttgaatcagaatatgctggtaacctaaaagaaaagattgctcctaaatctcctctcagaattccgtgggcatggttgcctggtgctctatgccttcttcaagaggtactacttctgaccttttattgcgttttatccctgcaaatgttttgtactgatctttctgctactatgcttcaggttggacaagaaaaacttgtgctggatattggccgggctgctctcaggaaccttgattcaaagccatatattcatgatatattcttatctatggcacttgctgag

SEQ ID NO: 190510 - DNA, 128 bp, Arabidopsis thaliana landsberg
agtggagaaggaaattaataccagtacggtcatcaagaagtccacgaagtccttcatttgcgccaaaaaaaccgccgccaccgccaccttcaccgcctctgtcaccatcatcaccaccatcaaattaa

SEQ ID NO: 190511 - DNA, 55 bp, Arabidopsis thaliana landsberg
atggcgagcggaattgagctcgccggagctaaggaaagggggctggccggtgagg

SEQ ID NO: 190512 - DNA, 326 bp, Arabidopsis thaliana landsberg
agcagttattgagattccaaactcagagaaggagttgagagttaaagacttatgggctaatggactagggtggaagctggataaaattgagccatatatctcatatcacactcagctggagttagcggctgtcgtattggattatgtgaatggtgcgagagataggctgtcttggggttattctgcagatggtgttttcacggttaaatcgtcctataggttgctgactgaggatcatgatccaagaccgaatatacatgctttctttgatcgtctgtggcgggtggtggctctggagagggttaaaacatttctctggttagttg

SEQ ID NO: 190513 - DNA, 239 bp, Arabidopsis thaliana landsberg
accgaagaaaacgcgagcacagagattcaatcttcctgatccagcccagagggagaatgaacgttgaagtccacaagttgacaatgccagaagtcacagaagagatcatctgcccccgtcctgcaaaggagagaaagcgcacaacccaagagttgaagcgggcagagatcttctcaatgagaggggagtacacagcgatagttaacttcctgctcatcagaggaaccccagatatctga

SEQ ID NO: 190514 - DNA, 413 bp, Arabidopsis thaliana landsberg
ggctactttcaattgctcttttcctgcattgagaagctactctcatccctgaatgttgaaagcatcgtggttccagcagctgaagaggcagagcccttatggatgaacaaatttgggttcagaaaacttgcacctgaacaggtaaaaacgatgactttgactcgtttgtgaattgtgtagtttttgaaatttgttctaagagaatctgacaacaattaaatccttcgttgctacagctcagtaagtatataaagatatgctaccaaatggtgaggttcaaaggagcatccatgctgcagaaaccagtcgattcacaccaaatcattgacaagacaatcgaaaccggtgcatctttagaagaaaattttgatttgaaacaagccaatgagttgtatgttcatcctttgtgttga

SEQ ID NO: 190515 - DNA, 135 bp, Arabidopsis thaliana landsberg
aggcattgttctgtcaacctggatttaaaagacaacgaccgcgttaattttgaagatcggtgctggaagagggacttactggaggaattgtttcacccgtctgccgttgagctaataaccaaaacaaacacggag

SEQ ID NO: 190516 - DNA, 639 bp, Arabidopsis thaliana landsberg
gtaggatcagaaaccagctatgaagaagagcatccaggaaaagagaaactctcccggcctgtccatgagaaaacaataaccaaggaagaacctggttggccatcatttgggcaactccttactgatctctgcaaacttgctctcgagtttataaccagccacctagttccagcccgattccaaaccaaccccaatctaaggccattaaaagatagactcataatgcctgaagacgaacaagaaccacctcgagtccaaaggcatactgccccagcaccaatctcagaatcccgacatgctcacttacctaaagctgatgatagttaccctgaacataagacgccaaagctaagatcaagtagtgtaatgaaggaccctactttgtcatcatccaagcaccatcggacatcatcaaaacggcaggactatgctcagttctatgcctcgggagaggttgcccaaccgaagatccataaagagcggtcaaggcgtcgtcatagagataaaacaaccgagacagaaccaaagccaacaccatcagatacggtgaagcctgtggagtacagtaatagttcaaagtttgatcattacaacatgaggagcagcaagtatggacctgaaactccatttcgattctag

SEQ ID NO: 190517 - DNA, 813 bp, Arabidopsis thaliana landsberg
atggggaaatcaaatatacatgtgcaagaatgggattgggaaaccaaagatattctcaatgatactactgccatggatgtgtctccttcttcagctattggggaatcaagtgagcataaggttgctgctgcttcagttgaattagcttcttcgacttctggtgaggcaaagatttgtctaagtttcgcgcctgcaactggagaaacaacgaatttgcatttgccttctatggaggatcttcggagagcaatggaggagaagtgcctcaagtcgtacaaaattgttcaccccgagttttcggtccttgggttcatgaaggacatgtgtagctgttacatagacttggcaaagaattcaaccagccagttgcttgaaacagaaaccgtatgtgacatgagtaaggcgggtgatgaaagtggtgcagttggcatttcgatgccgttggtggttgttcctgaatgcgagatctcgggagatggctggaaagcaattagcaacatgaaggacattacggctggtgaagaaaacgttgagattccatgggtgaatgagatcaacgagaaggttccttcccgtttccgttacatgcctcacagctttgtgtttcaagatgctccagtgatattctcgctctcaagtttctctgatgagcaaagctgctccacttcttgtatcgaagactgcctggcttcagaaatgtcgtgcaattgtgcaattggtgttgataacgggtttgcgtacacattagatgggttactcaaagaagaattcttggaagctcggatctctgaggctcgtgatcaacggaaacag

SEQ ID NO: 190518 - DNA, 89 bp, Arabidopsis thaliana landsberg
taccaataagaggcaaaaaccaagatcatgaaaacagaaatgctgacaatgctagcaacaataatcttcactcgattgcttccagctga

SEQ ID NO: 190519 - DNA, 1026 bp, Arabidopsis thaliana landsberg
  unsure (1)..(1026): unsure at all n locations
atgttctcctcgatgtttgatttcaagagggtccgatcggatggttgcgatgagattgtgcatatccccacaatgtcgcctaaggacgggtgcacggtgttcttgtctagccgcctcgttacctctccttgaattgatttgataaaagtcatcagtgtatatttatcacttttcacgatgtaccctaagtgttattaaatatgagagaagatgccatcgttttaccatgtcttcacctaatatatgtgttgtttttattttgttacaatgatgttgtataacttatttcttatgttaaaattgtatttttgttttgcatcgatcttttattaataaaaaatgaaaaaaggttcaacatcttatattggtagagcttttagaggagcatcaacatctgttaataaaagcaaataagggaacatttggaagttgcaaatcaaatgcacgttctctctatatgctttaacatgaagcattttggatcctccgaggatcaagatacggatcgaagagaaatctgccggtgttgtgacagttagtgagtacatgtttctcttaagaaatatttaacttgatcaagggaaaccgttataagcatatggtttccaaatatggatacacactgtgaagttggtagttgatgaatacatgggagaatcgaaaagtaaacatggaggtgtttgtaccaaangagtatagcaaaatgaacaatctcaccatcaaaatcatacaataatctgagttatcagaaactcactagtgtgtcattattttaaataacctggaagttctaggcttaactccatacattttctatagcatttaaaattttcccttagctcgtgtagttctaaatacttacgttttctgtttatttggattcaaccaataacccaaccgcccgttgtcttgtattcagctacatctagatacaaacttcagtttacgaaactttcaggatatgagacagtgataaaatttcttaattatacacaaaaacttgtaaacctggatcgagaactataa

SEQ ID NO: 190520 - DNA, 138 bp, Arabidopsis thaliana landsberg
gaaactaaaattctacaaggggagtacgaaaattcgctagagcttgctccaatacaacagaaatctttgagtgtgatgatgatgagtgaaagagagcgaacaaagcaacgagaagaagaagaggagctggagacttga

SEQ ID NO: 190521 - DNA, 291 bp, Arabidopsis thaliana landsberg
atgcatgaagtgaatgttcgtggggttactgatattgcagcgattatggaaacttctagtggggatggttctcagaatgattttggctcagaagcaaagaaacaaagagttgacgaggattcttcagatgggattgctgcaaacggttccttatatggcagtgaatttaaatctgatgatgcaatggaaacagatactacagttttaagagacttcgaaggtgcaacagcactgtctgctaatgcttcattggctgagcgtgctattgagcctgcacttgtcatgtttgag

SEQ ID NO: 190522 - DNA, 38 bp, Arabidopsis thaliana landsberg
ctggtcatcgtggtagagatattcgaaaatgcgagtaa

SEQ ID NO: 190523 - DNA, 69 bp, Arabidopsis thaliana landsberg
tgctttgtcagcgtctacaacttgcctttacgagctaaaaccaatcttcgacaaggtgttattgtttaa

SEQ ID NO: 190524 - DNA, 105 bp, Arabidopsis thaliana landsberg
actccagtagcgtttggagccatcttagggaagttaactggtgcagagaaagagattatagcagatgttgagccttgtcgcttgcttgacggcgttgacaactaa

SEQ ID NO: 190525 - DNA, 312 bp, Arabidopsis thaliana landsberg
cgaactcaaattatggatttggagaagatattataccttttggtgattatgtcagtgacgccttgccctccgagagattccaaccattccctgatgagcataatggtacaagcatgaacactagtagtctgggctcgggtggtttctatattccaatgcctattgaacattggaatggtcatttgcgtcactctcagtttcttggtcccttaacttctgcagggggcactgagaacatgagggagtttgaaaggccgatgtactcagaccgtaacatcttcccttcatttgtttatccttcatcatcaaggg

SEQ ID NO: 190526 - DNA, 938 bp, Arabidopsis thaliana landsberg
gtatgggatttgactgctggaaagcttttgcatgaatttaagtttcatgaaggacctatccgttcgctagacttccacccgcttgagttcctcctagccacaggttagtctgtgattctttgtttttcaggcattatagggatgacttggtgtcgttttcgattggtagattaactactgacatctccttaatcacagttttatattgaattcttgtgatttcacactctccctattcatattcaggttctgctgacaggactgtaaagttctgggatttggaaacgtttgaattgattggatctacccgaccagaggtactagcctgtggtgtcactagatactgttttctaggggactctataacaagtgttttttacgtttatttccttttagcgtgatcaccttgaagggaaacctcacacatttaaaatatcagaaatctgcttattctcggccttgatctgaagagtgtgttagagaaatgccaagataaaatttagttcttaaaaagatgtagaagtaaataaaagtgaacggagtccagaaagcagcatgtgatgaaatatgttttggcgttgagctagctttgtagccgtctcggaagatgttattcacacaatttatgtggtatgtggttttccttgttttcacaggctactggagttcgttcaatcaaatttcatccggatgggcgaaccttgttttgtggtttggatgacagcttaaaggttttgattttctttgtgatgagctttaccatataaagggttctccagagtcaaaaacattgatatcataagctgatgttcataattcaggtttattcatgggaacctgtggtttgccatgatggtgttgatatgggatggtcaacgcttggtgacttatgcatcagcgaaggaaagctcctgggttgttcatactaccaaaattcc

SEQ ID NO: 190527 - DNA, 350 bp, Arabidopsis thaliana landsberg
attggttcgacagtcacaaccataagacggcggaaataactggtcaagtggatttcaacagtcacacggatactgtcgtgcggacggccgtggcactcgtcaacctgctgaccgaaggcgaggatcgcagccgggagtaccggccgccgcagggcgccgagcgggcggcgcggctcaacgccctgcttaaggcggccggcagccggaccgaggtcaacgcatcggaagcggaagcgttcgacccagtggcggccgcgctccgcgctgtcttcgcggccgtcgccgacggggacgtctacggcgccgctcgccgggtcaacgacatgctcaggaccactggggcgcacccg

SEQ ID NO: 190528 - DNA, 161 bp, Arabidopsis thaliana landsberg
cctattttggaggcaaaaggaatggctgtgtggcttgacaagaggtaccgtcctgtttgtatcccgtcttacatacgctctaatttcggtcacttccaacgtcaacacgttgtcgaatattgatctagggctcgacaaaatatttgttatatttcgctttg

SEQ ID NO: 190529 - DNA, 292 bp, Arabidopsis thaliana landsberg
gtgctaattcctgcaccaacaacgggtcttcttatcgggttaagcggaaacctgatggcagtgttgagcggtacaaggctcgcctcgttgccaccaaaatattcttgtacacatggtatgtacatatacccctactagcctttgaataaaccacattgattgctctcccgatagatttgtgcctatcagaaataatggcaaggccctcatcatcaggtatcacacagttgagttgcttgaaaaacaacatcggttgacttctagattcgacaacctctacgattatcaatga

SEQ ID NO: 190530 - DNA, 171 bp, Arabidopsis thaliana landsberg
atgtcagcggcgagcgcatcggagtgggcggagcatgcccgtgcggcgcttgaccaggctgggcatcgcgagggcggggcacgcaatgcgatcatcgacctgctggctgagcagtcctgcgctctcagtgccttcgagatcgaagatcggctgcgggcgagcaagcgtagc

SEQ ID NO: 190531 - DNA, 109 bp, Arabidopsis thaliana landsberg
aatgtgtaaacttgctgagaaaaaaatgcttacagggagtggtattggacgagaaaaccgcttgttcatacccaacaagctctcatatgttgcattccagctgcagtaa

SEQ ID NO: 190532 - DNA, 63 bp, Arabidopsis thaliana landsberg
atggcggcaacaagcgacgagcagatgaatttgcttctctccagtttcgatcaaatctacgag

SEQ ID NO: 190533 - DNA, 81 bp, Arabidopsis thaliana landsberg
gtttttcagacactgacgtttgatctgatcttgtctgacgctctctcacagcttccaacaacgttaatccatggcaaataa

SEQ ID NO: 190534 - DNA, 158 bp, Arabidopsis thaliana landsberg
caacctatcttgctgatattcttaaaatttcaaagctctgtcgcttcaattttattcatatctctcgtaaagcgaatgatattgtggataggttagcaaagcaagctagatgtaatgctctcgattatgtaatccgttggactctacattgtacttga

SEQ ID NO: 190535 - DNA, 91 bp, Arabidopsis thaliana landsberg
atgggctatgaccgcatcgctttcagtgtagcctgtggacgaatatataacagaaacaaggctcgaagtggtccatcttatttggttttga

SEQ ID NO: 190536 - DNA, 213 bp, Arabidopsis thaliana landsberg
tacccaaaaaacaaaatcacatctttggcagttctagactcaaacccaacaccagtttcctcaattttgtcagaaaccaaatacagaaccaaaaagaacgaaacacaatttgagagagaagagatcaattaccagacgcttgtgttgaagaaaggaagagagaataaacatgtggaagaaagagcgtggcatattcagataaatcaacagtaa

SEQ ID NO: 190537 - DNA, 377 bp, Arabidopsis thaliana landsberg
atgtgtggaatcttcgcgtatctgaattttcacgcgaacaaagagagacgatacattctcgatgttctcttcaatggtcttcgtcgtcttgaatacagaggctacgattctgctggaatcgccattgataattcttctccttcttcttctcctctcgtgtttcgtcaagcaggaaacattgaatcacttgttaattccgctaacgaaggttactttacttacggatctctgaattttgaatccaaagtcgccgcctttctgaatttttgtgtggtggtgcttctcgatttttgcagagattacgaatacggatttgaatctagacgaagttttctactttcatgctggaattgcacataccaggtgggcttctcatg

SEQ ID NO: 190538 - DNA, 314 bp, Arabidopsis thaliana landsberg
atgtcggctaactgccgatctttactcttggctcggatttgtgccaatagtcacatctttaggcatatgaaggttcaagtgaggtatagcgttattatgtccctattgcgcgagtgcaatagccaattagtaccatgatctcttccatttctatgtgcttttcttgtttgtctttccgagtatttgtgaaataacataagcaactctcgttcataagacttctctcactccctctgtcagcctttatctagaggaatcaaggcggttctccggcttgttccttttaggttcgagctctcctctcgttgcgtcag

SEQ ID NO: 190539 - DNA, 431 bp, Arabidopsis thaliana landsberg
atgaagaaaattgtatccaccctcctgggggcaatgctatgttttatcatagcagcctccgcacaggaacgtacagttagcggtaaagtaactgatgccaaaggtgcaccgattccgggtgttaccattaaagtaaaagcaagttccaaagttgcattaagcgatgagaatggcatgtacagaatcagcgctgcacctaatgcaacgctggtattttctgctgttggattttctacaaaggaatccaaagcatctgctacttcattgaacatgtcattggatgcttattcaagtccgcttgatgaagttgtagtaactgctgccggtaccaccatccgaaaaaaggagcagggttacaatttcaccactatcaaattgcaggaactcactgccgcaaacccaccaacattgccgccggtctttgcggccag

SEQ ID NO: 190540 - DNA, 1159 bp, Arabidopsis thaliana landsberg
atcgaacaaccgtggttcggctcgggtatgggccagttgctggacaagattacatcccggctggctactctttactcgttccacctcttttctctccatggctgctttattggcttgggatgtcatcaagtgggacgcaagcatcttcgtctattacacagagtgatctttcttcttttagtgttctaagccaaaattctgaatgtaatcagatccgcattgttcatgactaatgttatttggttttgtaacagatggaccttcatgcttgtgatcatctactttgcggtacgtcgtaacagcttttcgaataagagtgttaaatccgggtattgtttatgttcattgggttctctgcagatgggtattgtagcttcagtatatggttgtttgatacatttaaaggagctaacacttgaaactgatgaagatgtggtagtagaaaaggtcggagatgagttccggcgaagattagaggtttgtggttgtttcatgcagacaatttttcaggttagtgtcaacagtcacggagtcccaattttttgcttcatacacactttcacacagtaactcttctgtctggtttgtgttaaagacaagtgcaggggctgtagtgctgacggacattgtgttttggttagttatagttcctttcctatcgactactcgctttgggttaaacacggtaagaacgaacatttcagcctatgtttaacaatgaaactactcaagactctactaatcgaatttatgatttgatgcagttgacgatctgcatgcacacggcaaatgcaggcttcctcctgcttgaaacactcctcaatagccttgtaagcaaaaatgaagttaaccaagacaatagattttaagaaaagagcctaaagaaattcgtttgttctgatttcagccattcccttggtttcgaatgggatatttcgtgctatggagttgtctctatgttatcttccaatggatcatccacgcatgtggcttcacttggtaagcaataacgacttacattgatgatacttaacccacaacttagcgcaaccaacctattctaatcaactcgaacctatctcaggtggccatatccgttcctcgagctagacaagccatgggctccgatatggtaaccatcctcattaattctatctaa

SEQ ID NO: 190541 - DNA, 64 bp, Arabidopsis thaliana landsberg
gcttcatacgcgtaaaaatggattttcaaaaagagaaaaagacaaagactcaagcaaaatctag

SEQ ID NO: 190542 - DNA, 745 bp, Arabidopsis thaliana landsberg
atcacaagcctccaggcaaaaatcgaggcattgaagactttgttactcacggcaaaggatggtgaagttaaggctcgtactgaagctgagattgagaggctacaacgtcaaatagacaaaatttgcagtgacatactcaaaaatatgtaatttgtttttcattcaaaatccaaagacttgatacactacgtagattttatcgtttgttacgttttgatacacaaatagttgaattatatttttttagtatacaattattgacgtttccagcagaacaataaaattcttgaaaaattcaaataaaacacattcactcttctcttttattttgttctgcttctgttttcgatcatattgttgcacgaagcttgtggtataatgggcttagaaatgaaaatataggcccaatagtgacgctcgtcagccgtcagggaaatacggttacaagaattcagttaagatattaacacgtgtcatattttagttggattattcactgtagttattgagggaccgtataaattctgccgttttcttctcatttcttttcactcgcttcttctcttctctaatctctctctactcggaagtttgctaccggcggcgattgatcggaacagattcttgccggagaatcggtttcgggaactggaatcatattccgttggtgtgcaagaagatgaagatcattgtcaaaacattgaaggggattcgcttcgagatcgaagtaaaacccaacgattcg

SEQ ID NO: 190543 - DNA, 431 bp, Arabidopsis thaliana landsberg
atggcaacaacgagctccgaccggttaatcgccggtttaacggcgtcgatcggctcaatcgaatctcgttacgcaaatccagctcaatccgtttctctaatctgtcgaaatcaaatcaatggcgcaccgcctatcgtcttgcggtcctctcgaaggtccaggctgtggttaatcgaggcgattcctccggcaaagtcctggaacggatctaacgatggcgacgaagatatcaagaagtcagacactcgtaattacgcgatcggtggaaccggtggtcacgcggtcgccggaaaagatgacagaacgatggagatagtaatagcagcggcgaccacggcggcgctgggtgtcgggaatcgcgtactgtataagctggctcttattcctctcaagcaatatccctttttcctcgcgcaactttccacattcgg

SEQ ID NO: 190544 - DNA, 908 bp, Arabidopsis thaliana landsberg
atgttccctaatttagtggatcggacttctttatgcagcacggaggaattatcagaattggttggtcctgagacacctcttccagagaatacatataaaatgcctcctcgaaaaagcgataagcagctcaaggaagagtggaacaaggcaggtcctcgacctcgacctctacctcctcctccagacagacctatctaccagcacgaaaaaaaagtatggtatggttggcttacacagaatgacacagaacctagcccttcgcctatggatcttaggaatcaagcacacaggttactgtgggatgcccttgatttagctgtttctgtataaactgatgtgttcttccctgggttcaacaacgatggtagtggatggccagatttttcaagtttggtgatgggtcaaaggctctatgaaagaccctcttcacgaacatatagactggacaggtaagcagaattattgataaaaaattgcttactgcatctaccgtccttcctcatagttaggttgattgcacaccttttatgccgataatcttcttattcttttgggttcattgatccgtaattttagctgatacatgcatcttatgagttactagcttttacaaaatttctcttttgcaaaattcattaactgttcactgatttgctcaaacaggaaagttattcaagaacttttcaacattactcgtgaggacatgtaccatcccaaccgtaactggacacttcgtgtgaggaaacatcttaactcaagtttgggtgaaagtgggcttatcaggcagtctatgttgtcgaaacctaggtcgttcctttcgcatccacttcctgaatgctcatgcagaacctcagcccttgaggattccaggccaatccagagtgatgatggttgatttctctatgcag

SEQ ID NO: 190545 - DNA, 989 bp, Arabidopsis thaliana landsberg
atgctgacggatcttgatattctcgactgtcccatttgctaccaagcattgaagattcctgtcttccaggttttgtttgtttctccttctttctgaatgaatggtttcaactttcttttaaactttgcattatgaagagtataataattttggagtaaatatagaagtagagtatccctagttcatgtttggatttgcagttattgaaaatatatatgtgggtagatagttttgcaaggacgagtttatatcctctctacgttgttactgtgacagcttttaatgaaaattcattggcttaatattttcagtgtgataatgggcatttggcttgcggttcttgctgtcccaaactgagtaataagtgccctgcatgtactttgcctgttggtcacagtcgcagcagagcaatggagagtgttcttgaatctattctgatcccatgcccaaacgtcaggtttggttgtaccaagagtttcttttatgggaaagagtcagctcatgaaaaagaatgcatcttctctcaatgctcatgcccttcatcggtctgcgattacactggctcatacaaggatctctacgctcactataaactgactcactccacgaatattttctggaatattaagcgctttagatgtggcaatttctttacgacctccatgctcatcagcgataagatactaattaaaagggtacatgagaagaaactattgcttgcagtgcagtgttttagggaaccgtgtggtgtgtatgtgactgtaagcttcattgcaccatctgctccagaagtaggagagttctcatatcaactctcctacaatgtggatggacacactgtgacttatgaatctccggaggtgaagagggtttgtaaagtgatttttgaaacccctcaagagaatttcatgttgatacctcacagtttattgcgtggtgacttgttggagatgcaggtttttatcatcgaaaatgtggaccaagagtaa

SEQ ID NO: 190546 - DNA, 678 bp, Arabidopsis thaliana landsberg
atggaaagttttctggtttcgattagcaagagatgcgagttttattccgacaacaaaagtatcgttggttttgtagaagaacctaaagcgtttagttttaggtttcatgagtattctgctattactgttcaggaggaggagaagaagaagatggtctctgatgaaaacacgagttccatggttttggagaaatcagaatcagatggttttatgaaggaacacgtgaaagaagagatgttggtttatgagttcatgagctgtggtgttttaaatgaatcattagttcacgagaatgttgttggtggtgaagacaacttgtttgatgatgatgggttcatagaactaaacccaagtttacagatttcaaactttccttatggagaagaagaagagtttatgcagagagaagaagagatgaaaatgggctttgatgaacaagaagaggtatatgatgagtttgatgatggttcagattcagatgatgatgagtttgagcatagtgatgtgattgagaagttgaaaacagaactaaggactgcaagaacaggaggattgtgcactattcttgaggaatcagagactccattacaagagctgaaaccactcaagattgaaccaaaaccagatcaacacaaagacagaattgctgaaattcacagggtttacaagaactacgcg

SEQ ID NO: 190547 - DNA, 283 bp, Arabidopsis thaliana landsberg
tctcatgtttgactcgttcactctctccgacatgtggctgctacccctgcagcaggcgacttgggtgaaacatttgagtctaaacaaggtgacgtggggggaagggggcaggcagcacactatataagatctcggcgagccaacactgtgtcttccagattgtcttccagactgacggcgctcggcatcttctcgctgcattgtccaaaatgacgtggctcgagtctctgtcactggattttgcgagtgtgccagcggcggagctgccgccgatgattgcgtg

SEQ ID NO: 190548 - DNA, 181 bp, Arabidopsis thaliana landsberg
gcaaacgaccaagaagcttcaagattttgtagttatcacgagatacattgtcgtcgtatccaatcccaacgtaatcagtgtgcaagtaacaaaccgacggtttgatccatttaatttccctcaaaaccggattccaaactgcgagactgttgtcccattttcgacacgtacacagcattag

SEQ ID NO: 190549 - DNA, 157 bp, Arabidopsis thaliana landsberg
atgcgacgcattcgaccgagccgagccaaacaaccgcgatggcgagcctcgagggagagggcacgcagacgtggctcctgcgcactgtcgtttagaagacggacttgtgacgacgcgacgagcccaacacccgagcatgggtcgccgctgcgcactg

SEQ ID NO: 190550 - DNA, 204 bp, Arabidopsis thaliana landsberg
gtttcattgttagtatttcaggctgttctagagaagctcagttacatgctcattgggaggcatgatattgagaaattgatgcggcttgatgcggcgagtgcttgtttaccatctacgcttggccatgccgtttctcactctgaggctgttggcactgaagtagaactcagtgacctattcttgagtttgcgacctatcaagcag

SEQ ID NO: 190551 - DNA, 1299 bp, Arabidopsis thaliana landsberg
tcccttcaaagtttgtggttttgggatttgcagaacgaagcagtcgaagaaaaatgtctgcaactaggtctacatttctaggctccatcttcagaaccgctaaagcacgaattttgatctcacccatcgctagacgctctctcccaagccctaatttcacttcctcgcgcttccacacttcttcttctcttcgtcagtctcgaatcgaaggttctattccaaggtttgtgatgacgtccttgatgtttgaatcctcttctgtttttttcctgaaatgaatgtttttatttgtgggtttatcttactctaatgcaaagtttcgattttgattcgaatccagaagttttcttccgagcatccatgtacgatttcatagtgttagtgcttccacttggttcagttctcgacgaacctcttctcaaggtacttatgtttctctgtatcaatgatgcttgttaaccgaagaatttagtcgaaatggtttcatcaactttggtaacgtcttctaattgagagcatttctcttgaatcaaagtgtaggtcgattagcatctgtttccatgtatatacaatactcaacttcagtcccaacacgttcacttagaaggagaatcagcaatagaaagaaatcgagtgcaaaaccaatccttaatgtttcaaagtttcatgaaacgatatcaaagcttccaccaagattcacccctgaagaactagctgatgctataactcttgaagaagacccgtttctgtgtttccatctctttaactgggcatcgcaacagccgaggtttacgcatgagaattgctcttaccatatcgcgataaggaagctcggtgctgcgaaaatgtatcaagaaatggatgatattgtgaaccaagtgctctcggttcgtcatattggtaacgagaatctttacaattcgatcatcttctatttcacgaaagccgggaagttgatacgcgctgtgaatatatttagacatatggtgactagtaagaacttggaatgtagaccaacgattagaacgtatcatattcttttcaaagccttgttgggtagaggtaacaactcttacataaaccatgtgtatatggagacagtaagatctttgtttaggcaaatggtggatagcggtattgaaccagacgtattcgctttgaactgtttggttaaaggttacgtgctctcgcttcacgtcaatgatgcacttaggatatttcatcagatgagtgtggtttacgattgtgaaccgaattcgtttacttatgattatctaatacatggattatgtgctcaag

SEQ ID NO: 190552 - DNA, 1350 bp, Arabidopsis thaliana landsberg
ggtgaagaattaaatgggtatggagaaatgtacgtaaggaggcatccaaagctaaagataaggatagtggacggaggcagtcttgcagctgaggtggtgcttcatagcattcctgttgggaccaaagaggttctctttagaggccaaatcacaaaagttgctcgtgccattgtcttttctctttgccaaaatgccatcaaggtaccttctttttctacaaatggagagagtgaaacaaaaggattcaatttggatggaccgtttttataaaaaagaaaatataaatatatgttaattcttctctagctagtgtcaatatacaaagccaatttgcgcgtgaaaataggatcgaacgtaaatagagtcaatggagtttccatatataaacgttacgccactaactatctacagtcacgtggcctactttttaagtccaaaacaattttggcatatcattttatgatttggtttgagcttgcgaaagatatacatattaaaacattttaatgataaattcatatttcagagaaattataatcggttttcatgctcaataaattaaaataaataggtaatggtgttgcgcaaggaagagcattccatgctcgccgaattcttggccgataagtgtaaggaaaatcttgtgctcacaaccaattactatccaatggtatgcgtaaacgacattaaattgatagtaacatattcaagtttacatacaaattaatatgtaacggtacgatgtagatttggttggtggcagatgggctaagcacaaaagagcagaagatggcaaaagatggaactccatttcttcctttctctcaatttcctcataaatactttacgaaaagactgcttttaccacaccaatccggctatgattatccctctctctgcccaaaacattgattcttgtgaggtatgtatacaacaattccagtaaaatagtctttatagtttctttgcgttacggtttaggtttactatattttttctaatctttacctaatacacttaaaacattttaaccatgctctacacgtaaatttcaaacatgcacaaacagaacatatatttatggtgtcaagtgtttgtatttgatgaagataggttataatttgtacttaacacatgtatgtctatagaattggctggggaggagagtgatgagcgcatggagagttggtgggatagtacacgcgcttgaagggtggaaggaacacgagtgcggtctcgacgacaattcaatcattaatcctcctagagtttgggaagctgctcttcgaaatggtttccaacctctacttctgccatctttagagacctaacgggttcaacaatttgtaa

SEQ ID NO: 190553 - DNA, 270 bp, Arabidopsis thaliana landsberg
cgccagcaggaaacggaaagacaaagtcaatgacagtggtgatgaagatgacagtgacagagaagaggatgatggtgaggggagtgaacaggatggtgacgagtcaggtacgcggaagaagccacgtgttgtttggtctcaggagcttcaccagaagtttgtcagtgccgttcagcaattgggcctcgacagtgagtttccccatagacctctttaaacctttccttatgtgtgatgtccactcttgtttctcctatagagttattttga

SEQ ID NO: 190554 - DNA, 39 bp, Arabidopsis thaliana landsberg
atgtgtgtaggatacgatgatcggataaaagagaaaagg

SEQ ID NO: 190555 - DNA, 284 bp, Arabidopsis thaliana landsberg
atgatggctctgatgaattgtgcatattcatcttcttcttcgtcttcgtctacttcctctcccacttcttcatcatcttcttcttcatattctccaaggtatccttatttccattttgcacaagagactaaccaatctttgagtcacagttaattgaaattttctttgtttttgttgtttgtaggaacagagagagcatgtttttgcagagtgtagttgatgcgtcaccttcaagtttctcttccgacagaacatctgtacggcttccaactcacttcatgtag

SEQ ID NO: 190556 - DNA, 314 bp, Arabidopsis thaliana landsberg
agcctatctttgaaggttccttgatggatcggtttttgaaaggagatgatgggttcaagaaatcgaggcttaaaatgattgcaaacattgtcaaaggcccttggattgttagaaaagctgttggagagcaagcgatctgtgtgattggacgtgcactctcttgcaaatatgtttcaggggaaaactttgtggagattgatgtcgatattggttcttcaatggtcgctagtgccattgttcatcttgcatttggctacgttactacattgacagttgatcttgcgttcctcattgagagtcataccgaagcatag

SEQ ID NO: 190557 - DNA, 736 bp, Arabidopsis thaliana landsberg
atgtcctatatgcctacttcttgtctggtcttgttcttcctcttattcttattccaccctcttccttgggccctaagtaaagaagacctagggtggtgtgaggctctgtttcagtgtggtaacaacactgctgatttccccttctggggtgggaatcgtgccaaaccttgcggtcatccgttgctggagcttcactgcaacaataacaatatcacctctttatacatctcaaatcaagagttctatgtttttcagataaatcaaacatctaatactcttacgcttgccagatcagaccttctaggttctttttgctcctcctatgcatcgaataccacaaccttgcctgccgaaatctttgagctttccccaacttacaagagcctaaccgtattgtaccattgtgatccaaagctttcttaccgctcgagttatacatgtcctgctctaggtactttttcaatgtctcaaagccttgattaccaatattcttgccaaaacagtttcacagttaacgtaccaacgagtttcaatccagaagagagagggttgaatttggccaatttggaaagtgctctaagaaaaggttttgaggtgaagctggtgattgatgagataccatgtcaacaatgttcatccactcgtggaatctgtagtttcaacggtaccacacagagttgctgtaacgcaacctcaccgtcaggaggagttagttgcgtaccatctcaacctagtg

SEQ ID NO: 190558 - DNA, 2373 bp, Arabidopsis thaliana landsberg
atgcaggaaacagaaattcaagcagaaacaataaaacactcgaccaacacaacttcggctataccatcaaatcttggagaaacaatacgaaccttggttagtgttttggagtcaaatatgactcgttgtcatgtgtatgattgagtataagaactagaatctcgaacggaacccaaaagctaaagtagtgtttccttgttagaaaaaacaaagccaaagactcatacaaacttcggctaatccctcaaagctttatgaagcaataagaagcttggttagtgttttagattcaaacatgactgatgagaacatgaccaatgcaaccaaaccacttgaaccacaagaagacaaggagcagcttgaagccgaggagcagcttgtaccggaggaagcattaatcgttccggcgggtcctctaacaagatcaaaatccaagaagttcaaccaagctatcaatggactactcaaggagctaaagaagaatcaagaagacgtggctcaatcctcattcatagtgatcacggctcaagaggctcggtaaagggttaagtgttgcttatgcactctttttcccttgtcaagttttgtcccaatgggttttcttgacaaggtttttaatgaggcctaagtaacactttcaagcctccctttatcagcccaattcgtggtccaaggcccactcacaatgccttggcccattctctcttttctattcaaactttgcatttattgcttttgttatttccaaaactctttgcatgagcttgcatgagtgtggacttgtgcatgctcttgcatgtctttcttctctcacctcttccccttctccctcctctcctatataaactcattgtatttctcatttgcaatcatcaaacattttaatcaaaaaccttctcttttacttgtttgatccgaaaagtgtgtaatatcttttcaacttgttttcttcttagtgtgtaatatctaagttggatccaagctagtagtctaagagtctttcatcactcttggaagtacaattcgttcccctttcattccgctgcatccactcgatcttgtcatcatcccggtttatcgtctttccgccgctttgtttcaaatcaatccattattcatcatcaagtacatcatttccaattcaaaaccaacaaagtgagtccttggagcatacatccacgtccaggagtgtatcatgtggtatcagagccaccttgttatcaggttttgaagttccaaccctaaaattttgttttctttttttcagatctccgttcaatcttgcgtgaattttacaaaatatttggctggttcaaaaattgtgaaaccaattgaattcgaaccatttacgagtctagtatttttagaaattaagttcggaatttttggagtcgttttgtccgtttttatttgcctgttttacttgttaaatttttaatttttcaggtacaatggtgacaagtgaagaagatgaagcgtcatctgcctctagtttggaaaggaggattttgaaaacagtcacatcagctatggcaacattaatcgatgaaaagcttggtgctctaaacttatatcaagtcaacccggacacaaatccacgtctaagacaagaagaaccaagggaagatgaagaggcaagaaattactatagtcacgcctcctctcacagtagccaacgtaggcatcgacgagagagaccaccacctaaagatcccttgggaggcctaaaactcaaaattcccgcattccatggaaccaacaatccggatacttacttggaatgggagcagaaaattgagttagtctttctttgtcaagaatttcttcagtccaacaaggttaaaattgcggctactgagttctatgactatgccttaagttggtgggatcaacttgttactagccgaagacgtacccgagactatccgatcaaaacatggaaccagctgaaaaccgtcatgcgaaagagatttgtgccgagttactatcatcgtgaactacatcagcggttgagaaatttggttcaaggaagcaaaaccgttgaagaatactttcaggaaatggaaacccttatgttaagagctgatcttcaagaagatggagaagcggtcatgtcccgattcatgggaggtcttaaccgagaaatccaagaccgtctagaaactcaacactatgtggagcttgaggagatgcttcacaaagcggtcatgttcgaacagcaaatcaagagaaagaacgcccgatcaagtcacaccaagaccaactacagctcaggaaagccaagttatcaaaaggaagagaagtttggttatcaaaacaattacaagccgttagtcaaaaaaaaaccggtcgatttagatccaaaaggaaagg

SEQ ID NO: 190559 - DNA, 710 bp, Arabidopsis thaliana landsberg
cttcaagtgatgaagacatgtggtggaggcaagagaggaagaggaagtgtatcaaacattccctcaaatcgacccacttcttcccaaccagttcgagttgaaccgaagactagggcatcaaatcgaaggcccagtggtcttcccagccagtacgagttcacaccggtgattcgtccagccccgcttcaagattctgaacatcatccgactgcacagccttcaacgggtccatccgtcagggactatcctcctccgacgcaacttttccagtcaggcgaagggtctcctcgcggatcttgttctcctcgtggatctggatcgactctgttttgagcatccggctcgattcaacctagatctggaggatctgttcatcgtctagcctctacggcgagacaatctccagcggcggttcacaagattgcctccaatcagtctatagcgctggttcaacgagaagcatccaatcctctacttccgcaagcctcaaatcctctacctcgagcctatgcatctcatcacagctctcaagctcaaaactcacacgcagaggaagatgaagatgatgatgctgagtttgtggctgatcttgaaagggaatcaactctccctgaagctttgcttgcaaatctacatgacatgcttgcccagctaggccgtgagaagtatacaacggtcatctctcccacatttgagcctctaaccgtatg

SEQ ID NO: 190560 - DNA, 161 bp, Arabidopsis thaliana landsberg
ccccgagcaatgttagacggtcggcagcaattactgaagaacacggcagctttgcccttcaaacatcggacatcgtttgtccatcaaagcccgacaatctggcaatacatcagcattttgcggtggtgcaggcgggattccgcagccgtcgaggttgttag

SEQ ID NO: 190561 - DNA, 171 bp, Arabidopsis thaliana landsberg
atgcggacgatcccgctacacgaaatgttccatatgcctggttatggtccggcgccacggcctattttatatgcattgatcctcgtcggcgtattgctggtgattgcggcctgtgtgaactttatcaacctggccacagcccaggcggtcaggcggttgaaagaagtgggg

SEQ ID NO: 190562 - DNA, 319 bp, Arabidopsis thaliana landsberg
ctgcacttgcttccaacgcagtcactacaacgtccactagtcctacttatcctccagattcagggaccaaatcacacgtatccagcgtctctgttattgaatttgtcctcatagttggccctatcctctgccccagttgtatagacattctcgtattttcctcatcattctcaccttctacatcagcgtctgcgattgttgtaacctcaatgtccactatacctacccctggcaggctttgtccacgcacgttgttcaaacaactttgacagtccttcccaaaccattcttccaatgttgtcgcttgcgtatccgttaa

SEQ ID NO: 190563 - DNA, 812 bp, Arabidopsis thaliana landsberg
atgagatcagcgcagagagaattgaccggagatccatggaggagatgggactgtgttaaggcggagaagatcgtaaaagcggtcaatacggcgacgagtaaccatttcatcgtcgccggtgacgggactgtttctatctgaaaattttcaaattacccttttttgtcttctcgtggattttttaggccccaaaactgaaaattcttatcgtggatttgtaagtttataagtgttatatttcttacgagtttagttaatgaatgattacaactacacgaaagtgttttttattcgaccatgatgactttaaaacttcacaatcagattctaccattattatctctgacttattaatatcaatttagtaaaaactttagaataatatatatttttaatttttattaaaatctaatcagatttggatttttgggtcaatattcaagacaacagttaccaaataaggtaaaagaaaaaattcatgacgacgacggctcgagaatcggaatttggtgatgactgaaggcaaaagagtcagacatagtttttagcggattcaaagagaacagctttgtgcatctcaggtatgcgatctacgataggagattcaaatttcctcggtcgatcacgccgccgatgcaccagacccaccacactcttcaaggtatgaccaactctccaacaaccggctctgcattgttagatcccagtttatcaggttttttaaaatgggatctaataatgcagagccggttgttggagagttgatcatactttggaatcttattcttaagcaacctgataaactgggataa

SEQ ID NO: 190564 - DNA, 294 bp, Arabidopsis thaliana landsberg
  unsure (1)..(294): unsure at all n locations
atgatcggggatgattccggtttctcggacccgnnnnnnnnnnnnnnnnnnnggtccattgcacagggtgtcctgaatcggtcggtctggagcattggcaagccgggctcgtcgacgtacgccatcaaccagatctacaagaagaagacgggtcacgatcttgactcgacttcggcccggatcatggaagggttcttcatcctggctgacgccatcaatcgcgccggctcgaccgacccggcaaaaatccaggctgcgctgaaagccactgacatcaagccggaccagctgatg

SEQ ID NO: 190565 - DNA, 222 bp, Arabidopsis thaliana landsberg
atggccttcgtcacgtgcgagaatgaaccagggctccgcgccgcggcggttgagcgcggcgacgagctgctccgcctcggtgaccgggacgcgcggatcgttggcgccgtgcgcgagcagcatgggttgcgtgagctgcggcacgtgggcgaggggggagatgcgcgcgaagaaggcgttgatcgccggatcgcgctcgtcgccgtattctttgcgccgcag

SEQ ID NO: 190566 - DNA, 87 bp, Arabidopsis thaliana landsberg
atgagggaaaacgctgatatgcgtattgatgcgattacagtttgcaaagactacaacgactttcttgctcacactctacctcggaac

SEQ ID NO: 190567 - DNA, 373 bp, Arabidopsis thaliana landsberg
atgtccttctaccacgcaagaaagctggtcatgcgggcgaggatagcctccaatacacggcaggtgctcgtcaacacctgtcaggcagcacaccggcaaccgcacgtctcataacttttcatgtgctgagaccacgaactctgcgtagccagccccgactacgggcaccttgcaggcgacaggctccagatttagcagctaggagctaactccgaccattggcagacgcgtgactcacctcacctgttacatagccctacgaactacctttgatgcactagggctgcgtgagggcatgcatcagagccgctgaagtctgacctctgatataacccagtgaccgtccctgtgataggcgcggatacgcatatga

SEQ ID NO: 190568 - DNA, 621 bp, Arabidopsis thaliana landsberg
gtcaaacccaattcaactctgcccaagacatttcttccacagtggtcctctcaaaccagacttaaaacacacaaaggcattgctaccaagtgcctgccaggtacaaaatgtttcaatgggttatgttgagttggtttcggttttttcagaaaaaaaaatcgaagaatgtgctgaaaataacttcgattcttgttcgtattacaacattatcaagtttcatttttgttgttgtgtttataaatatgttgtagttataaataatgactacgattcaacctgtgttttattattttgggtgattgttgtatatttagtaggagaatatatttgaatgtcgtcaaacatgtgtactatttaataagtttgtatgtaattttaagatagttaaagtagttaaataattgtgaaaaagtttaagtattcataagtttgttgttgttataagtaaaacatttacgaaaaatcccggatattcacctagtaaattaataaagtgtgcataagagagtactaaaatgaataaagtatgaaatttactgctaaaccaaaatcacctttccagcgaattgtggtcgttcgaatggaataatccggttaagctataccagagatggatgttaa

SEQ ID NO: 190569 - DNA, 489 bp, Arabidopsis thaliana landsberg
atgcctcagctggatcgttctagggtttccacgaccaaactgatcctctctgtggccgtcgagggcgactactacggtggatcatcagccgccgttcccttcaaatgggaatctcagcccggaacgccaagacgactctccaaacgatcctcctcttccggtttcaattctgattctgatttcaattttccgggttcagcaccactaacacctcctgcttcttacttctacgcttctccatcctctacaaaacacgtaagccctaaaaaaaccaacactctctttagttccttgctttccaagaatcgtagtgtcccatcttctccggcttcttcttcttcgtcgtcctcgtcttcagttccatcttctccattgaggacatctgatttaagcaacagaagaagatcaatgtggtttgaatctggttcgagtttggactacggatcgaatagtgctaaatcttctggatgttacgcttcccttgtcaag

SEQ ID NO: 190570 - DNA, 649 bp, Arabidopsis thaliana landsberg
gtacttgagattgaagtatataaacaggcaagcaatggccaagatcgtcgttccttgcctaaagctctaaaaaagtgcagtcaagagataagtccgcaaacgtatgtgtctcgtgaggcattattatcctcccattccgttgcctggacatctcttctaagattctcatcagaaagttcttgtgggaatatgttaagattctctcttttggcaattggttcaaagtccgggagcgtttccatatggaaagttcatgcacctgaatgctatcacattgaacgcagcaatgtatctcccatggtggaacttactgctatagttcaggcccatagctcatgggtttcaacaatgagttggggaatttttggctgtgattcttcgaatccgcaagtggtgttggttactgggagttgtgatggtaggtaagttagtgttatattacaagaaaaaatggtatttgtaaaaccataacaaaaaatgtcgtcagtgattggaatcttttgcatatacttctcaatggaatttttttttatcacacttttcagtccatttcttttcatactgcagtgtgaaaatttggatgagcaacaaagaagacttgcaaaaatctgtggaggtctataaatcttcattctttctattaaaagag

SEQ ID NO: 190571 - DNA, 528 bp, Arabidopsis thaliana landsberg
caaacaaagctgtggaaaccaatgagatgtggagtcttcggagtaaagagattgagtttggtgaaaggctcaaaagaaaatcaagagatgagagcagcaatggtcaaagtgagcagaacaataggagggattttttaaagagatgtacttcagttgatgagaatgttactactactagtttatcaccatcatcaagccggagcagaagcaaaagatggcaatcagaggatgatgatgatgaaggcttaggagatgtcgaggttaagacttttctccaatcaaggtatttccattatactcagatgctgcctgattatttcctttacaataatgatcgaatttgggatcggcttttgctgataaaacttgtgattctggtctatgatagggtcaagcgtggcagaggttctgttggtgctatgatggatgaaccgctaccctgtcttcctgagagggaattgtcaagaacttctgatacaggagatcggaagctagtgattcagccagagcgatcacctttattgagac

SEQ ID NO: 190572 - DNA, 124 bp, Arabidopsis thaliana landsberg
aaccaagcgcaaccacaaagacctaatcggaataatctggtgtttgatgaagattcagaaggggatgatgacaattcgtttgaagttggaacctagcaacgtggaaatcagcaacaagcgttag

SEQ ID NO: 190573 - DNA, 209 bp, Arabidopsis thaliana landsberg
atggagaatcaagagcctgatatcgagaaattgcctcgagacgatgttcctgatagagaaccagaccataagaagctcaagatttcgaccaccggccaggaaactgattcctcggctgttaccaccggcggaagcaatgtcgctgagcgtagagcgccgaaatacagaacgccggaagtcgcaatcgtgtttgcgttctgcggagtagg

SEQ ID NO: 190574 - DNA, 211 bp, Arabidopsis thaliana landsberg
atggtcaatatctctgaaattttggactacccgaatggcggtgatgaacgcgagctttgcttcaaggtattattgactttaaaaatcaaattcaaagaaactgaggtttatagtttctaggtattttttaaagtcaatcatacctgaagcaaaacaagttcatagctcctcttaaactgcgttttcgtttcatctcaaggagtccccatga

SEQ ID NO: 190575 - DNA, 1225 bp, Arabidopsis thaliana landsberg
atgactcctgaagccgctaactccttcgaatcgcctccgtttctctctgtttctacggtgagatcatcacaggcaaacaaattaagaatgtctctctgacgtttatatgagacgacgtgatgcttgtgtgtgtatgatctctctcgtcttattcatagctttttaagagaacagagagccgttgtatatatgatgagtttttcttgggccagaccaacgaatgattctttttaaacgaagggagaagaaagaaccagggcatcatcatctcgaagaagagaattgaaatcagagaaattgcgtctttagactcgaggagataacaggaaacgaggtatatttataaaacttatatgtttgagaattgagactcaagttccctttttttcttcccaaagtttccttttttccttttcacttagggtttgtttaagtccagactccagagcaaacaccaaccttaggttcggtgataatcaatctagccgttatacacggttcgggttaaaccttagaggtttggtgataatctagccgctagactcaagtttcctttttcccctttcacttaggaagtccagaccaacctttggttccgtgatatataatctagccgttatacggattaaaaatttccatttactagctgatacgctcctataaattgtattttgattgtattactactaacgcattgcttctcattttgatcacgttgatctattgttttgcagaacagggctaataagaacagaaccaaagtatagcagtcttaaagattttttcatggtttgaacaaataaaatcacattgataaagatgcttccacaatacctcaacaacagaatgaacagaagcaaacaccaaaaagtcttcataaacattatctataaagaacatgagatatgtgtcccaaaaaacaaaacaaaagagaaaaccaaagaaagaaagtgacgagatttaacaaattatgttaatatgtagtcagggacgactttttagcgttgttgatcttactattttcacagacaaaagaagaccagagcccatccttcttgtagttatcaaacaaagaatccatgagccctacacgttgccttggtgtgctcagtgatctcatcttttgcccttgcagactctgtcacactcatgtaaggctgcaaaccatcggagctttgaaaccagctctcgtcctccactaatagactctgctccaaacggctga

SEQ ID NO: 190576 - DNA, 145 bp, Arabidopsis thaliana landsberg
atgatgaagctttgtccttgtttcatcaacccgcatcaacttggacctaattcacctagagattcatttgatgaaggtcttacagcttatagaggccatagccgtaaactctttgctttgttcacatttcgctcacatcgaaaag

SEQ ID NO: 190577 - DNA, 44 bp, Arabidopsis thaliana landsberg
atggactcttcaaaagaacaagcgttcacggccaacaactctac

SEQ ID NO: 190578 - DNA, 496 bp, Arabidopsis thaliana landsberg
gtgtagaactttcatcccaaacaggtttgatgtggaggttagatcagttgtctctcacttatttcacaactgggctaagaaacaagcattccaggaaccaaagaggctgattgacaaggtgagtatcgcatacgctgcaacatttctccatcaactaatgtaagcgccagtcaattttcttacttcttacttcttacctttcatgtcaatgttttcgtacatgcaggtacggtttgtgattggtgaacgtttggccatcaagaagaacaaacacaaggttgtacgtctatagtcttattcactataacaagttctgacagtagttttcttgtttggttacttattatgaagcttaatggtaaaagtctactgagccataccgagagttgaaatatgctttggtgactaactggatactgcactattttgttaggatgtcttacgagctctcaaatcatcattgacttctgaggaagcgttccaatatgcagaacat

SEQ ID NO: 190579 - DNA, 390 bp, Arabidopsis thaliana landsberg
cgttaaagtctttgcaacaatttaatacccttgtacctggaattaacaagcgacaatcagcagggttagaagcagatgagccacagatgaagattcggaggctggacacctggttggttatctttgtgttccttcccatcattttcaccatttatccccgttgtacttaatgtgattgttctcttatttgggttgaattccaccttcctcttcaattcagggatgtcaattctttctctgaaccatttgaaatccactctagggtgaagaaatcttttgaaatggtctcattggctgttagtcaaaagcgacctgttcttctgtatggtccctcggggtctggaaagtctgccctcattaggaagttggctgatgaaagtggtaaccatg

SEQ ID NO: 190580 - DNA, 194 bp, Arabidopsis thaliana landsberg
aaaacactaacggaggagaagcttcaactcaaccagattcccagtcagcaaccgaagcaataattcacatcgatgatgtcgaagaaggtaaccgagatagtatagaggtcgttaaggaatcggaagagaatgacagaaacagcgtagggacatctgatggttgttgtagttgtagacttggtgaaaaagcgtag

SEQ ID NO: 190581 - DNA, 356 bp, Arabidopsis thaliana landsberg
gatccgtcacgatcggatctccagccaccaaaaacgtcactgtgttaaagcttctcgagaccaaaccctcccaacataaccgtcctcaccgtggactccctcatcgtccccaccggaatcgatatcaccgcatcggagactctcactccaccgccgatgtcaacatctctctcccctccaccggcgggaatcaatctcactcagatactaatcaacggacacaacttcaacgtcgctctatccctcctcgtcgcttccggtgtcataacagaattcgaaaacgacgaacgtggcgccggcatcacagtcttcgtccccaccgactccgccttctccgatctcccttccaacgttaa

SEQ ID NO: 190582 - DNA, 57 bp, Arabidopsis thaliana landsberg
atgccgccatgcgtgctgctggccatcggcgtaccaagtgccaaatccatccagcac

SEQ ID NO: 190583 - DNA, 556 bp, Arabidopsis thaliana landsberg
atgcccagaaaggaaaccgacgaggtgaggcaggaaagttcgatttttgtgctgaaacaagtgtcgaacaacataacggttgacaactttgtaaacgccgcgagtatgaagattgaaaaagtggagttgaagaaagccagcagcaacaattcgctcgtgatcaactattccaacttccagccattgggctccaaacttcttccatacaacggaacaatcaacctgttctataaagcggtgagcggcctgctgaatacgaccgttatctttgaatacaataaggcagaagttaaagacaaagagttgaagttccctttcaatatccccaagcggtatgttcgcaggtagatccttgctttgtttctttcttgtactcatttcggtgattcccgctgccgcgcagaagaacaaggcgcagctgcagaaggagaaacaacaaaacctcgagaagatcaaagaggtggaaaagatcattaatgaaacatcgaccaaaaagaagtcaagcatcggtcaactcaatgctctgaaccagcaaataagcgagcaggaaaagcta

SEQ ID NO: 190584 - DNA, 952 bp, Arabidopsis thaliana landsberg
atgaatacccttcctaaattggctcctactccattgggacgcatttccattgagcaaatttcctctcaggtttggtgacatattgtcttgttgaactcaatctgcgtcacagcaacctagaaacactctggagtggagtactggtaacctcctttcttactattttgaccatcagttcatgttttcgctatagcaatgtgcaatatccaactattctttggtgtccactcctcagaagtttggtcatttgaggaaactagatgtgacgggatctaagaatctcaaacaacttccagatctttcatgtgccgaggagcttgacgagttgcttctagaacaatgcaagagactaaaaggaattccagagtccattgcagagaggtctaccctaggcaggcttaatctatcatactacggtggggctaagaatcccatgggtgttgttatacagaaagtttctcagacgcaacgtattacattgttgttcccaacttcaagcgtggaaatgcaacttatgaatatatcaatcacgggagacattagatttcgtgtttttgcagattttgaaggatatgctgaatacttctcctttagtactgagcaaaagatccatgctacaaggacagtaagtgtccaccaagctcctcggctcatctcggagcttaacaaatctactacactcaatatcaggaggttcagctacaaagagaacggtcgacctgtcactttacacagctttccagatattcctggcctgaaagagctagaactagtcaacttaaacatccaaaaactgtcagatgggattggtcactttgagttcctagaaaatctggatctcagcggaaatgattttgagaatttaccagaagatatgaatagactttcccgattgaaaactctctgtctccgaaactgcagcaaactcaaggaattgccagagctaactcag

SEQ ID NO: 190585 - DNA, 428 bp, Arabidopsis thaliana landsberg
atgagctcccacgaccgcaaggacaaccgcaagccggacaagcccaccccgcccgagccggacgagcagcgccgcacgcgcaaatcgcacgagagcgaaaaccaggacgaagcgctggaagaaaccttccctgccagcgatccggtgtcgcccttcatcccggccaagttgccgaagtaatccccatgcacgctgcacgtgtccgtgcaccgatgccggagcggggccggacaaggtcttcctcgcccggccatcgacccacgcgcgcgggcgaccggcccgtctgcacttgcagcgccgcctgcacacatgagcgttgccacggacgatgcggctgcgaagcctgcgcgcttgcctggatgatcgaccaggacgaccgcgccctgtggaacgagcgcggccagctggtggcgccggacaacttggcc

SEQ ID NO: 190586 - DNA, 216 bp, Arabidopsis thaliana landsberg
ggcggattgatcaagaacggtaccggcacgctggtgttggccggcaccgacaactacaccggcggcacccaggtgctgggtggttccctgcaggcggtgtacccattgcccgacaaggtcgccgtgggaagagagggcacgttggattccgtccccggcgtgcttggttcactcaccaattccggcaccgtggtggtgaagggtggcgacacgcag

SEQ ID NO: 190587 - DNA, 1298 bp, Arabidopsis thaliana landsberg
atggagttttgtaagaaggaactattgaaaaaactaatggaactaaggtgatctagatagtgaacttagcttttcccaaacttttctttatgcactacaaaatttcaataaattaagtttttagaaaaggttctcaagtgaagttagaattttataactcaaacaatattcatgtacgtgtccaccggttttcatggttagattttgagaaagagtgagtccaaactttttaataacgtttttgattccgtgtaagaatgtgtgattctccctcctcctgaaaccctaacccaagacaggagatctttctaacacattctatactaattcacaaaaatcttccaagttccgtccgatgtgggacaaacaattctaatatcccctctctagttaccgctacgagcctacgaccatcattctttgagtcgaagttatacatatgaaatgggaggcgtgattcacgggtgaatcctacatttgagaaattagaacctatgatctgtgaccatattacaagatttgaatctgaaaagaaattttattcttcccaatatttgtttttgcgaaaaaaagagattatttggaattgctgacgtcacatctctctcaggagattcccacccggaagtatcaactgtcgtcgtgtatcggttgtttccgtagatctctgttaccactttccatccaatttcaacaaattggatttggcaaactttcggatcagaaacgtgctcgggatgaggaggtacaccgagaaagtttggtcttttattcgttcgtcgctgagtttagaataagggattgtcttcatcgtacgactctgtttttgttgaaaatcgaatgctccaaatgaagcagccattacagaaccttaatcagtcgcagaagacagctttagctggtgttttcgtgctccttttcccgattctctatccgaatctcttcagccctcttggtcgcgcctctccttctctcttctccgtcagtctctctctctctatctccgatgatttatttggaatttcacattttgggattgtgaagctgaagaattaagtttggcatttgcaggaatggaatgctccaaggcctagacatttgagcctactccaaggcgctcttgatcgacaaattgtaagtgggtttagctcagtttcttggatgtatctactacgttcctctaaatctttttcttcttcctcgaaccaatgtgtggtcgatcagacaacaagttgagttatggtctcccttggcagatcaaggttggaagccttgcactgaatcttatagaggcgctt

SEQ ID NO: 190588 - DNA, 100 bp, Arabidopsis thaliana landsberg
gaaagatgacgccctttacgtaaacctggagccaccccatcacactacaaactgtgaactacccaaccggaatgccaaattgatggctcatggcgtctaa

SEQ ID NO: 190589 - DNA, 465 bp, Arabidopsis thaliana landsberg
catatttcacaacacttcctctaactaaattggaatacgaagatagttttcgtgaaaagcttcctaagaatggtggttcaggtaacctttgggatgatggtagtttccaaggagtaagaaaggtgcatatatattatgatggatatagtgtgcggtgtgttcggttcgattatgataacgacggcaaagtcgaatcccgtgagcacgggccgaaaattgttgccgcagtacaagaaggagaggtcataactcctcaactctaaatatttgtctctatctatctatccatgctcctgaataacggcttatacatatataataatctttttctgttgcagtttgtcctggactatccaaatgaggttattacgtccgtggagggcattgccactgtcgttaatactgcactcagctttagtactggaaatgtgatgattaaatcgttgactttcaaaaaatctaaag

SEQ ID NO: 190590 - DNA, 244 bp, Arabidopsis thaliana landsberg
aaaggtgtgggtgatgctgatgattcatatgcttttgatggtcgaagggtaagcaaatggaacaaggaagctgaaccttatggtcaatcatgggttgctggggatgtcatcggttgctgcatagatttgaactgtgatgagatttacttctacaggaatggtgtctccctcggggctgcatttactggtattagaaaacttggacctggatttgggtattaccctgctatatctctctcccaag

SEQ ID NO: 190591 - DNA, 358 bp, Arabidopsis thaliana landsberg
ctccaacggacgtctccgcttgggatacgccagcagaagggccacagaacttctcaggtcaccaccaggattgtggagcccactttcgccgtgggaattctgaggaatactcttaccagttcacccatatgacccccaggcatgaccatcagcccgaggccgctgaggagtaccaccagagctggaatgctgcttccgcagtgggcaccccggacccgagctcggagcccatgcggcgggtgacttctgttggctctgtgtcgagccacctgagcctccggagctacaagggcaccaagccgcggaccatccgacaagaaccatcttccatgagagcctcaaccgatgtgtcgtctga

SEQ ID NO: 190592 - DNA, 925 bp, Arabidopsis thaliana landsberg
  unsure (1)..(925): unsure at all n locations
actgttacgcgaaggcaagataaaaaggtgaaaggtgtcccaagcaagctttctcttctttctccacacattataaatctacagtatcttacataaagagactgtgtgttgatagagagaaagagcagagaagagataaagcaagcttcttcttccatttgggagaatatttcatttttcagcaaaaaccattgtagactctgtagtaacgacaacaagtattcagacactgtttgggtttcttagatttttctgttcaacatccatatatctgatcagaactcaagtttactaaattttggagagtgatcggaagaaatcgaattctgttcaatgctggatcggttatgtcgtaagttcgtcgactttgattctttagcagctcaagtttcttgcttttgattgttttttatcatcggattctgcaatttagcataatcagcgtgttctagagatggattttgcctaatttttagtatcagaatttttggggtttctgttttctggggatgtgtcaagttgggattttttggaatttgtctttttggggtttttagttttggggtcagatctgggaagcatcggttttgattcttatagttaatggagctgcattttcatctgtagttgttgaattgatttctgtttcgtaattttgggtaaaggttttatttttacatttaatttgcgtactagtcttatgagattgaccaggtttgttgattaaccactcaattttactcttttgtggtttcctcaggttcttatgaatgattcacattttggtctaagaaagaggctttgacttgtgtcataaatatgaaggctgatactgttctagactatgctgtgtttgagctttcaccgaaatattcacggttagtaaattctgttagtgtatgttctgtagcaattgatcatgctn

SEQ ID NO: 190593 - DNA, 485 bp, Arabidopsis thaliana landsberg
cattcttcgcgggcggttctcacggagatgtccgaaaaatacttttccaacactggaaagaaaaagacaaagacgtccttgtctacgagaatctccccaaaaccatgaactacacgaaaatgatggacaaggcaaagttttgtttatgtcctagcggttgggaagtggcgagtccgagaattgtcgagtcactttactccggctgtgttccggtcatcatagctgattattacgtcctcccgttcagcgacgtgttgaattggaagacattctcggttcatattccaatatcaaagatgcctgacataaagaagattctagaagcaataacagaagaagagtacttgaatatgcaaagaagagtgcttgaggttcggaaacactttgtcataaacagaccatcaaagccatatgatatgttgcatatgatcatgcattctatttggttacggaggcttaatgttcgaatccctctttcacagtga

SEQ ID NO: 190594 - DNA, 132 bp, Arabidopsis thaliana landsberg
ccccgttcatggatcatgatgaccctgttccgctcaagacatctgccctgtgctacgatggagccacgttatctaacctgttccgtgttccttacctactatctcttaactcaatatacatcctgtacactt

SEQ ID NO: 190595 - DNA, 406 bp, Arabidopsis thaliana landsberg
aagcgggagattcgcagttgtctatagaagatgactcaagattccaacacgattataccagacagtcacgacactctgtcacggacggggaggccttagcttcttccactgatgcggagtatgatgatgaaacagaaggatccactgatgctccttgtgcagcagaagggagaaaacctttaaagatttcagacaagtagcgttttttccattctcttgcttcaatatgatctagtttacggtttgtttttgtctgaaacatatatattggtgactgaaaatcgcagacctaaaccggtgactccaaggagtaatacgacaacatcacgaccacttgataaactcaagcaagtcaatatgaggacgacaaacattgcaaaggctacgtcagccttgttgtcaccga

SEQ ID NO: 190596 - DNA, 198 bp, Arabidopsis thaliana landsberg
atgtttattaagcactttggacagtacccccatgtggtcataagtcgtaacagagcaatccatacgctttatacggtcaaaaaacaaagaacggtatccgttaaaacggacgggcttgatcgtcgttatccaacggtgattgtttgtttgtccttatttaacggttacctttaacgtcgtttccttcaggaatcttag

SEQ ID NO: 190597 - DNA, 27 bp, Arabidopsis thaliana landsberg
gttccagctgctgtcgttcctggtccg

SEQ ID NO: 190598 - DNA, 242 bp, Arabidopsis thaliana landsberg
attgtttaaaagttagtatatgtggagatgtaagcaaggagatagttactaagaaggatcaattagctttggatgctaaagatactaatgttgaagatgaagttatagggaagaaagcacagacttttacatttgaagaactctctgtttcaactgcaaactttaagtcggattgttttctaggagaaggaggttttggaaaagtttacaaaggtttcattgagaaaatcaatcaggtttag

SEQ ID NO: 190599 - DNA, 184 bp, Arabidopsis thaliana landsberg
agcaggagacatagcggcggagagagaggagaaaggagaggaagaaagagaaggagagcgagaatgtgaaagggagaagatagaggaggagaagaagaatgatcggaagcgcatggaagatggtgatttgaaaggggacacgtttgacgttgagagagagagagaaacgtttacgtggaagtaa

SEQ ID NO: 190600 - DNA, 933 bp, Arabidopsis thaliana landsberg
atggatttggacatttcttcttctggccaacttcaggattcattggagaaaatcactggaaacctcaaggatgactcagtttttgtggatattctcaacaattatgctataaaacctatgcaactagcatcttacttctgcactgggaatttgaaggacagtgttgctgagtggggacactatgcactagctgttcctctctatactcacttcacatctcctcttcgacggtacccagacatagtcgttcaccgtgcgttagctgctgctcttgaggctgaggagttatactcaaagcagaagcaaacagcaattgatgaagggagaagctgtttcaccggcatccatttcaataaagacgctgctgaatctatcgagggcaaggaagcattatcggttgctgctttgaaacatggtgttccctccactgaaatactctctgatgtcgctgcttattgcaatgagaggaagctggctgctcgaaaagtcagagatgcatgtgataagctttacacttggtttgtgctgaagcaaaaggaggtaagtgaattgataacttgcatcattctgatgcttcttgtgtttatgttggttaaggaaactcatttatttctttctctgcagatttttccgtgtgaagctagagtaatgaacttgggatcaagatttatgactgtttacattagcaagcttggcgtaagtctctactgattcatttaccacaattaaatttatctaaattcctgtttacagtctgctaaacacttgttgttattgatgctgtcacagattgaacggagaatatactacgaccaaatcgaaggcttgtgtgcagactggctagaggcaacatcaacgttaatcgtcgataaactctattccaagagaggtggaagaggctttttcaagcccatgaaggaagctgtctatttg

SEQ ID NO: 190601 - DNA, 446 bp, Arabidopsis thaliana landsberg
atgatgcaagcgctgacagcagccgatgcatttcagcgggcaggttgcgatctgaagaaacatttcattattattcaagagccgcataagagcgcactttccgattttgccgattccattggtgcaccgaagctgcctcatccaaccggtgtgggagggcgctattcggtgctgacggtagtcggcatgttgcccgcgctgttgatgggattggatgccaaggcactgcgtgccggtgccgccgatacattgtcacgcgtcttggctgctaaaagtccggcggatgtccctgctgccactggcgctgcgttgcatttcgcattgtccgaacaggataagttggcgaccaccatcttatgcccttatgccgataagcttgcgattttcggcggcaaatggcggcagctatgggcggaaagcctgggcaaagatggcaagggctggac

SEQ ID NO: 190602 - DNA, 110 bp, Arabidopsis thaliana landsberg
accctgagggcgcaacatcacgccatgagattcgtgaggtgcacgagcttcgatgccgatacatgaagcctagtgaatgctataagataagtgcaagccgaacagcatga

SEQ ID NO: 190603 - DNA, 252 bp, Arabidopsis thaliana landsberg
atgaccagcttctccgccctgagcgaaaaggaaattgacgcgatctttgattatatcaaaaccgttcccgatccttcaaaagccggtcccgctgccggtcctgcggctgaaaaaggccaggaaagcgataataccctgctgttcggtgttcttaccctgatactggccgtggtagcgcttaccttattacaggtaaatgccaacctgaaaaaactggctgatgaaaaagaaggccatggaggaatagagccg

SEQ ID NO: 190604 - DNA, 49 bp, Arabidopsis thaliana landsberg
atgaaaaagacgacacaatctcgacttccgattagtgttggcgacgatg

SEQ ID NO: 190605 - DNA, 210 bp, Arabidopsis thaliana landsberg
ataatagctttgaaggctttttctcgctcaatccacttaccaacctcacaaagctcaaggtgttcatgatttcatcaaaagatgatatggtacaagtaaagattgaaagtacttggcagccattatttcaactaagtgttcttgtactacgactttgcagcttggacaaaatccctaactttctcgtgttccagaagaacctgcgtctag

SEQ ID NO: 190606 - DNA, 448 bp, Arabidopsis thaliana landsberg
attgttatgttcaaagtaatgaagtgggtttaaatttgtcttttgtctatggtcatccaaacccaagtcatcgtaacaatctctgggaacatcttgaaagactagcaaacaacaaaaatggtcagccatgattcattctgggtgatttcaatgaactgttaggcaatcatgagaaaaaaggaggtagaatcaggccgaaagcgtctatcatgcaaatgagacaaatggttcgtacttgtgatttctcagaccttaaatccactagtgatcgtttctcatgggttggaaaatagggtgatcatcatgttttatgctgcctagaccgcacaatggcaaacaatgcttggcattcgcttttttccaatcagaaacagagttccttgagtttggtgaatcggatcaccggccattaattactcacattgctgatgaatgtgaagatcattga

SEQ ID NO: 190607 - DNA, 872 bp, Arabidopsis thaliana landsberg
atgagagattacattccgaaatacctgaacgcctttcttttggcatttgccacttttgctgtaggctttgccattttcatagcaaaagattcaaattcatcttctcatctttatttttcaacatcttcttcactatggacctcttccttctcacccgccttcatcacggtatccatctttcttaccgttcatcgatttagggtacaattgtttcaaacatgtttaccagtgtatatgtgtgttaaatatgtttccatgtacaaaaagtatttccaaagaagtaattttatttgtcacgtttttgcttacagttatcaagaaaaatggtttctatgttttgtattttcaagaatttagttttgtattttcaaggaaaaaagaaagagaaacggatcaaatccaggttctggatattggaaaagggatgggaaagtagaagcagaattagcaaccgcgagggcgttgatcagagaagctcaattaaattatagttctactacatcgtctccccttggagacgaagactatgttcctcatggcgacatttaccggaacccttatgcctttcaccggtaaaaaaaaaaaaaaaactgtttacttgtcatagaagttaccctttatgaatactgtttacttgttgcagaagttatcttcttatggagaagatgttcaagatatacgtatacgaagaaggagatccgccaatatttcactatggactttgtaaagacatatactccatggaaggattattcctaaactttatggaaaacgatgtccttaagtaccgaacccgagatccggacaaggctcatgtctacttcttaccttttagtgttgtgatgatccgacaccatcttttcgacccagtt

SEQ ID NO: 190608 - DNA, 608 bp, Arabidopsis thaliana landsberg
atggtgatggcaatgagacctgcccacacaaaaactatggttggagttttgcctcttcgtcccatcaatccttttgcaaatggatacaaatgcgccaacacccagaagctgaaaaatgctcctccgattagcttgctccattgtggcaccgcttggtatattgtcctgatgaacgccaccacaatcgctattatgttcaccattgctatcactataggcggtatcatcagcgacgaccatttcactatgtacaaatccgcgtatatgtcttcattgtcatctccccctgacttggtcgtcaaggtaaaggagatctcgatccctgcaatcactttgaggactccttggaccactgcgtaaaggtgagagcttgttcctgagatgagccaccactgttcgtttctccaccattcttccagcccaatgccagaccacttgacctccaaaaccgccaagccaatcaaacaaatggtgatcataagaaggtagaccaagaaggagatactgagcgtccgcacgatgaactgtccagagaaaagagagaatgccggaagaaaacaatagaggatgagaaacagagacgtgaaagggtatatcccaacattgag

SEQ ID NO: 190609 - DNA, 330 bp, Arabidopsis thaliana landsberg
atggcgatgaaccttgttctttatatgcgctccctccagaagttggatgtcaccttcacggtgacctcccggctcgattccgtcgagaagcacggcaaccacctgatcgccaatgtcggcagcgattacggcggcatcgccaggaagcagaccgtcgaccaggtcgtgatcaatcacggcacgatcccgctcgacgacctctatttcgagctcaagccaaggtcgagcaatctcggagcggtcgactacgaggaactgatcgcgggcgaggcccagtccgtggcgcgaaatcccgacggcaggttccagctcttccgcatcggcgacgcg

SEQ ID NO: 190610 - DNA, 92 bp, Arabidopsis thaliana landsberg
aacgacgatatgctaaaaccatctccggtgatattatgtagatcaaaccttcaaaatagcactcacacttttagtcagaatccatatctatg

SEQ ID NO: 190611 - DNA, 114 bp, Arabidopsis thaliana landsberg
atgactcacgtccaagtacggaacttcatctggaaagacataatttctatgcacggcctgtcttatgaaattgtcaccgacaacggatctcagttcatctccgagcaattcgag

SEQ ID NO: 190612 - DNA, 189 bp, Arabidopsis thaliana landsberg
atgcttgaactgcgccgtgctgctcagctccggtctttggtagtccgggctcagggtgcaggcgctgagcaaggcgacacacaacccggcgccgagcaggcgcgagccacgcccacgggtcagcgtctgcagggcacggtgaagtggggtctgggcaaaagtcatagcggggtttccagggcggcgtcg

SEQ ID NO: 190613 - DNA, 378 bp, Arabidopsis thaliana landsberg
tggtttacagctgcgcagtacaacaaaggccgcagggcgggccaaaagatcacgatccgccaaaactattaaaggctaccccacctaatctgacgcacaactttaccgcaaaagaaatccggcttgagtttgatgaatattataagttaaataatccttttcaggaaatcactgtctttcctgcccctgataaaactcctgattataaacagcgcggcaaagcactggtgattgaattaaaagattctttacaaaaaaatacgacctacgttatcaacttcggcaaaggtattggcgatgttaacgaaaataacatcctgaaaaactttacctatgttttttcgagcggtaatcatatcgactcattaacaatggcgg

SEQ ID NO: 190614 - DNA, 544 bp, Arabidopsis thaliana landsberg
aaccctatggacgagtaagagtgcgcgtaaggctaaggctgaccgagccgagggattcctacgcctccgggatacgaatacatcactcatcaccttccatgaaaagtaactctcgctcgcacaaacaatttctgttaccgacaaataagtccagatactcgaaacaaggggaaaagaaacgcaactttacaacacgacgatggtgtgtttgggcctcggcagtcgcagaaaacacacactacaagataatccgatcctgcaggctcggatcttgacaattgaagggagcagcagcaccctcggcgtcaactacaccttcggcgaggtccgacctagcctcggacggcgacacggtcggaggatctccgctccgaaggacgacgtcatcaccacgcccgggcaatcgctgccatggtcttctccgagaatccggcccaagcaggcggctcggcttgtcacccctggggcctcggccaaccatcttccaagggcgccagcccggtccgaggcctcggcagatcaactccggcgtcggtcccgctga

SEQ ID NO: 190615 - DNA, 561 bp, Arabidopsis thaliana landsberg
atgagttataagttctgccccggagtagcaaggaaacctgatgatcaacaccacatctctacctcaaaatctgcctctgctcatgcctctaagtcaaactcacgaaactactacaccccccatgacaacttcacaactcctaggagtaattctcatatctctgaaagaagtgtcatccctcaacagtttgtcaaccctgcaaaacgaaagttgaaccatgatggggccaagtccaggtccccacctgcccgtagaacctccccacagaggaagtcttatgctcgagaggactatcatcttcagggtgctgttcagtctccccgctatgaaagcaggcagggttatcattcttctcaacaattgcagtggcgagagaagtctaactcttcaacagggaatcatgtttcaccatcagaacaatctagagctcggagaccacctctcgagagaaatgttacaactcctgatcctcctacccctccacctctgcagactcttgaccccagatgctcggggatggaagtttcttctcctcctctacccccaccttctaaagaccag

SEQ ID NO: 190616 - DNA, 90 bp, Arabidopsis thaliana landsberg
atgcgcgaagtggaagttctctaccgttggagcggcgcgccggatgcacccacggtgatcgtgcaaggcggaatatctgccgatcgcaac

SEQ ID NO: 190617 - DNA, 279 bp, Arabidopsis thaliana landsberg
atgccatccagctgccataatattgccctacaaaggcaatccacctatcaacagagggaccacaccgttctgcaagttcccgtaaggcacgagtctcatgagccaatggagcacaagaggcggaagagcgctaggatggtccgatcatcaagcaagggttggataatgtcgggtcagagaacatatgagcgacgtgctgcacaacctgctggggttgcgatcgagcacaatgacgaggagatggcggagccacaccaagaaccggtcatgcctactgag

SEQ ID NO: 190618 - DNA, 326 bp, Arabidopsis thaliana landsberg
ggttggttttatttgcacaaaggtgatcgatggtttgcaaatttctggaaaggaaaagccagtggcgaaagccggttctattcaaagtccggtgagatattctttggacatttcaaagatggttggcgccacggacaattcctctgtatagatttggatggaacaaggtcagtgactcttaaaaaaaacttttccctctatcttaatcagaaaaggagcaaccccaagtttattcaaaattgttgacggctatttcctacagatactctgaaacttgggacgacggtgttctcattgaccggaaacaagtggacgccggagattga

SEQ ID NO: 190619 - DNA, 147 bp, Arabidopsis thaliana landsberg
ggaccaccagtcccggcgaaactataactgcatctgactgctataatactgcttacctggggcctgccattgtgggcgaaacattggctatcgatctagacacgtacttaaatgagaaggcgaatctgaatggagaagctggagaag

SEQ ID NO: 190620 - DNA, 251 bp, Arabidopsis thaliana landsberg
agaaagctcaggattatgttcagctttgggacacgtggaggaagggcacatcttttgccggaaacccatacggtgacttgcggaacaatgttcaaggtgacttgtggcctaaacactatgattactgtcgtcaatctgagggcacaaatctcttgacttacttgatgtatgatttttgtcgtcaatctgagggtgcaaatctgctcaagtacatgacctatggcctcagtccagaagctgacttggtttag

SEQ ID NO: 190621 - DNA, 729 bp, Arabidopsis thaliana landsberg
cttagtaatgatacttgtctagcatatacgctagctgcaatgagcaacttggtatcggaaatgggcattgcaagtacctccggtgttttcggattctcatactcacccgtgactagcactgcgtcttcattatccgtacaacaaagagtgtacatacttttgaaagagtctttgaggagagctgacagtctaaagttaagacgcttagtggcttctaatcatcttgcgatggctaaatttgagttgatggtaaagtctttacttaactgtgatgaacatagctctttccttatttatttatgatatatctctgatctgtcgtgagaatctggggtatgatttttcatttagaacctggtgtgtctctcatatcttttgatgcacaaagaacctgtgaattatcactgtgctcgcagcaattctagttctttatagtactcgaaaaatgttaacatgtgagggaaatatatatagaagaatttgtgacgtcgcttatgagaaaaagaaaacacaaaagaaaagtgatgaagcacatttgatagatagataggaggaagctggagcaattaaagtttttttgtttccatagaaaattatttcagcgtctgaattttctaatgagaaaaatgtgatgtatagagaaagaaatcaccagttttcctttggcatgtgtatctatttcatctctttccttgttttttgtcctgtaactagacatacaaagcttga

SEQ ID NO: 190622 - DNA, 93 bp, Arabidopsis thaliana landsberg
atggatattgggaaagaattacctgcaatggaggaggaagagattgttgcatctgatggtgaccaacaaactgaccataaggattcatctgag

SEQ ID NO: 190623 - DNA, 342 bp, Arabidopsis thaliana landsberg
ggtcatttcagccagatctatgctatcgcctttgatggcaagagagtcgtcacaggtagtctcgacaccaacgtcaggatttgggacccgacctctgggtaagtttgtatagctcctaggatgtatggtggcaaactgacatgttgttgcagcgagtgccttgccattcttcaagggcatacctcacttgttggccagctccagatgcgcggagacactctagtcactggcggatctgatggatctgtcagagtttggtcgctggaaaatatgtgtcccattcatcgtcttgcggcccatgacaacagtgttactagtttgcagtttgacgatactcgagtc

SEQ ID NO: 190624 - DNA, 314 bp, Arabidopsis thaliana landsberg
  unsure (1)..(314): unsure at all n locations
gtattcggatatttctcattgacatggaacatgatgccgctattggaagccggcgatattttccattgaatggtaagcacaaaattggcatattcaccatccgtgatcaggtcagtgggagcagcgccttttttatgtccgttgcaatgcaaggtcccgctttccacgtcccaggcagcgattgatttattttgatannnnnnnnnnnnnnnnnnnnnnnnnnnnntaaaaaggagtgcccacccgcctgctttatcttgtggtgaaagctggttgacagatgtatcggaggtaacggcagtcgttgcgactga

SEQ ID NO: 190625 - DNA, 183 bp, Arabidopsis thaliana landsberg
atgaaccgcagatcgtttctggcaaccgtcgcggcgggcgcaaccgtcgcagcgctgcccaaacagctcttcgccgcagacaagccgacgcttgtcacgtcgatccgctcactttccaatccgtatcatgcggtctggaagacgggtgccgaggccttcgccttcgccatcggcctcgatcac

SEQ ID NO: 190626 - DNA, 1061 bp, Arabidopsis thaliana landsberg
atgtcacgtcgtggcaacgaaaacgcagctcctgagcccaaagttgtagttactcccagcaacaaaaacaatgaaaacgacataccgcctcctttgaataatgatgcatcatcctcaaaatcaccagcaattactacagttacagaatctgtaggctttcatgagaccatcaatgaaggagacacagtggaaagcttcaaaagtgtaatttctcccggtgtttttgtctctgaaatgcctcagcctagattctgtgaaatcatgatatcaatggtataattacccatcacattgctacttattctctgtcgtgcccttacctttttttgttgtgtccatgagagcaaccccaactgtttggataatcaggtctaaaagctcggacagtgggataacgtgacatagatccagatcatgagaccaacttcatgagtaaatattgttttgtactgacgaattggcatggatagtagtatgcttaacaatctcatagagggttttgtctttacagtttccaaaggcaagacaatatgtgacttatatgcattagatagaattttgttggttaatataatactacagtaacacttaagtacttgcaatctattgttttgcagtattctcccctcaagtgtctcgatcaacatgtgccggatttgttgttgattgtggtgaagatagggatcatgaatatggtgattcccctactctttattttaagaaaggaaagaagagccaggctctcgctgccagaagaaaggtatcacaaaatgacaatgattttgcactagtttatgaggtattgatttgagcctgctaactatctctcactaaaggaggaaatttttgatgactctcacataccggatcaggttgtactacaccatagtgccagagcaacaacttgtggtcattgggccaatgtgaatcttctatccacagggtaaactatattacaagcttgcctttcagagttttgagatcacagttgatatgattttcttctgcttttccattgcagagatgaaaacgtagcagaaggaattctcaagctggtgtag

SEQ ID NO: 190627 - DNA, 162 bp, Arabidopsis thaliana landsberg
agactgataactgcaatacgactggttttccgcccgaaaacagagagcgctgaccgcgaaagctcgggctttataacggaaagattcgcaccaagtctaacaaaattgattcaaataacgccgatgagggcgtttgcgggaccatcatcagccacaggctga

SEQ ID NO: 190628 - DNA, 140 bp, Arabidopsis thaliana landsberg
gatattgggttgtgatgtgggatgaacacattgattctttgatcatatcgctgaatcggataacctcaatgcatgaagaacttgttgtgtctagtatgactgaacttagaggactaaagagtgaatgtgaacagccatag

SEQ ID NO: 190629 - DNA, 373 bp, Arabidopsis thaliana landsberg
gtactcgatttcgaggcccgcgttatctttctgaatgcgtctgctttgaataccaacctgatcctgctgaattcgcagtcaggccgttttccgaatgggctgggaaatgattcgggtttgctgggaaaatacattgggttccacaattaccgggcgagcctgcatgctgaaatgcctggttttaccgaccgttactattttggacggaacccaacggatgccatcattgccaattaccggaatcttcatgaacaggacaccgactacatcggcgggtttacgacctttctaagcgcacgccggaaaagaggggccgttggcgatgatgcctccggacttggtgcggatttcaaaaagcaaataactcagacag

SEQ ID NO: 190630 - DNA, 574 bp, Arabidopsis thaliana landsberg
atgcgggatggcatgaatttagtctgtaaggaatatatcgccagtaaaacggacagagaaggcgttttgatattaagtgaaatggcaggcgctgccagagaactaacggaggccattattatcaatccaggagatgccgatggcatggccgcggctataaatacggcactgcagatggatccctcagagaaaatgcagcatatgcaaatcatgcaggaaaatataaaaaaattcaatatacatatgtgggttaataactttttaaatagcctttccatagcaaaagagaaacaacaaaaattatcaacaagacaaatcagcccagtaaaccttgacaactttaccaaagcctatcagcaggcaaatagtcgacttatatttttagattatgatggcaccctggtaccctttgataaaaaccctgctaaggcagcgcccagtgctgaacttattcaattattaaaggcacttaccagtgataccaaaaacaggatcattgtcattagtggccgaagaagacaatcacttgaaacatggatgcaaggaattccccttgatattatagctgaacatg

SEQ ID NO: 190631 - DNA, 317 bp, Arabidopsis thaliana landsberg
atgaatcgagctggcgccgacgccgtcgcgcatcgccggccttttcgctttgtcattcgaggtttgcatgttggcggtgaagtatgcggcctgccagccgacgaaatgcacttgcgcgtccggctgcgcgcgctaggctcgatcagccgcccctgcgatgccggacccgtccgcaacgcgtttcggtcgatcgcggctcgtcatggcacctcaggcccggcttgtgtccggctgcatgaggagaaacgccatgaacacagtcgataccatcgaaatgctgaacaagctgatcgtcatgtccaagaacagcgagcgcg

SEQ ID NO: 190632 - DNA, 136 bp, Arabidopsis thaliana landsberg
ggtttcctgcagcctggacaacgcccatctccatgcaaatggtcttgtggcagaacagacagagccgaaatccacaaggacaggggaggaaattcgaatccgtcaagtccaagtcttcgtagcatatgggacatga

SEQ ID NO: 190633 - DNA, 421 bp, Arabidopsis thaliana landsberg
atggacctagagatgaaggaccacttctacgtttatcaactggtatgattctcttagcattttgcctaaaaggattcatgttttggtaaactcattggacaatgtaactcattgttttcaggatctactgagaactctcccaccgtcgcaagcacgagccggaaaatgtttagtgttgctagttcgaaaaagaggtcgtttctttctagagtatctttaaagagaaatggtcatgagttttcaacggctgaatcgtcatcggcagctggacttcctccgttgaagcttcccccgggaagatcagcacctcctccacctcctgctgctgctccacctccacagccaccacctcctcctcctcctaaaccacaacctcctccaccgcctaaaattgctcgtcctccacctgcaccacctaaag

SEQ ID NO: 190634 - DNA, 555 bp, Arabidopsis thaliana landsberg
atgtcggtctgcctcacggtgaccgcgtgctacatggcgtggggctgcgccatctcccaggtgatgcagcgcatcgagggagcgaacggactactgtccaagattgaaatgatgggtgcgaccatcaccgccgcacccatcatgaccgcctgctccatctggctcacggccgctcacgagtcgacgactctcggccctgacatcctgcacatgatgtactggggcggctggctcctgatcgacctcgcctacttcgtgacctcgttccagatcgcggccatcagcatcacgttcgctcgggacaagcgcaccaagccgctggtgccgtcgtgggtgaactggtggggttgggtcaccttcgcgtcgttcttcgtcgtcagcgcgatcccgttcgtcagcaccggcccgctcgcgttcaatggcgtgatcagcttctggatcgcgttcttcacctggttcatctggtgcccggcgctgtcgtattacattctcaaggccatcccgaggctcaagaccgaggccgaagcggctatcgcccagagatcggtcgcgacc

SEQ ID NO: 190635 - DNA, 210 bp, Arabidopsis thaliana landsberg
ccaaacaaggaaaaatcaaactctggaacttcaaagttaaagttggtttgcagatactaggagacattgcgggtaatcttgacgccaaaaaagcatgtaaagaagcgttgaagatccatgaaaaattcctgaaaaaggtttctttcactatcactataactttgggaagatataatatgatatacaggtatactaatgcagatggtgttg

SEQ ID NO: 190636 - DNA, 380 bp, Arabidopsis thaliana landsberg
ggctctactggggccggtacgacgagacagagaggtccctgctccgctctgcggagctcgacctctcagatctcttcccccatcatcagccgatgctggcacgcacccgcatgcacctcgactggctgcgtgggcagtggcaggggatcgtcgagacgtcagacgtcccggagcggccggtcggtccgggagggtcggagtggatcgaggccctgctcgtctggggttcgctccgagcggtgcgcgacgacccgagtggcgggcacgccatgctgctgcaagcgctctcgcaggcgtgggagaccggctccttgcagtactgcagcgagatctccgggatgctcgcgtggatgagcctcgacgcgggcgcgcccgaagcg

SEQ ID NO: 190637 - DNA, 241 bp, Arabidopsis thaliana landsberg
atgctgatcaccaacgcccacatcatcaacgaaggccacgagacggccgccgaccttctgatcaagaacggtcgcatcgaaaagatcgcgaaaaagatcgatgccccagcgggcgttgaggtgttcgatgccggtggccagtggctgctacccggtgtgattgacgatcaggttcacttccgcgaaccgggccttacgcacaagggcgacctgtacaccgaatcgcgcgcggtcgtcgccg

SEQ ID NO: 190638 - DNA, 197 bp, Arabidopsis thaliana landsberg
cggggttcgaagacaccgcggcactggaaacccgcgaccaggaccagccgctggaagactacatgtccgccatcgagcgcgacaccatcatgcaggcgctggaacaggcccgctacaacaagaccgccgtcgcgcgccaactgggcatcaccttccgcgcgctgcgctacaagctgaaaaagctcggcatcgactga

SEQ ID NO: 190639 - DNA, 265 bp, Arabidopsis thaliana landsberg
atgaagacggcgttatgctctcgaaagaaatttggattccttgacgggacaatttcaaaacccgtagaaggatctccagatttggaagattggtggactattcaagcattgctcgtgtcttggattaaaatgagtatcgatccagtggtgaagaagaacgtttctaatcgtgatgtggcgaaggacctctgggatcatttgaagaaaaggttttctgtgatgaatgggcctaaacttcagcaacttaaatctgagttagcgtgtt

SEQ ID NO: 190640 - DNA, 85 bp, Arabidopsis thaliana landsberg
gctgtctctccccagggaatcttcgctacttaagaaggagcaagaactgcttgtagctgaagaaaaaattgccagcaaggaatct

SEQ ID NO: 190641 - DNA, 67 bp, Arabidopsis thaliana landsberg
atgcggactcagatggatcagctaacgtgtggtgctagtagtaatcccgcaattgatgcggactcag

SEQ ID NO: 190642 - DNA, 169 bp, Arabidopsis thaliana landsberg
atgctggaagtgagaactctgatcgtcgatgattcccggcaggatgtcgatctgatgctgctgcatctccagcgcgagggagtgaaggacgagcatgagctcgtggattcggagcccaccctcaagagcgcgctgtgccgggattgggaccgagcgatctgcgactttt

SEQ ID NO: 190643 - DNA, 55 bp, Arabidopsis thaliana landsberg
atgggtcacctacactatcaccacaatgacgccacgctaccagacttgggaggag

SEQ ID NO: 190644 - DNA, 245 bp, Arabidopsis thaliana landsberg
atggctaataataagagcaaagtcgagccaaaaactcacgaagaagatcttcgggttagtcgtttaatgatgattattatcattattttgtttacctctattcttctaataattatgactactcttctgatcttgtcctgaaccagtctaagggatcaccgacacctactataggctataataagaagagtcgatgaacatgtttggaagagaaaagagatcaagattttgaccgacttgaaaac

SEQ ID NO: 190645 - DNA, 665 bp, Arabidopsis thaliana landsberg
tcttgatttgccttggttgggggattgacagtctttcaggagctgatgatgtatgtgattctaaagccggggaagatcttttggacatatttcgtagaaaggtttgtcttttcttttcactctgtttcaaaaatgttgcattgaagcaatttctattgcatttcacttgtcttcctttgtttgaacatattcgttgaaattggagttccctgtatagaaatcaaagctaagttacatagttgcttcaagtggtttacctatctttgtgacttccaaagcaattctccatatatgattcttgttctgctttctataagttggtttgcacattgaatcaattcttagctacatagtagcatataaagattgatcttttgttgaaactgtaaagctactgtccacattttgtgtattgagatctatttcttgtcttcttctttctctaggaatcagtatcatctagatcacccccatttttccttgggtctccccctagccgagcagcaaacccgttagctcaagatgcacgctttggatatgagaaactcgacactgtctcaccctcactctcccctcttctcccatctgcatctcgtgttaaaagtggttgtggtagaatgaagtttggggtgaaaccagcaactgttagagtagaaggggtttga

SEQ ID NO: 190646 - DNA, 933 bp, Arabidopsis thaliana landsberg
atggaagaagtaaaaggcccacctgagggatcaaaagcatcagaagttttgagtcctgcagcaaatgttgagacagtaaaaaatcaaaaggtgccagcagtgactccgaaaagaaagagaatggtcaatgtgctagatgttgtggaaacaattaaatcttccagcacacctccgaagaagactgttgccattcccgaagcgaaaactgaaatttctgatactaaggctccagagcaagaaactgaagccgaagctgggtcctcagagcccacgaagataaaatccttgaaaaccgaggaagaaaaaataacagagccaacttttgctgaggaaatcagtgtcattgcccccgaagcatcctccaaagttcgtgattatattattcgtcatgcttcgggaaaaaactattagaaaaagaagagcaagaggcccagcgctacgtgcaaaaactgaagtatccaaagggggcgttaatattcaatggcagtggagaagaagactttttgtattgtctccctgacaacaaggagatttctgtctgtcgggagatgagcaagagcttcggattcccaactttagaagacgggctctcggtgctgtcgaagaacgatttggccgacagcctagcctacaatagcttaaaggtgcgacaaatgggatccttgtattctttgttgataccaaaaaaaaaccttttgcttgttttattgaaacacacatacttttctttgcagggcctgatacttagtaagtgcctcagggcacaaaaagatgctgaagacgaagggtgtactatagccctgagcaaccttcgttccgaagtaattgaactgaggaacgaaggcctcgaaaaagataaaatattacactcattggtaaataaaataaaggaagacgaagttgcgttcaagagtcaggctgaagctcagagac

SEQ ID NO: 190647 - DNA, 938 bp, Arabidopsis thaliana landsberg
atggagagtttgatcgtgttgattaatacgatacaaagagcatgcaccgtagtcggcgatcatggcggcgatagcaacgctctatcttctctatgggaagctcttccttccgtcgccgtcgttggtggccaggttttgtctcaatcagataactctaacatagttttttctcttaagcttgtcttttaagggttttgttcttcttcttcttaatgagtgtagagttctggtaaatcttcggttctagagagtatcgtcgggagagattttcttcccagaggatccggtttgtgatcaaaaccaaagctttcaatttttttcgtaactaatttgtgattgattgttaaaacaatggaaggagaatctgatttttgtaggtattgttacgagacggcctttggttttacaacttcataagactgaaaatggaacagaggattacgcagagtttctccaccttaccaataaaaaattcaccaatttctgtatgtaaacaaacttatatatgaatgtgtctttttggctgtagtgagtcaatcatattgaaatggaatttgtgtcccagctttggttagaaaggagattgaggatgagactgatagaatcactgggaagaacaaacagatttcttcaattcctattcacctcagtattttctctcccaatggtaagctatcattgttgctatgatgctcttgtttccatccttttgtccaactaacatcagtttttgtttcttttgaaaacagttgtgaatcttactctcattgatttacctggtttgactaaagttgctattggtatgtgttgcttgactctacttcttttgggtctcctttggttcattacttgttaacattaccaatttgtattcagaaggacagccagaaactattgttgaggatattgaatccatggttcgctcatacgtcgaaaag

SEQ ID NO: 190648 - DNA, 365 bp, Arabidopsis thaliana landsberg
  unsure (1)..(365): unsure at all n locations
atgaacaaaggtgcgacgaaggaagaaaagaggatgacgcgncggcgaaacggcctttggatagagaaagtgaacgagagaaagatcgagccattatctagaaggatccgaagaaaagagaatcagcgacgagatcggtttctgtttcaacgctgtaattttgagttttggataatgctgtgtgagacagagcttatttttcccacctttttatcgtaattttttgtttgcttattatgttattacctacaagaatatttatttatattttaactttttcagccgacttaactaaattagctctgtcttttttagtactatggattaaccacggattattaggaagtctactacccatggtttag

SEQ ID NO: 190649 - DNA, 133 bp, Arabidopsis thaliana landsberg
cgtcacgaagaaccgatgccgagaactcggagaagtctggcacgtcggaaaaatgccatcccctgccttcattaatgttagcatgacggtggcgattaccacgtttggctccttttccacggcggccggataa

SEQ ID NO: 190650 - DNA, 408 bp, Arabidopsis thaliana landsberg
atggaatgtatcagtacggtgcggttaatgctgcggttaaaacgtctacggcttatggaagtagtggaagtgctagtagtgtggcttttggttctgcaggaagcccagcaggtaaaacagatttaaaatgaaatcatttttcaatttttatcttagtttcaaaagtgtcagttgaatgattctgatctaaatgatgatgcagcctcgatgttggcattgccagcgccgccaccgacagccaatggaaacagagtcggaaacaatagtccggtgatggtggatccatttgcggcgtcgctagaggtagccccaccagcatacgtgcaaatgaatgatatggagaaaaaacaaagattgttaatggaagaacaaataatgtgggatcaatacacagaagtggaagacaag

SEQ ID NO: 190651 - DNA, 427 bp, Arabidopsis thaliana landsberg
agtgcggggcgcctgatcaagcaccgagatggcctcgtcgagagaggccgtttgcgcgcggatcaaggcggattgagctcgtccgttgcggacgattggagaatcgggaaattgatcggcggcctgcgcccagcgctttttcgcctccgaccgggtttgcggatatttctccaactgggtgagaaggcgagccgcctcgggctcgacgagcgactctgccggcaaccagcgaatcgcgagcgccggtcggtgggtatcgagaaggcggcgcgcgacggcgacccgcgcggaccgccatcttcccggcgagagagcgagttgtggagccgcgggatcgattttttcgaaatccggtcgggcaatcagccatccggcgacggcgtcccaatccgtattggcggtgctttgaaaggcggcctccagccag

SEQ ID NO: 190652 - DNA, 471 bp, Arabidopsis thaliana landsberg
atgggaagtgacgaactcgaagaggaagaaaacggcactaccgcacatgaagtcttgtacggtaatggcgaagatgaagacgaaggtttcattaacgatgatgatgcacctatcggtattccagctgaacacgctctaccgcttcagttcagcagcctttctaacgccaaacctcgcgacttgttcaaatacgcgatcgactggatggtccagaaaaagataaatccggcgttcaattcggaggacgaggtatacgaaatgagtttcaggaaacttgacgacgaggtcaatgctctagccgggtccaagtaccattcttcaatctggacagccgagttcaccagagcaatcaaggcgagaccagaaattgtgatcaacgacatcgatccgcgcactcgcgcagtcatggaaccccattgcgaacgtgcaaccgcagaagccatccagctacattcgagctatcgttcaccg

SEQ ID NO: 190653 - DNA, 389 bp, Arabidopsis thaliana landsberg
ggtataaaccctacgcccggcgtcccttttccttcttcctcccctcacaaccctcgggtcacctcgggaagttgggcgccgccgctaccgctcggagccattgccgctgccgccgccaagccacctcaccgtgagtacagaattcctcacggcaccggacctaggtaagatttccccgactctcctccttaccctcatcaaatgtaggcccgagtgattgagttttcctgtcgcgttgggggcgctgattgctcgtcggcactggtagaaccaccgtggactgccctctcctatggaccgtagttttcattgatcatacacataaattggttcgctagatcgattcgccgtattgcaggctccgtgtgggaggttttaattgggttatg

SEQ ID NO: 190654 - DNA, 135 bp, Arabidopsis thaliana landsberg
ggtttctatggaacactcactgagccaaggaatattctgagtaaggaaatggatcttaaactaaacccagagctaaaagaaacactgaaagcattatgcaatgatccaaaaacaacagtagttgaattgagttga

SEQ ID NO: 190655 - DNA, 379 bp, Arabidopsis thaliana landsberg
cactccgagatggaccggctgccggtgctgtacgagctggccggcatcgtcgcggtgatggcgctggggcagggcgcggtgttcgtgccggcgcggcgcgcgtccaacgtgccgccggtcgtggcgacgcggtcggcatgacgcaccgctcgccaccacccgtccatcggcacctgctgcgcggagtccatccatggtgatgctcgactactacttccagttgggaatgcgcagcctgcggcgcaacccgatgctcaccgccctgaaggtgatggcgatcggcttcggcgtggccgcatcgatgaccacctattcggtgttccgcacggtgtcgggcaacccgactcccgacaagacggcgcggctgatcatcccgctg

SEQ ID NO: 190656 - DNA, 249 bp, Arabidopsis thaliana landsberg
atgggacatttctcttccatgttcaacggtatagctagatccttctcgatcaagaaagcgaagaacatcaacagcagcaaaagctacgctaaggaagccacagatgaaatggcgagagaggcgaagaagaaggaacttattttgagatcctctggttgcattaatgcagatggatctaataacttggcttctgttttctctagacgcggtgagaaaggcgttaatcaggactgtgccatcgtctgggag

SEQ ID NO: 190657 - DNA, 295 bp, Arabidopsis thaliana landsberg
atgagaacgacaaacaacaggcgcagattcctccggagaaggaacgagcaccagcattccgatgaatatgtgaaccggaattatcctggagagtttgctcacaggtacagcgaaaaccctgaaggtgatcagtatataccaagaggctggcaggaagaacaatgggaagagcgggacgaatgggatgaatgggatgaaaatccaggtgaaagcatcaattacaatcgttattacgaacacccgcacggtggcgaatggatgcgtgacacacaaccggaaaacgcaaatgggtcct

SEQ ID NO: 190658 - DNA, 52 bp, Arabidopsis thaliana landsberg
atgaagtcatatgcggctgttttgcttggtgccggtggcatggccatcttgg

SEQ ID NO: 190659 - DNA, 160 bp, Arabidopsis thaliana landsberg
gaattacgcggagatctgtctctctgtcagctgactcgacattttcgagttcggtgggataatcgatcggactcaatggacgcgatcagtgacccacgccgtggaaccaacggagaccacagtgagggagacccagcaagagaatctggatgccacaact

SEQ ID NO: 190660 - DNA, 428 bp, Arabidopsis thaliana landsberg
atgaagtttcactgttatgtctacgaggtgtcccggttttggaagcttcatcctcaaactttgttcaaattcatcacaatatctgtcaggtatggaatcaaaactacatcatatgtctgtgagcatttcggtttttggatcattctgatttgagttattcggtctttttttgcttattcggttcttgatttctttccaactgataggtacatgttcagactcataaatagaagggtgcgcagaatcaacactggttctagtttcagaccagttcttaaactatacaaagaagaagtgatatggcttggcttagacgcttatattcaagttctgaagaagaaaaactcgagatatcgaatgctcttgatctatttaaaatctgcactttctaaacactctctttctcagcagctatcgtcggaattgag

SEQ ID NO: 190661 - DNA, 84 bp, Arabidopsis thaliana landsberg
gttccatcagcagcgccgcatacattggcttatatagaaaaaccattacaagattatgatccaagctatgaaaacatgacggag

SEQ ID NO: 190662 - DNA, 224 bp, Arabidopsis thaliana landsberg
  unsure (1)..(224): unsure at all n locations
atggaggtacgtgaatgaacacatggtgtgttgtaacaattaatctcaatatggccaaaccaatccttgtctctacaacgaagctattgcgctatttgttttggttgtgcagnacgcttccttcttcttattgcctttcttcttaggcgtcatatgactctcttgcatccttaaaaactatgctgataatttatgccacaccaccatttctcattgaaagctaa

SEQ ID NO: 190663 - DNA, 97 bp, Arabidopsis thaliana landsberg
atgacggaccatgtggagtattcttacaaatacattacatatggggaaaatgccaaattacaatttggtgtacacatcaaagaggaagaagacagaa

SEQ ID NO: 190664 - DNA, 317 bp, Arabidopsis thaliana landsberg
atggcggcaagatttctctccctctcgcggcgctgctgcgaggcgaaaggagttgtggctcaaggtagaaggcgataagggatgtagcacgagttttatacccaggagacgaggggaatatacctccagcctcccaaaaagcgcgcgcagagatctcggcggaggccacagcgctcgcacgagtttgttacggagtttgcgcaggtgatgaagtttctgacgcgggggtccgacctggcggggagttgaggcacgtgcgcgcgatagctgacgtcctgggcccatttggcagcgcacttgagtacagcggcagcaag

SEQ ID NO: 190665 - DNA, 87 bp, Arabidopsis thaliana landsberg
atgttctatctggtatggatgccgaataagtcttcccgtgacatgcaggaagttgaacgcgaggaggccatagcattaaagaaaaaa

SEQ ID NO: 190666 - DNA, 1371 bp, Arabidopsis thaliana landsberg
atgaattcgagagattcggtgtcttggaatgttatcgtttttgggcttctcgattatggttttgaagaagaagggttatggtggttttcgaagttgagagtttggggttttgagcctaatacttcaacattggttcttgtgattcatgcgtgtcgtagtttatggttcgatggagagaagattcatggctatgtgatccgtagtgggttttgtgggatttcgtctgttcaaaattcgatcttgtgtatgtacgcagatagtgattctttaagtgcacgtaaactgttcgatgaaatgtctgaaagagatgttatttcttggagtgttgtaatccgaagttatgtgcagagcaaggaacctgttgttggattgaagttgtttaaagagatggttcatgaggcgaaaacagagcctgattgtgtgactgtgacaagtgttctcaaggcttgcacggtgatggaggacattgatgttggaagatcagttcatgggttttcgatacggagaggttttgatttggcagatgtgtttgtttgcaattcacttattgatatgtattcaaaaggatttgatgttgattcagcatttagagtatttgatgagaccacttgtcgaaacattgtttcatggaattcgattttggctgggtttgtacataatcaaaggtacgatgaggctcttgagatgtttcatttgatggtgcaagaggcggtcgaagtggatgaagttacagtcgtgagtcttctccgggtttgcaagttttttgagcagccattgccttgcaagtcaatacatggtgtaataattcggcgtggatatgagtcaaacgaagtggctttgagttctttgattgatgcgtatacaagctgcagtcttgttgatgatgcaggaaccgtgcttgattcgatgacgtacaaggatgtggtgtcatgtagcacaatgatctctggattagcccatgctggccgatccgatgaagcaatctcaatcttctgtcacatgagggatacgcccaatgttatcaccgtcataagtcttcttaacgcatgctcagtttcagcggacttgagaacttccaaatgggcacatgggattgctatccggagaagcttagccatcaatgacatctcagttggtacctctattgttgacgcatacgcaaaatgtggtgccatagaaatggcgagaaggactttcgatcaaatcactgagaaaaacatcatctcttggaccgtgatcatttcagcatatgctattaatggtctaccggataaagcattagcattgttcgatgaaatgaaacaaaaaggttacacaccaaacgctgtgacatatctggcagctttatcagcttgtaatcatggaggattg

SEQ ID NO: 190667 - DNA, 148 bp, Arabidopsis thaliana landsberg
aaaggaggagacgaagaagacatagtaatcatcagaataaggaagattcggctaaggcaagccattgctccactccactgggtactactgctacatcgctgaaacgaggaacagaaagatgttcccgatgcgttaacgacgtcgttta

SEQ ID NO: 190668 - DNA, 339 bp, Arabidopsis thaliana landsberg
aaagtcggatgaatggcatggaatcaacgatccatcaccttcaagatgaaaatcaatgccgggtgagagaatatcaagtggaactggatcgagctcatgatgctcacattgagattattgttctgcagaaatgtttgcaggactggcttgagaagagttcctctttgattgctgagaatcaggatattaaagaggcttctaaactgttagagaagctagtttctgaactagaagaggaaaatattgggaaacaagtgcagattgactcctcgattaactgcattaaaatactgagaacagggatctaccaggtattgatgaagcttgaaataattccag

SEQ ID NO: 190669 - DNA, 120 bp, Arabidopsis thaliana landsberg
atgactggaactgaagataaatacacaaagagctccgggaaactcatcgtcggaagttcaggtggtgaaggagctttgatgtctccttatcatcttagctcaaccgacaataccggccaa

SEQ ID NO: 190670 - DNA, 42 bp, Arabidopsis thaliana landsberg
cttgtggagagagcacgtcaagccaacgcttcagttaactag

SEQ ID NO: 190671 - DNA, 307 bp, Arabidopsis thaliana landsberg
aatatggaaagcaataaacaacttggtgttcaataatttcagagaaagttcaacaacaacaatactaaaagccaagactgaaacaaaagaatggctaaatgctacacgcatacaaaatcgaaggcctacaccatttcgatccaatcacgcagccaacaagaattggacaagtccaccgctaataactagtaaatgtaactttgatgctaagacgaaagtgcagaacttagaaactacaagaggaaggattatcagaaccatgacgggaatccacaagattggcgttcatggattcgtaaacatataa

SEQ ID NO: 190672 - DNA, 205 bp, Arabidopsis thaliana landsberg
attggttggttatacgaatcaacagcggaagatgcaaacacgagtatcggaatccattcgagagggtggactagctcatatatatctccgaaaccaccagcgtttcttggggctatgccaccgggaggtccggaagcgatgctccagcagcggcgatgggccacaggactgctcgaagtccttttcaacaaacaaagtccgttga

SEQ ID NO: 190673 - DNA, 578 bp, Arabidopsis thaliana landsberg
atgaagaatattttgtcagtgggagctctgacggctccatttgtcattggattgtggggtaggtactgttgtgcagcagtatgctgttttatttattcgttcatgctgcgattgttttaatcacttataagggttttttaaatcatgtttcttctctacattttatattcagtcatgatgcatctacatactagtaggctagtagcatcttactttaccttatattttgtggtttttgtttgaggtgtatctaattatgaaaacttttcttaattcccaggcatgaaaacccgcagattgaaatcccaaatgctcatgataacagtgtttgggatcttgcatggcatcctattggatatcttctttgcaggtagcaatttcaatagtctggtgctatgagttccttacagttttattctatgatgtgttgtggttccctgtgctcttgaataactaaatgcttcagataatgatttttaaccctattatctgcagtggtagcaatgatcacacaaccaagttttggtgcagaaacaggcctgcagataatccccgagatgttcttatgcagaaccaag

SEQ ID NO: 190674 - DNA, 163 bp, Arabidopsis thaliana landsberg
atggaattataccttttagaggtgtccttaggtgagacttgtgctaccgagtctccttcagtgataggtatagccgaagggggtttaaacataaaggatgagagtagaggatcagaatctatattggaagagggaatgaaagtggaagaccctccaagagact

SEQ ID NO: 190675 - DNA, 245 bp, Arabidopsis thaliana landsberg
  unsure (1)..(245): unsure at all n locations
atgccgtcgaggtaggcacgacggctcgtcgcnnnnnnnnnnnnnnnnnnnnnttgtttcttcagcgaggacgggatgcagcgtggccattgcagtctcggtacagttgagggtgcagcggatcgatctgagggggcgcgccgcgcgcgtggctgttcggaggaacggacaggcttcctgacaccactcatgcgacgcgctaccgcagagggcgaataatccgcaccatcacacttggagttgtg

SEQ ID NO: 190676 - DNA, 460 bp, Arabidopsis thaliana landsberg
atggcaagtggttatgtttggttcgcaacagactggcttcctacagctatggattccatggagcacgtggattcagacacgatggatctcttgcaaggagtggttgcttttcgccactacacaatcgagagtagtgtcaaaagacagtttatggcgagatggaagaatcttagaccaaatgatggcttcaactcttatgcgatgtacgcttacgattctgtttggttagttgctcgtgccctcgatgttttcttcagagaaaaacaataacattactttctccaacgatccaaatctgcacaaaacaaatggtagcactattcagctatcagctctaagtgttttcaatgaaggagagaaatttatgaagatcattcttgggatgaatcaaactggtgtgacgggcccaatccagtttgattcagatagaaaccgggttaatccggcttataagttctaa

SEQ ID NO: 190677 - DNA, 264 bp, Arabidopsis thaliana landsberg
  unsure (1)..(264): unsure at all n locations
atggcggccctcgnnnnnnnnnnnnnnnnnnnaaccaagctcgtgatcggcgccatggtcgcggtggtcatcgtcggcgcgatcgcggtggccgtcacgcccaagaccttcggcctcaaccagggcctcaatggcgcttccagcggacgcgcgagcctggtctccggcggcctcacgatgtttggcgaccgtccgatctgggggtatggctccggttccttcgaggccgagtactcgcaccagaacggcggcacctgcggcgag

SEQ ID NO: 190678 - DNA, 40 bp, Arabidopsis thaliana landsberg
atggagaatgatatggaagagaagtttgaagattggaaag

SEQ ID NO: 190679 - DNA, 185 bp, Arabidopsis thaliana landsberg
atgccgaatatcgaacgtggaacgccgatttttgaagtattcacacagtatgtcattcgtcattccttgcctgccttgtccggtaagcaaattcagcattccttattcagctctcttggaattccgaatatcgaacaccaattccagaagtatccacacttcgtcattcaatgtcgtttagttag

SEQ ID NO: 190680 - DNA, 291 bp, Arabidopsis thaliana landsberg
ggcatctaccactcgggggaggcggtggtggagtcctcggcggcggtggtactgaaggtgtccctgggggcgttggtggtgcacgtgggggagaaattggtggagttattggcggtgattgtggtggtgcacgtggaggagaagttggtggagttatgggaggagacatcggtggtctctttggaggagaatttgggggaactattggcggagataccggtggtgtttgtgggggagcggttggtggagcccttgcaggagtacctggtggtgtccgtgaaggagaagttg

SEQ ID NO: 190681 - DNA, 1125 bp, Arabidopsis thaliana landsberg
  unsure (1)..(1125): unsure at all n locations
atgagtgttagagaaatgtatcagagactgtatcgnnnnnnnnnnnnnnnnnnnnnnntggaagaacgaaaacttgaagtcatacagagccaaacctttgacccagggatcggactcgaagcacaagagactctaaaaagtctattccaagcagagctgattcaattgttttcatcaaatggactcatggcactaaggaaaagtccttgtttggcagtgacaatttccagactaaccttgtggtcaaggtttttcgaagaggggagatttgttgtaggaaatgagcatcaaatgagaaagctacgtggaggaaaaagactggtctacgctggtgagacgcgtggcagaataacattgggcgaagctggagaaagtttttacggagattctttaaaaggcagtctctgcttcttttcattattatgctgaaatctgagattgtaatcttcttcttcatttggttctttgtttgttcttgagaattctctgtaattctcaagctattcctcatcatattaccggagcttctctcttgagactcttgtagatgagaagttgatgttgcgtttcatgaacgtcgtatcaagttatcaatctatatctttcgaatccattttactctttatcatctgattccgttatcatcgactcagttctacaaagtttaaagcactcacaaacttaatggcaacatcttcgttactttgaacatcagttcttgtaagcaaaccaagtcatcaaatcaaatcaaatcacttggaagttggtcagttggaacagaaagtgacctagttacaaggaaacagcataattgaggaagtattttggtaaaatcatagagagaatcgaaccaaggtaaatctctctgaatgcgccgttaccaattttctgaccaagccggaacttattcgcaatacgaagttccatcgtcaaaactccaattgaaaaaccctaacttgtgttctactctgtcttgccaattcctgatttctcacgcacaggagagaaagagctgcgcgtttgcgtcgtctttttcatttttttcctcatatgtcatatctatagactataggttaaccatttttgtttgacatatttttttttttttttttttcactagaataa

SEQ ID NO: 190682 - DNA, 677 bp, Arabidopsis thaliana landsberg
atgagagaaaacaagcaagaaccctacttatacacaaaacgagacagtagcaacgaagataatcagagagacgacaagtagagaggagcgaaaactcacagagagaatcgtcttcttgcgcggctctagactgaagtatatccaagtctagggtttacgagctttaaatagtgaagacctaaactcagtttaactattcgttattgggccggtgggccgaaaaaaaaaaaatcaatttttattctttgggcttgtaaatgtcttgggtttggattttggtttcattggaaaaaaacgatccggctcggatttgatcactgtttttattctgttagggttttgtatctagcctaggtgattcttttactaatcaaacacaagtggatataattttgaagatgaatctcgtcaccattatcatatctaagctctagctggattctgtgtgttcggctgcgtttgcatttgaggttgaagtgttagtaatctcaaggatttttagcaaaattgatgtctctgttaaacgaaaatggaacaaaaatggtatgtttctttgtttcgtctatgttttttctcggaatccctttcattgttttcttctgactttttttttcacagcaaaatcggtggtgaaggtttgagaaatcgaggtttagtgaatgaggaggacaggatca

SEQ ID NO: 190683 - DNA, 56 bp, Arabidopsis thaliana landsberg
atgacgctcgatggcggatccttggacacgatgttgggctcacgccaactggcagg

SEQ ID NO: 190684 - DNA, 78 bp, Arabidopsis thaliana landsberg
atgattcaaggcagtactcgtggtggattagccatatcagccccaagaactcgaaatggctccaggaaaatgtcagcg

SEQ ID NO: 190685 - DNA, 214 bp, Arabidopsis thaliana landsberg
aaataagaaatcttctcttgagaagatgggttatcgtggtgccttgtcaatcaaggcttatgttgataaggaaaagttcacggacggattggtcagcgtctacagtgatgctggaatcgaaatcatcatccccagggatgaatctgaatctgcaagagttcatagtttgttagttgacattgctatgtgggcattggaaaaccctgcgacttaa

SEQ ID NO: 190686 - DNA, 165 bp, Arabidopsis thaliana landsberg
atcaacctaagtgaagatatatttgagactcttgtgatcaatatagatattacaatgagctcccatcaagtaatgtctccaaatcttgagagcatgaactacggcatccaattccaaatcatgtgtggggtagttttgctcatggggcctgagtgctcgggaggc

SEQ ID NO: 190687 - DNA, 1275 bp, Arabidopsis thaliana landsberg
cttttggcaaatataacagaaaagtttgacacaataataggttcgtttactcacctggacaaagagttcttgcatctcaaacagattaccaaatcttccaagttcatggaaagcattttagatttaagaaacgatataagcatgtccgtgaatctagcttgggctactttgcactctcttcttcattcagaaaggaccacatcccgtcaaaatgggtatatctggttgggggatcttctgattgcagaaattagtgaagagagcggtggaagtatatggctgagcataaaagatctgcaacaaaagattgcccattgtggtacctcagactctctggttacttctgatgtacctatttccatacatctcctatgtggactcttgaagtcaaggaacagtgttatcagatggggtttcctatttattctggagaggctacttatgcgctccaagttcttactagacgagaatgagacccaacgatcaactggtggagttgctactcaggaccataaagacaaacgactagagaaagcaaatgctgttatagacataatgagcagtgctttgtctttgatggcacaaataaatgaaactgaccggattaacatcttaaaggtacattccttagaacctttctgtttgtcaaatatcctaccaaagccactctaaagcttgctgatatatatagtaactgctgttctatatgtcgaataattggcgtagaagataactctgtctatacctcttattggaattttcacccagatgaagttaaatttcacttgtgtctttctctgttgtttccaagcagatgtgtgacattcttttctcgcaattgtgcttgaaagttttgtctactgacgaggatgcagtccccaattctgcggataggaatagcaaatttgatacttctcatcgtaacagctataaagaaagtgtggatgaaggtgacaccaagcctcggtacaataacgtctctgtttcaacgtgtgagacagcgtcaatggcagcgatgcttcttcgtggacaggccattgttcctatgcagctggttgcgcgtgtgccagcagctttgttttattggccactgattcaactagcaggtgcagcaactgacaacattgcacttggtgtcgccgttggaagcaaaggtagaggaaatattccaggggcaacctctgatattcgagccaccctgctattacttctgattggtaaatgcaccgccgatacagttgcttttcaagaagttggcggagaggagttctttag

SEQ ID NO: 190688 - DNA, 421 bp, Arabidopsis thaliana landsberg
atgcccgacatccctgacgatctgttggctaaaattgtcaagctcgtggctgatgatcgttggtggttgctaggtcctatcttgaaggctggccaaaggggaagagatatggtgtacagagatgacgttttaaaggatgcttgcatctactctctctgttctgatccaagcgatttgtactatttccgtcctttctttgagagatgcctcaaagctggcaacaaaactgccatctactatgaagggctaagggtggtggttgaaggttgtgacctcaatgggggtcttgaacttctggctcaactggtcccagaggatggcgcttcaacaatagcatgtggcattttctccatgtgtcttgggaatgaggctatgacggtccactatctagagcagtttgggattttccacgctcccttag

SEQ ID NO: 190689 - DNA, 164 bp, Arabidopsis thaliana landsberg
aaactttgtacgccgcaacaactcccgccaagaagatggaccccaattcccccaagaagcttgaaccaagagcgttagagaagagggataggatcggagaatcccaaatctctcttgaagaggagaaacttcaaaagtcccgctacatgcaagtagaagaatag

SEQ ID NO: 190690 - DNA, 313 bp, Arabidopsis thaliana landsberg
aaacaagatgaatctgttcttgaggatgtatggactttgataagggctgggagaatagaagaggcatgtgatctctgcaggtctgctgggcaggtaatctttataagggatataaattctttataagggtaatgattagaaaggtgtgtactgataatgtcgatttaaattactattttgccagtcatggagagctgcgactttatgccctttttctggaatggacatgtttccttctattgaggcactggtaaagaatggggaaaatagtactctccaggccatcgagcaggaaagtggctttggcagtcca

SEQ ID NO: 190691 - DNA, 96 bp, Arabidopsis thaliana landsberg
atgcgccaacttggcctctaccaagtcaacatggatatggaccttatggttacatgccgcctccgcctccaccgctaccgggatatggatacagag

SEQ ID NO: 190692 - DNA, 82 bp, Arabidopsis thaliana landsberg
atggcacccaagaggaagacctcgagcgcgtctgctgtggtgattcctcccatcgaccccaacagccagttgcctttcgcag

SEQ ID NO: 190693 - DNA, 372 bp, Arabidopsis thaliana landsberg
  unsure (1)..(372): unsure at all n locations
ctttgacgaggagggccaaacggacgggaccagcgagacctgcggcttgcattgcaagggcgaattctatcgcgtgcccaaccacgacgaaaggcgcatcggaggcgcgtcgatcttcttgaccaccaagacgcccagcttttggggctgcgcgaatgataacgaccannnnnnnnnnnnnnnnnnnnnnnnnnnnnnnnnnnnnnnnnnatgagccttggggtgacaacgtccacagcccactgggtcaccctcttgtacaaaggcgatgacacgcatgccgtcttgactccttacacctacacgaccgacaacaagatgaccactgataccgtgccgatcacctcggatggcctgaccgactgcttttaa

SEQ ID NO: 190694 - DNA, 380 bp, Arabidopsis thaliana landsberg
agcagtccggatacgtggacgaccacgtacagctatgcgtcgtatgggcagttgcagggtttcagccgtgccgacggcacactcatcacctacacctacgacaacctcgaccggcccacgagcatcgccacggggacgcagacccggcacatggcctacgacagctgcacgaacggcatcggccgggtgtgcagcgtcagcgatgccaccggcaccacgtcctacacctatgacccgcaaggcgacatcacccagcgccagttcaccgtcggcagcatgacgtacgccctgggctacagctacgacggcggtggccgcctcgccactctcacctaccctgatggcaaccaggccggctatcactaccaggacgggcgcct

SEQ ID NO: 190695 - DNA, 23 bp, Arabidopsis thaliana landsberg
atggccgcacagtgctacaggag

SEQ ID NO: 190696 - DNA, 525 bp, Arabidopsis thaliana landsberg
atggtaagtcataacaaataccaaataaaaaaaagtacatctttcttatgggacacggggtaatagaattacaaaacgaatcttcatagaccttttagatccttaagaatccgtaagatctgattagaagaatctctacaagattaaagctgagaaaaaaaagtaaaactaaagtatcaaaagaaccaaaacaaaatcacattcttctcaaactttcttaatttaccaaagaagtactaaaaaacaagattagtaacaggaaaggcctaaagcgtacacacacaaagcaggaatcgatgaattcacataacactaacaccaggactaacacgagagtgttattggcagtgtcagagagtgaaaaagcttggaaaaaatcgaaccgtacctgaacggaatcagttcgtaacacagagactgaagcagattagagttgaatcagatcaggagaggaaaaaagaagaaggaagaacagatctcaaatcgtccgtgaaatccggcagaaatagcatccgacgaagctga

SEQ ID NO: 190697 - DNA, 266 bp, Arabidopsis thaliana landsberg
agccgcaactttgttggccgaggactacgtgagggcacatttgacaatgtcaagtactccatcttttgggtgcttttgctcgccttgaagtttgccttcagctattttctccaaatcagtccacttgtaaaacccacaaaagatatatacaagatgaatggaatccagtacacttggcatgagttctttggccaaagcaatcgttttgcggtgtttgtgctctggttactagtggtgttgatctacctcatggatatccaaatttg

SEQ ID NO: 190698 - DNA, 1420 bp, Arabidopsis thaliana landsberg
agaagatggtgttacttcaccttcagaatctgctattaggctcaatgatagagttgagtctccgagaattcctgtgattgacaatgtagttagagatattgatgccatgagatttggggaagatggtagcttacgttctccgagagtagttaatggtatggatagtacttatgctggacttcttgatagaagacatgttgtacgagaaccttctattgagcgcaatgttagatttagtagaactctgagtgttggaagactccgtgatagagttcttcgccgatcttcactctctgatttcgcattccgtccctcgccacatcagggagaagaagatactgatctcttctctgctgaaaccgcagcagcagaggatgctcctgtgacttcaacgtctatactaaatcgttccgcttctagcattcgaaggaccttattcggcattcaggatcatgagacaccagctgctcttgtgagagaagggaggtatcaaggtttattagaacacagatcagatttccttgaaagaaggaggagaataagatctcaggtttgaaactcattgattctctcttccttgatgtgtctgatcaactcaagatctaactaactgatataactaattccacaggttcgcgctcttcaaagattaggaagccggtttgagaatgtcgcagtccatcatgatagatcttgtgtcttatcaggtcaagatcaagcaggtcgctgcacatgccgtgcagttactaaccgtggttcgacaacagcaacaaccgatgaaacaaatgcaagagctagcatctcaaggatagtattgctagctgaagctctcttcgaggtaaatacatgttttcggtctccctactaacagctttttgccactatctttctttctcatgtatgctaaggatctacagtgcattcattttaggttcttgatgaaattcatcagcaatctgttgtcttatcctctcaacaaccatcagtatcatctataggatctgttcctgcacctaacgacgttgtggatttattaccgataaaactttatactaagtcacaaagcgaggatccatcacagtaatgcatactaaattctcagatctttcttttgccaattgtgatgctcaaaagtctcgagacctaatggttaaacatgttttttcctggaacctcagatgttacatatgccttgtggaatatgaagaagcagactctataaggacacttccttgtcatcatgaattccacaaaacctgtgtagataaatggctcaaggagattcacaggtatgaatgtgatatataatttgaagtttggtgacaactaattttccgcctttttggtgtgtactagattatctgatgatgtttttatggcgatgcagagtatgtccgctgtgtcgaggagatatttgtag

SEQ ID NO: 190699 - DNA, 627 bp, Arabidopsis thaliana landsberg
cgcctcaccagttgttgctgtagttgcactgctgctttatgtgggctgttaccaggtaaacaaatagttgattagaattttgctaatcaaacttcactaccacaatgtcaatgcttgtcctaaaagtatcatagactttttgatataactcgtggcatctaaagttggagttcttataacaagtagttccattggagtttatgtacaaaagtgattcatggatttcattattttcgccttaaaacttttgatatgcttctagttctttttttcaacatgtttggctttctacttttcaataagagcttgaacgtattaccatcaatcttgcagctatcttttggtccaattggttggctgatgatttcagagatatttccccttaaactaagaggtcgaggtctcagtctagcagtgcttgtgaattttggtgcaaacgcacttgtgacatttgcgttttcacccctaaaggtaacctaccattcccttgaggacaaaaattctcgtttgtttaagcttggtatggccattactgtagaaatggtagcaacccttttgcaagacttttttactttagaagaaattgtcaatcatatggttagtcgtggtgaaattctagtcgaatga

SEQ ID NO: 190700 - DNA, 142 bp, Arabidopsis thaliana landsberg
ggttatgtcaattttacaaaatcgaaaagacgaaaagggaaacgaaaccgaacccttgattctcctccggcgaattttccggctacaagcgagatttaggcgaagaagaagaagaagaaacggtcgccgtgtctactactaa

SEQ ID NO: 190701 - DNA, 491 bp, Arabidopsis thaliana landsberg
atgctcatctatgtgcttctcgcatgcttccgtctatttcctttgcactgtagggtaagtatcttattcacagtaatactctgctttagttcttaaactactatgttaaagatctatatagaatctttgtttctggtcatggagttgttttctaattttgtttattgagctttaagtcacttatttttataccatatagttgatgaatttgagtttgcttgtggtacaagtaaaatgtgccattatagatcctgaatcattagttaaatcttctttactagtatttatgaaatgacaatctttcttctgtatctgcagttacttcttgaacttatcgttcaaaattgccaccagatagccattgatcaacacgggtgctgcctgcttcagctatgttttaacaaggaccgggttccaaatctagagataaggcaacgtttgattatggaagcaatcgctaatgcattgagactctgcttaaactgctacgg

SEQ ID NO: 190702 - DNA, 372 bp, Arabidopsis thaliana landsberg
atgaagacctcagctttcttcatcgctgtattgctcattctatcatgtaagtaatctcaaatcaatatttttttataacaagtttcaatttaaacatgcatgtgcacgtatatatatttgatagatgttacatatatatgatatttgaataggctcatcatcaatgataatgggagttagctatcatgagaaccgttgccatgactgggtagattgtgctatatggtgcaaacaatgggttcctcaaccaaaatgtattaaccgtgtttgcgattgtaagccaaaatctcttccgaccaacgacgagattcccaaatcggcttcttccagttcgaagaactaaaatatgattatgactctatgtatccatga

SEQ ID NO: 190703 - DNA, 326 bp, Arabidopsis thaliana landsberg
atggagaactccatggacaacaatggagggaagctcaccggagaagatggagttcgccggagccgagaagaaaattgtcgattggaggcgaatcgacggttggatcgatgaatcgaaggaatcgggatgaagctctcgacaagacgaacgcagtggtacgcttggattccgccaacgacgcacggattgaatgtaattgctcgcgggagttagaaccgctccaaacttcggcgagcaattccaggaattgtgaatcgaaactggagaaaccgtttcaggatatggaaagggttcgacgagagggttccagccatatatattgctag

SEQ ID NO: 190704 - DNA, 154 bp, Arabidopsis thaliana landsberg
gctggccactctgaatcgcctctccaccgaagacagaatgcaagctttaaatcgaggagcatttcgaaaccccacaagcagcacatttcgaaacatagaagatcaagatatgcaccacttttatttatatgcgacagtaaaacatctggtgtag

SEQ ID NO: 190705 - DNA, 96 bp, Arabidopsis thaliana landsberg
gtgggttaatggagggcttcctgatggaccggctcagggagagggcaccgcaaaccatggttcttatgggggagaaaggaggggctgggtccgcag

SEQ ID NO: 190706 - DNA, 90 bp, Arabidopsis thaliana landsberg
tacactacaataagaatggacaaaatccggtttagctcaccaactacccggtattatctgaggaccatcggtttatcttatggcctctga

SEQ ID NO: 190707 - DNA, 124 bp, Arabidopsis thaliana landsberg
actctgtctcctgttcccgatgatggttgtcagggagactatttttggtataaacgaggagacgatcctgaatgaacgtcaagatgaggtattggctaaagatcaacggctgatatttgattga

SEQ ID NO: 190708 - DNA, 2714 bp, Arabidopsis thaliana landsberg
  unsure (1)..(2714): unsure at all n locations
atgacggccaagcggaagagtaagaaacgcccagcttcgaaggtctcagatcccgtcaacttattccgatcccttgcttcagcaattacgtcctctcaggtacaattttctcaatttcgagtacaatgtttctgcatcttggtttctgttcaattagccgtactgggcaatgcttagattctgattagtttcctaaattttgtcgaggattagtatcgtgctcaaaagttatgatttttaagggtgtgaagtaatttaggatttgtgggtttttggaaataatcaacagtccttttgaatttccaggtttctcagaagccaattttgaaacgtttattgtgccttctgggtcctttatcattaacccaaccaacaaattgggagaattgtgacattgcttcacatcattggaatatcaagttccgtggagagaaagtggacttgatcaatttcgatgatgtctgtttcctctctgatgtgttgttcacagagcttgataggagtctcgaaagcctgttcgctactttattcaaacaaaaggctgaaacttgtcctacatttgaaagtacagaagatagtattgaattagcttcgctgttcttaaaatgttgtatgaagatcatgtctttacttgtggccaaacaagagcttgttctggagaaggccaaaactcttctctcgatcctcggtagattgattcgtgcaagaaatggagattgttcttttgtattcacgcatgacggttctttagatcccccgtcatacgtttctttgtacagggattgaggtaaaagttaactaatttgtggctcatttttatcttggatttctgatgaacttgtggctttttgactatacctttggcaagggcttttaagttgaagaaagcatgctcactgggtttttgattatttatatgtacaggtttttatggatgagattttggtgaataagtcaatcagcgaccttcttttcgtagttgattctgcattctcctcatgtagactgtttagtaagcatgatagggccggtgtggtgcaaatcgtttctgctcattttattatcgcaacttctgatgagaaaacgaatcaaatgtgtgttgagagattatattggaagaaaggtaatgcatttagaactccccagataagcttgagtgctgctgtgtccttgctgctaaacccggttatgttctctgcaccaaaaatgatccatgcctatgtggttttattggtgtctgacgccattggtatttgttcacatccatgttttaagggattagaccttcagcttattgatcactatattgatgcatttgaaaagtctgttgttttgtataagagacacatgtctaagagtgagaatggcctgtctgggaagtttggctttttgacgagtaagtctcgggtggcttttgaacatcgtcttttgccctcaacactggcgaaagttaatgatgttacacagcagctaaaggattcatgggattcatatcaaagtgataatgcgaagagagaaaacaatgagctggtagcgtattctgttgcatacgcaaaggaaagcttatgtgtatttgatagctcctgctctgaaagtatgttgtctcagaccttatcaattcttggttgcgtgatacttagagctagttctgatgatgttatggactctgtgttggaaaaatacaacacatctagtatggaagatctatatctgcttgcatccacacttaagttcatgacttgttcgatgttgcaagccatccgggttctcaggaattggaactggcatgaagctggaggtgatgttcgagcttgcaaggaatacaaagccatgatggatgttgttcaacgttttgaacagttcaatattcatatgccctgtcnnnnnnnnnnnnnnnnnnnnnnnnnntcttaccctcacagatctaagtggatgcttatgcatttttcaggcttactgtctgtaagctttgcactcaagcttgactttctagtgaaggactccatttttggaatggtgatatctatgtatttattcatcctagaagggggtgacttggaagcacttggggattcagttggtcactcagaaaacacgtcatcgtctatactatccagtggttccaaaaacttggnnnnnnnnnnnnnnnnnnnnnnnnnnncaactaaaaactcttttgcacaaagtctaaattctgcgcttttctaaatggatcaatataattatatggtacagacagcagtagataggaaacagagcggggcagttgctttgaagtttcacaaaaaccgaactttgtacttggggtatgtatagaccagcaaaagtcatattttttctcttcttcgctttcataatgcatccatgagagctttaaccaacaactacatattactccatggttgtgcaggaaggtgtctgaagctaaaggtccagagaatggttcagattcaggagttggtgttgaagaggaaacctgcaatggggagagatttctgtggtgtatggcaggaaaaggtaacgtgacaaaaaccgatgtggacgagttggcagatttcatagcgtgtgatcccggtaaggactactccgactggctaaaagggagagaacgatttcggaaccaacggtggaagtcagacaagattgctaaagaaaggtggaataagaagcaaaaagcttggagagagaacagaggaagagggtctaaaagctga

SEQ ID NO: 190709 - DNA, 84 bp, Arabidopsis thaliana landsberg
tcattggaacaaggtgaatccagcggtctccttctcggagaaaatggccacgcggacggacgatacaccacagaaaagtccaac

SEQ ID NO: 190710 - DNA, 681 bp, Arabidopsis thaliana landsberg
atggttgatagcttgagtattgatcaaaacactgatgaattcctgaggattgttgcagaattaggtagcctgcagattcaagtaggcgaagaagttcaagcactcatgattcttaactcgttgcctccaagctatattcaattgaagcatactctaaagtatagcagcaagactctcttagttcaagacgtggtgtcatctgcaaagtcacttgaacgtgaactgtctgagcaaaaggaaacaattagagcacctgcatcaacggctctctacactgctcaaagaggcagacctctaaccaagaacattcagggtcaaggaaagggacgtggcaggtcaaactctaagagtcgtctaacttgctggttctgcaagaaagaaggacatgtcaagaaagattgctatgctagaaagagaaagcttgagaatgaaggacaaggagaagcatgtgtgattactgaaaaattggtatactcagaagctttgagtatgtatgatcaggaagcaaaggacaagtgggttataggttctggatgtacataccacatgacatctagaatggattggttttctgagtttaaggagaatgagactactatgatcttgcttggtgatgatcacacagttgagtcaaagggaagtggctctgtgaaagttaatactcatggtggatccatcagg

SEQ ID NO: 190711 - DNA, 165 bp, Arabidopsis thaliana landsberg
gaggagagaatctgtagaaacattaaccaaagagagagagagagacgagaagaactaattggtgaaagctccccagaacattttctgaggcagatgcaagattttcccgcaaatcgagctacaatagaaaaatcgctttttatagcggagaaaggaataaaatga

SEQ ID NO: 190712 - DNA, 714 bp, Arabidopsis thaliana landsberg
atgtgcaaggtgaatttcaagaggaccgagatgaaagggtttacccttgagcaaatcaaccatgtactcggaacaactgaggttagtatttcctattattccttgagcaaatatgtttctatttttttcttatatttcattgtctattatttccataggtcattgagagtataattagagagaaggctgaagaagtacctcttttggctgaaatcacgggagtagaggatgatgttgataagcacgatgttgtagttgatagttggatgaagcgtcttggtcaagggcgtgaaattagatttgaggaggtgtacacgaggatgtgcaggcacgaatggaagccccaaatgaagaggaagttcccacagctgttggaccgggagacccgacgttagttgatgtaatggagaagctccattccatcaatgacaagctgaatgaagctttgttggcgcttatggaaatggagaaaaaacaagcaacgttcgaagcatttatggatgagatgaaagccaagataaatctgggtaataccggatatactgttccacaattggtaatatcgcgtaataccaaggtttaactaaattaacaatgcagatgtctcagaacccaccagatgaggaggatgcaacaaccaagggcaatgcggctgctcctgttgtgcccaaacgagtgacccgttcaacccgtgcaaactctaataacgtgtga

SEQ ID NO: 190713 - DNA, 498 bp, Arabidopsis thaliana landsberg
atgtcaaaccgcatcccttactatcaaaaaggcaaaggcatcgagagagggtattcgcccccaccccgtaagcgaatccgagctccagacatagatacctcagatctcattgaagagaatgctctaacccttattggccgtcttaccaatccttctgggcaaatactctgggccctcttcttattccggtccaacagatggactcttaggggaaaagctactggttcagatctagggcagggagtctttcagctcaaatttgatttcatggaggatcttcaacaagtccttgacaatagaccctaccattttgaccaatggatggttatcctacaaaagtgggaaccagtcatctcaccttctttcccgtgcctgatccctttctggattgaactccaaggcctccccaaacacttctggaaacctgagatgctcaaaaccattggagaagagcttgggaaagtcttagaccaagaaatcacctcaacttctgtaaag

SEQ ID NO: 190714 - DNA, 731 bp, Arabidopsis thaliana landsberg
tcaaagaaaagctctttgcgcaacaaaataacagaaaacacagagacaagtgagagaaactactagagagaagaatgtcaagctttcttggttctacgttaatggaggtttcgagtttctgttgatttcttttcaacctcaagtaaacttcaaatctcctccgtctacttctgtatctcttcttcttcctccaaaaaccctgaatttcgctccctctgaccaccgtactgactttaccggctccattcggtgatctacggaggtgatagctagctatggccgctcggggaaacaccaattcaatgcaggtctgtctcttagctctatctttgcattgttgcttatcttcttgttcgttagtctgcgcgaagatgtcactgagagttcgagtgctcgcggatcataactagtaatgtattgatctttcttggttcaattgcgaatcaattcactagtgatggtgtttttagaggatctcaaagatgggattcactggatttgcgttttgttggtagtgtaggagaggagataactgatactatttgataaaatctttgagattcatgagttcatttccaattggatctttacatgtattcagaaaccacaagaaaatgattgtacttgccattgttactattgttgttcagagagtgaaggtttatcgtttgaatgaagatggtcaatgggatgataaaggaactggacacattactatggattatatggag

SEQ ID NO: 190715 - DNA, 157 bp, Arabidopsis thaliana landsberg
atgagcggcttggttcagacgatgttgttatggctcaaaagcgaaaaggtaaaacactaagggatgaatttgggacgtaatctaataaaattgaccataattcttaaacttctagggttccttatttcggaacgacacatatacacaagctttataa

SEQ ID NO: 190716 - DNA, 84 bp, Arabidopsis thaliana landsberg
atggaagaagcttgggttcaagaagctgtcaaggaagactgcatcgacaatggcagtgagcttggacgggaaatatattgcttt

SEQ ID NO: 190717 - DNA, 198 bp, Arabidopsis thaliana landsberg
attgatgctgagaacagctgggatgaactcaaagagataccaatggaggagttttccgatctgctggaatgctcaactcaatggcgctcaccaccagactcactaagccatcaccattcttcgttaccttcatcgcctttgccatggcattttgaaactgtagaattcaagctcaaggaggatgaagacaccacttga

SEQ ID NO: 190718 - DNA, 546 bp, Arabidopsis thaliana landsberg
ttttctccgaagcctttatcgattcaatctgccccatatgaatcccaacgggcaatatcttgatgctcaccgttcttccaaaatattcaagaccaatgtagcctcttttagattcgtaatcaagaccaagcatcctactacaacaagacaagaaatgcctagcgtaatcaaacgtgtggaaaccaaccaaatcgcaattcagaaaccctttgagaatctcgtctctcacaggaagagtacggtaaatctccgacgaaggaaagggactatggaggaaaatcccaagctttatccgatgaaacctgttcctcaaaaaagtgggcaaaatcatgaggtgataatcatgaatccagacgtaatcatcatccgggtttagcacttcgaagatcttatcagcgaagatcttgttaacagtcgtgtacgctctccaattcgaacgatcaaagagagagccttgagcttgcgtcataggaagaagatagtgaaaaatgggccagagatagtgtttacagaaaccatggtaatacttgttgagcaagtcactag

SEQ ID NO: 190719 - DNA, 82 bp, Arabidopsis thaliana landsberg
atctgccacacacgacggatttagacctggatccgtcatgagtgtggacatcagattttgtggttttcatcttcgcgtttga

SEQ ID NO: 190720 - DNA, 300 bp, Arabidopsis thaliana landsberg
atgccctttgctaaccgggtggttaaccggtttggtcaggtgggtttggttccgtgctctatcggtgggactaaactaagccaatggcaaaaaggtgagtttctttacgaggagacggtgaagagggctaaagcggcgatggctagtggtggtggtggctcgtaccgggcggttttgtggtatcagggtgagtctgatacggttgatatggtcgatgcttcggtatataagaagagactagtgaagtttttcagtgatcttcgaaatgatttacaacacccaaatcttcctattatccag

SEQ ID NO: 190721 - DNA, 130 bp, Arabidopsis thaliana landsberg
gcggaagggtatcatcggggaacgcggtgtggttcatgttccaacaagtactacttggaatggcattggcggcgcgcgcgactcgaacgcgctggtggtggacggctgggtatatgggaaagcgtgctga

SEQ ID NO: 190722 - DNA, 73 bp, Arabidopsis thaliana landsberg
atgaatatcaaacttaaaataaaatctgcaactcaacatccatctacatcatccacaagcgactggaaggaag

SEQ ID NO: 190723 - DNA, 515 bp, Arabidopsis thaliana landsberg
caatggtcctaacgacattttgacccaaatgatgagacacctaaagcaccagccttgtgggatgatcctgaacctcaagagatgtcatgatcggaggcaatccttcctgatcctcgaatctcacatcgacaatggcaccgatgacctgacaaacacgcccgatcgcacctttgccaccgtaatcataggtctttttcccctcatccttagcaggagcagaggatggcgcagcagagcttgccggtgaagaggtcgcatactcggcgacgcggccgaggaggtagctacatggagcggcgtgacgcgcgggtgaaggagaaggaagcctggggtttcggttgactaatttggcggcagatctaccggaagatgaacggagaagagatgataaaactcttcgagacgccatgagtgggtgtgtggaagaggaaatgcaagctagggtaactacagcacctgaatctaagctcaaactttccaatgtttggtgggctcagataatgggcttattttga

SEQ ID NO: 190724 - DNA, 380 bp, Arabidopsis thaliana landsberg
atgggcgacgccgccggaggcttgagatctgaaacgcaagatgtgaccatgacggacctaggagagaaaggtcattctccgggagaccctcctgatgcaccgggttcgtgggtgaagaaagtggtggggggacatttaggtggtatcctaaatccgaatgatatcttagatgatgagtttgacactggagttccctgatggtgaggatggagaaccagtgataacaattggcagtgaggtattggcggcgatgaatggtttgttgaagaacagcttgatcgtgaaagtgcccggccgtaacatgacaatatcagcattaagtagaaagcttcgagagatgtggaaaccacgaggagcaatgtctgttgtggatctacctc

SEQ ID NO: 190725 - DNA, 329 bp, Arabidopsis thaliana landsberg
atgctcctagggttcatcgtctccgaacgaggcatcaaggccaacccggagaaaatcgcagccatcaccaacatgggaactatcaaagatttaaaaagagtacaaagggtcatgggatgccttgcggctctgagcccgttcatcttgcgccttgcgagaaaggattgcccttgtaccgcctcttaaggaaggccgagcacttcacttggattcctgaggccaaagaagccctcggaaacttaaaggcactccttactaatgcgcccatcttggtgccccccgctgcgggagaagccctcttgatttacgtagccgcaaccactcaggtg

SEQ ID NO: 190726 - DNA, 116 bp, Arabidopsis thaliana landsberg
atgaatattattacgatcgctagatttgcggctacgaaaagtgtacgactaatgagattgcgacactttagttattatggaaatagagaaaggtgcgaaacacttgatcttgccag

SEQ ID NO: 190727 - DNA, 175 bp, Arabidopsis thaliana landsberg
gtatgaacatgtaaaagctccagactccttgagtctcgtagaagtgacgacgcaacttctttcttcttatatgtctagaaatggatcaaacactggactaagaatccggaaatcgtatcgcaaaacgaatcaaaatgatgaaagttttagtctcttatacatctgtgattattga

SEQ ID NO: 190728 - DNA, 51 bp, Arabidopsis thaliana landsberg
atggtatcgatcgacaccaccctggtgtcgatcgacaccctcattttccag

SEQ ID NO: 190729 - DNA, 452 bp, Arabidopsis thaliana landsberg
tcaacaacatgaaaagaccaccactgccgtggcagatgaagatgtagatgtatatctcattgaacaaagtaatatttgcaacattgtcgctgacgatagctcatggattgtagatctggtgattcttttcatgttacccctcatggaagtttcttcacaacttaccaaattagtggtgaattatggcaaatcagggaagaagcaagattgttggaaagagggatatcattcttacatcaaacacatggtgtaagcaagttttgttagatgggatttaggcttaggcgttttattttttatatggttcaaacttattatgtgcaagtcttggcatttagggttgaggaatcacgtggctatttggactttgggatttagcctgaatcctttatcaaaaaagatttgcgggaacaatacaacaagatgtgcagcgtttctatggtcaagattga

SEQ ID NO: 190730 - DNA, 52 bp, Arabidopsis thaliana landsberg
atggcaggtggaaatgagctcgccggagctgaggggtggctggccggtgctg

SEQ ID NO: 190731 - DNA, 982 bp, Arabidopsis thaliana landsberg
atgatattagaagcaacttcagaagtttgctccactggaccaaagtatgtgaagaaaatggttcaaggattggaagaagctttttgttccagtttgtctgatttctatgtatgtgttacccccgtgactctagaccataaagttttcacttatatttgatctaacagtttctatctccaacaagcaacagatcgagagcttccttgtatctaacttctatttggaaaccacttgtcaggtcaatggaaacttcgagtcaattgacaattgctctcagctcctgaagtgtttgaccaacaaattgcttccacggtacccaaacttttcttgaatttattttatctcatagataaactagctttgccagtgtgagtatctagacttttagttgttcgtaaacagccaactattctggatgatacaacttgttaactgccatactttggtagcgtatttaggttctctctgttcaggttcattgtgttattccccttagtcaaccccttgtaactcggtagaatccgtcaagattttataatagacatagaaaacaactatagatggcacattcacctaacagagagttataataagcacatggaaaccaacaagcaatgcaatagcacgagtgtcttttctattattcctttacaaaatagagacctctttgtgtctttttccttcatttacaaattttatcgttccaaagatgaaaacttaaaaacatttgtggtgcatccatgtgtatggctccactgttttttatctgattggagattctttttctctatgccttctctctgccaagaacaatattcttcgttcctcttttgcatgtccttttgactcgtggaattttgttctgatctcaattagtgtggctgagatagatggtctcgagcaactcttggtgcatttcgctatcagtatgtggaaacaaattgaattttgtggagttttcagttgtgattttaatggtagg

SEQ ID NO: 190732 - DNA, 402 bp, Arabidopsis thaliana landsberg
ccgtcgaaagaatgtaacggtggttctggtgctctacgctacgctcttcatctgagatttctttgcccattacctaagaaaagttcaaagaaatctgaagaaaccgaatccacggggcaaaagaaaaacttggattcagatgggaagaggagattctatctgtacaacgacttaagagtcgtgtttcctcaacgtcacacagattccgatgaaggaaaggtacgtatgagatttgtgtgttttgagtgttgaccatcgttttgcaaatcagcaaatagctaaaattagttgagttttatttttgtaaaagtgataacaaaaatcatttatttgtctgtgttgcagttgaatgtcgagtaccattaccctgaaaacccaagatacttcgacatcaccgagtga

SEQ ID NO: 190733 - DNA, 102 bp, Arabidopsis thaliana landsberg
acctcagacggctgtgcatgtgcaccagataacttaacaggatctgtccgagtgccccaaggaccccggataaaccacttaccaccaggatcgcggtattaa

SEQ ID NO: 190734 - DNA, 727 bp, Arabidopsis thaliana landsberg
gctattgaggctggcaggcttcctggggacattttggaagatataccttgcaaatttgtggatggggtggttatatgtgaggtgagttatctgcaattattttttgggataaagccttccataagttcttggaaacagtccaaacgtatataaatatatttaaaaagagctcaacagaaattatctacacttaatcaagattaaaaaaatgtcgtaattataagtacatggaagtttatcttccaaactcaattgtacatgtatttgattgtttctgaaacataatggagtaactgggaccagaagtaaacataaaaaacctagttatactaatttttaattgactgctgtgtaccatcttacatcatcatgttttctttaatttttggcacatactattgtaggtgcatgactatcggaaacatacctcatctcaagtctctcctgtgataaataaattgcgccttaagatgtcactcgagaatgtggtaaaagatattccatcaatgtcagacaactcatggacgtacggtgatctcatggtaatcatggtagctcgtggcttataggtcgtatatctgagcactgaaactattatcttctgtactgatccttacatcaactgcaggaagtggagtccaggatattaaaagccttacaacctgaactctgtctggatcctttacccagacttgataggctgagtaaaaatcctttgactgctaag

SEQ ID NO: 190735 - DNA, 732 bp, Arabidopsis thaliana landsberg
atgtgtttggttcgggtgttcggtttaccctttcggatatcaggtaatacccgaacccgaaccgatacccacgggtacacttacataggacccatcagtgtaaaatccttatactcgtacccgccctaaatcgttttttttgttcggttccggttcgggtatgcgagtacggtttttatgtcgaggcctaattttatctgttatccttattttgaaccgttgagacagtatcccaaaacaagcatgaatcagacagcaacacaaaacatgtataagaaagaaaacaagtcagacagcaacacacaagatgtatgatacaaaaaacaatcacattcgcaataaaatttttgtgtaagaaatcaaaggcataagaaatctatcgacttggacaaacctttgaaagaaagcgttgaattagataagttcttagcaagatctgaaatacatagaactgaaattagcaaacatcccttattcataccctaaatccaaagaaccctaattgcaaaggaccggaaattgtaaattggatgaaccctaattgagaatcgaattaacagacattgtcgggtaaatattcataccgatattgggttggggctgaagattgtcagatgcggatgcgacgaggaactcggcggagagctagtcgatgaatccggagagctcgtcggcggagagctagtcggcagagagctcgaagaactgatctatgtgttttctgacttttga

SEQ ID NO: 190736 - DNA, 399 bp, Arabidopsis thaliana landsberg
atggccgagtacgaggctctggttaacggcgtgcgcatcgctgccgagctaggggtccggtgcctcgatgctcgtggcgactcacagcttgtcatcgaccaagtcatgaagaacatcccgtgtcgcgaccgaaggatggaagcctattgcgacgaagtccggcgcctggaagacaagttctacgggctggagctcaaccacatcgcccgacactacaacgagactacggatgagctggcgaagatagccttggggcggacaacggttcccccggacgtcttctccagagacctacatcaaccatccgtcaagatcgacgacacgtccgagcccgaggaagcctcggcccagcccgaggtaccctcgcccgagcccgaggtaccctcgcccgagcccgag

SEQ ID NO: 190737 - DNA, 336 bp, Arabidopsis thaliana landsberg
cctcggcaagatcgccgtcggctggcatccggacctgtttcaccgggaccgcgacggcgacatccgcctggtcaccgcacccgtcagctacgagcgcctggtccagcgctcgttcgagaagatccgccaggcggcgggcggcatgcccgctgtcctgatccggcagctgtacgcgctgctgacaatctccgccgtcgcgcccgtcggccggacgcaggtgctgctcgatcagcccgccatgatccagcggctgaacctggccaccgtcgccgaggaatccgaccgggccgacgtcaccgcccgctacgaggcgctcatcgcgctgcacgcgcaatc

SEQ ID NO: 190738 - DNA, 143 bp, Arabidopsis thaliana landsberg
tcccaagcaatcaatacgtactaattcactcacgaggaaagcatctctcaccattggaacaagactaccgtaataaccattcttggctgaaacaaaaatttcaggcaaaagtgattaagaatattgacacaaccagaatttaa

SEQ ID NO: 190739 - DNA, 575 bp, Arabidopsis thaliana landsberg
atgagcggaacaatcgaaacatcttctgcttcgattcccaccacacctgtgatagtgcagacgactcttcagactccggatgcaattcctttacctgagaagaagatgtctccaaagaaagagagtgatggattttattatattcctcagcaagatggagcgagagatgaagctattgtcgatgtagatgagaatgaagagcctttgaacgaggatgatgatgatgaggaagatgatatcgatgatgatgatatgaacattcaacatttggtcatgtgtcaatttgataaggtaatgatgatggctatatagttttctagtggtacatatttactaacaatgatggacttgaaagttgaaacttatacttcaacctacggtgttgcaggtgaagcgttccaagaacaagtgggagtgcaaattcaatgcgggtgttatgcaaataaacggcaaaaatgttcttttctcacaggttagagactaacttctacacaataacaaaaaatgtgaagatttcactttggctaattgtatcctctaaatttatgcaggcaacaggagatttcaacttctag

SEQ ID NO: 190740 - DNA, 204 bp, Arabidopsis thaliana landsberg
atgggccttaaatccctttaccaccaaaacgacatcgtttacttaatgactttaaacttagccataaaacgacatcgttttacgtaatgacttgcatctttctaactgagcagaagccgacaaacgacacacgacgtcaccacaattctcaactttggagctgcagacacaattccggcgacgtttacgattctgacaccgccg

SEQ ID NO: 190741 - DNA, 252 bp, Arabidopsis thaliana landsberg
atggcggtttatgagggtagttactttccgaattggaaggagaatgaaaactgccattataactgttaggcagagagtaaccaccatcgaaattccatagaaaaaaacggattccgatcgtcggaaaagcactccatcgtggagaaatcaattgatgaagaacgggtacgaagtcgcccagaatatcgccctcagagagcattgccattcattcatctattctacaaattgttattgaacatatatgcttaa

SEQ ID NO: 190742 - DNA, 397 bp, Arabidopsis thaliana landsberg
atggctcagtatcatcaacagcatggtgagtcattcttgtacattacacaattgctgatatatatgttttaagttcagtttcgcatataatcaatgtgactgatgtatttataaatatatatgcagaaatgaagcagacaatggcagagacacagtatgtgacagcgccgccaccgatgggttacccggtgatgatgaaggactctccccaaactgtgcagcctcctcatgagggtcagagcaaaggcagtggtggatttttacgtggatggtaattttatctttttcatctatctataattgtttctcctttcttttcctttgtatattgatcttttttttctgttgcagtttggctgcaatgtgctgctgctgcgttttggattgtgtcttctag

SEQ ID NO: 190743 - DNA, 443 bp, Arabidopsis thaliana landsberg
caagttccaacaacaacaattttggctgctacagcttcggctcccggtctgggtcaagctgccccgtgccaacctttcgaaagaggtggcccggcgactggatgacggaatggtcttacatgaagaatgacttgaaatcacgggaagatataaaaagtatcattatgcgtcccatctggcaacgcttcggctgcggaggccgaaggtggaaatgaatgaagcagccgaagaatgccagagagccttcagtgttgtttgctcttttattgggacaagcgatttggtccaagaacacattgccttcagagtatggccacttgtggaaaaatgggaaatgccgaaggagaccattaaagaaactgacgaaggtggactagtcaggctgaaatacacatttaaatacggagataaatttgttgagccagatgacgactggttgaaaa

SEQ ID NO: 190744 - DNA, 1219 bp, Arabidopsis thaliana landsberg
atgaaaaacaaacaagtttcttcttctcctgaaacaaatattgattctaatccatcaaagaggacccgttttcagagcattgaaacaccacaaagtcaaataactcacagtactaccgcggatactaatgcaacagttcctcttacttcagcattctctaaagtttttaaagatattacaaaccttgggtatagctctgttggcagcttcttgacaccatctaacaatcaacaatcctattctgcaaaaaaaaatcactcaacaaatataggtaaacgcttatttctgtttttgggaatttaactaattgcattggttctcttagttagaagagtgaattaatcattcgcggtaccaaatgttagggtccactgctgtttctggacttgcttcaatggtccaagcaaactccagacatatgaagcaatctcaagctgttgtatttaaagacatgaccaaccttccctccatggggctttcgtctgcaactggaaaaggaaaaggttagtgttttgaacagatttttaattaagatacaatgacaaaacctaaatatcaatgtttaaacaaaagtctaacacaattattgcaatctttgttttcaagcgagccaaaacgaaagtactacttcttgcatgttctttcacaaacagactactttgcagacagaaaaagacagattcccaaggaaaaatctccaaaatgactttgaaaatgccttccactctcctattactcaaggtacctatgaagtgcaatttataatgtctaatcacacaatgttagtcatctaatctttacacattctgttttgaattattaggtcaaagttcggccaccatcaataatgactttcattgtgaaatgtctgatgatgaatccatgcctgatttcaactatgatagttcatcaaccaatgcaacagatgaggatcaacactactatctcagtccaactgaagatgatactgatgatgaatctactatttctattccagttgctgacccatcatctgacatctgccagaataatgcaaacccgacagaacctacaacgcctcatatcgccaaatgtgcagaacatgaaaaattcattgctactcttaagaaaacggctgcaaaagcagcacaaaatcagaatttgtcgcagccaaagaaaagaggaaggccacgattgaataaagatacaacctgtttggctgggaatacaaataaatcag

SEQ ID NO: 190745 - DNA, 1322 bp, Arabidopsis thaliana landsberg
atggatagccgacgggtgagaatggtgcgacacgggctcctattatcattgacttgagtagagaagaatcactgagcagcaaggcaataatcttgcaaattgacaataaaaatcaacaagtttctgcaagtatgagctccctatgtgcacatatgcaatttagcaatgatttctgaagctatttctgcatgtaagatacaatgcactaaattaatatttgactaattcttccgtttgttttcgaatgtgtgtattgcaggtgcactaaggcattctctacaagataggcttagcaaaggagcctcaggaaggggtcgtgatgaaatatacctaaaacttcgtaccagcacaggtaattcctttctacttgcacaatcaaaaaaatgaatcccttgttcttgcaacatccatattatccaagcctaagtcggatagtgtcccctacttcagtgaacagctcagttgtagtgagtttttaccactaattctaatgcacattagcgcttcaacttcttttgggtaggatctgaagctaagttgtggaaattgaactatatatctaaatgaagatgtaacttaaatgttctctttggaacatgaactatcacatatcgtttgtttttgtactgttttctgtaatcatgataacatatttttcccttttaagtgcagctccaccactgaaattgattgatttgcctggactggaccagcgaattgtggacgaatctatggtaagcttaggaactgcttgatgcctttgtcatccccctaatccacctgtcaactatggagaattccacattttttattcggcattctggctgtagggcaacatagattcattatcattgtcatcttataatttttttctctcctctctttgcaagattggtgaacatgcacagcacaacgatgctatattgctggttgttgtgcctgctagccaggcatctgaaatttcgtcatctcgagccctgaagatcgcaaaggagtatgatccagatagtgagtatataggcactttcattatagagacccttcattatacttcttaacaactgttgttactacctttggattaaacctttggaactaaattttgtgtatactataaccaaaaaattaacatcactccttattaataggtaccaggacagtaggaatcatcagcaaaattgatcaggcagcagagaacccaaagtcccttgcagcagttcaggcgcttctttcaaatcaaggacctccaaagacaactgatattccatgggttgcacttattggccaatctgtctcaattgcatcagcgcagtctggaggca

SEQ ID NO: 190746 - DNA, 99 bp, Arabidopsis thaliana landsberg
ggtcgactcaaaaatgaaggtggactgatcggtcccaagtatatatggacctatcggtctctgattgtctggatcagtttccacaccagtttcatctga

SEQ ID NO: 190747 - DNA, 189 bp, Arabidopsis thaliana landsberg
aatacactccagggtttatggggaaagcttatatcatagagacagaatcatcgtcaacaagagaacctggttttaaagccgcgttaacaatggaatcaagcgacaaagatcatggcccatatttatgttcccttcaaattaacaatgacaaatgtaagagtttgagagctcagggcattactcaaagat

SEQ ID NO: 190748 - DNA, 336 bp, Arabidopsis thaliana landsberg
gtattgcgacgttcgtatatctccgccatggaaacacagatagcaaataagaatatctacgacgatccaagaacaatcggagaaatctcagatccgattccccttgatctcattctggagatactcataagatcacctgccaaaaccctagcgaggttcctctgtctatcaaaatattgggaatccatcattcgcaacagagacttcatgaaatcgtacttgatgaagtcttccactcccccgcaaagtctcatcttcacatttgagaccaaaacttacgagaagcaattctttttctcatcgactcatccccgaaaatcgaggggaaaccattaa

SEQ ID NO: 190749 - DNA, 334 bp, Arabidopsis thaliana landsberg
ctttctgtcctcgactctctactcctcaacgcagtcatacccaaccgcctcaaatcgctacaatgagcaatcgaaagcgatcgcgctccattgcggaggagaaccgcgcagagtgtcctttcaccatctcgtacgcgaacggcccatcgcgcgcccgacacgagaacaagaagcgagagcacaaaggccaggatgacgacaagcggattcaaatccagatcccgcccttttcgcccaccggcaccttcaagacacacggcacaatggatccatgctataccgtggagcctttccagccactggcaagacatgacgcgctacaacagcttcaacc

SEQ ID NO: 190750 - DNA, 498 bp, Arabidopsis thaliana landsberg
agagagacattacattcaccaaatcaattattcaaagctacgacgcccaaccaatcctgtccgaaatcgataatattgtccaaagacgagaaatacgaatctgcagtttcggaattctcaacagcagcaggtgcagataaaacctcgctggtaattgcaggccctgatgttgcaggagaaagatcttccacgaaatttcccaagaaaaggttactttcccacacaccgttctcaatctcatggttagagaaagaaaacgttctgaaaatgttcttcttgttctccagatctcaaaggcttatcatcacttcttcggacttggtcggtttcatgtcttccgattgctctgtaacatgtactctgtttccttcaaagatgttcgtgttcgtcaatgaaacagagaagttcgtcgtcgtcttcggggatgtgatgttgttacaagtgtggtttccgagatacttcacttcgaaaagggaaggatctgtgtctgatttctga

SEQ ID NO: 190751 - DNA, 160 bp, Arabidopsis thaliana landsberg
atgggaatggaatggatccaaagagaagaaaacgaaacaagagatcccaaaaatggaatcggaaaacgaaaggattcaacgccttcttctgggaaatcaaagacacgcagtaactctggcagagagagagaaagaaagagaccggagttttgccatttcg

SEQ ID NO: 190752 - DNA, 193 bp, Arabidopsis thaliana landsberg
atgaatataagtagaacagaattcgcaaactgtaaaacccttataaatcataaagaagaagtcgaagaagtcgagaaaaagatggaaatagaaataaggagaggtccatggactgtggaagaagacatgaagctcgtcagttacatttctcttcacggtgaaggaagatggaactccctctctcgttctgctg

SEQ ID NO: 190753 - DNA, 472 bp, Arabidopsis thaliana landsberg
atggcgatcatggccgttgccgctctctttcacgcccgcttccctcttctcctccgtcgcagtatcccgttactgtcggctcctacttctgttatttacaatcacagaactcttctatccgatggactcagtactcgattatgctcgattctccgttattcatcgtctgacggcgtcaacggcggaagtagcggtggtgatttcggtaacgataacgattccgttagtgttgtttcggatgttcagagtcctaattacttaaaattcaccgatgaagaattgatgaagcaatgtagattagagacatttagagtttcaggacctggaggacaacaccggaacaagcgtgactccgccgtgcgtctgaaacatctccccaccggaatcgtagctcaagccgtcgaagatcgttcacagcacaagaaccgtgcttctgctctaaaccgtcttcgtacgcttctcgccattaaag

SEQ ID NO: 190754 - DNA, 575 bp, Arabidopsis thaliana landsberg
gagaaaatccattacgagaacataatgaaaaacaaggtcctacctgatattaagaatgctgaggctaactacgaggagcttaaaaataagcgaaaggtacatataataagcaattactcagaaatttttcgaaatgacatttgcaacttctttccgttctatacaacacacacacacgcaatatatatatatatatatatatacatatatatatatagatccctctcttaatctcttgtaaaccctctataaggaaatggccagtttgaaacccggtatgacatgttgtctagtctatggaacttagctactggagtaatgtgtattagctgtagaatttttttatcttgtaggttattattgcacagggttcatttttctgtggttatgaattgcatgtgctgaaatttcaggaaagtgaccagaaggcctctgaaatttgtcctgagagtgagatagaatctttgggtccctgggatgggagtactcctgagcaactcagtgctcagattaccagaatgaatcagagacttcatcgagagaatcagcagtgcttaagtttctgtgccttgtga

SEQ ID NO: 190755 - DNA, 57 bp, Arabidopsis thaliana landsberg
atggacgagaccatctatataagcaagatgccgccggagcaactgagattctctagc

SEQ ID NO: 190756 - DNA, 374 bp, Arabidopsis thaliana landsberg
tgaatcgcaccgacattcaagatcaccagatagtcgtggccaactaccacaagttccaggatattgagaagtggttcggaaccagcaaagatctcatcgacctaatcgtcattgatgaagcccatcaccaggccgccaacacctaccaagagctgatcagattctttgaacaggctaaagtcatcggcctgactgccacaccgttccgttcggatggcaagccggtggatggaaaaactatttacgcctaccactttcggcaggcggtccaaaagggctacatccgcaacatccgcatgaacaatgtgtcgccacgcgaagtgacgctggcattcaccgaggcgggcagtacgaaggtctacacgatggatcag

SEQ ID NO: 190757 - DNA, 74 bp, Arabidopsis thaliana landsberg
atggcagtgcaggaagtttcttcaaaggaagccgggttgttcaatacctggtgccacatgccggaagcatcctg

SEQ ID NO: 190758 - DNA, 273 bp, Arabidopsis thaliana landsberg
gttctttcatggccatacagatgtagaacacgatcactgtgttcactgataccaccgcaagaaatccgctcaagagaattagagaatgaggagacaatgtcgttgaacctgttaaagatcaagctcaaaacactgatagtgagtattgaggtcagcttatcacattaacgagctgagcaagtaatacataaaacttatgtgggacagacaacgccaaaggaacaacgagcattggatgaacgtgaagatcatcaaaaagctatattgatatga

SEQ ID NO: 190759 - DNA, 379 bp, Arabidopsis thaliana landsberg
atggaagtcgaacgatcgaagaaagacgacgatctaaacaatggatctaaatccaacgaagaagaagaaatctccgtggagagaatcttcgaagagagtaacgaaatcccaccgccgtggcaaaaacagctcacgttcagagctctaatcgtgagtttcatactcgcgattctctttacctttgtggtgatgaaactgaatctaacgactgggattattccgtcgctgaatatctccgccggtttgcttggtttcttctttgttaaaagttggactaagattcttaataaagctggttttcttaaacaaccgtttacacggcaagagaatactgtgattcagacttgtgtcgtcgcctcctccggcatcgcctttagcg

SEQ ID NO: 190760 - DNA, 49 bp, Arabidopsis thaliana landsberg
ttattgtttacgcgttgaaaagttgcaatgcaacaacaacaacaagtaa

SEQ ID NO: 190761 - DNA, 663 bp, Arabidopsis thaliana landsberg
atgaatgatgtccttatttggttggattcagattcttggattgcctctgagaaacaattaggcccaccaagtttgggcccggatgggttagtgggttgagttatttaaggtccacgatactaataataaaaatagaataaccgaatcattagatctctatagagttaattaagattaggtaattaatagtgatgcgacatattgcttgtaataaatgaaaaacattcatcatattttctttttaataatatcacaggaattaataattcactaaactcaagtttaataattcgccaatttcagttttgaacatgtaacatataagaatatttagttatttacgatggtataatttgaaaatatattgcattctaataacaatttgttaaccattgttttattttgtgtagcctgtaggtttagattgcttctcaatgtcaagtgtaaaggtgaaccatcttatgagttatgacacactgcctgaagaacggatgtttcaatgaataatcggaatttctatcagttattgaagtctcttaatctaatttacgttgcttttctcttattcaaatcttctctaatttcagttgttgtaagttctatgtggatcgatcgattccaatcgttgtaaaagtcgatttagtcaatgaagcgtttgtgtga

SEQ ID NO: 190762 - DNA, 1159 bp, Arabidopsis thaliana landsberg
tggattggtgtaaatgttgattttgaatccttgcaagtacaagatgcttgtattgcaagcaggcgctacttgcccctcactactcgcaataatttggagacccttgaaaaccagcttgactataagttcctccacaaaggtctacttgtacaagcctttatccatccatcttacaacaggcatggaggaggctgctaccaggtatttttgtgtttccttcttatttttcatttctctcgataatatccatctatggtaaccaaatttctctaattgggggtcctcagagattggagtttcttggggatgctgttctggactacttgatgacatcctattttttcacagtcttcccgaaactgaaacctggtcaactgaccgatctaagatctctctcagtaaataatgaggcgctagcaaatgttgctgtcagtttttcgctaaagagatttctattttgcgagtccatttatcttcatgaagttatagaggattataccaatttcctggcatcttccccattggcaagtggacaatctgaaggtccaagatgcccaaaggtgcgttccgatctccctttcacatgtcatagtaaaacaatgataagattcactcgtattgatatcatcttacttacattttgagaatctcgaactatctctgttacctttctaccttaatatctttttatctatacgagatgttgagaatggaagagactatccccatctcattagttttagtttgcagtcaattaatatcttaattacataagaacatacataggtaaattagtggaagagctaatatagttattatattcttatgcaggttcttggtgacttggtagaatcctgtttgggggctcttttcctcgattgtgggttcaacttgaatcatgtctggactatgatgctatcatttctagatccggtcaaaaacttgtctaaccttcagattagtcctataaaggaactgattgatctttgccagtcttacaagtgggatcgggaaatatcagcgtcgaaaaaggatggtgcttttactgttgaactaaaagtgaccaagaatggttgttgccttacagtttctgcaactggtcggatcaaaagacagggcacaaaaaagtctgctcatctgatcatctacaaacctcaag

SEQ ID NO: 190763 - DNA, 148 bp, Arabidopsis thaliana landsberg
atgggcgatcaccgcacgcgcgaaggcgtagatgacggcctgggtgagcagaccgcggtgggtagacaacggatcgcggtgaacgaagggtgacggcacctaatctggcttcctgtcgctgtagggcatggatcagatccccccctga

SEQ ID NO: 190764 - DNA, 1116 bp, Arabidopsis thaliana landsberg
ccgggaggaaatctctgctgcgttgaagagtcgcagaagcaaaagtcagatatagtaggcaatgaggctcttttgaatgctgttgaacctagtgtgacgaagcctaagtatttgaatcaagctagtagtgatggaaaatctgataagtttagttctagggcggatccttgtcttggtaaattagttgagaataatggtgcagagataaatcctgatgtaggagagcaagattcatcgatatcaaataacagaaacacatccccaagtagtgagccagtggagcatggatcacctgaccctattttaaaggtagcagttgatgataagattgacaatgtcacttgcactgaccatagtgatggtactggaaataatttagtcaatgatcagaggataatcaggaagacaacagatgactcgaataaaagatgtaaagatgaggttagagccaaacgtgtgcctgatagtcgagctgctacagacaatcatatccttggtcctaatcagaaattaaagggcagtataaagggacaagatcatggcagtaaaaagggacaagatcatggctgtagaaaagaatcttctgacagtaaggtggttacggatcttaacattgccagttctaaaaagccaaaagaattgctgaaagagaagaaaaagaggtttgaaaatgaactaggaaagtctgcatcaggagcagatgaaagtaaacgtgctgctaagaggccacggtctgaagatgcgaaggatcaaaaacaatgtaagagcaaacgtcttgttcctgttggtgaaggcaaggctgaaatatctgattctactggcgttgtatcaatttttaagcgtgagattgtgttagggataagtgccctgggaggaaaaaatcaatttgataaggacatggtcgcttatacaaagcgccggaaacagacagtggagcacacaagtgtttcctcttttcctgggtctctcgttaaagagggggcaaatcaccctgaacagaagataagttcatcttctgatagcgatatcaaggttcaagctgctcagctgccgaagagacggagggcggtttgtatctatgacgacgatgatgatgatgaagacccaaagactcca

SEQ ID NO: 190765 - DNA, 169 bp, Arabidopsis thaliana landsberg
accaatcggcttcatagcgatccatcgtgacatacatacgaccaccgcccaacgccacccgcacgtcaccgccagcctgccgcgccaactcgatttgctcacgcaaccgctccgcatatatttcggcggatttttagcttacatcgcgaccatcaagcaaaacatgtag

SEQ ID NO: 190766 - DNA, 128 bp, Arabidopsis thaliana landsberg
atggtcctcttcttgcaagagaagatcagggaagttgagacgtgcggaggggccacggaggtagaagacggccacgtcgtaggctctagcggcggcgatatcggttgtgtaagagccaagccaaagcc

SEQ ID NO: 190767 - DNA, 52 bp, Arabidopsis thaliana landsberg
tgcttcagggacacgctgcactcgcatctttgcagagacaacgctctactag

SEQ ID NO: 190768 - DNA, 96 bp, Arabidopsis thaliana landsberg
cgacaccatttcatccctttggtggtgctattgatgtcatcgttgttcaacaacaagatggttctttccgtagcacgccttggtatgttaggtttg

SEQ ID NO: 190769 - DNA, 135 bp, Arabidopsis thaliana landsberg
atggctggcaacgaagctcgaagccaccttaagccggtaaaaaatttatgtctgttattttaccttctccttgaagtctgcacttctctcataccgttttaatatgtacaggatgatgatgctgaagaaaaatga

SEQ ID NO: 190770 - DNA, 280 bp, Arabidopsis thaliana landsberg
ctcaaatatcaattttgggatgaagattccagcgagggctcggcgagtgacgagagaaaccggagaagaagaatggtacaatgttgttttgtatatagggatagtagacacatttcaagactatggtatgaagaaacgcatagaacattgttacaaatccattcaatataactcaaactcaatctcaaccgtccatcctaagatctactcttctagattccaagactttgtctccaacatcttcctacctcacgacgatgatctctcttcgaaatattga

SEQ ID NO: 190771 - DNA, 844 bp, Arabidopsis thaliana landsberg
atgcactttgtccctgtggttccaaaaagagatataaaaggtaaaaactttgaagagctttcctttttcccggcaaatacataagactgttaatcaaagttgcacttctatgtaaattcatcattttgttgcttttccatttatcgttgtgttgatatatttgcactctcttcttccttgaagatgttgcggaaaggattgaagaacacagaagttgatccaaagcatctaaagatacgagctttcttttgtttgactcttttcttggcttcatttactatttaagattgtagtatttgtatttttttaaggttatcccataatcagttcatctgaatactttatttttgaaaaatagttcataacctaagttaaagtcacatgtttgctaagtatatcatttcgttgaaagaaacccaatccaacggctacaaaacagaacgtacaatagtgaatagttgatggtcaaacttgagagcagtctaaattcaaatccaacggttgagatctcttgaattgatctaaggctaaaaatcgaagtcatacgtcacgaaataagaatgctcagtgaggttctttctccctcccatttctggtaaaaattgtctctttctctcttcttttctttctacaaaaacagaaacaaaaataaaaagtaaagctttctctaaaaaatctctcctttatcttcttctagctcttctttgtgcctctttcaccatgctgagtacagagagaactaagttcagatccatggaacctgcaacttcttcaccattgccacgagacacgtcggagcaggatcccgcgctggcgcagagtgaagatcagtctcaaggaaggt

SEQ ID NO: 190772 - DNA, 92 bp, Arabidopsis thaliana landsberg
acaaaaattcggtacagttctggtttggtatggtcagaccgaaacgaacactcattaatgaagttaaagttggacagttccagtgggcatag

SEQ ID NO: 190773 - DNA, 261 bp, Arabidopsis thaliana landsberg
atgaagaaagtgtacatcgagaagagtaagaaggtcgtcagtagaagaaggagggctaagaagattcgttccagcatcgatgagtgctttcgaaagctggtcaaatccaacaatagcagtcatttcttcttcttccccaaacaatctctcaaacttctaaaccctaacaaaacgtaatcaaatcctctaggcaacgcttgaaatcctcaaggtcagagcaagaaaaaggagagaaaattcgggtgattctgaggttaagcg

SEQ ID NO: 190774 - DNA, 394 bp, Arabidopsis thaliana landsberg
  unsure (1)..(394): unsure at all n locations
tctatggggccgaggccatcttgcccacagacttagaatacggttccccgaggacgagggcacgcgacgaccaaagcaaccagaccaatcgagaagactcactggaccagctcgaagaggctcgggaaatggccttactacactcggcgcggtatcagcagtccgtgcgaagtaccacgtccgaggggttcggtcccgagacctccaggagggcgacttggtgcttcggctacgacaagacgcccgaggcggcnacaagcttactcctccctgggaagggccgttcgtcatcgccaagattttgaagcccggaacatacaagctagccaacgatcaaggcgaggtctacaacaacgcttggaacatccgacagctacatcgcttctacccttaa

SEQ ID NO: 190775 - DNA, 382 bp, Arabidopsis thaliana landsberg
cgcgtccgcagaaaagctttaaaatagacttcggcggcaatatagccagccggcccatcagcaatgtatttctgggcctgcaatatcattacctcgaccggaaatcctatacctttggtgcaaacctgtattccggccggttctatgaatcggtacagctcaacggccgggtcgactttccctcccggctgcccctgttcctggctgtcgaagccacctacaatcatttcgactactacaataccagttcaattttcattgaaaacccgcgcccgacctatatcgaacaggcagacaggaaagcaggcctgaagatcggttttccgctgaaccggaatacacgtgtcaccctaagctcttcatttgtcaataactttgacag

SEQ ID NO: 190776 - DNA, 1589 bp, Arabidopsis thaliana landsberg
agagtcattataatgtggcacactctcttggatgtaactacaccctcaatagttttgagcatttcgtgttgcctaagctcaacatagcgttacggcaacaaccgcctgtgaatcctggaatctcagatcttactctagtcgttcagttgttatcaacatttccttgggagcaaccaggtgcaataatattgttaaaattttatgtagttttgtaacatttctcgctaagttagtgacactattaatttcgtgaaattgttgtgcatgtatgtttcgcaccattaacatgactgtgagggaaacctcaagattatggttgttcattggcagattcctcctggatcctgttgtttggagagatgggaatattattcttggaattttgaaccgcactatccacagaccaaggtcacaacatccaatggctgtacattataagttgcatcgttacacattggtcaacactccagaaagagcactctatatcctatcttatgaaaggcctgcaggcgttgttgaaactgaggctgtatttggggctggccgaggaggagctcgggctggccgacgccgacgccgagagggtgctggccgtggccgaggccgaggacgagctgctccaggtcgtggctgaggccgaggacaacctagtcatgaaggccttgtggatgaagtcgaaggtgaaggctttggtgttgatgctggcagaggacaagttgaagatgatgatgctgtgggatttgaactacttgatctgagtcaaccaaatttcaataacctcagccaagaactgcttcaactgcatctaatggatgtctgtaaagatatctctctaaaggtaaaagtttctaactgtcacctagtatacttgtttctacgtgcacatttattgcattgtactcattgtttatggtcatctttgtgaattggtagggttggctaagtgtagctatttcaagtggaatggaaactttgcaatacgaagaattaaagactcaatatgagaagacgctaaggtaatttgggagaacatgttatgactttatcccctccccttgtctggtttcctgtgggcgctttataactttacgtattatctttcattggtcaggagttgcatgataccatcaaattcttacttgcaatacacattgatccgagacggtggtaatctggaacacctcttaactctcagcaagaattcgcagacccttctgtgtaaggtttgtggatcaccttctttagctttaataaatgcttgattttgtattcaaatttttcttatgattattgtttttcttgttcttctgagtagattactagtattgaacaaacttttctctgtttcttcttatgttcgtttgtggtctccagttgcaagtcgtaatacgtcattgtcttctatagctcttggacaagctgattcatcctaaaatctatttgatcacttcaatttgacaacattggccattgtttctttgtagattggaacaacagatacagaagaaaatctaacagtccgtcaagatctgcgatggaacaaacaagttggcacattactgtttgaatttggtaattcatcctcttaa

SEQ ID NO: 190777 - DNA, 293 bp, Arabidopsis thaliana landsberg
atgaacggaactgaaactgagatatcaaccatggctaagaatgtaaccaccaccataacacaagaccgcttcaaacctttcttcattgtaaaccgccacaagtaaaaaagttctgattggcgtttatgtttatatgtttatatattttgtgtctccaagaacttttgagatgggaatatataaagggaatagaaagagcgtcatgtggttggaagttgtggccaagaacgaagaactagatgaaataatgtacgattccgattggtttttacattctccgtttgaaatggacg

SEQ ID NO: 190778 - DNA, 94 bp, Arabidopsis thaliana landsberg
aatggcaacgactaaagaagaaagcaacatatcttctactgttgtacagcaatgcacacaacacatcaacaaccaaatcagcaacagaaattaa

SEQ ID NO: 190779 - DNA, 440 bp, Arabidopsis thaliana landsberg
atggtaatgccgaatggtatgtgttccgcatgccagaaacatacctgatgagagccaaagcatatttgtggaaagaaaagacggccaatgctgctgcagatgtaaacgctgtcgccacgagagcgaaatgcacaccttaccttccttccaaaatgagcatcggcaccatactggatgagcgtgcccgtgaactgtattacgaagaaccacgaaaaacagagctgacgaggatcgcctatattttcgcaaaaacagaacaaccctacaacggcaagacctataccatggcgaacttctccacatccaatttcatggttgaccgcactactggaaaagaatgtgttctactccaagaactttacaacggtgcatggcgaccagttccaaatcagtcagtaccatgtattatggcctgtgccccaggcggccatactggctaa

SEQ ID NO: 190780 - DNA, 801 bp, Arabidopsis thaliana landsberg
gtccagtctgatggacaacctaagcttaccacgcacggaaggaaagcaacgattagtgagttctatggtaagcaaacccgtaacaatcgatcactaatgttataatattcatgtttttggctaaagctttttgtggacatggtcattcctttaaaaggttttcgattgagacattgcgggtatttacaatgggaatgatgttgaatgattaatatgagtctgtttgtgtctccatctttgtccttaatgttttgtgttttataggtgtgatactaccatcactgcagctattacacagcaacttagatgagttggaaaccacagacatcgggtttgaccttaaaagactcagtaagaagataacaaaagaggctcgtagtagtagattcagcaatgccggtttagagcgtgaagaagaatgcggtatctgtttagaaacttgcaccaaaatggtgttgcctaattgttgccattctatgtgcatcaaatgctatcgcaattggtatatacacacacacactttagtttttagacctttttgacctgatgcatttactgaatctcgttgattctcaaatctgcaggaacttgaagtctcagtcatgcccgttttgtcgaggcagcatgaagagagtgaactcagaggacttgtgggtgcttgcgggtgataacgatgtggtggatacaaggacggcttctagggaagatttgttcagattctatctatacatcaatagccttcccaaggattacccagaagctctctttgcggtttactatgacgtctcaaatcgtgtatag

SEQ ID NO: 190781 - DNA, 136 bp, Arabidopsis thaliana landsberg
atgctagggactgttccacccacccccgctcttgtcaatgacaacgtcgccatctgcccgggtgaaaaagccacgctggaagtaaaggatctcgagacaggcataaaatatgtctggtatgatgtggctttcggtg

SEQ ID NO: 190782 - DNA, 78 bp, Arabidopsis thaliana landsberg
atggtaacagaaccgccagatacacgacaccatagccgtaggatgaagaagccatgcctcgttagaattcagattttg

SEQ ID NO: 190783 - DNA, 101 bp, Arabidopsis thaliana landsberg
agaaggttaatgaaaaaattggtgaatttgtgtccaaaatgtctttgcaaattagtcaaatccgatacacagttgtgattgtgaaacaccctcaaaaataa

SEQ ID NO: 190784 - DNA, 98 bp, Arabidopsis thaliana landsberg
aaacgaacacaaaaacccgcggcagtcagcggtcatcgacatctaaaaaaacacaaaacccgcggcacgcaaccacagcgtctgcagcgacgaaatga

SEQ ID NO: 190785 - DNA, 243 bp, Arabidopsis thaliana landsberg
atggagagcttggttcggctagaccatttattcggtgtagattgtcacaagcttggtttgtcaggaggcggttcgtcaaggagtcggttcgttaggaagctggttcgtcagggagctggttcgtcagggagctggttcgtcaggaggcggttcgtcagggagctggttcgtcaggaggcggttcgtcagggagctggtttgtcagggagccggttcgtcaaggagccggttcgtcaggagtcg

SEQ ID NO: 190786 - DNA, 148 bp, Arabidopsis thaliana landsberg
agatgacaatgtgctgagctgtttcgttcagattcgatcgggaaagagagtacttacggcggagaagataaaatcggcggcgactgtggaaggtttcttaagaataagccgtggatcgactcctcgtgtcccaaaaatgcttttttga

SEQ ID NO: 190787 - DNA, 392 bp, Arabidopsis thaliana landsberg
atggaagttgaaaaatcctctcctaaaaccaccaaaatggcagtccaatatatgaacgtgaatcgcatgatcttaggtaaatatatcaatgtatttcgtagttactttaaaataggtatatttgtttctttatggggaaccattggctaatattgaagaaggattggaaacaaattagtaaatttttattggtgtgagtggtcccttgttatcatgtcaatacaccaataatcacttttaagttacaaagacatttcacccaacccttttggcgggtcctatgcttatcaatgacttaaatatatggggctttaaattatttcatttttactcaaaattaaccaaaagtcttttttatctttaaagatccaaatcatgtggccgataaatga

SEQ ID NO: 190788 - DNA, 412 bp, Arabidopsis thaliana landsberg
caatactaccaagtcgataacgatctcaatccagatgtctggttggagcccaccgaggtatgccttatagtaatatttgtagataacgtacgtccacgttctatcttatgggtccaagtgtattgatgcaaagctaaataatatgcttgcttgaaggtgtgggaagtgaaagcagctgacttgacagttagccctgtatatcgtgaagctattggaattgtggaccctgacaaggttcaacattagcatacgtattttttttatatttttcttcatgtgagctattgcatttacgattggactttttcatttttctgtttgttatggttaaaagggaatttctctacgatttcctcgtctagtccgtatacggaaagacaagaatccagaggaagcaacaacatctgaccag

SEQ ID NO: 190789 - DNA, 99 bp, Arabidopsis thaliana landsberg
gtgtctgagcggcttgaagaggatcaacatgaggagctgccgctgctgcttctgctgcttgttgcatttgtctgttgtattgtctcactgatgatatga

SEQ ID NO: 190790 - DNA, 204 bp, Arabidopsis thaliana landsberg
atatttcgatacctacatcaaatttggatgttaagcttcttcttaagtccgagaagagtaaagaaattagtgagcgtgctattaaatattgctggacagctgatgaagtttcttgaggatcctgacgagctccgattgcgtgcttttcttactctcaaaagacttaacatttctatattggcttgcgatgtagaagccatgaag

SEQ ID NO: 190791 - DNA, 602 bp, Arabidopsis thaliana landsberg
atgaaagagacaaaaggtagagttcaaccatctagttcaggtactagtcaattgcagtcaatggctaagaatgatcgcagtggatcaaaggttgatctttctgatgcacccatgaaaggcacagtaaacaacaagaaggaagctgtgaagaaaagctctaagtcggttacagtgaacaagagtaagatgaatgtcaacaacaaggagaaagctgtgaagaaaatctctaactcagtcacagcgaacaaaagtacaacgaatttcttcaaggatgctgaggaggatgaatctaagacgactacgagtgactccactaaagcaccatcagatagttcatcagacaatgatagtgatgtgacttcttctatgcatatgaagcaaggtattttatcgacccaaatataactttgatcacatgttctctcaaccagatatgctaatttcgagtcttggtttcaacaggaaacaatctgtctggaggaacaaataggtaagtaaacgtttaagggtattattattgtcaatcttagctgcacagactactgtcataaactctttttactcgtcttgtgaacaggttatcggggagcctgcaagatatc

SEQ ID NO: 190792 - DNA, 90 bp, Arabidopsis thaliana landsberg
atgtgtcctccactcaactgcatcattggcgactgcgcgatgtgccatgccgaccggccggtctgtctactgatgggtcaaggactcaag

SEQ ID NO: 190793 - DNA, 69 bp, Arabidopsis thaliana landsberg
atggccacaattggtggattgaactcctttaagatttctttagaaaaaatctacactaacaatgttgag

SEQ ID NO: 190794 - DNA, 195 bp, Arabidopsis thaliana landsberg
gataacaaaaagcgtaaacgagaaacgatcggaacaaaccaattgatcggaaaaacaggacactaccttcacagcgacagaaatctagatcggcgtcaaattgttcaaccaatggcgattcaaaagcgaaatcagatatttatttaccaaagaaaaaacaaaaaggtatcgaattcagataaacagcgccaatga

SEQ ID NO: 190795 - DNA, 58 bp, Arabidopsis thaliana landsberg
atgaacgatgtcgcaagaaaaaaacaggaacatgtcagaccgccgtgcgaccaccccg

SEQ ID NO: 190796 - DNA, 284 bp, Arabidopsis thaliana landsberg
atccgaattcgctctggtactccatcttagaagcgctacagtcgaattattggacgaccacaccagctcgatgacgactatggactttggctgcactatgaacgcttatcacaaacatgaccaaggttggtgacttgttgggaccctactgttacttgaggtcacgcgtatggttgaagctcacaacttaaacccagtctaggtcttaaaagcctcaatagagcctacctgatacagaacactaatgcagcgactcacctggacacagactacgcctatgacag

SEQ ID NO: 190797 - DNA, 1209 bp, Arabidopsis thaliana landsberg
gctgcggagttgcaaacaaacatgatggaaacactggaagctgctgaccttgaaaagcagaaacatatcaatacaagaatggaagttctcacacgcttggccggattagaggtattaaccgtttaatttgtttgccgacagttcaaattgctcttattattaccttacattggagcaagatgatatgattttttgatgtaaacataaaaattgaatgttttaggctgaaaacgctgaacttacaagatcacttgccgctgggcagaagaaacttgagactcaggtataaagatcacataatctatttattttgtttcttggtttgtttaaattagctggaaataatgaaggtaaaagttaatgaccattgttcttactgaaagatgtagatcttctgagtctaaggatgttttgatcaatacctaattaatgttgctgagtcaaggttttagaaccaacttctatatctgcatttgcgtactaatttctatctttctgatgtgaccagatagatcaggtagcagtactcaaacaacaagttgagcttaaagagtctactctggaaggtataggttccttctttgagaaattatacagagcttaaaaacattaattcaaatgactttttttactgcaaatagtcatttggggataatcacttctctattttgctgaagaagttgtcttcatcatgtagaactgaagcgaaatacttttaatattgggggaaggggaacaactttaaaacaggtgacttgggtcttcttttctttctgtttctttttcttcaatctcaatgtggaaatctttgtctatttggtctgagaatcatgctgctgatatgtgggctgtatagttagatacttctagaggagacaaattcgaacaccagatgcttgaagcagagatttctttgctgactgataaaatcgggcggttacaagataaggttagctaacatagttgtctggttgaattatgcttcaggttcccttatggaatgattgttcctatctggttgacttatgctattgtcttttcttcaagattccattttttgtttgattccttgagaaatttcaggcaactaaactggaagcagacatagaaatgatgagaaaggaacttcgagaaccaactgaagtggaaattgaactgaaacaaagactgaaccagcttactgaccatcttattcaaaaacaatcccag

SEQ ID NO: 190798 - DNA, 119 bp, Arabidopsis thaliana landsberg
atttgctaagtttggaggttaagattctcttctactatacttttgtaatctggaagtataagttagctagtgaactgagttttgacaaagaagattatatcatgactcgatcggattga

SEQ ID NO: 190799 - DNA, 753 bp, Arabidopsis thaliana landsberg
atggtacatccatccgaaacaactaaagggtcaatttggcatgatcttcatgatcctggagtcaagcgtgcattagtcgtaggagttggacttcaaatacttcagcaggtagtctagatagccacatcaaaattagtgaatcacagaagaaataatgcggtttatgctaattctatgttttcctgcttcctcttggaaatgcagttctcaggcatcaatggagttctttactacacaccgcaaatccttgagcaggcgggtgtcgggatcctactatcgaacatggggattagttcttcctcagcatccttacttataagtgcattgacaacctttgtgatgttacctgcaatagctgttgcaatgaggctcatggatctttctggtcgaaggtgattaaaacttaaatttcctttgttcttacaatacacataaacgaaacaagctaaaatgcgttatgaaatgtcttttattttatatttgcaggaccttgcttctcaccacgataccaatcctgatagcatctctattggttttagtaatctcaaatcttgttcacatgaacagcattgtgcacgcggtcttatcaaccgtaagcgttgtgctctacttctgcttcttcgtgatgggtttcggtcctgctccaaacatcctctgttcagagatttttccaactcgagtccgcggaatatgcatcgccatctgcgcactcaccttctgcatctgtgacataatcgtcacttacagtctcaa

SEQ ID NO: 190800 - DNA, 444 bp, Arabidopsis thaliana landsberg
atgcccatgaacccggactcgaaagaacgcgcccggtcgaccgacacgccggcggcgaagcgctcgcgcccgagcgtcgcgctgctcgtgaaaggctacgtgggatttctcgtcggcacgggcaagagcgcgtcgacgatttcgtcctacaagggagacctcgacttgttcgaggagttcctccgcgcgaagaagcgcgatttctaccgcctgcagccgcgcgacctcgaggcgtaccaggtttggctcgagaagcaggggatgaagacgaacacgcgccgccgcaagctgctcagcgcgaaagcgctcgtgaagtacgcggtgagtcgacggaagctgcccgccgggaacgccgtgcagttcgtgaagaccccggagcgcctggcacggctgccgtggattccgacccgcgccgagaacgagcgcatcctcgcttgcgtcgac

SEQ ID NO: 190801 - DNA, 1563 bp, Arabidopsis thaliana landsberg
gctgattcggtttcttaaaagacgtattactgattcttctgaggagactgacgttgaaggagattttgtaatggattctgctattgaaattagttcaggtagtgatagtgatgacgaagtaccaccgcagcctgtttggccacaaactcgaaccaggatggatcccacatggctaagtatagtttttggcatatctttgtcaatttcggtctttctggtgaggttagttttggtagctttatggactgatcgactttgatgctgtgtttttttctttgcaggcaggagacctttgcctacagtggatagccatgctagagctgaacatacaaatcaggctcctcccaatggtgcctcgagtgatacttctcggcctggagtctctaagcctttcacagggaatgggaacactgtaaactcgagaatttccagtggatctggtgctgattatgtgagactgtcttctgagcaagctctgaaaagaactcttccaccctcttttaattcccctccccttcctgccagaagtggcactaacaatataagtaatgctagtggaagtcgtgttggtgtggattatgagagaccattgtctcagcaagctctgaaaagaactcttccaccctcttttaatccccctccccttccttccagaagtggcacaaacaatatacgtaatgctggtgggagtcgctttggtgccgattatagtcatccagctgtgtcagctgtaggcaacaagagtacctttggtgatcattatagtggagcccatgctgagataggaattcaacgtggcgtgaatggggttaggatcctgcctccatctctgacgcatggaacatctgcttctgttttgcatcatgctggttcgagtgatccaatgcacaggtttggtggtggtgaagataggaatcctgataacgatgaaaggctggtttatcaggctgcactacaggtattcatcctcagcacaaccctttgttatttgtggacttcaacacttaagctcttcttttgtgcttgcatatctagttatcgctgccccttgtaccagctttacattttgccggctcttttgaatctcttaatatgattgtcatagagtataatggagcaataattgactctaaatctggctcatttttttttgttaaatatctttctgaggtgcatggtgcatgaaacgttttataagcgtttgcatgtcttattgatgcttcggtcatactaccattgctggatcaactcaattttatactgactatcttaaaataataatgtagctgcattcgtttttctttatgtctgagaaataatgataattaataataatttggatcattgacaatagatgtagcatttattttccgattttactctggtacattataagggtgttgagagctcggttgtgatccataatctacctcatattaaatggcgtggtaagtgcatttttgattatcaagcaccataatactgcaggattttgaatcaccccatgactgtaaagtgatctaccttcctggtactctttcaatgtcctctatgaggcatcag

SEQ ID NO: 190802 - DNA, 306 bp, Arabidopsis thaliana landsberg
atacgcatgcgccgacaaaagctgatacagtacgctatacaccttatcaatttgcgaagcgcatgctgcaattgtctgcaaaggccacacaatatcccggtcatgcttccgactattactatcttttaggttgtgccgcttataacatgagctattacggcaacagctggctgctggtgaaagatagccggagcagtgccgaactgccgtattccattgaacagcctatgaagccggcagattccatcaactattatacgaccgctgaggccatggcttatttcgacagcgctgtgcatgcagcaa

SEQ ID NO: 190803 - DNA, 139 bp, Arabidopsis thaliana landsberg
tcctattcgacaaatacgtcggaatctgaccggaaagtttgttattcgacacatcaaacgccgagagcctcgctaatagacctaattgctgcggaatctgaccggataattcgttatcgtggagatcgattacgtttaa

SEQ ID NO: 190804 - DNA, 286 bp, Arabidopsis thaliana landsberg
gattatagcttattatgggaatttatatgtgaagaaaatgggtcctttaggtcggtacgaacctaaagaaatgtggagaaaattggacgaggaggttgccaaatggaacagagccgatacggttgttaaatctattccagcattacattatattgctactgtagccagtggtactccgggaaaagatggaatgtacattaacagaatgccagatagccagattgattcggtgttaaaaatcgcaaaaatgtataaccacgatgctatcgtgtttttagatgtgcag

SEQ ID NO: 190805 - DNA, 379 bp, Arabidopsis thaliana landsberg
atgttcctggacggcacgctgcacccgttgttggttcagacactgcctgccggcatccctgagtgggtgcgggtgggcgtcgtgcaggacccggcagcgctgcgcaatctggtggccgaaggcatcaaaaccctgctgggtgaaattccagcggcagacgcaactcatcgggactggacgcacttcgcgcgccgcctcggggaggttcttgcacgttttcacgccttggattcggcacgagccgaaggcatcaaggatgcaatgcgcgagctacagacggcggcggacgaggctctgcgtgtgtgggtcgtgaagcactatgcggacttgccgtcgttgtctccggccaagggcccgatcatggtgcatcacgtgccgc

SEQ ID NO: 190806 - DNA, 223 bp, Arabidopsis thaliana landsberg
atggaggatcatcaaaaccatccacagtacggtatagaacaaccatcttctcaattctcctctgatctcttcggcttcaacctcgtttcagcgccggaccagcaccatcgtcttcatttcaccgaccatgagataagtttattgccacgtggaatacaagggcttacggtggctggaaacaacagtaacactattacaacgatccagagtggtggctgtgttg

SEQ ID NO: 190807 - DNA, 559 bp, Arabidopsis thaliana landsberg
  unsure (1)..(559): unsure at all n locations
atgcaggcgatgccggcacgggtgcgcagncggtctcttaaattccggaaggtatccccatattggccctaatgcgccctggtgagccccgatccagggccgggcggttgtttttttcatttttcagcagacagcattcattatgagcgattccgatacctctgttcacgcttccgagaccctggggttccaggccgaagtcaagcaattgctgcacctgatggtgcattccctgtacagcaacaagaaaatcttcctgcgcgaactggtttccaatgcgtcggacgcctgcgacaagctgcggttccaggccatcgaccagcccgatctgctgcagggcgacaccgaactgcgcatccgtgtggatttcgacaaggcggggcgcaccatcacggtgtnnnnnnnnnnnnnnnnnnnnnnnnnnnacgaggcggtggccaacctgggcaccatcgcgcgttcgggcaccaaggaattcttttcccacctgacgggcgacaagcagaaggacgcccagctcatcggccaattcggcgtgggattttattcgtcgttcatc

SEQ ID NO: 190808 - DNA, 87 bp, Arabidopsis thaliana landsberg
gccacgtggcaactgtttttctttggcagtgatggttcttctttgagagttcgtcggtgtccttatcggaaatgtaagaattcgtaa

SEQ ID NO: 190809 - DNA, 449 bp, Arabidopsis thaliana landsberg
atgattcgcactagcagtacgaaggtaaattggctccaatcctatattcaaatcctagtataaacgatcatatggtaaaatatgtttaacaaaatacggcgattaatctaagtgataatataacaatgacattcacacaaatcacttattttcatatactagtcaataaactatatgaaaaaacagaaattaagagaatagtattaaatgatacaatcacatccacgacgatacaacaattaacaggtgcgcattaattcatgtctctttctcattagatcagacatataccgaattgggttctgttccttaattaacacatcaactatgcgtagttgcgtactcatcttcgcgacctgattttttatgtcgtgcatagggactttactttacaacgaacctatacggtggttttagttcgaatactaaacattgcagcacacagttaa

SEQ ID NO: 190810 - DNA, 206 bp, Arabidopsis thaliana landsberg
ctataaataaacatatatttgatggttcattcatcacaaaaatcagatttcgaaaattgtcaaatttcagatcatataagcaaaacaaatgtcgctattttgtgtgttgtatgtacctgaacttgaccggtgacttctccggcgctgtggctcaactgctggctcgacgacatcttcttggttgttctgtgaaatgtcttaattaa

SEQ ID NO: 190811 - DNA, 167 bp, Arabidopsis thaliana landsberg
aacacgtgatcggcaacgaccccgagccgctgcaattcgagaaaaaaggctgcttctcgctggccgctcaaaaagccgaattcgacgagcttaaaaaagtcaccgaactgatgaccaagctggatattcccgtgaaggtgtacgaggccaaggatgtcgaacgcgac

SEQ ID NO: 190812 - DNA, 123 bp, Arabidopsis thaliana landsberg
gtgcataatcctaaaagacttcagttttaccctttacttataatggatacgattaatttccttgtcgtatatgtacaaattaagttttgttttggtataaccaaatacaagccctacaattaa

SEQ ID NO: 190813 - DNA, 359 bp, Arabidopsis thaliana landsberg
atggtcactttggagttagcatcaggcatctcactagaggtatatcaaaatccacatgcagatatatatatattaaccaaatgcagagttgagaaaaattgagttatatggtttatgtctagatacctgtgggagcaagatttgttgggatccctgatacagaaaacgcagagaatccaagtggagtaatggtggaagtgtactggcaacaagacggctcggggtcgatgtgcatctctggacactcatcagagatgcgggtaccacagaatgttccggtgacacgtccaccatcaccaaatgcattaggacataaaagcctacgacaaggggttcgtggtatcgtgatcgatttatga

SEQ ID NO: 190814 - DNA, 183 bp, Arabidopsis thaliana landsberg
atatgggtatatggaaacagctttgagtccttccttgtagcaatcgctaacccggcccaacaaactcttgaacgatgggctgtggagaatggagtgaatggagacttcaactccatctgccaaaatgcaaaggcaaaagcattcatacttggagaactcgtaaaaacagccaaagagaacaag

SEQ ID NO: 190815 - DNA, 142 bp, Arabidopsis thaliana landsberg
atgagctacgcacagtgggtgatggacgaatatgggaagcacgtaactaggattattgtgaccctatttgaagctataatagacaccttgtcccttgaattatccggtgaccaaaaaatgggctacttatcaaagtcaacag

SEQ ID NO: 190816 - DNA, 236 bp, Arabidopsis thaliana landsberg
ctttacctaatggcgaattcaatcttaatcgtgaagaatcaaatttgatcccaaaagtcgccggcggagaaatcgagctaacaggagacaatcgaaaaccatcaatttattctctggtttattggatgttaagggaagtaggttcgattgtagaagatggacgaacaacaaagcagaagacgattgtaactttgtttagtcgaacacacatgtacagacaagtagagttggtttag

SEQ ID NO: 190817 - DNA, 134 bp, Arabidopsis thaliana landsberg
atccggataaaccggaagaaggtccgacaaaacggaaaaggagatccgatctaaatcggaaaacggaatatgttacaaaacaaaaaaacaaagatacagtccgctcaaccggaaatcgaactttttctctctaa

SEQ ID NO: 190818 - DNA, 816 bp, Arabidopsis thaliana landsberg
attaaaaaccatcaaaagaggcaaagattcataacctcgaacattaatgatctgaagaaacatcaaacaaataaggtgcatcatagttatttcatcacaaaatatagtgtttcaactggatcttgtcaagcctctttcggaaatatctaagaggcatacaaatacatacatgctcaccaggttactgcatttggaggggacagagtcattaatcttctgcaggctattgagagtaatcatcgtagatttagaaaaccaccaattggtcctattggctcccatgtggtaagtttctactcgtttcgtttgcaatctgtgcaccaaacaaactatttcacttgttatcttatattgacatgtgcaactgttgctgtaacaatcttttgatgtgaacattttgtgggttaaaaagtctcttctaatggtgtgatgttctgcagactttagtcaatggcaataaatgggcttcttcagttgaacaagctcttggaaccctattaaatgccttcattgtgactgatcacaaagattctctcactctaagaggctgtgcgaatgaagctaactatagaaatcttaagattatcatctatgacttttcgagaccaaggttcaaactcgaaataagcattttcatatttccttttaaccatctgcattgatgaatgggtagctttataacgcaaatatatgctatctcttcatttatgcaggttaaatataccaaggcacatggtgcctcagacagaacacccacctatactctctgtcatagactctgataaccaaaccgaccttaatgtcttggtggatcag

SEQ ID NO: 190819 - DNA, 1761 bp, Arabidopsis thaliana landsberg
atgttggaagatgaagattacagagtttatgtgagccgcataatgagtcagttaagggaacagtttcccggtgcatcattcatggtgtttaatttccgggatggagatagcagaagccggatggagagtgtactaactgagtatgacatgaccatcatggactatcctcgccattatgaaggttgccctttgcttacaatggaaacggtgcatcacttcctaaaatcagctgaaagttggttattgttaagtcaacagaatatcttattgtcgcactgtgagcttggcggatggccgactttagcttttatgcttgcttcgctcttgttataccgcaaacagtttagtggagaacacagaacactagaaatgatatataagcaggctcctcgtgagttgttacagctaatgtctccactaaatccgctgccttcacagttgaggtttcttcagtatatctcgaggaggaatgttggctcacaatggccaccgctagaccaggcccttacattagactgtgttaatcttagactgattcctgattttgatggtgagggtggttgccgacccatattcagaatatatggtcaagatccttttatggcttctgatcggacttcaaaagttcttttctcgatgcctaaaagaagcaaagctgttaggcaatataagcaggtgatatcaagatctttatcattgatgtgttcatttatacagactcttcccagtatcagagagttatgatagtcctaacttttcatctactgttgcaggcagattgtgaactggtaaagattgacatcaattgccatattctcggtgatgtcgtgctagagtgcattaccctaggtagtgatcttgagagggaagagatgatgtttcgggtcgtgttcaatactgcatttcttagatcaaacattctaacacttaaccgtggtgagattgatgtactgtggaatacaacggatcggtttcccaaggatttcagtgcagaggtgactaattatcttctttctctttaataagtagaccaattttggtttcctagttaaaagagttgcctgttgtctaagctttaaatggtcagtcccgatgagctcagaattatactagtcatttgtatagaagtacttcgtgtaatacatctctctgagtcaagaattttgtgcatttaatgattaatattagtgagttcagttttgagtctggcatatctgttaaaagcattttatgttatacatagctaattgtctttccaagtcaagagaggagtaacattctgtgtttgttcaggttatattttcggagatgggtgctggtaaaaagcttgcctctgttgatctgccacatatggaggaaaaagatgttttacctatggaagcatttgctaaggttcaagagatatttagtgaagctgaatggttggatccaaattctgatgttgctgtgactgttttcaaccaaataacagcagcaaatatccttcaagaaagcttggattcaggttctcctcgaagccctgactcacgtagcctattggaatcggcacttgagaaagttaaggagaaaaccaagttgatgatatcggaaaatattgtttcaagtcctgatacatcctctcctgaaaaagagaaagatacaatgtcctctcataaatcttatgcagatccgaattcaatccttaagaaggttgacgaatcgcgtggacttcgagtttcagtccaaagaaatgttcactcaaagatattttcacctcgaatg

SEQ ID NO: 190820 - DNA, 322 bp, Arabidopsis thaliana landsberg
atggtgctcgaaactccggtctgttctcccatagacaaagaatcctcctccgacgatgtgcagctcaacaaaccgccgaagaaaaagcggaagcttgacgtcgtctatccacccagagacaatacatcctcctcctccgatgtgaaacccaaagtccccgtaattctctattctcttcgtaatcactttcataaccctaacttgattgattgattctatctgaacttttttgtagggatattgtggggtaaaagccattggatgtaatcgctctgacgaactccttgcagaggtggcactccattcctacaattctcaaacg

SEQ ID NO: 190821 - DNA, 453 bp, Arabidopsis thaliana landsberg
gcgcaccacccggcgagggtacgctatacccgtcggcgggacgaaccgccggggagcatgacgatggctcgcacgcaattcgtgaacccggatcttgacgtcgtgacacggcgcgaccccgcaccgctgatcgcgatgctgcgcgcgctaggtgtcccaccgctcaacgagcagtccacccgcgaggacggcgcctggttcatcaactacgagctcacgggccgcagcgcgacccccgagtcgaccgtcatcacgatcgtcgacgcgatcgagaagctcaccggcgaggcccgcgagatctggtacgtagcgaccacgcgcgagctgcacctcggcttcgacggcggagacgacccgcgcgtgttctccgaggcgctgtcgagaaagaccctcgcgagcgccgcggcggccggcctgtcgctgcggatcacgctctacgcctcgcagggctga

SEQ ID NO: 190822 - DNA, 110 bp, Arabidopsis thaliana landsberg
tattagatggtatgatactaggatctaatgcagatgatgatgatgatgatgatgatgcagtagtgtctacaagagagtcctcatctatcaaaggtgttgtttctacataa

SEQ ID NO: 190823 - DNA, 48 bp, Arabidopsis thaliana landsberg
atgacggcggacatggaagaggatagccagataagcttgagaagaaag

SEQ ID NO: 190824 - DNA, 179 bp, Arabidopsis thaliana landsberg
atgggggaacaacatttctgggcaaaggctacaatgcatctctatggcatcatgggtggtgtgcttcgcaacgtaccatgtgtcctgcagtggaatggacaactacacaacaccactcaatgtacgccccactgtatatgacctcggaacctactggaatccatctcttcaccgagtag

SEQ ID NO: 190825 - DNA, 613 bp, Arabidopsis thaliana landsberg
agacactcaaccggtgattggaaataagagttacgaactcgcgctccatcttgatggaagactcgatttctgcaaaagcagagccaatatctcccgtcctggagtcaatgttacactcaatgcggctaactaccgctctcagctaggtgtcgtagaagtaagcagtctctctaaacgaatgatttgctaccctactctcgaatcagccttcgcaagcacatggatttgtgcccgcaagaccgaatggtctcagaccgcctacgccgaagctgtccgctatgcacatgatctaggtatggactttacaacagtcgtcctagacgttaaagttggttcctccttgtggctattcgctcctatgatctctgatgatctcttctctctccgatgcccactccccgaggacaactacactgttgccggtgccgtcgtccaaatgttattccataaggccgccgcgaacaacgccgtctcagaaatcttcaatctcgcttctataccagatgctgactacggaagcttcattcctggaccccgcgaaggattcaacctctcagcctattatgccatctccaatgaaggcagcgatgaagtttcgaaatctgccgtttaa

SEQ ID NO: 190826 - DNA, 954 bp, Arabidopsis thaliana landsberg
atggaaaagcctccacctagtgggggacaaagaatgaaatttgcaattgatgtggcaaatgctttggtaaatatcgcaaagtctttcatcgacattttctctgtaaactgatttgataatatatcttttacagtttttgggttctggcttgcacgttgttctctcctccaggaatatcttcatttgtgctgtgatcctcctctctgtcatagagatattaaatcaagcaatatattactcgatgagaatttcgtcgctaaggtatgtagtactgcacatcttctgtgttagagaaccctttggtatttggataactaataatgttttcttggtgcagctttcagattttggccttgcacattcgtctagagatggctctgtttgctttgagcctgtgaataccgatatccgtggaactccaggtttgggagagatactgaacagaataacttgactaattttgatggaagctgagttttaaaaacttgaagttttttcaggttatgtagatccggaatatgtagtaacgcaagagttgacagagaagagtgatgtgtacagctacggagttgtgttgctggagctcataaccgggagaagagcagttgatgaaggtaggaaccttgtggaaatgtctcagcggtttttgttggcgaaatcaaaacacctcgagttggtagacccgagaatcaaagactctattaatgatgctggaggaaaacaacttgatgcagttgtgacggttgtgagattgtgtaccgagaaagaaggccggtctaggccatcaattaagcaagtcttgaggctgttgtgtgaaagctgtgatccggtgcatagcgcatttgctaaagcggttgaagaagagataggctgggatagtaggaagagaagcaatttgagaattcaaagaggtgattcccggatctttggtccatcgtctagtactacttccag

SEQ ID NO: 190827 - DNA, 92 bp, Arabidopsis thaliana landsberg
gctgggagcggaaacactcgagaatctatgaacccaaagacttaaaagttgctaagcaagtccgagccgagccacgaagtcacaagctttaa

SEQ ID NO: 190828 - DNA, 735 bp, Arabidopsis thaliana landsberg
  unsure (1)..(735): unsure at all n locations
atgacatcgaattacaaatgtacctttagcttggaaagagatgaaagtacaggtgtgacgcaaaagcaaatgccaaatccgcgtgaacagtacgggggtactgttcacctatttatagacacgggacacagcccatacaattttacattcatgccctttacatttggtaatgactataaggtaattcatcgaggtctaannnnnnnnnnnnnnnnnnnnnnnnttccctttcctgctgtcatgccgaagcttccttgcgcgtacttcggcgctgcatcaattttcgtattgttcgtgcttctcacactgtggttctaatccgaaggtaccatgttcatatattacaactccggaaacattgttaaatcatgtttggaggacgttctgaagacgaaggcccccaacagtcagaccaccagaattgagttggcaacggcttcgactggtggcacaacccgaggacggtcgagacaccacgacaacaactttcctccctgggacagacgtcatcatcgatgacaggaggacacgtgtggagtatcggcgctcactccacgcctcagggccattcaatggccccctaacttcaaagtctccaacatcgacaagtacgagcctaagcaggatctaagaggctggttggccgtctacacgactgccgcccgagctgctggggcaaccgaagatgtgatgacggcgtacttgcccattgtcctggggcaagacgcgttgtag

SEQ ID NO: 190829 - DNA, 593 bp, Arabidopsis thaliana landsberg
tttcaacacttgaagatggagaaatccagaggaatcttgaatttccaagcaataagatcgttcacgagcttgttcagactgttcgagcttcttcttcttgtaatcttgatctccaaactctctttcccttctgtaaaatctctggggacattttcaaggaagcagcagtgtttctcgttagcccgagattcgttttcttcatcggaaacgcaattgtaattactcttcttgcgaaatccggacgatacagctcgagtcacgagccttcaaagacagcaacagaagctgcaagcaacgatctttaccaagaatttcttcacaagagtgagaagaagaaacccgtagtttacgctacgaaaacagaacaactaaagaagccgagtggagggaagagggttagtttcgggagaagccaatcgcacaaagcgtttgaggcggttaagccgctggagagtaccaatggtgagaaaaacatgaagaggtatgtgtcggagaagcatatgagggtttgtgactccgacaagaaagtagtggtgagagttaagaaaccagaagatggaatgagcaacgagcaatttatgacaaaagattga

SEQ ID NO: 190830 - DNA, 1601 bp, Arabidopsis thaliana landsberg
atgggaactgtggttggaactgttgaggaccgcagagatatgtttgagggcaatgctcagacaaggatcacaccattttcttcaacaaatcagattggaaatcctgttgcctacaagcttgtccgggtatggctataaatgtcttcttttcactggctctcttatagttaatcctattgtttgatttctgcgtgtggcttctgacttctgtgaacttcttccaagttagaacggggaaaaaataatctaataggggcttctggatttgagaaatctgtctattatgactatatatattagccagcctttcaaaatcttattttgggttgtttatggaaatggttaggtttcaggagatgggagtctagtgcctgcaaccgatgaagaaattttggaagtcaatgacaccgatatgcatattccatcagatacttgtcagactataggctaccttgcaaccgatgaagaaaatgtggaggtcgatgagacggatatgcatattgcatcagatgcttgtcagactataggttaccttccagctgaagggataccttctcggttgtcccagattgaaagttcagaaggtttggttcccatagacccttacatgttgaaccgttcttgcttaaaagcctatggtagtttagctctaattatgctccttttctcagggaacatatgtttctatggtcaggaatgcattgtatatccaaatgcacttctttaaacatttcatatatttacacagagtgattatgctagatgcaaatcatagagagagctaaatttttggtttcttttccaaactatagatgtgtatcaatctattgcaaatttcataccaatttctattattgatatatatgcttgtgtctctgtggctttctctatcttacgttgaggattcagataaattggtgataaattttcttattctttcagctatcaattcaggtttattgcattctgataatgtgcaaccatatacagaccaggtaaagtctcgatctgaggttagtaccagttcaaaagtgttgaaaatagaattaaaatttatggcattgtatcatttccacagttagattcttaatgttttcataagaactccatgagagaccagatggtcttactcctaagattttgctccatctttgagatttttgcagtataacgaggagatgttgcaaaaggttgaacaggaagagaggcttgagaatgtacatggatctcagatgccttccattcctgcagatgccaatatccagtgttctaatgaaaacaacttttttgaggaggatcaagtccaccatgaagctttactgcaggatgaatgcaagatgaatgaatctgatatgatggaacgatgctcaaacgcagttgctagtccaaaagaaactgcattgtctgctgctgctcaaaaacctgatttttctagagttagaggtgagatctgcttggataatttaccgattaaagcactgcaagaaacattcagggcaacttttggccgtgatacgactgttaaggacaagacttggcttaaaaggaggattgcaatgggacttattaattcttgtgatgtaccaacaactaacttgagg

SEQ ID NO: 190831 - DNA, 234 bp, Arabidopsis thaliana landsberg
tgtatcggcttgtatcttcggagtacagtacaccatccctcgatagaaggcggaaaagagatagagaaaaccgagcctgaaatatttgatgttagatttaagaagagcaaaagatatatgaagttctgggtattgtggcttagtaaaggcgtagcaatttttacccattggaatcccacgagagcgtaccagcagcctctcaaaccaaatcctccattgctcagaagctattag

SEQ ID NO: 190832 - DNA, 300 bp, Arabidopsis thaliana landsberg
atggcttgtacttcatcatctggtgcacacgtgcgttcaacaagctggtccgaagacgttaatcctctgtctcgagccatcgaagatcatcttctgttactaaagaaaagaccagagtccgctcgtcggaaacttggagttttaaagaatctgtacgaggttgtcgaagttttcctccgttttcaaacgactaaaactcaaaagtctttcacaggatttgaagatgtttctgacggattcatcgaggttcttgatatctgcagcacgatcagagacgttctgatggagataaaggaacaa

SEQ ID NO: 190833 - DNA, 381 bp, Arabidopsis thaliana landsberg
atgattttcctttgcccgcaaaagagtgtgggaagagtttgcaaagaagataatcagctggtacaccatgtgctttgattgaggacactaagtcttcgaagacctctagatgatctagtggtgattcatcataatagcaaagtcttctcttgcaaaaggaggtagctggatcgctgatcgattggagtagaaaagatcagctatgttgaattcgcctatggtagttggtttattctacagatggtgtcaatcgacaccctggtggtgtcgttcgacactgtcgaaatctgccggcagtttgctgcgttccatcttgtaattcccctatcacaggaaaaagaagaaagtaaacgcgtgagaaacaaaagaaagaaaaattaa

SEQ ID NO: 190834 - DNA, 337 bp, Arabidopsis thaliana landsberg
ggtcttccagctcaattctgcaaatctcacctcgggatacaagatggtgtcataactttgatagatgaagaaggcgaggagtatgagactatctacttagcgagaaagaatggacttagtggtggatggatgggatttgcggttgctcacaatctagcatatggggatactcttgttttcgagttagttcgtcgtaccgctttcaaggttagtaaacctgttagttacctaccaaacccacaaaaaatgatgaaactgatgattgatgttgttattctgtcaggtttacattacaagagttggaagttgtggagaaagctccaaagatatgagctga

SEQ ID NO: 190835 - DNA, 286 bp, Arabidopsis thaliana landsberg
atgcccgataacattcagtgcacatttcgttcttccctaaaggatttatcggccctgttgcaggttaatgatgaggccgcggaggtctttctgtttcgcatcagcatagttacgcaagcgcatgataggtcactcagtaagacagcacatgagacttagtacaatgtctagtcgccagaatagacattggatatgattcatatgacagaatacaagagtgatttgaatgatgaggatagcatgcgttatgtaaaagaacacaggcaagcagtgcgagagaatgacg

SEQ ID NO: 190836 - DNA, 698 bp, Arabidopsis thaliana landsberg
  unsure (1)..(698): unsure at all n locations
atgccgttcgcgttgaggaatgcgggtgtgacgtatcaacggtgcatgaaccatgtgttcggcaaacacattggccggacggtcgaggcctacgtcgatgacatcgtagtcaagacaaggaaagcctccgacctcctttccgaccttgaagtgacattccgatgtctcaaggcgaaaggcgtgaagctcaatcccgaaaagtgtgtcttcggggtgcccaaggcatgctcttggggtttatcgtctccgagcgaggcatcgaagccaacccggagaagattgcagccatcaccagcatggggcccatcaaggacttgaaaggcgtacagagagtcatgggatgccttgcggctctgagctgcttcatctcacgcctcggcgaaagaggcctgcctctgtaacgcctcttaaggaaagccgagtgcttcacttggacccctgaggctgaggaagccctcgggaacctgaaggcgctcctcacgaaggcgcctatcttggtgcccccggctgccggagaagcccnnnnnnnnnnnnnnnnnnnnnnnnnnnnnnnnnnnnnnnnnntgattgtggtcgagaggcaagaagaggggcatgcattgcccgttcagaggccagtctacttcgtcagcgaggtacatgtcgaaaccaagatccgctacccacaagttcagaaactgttgtatgcggtgatctga

SEQ ID NO: 190837 - DNA, 521 bp, Arabidopsis thaliana landsberg
atggaacggttgattgcacgtatgttttctagcatgtaagggattagctagattgagatgttaattcttacattatatgtttataccaaagacttactaaacatatttgttaaacttgtgttacgtgttatagtgaagctagtggaagaaatggcgataaagtggtgttatatgaagatacagctaagaagcaggtacaggaattcatatcaactctacgtggttgtgaaacaatggcagaagcatgctcttctctccgtgctatcttgaagcatgataaatccaggcggctgcttcatttactaactcctggtataatcaatttgctccatattcacattcttatactggcaaattgcacagcatctcatatcatttctctgccaggtcaaagtcttccaaatatatcatcctccattaagtatttcaaggatgcttttgactgggtagaagctcacaattctggacgtgtaataccccatgaaggagcagatgaagagtatgattgtgcctgcaaaaca

SEQ ID NO: 190838 - DNA, 159 bp, Arabidopsis thaliana landsberg
cgcgcgcgtcacgcagcttgttctccgcagctcacgcatgtacgatgcgatcatcagcacagggttcacttacaactcgcagggttcatatgtgtcaccctcagaacgtccatccaagtacagttgttcaccacatctccgctcagctccagcgccttt

SEQ ID NO: 190839 - DNA, 109 bp, Arabidopsis thaliana landsberg
atgcactacattgccttatccattagtattaaccacctaacttttcttcatcgggtgaatggattatggacttgtgatgttgtaatatatttcgataataagatgtgtg

SEQ ID NO: 190840 - DNA, 399 bp, Arabidopsis thaliana landsberg
agcttcgtgagcaaccggcggcaaatttccggcgaggtgcaagggccacacatgagatagataacgtttccaagaggccgggtaaagataccgtcttcccgaagcattattagaagagactttgcatacaacgaagcatacctgaaacacgcagagaaattgtaccaaagtttgtgttcaagacattttgtctaatggtgacaattcaagagaacaaatattatgttacttgagaagattaccctgaattggaagcatctgcttttagttctagagcgaaaagggttcctattacaaccaccctttgaaccgcagagtgagatgatatttgttgcaccagttcttcgtcccacagctgcaaattttaaaggattaattgataccaagagtaatggctga

SEQ ID NO: 190841 - DNA, 386 bp, Arabidopsis thaliana landsberg
atggagacgaatggcgatggtgaagatggtgatgagaccaaagaaaatgatggtgtggacgagaatcgacgctccactagtctgcatattaccaaattcaacaacacgacctctcgccggaatctgaaagagaagtcccggagtcaaaagcacgaacagtatcacagcgactactacaggtccccaatccgccatactttgccactagagagagaaatgacagagaagttagagagaaaatggtttgagttttttttttttggttgttgttgtttggttttgtgattttgaagaaacctaaacttccttgtgcggtgtgaaaaaagaaaagaaacggccggtggcgatgtcacgtgcggatacgttgttttcgaaggacgtgacac

SEQ ID NO: 190842 - DNA, 195 bp, Arabidopsis thaliana landsberg
atggggacccttggaccgttagttgcgctatgtctggtaatgtcgtcgacgcctcgacggcgcacggccactctcaattctggatacctccaccaaggtatgttatctataatcttttatcacaaacacatgcttggattaccatatctatgtcataagcttatgctttcttaaggttattgtaccaatccatga

SEQ ID NO: 190843 - DNA, 227 bp, Arabidopsis thaliana landsberg
attgcgttgtcgtggtcatccagtcggtaagtccaatagtcgcttccttagtggctatttctcttttatttagtgtccacttcagtctttcgtcggtcagctcgttttgtagtcgtggttgtttggtgttactccaccaatagtctatgatgttggtggctacggtcccatgtatttggtgtcggtgtatggaaagtttcgcaactggctcatggctagcttattat

SEQ ID NO: 190844 - DNA, 153 bp, Arabidopsis thaliana landsberg
aagtttgaacttgttagtgctttgatcttacgatctgattatttgaaactccatcggtttatcagagtatcagtagaggaatttctcattcttgatgatcatcccattctctgctacgattttactatctttaggtcaaactccactgattga

SEQ ID NO: 190845 - DNA, 983 bp, Arabidopsis thaliana landsberg
atgcagaagactgcgttccgttgtcaaatcaattttggctatgaagtagaaagaatgaatgttcagttcatgaagaggaagaaatcaaaatcctgtggaaaatcttcggtaaggtggaaacatgttagcggaaaaaatgcaatcagtttcgaggaagattattcggttgctgtaggaatagcatggcaaataaaggatttactcactaccgaagatgcacgtaaatctttactcgagtctgacattgaggagctgctcctttccttaaaagtcgtctcacagactagcattttgcaagccacttgttgcaaatacatggacgtgaatccagtactggcatatacttctctttctttgcacatggcccttcagaatctcaataaggatgctcagaagaatgatatgagaatcgctgaggcaaggactttttgctttccctcttggcaccttcctcttcacataatcagattactaattatcaggtttcccattttctagcaggatattatggaccaaacaatggatcacatcctagtctgtacagatgaactatttaaggcaggtgacattggaacgctaggcaccacatctccagaggctaaccttagcaagaaaccgactacaagtaacggcaaccaaccaaaacgaagacattcaaatgctggtgatgatggtgagtggagaggtgagttcattacaaatattaacccaacatattgatatcttcatgtgtaactctgctcgtggtaccagttcccgatgaggcattcaagttttctgacattgcttacatgcttcatgcagcttctgagggatcaaaggaaggaggtgtactgaacaaggtcaaaatgctaactgcgttttcaagtttttcgttgagtctacagagatgggtctagcttcccactttcaagcaagtatgtttaagtttacatctgcgtatataaagtatgtcatctccattttcaacgaccattcaaccg

SEQ ID NO: 190846 - DNA, 871 bp, Arabidopsis thaliana landsberg
ggcaagaactgcatctacagagacctgaagattccagaaccccacctgatcaaaataacatggaacttaacagatctgaagcagacgaagcaaaggccgagaccactcccaccggtggagccaccagctcagccacagcctctggctcttcctccggacgtcgtccacgtggtcgtcctgcaggttccaaaaacaaacccaaacctccgacgattataactagagatagtcctaacgtccttagatcccacgttcttgaagtcacctccggttcggacatatccgaggcagtctccacctacgccactcgtcgcggctgcggcgtttgcattataagcggcacgggtgcggtcactaacgtcacgatacggcaacctgcggctccggctggtggaggtgtgattaccctgcatggtcggtttgagattttgtctttgaccggtactgcgcttccaccgcctgcaccaccgggagcaggaggtttgacggtgtatctagccggagtcaaggacaagttgtaggagggaatgtggctggttcgttaattgcttcgggaccggtagtgttgatggctgcttcttttgcaaacgcagtttatgataggttaccgattgaagaggaagaaaccccaccgccgagaaccaccggggtgcagcagcagcagccggaggcgtctcagtcgtcggaggttacggggagtggggcccaggcgtgtgagtcaaacctccaaggtggaaatggtggaggaggtgttgctttctacaatcttggaatgaatatgaacaattttcaattctccgggggagatatttacggtatgagcggcggtagcggaggaggtggtggcggtacgactagacccgcgttttag

SEQ ID NO: 190847 - DNA, 125 bp, Arabidopsis thaliana landsberg
cgacagcgaccagcgatcagctacagcaaccagcgacaacatacattgtttgtttgtctgtcgctggattcagcgaccaattacagcgacaatcgctaataaccgtcgctgtgttgttcgtttga

SEQ ID NO: 190848 - DNA, 162 bp, Arabidopsis thaliana landsberg
ttcaactcaatctatgccggaaaagtgcacttatcgctttacgccagaaatttcatattggaagaaaacgctgatcttcaacgtaaaatcggcgaagctggcggctacttggcgatgccttcagatttcaactataaaccgcgaagagaggaatatagttga

SEQ ID NO: 190849 - DNA, 96 bp, Arabidopsis thaliana landsberg
tgtaaatggaatactgcaagtggaaaacacaagtggagaaagacactagtgttgtcgcatgaggatttacttcaagtggagaaagcttctgcatga

SEQ ID NO: 190850 - DNA, 312 bp, Arabidopsis thaliana landsberg
atggcgcaaggggcgatgctagtcctagaccacgtggccgattatgttggcaacaacgaccgaatgcgcgaagaattgggagttgatagaactcattctgggaaagtcgaatcaggattgattgaccaagtgctgtcgtcggcacccatcgaaatgctgtcgttaccgcctgaactcgccaagcgggttatcacgttctttgtccgagaacggtttgatgaactgtacgagcaaaccaagccgcaattagctcaagcaatgtccattttcgggcaaggcatttccaagttgattcaggatgcacataaaaag

SEQ ID NO: 190851 - DNA, 353 bp, Arabidopsis thaliana landsberg
atgatccaccgaaacgacgccgatgccgtaggcgccgatcacttctttcaaagcgttcttgaccgcgagcacaagcctgttgttgcccagagcgccgttaccctgtttggcggcttgcagtttttcatagtgttcgccgatcagatgcgccaggacctcggtgtatgtggaggaatgaaaggtatgatcagtggcgagcaaacgcgatttgatccggacgaaattttcgatgacaccgttatggacgatggcaatccgtccgctttgatcaaaatgcggatgcgaattttcatgcgttggcgctccatgggttgcccagcgagtgtggcccatgcctgtatggacagagggcg

SEQ ID NO: 190852 - DNA, 565 bp, Arabidopsis thaliana landsberg
agtctcttgttctgttcccatcgaatgagcaatacaaaacacatccacaaagggttacaagagaggcttttagatcttctcttgatcgctcttatagtttacatgactcttaaaggcggcacgagtggggcttgtgccgcgtgcaagtaccaacgtagacgctgcgccgcggactgccccctcgcgccttacttcccagccgaacaaccgaaacttttccaaaacgttcacaggctattcggcgtaagaagtatcgtcaaaatcctcgaaaaactagacgaaactcagaaaccagaagcaatgaaatcaatcatcttccagtcttatgtccgtgaccgttctcctgtccacggttgcctcggcgtcacgcaacaacttcaatacatgatctggtttgctgaagaagaactcaaagctgtcaattctcaattacaactatatcgctctcaaccacaaaacggtcaaaatcaaaaccaaaaccataatcataatcagatgattcatgagctaggtagtgatcataataagcagcaagaagatgttacatcgcagcagcttgacttgg

SEQ ID NO: 190853 - DNA, 78 bp, Arabidopsis thaliana landsberg
atttcttcctcgttgttctaatactcaagcagatggtttagctaagaaagctcgggttcgtaatagtctttttcccat

SEQ ID NO: 190854 - DNA, 450 bp, Arabidopsis thaliana landsberg
atgcaccttctgtttctcttctatttgtttgctggaatttggatccccccagctgttttatccttcaaacttgccacgttgtccggtaacgactgccctgtgaagtcaatgacttgccattcatcatcgatggtagaggaatcctgaaaatgtatgactgccatgattagatacaagtcaagttgagaaacaaaagactctaagaatcagaacattaaacaattaccggatgttgatcagcaagaacaggtgatgactcgttttttagaggcagtggtagtggaggagacgtttcaagcgtatgtggtggttgcatttgtgttgaaaggtgttgaggttgtgggacgttaccagaatagtctgcatcctccaaacgagcaaaatagtcaagcaaatcaatcatatcaatatccactccctcctatcgcttttccaattgaagacaactga

SEQ ID NO: 190855 - DNA, 190 bp, Arabidopsis thaliana landsberg
gtatcagcacagccacatagtgctcgcttccaagaaacggagatgccaagttacgagcaggatcaccaagccagaaagagtcgcctacccaagttcctatgctgctcatatttctagtcattcctacatgccacgctttattgttgttcttttcattttgatcccgtgtgaacacaagctacgtttatga

SEQ ID NO: 190856 - DNA, 270 bp, Arabidopsis thaliana landsberg
ttatgtcaacccctcaaagtttctattcagttcgaaatgtccttgagaaggacaaattgaatgaatcaaaccctcctgaatacttggaagatctggagaagaagaaaacattcaagatttcttcttcgggtatctatgttatagaagtaaatgttactacatctggttctactccttgggtattggataccggatgtggtgttcacatttgtgtaaatgtgcatggcctaaacaacagtagaactttggaggaaggacaagtggacctac

SEQ ID NO: 190857 - DNA, 668 bp, Arabidopsis thaliana landsberg
atgaaggtaaccgatttctggttcggtctcgaatcaggtaaagcttcttctgtgtctcagaaagttgttgagttgtttcatcaaggagttgcaatgaacactacagggagtgtgtttaaggctaaagcaggaacagagtatgagttctctggttctccaacggagaaagcgattcttagctgggcggttgaggaactggagatggatatggagaaagtgattgaagaacatgatgttgttcatgtggaaggtttcaattcagagaagaagagaagtggtgtgttgatgaagaagaaaggcgtaaacacagagaacaatgttgttcattggaaaggagctgctgagaagattctagctatgtgttcaacgttctgtgatggttctggagttgtgagagagatgaaagaagatgataagattcagtttgagaagattattcaatctatggcagctaaatctctccgttgcatcgcctttgcgtattcagaagacaatgaggacaacaagaagttgaaagaagagaagttgagcttacttgggatcattggaatcaaagatccgtgtagaccaggagtgaagaaagctgttgaggattgtcaattcgccggtgtaaacatcaaaatgatcaccggggataacattttcacggcgagagcaatagctgttga

SEQ ID NO: 190858 - DNA, 426 bp, Arabidopsis thaliana landsberg
atggcgcttgatccacccaccttgctttctatctccattgccctggctggcgcggccgggttgtacctggcgatcgagtggcgcagcgttcgcgattcatcgctgctgttctggagtgcaggctttgccaccatcacgattggttccaccctggccttgctgcgcggcatcggtctggtgctgatcggtatctggttcgccaacggtttgctggtggtggcgcactggttcttcctgatgggggtgttgcgcttcacccaggtgcggctgtcgcgtatctggttatcggtcgtgctggtgtggttcgccttgctgctgttgcctgtggggccgcagtggtcgaaggtaatgctgatggtcaactcgttgctggtggcgctgttgacgctcaaggccagctggctgttgcggccgcatggcaagttc

SEQ ID NO: 190859 - DNA, 267 bp, Arabidopsis thaliana landsberg
agtgatctaaagctagatttttcgagagagaatctaaggaaattccgacaacagaagaagggagtataccggagagctcgccaatcaccgccggagcgatggagtaaaattggtacgattttgaaaaagagaagcgtggtggaagaatttcggattaggattttgatagtgtgtaaacgacggtggtcgatccatgagctccgacgacggcgaacttcactgagtttgtgtgtgattcgaaaacgtaacgtttcatgtttagcatag

SEQ ID NO: 190860 - DNA, 674 bp, Arabidopsis thaliana landsberg
actttggttctaaatcccttaactttggattaactgtcaatctacaattttatattaacagagatagcttagcaatggagcagtcagaagagggtcaacagcaacagcaacagggagtgatggattatgtacctcctcatgcttatcagagtgggccagtaaatgcagcttcccatatggcattccaacaagctcaccacttccaccaccaccatcagcagcaacaacagcagcagcttcagatgttctgggctaaccaaatgcaagagatcgagcataccactgatttcaagaaccacacccttcccctagcccgcatcaagaagatcatgaaagctgatgaagatgtgaggatgatctctgcggaggctcctgtgatttttgccaaggcctgtgagatgttcattttggagctcactctacgtgcttggatccacaccgaggagaacaagaggaggaccttgcagaagaacgacatcgccgctgccatttccaggaccgacgtgtttgatttccttgtggacataatcccgagggacgagctgaaagaagaaggcttaggcgtgaccaaagggaccataccatcggtggtgggttccccgccatactattacttgcaacaacaggggatgatgcaacactggccccaggagcaacaccctgatgagtcttaa

SEQ ID NO: 190861 - DNA, 283 bp, Arabidopsis thaliana landsberg
  unsure (1)..(283): unsure at all n locations
atggctgttgaccaagacgttttaagttcctggtcctatctcaacgtagctactgataggtaaaatctcaacnnnnnnnnnnnnnnnnnnnnnnnnnnnnnnnnnnnnnnnnnnnnnnnnnntagctgtgtatggtctcagtgacaaggttgggctactctcgtttccaccaagggatgatggctacgacttctctaaaccatacagcaacaaaaccggtgctatcatagacgaagaagttagggactgggtggccaaagctcatgagcggaccgtagagctg

SEQ ID NO: 190862 - DNA, 494 bp, Arabidopsis thaliana landsberg
atggccatattaaaactaggtaaacgacaaatcagtaagttgaaatatataggaacatgcaaaagagtaggacagaaacaagatttggttgagacttgagaaataggttaggttatggccttttgggctgaagaataggctagattatgagcaaactattagaagaaaaacacaagtttcggtctggatgtagaaccaatcagaaacacttacattatgtcaacgagcagcacttatttatgtatttaaatgtgaggcataaactagtcgattacaagttaacaactattctattcatccaaaaagaaaatagaacactttctaagatatcactggcagtaacatcctccaatatcatagttacaataaccaccatttccaccacatgtactaaagcacatttcgtccgaccagcacggcggtccgctattgatcactgcgtttggcaaccaacaaacgcacttaccgtttttgttgcagagaccaccgtgtga

SEQ ID NO: 190863 - DNA, 91 bp, Arabidopsis thaliana landsberg
tgacggcgaattaaaagagtcaaagacaatgaatttggaccgttcgattttttatctggtataccaaatcaacggtacagatcttgtttaa

SEQ ID NO: 190864 - DNA, 130 bp, Arabidopsis thaliana landsberg
atgaataacgatcccctccccaccgcgctcctgcaccagcgcgcgcaagacacggcccgcctgctgcaggcgctggcccaccccacgcgcctgctggtgctgtgccgcctgttccgtcagggcgaggcca

SEQ ID NO: 190865 - DNA, 135 bp, Arabidopsis thaliana landsberg
agtatatgcatcggacctatactatacgatgcttattttccacaaggcaatgtctctgaccgctatacacaaagtctaaaacgatcacatcacttccccaatccaaaccgtctacaagggaccaactcccttacg

SEQ ID NO: 190866 - DNA, 437 bp, Arabidopsis thaliana landsberg
atggggcacctctctctcctcgctgactacagcaacgtactagtcgatatcctcgccggatctccaccaccggacaggtcgctgttaccggagtcttacttcaacgtctcagaatccgacgactctccttcgtcggagctgacgatccgtttcgcttggatcatcctcgtcctcctttgtaaaatcgatcgtaaatcaattcactacaaagacttctctatacagtatctcttcctcaccaacaatctccagcacgtggtctcacgtgctcgttcctcaaacctgaagaaccttctcggcgaggattggatcacgagacatttcgctaagatgagacaattcgccggcagctataagcggctagcttggggaccggtggttgctactttacctgagaatcgtacggtggagatgacgccggaggaagtgaatgagcg

SEQ ID NO: 190867 - DNA, 312 bp, Arabidopsis thaliana landsberg
atggacgccacgacgatcgctttcgaaatcggcaagaagcagggcgaattctgctcgaagaaggatcgcaagagcctgctcgccgctgccggaatcgatgtcggcacgaacggaatcgtggaggctttcgccgcgggtcaggccgctgcggtcgcggaaaagaaggcgacgaaggtcgccccgaaagctgccgaaccgacgcccgcgaccttcgccgaacgaagcggcgaggctgatccggcgctcggtcgctggattcacccgccaccggcgagaatcgcgtctacgtcaacgattcgcgactgtggcgag

SEQ ID NO: 190868 - DNA, 1013 bp, Arabidopsis thaliana landsberg
atgacacgttcaaaggctaaacaactgaagaaaatgttcaacttagctgtgcaagatattttgagctccctagagctaggagtaaactggtccgtagcaccccataccggatatgatctaatagccgaagaagagcttgctgaagcattcacccaaatgagtcttgaacgaactactcccccaggtatgaaatatcgtttgacaggttcaaggacctctagaaaccaagagaagactttggagcttcaagagatagacgattcaagtgtcacatctgaaagtgatcgagagagtcaagatcgagagcaagacatcaaggacatggaaaagcacgaagacatttatcaagctactcaagaggaactccagaaagacccctacttcaagtaaccagccagcaaacaagcacaagacttgattccagaagtacctcaagaagtactacaggaagtgactcaggcgtcatctattgggcctaaaacgcatctaggtaaggtttattcagtttatattatctttgcaggtccaaaaagcccagacaatggctagagtcaccctcaatcgtgctcctcaagagaacttaattagtttccttattttagcttattttctttcaaaaaacaatggtttttgtgttttgattatatttgcttccttgttgcatttttacatttaatttcggtcctagggctagctgaaggactcttataaagtccccctgcagcagttgtacgatttttacctttgattatcagtaaaaaaaccgcattttctcacttcttctctttaagtgttcttaagagaataaccttgttctttgtcttgtgtgtgcgattcaccaaggtcaagttcgtgtactgtatcaaagactcatcacatctctgtggtgtacttcaatccgccagcacttcccctccattagatcccacacgagagaagcgatcgccatcgtgttagatctccatcatcgaccatctttccttcacaagagaaaagcgaccgccaatttgtga

SEQ ID NO: 190869 - DNA, 762 bp, Arabidopsis thaliana landsberg
atggaccacgtacgataccaactcacaaagatggtaacgtgagtacttaattagttagaatatgttaatattttaatcgataagatacatgaatatttggttttgaaaacatacaaacatccagttataatccgtatatattcttgactttgggtgagttaaatatatacatgggtgcaataataagtattatatgtaatggactaatgatctcccaaaaaaatggaaaattgtaaaattgaaactcatctagatctcaaagttcaaagaatgttagaaattaaaacttaaaatgtagaagttgagaaacgcatgaagtattaggagagcatgtgagtcagttgagacagttggagagtccccgcttggttacgacaattttcttggtttcgatttgtggtccgaaacatcgaccccttccctctgcttctttgttttttcctttcttattttcctttttttgacgcatttcagtactataaagattcactgtatatgactatatggtttaccaagtggacagaagttcggttatacgtgttacgttaacatttcagaattatcattgttttacaaaaattctagtactatttactttctctttttgtctatgttatataaatattggaaaatattactcactagtggctcattgggtacaacaacgctccttttatccttgtgaagtttcagctttgatgtcttttcttttattcttctagattcacgggttcaataaccaagatcgtggtactcttctga

SEQ ID NO: 190870 - DNA, 389 bp, Arabidopsis thaliana landsberg
atgccggccatccgggaaatccacttaaaccgaccgctttcccgctccgagacctccgatggcaatcctctcggaattccggtgccacgacaaatgcttcctggtacgagcaatggcagagacaaagtgtgcattcatcgcgattcgcgctgcatctttgtctttctggataatggcgtccgcaatgccaaggtgaagctgcaggacttgcccccattcatccgcttcgtacacaagcttcagacctgcctcgcaggagtgggctaccgcggaactgataccgtccaacaaattcctgataagcgaatttctcgatgcgtcgacaataatgcgatgcagatgttggtcgtgaatcgagaactcatcatcggccacatgttttttcaact

SEQ ID NO: 190871 - DNA, 480 bp, Arabidopsis thaliana landsberg
atgttatcggcatcgccgaacacactagcgaaaagttcgttagaggagatgcttgagtctcttcgtcagaaagatgagtgtgatcggcctaaagatatgcctccggcgcttccttctcggcctaattcaagagctcgtcttccttctgctcgtcgttcgcttccggccaactttaatgtttctagtgtaatggaagatcagaacggaagtgttgtttctgtgacgcctgcggtggaagctgaatcggaaaggaaagaggaaggggtgaagaggaaagagaaggatttgggtgttaagaggaatagttttggaagcaagaaaatgaggactggtcttaggtcagagtctccgtatgcagcagagaaggaagaggagggtgtgaagattagtatcgctaaagttagtttggtggagaacacggaggagcataataagcctgagtctgagtggaacaataacgttgagtacttcatcaagaag

SEQ ID NO: 190872 - DNA, 926 bp, Arabidopsis thaliana landsberg
atgaaagaggcgatcagaatggtactcgaatccatttacgatcccgagtttccagacacatcgcatttccgctcgggtcaaggctgccactcggtcctaagacggatcaaagaagagtggggaatctctcgctggtttttagaattcgacatcaggaagtgttttcacaccatcgaccgacatcgactcatccaaattttgaaggaagagatcgacgatcccaagttcttttactcggcttttaaggcaataaatgataaactcagttttaattttaatttgatattaaaaaaaaacatatgtatggacaagacccaagaaatcaatacataaaaggtcaaagtgtaacataacatactaaaagtctttctcaagcttaacctttatatggttgctatttgtaatgatatgggacttaatattctccatctctttatgtatctccttggaggatacacatgctacgatttctgaggaattcttcatctctgctccagatttcattctattctcaatgtttctacgagccaacgagaacaatgctacagccctgacaattcatgattaattctattttagaaaagaagaaagtttataaggccaaaaccggttcatacgagttttatatcaaaaacatacatacctttcaaaaaaacttcccgtttctacatgttctctcgtatatttggctggattattacactttcctttacaataattaataacatcgtataatatacatatacaggaatgataaaaacctatgtgtgatctaataaagaaacttgcccgtttgttaggatatgtgatttgatattctccatctgtcgtcgtatctcctcagatacaaatgcaaagctattcttcttatcgatgttctgatgagccgacgcgaacaacgcaacggccctatgactttaaattga

SEQ ID NO: 190873 - DNA, 1712 bp, Arabidopsis thaliana landsberg
atgttaagcaaggagagagaccatccggttagtcatcacaaccaaggtgacattgttcttaacctatctttctcacaaattcatccctatgctcattctcacactggggacggtgtgacgtaagtatggggggttaatgaatccgttactactaatgctactcattattttgttgacttgagacctttatccactttttacactgatacgctctaacaaagcaaaaagcttttattttcagtttttatttcttttcaaggtaccattgggcaaggacaatgtagggaacaatgaacctactatatgattaataagaccattacaatgtgctaactcataccctaagtgacaagttttgcaggactcacaaggacggacaatacctagaaacccactaccgtatctatcccctgaattctcactacagagactctgtttgacctaacgttaactctattttatttggacgaattaacctaaccttaattctttctcatgaaggggtgttagagcggggaaacgagcatatacattcatgacttcttatccctttttactactctctgctgatcttgaatggccactcatttttagtggttcctacccttaaaccctatccttttttcaagcctcatgcattctcttttcctttttcatttagcagatatgtgcaaaaacgttggagagaaaggaacaacacagtttcccgccacaaaaacaaaaatgaagcaaaaataagagattgcaacaaacggcctaagagtttattcttccttggaaccaattcaaaaggtaagctcattagactcggtgtttcgaagttttgtttccccttccataaaaataaaaaaaaaataaaaaaaataaaaaagaaaaggaaggaaaggaaacattacaaccaagagagtctagtggcatagttcgaagaaaagacatggaaacttaaaggagagatgagccaattgcagtagagggccccctcagaaaaacctaagtctaggggaaccgaaagtaagaaagaagtaaaggagaaagaggtgtttaatagaagacgtggttggaaactgtggacctcaaccaatctgttagctcttgcgattttgcaacatatcctgcattcgagactatacgataactctaaacactttaactccaccacttaaacaccaaaatcccctttcataccaagcgccgtctaccccgaatgacaccttctaatgagaaagtccatgccaaatcatttaaagaatgtaaagagttgactgacgtgaattaagagttctgtaggatcaaagcggatgcacaaggacaaaaaaggggtaggactattgagcggccattctaacgcaacttttgtttatgtggtctgtaagatataattgagacacggtcactgataacaggagagttcccacgatattcaaacctctccaccagatttgttcttttattggcttgaggacaagcaaagtctacgtttgcgggagttgataacacgacttttagcccgttctagctattgatttcttatgtttcagagagaatttggtgccattctagagccaaataagaggataaacacgtattttaggtgcaaagaaggttttaagagttttgaagcaaaaggtatcgaaaggcaatcattccagtacttcagaagtttagcatccggccgacgtcttccccatcacggcaaggagatatttctgtat

SEQ ID NO: 190874 - DNA, 569 bp, Arabidopsis thaliana landsberg
gagcagtttggagtgtgctgttcattgcctggggctgcaaggtgcccccgtgtacatagacatcaggtaaatatgaatgtttgtaaacctgacctactagcctagcttcttctgaaattccaaatgctaaagattggttctttttcataacagtgcaaaagttcttgtcttaatttaattacaaatatggtgtaggtggtggatacattggtcactcttctctgccgagaaaacatatctgcagaaacattatgggatggaggatggcttttacgccaattgcttccttatagtgaggcagaatttaatcgtaaacatctcaagatgctgaatgtatgttgctttcaagatgtttttttggtttgccactgtttctctttcccctctccctctcttgattatttacctcctgcttatcgcaggtttcgtatgagaaatgcaaaaattcccttaccggggaaattaaaggtatctggcctgatctactcatcagggtactgcttgatgagtggagaaagtgcaaaagaggcaagtaaagaagcgaattttggatacgttggatttcgttt

SEQ ID NO: 190875 - DNA, 178 bp, Arabidopsis thaliana landsberg
actgtttctttaccgtctgatctccatatctggcgctcatcgaccgacctcgcaaaaacaagaggaaccaaagacgcatggattttcagggcagtgcgaacctgtagattgcgaattccaaaaacaaacaatgtacccaccgttaaatacatctatatgcaattcggagcacacatag

SEQ ID NO: 190876 - DNA, 115 bp, Arabidopsis thaliana landsberg
aggcaacgaaggatgggtaaatgcagatgttgatgatgattcggtgactgtggggatcactgaagacaatggtacaagacaaaaggggagagagagagagagagttgagaagtga

SEQ ID NO: 190877 - DNA, 64 bp, Arabidopsis thaliana landsberg
ggaaccagcttcaagtcctcttgtaccgatcatcggcaagggagtgctagaggaggaggttatg

SEQ ID NO: 190878 - DNA, 368 bp, Arabidopsis thaliana landsberg
atatacctgctataacacccccaaaccgctctaggccaagaacaaatccggaagcatcacggttgactcccgcagccggcaaacccaggttcactgaatacgaccgctcgcccgaagttgtccaaccgcgagaaatacgtttacctttctatcacggcctaaggctttgcaacccgtaccgtgatacgcgagttatgatagtcggcgacaggactaattatatcatgggagacacgagatttactaaaataagagctttattactatcaatgaaaatatcgagttataccacctatacgcaaaacctatatctttacaaagacaatgcaaactacaccggttggcctaacatccttcgctcccactaa

SEQ ID NO: 190879 - DNA, 1058 bp, Arabidopsis thaliana landsberg
atgaaagagccagggagaagagatgaggttggtattttacaggtagctttgtcttgtttgtattgtggaatttaactaagtaattctcctattgttgtgggaactggtgatagagttgatgtctagctcacaaggtccatgggcccttgtgtctccccaagatggaagttaaagccagcctccatttagtaggatgtaatgggttgacattaaagtagatgccttggttttcggtttctgtaatgggttgactttaaaatagatgccttgcctagagtcattagttaacatcttgtcatgttgtttaattcagctttcacagtctgagtccctttcttggttttcactctcttgattccttttccaatttcctcttttgcagaacaaatatcatcctagctcactgaaccatcaacggtatggatcataagtatactgtttttggtagataattagtgtcctgttaaaatctttatctccgtcttaatatttgccaatatgtaaccaaacttctacttatatatcagttttagctatctagttttctggctacaataaacctctctgtgctcagtaggtaactctctgattcttgtatattcttttgctgacagacaggcaggagtccgcattttgaagaatagcaaaaaaattactgatgttcatcaggaggataacgttagtcttgcacataattggttcattctgtttttcaagatattgctcagcagctgcttattattatatttacctattgcaggttgaagccagaagctcaagttgtagctgtgagttcctttttgggaaaaacttttttattttacttacagaaccatgatgaactcttttctgcttcctttttgacaagaaaatgtttcctgacatgtgtctcatcacgtgttataatgacagtggacaacatgtctgaacgtgtaaagccgatagaacaagagaaaatgccggaaccttctagtaatggttttcacgatgctacggagagaccctcgtcaactgaaaatttttcatcacagagcactactgtggatgaaaactcaaaa

SEQ ID NO: 190880 - DNA, 321 bp, Arabidopsis thaliana landsberg
gtggaactggatattgatgtgaaggctgtcttgtatgatactaaacaatcatcctacaattgttccttcagcaatggcgagtgctcattcaaaatgaatgaaaggtaccctgttgaaaattatgctgtcgtaacttcaccagcactgggtcaggtatgtactcgtaatacgaaacactaacaatattgttactgttattattattatgactcttagctgaatgaatgtttgtctcactgccttagggagtatccatcgatgatgaatggtatatcgagttgtcacatcaacctagattgattgcatatggaagcttcacag

SEQ ID NO: 190881 - DNA, 133 bp, Arabidopsis thaliana landsberg
atgatgaagttattgtcgaagcttcttcacatgaagatgatgcccagatatcggacttttataattctgatttggttgatcccatcgtacttcctcacatcaaagctattgcaaacgccatgtttgcttgcga

SEQ ID NO: 190882 - DNA, 743 bp, Arabidopsis thaliana landsberg
tgtccggattctcaaactccacggagaatggatctgcatagcctcgctttgatcctccgaaccgccgctcttagccctattcccgatgagcgtaaagtttctgagcagcaactcaatcaggtttctcagtttccacttcaatttctctttcgatgtatttacacggttgcttggtcgcgagtttgattgttcttattctgctagtagtatcttaaagtttgagctgagttcatgtatagagtttccttataagttcactttctggttttactgaagatagttcaaagattcccactctttttgaacaaatcgttatttgctttaattcactgtagccagatttcagtggtgtttactatttctaatgatcaattaaagttatgcagtttctgatgcctgagtttctcgttattcttttgtcttgcagttggagcacacgccccagcatttggtgaggttattgcagatagccgtggatggaaattgtgacatggcagtgcgtcaaattgctagtattcagttcaaaaatttaattgctaagaactggtcacctgaggattgtggtaataattttgtattctaattatcttgtctcggcttagcgtttggaagatctttagattaatttgcatatttgatggtgcaggtcctgcagtaaggcagcagcagatatttgagagtgtcaaagaattgatgagggacaatattctcgtctatgtcacccaagttccaaccttactcag

SEQ ID NO: 190883 - DNA, 277 bp, Arabidopsis thaliana landsberg
atgagcgagtaccccggcaacgatcccgaccacaacgacgcggcgcccgcaccatcgcccgaatcagcccctgagtcggcgaccgaatcggccgacgcgaagcctgaggcgacggcgccgatcttcaaccccacgagtgcgcagccgggcgctgaccagcagtacccgccgcaatacccgcagccgcagcagtacggccagccctacgggcagcagacgcagtacggacagtacgggcagcagcagcagtacgggcagccctacggtcagcaccccg

SEQ ID NO: 190884 - DNA, 454 bp, Arabidopsis thaliana landsberg
atgctctacatgcccgcctcggtgaaggtgaagaaaggtcagaccgtacgcttctccattcgcaacggcggcgagaccgaccatgaattcgtcctcgatacccaggacgagatcatggagcacaagaaagtcatggagaagttccccgagatggaacacgacgacccgaactccgtgcgcctcgcgcccggcaagtcgggcgagatcatctggaagtttaccaagtcgggaacgctcacgttcgcctgcctgatccctggccattacgaggcgggcatgcatggtgccgtcgacgtcacggcgaagaagtaacccccaagaaaggagcacaagaatgcgcaaaatcatcaatctggcggtcgccgccaccctcacgttggcctttgccgggaccgcctttgcggccgagttcaccaagggcaagatcaagaagctcgacgagaaggccggaaag

SEQ ID NO: 190885 - DNA, 1080 bp, Arabidopsis thaliana landsberg
gatggaacacatttgctggagtcacaacagcgagcttgtacgttagaagcagaacttgcattgctacttagaattagtcacaagtacggaaagtctggaggccaggttctgttctccatgggtgcgctggaacatattgcttcatgtagagctatcagctttaaggtaatagattatctgtacttatcaagttttctatccgtgacctcaatattttctctgcttttaatccgaaaagtgccttccagggaaatatgagacgtgtggatatgaaacttcagagtgatgtaggatataatgtgcaaaagcaacgaacgataatcactgctgtcctaagactggtgtttgctctgacctcattggttgagacctctgaattttttgaggtcagccgcgtttctttagatgaccttttttatgatcctttgcattgctaattcaatagtctcttccatatgtattggcctggtttagtgaacatgagttgccatttaaacactatcctcgagatcgtttagggcctttctaagactttgcagtttttatattcttacttgtgatttatttgaggagttgtgtgagagtaatacagaccttctaaaattgaatgacagacaccaagttcattttgcgtgagatatgaaattagtattattgcgcttttctctttcactaaaactaatggttgtttgcgtcttgtagaaacttgaatgatgtcactatttttccattgctattgtttacacctttaatgcctaaacaagtagaagcttaatcaaacattctgcatttcaatattagattcttttcacctattctttaatctattcaactaattatgcaagtccgtgttgtcgattattctgggtaactggttttcttggtatgcgaactataatgagttatttcctctttctctacctgggcgtttgataggggaggaataaaattgttcgtgacgtcgttgagtttatcaaaggacatcaatctctgtttgaccaacttcttcgtgaagactttactcaagcagatgatttattgatggagcaaattattcttgcagtgggaatattgagcaag

SEQ ID NO: 190886 - DNA, 200 bp, Arabidopsis thaliana landsberg
tgcttacggcgccgccggctgctgctcatacccctgtgcgtaacatccgcgtgccagaccgcatgcctcactggcgcccgcctcctcagacttggctccgtcactgctgatggatttggcagttgcaggagctgttctacatcgcacgacgacagacgctggcggcttgcgggaggcgtcttggggtcgcacccgccacg

SEQ ID NO: 190887 - DNA, 425 bp, Arabidopsis thaliana landsberg
atgactaaaatcgaattgaaaccatcatatctcagttcacatcacatctatcaagaccttgacgagttcatcacacatactgagttttgtcgattgttgagcgaaaggatcgttttggattgtgctcatattccccaaccttttagtgtgtccttatacgtggaagtgacaagagatgttatgttctcgtctattgctgttaggtcgagagatacgtttcaaagattgcttgaggaacaaacaatggaattgactgatttgggagatgaagaagaaaccacttgttcgatttgtttggaggacttttcggagagtcatgatgataacatcattctgttacctgactgtttccatttgctcccccaaaattgtatctttgagtggcttaagagtaaaaggtcgtgtcctttgtgtcgacgagtacc

SEQ ID NO: 190888 - DNA, 306 bp, Arabidopsis thaliana landsberg
  unsure (1)..(306): unsure at all n locations
atgacggagacgaggattccgacggagattcgaggtatctatcgactccatagacggaagaagcgacatggagattctcatggtagatcggcgggaacacaacgccatcgtccttgnnnnnnnnnnnnnnnnnnnnnnnnnnnnnnnnnnnnnnnnnnnnnnnnnnnnnnnnnntcaggtgttgttcacaataatgatcttcatcttcagccatcttcagttggatttgctggaggaattatctcgctagggtttgcttgtgagaaagaaacagttggaggaagaagaagaaggacaaatccatga

SEQ ID NO: 190889 - DNA, 99 bp, Arabidopsis thaliana landsberg
gtttgaaggatgagtaccagccaacccttggtatcgtccattaccacgagaccttaacccaccccctcgctgctcccccattacatgtcccggtaaaaa

SEQ ID NO: 190890 - DNA, 695 bp, Arabidopsis thaliana landsberg
  unsure (1)..(695): unsure at all n locations
gtcatacttcttctgataatcctttagtcactcatgctcaagctgcaaaactgttgaactcgctcttgaaagtgcgccaagcttgctgccaccctcaagtaggaagttcaggtttacgctctttgcatcaaagtccaatgaccatggaagaaattttaatggtgattttgcaagatttagcgttttaatctccgtcacttatttgtgctaattgaagtttttcttaggtccttgtgaaaaagacccagagcgagggagaagaatctcttagagtgttaattgttgcattaaatgggattgctgctattgccatgcttaagcaagaattttctgaagctgtgtccttatacaaggaagcattaagtataactgaagaacacgccgaggattttcgtcttgatccattgttaaatattcacattcttcacaatttagctgagatactaccaatggccaaaagctacggtggaaaactttctgcatcaggaaggcctgaaacaaaaatagatgnnnnnnnnnnnnnnnnnnnnnnnnnnnnnaagaggcaaaggatcaatgagctcgagagtttaactcatgattcttcagaaactgtacatcagcgggaagctattgctccagacaatggtttaaagaaggatggagagtgtcatgaagaatgcaaaagtctggatatagtttgtgacacactgaag

SEQ ID NO: 190891 - DNA, 131 bp, Arabidopsis thaliana landsberg
ctcagaatccactaatgaatatgtgccttccgcctatcatttctgaagattcttaccatgagtttatgatttgtgatggccgtatgcatcgctatcgggggagatctgacatcgagctcaactatatctga

SEQ ID NO: 190892 - DNA, 133 bp, Arabidopsis thaliana landsberg
atgagtgagaatcgaacgaacctggaggcgttgaatcgcttgttggaatgtaggaacagacaccgcgcgggtaacatcatcgtcgggattacgataggattggtgatgaacagcggcggaggaaacggcggag

SEQ ID NO: 190893 - DNA, 189 bp, Arabidopsis thaliana landsberg
aacggtggtaaaaatgtaacaggatcttgggagatgtgttcatgggcaaataccacaccgtatttgactttggtaacgaacaggtcgggtttgcagaggcagcctaaacacgatcgggttggtgtcgcgtatggttttagtatgaacaatctgcgtctcaagtgttgtttgtatgttttctggagttga

SEQ ID NO: 190894 - DNA, 415 bp, Arabidopsis thaliana landsberg
gcgaggccctgcagatcgacgctgccaacgcggcccgatacgcgccgattgtgaagatggtcgacagcgtcgacatgcagaagctcgccgcggcctatcgccgctactacccgctgttccaggacgcgtacgaccgtctcggcaatccacgggcgcgctacttcaacgatcgtttgatcgacatcatcgatcaccttctcgccacgcctgtggtggccgagccgattccgctcgtgcggcccaaggtcctttacctattcgccgacccggaactcgagcagcgctcgtcgggacaaaaggcgatgctgcggatgggacgggagaacgccgcgagactgcaggcacgtctgcgcgagttccggtccgccatcgcgcagaagcctccggcgaaccgaaagccagcttttcggcttgg

SEQ ID NO: 190895 - DNA, 452 bp, Arabidopsis thaliana landsberg
gatggaagcctgctttgcactatgagtggtcataaatctgtagtctcaacgcttgttgtggtaaatggagtactatacagtggaagttgggatggaaccgttcgtttgtggagtctaagtgacaacagtttgttgacagtgttgggggaagagactccaggtattgtaagatctattctgtctctagctgcagacgatcaaactctagttgcagcttatcaaaacggagatatacaggtctatatgtttccttaaaaacaatttacttgatgtgcttcatttcaatcgtattgccagtctctaaacctgaacccttctgattccttttccagatatggagggatgatacattgatgaagtcaatgaaaatacagaatggcgcaatcctcagcattgccgtgaatggtaaatggctattcactggaggttgggacaaaaccatcaatgtacag

SEQ ID NO: 190896 - DNA, 396 bp, Arabidopsis thaliana landsberg
cctaacgagttagaccaactgaaagagaggatggagaaagttcgaaatgttttccgtgatgtggacactaccgagtttgttattgtaaccatcccaacggtaacaccattcttttacttgttcctaaagatcattaatttgtattaagaagaacacctggcttggaaattatcttcttggaatcctgggtacatttggttacatattcacttggctattatatttccctttaggttatggcaataaacgagtcttcaaggtgacatgcatctttaagaaaagaaaatgtgccagtccaccggcttattgttaatcagcttctacctcaatctgaatccgattgcaaatttggctcaataagacgaaaggtatatacaaactctctgcaagccaaag

SEQ ID NO: 190897 - DNA, 92 bp, Arabidopsis thaliana landsberg
aatcattcctgaatctcataattcaaacggaacgggtcactgtgtttacggatcgggtagataccaacccagttattaatatctccaattcg

SEQ ID NO: 190898 - DNA, 1291 bp, Arabidopsis thaliana landsberg
atggatttaaaactaaacactaaactaattattctcatcacatccttagcttttcctttcatgctttatgctctcttcaaatggttcttgaaagagcaaggttcattggctgctacgaagctgccacagagccctccagctttaccattcattggccaccttcatttgataggcaaagtattgcctgtctcattccaaagtttagctcacaagtatggcccactcatagagatacgtctcggtgcttctaagtgcgttgtggtctcaagctcttcggtggcgagagagattttcaaggagcaagagcttaatttctcctcgagacctgagtttggttctgcagagtatttcaagtatagagggtccaggtttgtccttgcgcagtatggagattactggaggttcatgaagaagctgtgcatgactaagcttcttgctgttccacagctggagaaattcgctgacatccgtgaggagcgagaaactgaagctggtcgattctgtggctaagtgttgcagagaagggttgccttgtgacttgagtagccagttcataaaatacaccaacaatgtaatctgcaggatggcgatgagcaccaggtgttcaggtactgataatgaagcagaagagataagggagctggtgaagaaaagtttggagcttgcggggaagatcagtgtaggagatgtgttggggccattgaaagtaatggacttttctgggaacgggaagaagttagtggctgtaatggagaaatatgacctgcttgtagagagaattatgaaggaacgtgaggcaaaggcaaagaagaaagatggtaccagaaaggatattttggatatattgttggaaacttacagagatcccactgctgaaatgaagataacgaggaatgacatgaaatctttcctgctggtatgtttcctcccacctgcaatcagaatccaattttcaatttgattattttgatgtgataaaactgtgtgttgcgtgaaacttctctaggatgttttcatggcgggaacagatacatcagcagcagcaatgcagtgggcaatggggcaactaataaaccatccacaagcgttcaacaagttacgagaagagatcaataacgttgttggaagtaaaagactggtgaaagaatcagatgttcctaaccttccttacctccgagctgtcctaagggaaactctgaggctccacccttcagctcctctgatcataagagaatgcgcagaagactgccaggtgaacgggtaccttgtcaagtcaaaaacccgtgtactc

SEQ ID NO: 190899 - DNA, 132 bp, Arabidopsis thaliana landsberg
atgtggttccgctcattagacatcgaaaatggtcaaaatgcagttgctacggttgtaccgctccaaccgcggaaacagaaccctatatcattgcttaaattttgcaacaaaattaaacacaggtttaacagt

SEQ ID NO: 190900 - DNA, 132 bp, Arabidopsis thaliana landsberg
aactcctccgaatttctctcctttgcaaacccccaaatcagatttctccggtcgtcaatctacccgattcgtctcccccgccaccaataaccaccgtcaaaccaggcaaaacccaatctacaaccaccgtcc

SEQ ID NO: 190901 - DNA, 241 bp, Arabidopsis thaliana landsberg
aagaagagctgctttaactattgacgaaggagagtttgggaacagaaatgatcagggcttggagatgcttgaagctaatccgttggaattcacaccagacgttgaaagacgagtgaacgaggggtttaaagcatggatgggaccatctttattatcatctgatgaagaagaagacgaacctgacttttacaatgaagtgccgaatgtaactcatactctttcaagcaggcaaagatcttga

SEQ ID NO: 190902 - DNA, 112 bp, Arabidopsis thaliana landsberg
acttgagatctttacaattgctccaatatcatcacgacgagaaggtggtatagtcatggagataaccgtcggagaaatgggtcgaaaggaaaccacatcgtcggaaaaatag

SEQ ID NO: 190903 - DNA, 211 bp, Arabidopsis thaliana landsberg
atgatagtaggaccaacaaagacattgttcatggatgagatatcgacaggtctagacagttcaacaacgtaccaaatagtgaaatgccttcaagagattgttcggttcacggacgcaacggttctcatgtccttattacaaccagctcctgaaacgttcgaacttttcgatgacatcattctattgtctgaaggacagatcgtgtaccaag

SEQ ID NO: 190904 - DNA, 190 bp, Arabidopsis thaliana landsberg
atgatcgtccattggtgcacaggtgcagtatcatcatcatgccgcagactcttcagttgcgcctatcggcaagcaggtcccctccacggatggtcagtatccgctggagagatatgacaaggtccagttcgttccagatttcaatcgagaagatagctatttccatgcggcaaacgggcgcaaaggccat

SEQ ID NO: 190905 - DNA, 39 bp, Arabidopsis thaliana landsberg
atggtgtctgaagaggaaacagaagatctcactaaccag

SEQ ID NO: 190906 - DNA, 1080 bp, Arabidopsis thaliana landsberg
atggtgacgacggaggttaggaccgccgtctccgataaggaaccattgcaacggtctccagaattagacagctccactggtaaaccctaagtctcactctctatctccgcatcagtttcatagcagatcaatttcaccatcactcaataaaaaatgtagaatcttaagtcacatcattgggatgatttcgtttgcagatttccttgacaacgatagattaaaagaaacattctccagtggagctcttgattttgatgaatggactttgttaatctccgaaatagagacgacttcgttccctgtaagtcgcactcagtgtggtgcaaagttgcgtttctgatttcgtgatctaaaaaattagggttctttgtttaaatttcaaaacttttgttttgataggaactaaaatctaagctttctaattgtaggatgatattgagaagctatgtttagtttatgatgctttcttgttggagtttccattgtgtcatggctattggaggaaatatgcttaccataagataaagttatgcactttagaagatgctgttgaagttttcgaacgagcagtacaagcagctacttactctgtagctgtatggctcgactattgtgctttcgctgttgctgcttatgaagatcctcatgatgttagtaggtatttctgaattttgcgtaggctttgttcttaactttcattataatgtgtaactcaaacaacaatcttactcatcattgcaattgttctaagtagtagactttattttccccatagggctgaaatttgttaagtagtgcagcgtatgtatttgatgacagaaataatgataatttacttcaattcctctatttatatttcattgtggagcactagaggctaatttttggaactgtttttcttacctctggcagattatttgagagggggctttcatttattggaaaagattattcttgctgcactctttgggacaaatatatagaatatcttttgggtcagcagcaatggagttcactggctaatgtatatctccggaccttgaaatatccatccaaaaagttggatctctattacaaaaa

SEQ ID NO: 190907 - DNA, 505 bp, Arabidopsis thaliana landsberg
atgtgtgagacttgtcttttctcgtttgctacaaccaataagtccaatgctgaaacttacagattgttggttggtaaactgggtgaagattctcacttcggatccaagagtgatcgaagcaaatatccaaattgctctaagcttacagattgtacatgttgtaatcagttgtggacgcctcaaatcgctgctactcaggtggctgaacgggaaattctacccaagattggtttgcttggtaaaataagaaccgggaagcagtctgcgcccaagaaaagtgtcagcttcaatcatttgcctgatgttgggtacactgagctaaagattcattcagatactgaatcagaggctgtgttttcagatactgaaccaaagcaagaatcttcacttaaccatttgccacctgttgggtacaatgagcccaagattggtttggttggtgatgtgagaaccgggaaaccatctacacccaagaagagtgtcagctttaatcatttgcatgatg

SEQ ID NO: 190908 - DNA, 142 bp, Arabidopsis thaliana landsberg
atgggtatgccatttgtccctcgctcgcctgacgtgcctctccatcctcctcccccggagattaatgagtggcaccagcagacctatggggtgccatttatgtctgcagacgatgatgaagaagaagcctatgttgatgatc

SEQ ID NO: 190909 - DNA, 1002 bp, Arabidopsis thaliana landsberg
gtatggtgaagaaactaacaggtggatataagatcaaataccacgctaatgggtacgataaagagccaattgaaatcgacttcactcctccatttaggttagtgaaatatctttgttggtcaagacagagttcttctcggtggatttgggaatgatttgatatttctttatttctgtaggagggttgacatgattgtagatttagaaaagatggccaaccttaatataccaaaagacttggctagcaaggaagctaacaagtatctaattgatgtgtgtgagaggtttgatgtcagatgcacacctcctctgacgacagctcatttgttggataaagtaagtttgttatccccttatagtattaaattcgaagttatgtgattagttcatatgcttaatgttttcactgtgcagcttgttggacactttctggaagtgacgtgtgttaaccctactttcataatgaacaaacccaagattatgagtcccttgggaaaatgtgataagccattagtggtttgatatgtttataatttgcatgatttaggcattcattcttcaccactttgtcattgtttcatccacatttcatctcattaggagtcgttttagtgtgttttacatacttaggacgattttgcattaggattgcatgtgcatggcatatttggttgttttcaggtactttggatgcttttggagttcaaacagaggaaaaacagaacatgaagtcagaatgcccaatgacgccttcagcaaaagtactctatcgcagcctcggagccctgccagggcaaatcactctatcgcaaccccggagaagctagcagctcagtttcactcaatcgcgaagccggaggaatcaccccatcagaaccactcgatcaccactcgatcaccaggaagcctatctgctcgttctgcactcaaccagacaagctgagaacaaagaagagaagagaagccgaaggaaccactcgatcaccacctcatgactattag

SEQ ID NO: 190910 - DNA, 54 bp, Arabidopsis thaliana landsberg; identical to SEQ ID NO: 181772

SEQ ID NO: 190911 - DNA, 2870 bp, Arabidopsis thaliana landsberg
atgttggaaaaagggaattatggacactggaaagtgaagatgagagctctcatacgtggtctaggaaaggaagcctggattgctacgagcattggatggaaggctccggtcatcaagggagaagatggagaagatgtgctaaaaactgaagatcaatggaatgatgcagaagaggcaaaggccacagctaattcaagggcactgtctttgatattcaactccgtgaatcaaaatcaattcaagcaaattcaaaactgtgaatcagctaaagaagcatgggataaacttgctaaagcatatgaagggacaagtagtgtcaaaagatccagaatcgacatgttagcatctcagtttgaaaatctcactatggaagaaacagagaacattgaggagttcagtgggaaaatcagtgccatagcgagtgaagcacacaatctaggaaagaaatacaaagataagaaactggtcaagaaactgttgaggtgtctcccatcaaggtttgaaagtaagagaacgaccatgggaacgtcgttggacactgactcaatcgattttgaagaagtagtgggaatgctccaaccatatgaattagaaatcacttccggaaagggaggttactccaaaggacttgctttagctgcatcggcaaagaagaatgagatacaggaattgaaggatacaatgagcatgatggcaaaagacttcagtagagcaatgaggagagttgagaagaaaggattcggaagaaatcagggaactgatagatatcgagaccgaagttcaaaaagggatgagattcaatgtcatgaatgtcaaggatacggacatattaaagctgaatgtccctccttaaagagaaaagatctcaagtgctctgagtgtaatggtcttggacacactaagttcgactgtgttggatcaaagtctaagcctgataaatcctgcagttctgaaagtgaaagtgactcaaatgatggagactcggaagattatataaaaggtatcgtgtcttttgtaggaatcattgaagaaaaagatgaaagttcatacagtgaagcagatggtgacgatgaggacaactcagctgatgaggattctgacatcgaaaaggacgttaacatcaatgaagagttcaggaaactgtatgacagctggttgatgctgagtaaagagaaagttgcctggctggaagagaagctaaaagttcaagaactaacagaaaagctgaaaggagagttaactgctgcaaatcagaagaactctgagctgattcagaaatgcagtgtggctgaagagaaaaacagagaactttccaagagcttagtgacactcgcaagaatatccacatgctgaacagtggaacaaaagatttggatagtatacttgctgctggaagagtgggaaaatcaaattttggtttaggatacaatggtgctggatcaggtacaaagacaaattttgtacgaagcgaagctgctgctccaacaaaaagtcaaacaggttttcgaagcaactatgatgctgttccagcaagacgcgtgtaccagaatcacgatcactatcattcccggagaactgtgacaggttacgaatgttactactgtggaagacatggtcatattcagagatattgctacaggtatgctgctaggttgaataagctgaagagacaaggaaaactatatccatatcaaggaagaacctccaagatgtatgtcagaagggaggatctctattgtcatgtagcatacacctcgattgaagaaggaataaagaaaccatggtattttgacagtggagcatccagacatatgacaggaagtcaatccaatcttgaaaattacacctctgtcaaggaaagtaaagttacttttggaggtgtggataaaggaaaaatcaagggaaaaggtgatttgactaaagcagaaaagcctcagcttacaaatgtgtactttgtcgaagggcttactgcaaatctgattagtgtgagtcagctatgtgatgaagggctgactgtgagtttcaatagtgtaaaatgttgggctacaaacgagaagaaccaaaacactctcactggagttagaactgggaacaattgctacatgtgggaagaacctaaagagtgtcttagagctgaaaaagaggatccagtggtatggcatcaacgtcttggtcacatgaatgcgaggaacatgtcagaaatagtgagcaaggaaatggttagaggagtacaagagctgaaacacatagagaaaattgtgtacgatgcctacaatcaaggtaaacagattagagtccaacacaagagagttgtaggtgttgttgagagaaagaaccagacttttcaagagatggccagagccatgattcatggacatggagttcctgaaaaattctggacagaggctattagtacagcatgttatgtgataaatcatgtttatgtgaggattggaggcacattcgacaagttggtcaaagcgtttgtgaagacaatgacaactaagttcaggttgagtatggtaggcgaacttaagtactttctggggttgcaaatcaatcagattaatgaagggattgttatctcgcaaagcacctatgctcagaacctggtgaaacgcttcgatatgtgttccagcaatccagttgaaactcctatgagcactaccaacctctgcagctgctgtactaaatttctttggatgaaacacatgggtttggattacggtatgtctttttctgaccctttacttgttaaatgtgataatgaaagtgctattgccatatctaagaatccggtacaacactcaatcactaaacacatagctataagacatcattttgttagagaattagttgaagaaaaataa

SEQ ID NO: 190912 - DNA, 342 bp, Arabidopsis thaliana landsberg
ctatttgaatttgcggacaaatacagaggcaaatacgacagcagcattaccgtggcacaaaaatattaccgatccgtcagcggttacaatgtacttaacgcaaactctcttaagtaactaacgaaaacatttgttgctagctattgatattttactagcgcaattttgtataaccaggatgagttactatgggctgctgcgtggttataccaagcaacaaatgataaatactatctagattacctcggcaagaatggcgactcaatgggtggtacgggctggtcgatgaccgaatttggttgggacgttaagtatgctggtgttcaaacccttgtggccaag

SEQ ID NO: 190913 - DNA, 72 bp, Arabidopsis thaliana landsberg
atggtattgaagaagctttgtcatggcaagctcatcgtggtccggttctctccattgccatctcggcttatg

SEQ ID NO: 190914 - DNA, 190 bp, Arabidopsis thaliana landsberg
atgtttattgccaggcaagactcgcaacttgaaccatcaaagctgtttgtcgccgaggagcagcttgtagcgggggaaactttggcggaaccaaccagtcctatgactcgttcgaagactagatttctcaaccaagccgttagcggactacttaaccacttgggcaagaatccatcattcaaaccgtttg

SEQ ID NO: 190915 - DNA, 469 bp, Arabidopsis thaliana landsberg
agaaggcaggatgcgatcacgtgaagattctggcccaagccggagatgtgtttttcattgaagatacaaaagacccctcggccgaagcaaccttggttggtggaaagcttttcaccgacatttgggaaaatggtggccgagggatggctcacgaaattataatgaaaagtgaaaaagatactcacgatgctagagaagcagcaagggcagctgaaaaactgtagaagttgaaaggcaaataggtatttcataattacttttgactttatgttttatttttgtgactttgaacttatttatgttttgcattgcagctgaactatatcctcccccggagcctctcgagtcattagccaatcccgaagcaaaaagtgaagatgaaattagaaagatggccaaagctattatggacaaagttgtaactcaactactaaacgaagctacagaagtagttttaagagaagaatag

SEQ ID NO: 190916 - DNA, 49 bp, Arabidopsis thaliana landsberg
atggaggcagttgtaccagtcgagctcaatgtatcaggattcgtcgaac

SEQ ID NO: 190917 - DNA, 673 bp, Arabidopsis thaliana landsberg
atgaggaatttggcgggtaagcaaagagaaagaggttgaagaagaaaatctggacaaaggagaagggcaaagaaggccgacgagatttattcttgctgggacaaaaagggcaccttcttctctcctcacagttttaggttttacgagggtattatcgtcatttccagatttacacaagtcgtgtttttttttgggctacacaagtcgtattattggacttttccttactagtaaaatagtaagttagtaaaactaaccagattcgagataacttgagaagtactaaaacccacatataatccttggaggaagaagaagaaaccttagatctaatgatccatttggcaaagttttaagaaagaaaaaaatcacctaagcaaatcctagatcttaaagatggtagatgatcaggctgatattccgaacagtgagattgtgccatcttctcatgcaaagtgttcattgatccttcgtgtggcctatcacttccgtcgcaccaatcttcggattgcttacctatgtgagttggtaacaaatatacaatgatatagtgataaaacttgcccatcttctaatctcttgagttgcttattgtttccatcaaggtgttcatggtgcgcttgaggagtcaaaaaagagtaaccccttaatacttgatcgtggtgttccataa

SEQ ID NO: 190918 - DNA, 350 bp, Arabidopsis thaliana landsberg
gtattctattgttccaaagacaaataagtgtttggaagatattgacaagtttatccgggaaaaccattttgatgaatgtggcatcatttattgtctttcaagaatggactgcgaaaaagtcacggaagcattgcaggttggtcgtttgttggcctttctcgtatctgtttaaatggaggtttttacatattgtgagcgtaccacatttgttatgttccaatttcaggtgtttggccataaagcggccttctaccatggcagtatggatcctggtaaacgtgcctttgtacagaaacaatggagcaaggatgaaatcaatataaaatgtgctacagtggcatttggaatgg

SEQ ID NO: 190919 - DNA, 332 bp, Arabidopsis thaliana landsberg
ttgtgaatcaggctagaggagatacatgtatagatggattaggctattgcaacaattgtgacgagagatgcaaggccaagcacggaccatcgagcgaaagcagctgtgatcgtagtgttggggtgccgctgtgccaatgctactacgaatgtgaatctccgccatcaccacccgcgccgccgaagaaatgcgacggtggggctggtatatgtagtcaaagatgtcaaggacaatgttgtgatatgaactgtgcacaaaagtatattggtggacgtggattttgtaatactcttggtacgtttagtgtctgccaatgcgaatatccttgttaa

SEQ ID NO: 190920 - DNA, 607 bp, Arabidopsis thaliana landsberg
tgactgcgaaaaggattcagttcatatatctttgtttttgtaataatcaattgagtctcggtaagtagtttaaccttgattacaaagtttttttattttgcgagatcgattttgtaataactagggtttctggttttacttccctagatgggaacgcttgatcttccccctcgtctcgtagcttttaaggaagaacctcgcggcgagcgagttaatgtgtaccagaagatgaaaatgttgtgtgctatcttcaacgcgcttgacgatgataaacgacatgaactatcgcggtcttctctcggagatcttttggattttcctaacaaatcggcgtggtctcccaattttggaattttctaccggtagagaaaccgaatgagatttggcttctttttgctggtaccccaatccgtttttcattgagggagtttaagattgttactggtttaccttgtggtaagttcccgacaacaaagaagaagaagaaaggcacagttgggaagataaaacttttctacaacaagttgtttagtttagaagatgatgtcactgttgaccgagtaatcgccctgctgaagaagaagattgtttctaatcctgatataag

SEQ ID NO: 190921 - DNA, 291 bp, Arabidopsis thaliana landsberg
gataagggaaagaggaagggcaaggacgcggaccgcaagcagcgcaagaaagacaagaaggagcggcggcgacacaaggaggagaaacgcgcggccgccagggaggccaaggccgagaagaagctcaagcgcaaggccgcacgcgacaccgaagacgccgaggacgacgagggtgcggtcgctcgccaggaccgccgccccagcccggccgcggagggtggcgcgagcaacgcggtcgctcagtctgacaccgaaggaaacgaggaggtgaacttccctcagcgcaagcgg

SEQ ID NO: 190922 - DNA, 113 bp, Arabidopsis thaliana landsberg
agtgtcaacacagccgtgtgacactcggataggttttcttaaaaccctaaataaaggctttgctgagtgcctgtacgcagacactcgacaaatacgtctttaccgagtgccag

SEQ ID NO: 190923 - DNA, 565 bp, Arabidopsis thaliana landsberg
cactggattttttgggacctgtggaaggctcgcaacctcttggtgtttgagaacaggactatcttggaaacggatactttggctaaggttctcggagctgcaagggactggcagtgtgcgcacgtggagtgtaaacctcctcctagcagcagcagtcaaccattacctcttagtgaggtgtctccccccgccttacctcgtactgaggttagtaccaccatcataccttgtattgaggttctgtctccttcttttgctttccctcagtgtgaggctgttttatgtttcacggatgcggcttggaatgcgtcctcgggctcatgcggtatgggatggatcttcaagactcataatcaaagagttatccatcagggctcgtcatctcgactacataccccttcggccctagcggctgaagcacttgcggtaaaagcggcgttgaatgaagcgttgcgaatggacttaacctccatcacagtttactcggactctcaagtcctcatatctctgctcactacagagacctccacgaatgagcttcagggaattcttcacgacatctcct

SEQ ID NO: 190924 - DNA, 268 bp, Arabidopsis thaliana landsberg
atgagagagagtcttgttacaagttacaagtgggagccatgggaccgaggttcttatgtgggggacctacaagccgggcccagcttgaggtccggaggaggagccgaggaagtggtgtgactcttctctttgtgtaaatggtccctttctaaggccacgtgtccccgagccaaaggaaaacaccttctctccgtgtcttattcgtctacgtcgtattcgtatatatgtttttaataacctaacgtcgtcgaacatattatataactaa

SEQ ID NO: 190925 - DNA, 265 bp, Arabidopsis thaliana landsberg
atgagcggtagggctggcctcaccgtcggcgatcagcggctcgatcggcaccggcgcgcggcgcggcatcctgatcaagggcggctcgcatctgtatcagaccgcccgggtgtacgccctcgtgttgacaagacacgggacactgtccgtcgggcgcccggtcgtccccaagatcgttgctgttcacaaggattgggagacccagcaggaactcgcctatgcggccagttcggaaaaacactcgcgtacaccgttggccgagacg

SEQ ID NO: 190926 - DNA, 343 bp, Arabidopsis thaliana landsberg
atgtatgcttccaagacctaccttgacctggtgcgtcagtatcccatggatgtgcgcaacaaattcatcgagcctaactacaataccaattccaccaagatatgggccttgtatgtagataacaatgccaaatatgtacctgtggtggtgcagaaagtaggcaacgattaccaggtggtatcatcaggcgccatgctcgagaagcagacaaatatcaatggtgattatgattatttcattacacctgccggcatgagcaaacaaaaagtgatcattgaacgcgagatgaacctccgcaatggctatccccagttctttatcacaaaatgttccaggcaggaag

SEQ ID NO: 190927 - DNA, 306 bp, Arabidopsis thaliana landsberg
gcggtcgccacccagaagatcggcccggtgaaggcccgcttcaaaggcaaggtgaacctgaccgacctcgacccgccgaacggttaccggatcgtcggcgagggcgacggcggcattgccggcttcgccaagggcggggcgacggtggcgctgaccgacaaggatggcggcacgctgctcacctacaatgtcgaggcccagatcggcggcaaactcgcccagctcggccagcggctggtcaatggcgcggccaagaaggtcgcggacgactttttccagaaattcgccaacgagttcgccggctga

SEQ ID NO: 190928 - DNA, 536 bp, Arabidopsis thaliana landsberg
atgacagacaggctgctgccgcataagacgatagatgtgctggatgaagtagcagcgcgtgtacacctgaagaatattaatgtgccgcaggagatcgtggagctggagaaaaagatcgaggatgtaaagaacgagaagaacaaggtggtgaagagccagcgttttgaagaagctgcttccctgcgtgatacggaaaaacgtttgggtgaagaactggaaaaagcgaagacacagtgggaagaagacagcaaacacaaacgctatcccatcaccgaagaacatattgcggaagtggtgagcatgatgaccggcatacccgtgaaacgcatggtgcaggcagaaaccgagaagctgcgccgtatgggtgaggatatgaaaggcatggtggtaggacaggacgaagcgatacagaaagtggtaaaagccatacagcgtaaccgtgtgggcctgaaagatccgaagaagccaataggtacatttatcttcctcggtaaaacaggtgtgggtaaaaccgagctggcacgtgcacaggcaag

SEQ ID NO: 190929 - DNA, 189 bp, Arabidopsis thaliana landsberg
atgtttaatgttgtggagagctttacattagcaaaatggatagaagttaagtcattgggagacaatgcgtttgtgattgctaccgatacttgtttctcggttttggctcatgagttttacggatgccttcaaaactctatttacttcacagacaacaaggatatatttaagctagacaatggaccaatg

SEQ ID NO: 190930 - DNA, 44 bp, Arabidopsis thaliana landsberg
gaatcactcatccaaatcgatatccagtattagatttaatttaa

SEQ ID NO: 190931 - DNA, 364 bp, Arabidopsis thaliana landsberg
atggttaccgcagcatcggtgcaaaagcatgagctagaagagggtgaattatctcccaccgccagtcgtgagcaaagcaactttgaggttaatggacagaatgccttcaagcctttacaaaaggtgacggacaatgtaagaagcaataaagacaagcaaagttgtgataaaaagggagcaaagaacaaaactcgcgctgaagatgacaaacaagaaaattgtcacaagttatcagagaataataagactgcctctgaaatgcttgtttcaggaaccaaggttagttgtcatgaagagaacaacagagttatgaactgtaatgggcgtggtagtgtggctggacagatggctaatggaaatcaag

SEQ ID NO: 190932 - DNA, 200 bp, Arabidopsis thaliana landsberg
atgaaacgcatcctgccgttgctgctgtgtctgttcgcgtggccggcgttggccaccgcgccgaaaccgttgttgctgacccacgtcggcctgatcgatggcaccggctcgccggtgcggccgggcatgacgatcgcaatcgaaggcaggcggattaccgacgtgtatcccgacggcagccggccggtgccgaaagaccg

SEQ ID NO: 190933 - DNA, 348 bp, Arabidopsis thaliana landsberg
atggcctcgctggttcgtcccgagcgtttccagaccgaggaggcgctcgacatggtgcgccgcctgctcggattgagcgcgccggcgttcgctgggaggatctgggccagcaccacccccctcggtgacctcaccgccggggagttcatgctcttcatctcctacctctcctatgggttggtgctgccgatctcgccgttcttcctgctgctgctggaggagttcgaactccagctctagcacctcacgccccactccatcctccaggtggtcatcttcgtccacctctgcgagatgttagtgggggtggcatcctgcacttccctctttcgccaattcttcgtgctg

SEQ ID NO: 190934 - DNA, 262 bp, Arabidopsis thaliana landsberg
  unsure (1)..(262): unsure at all n locations
atgatcagcggaatggtggcgnnnnnnnnnnnnnnnnnnnnnnnnnnnnnnnncccgtcgataccgggcagcatcaagtcgagcacgaccagcgccgcctgcggccaacaggtcagggcctgttcgccatcggtaacccagcgtaccgcgtaaccggcttcgccgaggatggccgtcagcaggtgcccgatgtccggatcgtcttcaacgcacagtatgggttcagtcatgctcgtgtccgctcacgccgatcactttacag

SEQ ID NO: 190935 - DNA, 39 bp, Arabidopsis thaliana landsberg
atggctgctgattcatcaaacgtccagtttatgagcaaa

SEQ ID NO: 190936 - DNA, 83 bp, Arabidopsis thaliana landsberg
gattaaagtgggtccacgggcccaatattttggtccccgataaagtggaccgatttgatccaaaggttttagaccatacttaa

SEQ ID NO: 190937 - DNA, 276 bp, Arabidopsis thaliana landsberg
atgtccgtaagttttcagcctagagaataacagtaaaactctattgaatgctcgagacaaagagtaacttcaatagcaaacaggtccattaggatcaaagcaaagcaaggaacaacttaataataaaaatgcaactctcaagcgtacctactcaacacatagatatataactccaataacagaacaagtagagaacaatcattagaaacaactaagaagcaacaatactccaacagttccgatgacaaatatgcagtaatcactaatcaggtctaa

SEQ ID NO: 190938 - DNA, 98 bp, Arabidopsis thaliana landsberg
cattctggttctcgcctttcgaagcatccgataaccgcgactttgaaacagatccacagcggaagttacttagtctcgaacccgagcgcagatggtga

SEQ ID NO: 190939 - DNA, 170 bp, Arabidopsis thaliana landsberg
atgcggctgatgcccgcaagattgggggaatcgtcggcgttatgtgccgcgcccactacctggaggcgcacggcacccccgaagcaccgaaagacctgccagccacaactgcatgtgtgcccagaacgatgcagcgttcggcatctggcggctcagccgtggcaagcaga

SEQ ID NO: 190940 - DNA, 370 bp, Arabidopsis thaliana landsberg
ggctttcttttcttggaaacgctttatctaaatcttttgaacaatggcggatccagttcttcaatctccgaaaaactcacatttcttccagccacttcttcccggcttcgactcttaccttgtactactctcttatacgagtaaatacagcttatgttgagagagatggtttcgttttaataatctcttttgcatgttgttgcagaacattcctgtgaagtttttctcaaaacgcatacaaggaagaaacgaaggaaggacagtggagctaagaaccgacccgtctgaaaaaacttggcaggttaagatccaagggcggagactaacagtgggctgtgaagaatttcgccagctgcccatgaattcccca

SEQ ID NO: 190941 - DNA, 807 bp, Arabidopsis thaliana landsberg
agagcaccatcaacaaagtttaattaatcagaaaagtatgaaaacgcagcagcgaaaggctaacacgcagcaaacacaacatagtttatttaacaacattttagctataatgagtgatgttctggaggaagaggcaaattcgtcttttgtcgttgttattctggaaaatcttgtgaaggaaggagaggtatggatatacaacgattatctctgtagattatggttttcaaaatgattaggtgatgttttcaatctcgtgtgcttacaggatacaacttctggagctgataagctcgcagttctctcattgaaaggtgtgccgacaggctcgagccgttaatttgcagctttttaacatcatgttttatggaaaaagattccatccagaccaatctcaaagattcttatcacgaaatcatatttaagatctccttaattgctccccagatgctgctagcagttatcccaaaattgacccaggaactactggtatctcttacacacttttatatttataaacatatgatctagcttttctatgagattggttaaattgtactatttaagcaggtatagactgttttgttttaagttagcgtttatattcctgtttttttttttttttgctactcaccagggtcgttatttctatgtctgcagactgatcaggtcgatgtgcgaataaaagcccttaacttagctggaaggatttttgcgcagcctaagcactgtttaagttcttacgtagagacatatcaagatctttatgcagagttcttgagaagattctcagataaatctgcagaa

SEQ ID NO: 190942 - DNA, 206 bp, Arabidopsis thaliana landsberg
gatctaatcgaggattagtaggctatagtgatattagtcacaatgtagataaagatgatggtaagagtactaccggacacattttcgatgttggtaattgtccaatcacttggtatacaaagaagcaagagacggtagtgttgttaaagccgcaaaacagacgatttggcttcaagagcttccaggtgaagttaccagaaggacat

SEQ ID NO: 190943 - DNA, 42 bp, Arabidopsis thaliana landsberg
gctactgccagatcttctgaaaatgcggaatcctctgcatga

SEQ ID NO: 190944 - DNA, 81 bp, Arabidopsis thaliana landsberg
atggtcatggtagtggttttgctggtggagttggctttggaaatagtggaggaggaggtggtggtcgtggaggaggtggag

SEQ ID NO: 190945 - DNA, 46 bp, Arabidopsis thaliana landsberg
atgactaatagaaacaagtttgttagagacgagagaaagaagaaag

SEQ ID NO: 190946 - DNA, 421 bp, Arabidopsis thaliana landsberg
tgactcggttctaggacgagcatctagtgggttcaagagaaagggacagcggattttcgtgttcatagtaggaggagcaacgagatcagaggtactaaaatttaccccggtctgagaaaaaaaattgttgtgaattatgtgtaatcaatgatttggttactgatacattttgggttattgcagttaagggtttgccacaaacttacggagaagctcgatagagaagtgatcttaggatcctccagcttccttgatccccaaactttcctcactgtatagcatctcttcactttggatttctgtacactcaatatctctctttctctctgtgtaatgactaagatcgtgttcttgttatgtgcagaaaatgaaaaaactaaacgaagaagaggagatctcacttgatgatattgtcatttga

SEQ ID NO: 190947 - DNA, 1273 bp, Arabidopsis thaliana landsberg
taactcatccttgggaacatcgtttaaaacactccttctgctagtattcaacattttaacttctgtgcaaccggcagtgcttatgattgatgaatcatggtatgctgtatcgataaaggtaaggccatctagacttattctccaccaacattgccatgttatcaaagagctcactgaatcctctttgtcttgtagttgttaaattttttgagcttgcgagacactgctataaaacaatgccatgaagatatggtggtgattggcattctttctttggttctgtaccactcgtcagatggagcacttgtggaagcttccagaaatattgtgtcgaattcgtacctggtatcagcaatcaacactgtggttgatgtagcctgctcaaagggtccagcattgactcagtgtcaggatgaaactaacatcggagaggctctagcattcacgttacttctctattttttctcactaagaaggtagcatttgaaattgttcacactgatagatcctacttctaaccgttctgacttccttttggcctactagtttgcagattgttctagctggagcagtagattggcaaactttctttggcacgtcgaccagcctggaaacactacccgtagtctgcatccattgccataatttgtgcaggttgatgcattttggagcaccacaaatcaagcttatcgcctcttattgtcttttggagttgctcactggactatcagaacaggttgacataaaaaaagagcaactacagtgttcatcgagttacctgaaatcaatgaaggctgttttaggtggtcttgtattctgtgatgacataagagtagcgacaaactctgcgctttgtctttccatgattttaggatgggaagacatggaaggaagaacagagatgcttaagaccagctcatggtacaggtttattgcagaagaaatgtcagtttccttggccatgccttgttcagcatcaagtacatacgtgaaccaccacaagccggcagtctatctaaccgttgccatgctaagactcaagaacaagccagtttggctgagaactgtttttgatgagtcttgcatctctagcatgattcaaaatctgaatgggataaacatcagcagagagattgtaatattatttcgagaacttatgcaggctgagttattgaattcccagcaagtgaccaagttggatcgtgcattccaggttagtaacgcagataagtttactcgacataggtttgaatacatcaaattgatttcataa

SEQ ID NO: 190948 - DNA, 292 bp, Arabidopsis thaliana landsberg
atgggtgacgtcaagaaaggtgagaaagactcaaaccttaaatggagcaacttgttcaagaagaagaagtcacagaagataaccattgaaggagacctaaccgaccaagtgattaaagaagctgcaaaaaagccagcaggcttttctggtcgtgaaatcgctaagctggtcgccggtgttcaagctgcggtatatggacgacaggattgtgtcttggattcccaactttttgaagaaattgtggattataagatcgaagaacatcaccagagaatcagacttgcgactgaag

SEQ ID NO: 190949 - DNA, 138 bp, Arabidopsis thaliana landsberg
gttcattggttgagtactcatagactacggccaagtgatcttattggaaacaatatacagcacgacttaccaaagttacgtggtgaaccctacatagcgtgcacacctgatactcaaccatatgaacacataacgtga

SEQ ID NO: 190950 - DNA, 798 bp, Arabidopsis thaliana landsberg
cttgagaagagtcattctggtggaattcatcgagaaaccaagtatcgagctcggcaaagaagaacatgtcttcccctacaagttggtgcggattgcgacgacgcttcggatgacagcccagagctgggttgcgactcagaatggatataacccatcaaaagctacatatccgaagggaaattgccctcagacaaatgggaagctcgaaaacttaaagcttagtctgcgcgcttcgttctggtcgaggagaaactctacaagtggctcgcaattcatatcaacacgctttcaaggcttctgcgacaaatggggaatccgactcagcaaggaaacggtcaagccgaggctgcaaacaatacaatcctcgacggtcagtagtaacgcttgccgccaagaagggctcgtggtctgacgagctcgaaggtgttttatggtcgcatttgacgaccccccgtcaagccaccggagaaaccctatttgccttagtctacggaacagaatatgtaattccagccgaaatgacggtaccaacgtgcgcgaaccctatttcccgagcacgaaacagataatactcagaggctactcgacgaacttgatctgatagatgaacgaagagattcagtgttggtgcgaatagagaattatcagaatgagacggctcggtattacaactcaaacgtctaacagcaaagatttcacgaaggggaccgagttctccgaaaagtctttcaaaacactgccgaaccgaatgctgggaagctcggggcgaattgggaaggaccatacctgatctcgaag

SEQ ID NO: 190951 - DNA, 387 bp, Arabidopsis thaliana landsberg
atgcgacaactttttcgaataagaaattacctgcaaagaaactacagagctctttgtatctgaaaaagcaactgcacaagaccttgtatggtttcatcgtgtttgagattgaatgggctaatgtgaggggtatcaactacttaaatgagctacaggtacttcttgcaactgtccactttttttttggtctgacattgtgtgttattcttgtttcttacttgatctatatctttatgtagacagacacatctcttgctatagaagctaagttgatgcgaaggtgggagtttgagagtatcgatcaagctgtgaaaaacatgtctcagtggttctctggatcaaaagctgaaaagtcttgcttgagggaatatctcgactcaactatag

SEQ ID NO: 190952 - DNA, 95 bp, Arabidopsis thaliana landsberg
tgaggtcgaatcgagtatttttacttggattccgcaacgataatttgtgctcggaagatctatcggaacggataaagtcccaacaacaagcttga

SEQ ID NO: 190953 - DNA, 169 bp, Arabidopsis thaliana landsberg
cctgactgatgcagtcctctatgtagaaccccgctttatggaaaagcctcggacaatccttcgtgttcacgatcaccaacccgctaccaatgtcttcaaatccatcaatggaatcgcgatttacaatcctgccatttctgccgatcagttgcgaatcggcaatcaacaa

SEQ ID NO: 190954 - DNA, 429 bp, Arabidopsis thaliana landsberg
agcttaagggacctgatctaagaacaggttccttcagtttgaggcaactaaaagccgcgaccaacgattttgatcccttaaacaagattggagaaggcggctttggatctgtttataaggtacaaaggagtcttcaagctctataaatcaatgttagtgttcttaaaaacaggtgacggtaaagccaaaaatttgacaatacaggggcgattaccagatggaacattgattgcggtaaagaagctatcttccaaatcacatcaaggtaacaaagagtttgtaaacgagatcggtatgatcgcttgcctgcagcacccgaaccttgtgaagctttatggatgctgtgttgagaaaaaccagctgcttcttgtctatgagtacttggagaacaattgtctttctgatgcattatttggtaaatttatctga

SEQ ID NO: 190955 - DNA, 563 bp, Arabidopsis thaliana landsberg
atgtataatcatgaagaagtaaaggaggaggttaaggtggttcataaaacttctgaagtccagacaaaagagtatgaaaaggctgcaaagcgtctggcgaatgctaatttggtaagtttagctaaccctctttattcgcactattcagcattcttgttcttgttgaatatttaaaatggtgtaaatatgggatctatttgtttgattaacaggtattgaggaagttagttgacaaggaaaagttcaaaaaccgctcctcaaaagacgacaaacctgatgttcaaactcctatcacaaaggaagagatagtctctgaggcaagtgttctttccttttaagtgactactagttttgtaagtaggtcttataatcattggttgttgtgtcggtttatgaaggtggcgaggcagctctgtgtgaagattgatccagacaatgtggttttagcggcgcctttggaaacttttggcgagtacgaggtgcctcttaaattccccaagacaattcctttgccacaaggaactgttcaatggattctcaaagtcaaagtccgtggccattaa

SEQ ID NO: 190956 - DNA, 86 bp, Arabidopsis thaliana landsberg
agatcgtgatcgaaaacttgaaagagaaattggggattagggtttcgggtaaatggaattatggaaaacaacaaattgtgcgttaa

SEQ ID NO: 190957 - DNA, 3 bp, Arabidopsis thaliana landsberg
atg

SEQ ID NO: 190958 - DNA, 72 bp, Arabidopsis thaliana landsberg
atgagcataatgatcaaaattagaacaagtgtgaaatatcgaaacaaaggcaagtcaatatcggacagcttc

SEQ ID NO: 190959 - DNA, 60 bp, Arabidopsis thaliana landsberg
atgaaaaccgtcctcacgggaatgtctcacaagatttcacattatcaacaatccttaata

SEQ ID NO: 190960 - DNA, 2402 bp, Arabidopsis thaliana landsberg
  unsure (1)..(2402): unsure at all n locations
ggtggtcgatctaattgctcagcttcatcactagtacctcaactatcaatatccggatccgcttcaaaacctcctgcttctgatgttttggtcaaattaaacaagtttgtcaaatcaagtcatatagggacacctgatagcaaacacatgtctgacgcaaaaacttcttcttctgctccatcaaatcataagactctcaggtttcgtataaaagttggttcaagtgacctctcgtcactcaaaaacgtttctacctttactaaagaaggcctcaatatgctaccatcagcatcgcgggtgaattgcctctcagaagttgaacaagatttactgaatgggatttgtgattcgcccactaaaattcttatggtgattttgttttctttttctgtttcttccttctccttaaagattgaacaatgatgaatatgagtttaccatataccttggtgtgtgtaggctatggtgtctttccctttgcataaagatcagctgttatcacctctctgtgatgatctaattcagttgggatcgaaagaaaagattttgaaaaatgctggatatggttgatcatacaggacggatgcaaaaagtacacccgatgggttagttgtttctgattcacaaaagcgtgctggtaagttttctattgggaagaaggaaaagttaagggatagggtaaagtataggccaccgtcaaacaagcttgacagaaatcataccgtatccaatactgaaaaagaggctgacaaagagtcctgtgaggagcttgtttccaagactatgaagcttccacttttatcctgtctatcaccttcatatatccacccggcaaaagagattgataacgtatcagattctaatgtggagagtatattaagaggaacgaacaaagatgcagctttgatgggttcaaagccggaactagaagataatgtagtggcattttcagatcgaagtgttaaggaaactgaaagtattaacgtaagaaaagacgtgtacctgataaaaggtgaacctctaaactcattggaaagtaatcccaagcgggagaaagctccaagtattgaacatgtagattattcttctgtggttaagggtactcagagtgagacaaggaatgaagagcaaattttaaagtcaaaactgcctaaagtacagaggtcacaaaaaggttcaagctccattgttaccatgaatagtcagagaggcaaggacgctgctgtaaatataattaagaagaatgtaccagataaattgcaggaagatattgaagaatccgaacacatgtgtaagggattctttggtgattcgaaagaatcaaaagaagaaaancaaattagtcccgtacttaaagctgagaaagaaaagctttcagaagaaaatgcattgggcgagagtttcaacagtgttaaaaatgatgaagaggcttgtgatcatctaaatttggtatgtgaacctgatttgaaacaccttattaagccgagtgacttgaatgaagataggcacaccaccaagcagagtgttagacgggaagtgaaaaataagcattctcttgaaggtattatttgtgaaagatattgattttccttataatattttctttctgttcaaattatctgatctgcttgatgaatacgcatgtaggaggaatggagaatatgggaatggaatctgaaagggaactttctggggtttctaagaaaccaaagactggaaaatcacgattttccgctgtagatcaacctggatccaacaaatccaaccaaattctggaagttttagatactaacaaaactatgattactcaagccttagccgaaaatgtcaaggattttgctaaggcttcctcgcatggcgaacgtgatgacagaaagaggaaactgaaggaaaatgaggaaagtggagattgtatgagacttagagaagctgcagtaatggaatcaagtggagagaacgttagaaagagaaagaggcttaaaggttcaagttgtgatgaaaaagagttgccttttagtagtgaaagctgtgataaggaaagaagtgttagtcaagaaaatggtagagatagtgcttctcatctaccttctacactgtcctctccgagtttgtgtaaggatttgggctctgaaattatcaaaaataatgtccgcgaaagtaaaggttcactagttgaatcagttgcccctttggccttgagagtgttagactcaggtgagcttaaatcaggaagaatttcagaaagggatgagtaccatgatactgattataatgctggtgagacgttaaaaagatgccgagatggtgaggcttatagttctatcgatagaccagggacaacaaagaaggctgcagaagattccaggatagagaaagagcatattgggaggattgttaattga

SEQ ID NO: 190961 - DNA, 80 bp, Arabidopsis thaliana landsberg
atgaagcagaaacctagaaatcatcgcaatcgcgtttatgcagaaccaagaaaaccgaagcgtaatttgcagaaattggg

SEQ ID NO: 190962 - DNA, 284 bp, Arabidopsis thaliana landsberg
atgcgtaaaactgaaactgacgaaactttagtgagaagaatagaccatgaaagtgtttcgatcaacaacataagtcgtagaaaagtaaggaaacatctaagaattcttaccaatcttaaaagcagagttcggctagtgactacgagaaaccttggacgaactttgttgagaggaatgaaacttgctctcgattaactttggatgaactttgagctctctgactctctctctctttggtttttcaactagaaaaaagacttttgctttctgaaactacgagaata

SEQ ID NO: 190963 - DNA, 116 bp, Arabidopsis thaliana landsberg
tccaccacatacccaatccaggctcatcaacatcatcatcccagcaacagatgatgataccaataatgtgcgcaccctacatgtccacataccagtaaacgacaccttctcatcag

SEQ ID NO: 190964 - DNA, 38 bp, Arabidopsis thaliana landsberg
atggtgtcgtgcggatccaccgtgcccgcccatcaccg

SEQ ID NO: 190965 - DNA, 108 bp, Arabidopsis thaliana landsberg
agctcgcagcaactagcgcaggtactctctctttctcactccttaatctagatactaaagctgatcattttcatatctctcagtaatccgtttcgtctgatcgggtaa

SEQ ID NO: 190966 - DNA, 64 bp, Arabidopsis thaliana landsberg
atggcttggtcctctaaacctagcatcgaggaggtagaaaaaggaggactgacacaagttcgag

SEQ ID NO: 190967 - DNA, 158 bp, Arabidopsis thaliana landsberg
atggactttgtagacgatccaagagctcttttaagaaccatggaagcaaaaagtatagggaccaagaggtcactcttctaccaggcatatgctctccattatgagaagatgaagagatttgaggatgctgagaaaatgtcccgccttggggttcaaaa

SEQ ID NO: 190968 - DNA, 15 bp, Arabidopsis thaliana landsberg
atggcgatcaggctg

SEQ ID NO: 190969 - DNA, 566 bp, Arabidopsis thaliana landsberg
atgggcttgatgatgcttttgtttctgagcatgactgtggagaaaccaggagaagaggcaatcgatcagataattgccttgtgtatagcaggaagaaaggtagagtgaaatttaatagttgtagttttagcaaacatgtcactggaggaaccaagataagctatgatcaagctgactcttctgcatgtagccaaatgggacagatagttaaagctgatagttctttaactagacctaagcctggagaaatcaagaaaagtggtcatcaacttgtttacagccaaagaaagcagttagtgaaatctaatgggagctttactgaaagtcatgttggaaaaaccaagagaaatggagatagatctgaggtcttacttacgtatagccggaggaagaagagtgggaaatctattggtgttcgggttaatggctttctagtttatacccggaagaagttaaaattcagaggaccttttgctagacttgacctaagcgaaaccaagaaaaatggtgatcaacgttctactgtcagttctcgagaacttttagacgatacccaagttaccgaa

SEQ ID NO: 190970 - DNA, 114 bp, Arabidopsis thaliana landsberg
atgttgtttgaatatgtcaaagaaatgcctaaaccagaaacacgtcttcgtctggacattgcgtctctaattggcccccttttcttcacctgggttattcttcttctgttccct

SEQ ID NO: 190971 - DNA, 362 bp, Arabidopsis thaliana landsberg
aagtgcaacgggacgagccgatcaaccggcgagccttgtcggaacccggttatgcagggaaaaaagaaatgtcggtatcatgggggcgccgttcccggaggggacgcctggcacacgttgcagtggcccaagcgcgatgcgaagaactggcaaaggaagctgaacgagaagttggcgcgggacgagcgcaaccgccgccgcaaagaacgacggctggcgaagatgacagccgaggagcgggcaaaatatgacgaatgggtgaagtatcatcgcccgggatcgaaaattgaacgatcgaagccgcgcgcggttaataaggcggccgaggaattcaggaagcggatcgagaatgacgagccgcg

SEQ ID NO: 190972 - DNA, 807 bp, Arabidopsis thaliana landsberg
atgaatctgaagccatcggtgcaagttgcgacttctgataggaaagaaccaatgaagcgacctgatagaggcggagttgtggctgtgcggcgtgttaatctatatgtgaatcattataaagtgaatttcaatcctgaaagtgttataagacattatgatgttgaaatcaaaggagaaattcctaccaagaaggtttcgaggtttgagctagctatggttagggacaaggtgttcactgacaatcccgatgagtttcccttagctatgacagcttatgatggtcagaagaacattttcagtgcggttgagttacctacggggtcatacaaggtggagtatcctaaaactgaagagatgagaggtcgaagctatacgttcactatcaaacaggtgaatgtgctgaagctaggtgacttgaaagagtacatgacagggagatcgtctttcaatccgcgtgatgtgttgcaaggaatggatgttgtgatgaaggagcatccttccaagtgtatgatcactgttggtaaaagctttttcactcgtgaaactgagccagatgaagattttcgtttcggggttatagctgcgaaagggtatcgccacactctgaagcccacagcacaaggtttgtctttgtgtttggattactcggtgttggcgttccgcaaagcaatgtcggtcattgaatacctgaagttgtactttaactggtctgatatgcgtcagtttaggaggcgtgatgtggaagaggaattgattggtttgaaagtcactgtcaatcatcggaagaacaagcagaaactcaccatt

SEQ ID NO: 190973 - DNA, 216 bp, Arabidopsis thaliana landsberg
atcctctgttccgagagcggttggcaaccgttaccgttaacagaagtcataacttcagcagccgtgaagcgagcttataggaaagctacactttgtgttcatccagacaagttacagcaattagccctctctctctctctctgtatttcttgtttctgtaggtttttgtttgtgatgatcgatcgaagatacttaaacgatgaggctattttataa

SEQ ID NO: 190974 - DNA, 194 bp, Arabidopsis thaliana landsberg
gtatgattaataatctcggttaccgcaattatatggatgttaatagcacactaaactatccaggtaaaaatgatgatgttcataagttgagaagttttaagcgactgagacaactctccttgacgttgatgatgaatttgaagaaagcctacagcttttcacaaattttggatgctgccaaaaagacagtttaa

SEQ ID NO: 190975 - DNA, 286 bp, Arabidopsis thaliana landsberg
atgagccatcactctcacgattcaccgctgcccacatcgtcgctactattatcggagctcatcgacattgtcggaggttaccatcgtcgccgttgtcggagctcaccatcgtcgccattatcggtgctcaccatcgtcgctgttgccagagctcaccatcgtcgccgtgagcggagctcaccatcgtcgccatcaccaacaaaggaaacaatatattattctttatctttacataatgatagaagggtagaaccgtttatttcaaaacaggaaagtgccggttttc

SEQ ID NO: 190976 - DNA, 110 bp, Arabidopsis thaliana landsberg
agttcaaggtcatcttgatcacattaaaaccgccgatcaaagctgttgagttatggacgttgcgggacactaatgaagatgcagatctattgatcgagatgtttggctaa

SEQ ID NO: 190977 - DNA, 392 bp, Arabidopsis thaliana landsberg
atggcttctgagggagtgtcactaccgttgatccatgatctgaagaaaggtgattgctctggacgcctggaatgtgtcgaccatgcttctgactctatcgtacacccatttcaccccattcactctcttcggcttctaagtaaaccacatcgtgtatgtgatttatgtggaaggggaatcaggggtctaggctatcattgtgagacatgtggatttgacgtggatttacattgtgccaagtacccaccgccagaggttattgacatgtccgagacgcatccccacaagctcaccaaccttaaggagcggatcgagttcgattgtgacgataaatgtgggaggaatggtgatggatatcgtacaaatgccatgaatgtgaattacatttccat

SEQ ID NO: 190978 - DNA, 502 bp, Arabidopsis thaliana landsberg
tcttcttacatcaaaggtaccgtatggtgttacttgtttttattttccatcattgccttatcttcagaaatctttggtcacattgctgtttctactgtctttaacagagaaaagagaagcggaacacaagatttgcgtcgtattataaaatctggaaaaaaaacaaaaccgtcataagatggtaatcctctcaagcattggattattgaatgtgtacacaattcattctctagacattttatatcgaatcgttttcagctcctaaagtcactcttgtttaacattttatacaggtaagcttcaaactgctcttgagatacaggatgttcaaatccgatattggtttggtgaatcacaaatcttcctcattacttctccatctcagacctttcctcatttggtgtttctcaaaccagagacttatggattccaaacgagagtatttctatgtggttatgaagctagttgctatggatatcagatggattacatagacaaatga

SEQ ID NO: 190979 - DNA, 150 bp, Arabidopsis thaliana landsberg
ctgagtatgagttcaatcatttcgatatgcagaagataatggagagtatttcagttggtggagaagctggaggtgctggtggtgcttactcttataatgccttgaagagacttgacaatatttggtccaacatatgtactcaaccaacag

SEQ ID NO: 190980 - DNA, 73 bp, Arabidopsis thaliana landsberg
atggttcacgtcaatacacatgatcaaatagctgacttgcttactaaagctttgggtcgtattccgtttgaag

SEQ ID NO: 190981 - DNA, 133 bp, Arabidopsis thaliana landsberg
aaccagccaaagtggaatgatgagagtacacatacgagtaacgggcaggatccttctttgaacaatgataaagacctggtacgttcgctctgtgctttgtttccgtggatagatacagctttccaacctctaa

SEQ ID NO: 190982 - DNA, 73 bp, Arabidopsis thaliana landsberg
gttcaatgctcaaattacttttcactatagctttcaatttgatcggtccttgcttattgcaggactacactaa

SEQ ID NO: 190983 - DNA, 330 bp, Arabidopsis thaliana landsberg
atggatttcgaggtggaggaggaagctgcttcttccacaccactggttcccaaccgccctatgccgggcgctgctactgtgcatgccgcacggcagcatacagatgcacagacatcccggactccgtcgagagcgactctgggagcattgtcagcagccagggagttgctgcgacaccatccaagctccacagcctcaccaggggccatgaagcaatggcaggacgacgtcgaccgactgctcggcatggcacactccaccccgaccatgtcgaggccacggtcatcccggcgccagcatgaggcgtcggcatctgtgcgctcaccctca

SEQ ID NO: 190984 - DNA, 36 bp, Arabidopsis thaliana landsberg
atgacggcccgccgcccgtcgcggtcgaggttattg

SEQ ID NO: 190985 - DNA, 427 bp, Arabidopsis thaliana landsberg
cctcgctacgtgggaccctaccgcgtcaccgagatcatcaatgacgtggctgttcggctagaattgccgcccggcgcgcgcctgcacgacgtgtttcatatcggcgtgctccggaagtacgtgggctccccacccaccacaccgccgcctctgccgcctcttctcaatggtgcggtagtgccggagcctgcaagaatagcgggggctcgcttgtcgcgtggcgtgcggcaagtcctcgttcactggagcggcgaaccagcttcatcagccacctgggaggagttcgacgacttccgcgcccgattcccagccttccagctcgaggacgagctggccttcgacgaggggagagatgtcatgtacgggcgctcgtacgccaggcagcgtcgcgcccgtgacaggcgccgcgcacaggagcgccaggccg

SEQ ID NO: 190986 - DNA, 110 bp, Arabidopsis thaliana landsberg
acgacaaaagtacgattgctagggtaattttcttgttgtcatatttcgacaataaaagagagacacgtgaaatcaacgtagaatcaacttttgactactccgaaaactaa

SEQ ID NO: 190987 - DNA, 430 bp, Arabidopsis thaliana landsberg
gacgcgggccggggcctgcgggcgggcgagttcgcggcccgcgcggggctgccggcggacaaggcgggagtggagcggcttcgggcgaagctgaaggtgctgaccgcgcggggctggctgaaacgggtgcccgggggcctgttcctgttttccggtcacggagggaaaacgggaaacgccggaaggtgaggggttctcctctctaggttcggaggtgctggccagaaccgtcccgagaaagaagaaccccgtggaagcgtatgccactgacccgttcgccgcgtcgaaagccctcctcgcaggcctcgccggcgagcttgccggccctgccgcggccggcctgaccgccgcggggctggaggaattcatcgacgagaggggccgggaggtgctgcggcagctgctgcaggatcacttctacctgcgcgcg

SEQ ID NO: 190988 - DNA, 97 bp, Arabidopsis thaliana landsberg
atgatgacactcaccggagcccaccagagaccggaggctctcaacctcaagatggtgatcttgatcttgatcttcgactcggcggtcatcgtcatca

SEQ ID NO: 190989 - DNA, 119 bp, Arabidopsis thaliana landsberg
gtattagattgcgacttctccggagcaccgtgtgccgatcactgattaccaacctccaacaccaaatcgatccgagaaaaaaactaacaattacaaaatctcttggaaacgacgcataa

SEQ ID NO: 190990 - DNA, 471 bp, Arabidopsis thaliana landsberg
atgagccgggagtttgaaatagcattccagaaaattttgcggtatccgatcacgaaatgggcaggagaggaggcggaaagggatatccggaacgtcggtcgccttcatcggagtgcccttgttcagttgaaaaaacgaggtaaccgaattgtgcttcctgatgatcatatccttaaaaaacggttggtttcggtaccgtctcggatcaccgtcggttcgaaaaccgactccgtagacacgcccgaaaaccgctttgtaaagcacgcgctggaagttttcgcgggttttgtgaaccatatcaagcgcattgcgccggagcgcagccgctttcgccatgaggctgccgtgctggaaaatcatttgaaccagatgctttcggccccgttgttcaaagacatagggaagccgctccgactcgcattgaatggtcctggcctggttcggaaagaagggtataaacaaatcctgagg

SEQ ID NO: 190991 - DNA, 456 bp, Arabidopsis thaliana landsberg
tgtgggtcgacacagtttaccgtatctcaaattcgaaattttgccaagtcacaggtaaagaaattaaattatcccgctagtctggttctatataccaataccatgtttttaaccaaccggtttgatattcaggttgattacatccttggaaataatccattgaaaatgtcttacatggttggatttggaacaaagtatcctacacaacctcatcatagaggctcgtcattaccgtcaatccaatctaaaccagagaaaatcgactgtaatggaggattttcatactacaattttgatacaccaaacccgaatgtgcataccggcgcaattgtgggcggaccaaattcatccgaccagtataacgacaaaagaacagattattctcatgcagagcccacaacttacatcaatgccgcctttattgggccagtcgctgctctgatcagttcttcctaa

SEQ ID NO: 190992 - DNA, 252 bp, Arabidopsis thaliana landsberg
atggctgccacaacagaaaataaacaaattggagatccgtcagtgagtatgcaaggggagtcactgagacttcacatcaagtaaatcaaaagaagatcataaagataaacaaacaaacaaataacagcctcagtctcttagattcacgtttaacgtcatgtctttgttcaggacaagcctacgaaaatcatcaccggcagtaatccacacaaaaaaaaacatattgaaatatcgaaaatcaatacaaagtaa

SEQ ID NO: 190993 - DNA, 655 bp, Arabidopsis thaliana landsberg
atgattcaagtttctcgtcgtataacggtgagtaaccacgaaaaccatgacgagccatcaccatcttctcaacaagaggaagagagaatagtttcttgctctctattaacactccttccatcaactcttccgaaacgccatgattcgtaagatagaagaatccatgatccaagcaagcctaaacaattggatatttaagcatcacaatatcattctaaaacactattatcgacaaccgacatttctacagtaatataagaaccatttactgtttagagtataaataatacaatcaatatcttcgttttgttgccatgaaaaaaaagacaagggggagaagaagaagaacctgacgaatcaatcgggaagtagagagcttctccggcgaagaaagatcgatgatcggaagtttcagagctgttcccatttttttttttttatccctattatatttcatttggatttctctcatctcgcttgtgttttatatttaagccgctgtctgaacttgtcagattatgtgagtacgacgtgttctaatttcatatcttaactttgggcccagattttgatatactgggctttaagcccataaaacttaaataatcgtccaagtccacgtcgttattgttttagctcaaacaatccaatgtga

SEQ ID NO: 190994 - DNA, 233 bp, Arabidopsis thaliana landsberg
tgttaaaatcacaactggaaattttaatactgattaatgttggtaaaacagattctgccagtgaatataaagggtttagccggaagtatagcaactttgttaaactggttcgtgtcatggttagtgacaatgactgcaaatatgctgttagcatggagcagtgggggaactttcactctctacgctttggtttgtggattcactgtggtttttgtgagtctttgggttcctga

SEQ ID NO: 190995 - DNA, 168 bp, Arabidopsis thaliana landsberg
ccgcatctttttccttataacttggataacatttctaagttgatcagttttgaacaacaaccagtgatcccagaggattttgaagattttttggctgacttcatgaagcaggatggagatgaagaatccatcgacactgaaggaatgatggaacactacactaactga

SEQ ID NO: 190996 - DNA, 892 bp, Arabidopsis thaliana landsberg
gagcattccacagggaaaacagtttaacacctttgacatgcgaagctacataagcaatcctcttctctgtgggcaaccaaccgacataagctgcattggtaatacctttcaagaagcagattatggagtggaagctgttgaaagcacgatcgacatggtttctttttactggagttttgttgcagcatacataacaatccttcttgggttactcgcatcactctcatttgattctccttggtgcagagataggttctacatcgatgatgcttgcggccacaaggataggaatatgttgtggcaaaacactgcaggtaccaaatgttcttacgtgctagtttcattgtcgtccccatctgttgttgttcttctcaaacctcctgctttgtttcacaaaaccagaacataacttatgttttggttcctctgtactgtcttttgtctttaaataaatgtaatgcctcaaacatatcttggagctgctttggttgttggttcaatgcataatctactgaaatacaagaatttgcatgaaacaatagatacagagaattttccattagttgtctttcttcttttatgaattctctttctatatcgctttacagttttttctttaggtagccatctcaagaacttcagtaattacataacacaccatatgattataattctgctgtagaatacggaagacccaagaacgaccataagaatcagcaaagacgaaaaaaaggaccagagtgaaacataacacagttaaagagttagagaaaccacttgtgtatatattttgtcttcttcaacagacttagctactggtcagcaaaaagcgttcgtcgccttcctgactttgcttgcagacggcttgtctctgcatgcacgatttcattaa

SEQ ID NO: 190997 - DNA, 1118 bp, Arabidopsis thaliana landsberg
atgttttggccagtagctccccctcgtaagagtcatttcaaagctgctgctaagatgaaagctgtcaaacttgagaacgaagcttctagcattctgggatttgattatgcaagaagttctgcttcccttgaaaaacaggaagatgcttctgccaggtccactaaaattattgtcggctctgatatggagatgtcagtgacccgtacccgggtagttacagcatctgcattaggtatctttgcatcccggttgcgagagggttcaatgcagtttgtggtagatccactgagtagtactcttacttctatgtccggtgttcagcgccaggtatgcatctctctatctcaatatctcgttttctctctattactagacatctgttgcgtttttcaaactaaaccgctggctctgcaggttgggtccattgtgctcatctcttggttcagagaaactaaatgcaaggccccttctgatggaagtggaagtttgcctggtttccctagtcctctgaaaaaatggctgctagatttgttagcttgcgcagaccctgctttccctactaaagacatatttcttccttatgctgagctctcaagaacatacactaaaatgaggaatgaagcttctcagttgttgcatacagttgaaacctgccattgttttgataagttattatcaacgaataaactcaatgtggagagcgtgactgctgatgagacaattgactttgcatcaacactagatttgtggaacaaagaaagtgctggaaatgaatccttagaaaagcaagtttttgaagacgtggagtcatctaggcaacagctattaagtactgctggttatttaaagtgtgtccaggtacattgggatctatttttgatacaattcatgtgctattttaaatcttgatctgctagattatcatgtcatataaattaaatgtttccatttctcgattgaaccatttttatcctatatctggacttatgtttatgcagagtaatctacatatcacagtcacctccctggtcgctgctgcagttgtttggatgtcagaatttcctgctagacttaatccaataatcttgccgctgatggcttcgattaaaagagagcag

SEQ ID NO: 190998 - DNA, 372 bp, Arabidopsis thaliana landsberg
atggctaagttgttagatcctaaaggaaagtttttcagcgatcgaattatttctcgtgatgatcgtacggtgagacataagaagaatcttgatgtttttgatgggaaacgaagaagcagaagctgttcttattgtcgatgactcgcagaatgtttggttagagattgagagaaatcacttcttgcttcaagctgcaaacagtttaaggaagattccaaatcgctgtcgtagttaaagatggacgagagcgaattcgatgtatcacttagtactgttattaacgttttgaagctaactaatcacatattctttgaagacacaagtagagatgtgagatcagtactgaaacaagtgcgggaagcaggacactga

SEQ ID NO: 190999 - DNA, 63 bp, Arabidopsis thaliana landsberg
tttgttgtcgctaacgcatttcctcgaacatttcggtgtaggatatgccggttcgcaacccgg

SEQ ID NO: 191000 - DNA, 127 bp, Arabidopsis thaliana landsberg
atgatcatcctcacaagtttctaccgtccttgcgataccttatacgccatagttgatttcagcgtatcctctcaacctcgagacaatggcagcaacgtttgcctttatcctgtggccaatttatact

SEQ ID NO: 191001 - DNA, 753 bp, Arabidopsis thaliana landsberg
tatgcactcgatattattaccgaagctaatcttcatggtgccaagacgtacgctactccggtggaacttaatcacaagttagccttagccacgggtcccattctcaagcgtccagaagagtaccgtcgccttgttggtcgtcttgtatatcttactatcactcgtccagaactgagttacattgttcatattctgtcccagttcatgaatactcctctactaccacattgggaagctgccatccgtgtgattcgttatctcaaagggtgccctgcacaaggaattcttcttcggtcagatagtgagatttcttttattgcttattgtgattcagattggtctgtgtgtcctcttacccgacggtctctcagtgcatatgcggtcttctttggctcttctccaatatcgtggaagactaagaagcaacacacggtttctaactcctcagctgaagctgaatatcgtgtgatggcatacactcttcgagaaatcaagtggctacgcgaacttcttcaaacttttggttttcaacatacacgacccattcaactattttgtgacagtaaggcggctatatacattgcttctaatcctgtgtttcatgaacgtactaagcatattgaatccgattgtcatcaagttcgtgatgcagttcaagataaactcatcaccatggaacacatttctactaaggaacaagttgcagaaattcttactaaagctctaccaacactttacgacttatttcaataa

SEQ ID NO: 191002 - DNA, 370 bp, Arabidopsis thaliana landsberg
atggatttgatgccacggaacaaagcagcgtggagtgcgtggaatttcttgggaagtacggaaaagaaagtatgtgtaacatactgtctcaatatacttcaggtatacaaaacaatctacatgcttttaaatacgggtttcgcaagaaagcaatgactttaagctaaatcttgatgatatctactggtgtagaaccttggcgatggtgaaccattctttgtaacacttaacccagacgagaccccaaagaaaacgttgctcaagtggaccactggtcaccctgtaccttcagttgcagcttggacagcttcacaagagcttcataagattcagggcaaacgtaatatatggttctgtggtgcatatcagg

SEQ ID NO: 191003 - DNA, 445 bp, Arabidopsis thaliana landsberg
atgtatctcaagtgtggattagttgatgaggcttataaattctttgccgaaatgcagttgaaagatgtgatctcctggactgtagtgatcactggttatgggaagcacgggcttggcaaaaaatctgttagaattttttacgaaatgttgagacataacattgagcctgatgaggtatgctatttagctgtactctcagcttgtagccattctggtatgatcaaagaaggtgaagaacttttttcgaagttactagagacacatggaatcaaacctagggtagaacactatgcatgtgtagttgatctattaggaagagctggtcgtttgaaggaagctaaacatctgattgatacaatgccgataaaaccaaatgtcggaatatggcaaacacttcttagcctctgtcgagtacatggggacatcgaattagggaaagaagtgg

SEQ ID NO: 191004 - DNA, 180 bp, Arabidopsis thaliana landsberg
atggcatacgacgtactgatcgtgggcagcggcctggccgggctggccacggccctggagctggcgccgcattgccgcgtggcggtgctggccaaaggcggcatcgagcatagcgccagccatcgggcgcagggcggcatccccaccgcgccccatccgcaagacagcgtggacgagcat

SEQ ID NO: 191005 - DNA, 120 bp, Arabidopsis thaliana landsberg
atgactgtgaatttccggttctctaacgctaaccggagaatgcggaatcgaagtaggattcgacggaacaatctgatcagtgttagaagattccgggtcgtttgtgatagtacaaatccg

SEQ ID NO: 191006 - DNA, 46 bp, Arabidopsis thaliana landsberg
acgaatgtttttggtttcgagaatttgctgaaatctattcacggtg

SEQ ID NO: 191007 - DNA, 1084 bp, Arabidopsis thaliana landsberg
atgtctgaagatggctacaacacagattttccaagaaaccctctatacattttctttagtgatttcaggtaaaatatattttcttgtataattctgtttgaggtcatggcctcaagaagtgaaacttgagaattggtttttctttgatgtatcagatcagttctgaaatttgatgagctcggtttagagatagcgcgaattgctttacccgcagcacttgctttaacagctgatcctattgcatctctagttgacacagccttcataggccaaattggtaacaacaagaacaacaactcttttcatttgtttattgttattttataaatgaaaattattggtgtaattttcggttcttgttgtggtgatgactgataggtcctgtagagcttgctgcagttggagtttctattgctttattcaaccaagtttcaagaattgttattttcccacttgttagcatcacaacttcttttgtagcagaagaagatgcttgtagttctcagcaagacacagtccgagatcataaagaatgtattgaaattggtatcaacaatccaactgaggaatctatagaattgattcctgaaaaacataaaggtatatatttgttcttgctaacataatcactcctctgtttttttttgtggtggtaataattacaagtatattcatttttatttcagattctttatcagatgaatttaaaaccagtagcagtatctttagtattagtaaacctccagccaagaaaagaaacataccatcagcttcatctgctttaatcattggaggcgttctcggcctttttcaagccgtgtttcttatatccgcagccaaacctctcttgagtttcatgggagtaaaacacgtaacgtatcgatcttttgttctctataaatgatgttatgagattcaaaatcacttaacatggtttgattttttcaggattctccaatgatgagaccttctcagagatatctatctttaagatcacttggtgcaccagctgttctactctcacttgcggcacaaggcgttttccgcggatttaaagacacgacaactccgttattcgctactg

SEQ ID NO: 191008 - DNA, 884 bp, Arabidopsis thaliana landsberg
  unsure (1)..(884): unsure at all n locations
atgcgccacctgatagtcgaggcttgtattgcaagaaacatactggatatgtcggcttattcgtggcctggctatgttaatggccgaatcaaccaaatacctcagagtctgccgaatgaagtaccctgctggtcatcatttgtgaaaggggctccactaaatgccgcaatggtgaatacattagtttcagttcctgcttcaaggtagaatgagttattatcttctttttgtttctttttgctctattagctccacactacttcatccacatagtcttccctccaaatcatacagtcagtggtaatttaaaattactatacaaaattaagctacggagtttcaaagtcgtaacctaaggaaaccattgccacaatgagaatagtggttgcattctagtttgacttaagttctgcttcttcttcagttattcctttttgtttcttagccaggtaatgctctttttttaatttaccgagagtaaagcaactgaaatacctcatggatttgatggaagcttagcagagctcgagaaactatttgaggttgcagtcaaaggatcggatgacgagaagatatctgctgctacagttctttgcggggcatctctcacacggggttggaacatacnnnnnnnnnnnnnnnnnnnnnnnnagaatctccaccagtgagaattttcggttgaacagacatgtttgatttatctatctttcttcgatgtacaggaacacactgttgaatatcttacaagattactatccccacccgttccagcagattattccagggctgaaaatcatttgattggttatgcctgcatgttgaatgttgttattgttgggataggatctgttgacagcattcaaattttctctttacatggcatg

SEQ ID NO: 191009 - DNA, 269 bp, Arabidopsis thaliana landsberg
cacctttaccattggacacaccaagttcatcaggtgctttaaggaacagaactgagcctttggaaatcaaagaagaatatgctcaatgtagtgatgaatcattggacctcaacaatgagaagattgggggtcctgcatcccaggttatagaaaatgcatgcacaatcacagctaaagtgggaaatgatggagttagaagtaagcctccaggaaaggaacagcaggttattaggcaaaagaaccttctgaaaactcggaaaaaatcacag

SEQ ID NO: 191010 - DNA, 352 bp, Arabidopsis thaliana landsberg
atggttggcttggcgttgaccgccatcgtgattctcggctcggcgatcatcctgcgtgccaaccaaggctggttgcgcgcggcgttctggatcgcgctgggactgctgtgttcgggcttcttccgcatggggatcggcgtcatcttgctggtcatcgcggcactggcgctggcctgctggttcgtccagggtggccgcgcgacgctgcgggcctgcgtcatggcactggccgaaggtgcacggcataccgtgccggtcggtatcgcctgcgcgctggtcggggtgatcatcggcgtcatttcgctgaccgggctggccaccaccttcgccggctatatcctcgacctcgggc

SEQ ID NO: 191011 - DNA, 368 bp, Arabidopsis thaliana landsberg
atgtggtatgtgtcggcaagggataagataaaaggtgacgattgcattagaccatcctttaacggtgaggatcagagtgtacttattttaacgagacatggaacaactgggatttttgaatctaccaagtaccaaccagtcaataacctctttgataaagtgttttatttatactctccacgagaagtctacttactttccaacacgagccaaaattgacacaaaaaatggaagatgttttttctctcattaccatgattgtgttgcttctcctagctttccatggatttggaaaatgcagcaatgtttatagcaggaacgatttccccgaaggcttcgcttttggagccgggatctctgcttatcag

SEQ ID NO: 191012 - DNA, 129 bp, Arabidopsis thaliana landsberg
ggttttgagatactgctctcagtgcttctaattgcatcataccatttacagtacggaaatggtcgaatgattctaaccatgaaagattttatatctaattctaactctacaaatgttgatcattctcag

SEQ ID NO: 191013 - DNA, 161 bp, Arabidopsis thaliana landsberg
atgaacgttgtcccggtcgatgcagagaaacaaacactaggtgttatctacgaacgtggattgatagggacgtatcaagattggtgtgaaggattctcaacgtatccaagaacttatgatatgattcatgcaggaggattgttcagcttatacgaacatag

SEQ ID NO: 191014 - DNA, 366 bp, Arabidopsis thaliana landsberg
atgagtaatcccgagaagtctaaaattgctgaggaagagatgaatgagaattctgacgagagtgattatctttggagcgatgaagaaggagacatacgtgaaattgttcttggccttcctgctctaagacttagtgagagtctcaatgtggatgaaagcatccgtaacgaagccgtttccgcggcaaagttgatcgtggcagccgccaaggaagccacagggaatatagaacaaagtgctagtggtaccggtgacgttagtggaactccagaaatcataaaagttgggaacctccgtgtattattggaagcgctggccgcagcgtctggttctacccctattggggtgaccactactgaaggagag

SEQ ID NO: 191015 - DNA, 534 bp, Arabidopsis thaliana landsberg
atgttgcaggttgagagtgcttttggagaattcctccttcgtgaactcaaggcgttgtctggtgccgtaacaatcacatgcctcatggtaaatagctattgctgaatattcttaggcccatcggtgttgtcgccttcatgctgataaatttgttttgagttcctcaatcgcagattgcaaatcttgctggctatgtcattggaccatctggtataaactggatggtctccagctttctcaaaagagaaggtatatagattcacaacagatatcagtcttcatttaactatctttttcatacgctctgattcagtaatgtccattcatttgatatcacaggagtacctgttctgggcggcgtgttctttagcttgtacgtgggtacaaaggtattgctttcaattttctgctacgctaaatgtttagtttccgtttctctaacaactttaaccgttatttgaatgctcccaactttcctttctctattttgcagctgatgttccacatccaagacttaagaagtgtggcgcatag

SEQ ID NO: 191016 - DNA, 943 bp, Arabidopsis thaliana landsberg
atgaccggattaagcccatctggtgatatcaaaccacttttggatgatgaatcccagagacctcgtgttatcactccttttccttctcctaaactcaccgacttgtccatggtaactctctttttgcttttcttcttgttttctcagtggaaagtttgactttttggaactttttttttttttgcaacagtttcaaggtgagcacaaggaaagctcgtattggggaacttatcgtcctcaggtgtattttggagttcgagccaggtatttatttggtaacggattatttgttgctttttattagtcaactttatcatatgattctatacacaactttcaccaaactgtattatgtgtatgtgaatcagttattctgttaaaagtcaaagaccactagacgactactgttacagaggatttgaaggaattgatttgtttttctgtgttgtcatatataagcactaaaagagctagtgttcgtttcttgtacaagctgctaagtttttgtagatgactatgcagaactcccaagtcccttgttgctggcttgatgtggctcgttatgaaagatggaaagcctgttatgagacatttctgtgaaaactctaacgatcttaagtcatttggttggaaagaacacaatggaagagattttgggcgacaagagctgtttgaacaagatatggttttggagacaagttttgtcaagtctgaggaaggcagccttggttatggaggagattggtctattagaatcaatgttcaaaatatgttgaatgatgatgaagtaaagagaagtacacatctcttcttctatctagctgatgaaggtggcaatggtgtgaatttaggcaaagatgtgttaaggcttaaagagagttctgtcttagcttcaggttcacgtcaagatgtaggaaactggcagatgcacttaaaatcacag

SEQ ID NO: 191017 - DNA, 172 bp, Arabidopsis thaliana landsberg
atgggggagttgaagtatttcttgggatttcaagtgaagcaactccaagagggcaccttccttagccaaacaaagtatactcaagatattctaagcaagtttgggatgaaggatgccaagcccatcaagacacccatgggaaccaatgggcatctcgacctcgacacgggag

SEQ ID NO: 191018 - DNA, 439 bp, Arabidopsis thaliana landsberg
cgtgctggtctccccgctgctcccgggccagtcccgcgccgacggcggcttctacgcggtcctcgccatcacgctgacggtggcggggctgcggtacggcccccggcacctgtggtggatgatcgccctgacgctgatcccggtctggctgtggaccggccccgactgggtgtacccggcggccaacaccgcgtggctcgccgtgctagggatagccgtgcagggcgccgcgtactggcgccgggaccgccgggcactcgccgcgcagaccgagcacgccgcccgcgagcgggaactggccgcgcgcgagcgcgagcgggcggagcggcagcgggaacgagcggagcaggaaggcgagcgcaacgcggtcctggaggagcgcgcccgtatcgcgcgggagatgcacgacgtggtcgcgcaccacatgtcgatgatcgcg

SEQ ID NO: 191019 - DNA, 511 bp, Arabidopsis thaliana landsberg
atgaggttgtatgaagaagaagcaagacgtagaacaggaacagaggaagacctcagcaaggtggcggctgagacagacgcagcgagctcagtctgtccggagactctattactccttcagagtcacactcgtcgccatggaactccttctggcttctccgatgaggattccgttagacgctagccttcctcatatttcatatgtcttatctcacaggtatgtggatgaggcgtcctgtgcgttcattgttcaaatgagagcattgtaacagagcaaacttatattcgatgtttagaagttaatgcttgtttatttattaattcaggaagtaatgcgagagcctcgtgttgcagccgatggtttcacctatgaagcagatgagttcagaagatggctcaatcacgtaggtggaaaatcaccaatgacaaatcttaggctcgagaaatgcaatctcatcccgaatcttgttcttcgttccgccattaaagactgggtgcaacagcatccataa

SEQ ID NO: 191020 - DNA, 325 bp, Arabidopsis thaliana landsberg
atgaaagaaacagagaaaatagatgattttgctggaaaattgtctgaaatatctacaaaatctgcagcccttggagttaacattgaagttccaaaacttgttaagaagttccttaatagtctaccaagaaagaaatacatccatattatcgcctctttagaacaagttcttgatcttaataacacatcttttgaggatattattggacgtatgaaagtatacgaggatcgtgtctgtgatgacgatgaacctcaagaagatcaaacaaagatgatgtatgcaaattcagatacaaacagagactattatcaaggagattcacgtg

SEQ ID NO: 191021 - DNA, 87 bp, Arabidopsis thaliana landsberg
gctacactaagcgaaagtctgagtggctgctgcatcgtcgcatccctgcaacggacttgacgctcattatcggcaagggcaacgttg

SEQ ID NO: 191022 - DNA, 32 bp, Arabidopsis thaliana landsberg
gtctaatgaatgcagccaaggtaatagaataa

SEQ ID NO: 191023 - DNA, 62 bp, Arabidopsis thaliana landsberg
atgtgggctaaggttcgtggtgtggctatgatgaacccagtggagcatcctcatggaggaag

SEQ ID NO: 191024 - DNA, 63 bp, Arabidopsis thaliana landsberg
attttggatatttcctcgtatcggattcgaaatcttctgtttctaattccaacaatggcaacg

SEQ ID NO: 191025 - DNA, 270 bp, Arabidopsis thaliana landsberg
atgacggttacgacaaatctttctctagacatagataaatacccgagagatctgttacgaggtttcatgtctgaaaacggcggtggaagagtctttcacggcggagaaacaaactgcgatgatgagagtacgattgagctcaatcttggtttgtctttaggtggtagattcggagtagacaagactccgaggaagctgaaacgatcttcttctgttttggacactgtaccattcaacgattcaactgtggctgagcctgagaattacacg

SEQ ID NO: 191026 - DNA, 784 bp, Arabidopsis thaliana landsberg
atggatagacttcccaaaaggctctacgccattgattgctatccgccttgtggtcgtattaatacctactcaaagcctgagtatcttcttgatctcgtcaaaatcctagatgggacaagaaagttaaattatcttagcgcctcatgctttggtccgctgtttcagctttctgtccgcaaatgttatttttctgataaattagtccatcagatgttgtgtagagggctctacacaaggaaaaaatacaaactttggtttatttttgccgatcagccattccgattttcattaagagagttaactattctgactggtttgaattgtcggccataccccccaaccggcaaatatattaaagtcggagcaacccatcaaacgaagacatctttactggaatatgctcatcggtaaggatcaccctatcgtcctcatcaaggacattattgaatggttgaagaaagaacaagatgaacccgaaagaagaggagatggaaaactgtagaaggctttgtctcgctgttatcgtcatcgtggaagggatattgatccgcagttcccaacctgttaaagcttccatgcaagttgttgaaatagtcaaggatttggagacttttgaggcgtattcctgggggcgtgagtccttccttctcacaatgcgaatggttaaaatcagttagaaggttagcaatctctttggactaattgccaagttcaaccagtctcattcttcaaccgacgggttccctcttgtcttccaactgtttatgttaaaggtcatccatga

SEQ ID NO: 191027 - DNA, 75 bp, Arabidopsis thaliana landsberg
aataaatacggcggtttacgagttgaaacgacatggttttgtgatttttctctccaagcgaatgatgatacttaa

SEQ ID NO: 191028 - DNA, 763 bp, Arabidopsis thaliana landsberg
atggtgaacaccgttcaggcgtgagtacttaaagatttttgttactgttttcctacaataacaatttgtttttctcctaactattgtattgtctgtattgtattttttctgtgttgtgttagtctggattttgagagaaatctggccgatcttgcaacctttacgtccttgataactaggggtgactttgaaggcgtcgtgacttattttggccaatgccagaaggaaagttatgtagcctccttccgaatcttatattacatttggcggcaaatgtgttgggaacttctttctgtgaaagatttctcagtttcttctccttgttctgttttgtgtgttctataacaagttgttcggttttttcttttctttccaatgtaggaatagcagaatgcaagccaaaggcgttttgttccaccacatttatctcatttcacgaatggacccaactttagaacaggagtatgaccaaccgaagattttgatagagtatgtgattatgtgtgtgtggtgtgttgtcttattatgcatgcatcatctctttgtatgctctatgtgttctcatatgtctcttaactcttatttcttcaggagcaacacgatccctacttttaatctagagactcatagggcagttgtcgttaagtatgtgcatcaaataatccaagcaaatgtagatgccaggtccatcttctatccaaccaccattgtggaacaaaatagattacatacaggcccgacccaaagaaaaatgggaccatga

SEQ ID NO: 191029 - DNA, 990 bp, Arabidopsis thaliana landsberg
agctcctgattcgtcgatttcgaatgttcatagagttcttaatctcatggttaataatggtttagagcctgatcaagtaactaccgatatcgcggtgaggtctctttgcaaacgggtcgggttgatgaagctaaggatttgatgaaggagctcactgagaaacactctcctccggatacatatacttataactttctactgaagcatttgtgcaaatgcaaagatcttcatgttgtttatgagtttgttgatgagatgagagatgatttcgatgttaagccggatcttgttagcttcactatcttgattgataatgtttgtaactctaagaacttgagggaggcaatgtatctagttagtaagttaggtaatgctgggtttaagccggattgtttcctctataacacgattatgaaaggtttttgcacactgagtaaagggagtgaggcggttggtgtgtataagaaaatgaaggaagaaggtgttgagccagatcagattacttacaatactttgatatttggactgtcgaaagctggtagagttgaggaagctaggatgtatttgaaaactatggttgatgcggggtatgagccggatactgcgacttacacgtcgctgatgaatggaatgtgtagaaaaggcgagtctttaggtgcgttgagtttgttagaagaaatggaagcaagagggtgtgctccaaatgattgtacttataatactttgcttcatggattgtgtaaggcaaggttaatggataaagggatggagttatatgaaatgatgaaatcaagtggtgtaaagcttgagagtaatggttatgctacacttgtgaggtctctggttaaaagtggtaaggtcgcagaggcttatgaagtgtttgattatgcagttgatagcaagagtttgtcagatgcttctgcgtactctacacttgaaactaccttgaaatggttgaaaaaagctaaagaacaaggcttggttccataa

SEQ ID NO: 191030 - DNA, 177 bp, Arabidopsis thaliana landsberg
tatttacatctcttcactcttcgttatactttccaagcaacgatccacagtttatggcgagagcgtaatagtaggcgacatgggaagcctgttatcccggtaatgaaacttgcaaagatcatcgagaaaaatatacgaaacagattcagcacggctataaattctggaaatccatga

SEQ ID NO: 191031 - DNA, 376 bp, Arabidopsis thaliana landsberg
atggctctttcgctgtaccctaaccgggtaagcctcaataatagcgattagcacgtgatagggctttttgtgtatactacataacgccgggtcacaacccttaataaagctatgtttcctggctagattgaccaaagtttatggtctccttcgcatataatagatggtttatgttcaaaaactagccacaatgatacctattaggagacttcacatatacaaaccaagctatcaagtagtttgattctaatccccagacacttggtttcaggtctattgtcggtctttgataagtagagtaactgcaaacattgttcgatattcacaaattgtctgcgtttataaacgagaatcaaagaacaaatgtcgaatttga

SEQ ID NO: 191032 - DNA, 156 bp, Arabidopsis thaliana landsberg
agaagtcaaagaacgatgaaggaggagtgcccggcattctgcgagcaactggagaagatcgtcaggaagaaagcaggggcgtacatgctgcagcctgcaggaggagtgtgctggcgcatgcgttcaccattcctctgcgtgctactccagccataa

SEQ ID NO: 191033 - DNA, 101 bp, Arabidopsis thaliana landsberg
ctaaagaagcagcttccgatgaatttatttacgacgagatgagacatttggaaatggataatgacgctagttcgaatgttctagaatttactaatatgtag

SEQ ID NO: 191034 - DNA, 274 bp, Arabidopsis thaliana landsberg
atggcgccaaccgctgaagctaggccggttaagaagaggaggatggtgaagaggagagtcatgaagggcctggaagaagaatctaagacaagacacatgggtatgtttggtttctttcttatctccatccctccttcgtgaagggagagagagaagagagaagaatgaggaagaaaatgacaagacgaaaggaaacgagattgttgggatgcttgtggttgaagaaagagcgagggaaaaaagggtacgaaagagagttgttatgtgtggctag

SEQ ID NO: 191035 - DNA, 718 bp, Arabidopsis thaliana landsberg
gaccgagtttaccctcctcagcagcagcaacaacaacaacccaaaccatttattccatacaaccaaggtcaggggtttgttccaaagcagcagttccagggaggttatcaacaacaacagccaccacctggtttctaatttacagcaacatcaagcagctgcacctcaggattcaaacatgaagaccatgcttctgcagataattcaaggccaagccacaagagcaatggaaatcactcagaagtttgctgaatgagacaacaaagttgaccgacactttgtcgaacttaacagcaagtatgaatctttgagcactaggatacgatatctggaaggcatccccacttcaccatctattaccaacatcccaggccagcttccagggaaagcaatccagaaccctaaggagtatgccactgctcacgccatcactatctgccatgatcgagagctcccaaatcgacatgcctttacctctatcactagggacagtgaagttcaagaaggggaggttttcgttcagaatgaagtttcagctgaaatagcaatagaggagcctatactcgatcgtagtactcgatcccaagctcaagtagtacctccttctcttaaaaagcatgccgctactaaaaccaaggataaagtctttgttcctccaccctacaagccttcactacaatttcaaggaagattcaataagcaactgataaagaagtaa

SEQ ID NO: 191036 - DNA, 120 bp, Arabidopsis thaliana landsberg
cggtttccgaaatcaagcctttcaaaatagaatggaaaatccaagttaagagtgtgcactcatgggttcaatacacaaagtacacaggaaaaactatggaaatgatacttgttgataacg

SEQ ID NO: 191037 - DNA, 382 bp, Arabidopsis thaliana landsberg
atggccgacctgccccccgccagtaaccgtgcactttatgttatccccaacgccatcacccccgagttccggaccttaatcgacatcgtcttcgagaacccccagaagagcatacactccctccacctcgaccgctaccccttcttcggcgtcgggatggagcctgcgacgtggtcgccttagatgaggaaccacgtacatcctactggacacggagagccggcacacgatccaagactacccgcagccatggacggccatcatgctgacattcgacaacgccttcatgtcgagcgatcggtccaacgtttgccagcgagactacctcgaggagcagatctacattagcgtcatctcgccgtcgcagtcgatgtgctactag

SEQ ID NO: 191038 - DNA, 75 bp, Arabidopsis thaliana landsberg
aagcaacactttggttcaaaattaagtcggaatcaagaatatgataacacagagcagacgagaatctgctgctaa

SEQ ID NO: 191039 - DNA, 542 bp, Arabidopsis thaliana landsberg
tgattttggcgcgttcacgctttgacaaagaaaaggctgagaaacgtctccgtatcgtcgaaggtttgattcgtgtgatttcgattttggatgaagtcattgctcttatccgtgcttctgagaataaggcggacgcacaggaaaacctcaaagttagctatgattttacggaagaacaggctgaggctatcgtaactttgcaactgtaccgtttgaccaataccgatgtggttgtcttgcaggaagaagaagcagagcttcgtgagaagattgctatgctggcggctattatcggtgatgaaaggactatgtacaatctcatgaagaaagaacttcgtgaggtcaagaagaactttgcaactcctcgtttgagttctttagaagacactgcgaaacgaattgagattgatacagctagtcttatcgctgaggaagatacctacgtcagcgtgaccaaggcaggttacatcaagcgtaccagtccacgttcctttgcggcttccacttggaagaaattggcaagcgtgatgatgaccgtttga

SEQ ID NO: 191040 - DNA, 178 bp, Arabidopsis thaliana landsberg
aaattgaagggatccaaaaatcaacttagatttcgggaaaatggatcagacgaaatccggactcaccggaagttttgcggagaaaggattggtgttgagatcgagaaagatgtcgagaaacgaagaaccgtccataaaagaaacctttatcttaagatacaaaccaaaggactagttg

SEQ ID NO: 191041 - DNA, 403 bp, Arabidopsis thaliana landsberg
aaggagtagcttggaccagtcatggaagcttcagcagcagcagagaagaagtgaacagatgcagcaacgaagaaaacgcgagacgcgtgacctgaggggaacgagtagtgatcagctgatacagcggcggacattgaagggtgattgtaagcgggacgagcacgacggaagattaattttacgattccgacgaagattagatcgaagaggaggccgaggaggaaagggacgaggaaagagcgtaatggaggggagaggaggaaggaaagggatacggggaaggagaatcggaaatcagctgagatttcgaggaggaggaggacaaatggtgggaggaatggtttcgccgccgtgtgaatcgcgtgagatacggcggcgtccaccgctaagatgggaccgatga

SEQ ID NO: 191042 - DNA, 1628 bp, Arabidopsis thaliana landsberg
ggggaatgagaaaaaagtgattcttactgctaatcaaattgagttcttcgcgctgcaggaggtaaacgaaatgtgggcaggtttgggatactatcggcgggcacgttttcttttagaggtaaatactcttctgcaatctggggtttgatcctagttgatacgttcactaaatatcatagtgatcttttcttcttgtcttgattctcacagggtgcaaagatggttgttgcagggacggagggtttccctaatcaagcgtctagcttgatgaaagttaaaggaataggacagtacacagccggagcaattgcctcaattgctttcaatgaggtgaagtcagtttcatttttttcagtcatcaatgtaagacatctaagtaattatctttacgtcttttgacacttattatgaaccaggcagtacctgttgttgatggaaatgtgataagagtgcttgctagattaaaagccatctcagctaatccaaaagaccgacttacggccaggaatttctggtgaaataacttttgtatttgctcgaatgtttcgctattgagacaatactaaaagagaggataaagaaatcatttatctttgtcaggaaactagctgctcagctagtggatccttcacgccctggagatttcaaccaatctctgatggagcttggtgctacactatgcactgtatcaaagccaagttgctcttcttgtcctgtttccagccaatgtcgtgcattttcactttccgaggaaaacagaacgatttccgtgacagattatcctacaaaagtaatcaaggccaagccaaggcacgacttttgttgcgtttgtgttttggagatacataatctggagaggaaccaatcaggaggtagatttgttcttgtaaaaagacccgaacaaggtctgcttgctggtctttgggagttcccatctgttatattaaatgaggaagctgattcggcaacaaggaggaacgcaatcaacgtctaccttaaggaagcatttcattttcatgtagaactcaagaaagcatgcactatagtttcaagagaagaactcggagaattcgtccacatattcactcacattcgtcgaaaagtttatgtggagctattagttgtacaacttgcaggtttgaccactatctatctctttctttctaggtctcttttttacatatagttagagaaactaacaagaagttacaggcggaaccgaagatctgttcaaaggtcaggcaaaggacactctaacatggaagtgtgtgagcagtgatgttctttctaccttgggactgacatcagctgttagaaaggtacctccttttcgtcttcaacatattaaaagactatccttggatgtgatggttgaaaaggaacaaattttggagtgcaggtgtattcaatggttgaagcacacaagcaaggcttatctgttgctcatgtctcatcaaatagaacagccatatcggggaaacgaaaattctcatgatctccttctcacacttttcttcatgctgcttagcttctatagttcttgtaaagcaaagggaatcaaatttggtgatcttggtttgaaattgaacagcttagtttctactgagaaaagtgacggtgatgtgtga

SEQ ID NO: 191043 - DNA, 190 bp, Arabidopsis thaliana landsberg
ggattggtgagcgaagcggtgcccgcggtgtcggtgagcgggcaggtggtggtcagcggagattctgtcccttgcgagggcgggctcgttggtatcgcgccgccgcccgaagaggagagcgcgccccgcgtgcctgtgctctcggctttcgtgcaagatggcgagttccgcatcgaaggggtcacgcccg

SEQ ID NO: 191044 - DNA, 334 bp, Arabidopsis thaliana landsberg
gggaatgagcccattcgtcggcccgtactcacgctcacccatgaaggcttatgcgcggaagaaaaaatcactgtcgtcaaggtagatccttctcatccgactcttaacattggcaactcgacacaagagtcgtgcacggcggtacaattcagcgagcgcttacctgagttcacgcacaatcttgcaccgattgcgagcatctttggctgtgatttgcgtaaaggaaactcaggctcgccggttttaaacgaaaaaggcgaagtggcagcgatcgtgtacgcaggccttgattctgaagttgttagacccgttcaaggcaaagaaaaccgtgtcg

SEQ ID NO: 191045 - DNA, 54 bp, Arabidopsis thaliana landsberg
atggtcaaagataaaggactacgttgccagtacattgttgcttgtgaaccaaag

SEQ ID NO: 191046 - DNA, 166 bp, Arabidopsis thaliana landsberg
tcactgtcgcgtacatcatcaatgtcgagagtacagagaatgttgtcttaatcaagcactgacagtccggtactttgttccgctcgccgccgccgatgatggattacggcggcggcggcggcgaatcgcggttgcttctcaggttctctgttcaaatgggtgttga

SEQ ID NO: 191047 - DNA, 1083 bp, Arabidopsis thaliana landsberg
attgttgtcacgagagaaggaaagcacatcagtgatcagtctcgcagggaaattgcaggtaaaaaaagaaagaagaagaagaagaagaagaagaagaagatcaaagatggtattttggtttttgatttctcaacgaagaagaagaaacgagagttggagtatttatcagcaaacgctccattgaaaaaaaaggaaattgtctcctttattatgttttgcgaagaaaaggaaattgatcaaggtaataaaaagtcaaattaagttaccgttacaagtataaatatgtttcttctgtaatttatatgatgtttaaaatttagagcgattgttgaaagagatggaaacatcaacaaaacaagccttgtaaagtaacacaaatctataaaagtcaaacctagtcatctattagcataatgctcggaacagaatgaaaaatatgccactagcacaatcttactcaatcatatatagttgttcttactatttttatttgttattgctctgagtagagcgagagagtagagtccactttcattttcagtcgtaatcgtttctttgattttcaacacacattgtaattattagttaatatttatgttaatttgattagaagtttttaatacatgtcaagatctaataaatcaaatatatacctaatatagttaccaaaaagaaaagttaagaaaaaaaaaaaaaatatatatatatatatatatatatatatattcatgattagtatatataaatatactttaaaaaaatagtttttctatttcgagaattatatatatatatatatatatcccttatttctattttatatataggttttattattaaagaacccaagtcgtgtattttcttaccgtccatttagctacatgtaaaccgccgctatgtagtccaatataggaacaccggacgagacgtcatagcatcctcctcggcctccgttttcgtttttatcacaaccgcagtatattgttttaagcagcttggctcgtatcgatatcgtactacccaaagctctctcttgtctccaagagcttccgctcgttggtcctctcagacttactctatgag

SEQ ID NO: 191048 - DNA, 155 bp, Arabidopsis thaliana landsberg
atggcgactggtcgatacatcgttgaggttgagaagggaaagcaaggcgttgatggaggaagtccatcggtcggtccagtgtaccggagtatctatgctaaagacggttttcctgaaccgcctgatgatctcgtcagtgcatgggatattttccg

SEQ ID NO: 191049 - DNA, 252 bp, Arabidopsis thaliana landsberg
atgaagccgtctgatgtcaatgcctatgatagagctgaggacggcgaaagctcaaaaatccactctcaaaaaaagaaaacaaatcaaatcgtcgaagcaaaggcccataaggatgtcggaaacacgagtttgcctgaaagtccagttgagccggcaaatccgttatctgaggtcaagcaagaaccagaaaaacttccttgtggttatgaatggatcacatgcgacttgaacactgatgatatgtgttcagag

SEQ ID NO: 191050 - DNA, 343 bp, Arabidopsis thaliana landsberg
atggggccttaccgctgcggggtcatcgccgctatccatcgtcggagggtgctccctttggcagagcgacggctgcgacttgcggagatgaagccgagggtcgatttggagggctcgcggatgtcctcgacctccctctccaccgacgacctcctcaagcgggtagcaggtacggtagggaggctggatgctggggcccttagccagcccgcgatgcatcccgaccgtgggtatgtgtccctggtaagtgtccgatcctccttctgttttacgccgagttctctacgcctttgattcttactgttgggatttttgttcgtccccaggggttgaggatttttaa

SEQ ID NO: 191051 - DNA, 231 bp, Arabidopsis thaliana landsberg
caagtgtctgaaaaaacccgaaatgagattgctacaaagatggcagtgatgtctagcagccaacctggctcatcaggtgagctgagtgagaaccgctcaagtaaacttttttcaagcagtgcccaaaagattcaaccggtgcaagaaactaagttatctgcaaggcttgggcgtgatgacggcctgagaagcttcgatatgcttactatcggttccggaaagcggaaatga

SEQ ID NO: 191052 - DNA, 420 bp, Arabidopsis thaliana landsberg
atgggtgctcagaagaaaggcggcgcgccgatacgggtttcagaggatgcggaggtacagagtcgccaccgattgcaagcaattcttcttgccgacagtttcgccacgaaatttcgtcccgtaaccctagaacgcccaaaggtactgttaccgatagttaatgatccgatgattgattacacattggcatggctcgaatctgctggaatagaggaggttttcgtcttctgttgtgctcattcgatgcagggaatccaatatgtggagaaatccgagtgggattcgcatccaaacttgcttgtgagaacgattgaatcgcacaaatccatcagtgctggagatgctttgcgttacatgtatgaacaacagacagagacgattctgattcaaggtgatttcggtcttggtagtggagagact

SEQ ID NO: 191053 - DNA, 177 bp, Arabidopsis thaliana landsberg
gagctacaccgttgtacctatcgcctcaccagagccacaaccagaaccgacgagggacactcacacaaggacagatcggaagccaaactcgtcggagaagaagctctgtaacagcaccgtccacaagcgccaaaaacaagagcacactaagagagcaggcacactatcccttgcacc

SEQ ID NO: 191054 - DNA, 158 bp, Arabidopsis thaliana landsberg
catcaatgacgaatgaaaatgacaaacgatacattgtgttgttcgaattcgtgttattgttgccaaaacgatgtgataataatggaactatgttcattgtattggcgttgcccgctggtttacaacgacctatttcatcgatgaattttggtaattaa

SEQ ID NO: 191055 - DNA, 91 bp, Arabidopsis thaliana landsberg
atcatgtccacctgatttaaagaaactacatatcaaccctggagaactgcatctactggacaagcaactcgatggtgttgaggttcgctag

SEQ ID NO: 191056 - DNA, 153 bp, Arabidopsis thaliana landsberg
atggagaggcgcaaaataaggatgtgcatgaaggtaaatttaatcatgtttagggtgtattctcgggataagagttgtcatatccgagaccttgcaacaagagggcagacattacgtttcgtcaagtgtcggcgttcgctgtcaaataaagtt

SEQ ID NO: 191057 - DNA, 376 bp, Arabidopsis thaliana landsberg
atgtacacgtcgctatcgctgcgcaccgacgacggtcgtcccggcgtcgcgtatctcgcgcatgtcgcggaccaaaacggtgagcgcgcagaagtgcgttacgctgccgcgcagaaccagttcccgacgagctcggcggattggcagacgtgggtcgtcgacaccgcgccgatcccggagaacccggacgaggtctacccgctgccgggcggcctcggcctcttcatcgacagcacgcgcaatccgatgaaccaagcgcctgtcgtcgcgtactacgatcgcacgaacggcgacctcaaggtctcgaagttcgatcccgcgaccggcatgtttgccgcccccgtcatcatggacggcacgaacggtgtcgacgcat

SEQ ID NO: 191058 - DNA, 875 bp, Arabidopsis thaliana landsberg
atgacaaattcttttcctattttgtaccaaacagattctttatttgaagaagatcaggtacttcagagcaccttggagcagcaaagataatgctagcaatagcctctctcaactctctcgggcattccctattcaatttgacaaatccaaagaaacacattatggatcctcccaccactatctatcctttgatcacaaataaaaccaaaaagactcacttttcactttcaagaattggaacacgagcaagtataaactcgcagaatagctccaatatctcataagctgcccataaattcatttctctgatcacatgctccacctaaatctcagacaagaacataagagattgatgttgattgtaagaagtaacatacagaaatcagaatgagatcaaacccgaattcgagcaatgggttcttgtccagcttgcaagaagtgagctatctccttcttcatatgtttaagctgcatatctctcttgttttgcagcaatttcattcgagctatcgccaagttcaagcttgtcttgctgccaacatttacttcaatttctcagttttatggacaattaagagcataacaaactctaatttcaaattgaagcaaaagagtaatcgatggcatcaaattattgaagaaaccctagcttcaatcaaaacccaaatcaacgtataagagaaaagaagaagacgaagaaaccatttggcgccaaagatcccacggttgaagagttggtttagcagcgacattgaaccggaagcagaggaatcaatgcggtggaggttggagattgatcgtcgtcgattgaggaaaaaggaaaacgaagaagatggtgaaaataatacactgcttcgcggaacacagatatcacg

SEQ ID NO: 191059 - DNA, 670 bp, Arabidopsis thaliana landsberg
atgacacacgtaaaaaaatgtgatgagcagattccaaacttggaatttcgtttcaacttcatccctatctctgatatccaagctcggactgacaatgataatgttttcattggtatagtttcttcttcctaaatttgttttttaatttttcacttgcaactttatctttcaaattaatgtttgcttatattttcagacgtaattggtgagatcattggaatgcaagaacttaaagaggttaatgtttcagggcgacaaacaaagttattaaatttacagcttagagatcttgggttagttatctatcatcctaaatatttcattatttgtataatgtagctgcatctttactgacacaaacatgccaataattgtatcagagaatcagtcatcgatgttactttgtgggaaaaatgggcagaagatctgtactcttatgttaagggctacaaagatggttcaattgttttagttggaagcttgatgaagataaagacatataacggtgtagtcattgatctttttaaaacgtatatctcactttcactataagggattcattgatttggttcttaatatttagcaggcaagatctctgtccaaaatcatcattttcgaccaagctctttatcaattcctcaattgccgagataactgagtttaaagaaag

SEQ ID NO: 191060 - DNA, 210 bp, Arabidopsis thaliana landsberg
atggagatagaggatctccctgccgtatgcctcgttgtgggacaatggagccttgagcagtatcatttaaaaggtaagagtagctaactatggtcacaagaactgatggaaactgagtctttcaagaactgagctgataaaaccccattctattctgtcataggccgtactcatatcggtcatcactgccatatagcatcagacctttga

SEQ ID NO: 191061 - DNA, 141 bp, Arabidopsis thaliana landsberg
aactcctaaagtcggccggcattgacaacaaatatgccgacgctattggtggtttcgggttagacgtgctgactgatcccttaacgttcactggagtcgctccgttcgttaagggactcaaacttgctggaaaggctgctg

SEQ ID NO: 191062 - DNA, 175 bp, Arabidopsis thaliana landsberg
tgtctttgccacattctccttagctgctcaaaattatacaaacaagcaaagccataacgccaatgactcacaatcaggttttgatattatcacagatataggcgaaaaaccaatgcaggtcctcatggagaagcgagaaggcgttcttgttaagtccagtgcagtgcaggactaa

SEQ ID NO: 191063 - DNA, 591 bp, Arabidopsis thaliana landsberg
cggttacctccggagtggactagaagccgcgggttggcaaatccggacgatacaaaggattcggaaccctaaggcagtgaaagatgcttacagcgaatggaactacagcaagttccggctatggcagctgactgattacgacaaaatcattttcatcgacgcggatctcttaatcttgagaaacatcgatttcttgttctcgatgcctgagatctcagctacaggaaacaatggaactctgtttaattcaggagttatggtgatcgagccttgcaactgtacgtttcatcttctgatggaacatataaacgagattgagtcttataacggtggagatcaaggttacttaaacgaggtattcacatggtggcaccggattccaaaacatatgaatttcttgaagcatttttggattggcgatgaagatgacgcgaaacgcaagaaaacagagctttttggagcagagcctcctgttctttatgttcttcattaccttgggatgaagccgtggttatgttaccgtgactacgactgtaacttcaactccgacatattcgttgagtttgctaccgatatcgctcatagaaaatg

SEQ ID NO: 191064 - DNA, 256 bp, Arabidopsis thaliana landsberg
actgaagaaggtgctccctcttattatatctgaatctcaagctgcctttgtgcaaggtagactcatcagtgataacattctggtggcctatgagatactccatgcgttgagctcaaataataagtgttcggaggaaatcattgttgtcaagactgacatatccaaggcctatgatagagcggaatggaactttctacatgacacattggaagcgttggggttcaacacaagatgggaaagcctgattatggagtga

SEQ ID NO: 191065 - DNA, 620 bp, Arabidopsis thaliana landsberg
ctgagaaaaccctaaaagatgatggtgttgttcaagagaacggtgttagggtttccgacaacggtgagaaaaagtctgatgttgttgttgatgttgacgagaaaaatgagaagaatttgaacgaatctggagttattgaagattgtgttatgaatggagtttcttccttgctcaaattgaaggaagatgtggaagaagaagaagaagaagaagaagaggaagaagaagatggcgaagatgaagaagaagaagaagaagaagagcatggatactgtgtaggagattttgtgtggggaaaaattaagaatcatccatggtggccaggtcagatttatgatccatcagatgcttcagatttggctttgaagataaagcaaaaagggaaattgcttgtggcgtgtttcggagacgggacatttgcttggtgcggtgcgtcgcagttgaaaccgtttgcagagagtttcaaagagtgttcgaaagtgagtaattcgcggagttttctaggtgcagtggaagaggcggttgaagaaattggtagacatattgagcgtgtattggtatgtgattgtgctgaggagaagaagcatgagtttgatagtcctttagttaacaatgcatga

SEQ ID NO: 191066 - DNA, 128 bp, Arabidopsis thaliana landsberg
gatctcctatcaatatcagtcagatggtcgcatgtgttggtcagcagacagttaatggtcaccgtgctcctgatggatttatagatcgaagtcttcctcatttccctaggatgtccaaatcacctgca

SEQ ID NO: 191067 - DNA, 2540 bp, Arabidopsis thaliana landsberg
atgagcctctggtcgacgaccattttcaataataccgaagctaacacgtacgagtttttgaccaagaaatggtctccaccagaaatccaagaatgtgatctatggcaaggaaacatatgtggggtgaggtgtatgagcgtctggtcgatgatcaatggccacacaacccccatttttgtcgaaaatagccatgaacgaccattttcaataataccgagggctaacacctacgaatttttgaccaagaaatggtctccaccagaaatccaagaatgtgatctatggcaaggaaacatatgtggggttaggtgtatgagcctctagtcgatgatcaatggccacacaacccccatttttgtcgaaaatagccatgaacgaccattttcaataataccgaaggctaacacgtacggatttttgaccaagaaatggtctccaccagaaatccaagaatgtgatctatggcaaggaaacatatgtggggtgaggtgtatgagcctctggtcgacgatcaatggccacacaacccccattttttgtcgaaaatagccatgaacgaccattttcaataatatcgaaggctacacctacggatttttgaccaagaaatggtctccaccagaaatccaagaatgtgatctatggcaaggaaacatatgtggggtgaggtgtatgagcctctggtcgacgatcaatggccacacaacccccattttttatgaaaatagccatgagcgaccattttcaataatactagaggctaacacctacggattttagaccaagaaatggtctccaccagaaatccaagaatgtgatctatggcaaggaaacatatgtgggtgaggtgtatgagcgtctggtcgatgatcaatggccacacaacccccgatttttgtcgaaaatagccatgaacgaccattttcaataatactagaggctaagacctacggatttttgaccaagaaatggtctccaccagaaatccaagaatgtgatctatggcaaggaaacatatgtggagtgaggtgtacgatcctctggtcgatgatcaatggccacacaacccccgatttttgtcgaaaatagccatgaacgaccattttcaataataccgaagcgtaacacctacagaattttgaccaagaaatggtctccaccagaaatccaagaatgtgatctatggcaaggaaacatatgtggggtgaggtgtatgagcctctggtcgacgatcaatggccacacaacgcccattttttatgaaaatagccatgagcgaccttgaaaatagccatgagcgaccattttcaataatactagaggctaacacctacggattttagaccaagaaatggtctccaccagaaatccaagaatgtgatctatggcaaggaaacatatgtggggtgaggtgtatgagcgtctggtcgatgatcaatggccacacaacccccatttttgtcgaaaatagccatgaacgaccattttcaataataccgaaggctaacacctacggatttttgaccaagaaatggtctccaccagaaatccaagaatgtgatctatggcaaggaaacatatgtggggtgaggtgtatgagcctctggtcgatgatcattggccacacaacccccatttttgtcgaaaatagccatgaacgaccattttcaataatatcgaaggctaacacctacggatttttgaccaagaaatggtctccaccagaaatccaagaatgtgatctacgacaaggaaacatatgtggggtgaggtgtatgagcctctggtcgacgatcaatggccacacaacccccgattttgccgaaaatagccatgaatgaccattttcaataataccgaagtctaacagcgaccattttcaataatactagaggctaagacctacggatttttgaccaagaaatggtctccaccagaaatccaagaatgtgatctatggcaaggaaacatatgtggggtgaggtgtatgagcctctggtggaagatcaatggccacacaacccccatttttgtcaaaaatagccatgaatgaccattttcaataatatcgaaggctaacacctacggatttttgaccaagaaatggtctccaccagaaatccaagaatgtgatctatggcaaggaaacatatgtggggtgaggtgtatgagcctctagtcgatgatcaatggccacacaacccccattttttatgaaaatagccatgagcgaccttaaaaatagccatgagcgaccattttcaataatactagaggctaacacctacggattttagaccaagaaatggtctccaccagaaatccaagaatgtgatctatggcaaggaaacatatgtggggtgaggtctatgagcgtctggtcgatgatcaatggccacacaacccccatttttgtcgaaaatagccatgaacgaccattttcaataataccgaaggttaacacctacagatttttgaccaagaaatggtcaccaccagaaatccaagaatgtgatgtatggcaaggaaacatatgtggg

SEQ ID NO: 191068 - DNA, 620 bp, Arabidopsis thaliana landsberg
tggctacacctaaacaaataagggaactcatgaaagttgatggtttgaccaatgatgaagtcaaaagccatctccaggtaacttaaatcacaagtcaccacaatatgctttacaactttttttaactcatatttaagtactttactggtgtgttgattttaaacaaacagaagtatcggcttcacactagaagaccaagcccaagcccacaaacgtcaggtgggccaggtccacatttggtggtcctaggtggcatatgggttccaccggagtacacctccgcacatggtggcactccgactctctaccaccaccaagtccaccaccaccataccaacacggcagggccgcctccaccacacttttgctcctctcaagaattctacacaactccaccgcctcctcagccgctccaccaccaccactttcaaacgtttaacggttcatccggtggcaccgcctctaccgattctactcatcatcaggtgacggacagtcccacagttgaagggaagtcaccggagagtggtggtggagagagaaaagggttggctgctcttagggaagaatgtgaagatcacagcaatattaatggaagtgaaataactctcaaattctaa

SEQ ID NO: 191069 - DNA, 1640 bp, Arabidopsis thaliana landsberg
acaattactctcgattttgctggttttatccactaaagttcacgtcagatttctttaagatattcacaatatttcaagctctagtggaaaatcagtttcaaaccaaaattggcagctttcagtgtgatggtgggggagaattcacaagtgctttatgaatcatctacaacaacatggtattcaacaacttatctcatgtccatatacaccacaacagaatggactatctgaaagaaagcataggcaccttattgagttagctctggctatgatgtgtcacagccgaatgccactgaagtattgttttgaagggttcttcactgccaactttctcatcaatctcctgcctaccactgccctgacagaaagcaaaagtccttatgaggtactatatgttcataaacctaactatacttctttaagagtatttggatgtgcttgttatcctactctaagggattatgcaaagaataagtttgatccacggtcattgaagtgtgttttcttggggtacaatgagaagtacaagggatatcgttgcttactcatctcaacaggtcgtgtgtatataagtcgtcatgtggtgtttgatgagcaggatttcccattccatacagtctcaccatctccattgacactgtctacacctctcctaaaagcctggcaaaaaagttttcagagtcagtctacaaacaacacagagaatcagtcacagaatcagccagaggaagtacagagaatacctgaagatcagacaataggcattccaattcagcgtcttacaacaacctcattacttcctattgtgactgatactgagaattatgggtgtacggcaggctttgatcctgttcctataggcaaaagttctcagttatcatctcatagtatggatagtgatgagccatcagcggtttcacctacagagtcagtgccaagtgaacacaacaacgaaataagcttcagtcagtctacagaaatcagagagttagcagaagatacagattgtaccttgagagcatacaacgacagtgatcacggaggctgtcaggaaacaagcagatctactggaggattctgcaccttcttgggtaataatatcatctcctggcaatcacagaaacaacctacagttgctaaaagttctacagaagctgagtatagatcgatgtcagaggcagcatcagagattacctggttgtgtaagatcttaaaagagcttggaataccactacatcaaacaccagaactctactgtgataatctttcagccgtctacctcactgcaaatccagccttacacaagcgcagcaaacacttagcgaatcacttccactatgtgcgagaacaagtggctttgggaacactgcgagtctctcatatcccaaactacttgcagctggcagacatctgtaccaaatcacttgctatggcgccatttgctttactgcgattcaaactcggcgtcgatgttccacctactccaagtttgagggggactattaatagagagagtgaagtagagcaattctgcttgcctaaagcaaaagaagaagaagagagatcgacaaaagctgagcaaaaggacaagagagttaacctagcttcagacagaactcttaacgacattgttggattaa

SEQ ID NO: 191070 - DNA, 171 bp, Arabidopsis thaliana landsberg
atgtccgacccagttatcctccaatcgggtcatactttcgatcgggtctctatccaacaatggattgactccggcaatcgaacttgtccaatcaccaagctacccttatcagaaaccccttatctgattcccaatcacgcacttcgtagcttaattttaaacttcgccgat

SEQ ID NO: 191071 - DNA, 298 bp, Arabidopsis thaliana landsberg
atgattacacagataatgaatgaactgattccttccgaagtccgtatcccgcaatacgaccaattttcattctggcggagggacaagaaaaaggtcccgcaaaatactatcagaggggactgcggcgtttacgcattaaagattcttgaatgtttattgcttggtgtttcttttgatgtcattactgatgcaaatatccaagttctacgggttaagatggtagcagagatcttcgatgaagcaccgaaaaggacccctgcacggtttctagagacgttattggctttttcgaacatat

SEQ ID NO: 191072 - DNA, 572 bp, Arabidopsis thaliana landsberg
atggttgcgctcgatcaacgccttaagcggtacagcggccaagtcatccgttcgctttcccgccagggcgccagcgaaacgtccgattggcgtacggacggcatcgcatatgaaaacatcacgcatgtgcatcgttcctgtgcagatcttgaagcgaatcagttggctttgacgacgggcttgcccgcttcagccggggtacccagcaggatcatcgcggcgccggtcagcatcagcacgccataggcgacctgtgacgcggccatgctgccggtaagatcaatcaatgcccccaccagcgccggcatgaacacgttaccgacaccggccagcgtcgtgaccaaggcgatgctgcccgctgctgccttaccggtcagcaggctgccgggcagtgttcagaacggaccggtcgcacccagaaccgatgcagtggcgacaatcagcagaatgaccgatacggtggtgctgggttgcaggatggccaaggtcaaccaacctagcgccgaaatactcaagcagatcgccacatgccagcggcgttccatgaccttgtccgaatgcttgcccaccag

SEQ ID NO: 191073 - DNA, 468 bp, Arabidopsis thaliana landsberg
atgaaaaaatcaaaatcttctcccccacgtaacctagatgactccggaaactccacaaaaaccatctcttttgatctcaccttcgagatactatcgatccttccgaccaaatccatcatccgattccaatccgtatcaaagctctggttctcaatcatccgcagtaaagaattcgttgactcgttcctgactaggtcaaagacacggccgcgtctccttttcactttcaaacacttggattccgacaagcttttcatctactcagctcctgatcacgacaacggaaaatcctctccgggcatagccagacacgacatgacgatctcgaatttcgtcaactacatcagatctccccctgtcaacggattcgtttgttgcacacgtggttcatcgatcgcggtttgtaatccaaccacgagacaaatagtaaaactgcccgatgttgttaccaacgaaaattacatgcac

SEQ ID NO: 191074 - DNA, 114 bp, Arabidopsis thaliana landsberg
accatcacacatgaaggctcaacaacaggaatttggagtggaccatcgaatgttagcggaccttgtaatctcaaaatggattgaagtagagtttgtcgatgtatacatatatag

SEQ ID NO: 191075 - DNA, 675 bp, Arabidopsis thaliana landsberg
ttgcatcgaatcttccacctggttttgaagctgctgattatgcaacgaagcgaatcatctcacacattcctcggatcaaatggaaacgcccaccattggtataattcttttcttgaattgcaaacaatgtgacccttcttgtttttatataactctcactgtctttctttattcgccgccaaaatagtttgtcctcgatgatgctttgcttgttgggagtggtggaaaaagcatcgagactcgttctgagaatcttaggatttctaaagtcttggaagctttctatccacatcgctctgtcatcccttctcggtaattttatcatttgaggatttgcttttgtgccatgtcatgtttttccacttatcaaattctctctgatttcttctagtttttcgctcacactagctgttgaagaagaacactatgacgacggcaaaactcctaatatccctctcactcacgttgaagatgaacgtgacgctgctgctgaatcttcccacagtttcgaagctcctgcagctgtttctggacttggaccagagttaagtcttcttgcttctgcagctttgtctgccttaactaaggaacagggctctcaggtcgatcctgatttacttgtcaagttactcagtggccccaaaatcgttgagaacttgatcaatggcatgaaag

SEQ ID NO: 191076 - DNA, 870 bp, Arabidopsis thaliana landsberg
atgttcgaggacattttaggacgactgaaagtttatgaagagtgagtcatagaagaagaagaaccgcaagaagatcaaggcaagcttctatactcaaaccaggattatcaatcgaatcaagaatacaacagaggaagaggtcgcggaggacggaacagaggtagaggttgtggaggacgttttaacaatggtggaagagatacatcaaaagtaacgtgttatcgatgtgataagttaggtcactacgcctctaattgtcctgactgattacttaagttgcaagaagctctagaaacagagaacagtgacacccgagaagccgatgaccttatgatgcatgaagtagtgtacttgaatgaaaagaattgcgtgccgagcaagtatgagaagaacacagtggatgagtacatttgttaccttgataatggagatagcaaccacatgataggggatcgaagatacttcaataaaattgatagctctatcactctcgaaataagtacaactggaaataagtacgtctttgtcctcatatatgatcactctcgatatatgtggacaatactattgaaagaaaagggagaagcctttgagaagttcaagaaatttaaacaatcggtggaaaaagacttagaagttaccataaaaacatttaaaactgatagaggaaaagagttcttatcacaagatttcaatagtttttgcaaagatgttggtatacaagggcatctcacggcaccctacacaccacaacagaacggtgtggttgaaagatgtaatagaacactaatggagatggctcggagtgttccaaaacatgtaaaatgcacacttatcaactcccccaaatttagtatttgcttgccctaa

SEQ ID NO: 191077 - DNA, 360 bp, Arabidopsis thaliana landsberg
agcggaacaaatataccatacatcaaacgaggatatacagagaaaattcatggaagtatggaatttagaggacaatttctcttctgggctacaacggaccggcccattcgctcatttacccagaggtatcgagtttgtggacttttgatgccgctagagactattggcatcggattgaaaaaaatgtttacttcgttgttaacaattttctgaatgcaatattttccttgtcatgaatatttaaacttgttattactttcttttagcttaggtgtggacaattatggagtttacttcaaacgaggaagaatcttaaacgctcggttcaggtctcgaaaacaaaccaactcacaatcctga

SEQ ID NO: 191078 - DNA, 56 bp, Arabidopsis thaliana landsberg
gtaaagaaaaaacgaagcatcatactttaatagtggagattgttgacaataaataa

SEQ ID NO: 191079 - DNA, 182 bp, Arabidopsis thaliana landsberg
tagtaaacacacttattgtgattagtctgatatacatcaaagctttgagttatgtctatcaagtatcgaaccttaccgaaatcagcgatttgttcccatacagcgtttggtatgtgtactttgagcaataccttacgattcggtccatctgctgtcatggatattggtttggcactaggaag

SEQ ID NO: 191080 - DNA, 264 bp, Arabidopsis thaliana landsberg
gattcatcactttggattgtggcatgccctttgatgaatccccttatactgatccagatagtggattagtattcacatcagattcgaccctaatccagacgggaacgattggcagagtcgataaagcttttgacaaattacatataaaaccatatctggttatgagatactttccagaaggagtacgaaattgttacactttgaatgtcacgcgtgacacaacttatctcattggagccatgttcttttatggaaactacgatg

SEQ ID NO: 191081 - DNA, 58 bp, Arabidopsis thaliana landsberg
atggagacacgattaagagaaggtaggtcttcgtcatttagacggcttcttgattctg

SEQ ID NO: 191082 - DNA, 358 bp, Arabidopsis thaliana landsberg
atgtctcacaaccttgacaatgagatgcgcatgaatggtttggaaaaaaacaatcatgcgctcaaggaacacaatgaggccctcaaggaagacatggtggtgttgaagactggtgtgggcagggtaatggacgagctggcaacagcccgacttgcgctgaatgcgattatgaagtctttggagttcaacctgatgtgttgatggtcttgatgttccttctgcaggttgggttagttctcctgcacgtcgtgatggttctcttgcagggactgctgcacgtcgtgatggctcttttgttcttgttgcgggtcgtgatggttctcctgctcctgatgcattaatacattttaaatattaa

SEQ ID NO: 191083 - DNA, 96 bp, Arabidopsis thaliana landsberg
gtgaggaagcgacaaacttttgttgcttctgttcaaaggtggtacccaaagaagagaaccaagactagagctgcgggagggaaggccctccgttaa

SEQ ID NO: 191084 - DNA, 352 bp, Arabidopsis thaliana landsberg
aaattgcctaactgacaaggatgatgataaaatcgtcttgtgtgatgggtgtgatgatgcatatcacatctattgcatgcgacctccatgtgaatcggttccaaatggagaatggttttgcacagcatgtaaagctgcaattcttaaagtccaaaaagcacgaaaggcttttgagaagaagatggagacggtgcagaaacagaaaggaataaaacccaagaatctccaaggcaaaccgcaaagtaaagacaatggagaattggatcaaagcgtaggaggaatggacatgcttctaaacgcagctgacacactgaaagatgaagaacagatgacattccaatccatcaaatga

SEQ ID NO: 191085 - DNA, 117 bp, Arabidopsis thaliana landsberg
caatactccggtccttcagtattcaagatcaatctgtcaaaatcatggttactgcacctattcttgcggttgttgcaactcatattctctaccttaatttctacaacctcgatgaag

SEQ ID NO: 191086 - DNA, 335 bp, Arabidopsis thaliana landsberg
atgccccaggtaaacaatccaaaccatttcctggcatatagtccaataagcgtaccggtcactgccagaaggcccagggcagaagatatattgataaccagatcgtgatcggttgccgtcaataaaaagaacatgccagccatcgataatacgccggaaacaccaatcacatacttcagtactttgccggtacggatgctgccagcaaacaagagccagaatgcagaaagtgtactgcccaatacgatcatggcaagaagtgcgatgggtcgtgcagcattggatcgcccgttaaccgctttcccattgagcagattacaccagtagaagtttaa

SEQ ID NO: 191087 - DNA, 333 bp, Arabidopsis thaliana landsberg
atgatcgacagcctcgattttgcgagaaaagcgcttgaaattcatgatacaatcgcggtttcgcagtttttgcggctggcggatttcctgagcacgccagacggtacgctcgagtatcagctgaccggttatctggacgagcaccgcagaccagggttgaaattgctcattaccggccgattgatgctggtctgtcagcgttgccttggggctctggaatttgatctggataaggaagccgtattcgccctcgtgcgcgatgaggcggagataccagacggcgaagacgagaatgacgaaatcgattatctggttgcagaagcgcagatgtcg

SEQ ID NO: 191088 - DNA, 98 bp, Arabidopsis thaliana landsberg
gcaatcatttctctgagcggatggctgtgaggaaatcctggatgcagcatgttcttattacatctgcaaaagttgttgctcgtttctttgtggcgctg

SEQ ID NO: 191089 - DNA, 414 bp, Arabidopsis thaliana landsberg
atgttttgtgggtggtggtcaacggattcactggcggttggatcgccgccgaaatcggaagggagagtgatatactaccatgtggcggatgatgatgatgatgttgaagatgactctgttgaggtaagttcgtttactttcaaaggaaatggtgttgaagagctgactatgagattgaaagaagagagcaatgtcgaagacgttatcgtttgtactcgtagtccgttgaacgggaagcttttcccattgcgtcttcaacttccacctaacaatgctgacatgactgttgtcttattgccaaaatcatcaaaaagtgagtctcttttggtcctaatttcaagtcaagtcgttgcattgtcactgatgttctctgttttcttggatttaacagtagcagaaaagttcatcaagtga

SEQ ID NO: 191090 - DNA, 507 bp, Arabidopsis thaliana landsberg
aaacagagaaaaaaaacagagaggcttacgttagcagaggaggagacaaaagcaggggaatcgagaaaaagagagggactgaaacaagtggaaggagagacaagagaaggagagatagagattgaagaaggagcaaaagatctgaactttggtatctcaagatcttccaaagaggaagtagatgttcttccggattgttgtgaccaattagcagaaccattcatgttttgtctggttctgctattgtccattgtaagaaaagaagcagccatacgaaaaatggaagtttgttttataaaagaccaatttcagatatatatagaaaggaggggggcttggagaagaagaaaatgagagaagtgatggttcttgttcttcttcatgtttctgaatatttgttgggtatgtccgaatatataacacatattgcacgtctgattggtgaatattatacgtattttaaaattttgtttaattgttcgtctttatttttagggtcacatatga

SEQ ID NO: 191091 - DNA, 474 bp, Arabidopsis thaliana landsberg
gtgggcgacggcgaggcctgcaagacctgcaacgcctgcctgaccgaacagaagccgacgcctgccaagcgcctcgcggcctgtccggcctgccgctcgtgcagcctcgactgcagccacttcaccgagctcgtcttccgcgaggcggggctgccgtacccctacctcgacaccgccacgatgttggcgctctcggccgagaagctccgccgaagctacggcctcgtcgacctcgaccgcgatctcgaccgtgcggctcctggcgacctgctggtctacgacggccatgtcgtcctgctcgagaagcgccacgatcgcgtcaaggggcagcctgcctaccggggcgacatcgtgcacgcgaccggcggccgggacatcaagacgccgggcgaagggatccagcgggaaagattcatagatctcgcgaattttcgcggaccgctccggcgcatcctgcgggcccagtccctttcc

SEQ ID NO: 191092 - DNA, 374 bp, Arabidopsis thaliana landsberg
atgatcaagaaaacccttttcgccgccgccgccattatggctctgtcagccgccgccgccaacgccgccccctgctccgacgaccaggaatcgaccgccggtatgctggctgccggtgtcggcaaagccgccgtatccaaggttgtcgccgttaccggcaagcagatggtcaatattgaatcctgcgaattccgcggcggcagctaccaggtcgactacaaatataatttcctcgccgctgacggcctctactgggtcgagctgtcggccaagtttggcgccgacggctccggcccggcccccaaggtccccaaattcaggccgaacatggccgcttccgaaaccaaggccggcgtccaactggctttccactg

SEQ ID NO: 191093 - DNA, 4281 bp, Arabidopsis thaliana landsberg
caagaagatgtctaagcagaggaagaaagctgacttagccaccgttttgcgcaagtcatggtaccacttaaggctctcggtgcgccatcccactcgggtcccgacttgggatgcgattgtgctcacagcggctagtcctgaacaagcggagctctacgactggcagctccggcgagcgaaacgtatgggacgaatagctagctccactgtcactttggccgttcctgatccagatggcaaacggatcgggtctggtgctgctactctcaacgccatttatgctctcgctcgtcattatgagaaattgggttttgatcttggtcccgaggtaaacattgtgttgacaggttagactattcataatttgacctcactgtatctcttgcttgagttgatatctgaatcattacggtagttggttttgttgattaactttgttaatttgatgaatctgggatgtgcaataaactacatctgtttatatagcagtgtggtgtgatttgatgttgtatgttaataatcaacagatggaagttgcgaatggtgcttgcaaatgggttagattcatctctgcaaagcatgtattgatgcttcatgctggaggtgactccaaaagggttccatgggcaaatcctatgggcaaagtattcctcccacttccttatcttgcagctgatgaccctgatggtcctgttcctctcctttttgatcatattcttgctatcgcttcatgtgcaagacaagctttccaagaccaaggtgatatcctttttttagctatgtaaaacatacaacggatgctgatttttgaattttatttgtgaaggtggattatttattatgactggagacgtccttccttgttttgatgcttttaaaatgactctccctgaagacgcagcttccatagttactgtgcctattactctcgatattgcctccaaccatggtgttattgtcacatcaaaatctgagtcacttgctgaaagctatacagttagtttagtcaatgatcttctgcagaagcctacagtagaggatcttgtcaagaaagatgcaattttacatgatggacggacactccttgacactgggataatatctgctaggggcagagcatggtcggacctggtcgctcttggatgctcgtgccaacccatgatcttagagcttataggtagtaagaaagaggtaagtttctcatattatgcagcttattcctaaagaatgatattgtacttcttcaacagactttgacctcttatacatgttttgtaattgaatgggtttttgactttgcagatgagtttgtatgaagatttggtggctgcttgggttccttcaaggcatgattggctgcgaaccagacctttgggtgaacttcttgttaacagtctggggaggcaaaagatgtacagctactgcacctgtatgtttgtactgatttcaagactagctaaacttaaaaaaaaagaaatcgagattgctatgcttacttttctaatctctttgtatcatcttgtgtcagatgatttgcagtttttgcattttggaacatcaagtgaggtattggatcatttaagcggggatgcttcaggaattgttggtcggagacacttatgttccatccctgcaactacggtttctgatattgcagcatcttccgttattttgtctagtgaaattgcacctggtgtctccattggtgaagattcacttatatatgattcaacagtttctggtgctgtacaaattggttctcagtccatagttgttggtattcacatcccgagcgaagatcttggaactccagagagtttcaggttcatgcttcctgataggcattgtctttgggaggtcccactagtgggacataagggaagagtgattgtgtattgtggtctccatgacaatccaaagaactcaattcataaagatggaactttttgcggtaaacccttggagaaggtattgtttgatcttggcattgaggaaagcgacctctggagctcgtatgttgcacaagatagatgtttgtggaatgcaaaactgttcccgattcttacgtatagtgaaatgctgaagttagcgtcgtggttgatgggtttagatgatagtagaaacaaggagaagattaagttgtggagaagctcacaacgtgtaagcttagaagagttgcatggatcaatcaactttcctgagatgtgcaatggttccagcaatcatcaagctgatcttgcgggtggaatcgctaaagcatgtatgaactatggtatgcttgggcgtaatttgtctcagctgtgccatgagattttacagaaagagtcattaggattggaaatatgcaagaattttctggatcaatgtcccaaatttcaggagcagaactccaaaattcttccaaagagtcgagcataccaggtagaagttgatcttcttcgagcatgtggggatgaagcaaaagctatagagttggagcataaagtatggggagcagttgcagaagaaactgcttcagctgtgagatatggttttagaggtaaaaatctagccaccaccgtttggtataacacctttcataaacctggatttaactcttttatttgttcttcagaacatctgttggaatcaagtggcaagtctcattctgagaatcatatttctcatccggatcgagtttttcaaccaagaaggacaaaagttgaactaccagttcgggtagattttgtaggaggttggagtgatacacctccatggagcttagagcgtgcaggttacgtcctgaacatggctataaccttagaaggttcacttccaattggcacaatcattgaaacaacaaatcagatgggaatctcaatccaagacgacgctggaaacgagctacacatcgaagatccaataagcattaagacaccatttgaagtcaatgatccattcaggcttgttaaatctgctctattggtaaccggcattgtccaagaaaattttgttgactccacagggttagcaataaagacatgggccaatgttcctcgtggcagtggtctaggaacctcgagcattctagctgcagctgttgtgaaaggacttctccagatatctaatggagatgaaagcaatgaaaacattgcaagacttgtcttggttctggagcaactcatgggtacaggaggtggctggcaagatcagattggtggattatatccaggaatcaaattcacttcaagttttccaggaatccctatgcgtcttcaagttgttcctttactcgcctcgccacagctaatttcagagttggagcaacgcctccttgttgttttcacgggtcaagtaagtagcaaccactgagaggaagaaaagattttttgttagctacagagtctcattcattttatgccttttttatataaacaggtcaggctagctcatcaagtcctacacaaggtcgttacaaggtatttgcaaagagataatctcctaatttcaagcattaagcgattgacggagctggcgaaatccggtagagacgcgttgatgaactgcgaagttgacgaggtaggcgacataatgtcagatgcttggagactgcatcaagagctggatccgtattgcagcaatgagtttgtggataagctttttgagttttcgcaaccttatagctcaggattcaagctggtaggtgcaggtggtggtggattctcacttatattggctaaggacgcagagaaagccaaggagttaagacagagattggaagaacatgcagagtttgatgtcaaagtttacaactggagcatctgtatttgaaagatacatacagtgtcagtgtgtcatcatcttgattcttgtaaattgatatatttttttgggacctttggaaaaaataaaagcagaagaatctttcagatttgcaattaaaaacgatgtcgtgtggtaaacaaaatcctttgcttgaccaagtcgttctcttcttgcttctggttggtttacttcatagttcaacgaccaccaagctgtgaagtgaccgtattacccctgcctggaatcaaggtcaagaggccccgcaatatcagtatgttggtagcattaggatttgagagataaccctgttccaagaatctgggtcgggtgtgctcaacagctctctacagctcgttgatggcatgagagcacgccactgcaaacaacgtaacttatcgtcgcttgtgtcgctgaagtcggatcccaccgttagaggttacacatgtaacgccgtttcctgcattgtccacaagcaag

SEQ ID NO: 191094 - DNA, 115 bp, Arabidopsis thaliana landsberg
atgaaaaagaaagaattagatgtgagagtgtttgaaaaccagttgtcggagaggagagaaaacccggcgccggcaagcaggagccctaccgacgccggaaaacattgtcgtaaag

SEQ ID NO: 191095 - DNA, 120 bp, Arabidopsis thaliana landsberg
gattcagactcaaaaccggattttaaatacagtttattgccacgtcggacctgtgaacggttcagatttcgtgttcgatactctcgtggatcggtgacggtagacacaacccaacttccg

SEQ ID NO: 191096 - DNA, 92 bp, Arabidopsis thaliana landsberg
accggaccactcatcagacgtggccgtcatcagccgagttaactccttgtaatctttctcaaaagcagtatcggttaaagatagtgaaatga

SEQ ID NO: 191097 - DNA, 267 bp, Arabidopsis thaliana landsberg
gtaataagaaaacttggtggtactgtgaccttggatggcacaacgagcacgcatattgtcaccggaaaagtcaggaaaactctgaatctctgcactgctctttgctctgggttagtctcaaatatacaggcatcatattagccattgtgaacttatgcgtaaaatcataggaatgacgcggtttatggtccatcatacttgcttgcagggcgtggatagtatcaccaagttggttaaaagaaagtgtccgagaaggaagatttgcta

SEQ ID NO: 191098 - DNA, 316 bp, Arabidopsis thaliana landsberg
gggttacaaacgctttttcaaacgatcagctttagaaacctctgactacttaaaggatgattgtcttgtcatcaattgtactgttggcgttgttagagcccgactcgagggtccaaaacagtatggcattgtgctacccctgtcgaatatgggtcagggattgaaagacttgttagattctgaagttggttgtgacatagctttccaagtcggagatgaaacatacaaagctcacaaactgattctcgcggcacgctccccagtttttagagctcagttttttgaaccaattgggaataacaatgtggatagaata

SEQ ID NO: 191099 - DNA, 179 bp, Arabidopsis thaliana landsberg
gtgggagaggagatggcgtcactcacaaaaatagcttgcccgattgtgatgacatcactcctcatattctcaagatcaataatctcaatgtggttcttgagtcatctcggaaaagtcgaactcgctggtggtgcactcgctatgggctttggaaacatcactggagtctccgtacttaa

SEQ ID NO: 191100 - DNA, 307 bp, Arabidopsis thaliana landsberg
atgcctccgaagggtgtggggagctccctccacttctcggtcctgagctcagtgacatcaaccacgcaaacgcagctcttcgttgtgctcttccctggcgcttggaagatcttgcccctgccaacctccttcccatcgctgtcgactaatgatacaaggcggccgggctccagcgagaaggatctcgtgaatggacgtaccatcatcgtcgtgttcggggatagctctgcctgcgacgtttgctcagtgctgtccgggctcaacaggctaccacctttggatagagcagtcatcacacctgcagggg

SEQ ID NO: 191101 - DNA, 182 bp, Arabidopsis thaliana landsberg
aactcgcgatctggaaggatgagtggtgcaatgagtgtccatatgtagagtccggccgtgacccaacccgtgcatatcttgacccagaccgaggtccacccacatcgatcagagtcgactctctgatgagtcagtccatccgagagaacattgcagcgtacatgctcgcagcgcaaagatga

SEQ ID NO: 191102 - DNA, 362 bp, Arabidopsis thaliana landsberg
cgaggcgatgttcattagcgaacctgtattgtttccgagcggatgtcttcaatgggatatccgtgctcattgagagcaacggttacaagtttcagtatatccgcattccgcgtccggaaagccacgacacatccgccacgctgcctgtcccagtaaacctggaggccggcccggctgcccgcatcgtacaaggccaatacccgctggaccacctggctgatgcggccgcactgatcgagtatccacgattcactcaaaaactcgggcatgctgatgcacagctcgtgcccgatttccccaaacgtaccattgccctggacgctcatggcttgcggcatccgtacggcgcagcttggcgaaag

SEQ ID NO: 191103 - DNA, 36 bp, Arabidopsis thaliana landsberg
atggatgatatcaaagttgtcatcaaatgcatagag

SEQ ID NO: 191104 - DNA, 157 bp, Arabidopsis thaliana landsberg
aagtgtagtgagcggaaatcgagctagaagaagagaaattcgcgaccggaacagagatcgcgcgacgcggcttgaagacggaggtggaagagaaaccggcgacgcggaagaagagggttttggaagatccgaattgcatgattatctcaaggaatga

SEQ ID NO: 191105 - DNA, 307 bp, Arabidopsis thaliana landsberg
atgggacagggtaagcttgaacccggctattccatacatgaaaagacaatcgcgcactgggagtggagagatggcgagagtggcacgtaccctcctggcaaaggaccgcctaaaaagggtggtgtgctctcgggtggcgcggacctgttcatgcagtggaggatccgtgggaatggtagacatgcaaggtttatgagaaacttatgtcgtgtggttagagatcctcagctgagtaaatcgattcggatcgccgttatatcctcggagagtggagacttgatctccgacctacaacctaagtcaggac

SEQ ID NO: 191106 - DNA, 1576 bp, Arabidopsis thaliana landsberg
gtgttgttgggagagaattactatactgatagatcatcgaaacaaactgttgatttcctgaagagaagagacaagactttacagtctcaaattcattctcttaaagctgagattgaagatcttcaaacggaggcttcattcttcactacaactgcttctgaagtagcggtaggttttgctgaaagagtggatcgtgtgttcctttttcttgattctgcatatgtatcttaaccggtgttatcattttttataggatggacttgttgagataagagaagagtatgtagaagaagattcttctgcacctgttgtgatacattcaagtgaaaaagagccttgtaatctttctgaaggagagactgaagaaggtgaacttgaagacgatgactttgcaagaatcatggccaggttgaatgaacttgaaatagaggaagaactggagggtaaagatggggatagtagaggtgaagatcctgattcttcagtagaaagtgtggaacagatccagcatgatttggtgaaaggaagtagaggtgagacagaccgtggtagggttgaatacgggaaacaagaaactaccatatctgttcctaacaaagcttccggtcatagctcttcaccgagggtctcagaggtattttccaaggaaatttaacatctgggttcatgtttatggttaatgggttttcctaaagtttatttacttataatccagccaagggtcgaagccaaaattattcaagtgttaccagagacacatccacacaaagatctagatgatccgctgaatgtaagaaaaccccttcactttgatgttctctgatttcattagcgttttacagctccttctcagatattgcctgttattgcagcgtatccgaccaatggcacaatatctttccaaaggttagcgttatgatctaaagcatttcagacatcagaaaagtgtcaaattaatatattcaacattgaatcatcttcctgaaaacaattctctaaccaacatctatgttcttttattaccaaaaggtcaatcacgtggcggaacccctcagcaaaacgctgaaacatggaaagactttcgaacgaatgcaaaaaccaatgttttaggaccacaaaagattaaggtatttagatctatattcgaaatcaagctaactaccttgcattatggacatgttttctgcaacaaaacttatcattcacaagcatctcacaaataatcatgccaactttttttgggtgcagccacagaagccagagcccgagtttgattctaccaaggttacatacacatctctttcggccaagcgttagcaagttgtatagttgctcagatagatctgattttcctttaagctcactaaatttctgatccaactcgtgcaggcttttactggatcaatcgtagagcatgcccatattctagagaccagcgcacacagccaaacgcaggtactttttaatcactcgaactacacaacactcataaatgcaggaaacatgattcttattacattttttttgtttgttatcttgttatatgtcaacagtcttctacgtctcaaccgtctaa

SEQ ID NO: 191107 - DNA, 94 bp, Arabidopsis thaliana landsberg
atgaccaaaatgcagtccatggcgttagatttggaaagcccttccacaaagtccatgaaaatggtgtgccacgcatgtggaggaacaggcaaag

SEQ ID NO: 191108 - DNA, 663 bp, Arabidopsis thaliana landsberg
tgtttgaaaagagaattttgaagagagagaaaataaaaacaactaaaaaatcatacctttatcagtatcagtctccgccgcacgcacaacaaatctccgccctacgagagatccacaacaagatcagtaaaaaaaaaatcgaagaaaacattcatcaatctatccaacagaatgctaactaccgggtgattcgtagatcaacgtcgagaaaccagaacgccggcgagtgaactcaacggaatccgaattccgaagagagaggactccgactcgatcgacggaggtaactctggaagagtggatggtggagacagtgttgagaatcgaagtcatagaaccgacggaagagagaatcgtctctggtggtagttaagccggagactggagtggtgtgagtctgtgagttgctgtttcgggaaacgagtggttgtccgttaccggagataagtaatgtctacgttacagttttggcggcctttgattcaataactgccatgtggcacgatcctcttggcaatactagttgtgtcggatgttagttttgttggacaaaggaccttcattgaagcagaatgggcccggtttaaatccaaagcccaaacaaaacccattagggtttcattgaagcagaatgggcccagtttaaatcgaaaacccaaataa

SEQ ID NO: 191109 - DNA, 419 bp, Arabidopsis thaliana landsberg
  unsure (1)..(419): unsure at all n locations
atgggcgccggccagcaaaagatgtttcgctttatgccggtggcctacgccgtgctgttggggttggggccggccggtttgtnnnnnnnnnnnnnnnnnnncaccatttgtcgcttgttgacgcagtggtgggtgtatcgcgaggttgatcgcgaaaccgcccgccgcgaggcggcgaaagccaaatcctgacgcaaagggccgggcttttgtccggccctttggcatgcccatgacggatacgaccaccgacaccattgccgtcatcgccaccgcccggggtgcggccggtgtcggcgtggtgcgcgtgtccgggccgctggcaccggccatcgcggtgaccttgctgggccgtgaaccgacaccgcgtgacgcgcattttgcaacctggcgcgacgcggcctgcgacgtcatcgacc

SEQ ID NO: 191110 - DNA, 98 bp, Arabidopsis thaliana landsberg
tgaatggagacaatattcgcagactacagagaagctactacgatcctgacattagggttaacttagctactacaccttccatgaccttgtcccgttga

SEQ ID NO: 191111 - DNA, 214 bp, Arabidopsis thaliana landsberg
aataatatattcttatcatttgttgatattatcatcttaccgtcgatctccagttctctatatctcaatatcctccggcaagctcatacatggtaacacgtatgagattggacatgcctttaaaatacggctttatactcagcaatcgggtcatcgacgtttatacccggtcataggatcaaatcggctacaaatcgagtcgtttggtcattga

SEQ ID NO: 191112 - DNA, 819 bp, Arabidopsis thaliana landsberg
atggataacactgagcctgttcaagatattaatgatgtaactgttatagaccgtggtttcttacatggtgattatgttgcttctgcttctgagcctactggtcaggtgggagttgttgtggatgttaacatatcagttgatttgttggctcctgatggttctattcacaaggacatctctaccaagaatttgaaacgcgtcagggattttgctgttggtgattatgtggttcatggtccatggctaggtagaatcgatgatgtgttggacaatgtgactgtcttgtttgatgatggttccatgtgtaaagttctacgtgttgaaccccttcgacttaaacctattcccaagaataatcttgaagaagatgctaattttccttattacccagggcagcgggttaaagcaagctcctcttcggtttttaagaattcccggtggttatctggactggggaagcctaatcgtttagaaggtacggtgaccaaagttactgcgggatcgatttttgtctactggattgcctcagctggctttggtccagattcttctgtttccccacctgaggagcagaatccaagtaatttgactttgttgtcatgtttcactcatgccaattggcaagtgggtgactggtgccttcttccatctgtgaatcaatctgctacaatccccttacacaagcatgtatcgaaattaagactttatgattcccaagctgatcggcaacagaaaagtgggcgcgatttagaagatgtgcaagatgaagtacgtggaaaagttaaaccagctggtattactgctgaagctttgccaaaa

SEQ ID NO: 191113 - DNA, 722 bp, Arabidopsis thaliana landsberg
atgagaagtaacgaaatgacaaaaccggagacacgagatcggatttggaggttgatcggaaaacaaagaaacacatccattaaaaccggcgattacaagaagcactgctttgcggctacgacggtggatccgaactcattgactgaagtaattggttccagtcgctaagtcgaccccccgaacaaacctgaacctgcaacacttctcccgacatgaaccgttccccagataatccggaacccaatctctctaatcttcgacctagcaaaaagagagaacctagaaatctaacacccagtctccagcactaacaataaatgttatcttctccaagcaaagcaaacctcagatccggcctgacgaaaacaaaatcttggaagctgggaggatcagtggctcaaaccaagcctcaacaaccgaaatccgagaaaagccaaaacagatccattggatctgtcgttaatcgtctcgacaaacagcctaacccaccaatccgccttcatgacttccgccgcaatccgcagccctcacctcgagaagttgagccacaagaattctccaccaccataattctagcgtccatgaccagaaaaaatagcatcgggaaaatcctcaaacttgtcgtagaggaagccacagatgcatcacgaaccggaactccacaccacagctatcggagaggagagctcgctcaccaccgttttatggagcaagaaccctga

SEQ ID NO: 191114 - DNA, 157 bp, Arabidopsis thaliana landsberg
tctttgtgcggcaaggcacagcagcagtacgatgtggtggtatacggaggtactcccggtggtgtaatcgcggcagtagcggctgctcgtgagggagcgaaagtgctgctcatcgagcagactaggcatgtgggcgggctcaatacgagcggcattg

SEQ ID NO: 191115 - DNA, 46 bp, Arabidopsis thaliana landsberg
atgccacgtaagcgtaccttacagaccaaaaaacacctaatgcaag

SEQ ID NO: 191116 - DNA, 16 bp, Arabidopsis thaliana landsberg
gtgcatggaagagtag

SEQ ID NO: 191117 - DNA, 778 bp, Arabidopsis thaliana landsberg
atgagctacgctcgcaatacactgcagatcatcagagatccgaatctcgtcaaatcagattccgatcttcagaggaaacagcgaatcgtccttgaagcggtcgtcgggctcctcccaacgcaagcgaacaaaagctcgattccgatctccttcctctctagcttgttgaagaccgctataggatctggcacctccgtctcttgcagatccgatctggagagacggatcagccacctgctcgaccaggccatccttgaagacatccttattccggcgaacatcggcgccatgtacgacaccgactcggtgcagaggattttctcaatgttcttgaaccttgacgagtgcgactacagagatgatgatgacgacgaggaggacgcggtggacgagagcgagatggccatgtacgatttcgagggggctgagtcaccgaaacagagctccatcttcaaggtgtcgaagctgatggatagttatctcgctgaggtggctctggactctagccttcctccctccaagtttatagcactcgcagagcttctccctgaccatgctcgcgtcgtctgcgatggcctctaccgagccgttgatctcttcctcaaggtatatcagagtctgcttttgataatgagtgttgtatgattttgattgctgtgttacggttttgtattaggttcacccccacatgaaagattcggaacgttaccgtctctgcaagacagtcagctgtaagaaactgtcgcaggacgcaagcagccacgcggcgcataaatag

SEQ ID NO: 191118 - DNA, 740 bp, Arabidopsis thaliana landsberg
caagaaaaagaaacgaaatttcacaacttcactcatcaggctctggtcaaatcgatttcaaggtatgttttttgatgttatatttgttcgaatagcccgagaaattgctttaaatgatgcattgatgattgcttctccaggtgtttatggagtctaaacatgaagaacatgtgttatccaaacaaaaacatgatcaagatgtaaacaaaaaaggttcattagacgacgaaaatggagatgttgagcataaaacgatacctttacaagaaacagaaactgtaattattaactcagaatcacattcaagattatcgtcgtcttcgtcatcttcgtcgtcttcttcttcttcgtatttatcgccaccgaaagatctacctgaagaggtactaaaagaatcattgaatgatccggagatttcttcaccacctgttcaagtaatggatagagataacaacggaaaatatgacccgaataggattccatcttcggttttcgagagaagcaaatcgaatgtgccagctgaatggagctgcacttcgaatgaatctctcttcagtattcatttaggaaacaatagtttcactggttatggtggtgatttgatgaaatcaggtgaactttataaatccggtgagttacttgcgtatagtcctggacttcctatgccgcctgtaccaggatcggaaccaaaacccgtagtcgaagaaccgaaagttgttgaatcagataaggaagagaaa

SEQ ID NO: 191119 - DNA, 335 bp, Arabidopsis thaliana landsberg
gtcggagtagggcaacgacggcgagctctgcggcggagttctcaccgacgaactacggaccatgtccctagcgctctaaaatcgaagcagatggatcctacgcagggcggaggtgagcgcaaaactagtgaaggatccttacttgctaggttggtgagggtggtgctacctgcaatgacgcctacggcggtggttctcctggccaaccgacgaggaatactccgcgccttgaagacccccaaccccgtccggttcggattaacgcttatagaacgaagggtgagagccgtgcagagttctcaccgagatcgaaggagtggaagatcctgcccacg

SEQ ID NO: 191120 - DNA, 255 bp, Arabidopsis thaliana landsberg
agattttcgaaagtgttgacaaaaacaaagatggaaaaatttcatgggacgaattcgcagaggcgaatcgcgttttttctcctcaaataacatcagaagaaattgataagatgtttatagttcttgatgtcgatggtgatggtcaaattgatgatgtggagtttgcttcgtgtttgatggtcaatggtggaggagaaaaagataccgaagaagaagttgttatgaaagaagctttcgatttgtatgatatggatg

SEQ ID NO: 191121 - DNA, 126 bp, Arabidopsis thaliana landsberg
ctccagctccctgaaggtactcgagctcatcgcctctgctacggccagcactgccacaagtatactcgacccctcttcttctactgcagtcagcaccgcggtcgagtgatcttctggcgtgattaa

SEQ ID NO: 191122 - DNA, 354 bp, Arabidopsis thaliana landsberg
gtgtttgccttcttcaagtcgcagggcaagggtcacatcacgcgcatgcagaacgtgctcaaggcgtatgtgaaggcgcacaacaagtagccttctgggaatatgtcgttgatccggcggtcgattgtcccctagatcagcggcagttcttcgtttcgaaagccgtgcaccgatgaccagcgccaattccccctacgacgtgttcgtcatcgtcgggggcgtcaacgggacggggattgcgcgggatgcggcggggcgcggctattcggtgatgctggccaagatgcacgacctcgcctctggcacctcgtcggcagcgaccaagctggtgcatggcggcttgcgctacctcga

SEQ ID NO: 191123 - DNA, 1303 bp, Arabidopsis thaliana landsberg
atgttgctcatgtcggcaactttatctacgcacataaaagtcaacggaaacttggggctatctatatatgtaaggtcgctttatcatctatacgaatcactacaaattcacatcacatttatttttcctataacgatggtgatgtttagtatcttatgctgtttcaggaaaaagccagcatctccgccccaagtggttgaaacgggcaagaagatttcacctttgcttccaccgccgcaagtaaccaaaacggccaagaaacagccgactccgccggggcttaaaaagcgtataacggtcaaagatggaggacttgttgtttcaaagtcgagtaagactaccaccaagagttcacgccgtcgaacacgctatggaaataacgccggcggttttggaggttgtggtggtgggtgtggaggcggctgttaaaattattacattattaacttgtcttatgcgtagcggaatttttttttattataattgtgccttgcttataacttgtgatcttggaaatttaatgtacaaagttttctttacaatatattacgtggatcctcgactcatcgccgagtatatataatcttttattcttagataagagaatatatattatagttatatgatagagtccaagtcgatgatttttgttggattcacacaaaataggatcactattctgtgaaatctgtatattttcgagcgactcaatagtactacgaggagaatgagatcactgaaccatgcacaaagagccttaaaaacaagtgtggaagttaagaacatgtaggaaaatcaaacatttcttttggcaagccctttcagaatgcctagcgactctagcagactcttatatctccattgtgggttagatcgtacatgtatgagatgcgatggagataatctataaatcatcttctttttgagtgtccactgacaatgcaagtttgggttttgtccaatatatcccaccaatctgggtgtcttcccaagcacgtcaatctttacaaattttgatttttttctttggagagcaatggatttgggagcaataaaggaggttctaaaatcatttccatggattctttggtatgtttggaaaggtaggaatgataatacctttaataataaagatattttgccacctgataccttacagcttgcaatttcggaagccactaactggagacttgcgcaaatcattgaacaacagcggaaaacgaggaagagagttcaactttgctctaagccatcccgaacaacaacggacagctccgttgtcaagtggatgcttcttgggtag

SEQ ID NO: 191124 - DNA, 99 bp, Arabidopsis thaliana landsberg
attctgaacgaaacagtgtcgtacaattctgcataccatctctgcaaatcagactttgtcgagcagcagatagagcaagtgaaatcaaaattccgtgag

SEQ ID NO: 191125 - DNA, 865 bp, Arabidopsis thaliana landsberg
cctacaccgccggattctagtattcctacaccgtatccggtttatccgtcggagtcagtgagcggcaatgactatgaatcgccgatcagtgaggttctttctcgaatggggattaaattgaagagggagtggtgggtatcttgtgtttcaggacttgaaacttcaattccacaattttcctacctcgatgttgcagctaaagctaagcattgcttcgagcagtttatgttttccgatatgaatttatgcggaggtggtgttcttcctccgaacgttgcgtctatgaatcgtatagaactcgctggtccgtttgttctgcaggttatttgattgtttggtttttacactgtatatataattgcgcaatgtgtgattttggctgaacatttttgcttaaatttttcaaatttaggttgatgagattgttaacattggctgcccactcaaagggaggtatgagaatgctaatgcagggcttaagaggtgccttaagctgtctatgacagatggtgttcaacgcgtttttggtatggaatacaggcctattaaagatcttcaagtcttggctcctgctggtttaaaggtgtgtgtttcttgttgaggattgtagttgtgaaaattgtatgaatatttgttctaaggccattgtacagcctttaagattatttatacatgtctgtgtttttagtacaagtactgacaagaacagctaaatgcagattgttgtatctagtgtacaagttcggcatgggcttttaatgctagtacctgagattgtagaagttttaggagggatggttgaagaactagaagaagcacgaaagcgtctggttgttgaagtaaacaaacctccaagaggaaaaag

SEQ ID NO: 191126 - DNA, 438 bp, Arabidopsis thaliana landsberg
atgccgtataaaggggttttgagaggttgtgcgatgtatcttcctgtaagtactgtgtcgctcgtttcctagctattctaaaacagaaatgcgtttgcttgtttattcatgaaatgggttatgatgcaggatctctggaagagccgttgttgcctgggaagtgtagaagggtttgaccatactctggtgaatacaaccttagggggatgtggtgatctaccttctggtaaagacagtccttgtttgcccttcttcatctggcaatgtggagagacaaaggtaaacagaagttgttagatttatatgtattggcaaactttgggaatgtaaagatggttccttttcttggacaattttcagaaacttagcaaggaattcacagtcatggagtttgacttctccaagcccatcacaggtccatgttctggggaagttcag

SEQ ID NO: 191127 - DNA, 251 bp, Arabidopsis thaliana landsberg
aaagtgaaatttctaaaaaattcatcttagtgggacgggagtatctcttaacattcaactggagtttgaagagaaacaatctaaagcgacatcaaaaccatggccatgaagaaactgctgtgcacaacgatgaatctaaagagtcgaaaacacctttcctccaaatcttgagaagtacaaccccttcaaaaaccaactttaaaatactacaatctggcaaaactggaatgcaacttatttaccgacaataa

SEQ ID NO: 191128 - DNA, 567 bp, Arabidopsis thaliana landsberg
attgtcgtatccgtgggtatagagtaatacccgacccgaacccgatactcgaaagggtatccgcttacccaaaattacatatacttattcatagatttatacatataaaattttattttatatttaatatttgaaccaaatacatttatatccaaatatccaataataattactaaaaactaaatgtacctatatttaaatacttaatactaaatattttatatatgcaaaatattcgtaaatgttttggatatttggacaaaatttcggttattcgggtaaaattcagatatttgggtaaaattttcgactatttgggtataatttcgggtatttgggtaaaattatcgactatttgggtacaaatttcgggtataattttgggtatctgggtcaaagttccgattatttgggtataaattctgggtatttgggtacaatttcgggtattcggtaaaatttcggatatctgggtataaaatacccgaacccgaaggacacccaattttttccgggtatttagcggttctgaaattctatacccgaacccaattgacccgaacataa

SEQ ID NO: 191129 - DNA, 224 bp, Arabidopsis thaliana landsberg
atgaactatcctcaaatcaacgcgaagaattgcaaggagagtagagtaggggacggcgagctcacgtcagttgggaggtgaatgactggtggttctggtctcacgggaatttcctcaaccgtccaatgtatagtggtgccgtaattgaccgggtgatagatgtcgccgacgacgaaggcgtgtccgaagaggagcatgttcgaggggctggagcggaggacacg

SEQ ID NO: 191130 - DNA, 62 bp, Arabidopsis thaliana landsberg
ctttatattgccctcgcttttgcccgttcatgactcttatgatgcttggtcgtaaaacgtga

SEQ ID NO: 191131 - DNA, 453 bp, Arabidopsis thaliana landsberg
cgcgcgggacgccgccgagaagccgccatggccgaccacggcggcgaacaggctgagatcgttcaggtcaggcatctatcgttccaatatcgcaacagtctgtcgcgaaaggcctgactacaccgatcatcgttccacatccagattgggactgtccaatcgcgcctttcacgggaagacagtcatgagggttcttcacatcgacgccggcatcacgcccgagtccgtcagccggcggctctccgccgaaatcgtccaggccatcgtcgcggccgccccggacgccgcggtggtgcggcgcgacctcggcgcccagcccatcccccacctggaccacgaggcgctggcctccctcggcgacaacgccgtgctggacgagttcctcgccgccgacgcggtggtggtcggcgcgcccatgtacaacctcggcatcgccagccagctcaaggcctg

SEQ ID NO: 191132 - DNA, 267 bp, Arabidopsis thaliana landsberg
ggtgccattgagtcggtgtccgctagtgaaattaaactaagcttacgccagtccttggtcaaacttggcgttggttttctttctagagacccaaaagtgcaagtcttgatatctgatcttgaagttgtgatgaggtcctcaacttcaacaacaaatttacagaaagccaaaagtcataaacctcgtacttcaggcaggggaaagtggatggtggtggctaatattgcaaggtttctttcagtttctgtcgcagatatggttgtgaag

SEQ ID NO: 191133 - DNA, 408 bp, Arabidopsis thaliana landsberg
atgagctcatccgctcaggagcaatctgttgtgagcacatttgtgcagactttagaggatgatccaggtagccttgctggccaacttgtcgacgcatttactgatgttgtctccaccaaaaggccaaacaatggagtaatgacctcacattgatcaagcttcccattgattcaaccacattctttcttagtatgaataatatgattagaactaaatagtccatgatttctctaacgtggattcggctatttatcatcaatttggaccacaggattgaccacattgcaaatctctttggattggggtttagatttaggatttgacataataaatgggcgtttcggtttaatttcgggttcggtttgggttcggttcggttcgatttatttgggttttgtaaaattctaa

SEQ ID NO: 191134 - DNA, 651 bp, Arabidopsis thaliana landsberg
actgtaggaaactacaaaaagagccacaacaaatgactataagagaggaggcagaacaaggagaagatggacacaaagagacctcaagaaagtaagttgatggataagttgatagatggaaagtcaaatgattttgatgtgtaggtttttttttgttttgtttatcatgttcttataaaagttagagcaaaaaaaaaatgaaagatgtgttttgttgtatatagaagttgtagtagaaaggataaggagacacaataaaactcaggtgatgttgatgctctcaatactttgcctttgtgtattgaccttgagggttatattaggaataagaagagtgattatgtaacccccaaacaaacttaatttagaaatagtagccattatcttaagcatgttatctcaaaacaaccatatagtaaaatgtttggacgaatcctgaatgattgcaacgtgcatgaaaacattggaaagcataaaaatcttggaaagaagggtccaaaaagatctgacggtggagaattcagacacaagcctacgtggacggaacagtcatttctggtcgagacagctcacgcgcggctggcggcgaaaacatgggacccaaacgtgaaaaccaatcatgtggaacgggtcttgacacgtcagcattaa

SEQ ID NO: 191135 - DNA, 66 bp, Arabidopsis thaliana landsberg
tttccacattccgataagacggataatccgaagctgtcgcttcactcactcgatcgctttttgtaa

SEQ ID NO: 191136 - DNA, 366 bp, Arabidopsis thaliana landsberg
atggagtacaacgaatacgaacctgaacctcaatatgtagaagacgatgacgatgaggagattacccaggaggacgcgtgggctgttatatctgcttatttcgaagagaaaggtctcgttcgtcaacagctggattcgtttgatgagtttattcaaaatactatgcaagaaatcgttgatgagtctgctgatatcgagatccgacctgaatctcagcataatcctggccatcagtccgattttgcggaggttgtttcctcgtttttgttttttttctagggtttctatgggaattcgaaattatgtgcgggtttatcgtgtttgtggcggttttaaagtgtttcgatttgagcttctaccgtttgg

SEQ ID NO: 191137 - DNA, 153 bp, Arabidopsis thaliana landsberg
acttctagtgggacctcaatgagtcgggtttggtggctagaacttgggctaaatctaatggcagctccggaggtgcgggaggtgggtctcactcccttctccatcggcttctccttcagctcctagggaaaccctgctccaatcccggaggcg

SEQ ID NO: 191138 - DNA, 227 bp, Arabidopsis thaliana landsberg
gtgaaaagaagctgttgactcctcaaccgaggctaagaacaggattcttctctgtactagaatctgatttgttgaaacccgaaacgatcatggaggcttgcacttctgtaggagtagccaaatatggaagagcgattggccttgatgagaaaatcaaagtggatctcattgtcattggctctgttgcggttaacccacaaacgggtgctcgattagggaaaggagag

SEQ ID NO: 191139 - DNA, 1331 bp, Arabidopsis thaliana landsberg
gaaatcgttgacgacgaggaaattggggatgaatcgccgccgcaggctggtggaggatatcgcgatgatccatggtatctcgaattcacagagatggtgaaacatttttttatctcctttctgattttttcttcgtatgttttacatttataattggatttgatcctcatggtttagctacttgttcaaattcggttttgattttgatgtaggtgcgaaagcatcgtgaggaggaagctgacaggcgtcagcgtggcatgtctacctgggatgataagataatccgtgccgcgtcatctgattcggaagtaaatatcttttgtccatctttatttcttactatctcccaatgattttttttgttaatgagcataggtttctgatttttttcagggaatgtcggatgatttttatgacatttgcctcctcggcagacttggactttattgttacaattttcagaagatttttttataatatatttttattctacccctgttctctaggacactttatcattctatattattatctcgtattagggtaaaaacttcacgtttgagcgtgtgagaatgagtttatattccgagtatggttccaagattttctttacaatggaggctgaggatccagccgacgattattctctatacgttctaaggacgtgggttaagcatgacaagcttgcaaacactgtgcaatcaacgtgggagatatgctttttgcgatgtgataggtaaaacagagcaattactctattccattcctagggtttataattagacttttgacttcatttttttatattttggcaaaaagagacccgagaggcggatcatgagtgggacaatgaggcattaatagatgatcggtaccaaggtgaaatgcccaaatggttttctgatgaggatgtgcaacattgctatgtggtaattaactctctgctgcatctagttcttaactaaaagagtatatgtttaccaagtcatgtcttgttaatgactgttggttgtggatccctcaggtggaaaattcagagttgttgatggaccctaacctgcatctcttcgctgagtttgcattttacaagaaatagtgtcaacagtttgaggcaatagatattgcgggatgcctaccattgacgattcaaaaggttgttgtcgaaactcgaggagaagctgaaacagagccgagtgagaagctcaaggcggctaatgcaatcttctacataagttttcactgtgcctgtgaaccagtgatagacgatgagcctaattatagagagactaattatagagcggttgtacgaaagacaatggatgggaatccag

SEQ ID NO: 191140 - DNA, 583 bp, Arabidopsis thaliana landsberg
atgtcattgcttcttgagaacacaccggccaaatcttggtttcaagaaatgaaaagttgcaaaagagatccaggaaggataccgttacatcagaatctttcaaacctcgcgaggctagcgtttctttacaagtacggaggtgtgtatctagataccgatttcatcgtcacaagaagctttaaagggttgaagaattcaataggagcacaaacagtagtggaaggagattcaaagaactggacaaggttgaacaatgcggttctgatcttcgagaaagatcacccgcttgtttacagtttcatagaggagtttgcttctacctttgatgggaacaaatggggacacaatggtccttacttggtaacaagagtagcacaaagagcacgaaaaacgattggggataatttcacagtactgccaccagtagcattctatccattcaattggttagacattccaagactgtttcaaacgccgagaggaagcaatgactcaacgttactcaaaaccgatctggtgaagctgaatagagaaagctatgggcttcatctatggaacaagatcaccagaaagctgaagatcg

SEQ ID NO: 191141 - DNA, 27 bp, Arabidopsis thaliana landsberg
tctcgatacgagaaactgcgtttatga

SEQ ID NO: 191142 - DNA, 363 bp, Arabidopsis thaliana landsberg
aacaatgagcaaggtgatgagttccgctctattcttcgcggattcggacctgttaaaaaactcgaaccatatgtcgttcgtctcgatgaaagttgttcgtcagaactttcgcaacgtgtaagcatccttatctggggtaaacttcaaaaatcaaaaacagaacaaatccgagttatcaaagataacgtgactcatgtgttcttcaaaaattacgcacaaaacgtaaaagttgttcagaatattttctcacgaatattctccgccatcgtgtacaagcttctcaagcttccgattggcgcaaccaatgccgccatctacagccgacaacccccaatggaatatgaagcgactaacccacagaag

SEQ ID NO: 191143 - DNA, 72 bp, Arabidopsis thaliana landsberg
atgaagatagatgacaaaggaagagttatctcattcagtgaaaaacctaaaggagacgacctgaaagcaatg

SEQ ID NO: 191144 - DNA, 356 bp, Arabidopsis thaliana landsberg
atggctgagaccaaacctggttagtattttcatacatttcctgcctttattcacagagatatttcttaagtctaatgcaaattacaaattgttaatcagaaatagagatgtcggaggaagagaggaagatagtgaagataagctcgctgaagaagaaagcgataaatgcatccaacagattcaagaactccttcaagaaaaaaggtcggagaagcagcagcagagtcatgtccgttccgattgaggacgacattgacgcagaagatcttcaagctcttgatgcttttcgtcaagctcttatccttgacgagcttttgccatccaaactcgatgatctccacatgatgcttcggtaa

SEQ ID NO: 191145 - DNA, 62 bp, Arabidopsis thaliana landsberg
atggcgcttgctcaaacaccttatgcgttttctagcggtacccgtcttgcattttggcaacg

SEQ ID NO: 191146 - DNA, 128 bp, Arabidopsis thaliana landsberg
agaatttgcaacacagccgatcagtgcgcatcgtggagccctgggtttaagctcagcacaactgtgtggaattcaatggcagtgcagctggtggatggcgaatttgacgatgtatcgctgcgaaacgg

SEQ ID NO: 191147 - DNA, 156 bp, Arabidopsis thaliana landsberg
atgaagctggggggcgtgcgcgcgatcgcgaagctggcgcgcgaggaagcggccgatctgggtggcgcctacggcgaggagattccatcgttcggcgccgagtacctgatcccgcgtccattcgacccgcgcctgctggtgatgctggcgccggcg

SEQ ID NO: 191148 - DNA, 796 bp, Arabidopsis thaliana landsberg
gaccaaacatcacagacccatccatgaggaaggcggaagttcaggggctgtttctgtggacgctatttcccgtatgttggatgccaagcttgaaactcaggggaaaacaatgatatccacgctgactgattggtttgccaaaaacacttttatcgaaggagaacactcaaaggatcctgattgtgggattaatcgtcctagggagcctaccccggctagtaatgttggtgcttcaaattccgatgatttgggttgcaattgtggtaatgatgaatttactttcaatactctccgccccaattctcgatctcattgccgtgaaagaacttctaatctcgaggcaagtgtggatgaaattttatctttctacactaacaaggtgtcaagtggtgtcaattgcaaagaggcggaggtaatatgttgttttctaaccagttacgttttttgctgggtggttgaatatcttcatgatcccctttcttttttgttgcggtatagcgtgagaaagttgttccaatttccaatggatgaagatagtcgatatgaaggcgacgtggtggataatctacaggtgggcgaggtgtagatggttgtatttgtttaagttaacttagaatttagttattagtttacttagatgttaacaatgacattatcttcaaaaaggtggtgttttatttttgtgtgggtgtttggtgtataacaaacattctgctaaattgttttgtaggtcgctaacaatgttacagatgaggttgtcccccctctatattctggtcctgaagataaatccgag

SEQ ID NO: 191149 - DNA, 90 bp, Arabidopsis thaliana landsberg
agtacggaatgcggttggccatagctgagtggagtggagggcttgaagtagaagcttgtgacgaaaagtttcaaaagttcttcacacaag

SEQ ID NO: 191150 - DNA, 93 bp, Arabidopsis thaliana landsberg
tctgggatgcttggagcagacaaccaggaattgagccagcgagagggtgagggaattgggcctgcgaacaatcagttgcctaatagcacttag

SEQ ID NO: 191151 - DNA, 97 bp, Arabidopsis thaliana landsberg
atggtttgtttcatcttagacaacctgaatctgacggctttgcttcttctgaattcaacccgaatcatccctgctagcataaaaacaagttcgggca

SEQ ID NO: 191152 - DNA, 101 bp, Arabidopsis thaliana landsberg
gtttttccaatgtgtctctacagctcgctactgagcaatcggatcccgaccccatgtttcccctcagctcttccacaacgaatgacaagcagacttatcag

SEQ ID NO: 191153 - DNA, 102 bp, Arabidopsis thaliana landsberg
aaacggtttgtatttattgttagacaagttcggaagacatcaattgtggaagcaaatccgaagaacgtgaagaaccaaatgatcaacggaacaaaccaataa

SEQ ID NO: 191154 - DNA, 129 bp, Arabidopsis thaliana landsberg
atggactcaaatttcaagtggcttttgtttgccatcttgatctctctgacattttcgggttttgttcttcaccatggagttctcgctgaaagtgttaaccctgatgaagctaaacagcttagagacgag

SEQ ID NO: 191155 - DNA, 126 bp, Arabidopsis thaliana landsberg
gttgcagagcctatcaaattcatgaaggtggtcgagtggatcctccatttgcagaccatggaatttggtcccctgaatcatcgagatgagaccactcttaatctcgaagttgttgttctggattga

SEQ ID NO: 191156 - DNA, 217 bp, Arabidopsis thaliana landsberg
atggtattccagctggcgaggcccggcatgtttaacggtcatatcaactttggcctgaacacagatggtttcccggccaccaacgacagtctgctcaccatacagcccaccttgctgaccatcggcggcggcacacaggataatcagaacaatgtgctgaacagagccaaccttaacaactgggtgcatactgcgcttacgtatgattatgccacag

SEQ ID NO: 191157 - DNA, 1161 bp, Arabidopsis thaliana landsberg
  unsure (1)..(1161): unsure at all n locations
atggccacacccaaccccatcgatcttgactcgtgagatctagagtcaatcttcgttctgattgatttttattcttggnctcttgttcgtgctttgnttcggcttcccatgtctttatatgtgtgcgtttgtgggaggctctggggggttccgcttctgtccgcgcggtttttgtctaataaagctttaaagcttaacgtttaaatctcaacggtcatctttttttttggtcggcccatccatacgatttcttctagtttttataatcacattagtcatgtctcatgtgcttttctggctatgaaagtatagagaatcaaactcaagttgacaagttaagttacttagaaaattaaagtaaaaattgttaaatgtgatggacactcattggatttgacgatttgtaaccactatttcattgtaatgcaaataaatatgggactattgatggactcatgcaaccagcaatctcaatcggcctggtccgatcttacacatagctcgatcctattttcacatgtctagccgctttcttgaatgaaagatattcatcataaatagctaaatcccaaataaatatgttaaagtacgattcgatgttaaacaaaacaaaatgattcgatagtttaacagattattggtaaaatgatccaaacccagtgaaacagcataatattcaaagtatcatatccaaattgcaatcacttttttcccatgaactccaacaagccatacaaagagaaaaagatatcttcaagagttacttctcagagaagaccaaagccacccctaagggcaagaaccagatgaagaacagagcctccctctatgttgtagtcctttgccgttttgtcatcagctagctgttttccggcgtagattagcctgcaaacatccatgagatatataagcatcctagaaatactaatgagaatcactgttatatgtgacagcatagattatcagcttgcacgcagagtagaatcgtttgatgccaaaagcataagtaaacacactcgaaaggagctgcaattttctcaagagggaagcagccagtcactaaaacatgaaaatcaagtcaatgaaccgcaacttatacaatcaagtaaaagagctgagctgaaaggagctgcaaaattcacaagaggggcaagtcactaa

SEQ ID NO: 191158 - DNA, 35 bp, Arabidopsis thaliana landsberg
atgattgatgaaaatatcacatgggtttgggtaag

SEQ ID NO: 191159 - DNA, 59 bp, Arabidopsis thaliana landsberg
atgggatggtctgcgcccggcgagggggtcgacgacaggtttcacaccgtccatgactg

SEQ ID NO: 191160 - DNA, 498 bp, Arabidopsis thaliana landsberg
atggaccatggactatcaaccatcaacccacagccttacatgaaactactccttcaatacctcaaccctaataaagggcttattgcgctcgctttgctgctggcagccatcaaccaggtcttttcactttttgatccgctgatctttggtaagatcctggacaattatgccacgcacccgtttaccgaagacaaggccgggcttattcccaggtcggggaacgattttacggcgggggtgatcaaactattgctgctgctcgtaggcaccgccatggtaagccgtatagccaaggcattccaggattatgtggtgaatgtgatcgtacagaaattcggcgccaaaatatttaccgatggcctgcagcattccatgcgcctgccctaccaggaatttgaagaccagcgcagcggagaaaccctctccatcctcacaaaagtgagggccgatacagaaaagttcatcggctattttattaatgtattgttcgtaaaactg

SEQ ID NO: 191161 - DNA, 103 bp, Arabidopsis thaliana landsberg
tgacacgaagaagatgatacataaaacattttcagaaacgacgaagacgatagatttgcatttaatcgatgctactgaaaaagaaattatcaatggagaatag

SEQ ID NO: 191162 - DNA, 451 bp, Arabidopsis thaliana landsberg
gcccgatttggttaaagaaacagaagaaaaggttcaacgtataagacataatctgaaagaagctcaagcttggcagaagaattatgcagataaacgacgtcgaccattggtttttcaagccgacgatcatgtatacctgaaagtatcaccgatgaagggtgttagctggttcggggtaaaaggaaagttggcaccccgatatattgtctcattccccattcttgagcgatgtgggccagtggcgtacagacttcaattaccagaatcattatctgcggtgcataatgtgttccatgtatctcagttaatgaaatgtcttcggattcctgatcgaactatagatgtggtggatgttactttggaaccagacttgacttattcagaacatcccattcgagttctggatcagaaggacaaaatcactcgaaagaggactctcaagttctataag

SEQ ID NO: 191163 - DNA, 388 bp, Arabidopsis thaliana landsberg
agcgttcctgcgggccatagcttgctctggcgaaggccaagatcggaatacgtggcgttgtggctacggatataggcatcgcagttggcgacctcactccccgaagttgcagtggcttgtggcgcatctggaaaaaatcaggcagagcgacgagaaggtaatcgtctttacagaatatcgtgagatgcagcggctggtgcataaggtcatccgaaagcgattcgaggtccaggcgagcattgtcaatggctcaaccacggtggatacgctcaaggatgagtcccggcaaaagatcatcgaccgatttcaggatcgacctggctttggcgtgatcatcctttcaacgacggcggttggctttggagggaatatccagaaggccaatcac

SEQ ID NO: 191164 - DNA, 472 bp, Arabidopsis thaliana landsberg
aaaatcgaagttcgcaaaacacttgtaagtactttagggttaaagagtaaattttgcgagggaagtgctattgttatgtggtaactccttcgcaaagccattgcaaagccaaaaaatttgagacatataaatttcatgctcaccggatatatttagtaaattttagttaaaacaaaaatatattatatatatatacgtaactttcatggtattttttcttggtgtattgcaatgaaatatattatagatttgtttctcgttaattgcgggtgatttgcgacgcgttaagacgaatttgcgtggctcgtccttgtcgtagcaaatatcttgcaaagacgtcgcaaatttgcgagggatattttacctcgcaaaggtttgtcacaaattgtgtgttttcttgtagtatataagcaaccacattgtttcatctctggtggaacacaatgattttgtggagaaatgcattaactaa

SEQ ID NO: 191165 - DNA, 107 bp, Arabidopsis thaliana landsberg
agcttgggaaaagggggaaacagataaataatgatggtgttgaggcgaatcggatcggatccggattcgattgtttgcgattgacacggcggagaaggagatgttag

SEQ ID NO: 191166 - DNA, 401 bp, Arabidopsis thaliana landsberg
atatttggtcagttggttgttgtctgtatgagctttataacgggaaaattatgttccctggctccacaaacaatgatatgttacgcctgcatatggaactgaaaggtcccttccctaaaaagatgcttcgcaaaggagcatttatcgatcaacactttgataaggacttatgcttctatgctacagaggaggatagtgttactggaaagacaataaggagaataatggtcaacgtaaagccaaaagatttaggttcagtaattagacgacgttatgaggatgaagatcccaaggtgttggttcatttcaggaatcttttggacaaaattttcacacttgatcctcaaaagagacttacagtgtcacaggcattagctcacccattcatcacgggcaagtga

SEQ ID NO: 191167 - DNA, 279 bp, Arabidopsis thaliana landsberg
atgaatgataagtacctgagggatataattctgaacttcatgattgctggtaaggacacaaccgctgcactactctcttggttcttgtacatgctctgcaaaaacccacttgttcaggagaaaatcgtacaagaaatcagagatgtgacatctagtcacgagaaaacgaccgatgtaaatggtttcgttgaaagtattaacgaagaggctcttgatgagatgcactacctccatgcagccttgtctgagaccttgaggctctaccctcctgtgcctgtg

SEQ ID NO: 191168 - DNA, 265 bp, Arabidopsis thaliana landsberg
atgccgagaccagcggctaagcgcaatcgtttggcgaccaggactctaggggtttcggaccacacccagggtcatggaccacgaagtactgttgaatctagaggaatttcccgttcgccgacaagcgattccgtgggtaattcgcgactagcagacagcgccgacccgtctgatattatacgccaactgaggaaccaaacacccataagcaaagcacatgagtttgcgatcgggtcgtccccaggaaccgaacaaggagttacag

SEQ ID NO: 191169 - DNA, 543 bp, Arabidopsis thaliana landsberg
atggtgcctcacatcgacggacagtttctaagagatgtcgaagtcgtgctcaccgctcctgatcgtgcagatctcccagttctaaaccctggattgggtacatgggtcgacaaaaccattgttacgtggttcaaattcaatcaccaactagctgtcgcgattggtgatacactccagcgcaactttcaccatgcgtggccgacgtaccggatgattcccgttgttttcaaggcaaggtggtttttcctccttacgataagcatcgagtttttatataaagcacttcctgtaaaccgtagaccaaattcttactatttgctctctttgtagcgtatgcacacctgggattcaaggcacacgctgacggtgtggacgcaatttaatttggtggctagaacgttgtaccgggacaatatgcgggcgctgaaacggggatgggcacgtggtttagataagccgaggtggatgacgacaacagtttggaatgatatggtggacatgtttactgaatttggcccagatgatgttggtttcatgtcttga

SEQ ID NO: 191170 - DNA, 718 bp, Arabidopsis thaliana landsberg
gctttgtttcgctccaacaacggccaaatctatgggcgagtttgtggtgagtccttatccaattaatgtttctttcaaaataaacaagtgatatagtttccattcgcactttctgagagtttaatctcaaaaatctgaagaaatgcaatcgtgcaggtggaccggtagtttcaacccttgccaatgctttcagtccactatactttgaggtcacagaagcaatggaagtaatggccacagaagaaccctgcgatgtagcgtgcaaattcggcgatgggcttcttgctattgaagattacccacaaggcttccctcgaccaggtaagactcattgcttatacttacttgagattagccacttccacttttctctcaaaagaagactattagtaaattcccactgtgaccatatagacaattctgagcgttactttagcaaaaccttctataaaaccaaagcgtttctattgaaatatcattcagcttggagaaattgagcatttagtaaagcaaaacgagaaacacataatcatatatgagtttattacttatacatctcaggtttgagagtagcatatagacaaaggtgtctctaaacctcatagcttcatttgttttctctttacagcaacacatccttatccattcaacgacagtgtcgtcatttacatacggcacatcggtccaggtgtatgcgtaggacaggcatggcaagaag

SEQ ID NO: 191171 - DNA, 352 bp, Arabidopsis thaliana landsberg
atgccattgcctgctaaaaatgttgtcacttggacgataattattgctgggtatgcggagaaggggcttttgaaggaggctgatagattagttgaccaaatggtggcttcaggattgaaatttgatgctgcggctgtgattagtatcttggctgcttgtactgagtctggtttgctcagtttaggaatgaggattcactccatactgaaaaggtctaatctcggttcgaatgcttatgtgttgaatgcactacttgatatgtatgcaaaatgtggtaacctaaagaaagcgtttgatgtgtttaacgatatacccaagaaggatctcgtgtcttggaacactatgcttcatg

SEQ ID NO: 191172 - DNA, 828 bp, Arabidopsis thaliana landsberg
aaagaaacaaaatcaatattgaatatcccacttgaaccttattctagcaaaggaagtttcccaatgctggaaaaagtgaatgttggagatctgttacctccaatccaagtctttttaatcatgaatgtatatatccggtttgctatatcagtcaactttccggaaacaaccagggccataaaccggatttttgattcttcagtgaggatgatcttggaaatcattttagatggtagaatgataaaaaaagagaagaagatcatgctggaaagagtgaatgttggagatctgttacttcaagtctttaaccatgtatactcagtttggtatattattcaaccggaaacaaccggaagccataaaccggattcttgattatcggattcaaaaacaaaactaaaaaggcttgagaaagcaattcaaagtattttaccatcagaactagtgggctttggaactgctaagattcaagcttattggcaaattggaatgggctttaaatgtacaatgatttccaattgcataagtagacggctgatttagaaaaacgtaaaagtatgaggtctaaaagaagaaataacgtaaaataagaaatagaaaaacgtaactaaagcaccgtttccttcttccacagcaagaaaagttcaaccaaatgggaatcagaatcggcgacggtgacggcgacaaatacggcggcacagaggagctagaacttttcggaaaatctgatactgttacagtaaacagtataccgcatatgtctccgtcagtttcttcgtcatccgcatccgcgaagatgagttatggattcaacgaggaagagtttga

SEQ ID NO: 191173 - DNA, 125 bp, Arabidopsis thaliana landsberg
actccgaagttggttcgtcctctgctgaaagcatccgcgctggattcgtcgccaatcctgccgctgcgatcagattcgcagcgaggaagtctcgtcttgtcgtcataatttacattccaatatga

SEQ ID NO: 191174 - DNA, 194 bp, Arabidopsis thaliana landsberg
atgacaaccgacagaccacttgagttactccacatggatctattcggcctgatcgcttacataagcatcggcgggagtaagtactgtcttgttattgtggatgattattcttgcttcacttgggcattctttttgcaggaaaaatctcaaacccaagagaccctaaagagattcttgagacgagctcaaaatga

SEQ ID NO: 191175 - DNA, 117 bp, Arabidopsis thaliana landsberg
gctctcgccatctcacgttcttgtcgagcgtttggtgtggcactatcgatcgtcaaaggtagagcttcggtgccgcctaacagtgcgttcaaggcggacggcttcgccgccgcttaa

SEQ ID NO: 191176 - DNA, 176 bp, Arabidopsis thaliana landsberg
gaggtcaggaacccttagccagaaacaacaataatttagaccggtttatatcagtacgaatgtgctatgacccaatggtcttaggctcgataccagtgcataccttcattcaacaaaaaccagcaaagtctaattctgtaggtatggatgtatcatctacatccaatcgggattag

SEQ ID NO: 191177 - DNA, 444 bp, Arabidopsis thaliana landsberg
atggctgaaaattgctaccgcaaacgcttagaagaaaaaaatgacgatcaagaatggtcctttggcgacttctaccgcattgtggctgaagcagtcgagtaaaattcttttacttgttaagtgttataatgaaaccaatatgagtcggaaaggattagatttggttattaaaccattttcaataacgattttctttcgagtttttgagacaaattatttaatgctcatgggcggtttataagtcaatgatttaagaaataaaaataaacgataaagactcgagccatatagtcggcaccatgatattatgattatggtaatgatatttacatgtgatgtgatattcgtattttatgtatttggtgcgacagggaaattaacagaagactcggtggctctcaacttaaggtgccaagtgttgagaaactacaacaagcttatgag

SEQ ID NO: 191178 - DNA, 75 bp, Arabidopsis thaliana landsberg
atgacgtggcgtgttttgattggtgtaagtgaaatctggaatgcaaaaactcagcgcttacggttacatcgcgtg

SEQ ID NO: 191179 - DNA, 171 bp, Arabidopsis thaliana landsberg
ggcaccatcgcgctgccggccgacctgactatggaagccacgctgttgtcgccaggacggtcagtcgtgcacgagatcgtggctcaggggcctcgtaaggtgtacgtccacgtcgtcatgaccggtcgaacgcagcctaagcagggcgtcggcgagatcaaaataggatag

SEQ ID NO: 191180 - DNA, 147 bp, Arabidopsis thaliana landsberg
ggttttgattcaatttctgctacatttcgtttaaccggagttcgatacagtactaccaaaatgatgaacaactgtttggtgttcaagttctatggaagagacatttggtcaccggtttactatttttttgttcaatattctcagtaa

SEQ ID NO: 191181 - DNA, 515 bp, Arabidopsis thaliana landsberg
atggaacttatccaagtaagtatatatctctttaacccacatttatctttgtttttatgtgcatatactatttgtgagtccgtgttttcctctataatgtttggttagatatgtttgcatgtgaatatatacgtgtagttgagtttctgatgttctttatgcaagtctaatattcgagaccatatatatcctctacagtcagtagatatcaaaaacaaggaatcaagctgatcttaattatggaaaatgttatgcttgttatgcttgttatgcttggtttcatgtactccagcgttttcatatgtgtttccaatcataatcatgtttgctcttagcaccgcaattgcaaccttggctacattgttcctgagtgggttgagaaacgtccttctctggtcgatattcaaaagattaatggttttggttctgctattccgaccacaacaataatcatgcctttgaaaagtgacaaagtaaagccagtgaaagaacaactctccaatgttcatcctgag

SEQ ID NO: 191182 - DNA, 184 bp, Arabidopsis thaliana landsberg
tgttgacgggccttttgctctggcagagcgttttaaaggattaatggagtataatctgggttacgattatttcgataaatatgttgcaaccattcagaacatttctgcatctgaactaagagatctggcaaataaacacctggatcccgacagtatgattgaattggtagccggaaaaaagtaa

SEQ ID NO: 191183 - DNA, 114 bp, Arabidopsis thaliana landsberg
actgcggagacaattgtcctggacatagtacggacaccaaaacgatgtcgttttgtctcggattcgattacatgttctctagttgcaccttcgacaaaaaaacaatttttttga

SEQ ID NO: 191184 - DNA, 1288 bp, Arabidopsis thaliana landsberg
tcggtgggggttctccgtcgattttggtgacggtgaggaccccatggttcatggtgtttcaatcgtgattcgctcaaccttctcggaaaagttatccaaccaatatcatgggagaagtttctgcgagacactggcggtaagagttctatcattggtgttgcatcgcagagtggaaaagggagatttcacggcgagtgacgaaagaggaaggtgtttagatatggagactatagctgcaggatgttttagagggttgtcgcttgacgggggagatcatttacggcatggtgaagctaagctcccgttgacagattccatatttactccctactgcctttgtctctcaagactgcatggtttcttctcgaaaaatgtaagatcagctttttttcttcctcctcaaaacggctctacggtggcggatgggtacggttcctaggtcaccatctccgctcggtttgtgtcgtcctgattcgccggaggtcctgttccggaaaaaagttcacagtttctagggctacggcttcgaaagggtatttcgactgaagattagagtttcttacttaaccgatttatttaggtatggtgatcgcggatcaattttaagttgatggttttgtccggtttgatgtatgtggattgggcttgtaatcaatcaatatcataaaaacactaaaagtctctcttgtgctgacacatcacctttttcagttaacatcagtttgacacctttacaaaatcaacaacccattagaacatttcgtttaaatatagatcatttttgttgaccaatcaaactttagtatttgtacatgtcattctattatgaaaacgtaaattaaaattagcccaatccaaatttttttaaaactaaactttttatgttctaacaaattttagattagcccagcccaagttgtttaaaaactatttttcctatgttattacatgggctatactttctatactttctatgttatgttctttaacctgtttcgtttcaaactatccaactacaaatttttgtgaagccagtcagttataagatgatatttacgtagccagaatccaaacacgaaaccctaaaacctcactaagccgacatgaaattcacaaacaagccctagaaaaccgtctacaaggtacaattgaatcatctataaaccagaattgtaccttcttatcggcggaggaggcggaagctgaaggaaacatctgtgaagcaacaatctcagagatgaaacatgaatatgtgtgtgttgcaagaagcgagagaaggactggatga

SEQ ID NO: 191185 - DNA, 120 bp, Arabidopsis thaliana landsberg
gtcggtcaaataaaacatgataaaaacgttgatccggtatttaacacaaaaccaaatattgaccagaccaaaattcccaagacgttaactggcgttaacgaatccaataaccatcgttag

SEQ ID NO: 191186 - DNA, 593 bp, Arabidopsis thaliana landsberg
aacgagataatgatgcccgtatttccaatgttccagcaacacatcgagccacatctagtgcatgcacatgtgagtacacctgagattttagatttcacctactagtgaattgttctgtacaatctttccttgaatctgttactgttgcttactcgtttttgtgattaccattagctagtgaaaaacaaaaagcaatctgaattctataaacttttgagtatatatgatctgtatcgatacttaacaagtttttttcccaatgatacaggttaagattcgaaatgattttgatccagttctctctcccgagagctctttgtttgtattgaagagcaataaacaagtaagggttaaaatataatcacattctgaacttccttaatttacagcagcactcacgactcgtcatgtggttgataaggttccatatcaggatattctcagcatccttgattcgacaaaattctgcagttccgttcagaattttatcgatatatatttcaggctatctgggcttcctgcgaatggtcagttgtcagatagtgactgcatacgcgtaagaatctgcgagggcaggtttgcagtgcttatac

SEQ ID NO: 191187 - DNA, 331 bp, Arabidopsis thaliana landsberg
atgcaggctaaagacctaaacctcgcagcagcctcagctgaagaagttggacacaaaagcccattgatatccaaagcacaagaaatgtgagtacttcagtagtcttttctcctagaagctctattccttatgagttgttgtgaacaaagaaggcttgtgaatgaaactttatggaaacaacgtagaaatttcttatgaagcaaaaagcacacacatcaagctgaagattttgtttttttgtttttgcagttacaagaagatgtgcgaggaaggacatgaaacgaaggacttctcttgtgttttcagacacttttacaatgggaaagatgag

SEQ ID NO: 191188 - DNA, 1656 bp, Arabidopsis thaliana landsberg
  unsure (1)..(1656): unsure at all n locations
atgaatcccgaagaatcaagaaggagagcctctgctcgagcagtggcaagagggtttgagatgattaatgagaagaatcagtcaaggaatcagaaagctgcgagtcctggttttactcggatgacaggccgagtacaatggccgagtatggccccggagtcctctgagggtcgttctgcggctgctcaagaggaaatagcaagaggcaagagggtctgggagtccgagccagttgcagaagaagaagtgcctgagatagagaaggaagcatctgaggaagatgtgcaagttgatgaaggggtcccgatagttcctacaagtagaagaaggaacaccatgaggagaaagaaagaacctaccatagaagagcactaccaatatctcatggagctgagttttgaggggacaagatatccccatagacctaccatgcaagctttggggatatgtagagatgttgactacctcatggagatggccaagctggagaccttcttctcctaccagtatgaaggatacaaaactgagagctgccaattcctagccactttgaagctccatttctatgctgaagaaagggagagagagctgcataagggagttggttacatcactttcatggtgtttggaattcaatactcggttcccattaggcagttggatgctattttcaagttccccaccaagtatggaatccgccaaaacttcagcaaggacgagctccttgatctatggttgacaatcgccggtccactcccctacaagtcatctagggccaagagttcgttgataaggagcccggtgcttaggtatctccacctttgcattgcaagtgccttcttcccgaagaagacaaccggccatgttaatgagggagagctgaagttgcttgatctcaccttatgcttcattttggggcacacgaggaatgggatagagatggaaggggatagggctgatacatccctttcggtggtgttgattgatcacttgattggttttagggagtatgcagccggaatccaccaatccggctatggaggaagcttatgtgctggaggagtgatcacgcccatcctaatagccgctggagttcctcttcatacccccactcacacagcaacctacatcgatatggagtacttgaagaggaagtgctacttggataggtctgctccagcggaccaactctacttcaagttcaagcactccacgctaggtctctctaggctagcactaccttgcaagaagttcaccaccattaggattgggaacaacattgactttgatcctcctcaatcgatcttagtcaatgtccttgcgcctctacaagtagagccgagcataggaagtgagtctcaagaagaaggagcagagtggaatgaagaagaagccgagcaggaagcttatactcggccgagtaactttcagcaggccgagtattgccagnnnnnnnnnnnnnnnnnnnnnnnnnnnnnnnnnnnnnnnnnngatgaacaagaagattcgtgcgaagctgcagcggagcagtttttctttgaggattatgctgagtccgatccagagagagatcccggtcaagttcacaagaagttgggaatgctcaaaggtctgggcaagtttcagaggaagttgttcagtgggttgaagaagaag

SEQ ID NO: 191189 - DNA, 480 bp, Arabidopsis thaliana landsberg
ggctgcgctacaaggtatacctggatatgaacctgcccagcactcccggcggcaagctcacttataacttcggttttgatggcaggtattaccataagatataccgcaactttatctgggcgggcagggctgccgctgatttctcctggggccagaataagctgatctattacctgggtggtgtggatggatggatcaatcccaaattcaaccataacccaccggcgcaggaccagacctatgcgttccagtcactggcggtgaatatgcgcggctataaccagaatgtggccaatggcaacaatgcttttgtgctcaacagcgaattccgtttcccggtattctctactttactcaacaggcctatcaacaatgccttcctgcgcaacttccagctggtacagtttgtagacctgggcaccgcatgccatggtaaatacaatggcattaaacgccccaaaaaaatataccaggagcccg

SEQ ID NO: 191190 - DNA, 64 bp, Arabidopsis thaliana landsberg
atggaaagatgtaggcaagccattgtaatacaaggagcggttgaagagatcaaggagttaaaag

SEQ ID NO: 191191 - DNA, 2845 bp, Arabidopsis thaliana landsberg
atgcaccatggaagaggaagcgccgtatcagctgcaatttccggtctatcaccggcgaagaattcaccgtttccacagctctgcaatgtccttctcgtcgcgtctttgtccaagaccttgtctcagtccggtacacgaagcctcgacgcgaattcgataccgatttcggaacctgtggttctccagatccttcgtagaaactccatagatccatcgaagaagctagatttcttccgatggtgttattctcttcgtcctggatacaaacattcagcgacagcttactctcagatatttcgcactgtttgtcggacagggcttctcggagaagttcccgatttgcttggttcaatgaaggaagatggagttaacttggaccagacgatggcgaagatacttctagattctctaatccgttcgggtaagttcgaatcagcgttaggagttttggattacatggaggaattaggagattgcttaaatcctagtgtatatgattctgttcttattgctctggtgaagaaacacgaattgcgtcttgctctgtctatattctttaagcttttagaagcttctgataaccatagtgatgatgatactggtagagttattattgtaagttatcttcctggaactgttgctgttaatgagctcttggttggtctaaggagagcagatatgaggtcggagttcaaaagggtatttgaaaagttaaagggaatgaaaagattcaagtttgatacatggagttataacatttgtattcatggatttggttgttggggagacttggatgctgcattgagtttgttcaaggagatgaaggagcgaagttcggtctatgggtcttcttttggtcctgatatatgcacatataacagcctgattcatgtgttgtgtttatttggaaaagctaaagatgctttgattgtatgggatgagctgaaggtgtctggccatgagcctgataattcgacatatcgtatactgattcaaggatgttgtaaatcttaccggatggatgatgcaatgaggatttatggtgagatgcagtataacgggtttgtccctgatactattgtgtataattgtcttttagatgggacactcaaggcaagaaaagtcactgaggcttgtcagttgtttgagaagatggttcaagaaggagttagagcttcctgctggacatacaacattctaattgacgggttatttaggaacggaagagctgaggctgggtttactctgttctgtgacttgaagaagaagggtcagtttgtcgatgccattacgtttagcattgttgtgttgcagctttgcagggaagggaagctagaaggagcagtaaaattggtagaggagatggagactagaggtttctctgtggatttggtcacaattagttcactcttgatcggatttcataaacaaggtaggtgggattggaaagagaagttgatgaagcacataagggaaggtaacttggtgcctaatgttctgagatggaacgctggagtggaagcttcactaaaacgtccacagagcaaagataaggattacaccccaatgtttccaagtaaaggaagcttcctagatattatgagcatggtaggttcggaagacgatggagctagtgctgaggaagtatcaccaatggaagatgacccttggtcatcatctccatatatggaccaattagcacaccagagaaatcaacctaagcccttgtttggtttagcaagaggacagagggtcgaagcaaagccagattcttttgacgtagacatgatgaacacgtttctatctatatatctgtccaaaggggatctcagcttagcctgcaaattgtttgagatattcaatggaatgggtgttaccgatctcacgagttacacctacaactccatgatgagctcgtttgtcaaaaagggttacttccaaaccgcccgtggagtgcttgaccaaatggttgagaacttttgtgcagcagacatagcaacatacaatgtaataatccaaggattaggaaaaatgggaagagcagacttagccagcgcggtactcgacagactcacaaagcaaggaggatatctagacattgtaatgtacaacacattgatcaacgctctggggaaagcaacccggttagatgaagccacacaactgtttgacaacatgaagagcaatggaataaacccggacgttgtgagttacaacacgatgatcgaagtgaatagtaaagcagggaaattgaaaaaagcatacaagtacttgaaagcaatgttagatgcaggttgtttacctaaccacgtaacagatacaatcctggattatcttgggaaagagatggagaaagcaagattcaaaaaagcttcttttgttcgaaacaaaccaaataataataatatttccacatagttttaatgtaatatgaatacagagcaatataaagaaaaaaagaagagtataaacaaaaaagattcgtcatttgcaatctgaaaacctaaacaatcttctatatgttgtttgattcagagaaattagagccaaaatcaaaagagcccaaagagaatagaaaacccaagaagcatcatccagacaatgtgtatcaaaagcagagcttgtccaggaacagacaaaccaacaccattaccaacatcacaagctccttgtttcacaacacgaacaccatggcacaaagcatcagcacaaccgcaccagtaagtaacgctgtcttcaccgcaaaccggatcaggcctgaaacactgaaccggacacgaagccggtttagcaattccttcacagaattcgcctctgtttttttcaccgttgatcttctccgaag

SEQ ID NO: 191192 - DNA, 65 bp, Arabidopsis thaliana landsberg
aatttaaattaccgaaaattgatcttcaatccgttttacatggacttctctatgatgatatttga

SEQ ID NO: 191193 - DNA, 72 bp, Arabidopsis thaliana landsberg
aaaagtgaatgcagaggagacagagagagagagaaggaccacaacgatggccttcacgcttttactggttaa

SEQ ID NO: 191194 - DNA, 147 bp, Arabidopsis thaliana landsberg
atgcttggaataaagccgcagaacccgcttgcgacggcacagagctttacgccgaaaagttcaaacatcaagcatgtcgcgttcgatgcgggaaagaagtcactaaccgtcacgtttgtgaacggagcccagcatgcctacgcgggg

SEQ ID NO: 191195 - DNA, 463 bp, Arabidopsis thaliana landsberg
atcgcccggctggtgcgcgagcatttcgacctgcgtccgcgcggcatcattgaaatgctcgacctgctgcgccccatctacgccaagaccgccgcctacgggcacttcggccgctccgagcccgagttcagctgggaagccaccgacaaggcccaggcgctgcgccaggcgatcaagctggccgtatgatgtgcggcgctttcgccccgtgcgcgctgccgccccggtgggggcgcagcacgccgcggcgcagcgcaggcgtatgaccgacgaccgcgatccccagggctgcgatgccagcggccgcgacaccgatggcgcgcacagcctttcgcccagcgattcgccctgcatcgcggtgtgctccacgctgtacgacgaggtctgccgcggctgcgggcgcaccgccatggaggtcgccaactgggttttcctgtccgaaaaggaaaagcgtgccgtgtgg

SEQ ID NO: 191196 - DNA, 429 bp, Arabidopsis thaliana landsberg
  unsure (1)..(429): unsure at all n locations
atggtcctgccactgatcgagtttcgggcgcacctccgcggcattgcgctggtcctgtttgagtatggcgaacagcggtaccacgaacagcagccgcaagaaggtgacggcgaacgcagcgattacgccnnnnnnnnnnnnnnnnnnnnnnnnnnnnnnnnnnnnnnnnnnnnnnnnnnnnnnnggttccagatcgatccccataagcaggaagatcgcgctctacatcaggaacgcgatggtgcgccaattcatcgactcgacccatcggtcgcgcgcagcgatccggcgcgggccctcctggccgaccaccagaccggtgacgacgacggcgaggacgccggacgcctacaactacttggcgggcaggaaggagatgaacggaacggcgaacgacatcgcggtgctcagcaccggatcgcgcagtag

SEQ ID NO: 191197 - DNA, 535 bp, Arabidopsis thaliana landsberg
gcagaaaaggttaaagtcatacaaacattactgtttgtgtctggattaacaacattgttccagtcattctttggaactcgattgcctgtgatagctgtagcttcttatgcctatatcatacctatcacttccatcatttattcgacccgattcacttactacactgatccttttgaagtaagtcgtcttaacattattcttatcatgaattttacaaactacattgtactaataataaattgtttgatataatataattaatcagaggtttgtgcgaacaatgagaagcatacaaggagctttgattataaccggatgtttccaagttcttatctgtattctaggcgtatggagaaatattgttaggtaaattacttcattatcattttgccaaaggaggcataccttattatgtctctaacgttaaacatgaatgtatttttggtttgtgctcattagatttctaagtccactctccattgctcctttggcaacatttaccggattgggactctaccacatcggtttccctttg

SEQ ID NO: 191198 - DNA, 112 bp, Arabidopsis thaliana landsberg
cttcgtcttgttctgtcctccttccactgactcgtacgttgtcgccgttcttgaatccatcggctctgctccttgtgctcccgacatcgttgatgataccgatccttcttaa

SEQ ID NO: 191199 - DNA, 316 bp, Arabidopsis thaliana landsberg
tcttattgttcgtcattgaccagcttgctctgggaaacactgacagggaaagaacatcttctcttttatggaagacttaagaatctcaaaggccatgatctcaaccaagtatgttatcattatcaatcttacttctatcttatattagtgcaagagtcttaaacgtcaattcatggttaaatattaggccgtagaagaatcactaaagagtgtgaacctatttcatggaggagttgctgatatacctgccgggaaatatagcggaggaatgaaaaggcggcttagcgtagccatttcacttatcgggagtcctaag

SEQ ID NO: 191200 - DNA, 161 bp, Arabidopsis thaliana landsberg
actgtcccaaacaaccaaaacgcaccaaccggcaaaaggaacattacccattagagctttcggatcctaatccggcaccggaaccaatatatcgtcgtagatttctaacccaaagcatcgaagacgccggtgggatcttcctctgcgtcgatgtatcatga

SEQ ID NO: 191201 - DNA, 113 bp, Arabidopsis thaliana landsberg
ccatggatttaaatgagatacagtgtggaagagatgggtgtgaagagaagcatggacggtttgaggagatcacgtttgagataacagtaaacaactctgacgaagaagactag

SEQ ID NO: 191202 - DNA, 1415 bp, Arabidopsis thaliana landsberg
atgtggttacgagatgaaatcgaacgagcatcaggactcgctggaggactggcgaaagagcaacaccatgatcgtcggcgagatagatgtccggtgccgaaattggtaggtttacggaggtcagagtcgcccattgtcatcaagtgagagctggtgaagtgagtaaagttgtagtctagagagattactgttttgtgttggctttctatttctgtttcttctttttatgcaaacttgtttatttctttttactttcatcattgttaaattttagataatgaaatcatatatggttaattgacacaattccctagattcattttttgtgaacatgtgtggatacattgctgtcatgatttaaaattgaataccaacctaattcaatttttcttcaaaaacattttattgtttaagttttagttcataaacatcctctatttattgaaaaaagtttttttttttattgtcaagctaacaaattttctaaatttattattaattttgtttcattttcttttactatctttcttgccaaacattaaatttttttcttttgctgaattaaatatatatatatactaggttctgaactcacgctacacgttagtctatttgtaaaacttttaataatttttgtgtgactaaatgtttttattgaaaaatttgaaagacatgtttttatatgtctacttgttgttaatattataaactctttgaattttaaaattaccatgacaaatagttacactttaataaaacttttagattttacaacatttatcaaaagaacatttttttggttcatgactctctctttagttttagatatttaggataacgatgtctttttacgtatgaaataaattgttgtatgaaaaataattttgacgattttctcattttggtacctgcaaatttactattgtttttcgtttatcttcgctgtattagttagtatagctcttctaaaaataagatattatattgaagtatattcataaacttatctacactttcttttaacaactcatatttttctcacattctttcaatatgtatatgaattactatcctcacaatttcttacaaagagctatcactctctctatctttttgcaagcactcgttttatttgttttattttttcttacagtgtctctttccatcctcttatgattttgtctaagcaatatgtgccataccttctaaacttttcacatgcttcatatttcttcttcgaaaatctcttacttttcttgttagtataagcatttttcaagctcgtcaagatgtactctgttttattttctgttattctaagaaaatgttttaccttctaaattggtacttaactctatcacttctctcttttgatgcagtttagatcctcttcaccttcacgcttcccagactga

SEQ ID NO: 191203 - DNA, 930 bp, Arabidopsis thaliana landsberg
attttggactcgaccatctgtcaaataccgagccacctactcatcaaccaaccccgcagtctgaatgcattgagttctggctccaacatgttgcatataaaacagagcattgatctttgcgggtgagaattcacactcgaaaccccttactaacaccttgactgagtctccctccacccgaactgagggtagattggctcagaattcatagaccacttcttcctcaaaaccttggactcccgttactgtgttgagaagacccgcctcagaaatcatatccatgatccattgatccattgatcaaccagaagatccaaattcatttccttgatcatttgtcaatgagagaaatacaagtacctttgttcggcgagaggagaactgaatttgaactcatgaaatagatcgctccttccaagacttgaaacaacaactccctttcctttctgttgtttttgtgacagaaacttctcacttggggtgtctcgtttgcgctttgtcaggcgcgatgccactgttagtacccttggaactttggcagacatcggcatggaaacctgttggcttttgactggaacgatggaagccaaattgtccttatcatcatcacttatatccacaagctcaacaggaagccgaacatgtggagtggagcggtccggtgatgaagtacgtcacagatctgacccgccaaaatctgcatacaacaccaactgattgtgaggcgtactcacaagatcgtccagcagatttgggttgtagctttctgatgttgtggatgaagattcggatcccgaagactcgattcttgattgcacaaaagtcttgaaaaacgatttcattttcaagcagagaatggaaatgatttttttttcttcagagatcagaatgaattctctagagcacgcaaacgacttttcactttcttga

SEQ ID NO: 191204 - DNA, 163 bp, Arabidopsis thaliana landsberg
atggtgagtatcatgaagataatgatgatcatggttttgttagtggttggcgtcagtgcaaagacggtggaagaatgtaaacgaacaacgtgcgcgactaaatgtcgtgacagcaaaagttttgcttgttctgattgtatcattcattgcgcttttcctggaa

SEQ ID NO: 191205 - DNA, 368 bp, Arabidopsis thaliana landsberg
tgagtgcgaacatgagagggcgggaggaggggctacacgggtccagcaggtggagattgacttaaggaagaaaagccctcggcgagacgatgacctgaactgtactgttagagaagatggagagacagaaaacttacaagaaatcgaagaatactgtcacgacgaggaaagtgactgcatggtcaaggaggctggatttgcgacattagatgaggaaaaggttgggcagggatggaacaataagaaagttgagagggttaaagtatatctagaaaaaatgaaactaatagaatggtttgatgccatagaggttcaactgccaaaacagacaattgaagaaacagagaagatgattgagcccatgagaa

SEQ ID NO: 191206 - DNA, 660 bp, Arabidopsis thaliana landsberg
agttgatcccaattacgagagaggtgctcggagttttgtacgtgatgtggttgcggctctaggagatattgatatgattatatgtccctgcaaagagtgtcgtaacgtataccggcagtcaagcagtgatgtggttgtccatctggtaaccaaagggatggatgaggcatacaagttgcaaagtgaatggtatcatcatggagactctgtggcttcagctgaaggcgtaagtacaacaaatcagaggaatgatgaaattcttgagctatacaaggctgctgaatattttgatgaagagctggctagcaagcgggacttagtagagactccattgggtgacttagctgagatagcagaagacgaggacaggagagaagatgaattcctagccaaactagcagatgctgaaacccctttatacccgacttgtttaaaccacagcaagctctcggcgattgtgtctctgtttaggattaaaacacgtaatggatggtctgacaagagcttcaatgagctgcttgagacattgccaaatatgttgcctaaagataatgtgctgcacacatcattgtatgatgtcaagaaatttttgaagagcttcgacatgggatatgaaaagatccatgcttgtgtgaatgactgctgcctattcagaaagaa

SEQ ID NO: 191207 - DNA, 321 bp, Arabidopsis thaliana landsberg
ctgtgcatgttgggggcgctatatgaactgcgtgaatattttgtgtgcaatgtccggccgaaactgtggttactgcccgcaacacaggtacgtgccgtactggcaggctcctggctgatagccagcgaatgcatggagcccaacctggtgctggccgtctgctgtacgcggccatggtctatgatactgcttacacaaacagggttactgctgggctttacctgtgttaccgccggctatgccagaccgtttgccggatggagataccgtaactaccgaaccagccacccgagccagcatacccatattaccatactttga

SEQ ID NO: 191208 - DNA, 137 bp, Arabidopsis thaliana landsberg
gttacaggtagataagcagtctgctcctaaagaacggaaggagacttgtttcttctctgcgatgttcttggaaatcgcggcttttgcccgccagctgcgaatcattcattcagaaccggatggtattttcagtccag

SEQ ID NO: 191209 - DNA, 483 bp, Arabidopsis thaliana landsberg
gatgaagaagctgctgatcagacgggtcaagaggaagatgcctctacagtgtacgtgttacttctttagttccgttgtttatgtggcactggaaggaatagctagatgtcatctttttacttgtgatgaccaagcttagcattttgtcatgcaggcccctgacgaagaaagctaagacaggcaagcaatcaaagatggacaactcatcagctaaaaagtaattgaaactgaaagcaaatagttaacaagtgttgaagtctctaaaataattctctactaatacgtaatattgtacttctgatgtattcaggggtagtggagctggatcaagcaaggctaaagctactcctgcttccaagtccagcaagacgtcccaggatgacaaaacagcgagcaaatcgaaggattcaaaggaagctagcagagaagaggaggcgagctctgaggaggagagcgaggaagaggaaccccccaaaaccgttg

SEQ ID NO: 191210 - DNA, 70 bp, Arabidopsis thaliana landsberg
gttgtgatctgtctttacttcttggcagctctaggacgaatcatatcgggtgtgaccattgcctatgcag

SEQ ID NO: 191211 - DNA, 48 bp, Arabidopsis thaliana landsberg
tcaatcacatctctctccgtcaccataaccataaatgatgagagttga

SEQ ID NO: 191212 - DNA, 178 bp, Arabidopsis thaliana landsberg
ccgctctatcatcgagcatagcctaggcatcgacccctcggtgcgcccgaaaaagcagcgactgcggaaaatgtctgatgagaaaactgaggcagccatggccgaggtgcatcacctgctagaagccaggttcatcgagccggttgcttatccaacatggctcgccaacgtggtcatg

SEQ ID NO: 191213 - DNA, 98 bp, Arabidopsis thaliana landsberg
ctcattcttggaaagtctttcagcatgctttttggatgactctggtatcggaaatcaacagatttaagttatctaattcatctgatgcaagagcaaag

SEQ ID NO: 191214 - DNA, 734 bp, Arabidopsis thaliana landsberg
acaaaaccaacaactttgcaatgcgtctaagagaagttgtcagacaaagcgagacaaaacccattgacacaagcaaaacctcagacacgatgagaacactcaccaacgtggtcgtgtctttatcttggcgtggcactaatggaaacccaactgatgtttgtcactgggctgacggttacccgctcaacattcatctttacgttgctttgttgcagtcgatattcgatgtgagagacgagacattggtgctcgatgagatcgatgagcttctagagctaatgaagaagacttggtcaacactagggatcacacgaccgatacataatctgtgtttcacttgggttttgtttcatcagtacgtcgtgacatcacaaatggaaccggacttgctcggcgcttctcatgctatgttagctgaagttgctaatgacgctaagaagcttgaccgcgaagcaatttatgtgaaactattaaactcaacattggcctctatgcaaggatggacagagaaaaggtatttgactattctcgttaagccaagaagtcaagaacaattatatttacaaaatgtttgaattttaatgtgattttggttattaggttattgagctaccatgattatttccaaagagggaatgtgggattgatagaaaatcttctgccattggcattatcatcgtcaagaattttgggagaagatgtgacaatttctcaagggaaaggacaagagaaag

SEQ ID NO: 191215 - DNA, 310 bp, Arabidopsis thaliana landsberg
atggagaacctctatactttaggtgataaagttgtaccgatggaaggagtgaatgatgatgaggccccaatccgtcattcagataatgaggcagaacctatgaacaagtcttacgcaacacgacagttttactttgaggagtactccacaccgaggcaaagtaaagactcaaaggaagttcacaagcgccttggtttcttctaaaggctggtgtaaattccacgacaaggctctcgcggcagtcaacaagaagtttaaaaatctccaactcaagatcagttgttcttcctcaactacagcaatgccgtag

SEQ ID NO: 191216 - DNA, 166 bp, Arabidopsis thaliana landsberg
caatactttgagaacagattgaggtatcttgcagcgcagaaggaaaagggagagaatccatacccacacaagttttttgtgtccatgtcaatctctgaattcattgcaaagtatactactttaagcaaagaagagtctgttgaagacgatgaagtttctctagccg

SEQ ID NO: 191217 - DNA, 504 bp, Arabidopsis thaliana landsberg
atgcctcctatggcgaaaaatgcagcagtcactgatgttgttcatctcgacagtgatagtgacagtgacaacggagtagtaggaggaagagaatcaggaagtacaatcgctggtgctgcgacaatggctcctcgagagaccttagaatgccggagcttttggaaggcgggaggttactttgtgataccgaacgttgtgactcctactgctccaggtcatctctctcttcctcatacacacgcatgcatcacgattatggtatctaatgagatggaatttgataggtatgcttgagcatgctcgagttcatcccaggtttcttcactcgaatgctacctcacacaaatgggcttttggaggtaaagctatgagcctatgaattgtctctactggtgcgatcaatttgattaatttgtgattttgtgatgatcatctttgtcaatttcttcttctttgtattgtattgcagcaatcgctgagctacttgacaatgctgttgacgag

SEQ ID NO: 191218 - DNA, 737 bp, Arabidopsis thaliana landsberg
atgaatactcagccaaaacaacatcatgttcgggtgcaggagaagaaacgacaacaaaatcttcctcgttcatctccatttgatgaactctcggcaattttctatcctcgccacaaccaaaaacgcagagttttggtgattccaccatcgattactcttttatttctgattcattttcaaaagtgtcgaacaataccggtttactagaaaacatcgtgaaggaaggaataaaagaaagaaaataaatgcagttgatctcaacctatctatggagtttgatttgaattttgtgtgttttatttttccatcaaaaataaataaaatgctaccattgtaatttttgattaagaattacaatggtaagcattttattttatgtttatttactcttttatttatgtttctttgtgttttatttatgttttccaccataaacctgtttcatgattttgtaacgtgatcattgacagaagaacacacaaaatggattcatgaccctaatatccaaacatagatgacatgccaaatacgtctcacttttgatatctatctctcctttatagatgacaaacacccacggtattcctctcttccttgctaaacaatacttatgcacactgattagtatacaaagtttacagctttatactaacacatcattatggggaatccagaaaattgatcccactttactatgcccgttagattttatcacgaggaatggcgttataatggag

SEQ ID NO: 191219 - DNA, 159 bp, Arabidopsis thaliana landsberg
atatacaacaaacccagatctgaaaacaaagcatacgtcggaactcggaaatacaacgaaactcgtatcggtagatctgtaaacgaaaccttccgatctgaggaagaggcaacaacaccaggaaaatcagaaatcgatgtaacaaaaagcaaaccctag

SEQ ID NO: 191220 - DNA, 1414 bp, Arabidopsis thaliana landsberg
aaagataagtcgaaccctgtatttcgcaatccgccgagcagatgctctacggagagtaagccgagcccagcatctcgctccccaagtaatatgccgagtccgcctcacttattcttaaaacagagtccagaactccctctttaagttatacataggcctactggacataagccgatagacgtctcgcgtccagtacatgctgaatattgtcattcttaaaagccgagctcagtctcgcacttaacatctaatccaaacttagacagaagaaattgagtccgatctccgaggtcgcacgcacaataagccaactgaaagcaaagtcatattatattaataaacgatcaaataagatcggtagtcattacaaagacgtttattctagaataaattagagacgatcaaacaagatcggcagccgttacaaaggcatttattcgaagaaaaacagagggaaaatgatctgaaggccactaaggatcatcttctatcatatcaaaagcatgataagagaacatttcgtagcattcaggagagctacaggccagatacctcaaaggatcatcttctatcggtaagtggttctcacattccatgcttaaacatttcatagcatgagcaggtttggctaattgctttctctttatacagtgacggagtaagcgaagggcagtttagtcaggttctgctacatgagatgactgctatccgcaaggcttgtaactctctccaagagaattatgttcctcgtgttactttcgtgattgtccagaaacgtcaccacacacgtttgttccctgagcaacacgggaatcgtgatatgactgataagagtggcaatattcaaccaggtttctcactctctgctcttctctatcaacttaattcctttaatgatccagatttcaagtaacatatttgtatttccttatcaggtactgtcgtggacactaaaatctgtcaccctaatgaattcgacttctatttgaacagccatgctggtattcaggtattgcttccagaatctagaccaatttatgacctgttttgtctcagcagaattacaacttcctttgaatgtttgaatggtgatagggaacaagcaggccggcacattaccatgtacttctcgatgagaacggtttcaccgctgatcagttgcaaatgctcacaaacaacctctgctacacgtaagagacaacaacattgtacattttccttatgacatgttttaactctctgaaactaacaaaacatataataaaatgcatatgcaggtatgcgaggtgtacaaaatctgtgtcaattgtgccaccagcctactacgctcacttggctgcattccgtgcccgctactacatggagagtgagatgtctgatggaggttcgagcaggtccaggagcacaacaacag

SEQ ID NO: 191221 - DNA, 720 bp, Arabidopsis thaliana landsberg
ctttcccgaggagtcgtgaagcttctccaagaaaaatcaaagccttgcctgaccagaacagcaagatcatcgtcgccggacttctgtcgcccaccgccgcgcgtagaccgagctatccggtgagccattcttcaatttctcgcgcctatgtcttccctgacctcaagtgaagctcactgaccagtttaattgaactctactaccctggataggccggaccctcgccaccgacgagctctccgcctgcgcacgtggactggctactccgaccatccctgacgcgacccgcacatcaccgtgaccctcggacctcccctacatccttgaccacctcaccggagcagtctcgccgccggtaagcccctccgcccctttcttcctctgcggccactgttccattagggaaggaccgtgggttcaattttgcaaaaccctagggggttttctgcagagccgtagactcaagtgaatagtgcatcgaggacctctctgtaattcttttaaaatctttcgccagggaccccagcgcaaaattgtttttcctttaaccatttctaattaatctttttatattcagcagagaacttgaaaaatttatatcttgagttatattcaaccaaatttagtcaaacaattttactagattcaaaatattatgaactatcacataaaatactgaaccatgtgctttctgttttaaattttagagtttggaattaa

SEQ ID NO: 191222 - DNA, 458 bp, Arabidopsis thaliana landsberg
tcgtcaccgccgcgctttcgctggcgggccgcccggtcgccagcatcgatttcgccgccaccaccgcgggcaaactcgccgtgcccgccccgcaattgtggtggcccgccggacagggcgcacaaccgctttaccatctcgccgtcacggttcgcgaccgctcgggccggacgctcggccccttgaaacggcggatcggactgcgcacccttcgcctggaccgctcgcccgatcgatggggggaatcgttccgcttcgtcgtcaacggacgtccggtctttctcaaaggagccaactggataccggcgcacagtttcgtcgccggcctgactcgccgccgctacgatcgcgatctccgggccgccgccgcagtccatatgaacgccgtccgcgtgtggggcggcggcatctacgaaagcgagcctttctacgatctctgtgacgaactgggcttgcta

SEQ ID NO: 191223 - DNA, 2583 bp, Arabidopsis thaliana landsberg
atgcgtacaggggcttataccgtgcaccagacactaacaccagaggctgcttcagttttgaagcaatctctaaccttagcaagaagaagaggccattctcaagtcactcctcttcacgttgcttcgacgcttttaacttcgtcaagatccaatcttttccgaagggcatgtctcaaatccaatccgttcactgccctcggtcgccaaatggctcacccttctctccattgtcgagctctcgagctctgtttcaatgtttctctcaacaggcttccgaccaacccgaatcctctgtttcagacccagccttcactctccaacgctctcgtagcggcactgaagagagcacaggcgcatcaaaggagagggtgtgtggagcagcagcagagtcaacagaaccaaccgttcttggcggttaaagtcgagctcgagcagcttgttgtgtcgattcttgatgatcctagtgtgagtagagtgatgagagaagctggactctctagtgtttctgtgaagagtaacatagaggatgactcctctgttgtttcccctgttttctacggctcttcttcctctgttggtgttttctcttctccttgctctccttcttctagtgaaaacaatcaaggaggagggactttaagccctaaccctagtaagatttggcatgcgcatttgaccaatcatcactcttttgagcaaaaccctttctttcatttccctaaaggaaagacctttactccaaatcaagcttttcccgtgagagaagacgcaaacccggtcatcgaagtgcttctagggaagaagaacaacaagaagaggaacactgtcatagttggagattctgtttctctaacagaaggagtggttgcaaaactcatgggtagaatcgagagaggagaagttccagatgatttaaaacaaacacatttcatcaagtttcagttttcacaagttggtttgaatttcatgaagaaggaggatatagagggacaagttagagagttgaagagaaagattgattctttcacatcttggggtggcaaaggtgtcattgtttgtcttggagatcttgattgggcagtttggggagacggtaacagcgcatcttcttcgaactatagcgcggcggatcatctagtggaagagatagggagattggtttatgattatagcaacacaggagccaaagtttggctattggggacagcttcttaccaaacatacatgagatgtcaaatgaagcaacctccacttgatgttcattgggctcttcaagctgtttcaattccttcaggaggactttcactaacccttcatgcttcaaggttttttttttctcttcttataatttaatcactagcttaagtactcgtgatggatactaaattacttagtttcagtggtcacagttctgagatggcttctcaagtgatggagatgaagccatttagagtaaaagaagaagaagaaggagcaagagaagaagaggaagaagataaactcaatttctgtggagaatgtgcttttaactatgagaaagaagcaaaagcttttatatcagctcagcacaaaatcttaccgccttggctgcaacctcatggagacaacaacaacattaaccaaaaggtacaaacttctttttgataaatgaatgatttttgttttattattagcgtttgtgcagttacttaaaccgttttttttgtgggtttaactttcaggatgaattgagtggactgagaaagaaatggaaccggttttgtcaagctcttcaccacaagaaacctagtatgactgcttggagggcagaacagagcagctctgttttaccgggttctttgatggactcgagtctgaagcaaaactcacgtgcatctagttctgttgctaagtttagacgacagaactcgtgtactatcgagtttagtttcggaagtaatcgtcaagaaggtctaaagaagactgatgaattgagtttggatgggttcaagagtaacaatgatgaaggtgtaaaaactaagatcactcttgcacttggtcattctccatttccatctgattcagagaactcggaagaagaagaaccagagaaagcgattaaaatgagtaaattattggaaaagcttcacgagaacattccatggcaaaaggatgttcttccttcaatcgttgaagccatggaagaatctgtcaagaggagtaagaggaaagatgcatggatgctggtttcggggaacgatgtgactgccaaaagaagattggctatcacattgacaacttctcttttcgggtcacacgaaaatatgttgaagatcaatctaagaacatccaaggcaagcgaagcatgcgaggagctcaagaacgcgttgaagaagaaggaagaggttgttattttgatagagcgagttgatttagccgatgctcagttcatgaacatcctcgtagatcgatttgaggcgggagatttggatggttttcaaggaaagaagagccaaataatcttccttttgacgagagaagatgatgaatgtgtagagaatgaacattttgtcataccaatggtgttgaattgtaacaaatcag

SEQ ID NO: 191224 - DNA, 60 bp, Arabidopsis thaliana landsberg
atgggagaaaacggtggtcactactgttctaaaaagtctgatgatttatgcggaactcag

SEQ ID NO: 191225 - DNA, 268 bp, Arabidopsis thaliana landsberg
ctcagaaaagctgcgcgacctgaagaagtgggctggaggcgttcgctgccgcataggcggctcagacagacgaaacctgtgtttcgcgcaacactgaattgtccgctgccgcataggcaggtcagaaaacatagggccaaatcattggcagcatgtggatgttcgctgccgcataggcagttcagaaaatggatgccggcgcgctgcggatgcgctgctagttcgctgccgcataggcagctcagaaagcctgcacaaactccaatga

SEQ ID NO: 191226 - DNA, 117 bp, Arabidopsis thaliana landsberg
aatacctttccaaacatctcttctcaaactccaactcttcgacatcttcttcatcacttcatgaggattaaacctccgttggtaaaccttgctattgatgacctgcatcctcactag

SEQ ID NO: 191227 - DNA, 511 bp, Arabidopsis thaliana landsberg
atgtgtcgaacttgttcaaagaacttctctagtcctgaggagtgtaagaatcatcttggacaagaacatgctgcagaatttaaaccgtcttcgacaaaggatatgccccagacggtaagtaaagtctggggtcgtaagatatccgttggaggttgggatccagtggatgctgcagctgccgttgagatgattaagaatcggctccaagatgtgaaagcgtttgcatatgagaatggatggtccaaagactggcctttagctatagatgaagagcgcagtaagttactcaaggaaatcaagttgctccttgtgtcattttgggaccttaaaattctttcttgtagtattcgagactggatgatgcagtttccggttaagcatcttgcacaatttgaagtttctgagcatactcttactaccgagtgtcgcctagtggaaacacctcagagtatatgttttctggaatttcgtgaaaacaatcaaatcctgcactttgtaagagccatcaaag

SEQ ID NO: 191228 - DNA, 72 bp, Arabidopsis thaliana landsberg
atggaagagaagaaagaaacagaggaggaagaagaaacagagtggcttcgagtgtttttgctagggtttgct

SEQ ID NO: 191229 - DNA, 493 bp, Arabidopsis thaliana landsberg
ctccgtctgatggtgatcccagtcttacctcatctaatgtagctgccatatctgaaaatggacatcgttcttctgaaggttataaaccttgctttattgttgtttccttttcacgttgtttgcattatatcaatatttctatttatttgttccttctcgtagcgacaacgaacatctctagcccgctgacctcatctagtcaaggtggttctgttggaaatggagatgattggagtgaagctgccatgagggctgacatatatattttatcatcagacggttagaaccagcatttattgaatgatgtgcctagttttgccgactgcttaacatgtctatgggttaatgtttgtcatcttaatgtctctatttgcaggcccaacgcagcataccaacagtatgagttcatataatgacagtttaactaatagaaatgtagatgagaagtgtgaaggtgacaaaagtgttgatagagatgtttctttgtctgaag

SEQ ID NO: 191230 - DNA, 332 bp, Arabidopsis thaliana landsberg
atgtttaacaacgaggacgtaacaataggtgcgtggatgctggcaatgaatgtcaaccacgagaaccatcacatcctttgcgaaccagaatgctcaccttcttctgttgctgtttgggacatccctaaatgctcaggttcgtttttctccgtcaccgtcttgaagaatggatctaaagtcacactgcataagcatttctacaacaattgatcacaatttggattgaaaatgttactggtgcaggcctctgtaacccagagaaaaggatgttggaacttcacatgctcgagagctgctcaaaaagcccgactttgccatcggatgatgagtga

SEQ ID NO: 191231 - DNA, 324 bp, Arabidopsis thaliana landsberg
acggcgcacggcggccgccagcgccgcaatgggcgagtgattgccgctgaccgactactgggcgtcgcgcaagtcgccggcgatcttctcgccctgcatcatcgtggagcggcgttcggggagcgaggtctgctccccgttctttggcgcgagcttcttcaactcatcggacgagtggcgcaggtaataggcctcgcgcgcggcgcgttccatgccggcgcgatgctcgatcagcgcggcttgcgcggcacggagcgcggtccacaaggccttgagcgcgacaacatccttctacagcccggcgaaggcatcgagcagtcgccg

SEQ ID NO: 191232 - DNA, 250 bp, Arabidopsis thaliana landsberg
atggtttcaaatgcgtttgattttacagagtcaggatttgatcaaaacatggacgaagagcctaatgctgatgcaaaaaagttttatgatattttggagggtgcaaagcatccaatttatgatggatgtaaagaaggactttcacaattctctttagctgctcgattcatgagtttgaagactgattataatttgccgcagaattgtatggactcgatttgtgagattatgaaagaatatttgccagaag

SEQ ID NO: 191233 - DNA, 290 bp, Arabidopsis thaliana landsberg
atgtcttcgcccgagctccgggagtcttcggctcggatgctgagggttaccgggggttgttggccgaaaaatgttcctatcccctgcgcggctgaggaggactgttttacatctcgtatggttcatcggtggagagtttttccttacgggcgaaatatcggtgctgttgtgtgggcagtgatggacaaggatcgccaaggggcggcgcagaaacgccaggcgactgtcaggattcacgaagctcggccgaaaaggcgcggggaactacagaacgcgtggctccggcggag

SEQ ID NO: 191234 - DNA, 251 bp, Arabidopsis thaliana landsberg
gtaattttgcctttggctgccagcagaaaaaaaacggagcaaatacccgctatgagaaaagcccaaaattggcgctggtcttcctggttcagcgccacgataaaaaaaactaccgtaccaatgaaatatatgcttgcccaataaacgctacgcgcttttcgtctttttgcctgcaagttggctatttcggccagcgcttcttcaacactggatggcaaggcggtgtaatcttccattactgtttacaataa

SEQ ID NO: 191235 - DNA, 216 bp, Arabidopsis thaliana landsberg
ggacaactaccagcactgctaccattccctccaataaaacatattatgtgagcaaggaggtacaggccagtgtagggcctgcgaataaacttgtgtacagccagggaggatataatgcttttaacggcaactatatcaaattcaataacagcgtgcccgtaatcattcagacagcaaggctgtatgtaggctacccgggcaagcaccaagttcaat

SEQ ID NO: 191236 - DNA, 207 bp, Arabidopsis thaliana landsberg
gattttgtgtttccggcgatcagcgtcggcggcccggatcttctcgaaaggttcgagcggcagattgctgcggaggatccgttttcgccggtcgcgaacgagatgtcgcttctcattcatgggggcggggtcttcatgaagctcgacgccgaggggcgtttgatggtcgcggatttcattcgggatttcacgaggatctcggacgaa

SEQ ID NO: 191237 - DNA, 52 bp, Arabidopsis thaliana landsberg
gtcgcttcaggcaacacctgtcgatcagctaacaacaacagatgttatttaa

SEQ ID NO: 191238 - DNA, 108 bp, Arabidopsis thaliana landsberg
atgctcggtcggtcaaccgtgtataacccaacacttccacccatgatcctgagtacaaacaagaccacctggatgagtttgtcagaacctcttcgtctaaacgatgag

SEQ ID NO: 191239 - DNA, 172 bp, Arabidopsis thaliana landsberg
taggtgggatgatccggaaataacatctgggggagaactgactttgctgaaaaaggatggaggagtacctgctttattcactactactcggattgtgtttgcttcttataattttgatttgaatcagagttttttaagggccatgttttgcccaacattgtatcataaaaag

SEQ ID NO: 191240 - DNA, 104 bp, Arabidopsis thaliana landsberg
aattcttgcctgataaatttcatcaaaccaaagactattcccggttattgacaaatgagtttctttatgacttttgcgcgcggattaaaactcaaagtcactag

SEQ ID NO: 191241 - DNA, 178 bp, Arabidopsis thaliana landsberg
ctgttgtcgttttcaattgtttgtatcgaaagagggtgaaattgaaacccaattggagcaggatttgtcgaatttagctgggtttcgtttcgaggttggatctggagattatgctgttgaggcaatggaggcttctttagcggctttggagcggccacgaggttcagcttctaatacg

SEQ ID NO: 191242 - DNA, 111 bp, Arabidopsis thaliana landsberg
aatgtttccatatttggaaccagtaaaaatgaacgtaacgtaatactaagtatcgttagctcaattggtaaagattctacgcgttcgtctagaggtcgtcggttcgagtga

SEQ ID NO: 191243 - DNA, 94 bp, Arabidopsis thaliana landsberg
attttaatttcgtttgcaatttctggcaaccagtttctgaagcaagagcctcatgaattcctggggaccatgaaacaaggtactccttcttttt

SEQ ID NO: 191244 - DNA, 85 bp, Arabidopsis thaliana landsberg
tggttagagctcatggtatggttaatcttattgcgcttttccattttaaaggactgtctgcggtgctaactgctgaagagctcac

SEQ ID NO: 191245 - DNA, 1201 bp, Arabidopsis thaliana landsberg
aaaaaaagaggtaaaaatgacaaggatgtgtttcacacgcgttcagaccctcacacgtgcgacgatcatgttataaacaaactctctcataatttccccaatcggaggcctctgacgaacaaaaaaagcccagcaaagtctgaagttaatctcagccgtccgatcaattcatctaccatcgtggtcagagatcttcttcttcgtctctctctcgtttctcaaaaatcaaaatcccttcctctctctctctcaccgagccggcgagcccgttctctcggtggtaagtgctcaatttttcgatttcaccattcagtttctgggttcggagattctcgagccgctcctacattacctgtttaatttccgatttaatattcaaaattttgttaatctgaattcgattgccacatagctgctgcttattttttctagggtttatacttattcaattatcgtgttcgtcttttaattcaatttttgttgggttttgtttttgattgaatcattgtagtttttaaagatgcttatgatgatgatggggagtaatatcagaaatcaagctttttcacaatctcagaaattgtagtagagtttggcgattttatcaacctccggaacaagcttcttcttcttcgttttactcttgtcatccgtaaatgggttgtttccattccacggctgccagagaatttcccgatcacgaaaaccctgtgaagcttgcttctgagactgcttgtaagtttacttgcactatacgtttcgttttctcttctttgctttattctccaagagcatgagcataaagatctctcttttatcaattgttaactgatatgagaatctgttttcgccatttattgaatccgaaaaatggttctttcattcataatctatttgatctacaactttgttaaatgatgcttgttgttacttaagtcatcacataaacctatttcaacagtttcttggatcattagtgtagtttacttctactttcaaatggaatcttaatcagagaaagttttcaagaaccatcactttcgatttttgttttgatgatatacatgattttgatgttaaatctcgcagtgtggctaactaatactttgtttttctagttagtgttagtgaagttgaagcattgtatgaattgttcaagagcataagcagctcggttgttgacgatggcttgataaacaag

SEQ ID NO: 191246 - DNA, 745 bp, Arabidopsis thaliana landsberg
atggtgtttaggagccgggatgatgctctggtcctcgttagaaaaagaaaggtatagttttatccttgttttttggttttgcattatcgttcgaaaccgcttgcttcgccatttgaggaattttaaatactttttatttgttctgcaggttagaataaccgagggagcttctttatactcgctgtgtcgatcttggttgagaaatggtgctcatgagggaattaaggttcgtatccatttcttatttctgctttgtagtataatgcaacacttggatttttgtatatctattcttgatatctttggaagattaatgacgttgtttacagccgcagcgaattgatatgatgacatgtttgccaaagcctttacctgtggacaagacggagacaagtttgccaaaagatttagttgaagaagcaatttgcgaagaagacaaagaggtctcgtgtttctctgatttctttctaaaatggtaattgtgaagggtaaagctaagtttgattatttacttcaactctcttgatgagcttcaggacgaggaatctgtgaaacatttgtcagaatctgatcttttgaaaagacatatagaccgagctaagaaggtccgcgctcggtgagtcccacaacatatcatcaaagctaagttcgatggttgaagattgaatattttttgttttgaacaaaattgtgtggtttgttttgtttgcagattgagagaagaacggttaaagagaatcgcgag

SEQ ID NO: 191247 - DNA, 1015 bp, Arabidopsis thaliana landsberg
atgtcattacccgaagctatctctcctctctacggcctttcgtcaagtaatctcttcagaggatctcttccaagttcgctcgctcatcggctcaacggaacgggttctttataccttgatcacgttcaagtacccaacatttgaagaaggaagatggttcattctccaacggagaaacaatacctctttaaaattgaactgtgtaacatctcttcctcccatgtttcttggatgcactgccgtcacaataggtcacaagatttatgtaatgggtggttataacttccgctacaataaaaccataagtactgtgcttgagatagattgtagattcaatacgtgtcgacatctccggaatatgaagagggatcgttgctccgcagtcgctggagtgatcgacggaaggatttacgtagtcgccggacgccagagacgatttgatgattgggtcgaagtgttcgatgtagagactgagagatgggaacttgtgcctggtccattctcttcctttgctagttctagtggaaagtttattgtacatgtggttttggataataagatttacattatggatggtgactattgttttgcgtacgatccaaggcgacgtagatgggagacttggggacctgaaagtgcacagaggagttattggcacttgtcgtcttgtgtggttgatgatttgttgtacgcgattgttcctcgggagatttttggagcttcgattgtcgtttatgatccaaggggaatagcttggagacctgtcatgggtttagagttttggcctaatctcgtttatttcgagtctaaaatggcgaattttggtgggaagttggtgattttgggatgttatcggagtagttttgattattacagaaaagacgtttggtgcgttgaggtggctttggagaaacatgaagatggtcaaatttgggggaaggtcgaatcactctcgcttgtgaatgcattccctatgtcgcctttctttgagctttctcgaactgttacggtttga

SEQ ID NO: 191248 - DNA, 818 bp, Arabidopsis thaliana landsberg
  unsure (1)..(818): unsure at all n locations
atgtcccacgacggcagctacgatagggtactcctcccgcagcacgacaacaacgacggtcgtcagctcgcccggtggcggcgaacnnnnnnnnnnnnnnnnnnnnnnnnnnnnnnnnnacatccgggtttgccccgccaccctcctcgccggaggaggagaagacggagcaaccgtggccaggcaagaggcagcacttcgtcggctttcggaccagagcgagtcgacgacgccggcacccctgctggggacatgtcgggtgttgtcctcgcatctgagacaacgacgggtgtcgcttcccagcaacgtgccaaccccaggcggactgatgacgccaacaccctcgcgaatgactcgttgggcgttaccctcgtacctgagataacggtgcattccgtccccgatgcgacttcaccaccgtccatcaaccaagaggtaccatccattttccaccctgttccctttagatttagcttcgatccaccaagcaaccccacttcggtgagcgtttcgcaagggcatatcctgaccttctagggtaccatatgtggtcaacttgggaccgactggctgccgtctcaacctccggacccgcgggttccgaggaagaagacgaccccaacttcggttgggatttctttgaacttcgtgatcccagtgccatgcgagacttcatgtccacatgtgactactgccactccggctgctccgacgatgaccacagcctcgacgacgagggttatggcccaagtcgcgagtgtttccacatcgatcagggggatcacgacgaagacaaccacctcgggggatcctctaga

SEQ ID NO: 191249 - DNA, 871 bp, Arabidopsis thaliana landsberg
gtcgtttatgagaaagaaggagaagaatctttcatgttatctcctgatgatcaagagttctcaccatctcccagacctggtaatgtctcttatgttggagcatcattgattatagtgaagggcttagtattaattactctaggcattttcctttttagttcatgcatttactttcagtctaggatcccttagtttatgcttgtgatttttgcataagaatgcgctagtcagtgaaattgttcaggataggattcgtgttggaagctaacttggtaatatcttatgttggaacatcattgattagtgatggactcagtattactctatgcattttcctatttagtccatgcatttactttcagtttaaaatctgatacaaatgaaaactagtccttgtttgtgatttttgcataagaatactctagtcagtgaaattgttcaggataggattcgtgttggaagctaactagttgtttttgctatttttagacaacaggaaggagagaactctctggctacttgcacagaactttgtgaagctgtttttatgctctgatgtaagtgaataagtgttacggcatctctctaaacaagtctgaccaatgaccaatttattgacacctctattgttgctactttgatgtcaggatgatctggtaacatttgatagcgctacaaaagcattgctgaatgagtctcaggatatgaatatgagaagtaattctaattccttcccttaatcttttttgttctctgattattacatacataagcaataaccaaaccccatttctgtaaactctaagcagagaaagttagacgcctttacgacattgcaaatgtgttttcctcaatgaagctaatcgagaag

SEQ ID NO: 191250 - DNA, 440 bp, Arabidopsis thaliana landsberg
atgatcgctgagccaaagagcgtagtccttgccctcatgttcggccaggccaccgtagccgccgccgggacaaatcaccaacgcggcaccggtcgcctcgcctatgggccaatatggcgtgagagttggaacatctttatcggccgtgcccagcgcgccgggcgcgccgttcgaccaaagcggaaatgaattcgtaggttgttgagacatggcggatagtgccagagcaacattgatagccaaggcggcgagcaatttcgagcaattcatgatgatgcttcagttgaaccctattcgccgctttttttcaactggtattgttcagaagcgatggtgcgaaatcgggagaaaagacgcggtttcgcccagagccatccgactgaccaagtgatcaacgccgcgagaatgaaccaaaacaaaccagcatttgagtgcacacg

SEQ ID NO: 191251 - DNA, 1890 bp, Arabidopsis thaliana landsberg
tcatcatcgccgatttggaactccaaaaccacttgaaactgtcagatctccaaggtacaaagaagtctgacggttttaattagagaatcccaccaatcttcatcattgaatatgcaaaggaaagatatttccaaagaaattgactcccaaactctcgaggaacatcatcgtagagattaagccgatggagctttcagcaacatgctagaaaaaaaacactcgtttccatagatcagttagataaatagccacaattgccttaaactcaacccaaagcaccaaaaagaccttgatccgcaactccaatttgttcgtaaataatgaaatcgataagcttgagaaacaaatcaagccctttaaacaaaggaggttcaaggaattaagattccatatctaagaattgaaacgcaatagagcccaatcagaccaaattttacgaaataggagaaagaaaattgtttaaacaaaagcaaaattcagaactactggatacaatggacggcgagttaaaacagcaaaactggccaacgccgcttatagaagccaatgatgctagacataggaccagccatcacgactgcggaagccggagataatggacaaaaagccaactaaatcgggataacaaaactagaagaactctggtcggcaaaagaaaacgcttctctcatctttgaaaatttttagagaatttttagagaaaagagaaagggaaaacttttttatagtttggagtcttgaactatatataattgtcataaaataaaaatgaccatccctattacataagacatagaaaataaaagggaaaaaaagaatgacatgtccacgaaaaattttcattcttctagttgtccaagaaaaaaagcacatactatcgaagtacattataagataaagcttaccaaatcaaacttatggaagagtcctaatacgggtcaaatttccctaagaactactctctcaaataagagatcaattgcagtatttaaggatcgaattccacaaagttcttttgttcaaacaatgagttgattgtcgagattaagctagcaggtgatgattgaaataaaaagagaacaaagtaaaaaggcagcatattgattgtgttgtaaatgattaaataaagagctaggaacagggtattctcaggaaactattggttagtagatctaatgatagctaggttgttatcgaatcattcttaaactcaaactttaattatggaataaccggtagtgttccgcaaaactccctatgtttattgctaagaataaccggagaagccaagagatctttaacctaaatatgcattctaaaagagttcaattgttcaccttagtagataggccgattcttattacacacctataaaccaggctcatcaaataatagatccaactatagatacctatggtgggcatatctattgtaatacccctgaccaggactagcactaggccaaggaattttagtcgacaatttagcaagccgtacaatcggaacgatcggaagaagtccttacgggaagagtattgttcatcggaccaacggtctggtagttttggggatagtcatgagcaagtgttcggggaaccggatgggtgagacaagtgggacgaggacttgggtgactgggattaatgtgttgatgcattgagggaatgcgtgaacctgtcgtggttacggttctacgagatgatcaccgttggtaacggtaatgtccccgagtgcgtgggatgtgtttcacccggtaccgtggcgcttagtaatatctcatcccttactaggcgctgcttatgtactatttaccaaacaagccgctacgtgttcctcgagctttatttatgcccgagcgatcggcatttggatcatgtagatgatgcctga

SEQ ID NO: 191252 - DNA, 139 bp, Arabidopsis thaliana landsberg
agatgtggttgttgagatcagtcgaaggaaagaaaaagaaagaagaaaaatagaaaagaggaaagaggaacaacaatatcaagaaggtttattgcagggtgaattcccgacagaccagagggactcagataaggaataa

SEQ ID NO: 191253 - DNA, 341 bp, Arabidopsis thaliana landsberg
atgcaagtcgacgattccgttatcgggaccacagacatcgatgagtctctctacagccgacagctctatgtcctgggacacgaagccatgcgccgcatgggcgcctccaacatcctcgttgttggtctcaagggcctcggtgtagagattgcgaagaatattgccttggctggtgtcaagagcttgactgtctacgaccctgctccggtcaagattgcggatctctctgcccagttctttttgaccccagaggatgttggcaagcccagggacgaagtcacagctccgcgcatcgcagaactcaacgcttatacccctgtcaaggtccaccaatctcctgg

SEQ ID NO: 191254 - DNA, 265 bp, Arabidopsis thaliana landsberg
atgagcatcgacttttcacagataaacatcatctttagtacactcagccacactccccacaaccggtaagcagcgctttaaaagaagaatggaggggttacgactcctactagcagacaaccatcaaacaccacctcttaagccatcttttacctccgtattcagaggcaaaccaactaagataggtccagtaggccccgtcagattaattgagaagaccaagactcgttcaattgtcttgccagaaacttgcagtttcacctga

SEQ ID NO: 191255 - DNA, 103 bp, Arabidopsis thaliana landsberg
aacgagcgacttacatatatctgaagagttcaaaaagaccaaaagtaagaatcgttcgttcctgtcaacatgtacatctagtcgtctagatgaatctccataa

SEQ ID NO: 191256 - DNA, 316 bp, Arabidopsis thaliana landsberg
aagtatggattaacagttgttggtgtaaaattatccgcagatatgaaaaagtgtaaaaacacaaacaaggagaaagatgatgatgttaatgcggatgacgattctgaagacttggatgatgaatacgaggaggtaaccatgcttacaaactacttcttgtttacttcacccattagttttcccgaaaggcttgttcatcgtttctctgttaatctaatgtgttgtgttgcaggctgcaaatgatgatgacatatcaataagttctcatggatgtatccttcaaagcataaactttcataatataagcaccaattag

SEQ ID NO: 191257 - DNA, 222 bp, Arabidopsis thaliana landsberg
tatagttcaagctcaggcttcaaaagctacgatactaaagaagatatagagaatgttttgatgaacacttttgatggcgccgaggcagcagtattagacctaaaacaatataaccccgaggaagatttgatcctcacggagctaatcgatgaattagcaaaagacaattcagagaccacgccgaccaatgtaaacatcagctttaattctgtcgcatattaa

SEQ ID NO: 191258 - DNA, 343 bp, Arabidopsis thaliana landsberg
agatttgtcgaaagctcgcaacacggaatgcgtggtctggaaacacgagttcacggattagaacttgctctggacgaaatatcttatgacttggcggtttcaaatgggagaatgagtaacggttcaagcagaaacaactgttgtctccttccttctggaagtttcatcaaatctaaattctggaagaaacacgattccaagtattcagcatcgagaatgtccacttataggaacagaaatgcagaaaccaccgagatacaaaactcgaggcatcggtttaatggctctcctggatttatagtcaacccattagctgaaattcgaccagataatggatctgcag

SEQ ID NO: 191259 - DNA, 1176 bp, Arabidopsis thaliana landsberg
atgaatgaggatcagtgaggctctttgttcactcagtgtcatgaagaattctgtattctcttttcctatgctgaagggttgtaagatcaatgctgatgtatgaatgtcttccacagatgtctgataacaggcgccgatgcaacaggcgtgctcagcaggagcagcatgaccagcaggaggaaaatcagaggcagcctcccccaccacccctcgatgtcagtggagcagatgttcttgatgcagacccaggcagtgcaggccattgggcagactctggcagccatgcagcaggctcaacatcaaccccaaccccaattgcaagtgcagatgccccagatgccacgggataagcgtggcgagttcatgagaggcaccctcctaccttcgcccattctgcagaccccatggatgcagaagactgctgcgcgcagtggagagggaactgcgcaccgcccaatgtgacgacagggagaaggttctgtatggtccccgccagctaaggggagcagcccagtcctggtgggagtcctacctcgccacccatgctgaccccgaagcgatcacctgggaagaattcagcgagagtttccgcaggtaccatgttccagagggactgatgattgtgaagaaggaggagtttctggctctgaaacaaggacccctatctgttagtgaatacagagacaagtttctgcaactatctcgttatgcacctgaggatgtcaacactgatgccaagaggcagtaccgcttcttaagaggattggttgatcccctcattacccgctgatgaaccacactttccccaccttccagcatttgatcgacagagcaattatgacagaaaggaagcgtcgagagatggaggacaggaaacgcaagattagtggatctcaagtcgggagtagcagtcgtcctcgctactcaggcgacccacctcaaccattcaagcaaggtcaccagcaccagcatcagcattagaaccagtagcagcagtaccagaggcaatttcctcaccatcagcagcaataccgtcagaacaaccagcaaggaggaaattaataccagcgtcagagcaaccaggcagcccgtcttcctgccccagcaaccaaccagaacaaccaagcacgccagcgcaaggaggaagtcgtgtgtgttgccactatggggaacaag

SEQ ID NO: 191260 - DNA, 274 bp, Arabidopsis thaliana landsberg
acccaatacatattggttttcactggaaaaggagacaatagatggaactgttcacaaacaaaagaaaagatggatattttggtgcgttgcgctttgtactttgtagtgattagtttggattttttctttttttgctttgtggggaataaagagatagcctagatgcacgtgatacgtattcctacagtgctactgaatactgatgtacaaatagttccctctcgtgatttttgtttgtggtttcaagagaaatgttgcttacattgaagattga

SEQ ID NO: 191261 - DNA, 287 bp, Arabidopsis thaliana landsberg
  unsure (1)..(287): unsure at all n locations
atgcgacagctgcggccatgcatgctttctttcacgcgcgcacgcgccatcgcttcggcagggcggcgacgcaatcgggtcgccactgcgcatggnnnnnnnnnnnnnnnnnnnnnnnnnnnnnnnatccatccatcgcgccagtagcgtttccacagcgccggctcttccttgatgcgccacagccattccatgccgatgcgtcccacccaggaaggcgcgcggctgaccgtgccggcaacgaaattgacaaccgcaccgagatgactgacgaccggcacttgcag

SEQ ID NO: 191262 - DNA, 358 bp, Arabidopsis thaliana landsberg
atgggaatcgatgccaaagatgtcggaactctgttctggaaaattctcagattttccacgaacatcgtttatagaaacgtaaggaatcacccagttgtttctggtgtttctgcaattatcttcctcctatacatttttcttccacgccttttttatttcgtcctttactcttctccgttaatcgcatgctctgtgttttatcttcggaatcatccaagttttaagcttttgcatatcaaaacggataattggttttcaccattttcccaaaagagatctgaggaggaagaaacaaggaaggctaacataaagcgccaacgaagtgttcgacgaaacgctagaaggaaagttgaagagg

SEQ ID NO: 191263 - DNA, 132 bp, Arabidopsis thaliana landsberg
atgaaaggaaagctagcaccgcgtttcgtcggcccctatcccgtcattagcaaagtgggacccgcagcataccgccttgaattaccagaatctatgccagatattcacaaagtgtttcatgtgtccagctcc

SEQ ID NO: 191264 - DNA, 613 bp, Arabidopsis thaliana landsberg
ttgaagcctggtggtgcaattcctgaaaagggaaagaagattactctctctgtgaggaacattacagaccttagccgagatgttatcaaggtcagttttcgcttcattttgttttgcaccagttctctcagtggcggatcaatagatatttcctcatattattctatgtaccttaaaagcagctaagattgtcacagtttaagtttacagaatgtatgtagtttaagttgggtaaaggtttgacaagaatcttgctcgctgccaaattatatatggtattctcatgtcctggcagaaaataatatatctaggtagtggcagataagtgtcgaaacttcgagatcagatgtagaataggcttgtttgatctttgttagcttttggtatatatgtaaagacatctgatggcgatatcatagtagaaaacccttatgatcctttagatttttatagcaacacccttctactatgtcattaatggtaaattttgatcgtgtgtattagtcggacactgcaggagtgataatcccagaacttgatctggagctagctggtggtacacttggtggaatggtaacaacagttgaagggttggttacacagatcagagaaa

SEQ ID NO: 191265 - DNA, 159 bp, Arabidopsis thaliana landsberg
atgggttcgggtaatcatgttgatatagtcgatgtgagctcaggcgaagaggatgtcgatacacggggagacgtagaatacaccgattggctaaacggtgctatggaacccgtcgatgatacatctgacagtaccgatataaacgaggttctttctgag

SEQ ID NO: 191266 - DNA, 343 bp, Arabidopsis thaliana landsberg
catcactcaattgactcgacactggagctagattatgggattccatatgctcccacaaaaaccgaaagaatggagatcagaccggaaagccctgcagatagcgttagaggaaacgagaatgcattgccaaatcctcaggatataaataaagaaaccacagatgccaccaataatcagtcacagagagagcaggttggtgattcggtaagccaaaaaaaatattttcttggggagacaaaaacttctttcgtttctcaacagtttggatgatcacaaaatgcaggtagaagaagcaaaacctaaggaaacagattccacagaggcttcccaggagaaactacag

SEQ ID NO: 191267 - DNA, 116 bp, Arabidopsis thaliana landsberg
aaggaggcggagcacgtcggcctggtgagccaatgaacttcagagaaaagattctaacagatttgcaatcgagaagacgcaacggcaagattgaagatggaaggagacggagatga

SEQ ID NO: 191268 - DNA, 1039 bp, Arabidopsis thaliana landsberg
atgcgcgaacaagcctccatgtccatggcgattcatacaccaaggtgattctcccaacgtaggaaaaatcacaagaagaaacctctccggactctcaaaaacaatctattgtatggctagctccggaaactgtctcctgatggtcgatcgtcgtctcaaattctatattttgaaccttttgacgcggacaacgatcaatcttccatcaatgtcactaatacgtggaggacaagtattctttaaacctcaaaatgaatggtccaatgattctggatgcttcttcgggccttctcgtaatgataacgtgtcatatgactttgactctgttgaatggaaaaactcggtagctgttctatggataaacgagacaacaggagattatgtcgttgcttggacattcatacagcattacttgttcttctacaagtcaggatattggtcttggtgtaatctgaatctttatgggaaaagtttggttgtgtttgatatggcatgtgagaacaataagctttatctgtacacagctaatcatcatatcaggatttttgatttctctggagcttatcctatggaaaagaaaaccgaaaacccgtattggaaatatctgtttaacgcggttgaggaaccgtgggaatacgtttggaagaggaaaatagcgattcagaaatcatcaggtgaggttttgatcatcttgagccttaaacaagtgttttacgaagcagagagacttttgttttacatctttaagatgaatcttgagagtttcaagtgggaaagagtttattctcttggagatgagatgttggtttttggtcaaggtgttacaatacctactgctcttaaagatcttggtgatggaatcaagagtgattcaatctatttcgtcgataaagacgtctggccagatcatcaagatcatgatcgtcgtgtttcgaattgcggtgtcttcaatattgccacaagtaagatcaaatggcctacgaaaaaatatcgttccgtaaatgaaactcagtggtttgtgctcggagttgcttattag

SEQ ID NO: 191269 - DNA, 1138 bp, Arabidopsis thaliana landsberg
atgcgtacgcctccaccaacagttgggagttttgccatggctagcccgagtacagttggtggttcaactggtgcatctggggctactaggagtacaccactaagacctgtcaggatgtctcctggcgctcagaaatttacgactcccccaaagaaaggagagggtgatttccccaacccaatgtccttagaaagggctatcgaaggttttattcatctaggtgtctatcctcagatagaagactggcgtgaccgactaaggcaatggtgttcctcagtgttgctcaaacctctgcttaacaaggttgaaaccagtcatattcaggtttgtttctggagtccttttaaagtaaacactggccttcctatacttgtctgctgatgaatgagttgataaccacatccgaatcagaggcacaagaagaatttcttgtttccctatgttgctgtgaaagagattttaaactttgtcatttgtgtaggtaatgcaaacagcatcaaagcttggtgttaatgtcacagttagtcaagttggaagtgatttgccaacaaatggaaccgctacaactgccttaccggttgatcgaacgaaggggtggcagccatcttactctctcgatgaagatgctcttcttcaccaattacgcgctaatcttgtacaggctattgatgcttccatgcgtaagtaacattcctacagcttctactgtgatgtggtccgaatggttgtcattgttaagttgaagtgctgttctgttgttttgaaaatattgttatcaacttaagacttcatgtttctcaataaattactgaatttaagaatgttgtaattgattggatatctgagagaaataatgatatcatgtcatttatgtgttgttgctaaatgtttgggtcttcatatagttgctaattctttcttctggcatctgcagaaaagctgcgtacagagaaccagcagtttcagcaacagcaacaacaacagcaacagcaagcggcactaatccctgtcatgcaggaatgtgttgatgctataagtgaacatcggaggcttcagggcttaatgaaaggagagtgggttaagggcctacttccgcgcagcagtattccagcagattacacagtgcacagaatcccag

SEQ ID NO: 191270 - DNA, 1637 bp, Arabidopsis thaliana landsberg
atgaaaggagtcaaaaaagattcgtacaaggagatcatctcggctcttggcaaagacgttaacggtttgaattcctcagctgaggtcacgagttcgtcgtatttctacgggaaattaatagccagagcagctaggtttgccttaatcgccgaggaagtttgctatctcgatgtgattccgaagattgtaacttacctgaagaacatgattgagccgtggttagatggtagcttcaaacctaacggctttctgtatgatcctaaatggggaggtttgatcacgaagcaaggatcaaaagattcacaagctgatttcgggttcggtatatataagagataagttgagaactaggcagtttttagggaaataatttgagaactagacagtttttttaaaaataggctgatagggtagtttcttctgtcctctctaatacagccctcctctaatacagcaaatagtcaaagaccgttttacccctcttgtgttttgatgaaaactaatgggccaaattcaaaccagcccaatatcattcaaaattcaagatttgtcatgggctaatatcacaaaactcaaacccatttgtcctcaagacattgaaaccaaacataaacttatctcctaaaccctcgttgaacataaacttctctcgtcgtcgacatcttctctgaagtcgtcattgtcaaaagaagataaaccctcgtcacttcgaaaatcatacacacattgtcaaaatctgtcgagatggaaggtatgagttatcataagaagctttacagtttatgaaattgagtgtacggccaacaaataacgatggagacgatgactctgttttcgttttttcaggggacgatgaatcctgcgtctccatggtcggccggtggatttgctactccaatggttggtgggattcaaggttgataaaactaggccaggaaagtctattaactgcgaaaaaattgacactttcaaatcccttgaacaagttatccggcgaagattctacatggtcggtcacgacgtgtttagtttagtattctatcttggctagtgtactagtctagtgtaccgaagtggtgtactgttctcgtgttctcactttgtctcacgaagctcgtcagctcgtccgtctcaagtagctcatcagctcgcccttctcaagaagctcatcagctctcccttcttaagaaactcgttagctcgctcctcttcgtcaagcttctcaactcgttctcttcaccaagtccctcagctcgtcttcaagctctccagctcgtcttcaagctctccaactcgtctttaagctcttcagatcgcctttaagctcttcaagctcctcagctcgtcctcaagctcctcagctcgtcctcaagctcctcagctcgtcttcaagctcctcagcgaccaactcctcgtctagctatcagctcatccctcgactgcaaaactcatctacctcctcgcctagcggcagttcgtccattgactgcatagtccacctatctcgtcgcccagctcgtctacaccagcaaacaactcggtttgtccaactcgtctctctaccacggttcatccagctcatcgcacatttgccggctcgtcacctacctgccgacctacctccaatgacggcctag

SEQ ID NO: 191271 - DNA, 412 bp, Arabidopsis thaliana landsberg
atggaggtataaccgcatggcaaccagcggatggaaaaacttatttagaggtaaattttgttttagttatttgtcacggtatttcgagaatataacatttaaaatatgactccaattaaatgcagtggctaagtccagtggagtttattgaagacgcggtcgtcgagcatgagtaagatttattcatcaacccaatcttctcgatctctttaattttgaataaaacaaattttggtttaaattgtgagatattatttatatctcttaggtatgtagaatgtacggggtcagcaattgcagcactggctcagtttaataaacagtttccaggatacaaaaggaaagaggttgaacggtttataaacaagggggttaagtacattgaggacttccaaatggtggatggttcatg

SEQ ID NO: 191272 - DNA, 323 bp, Arabidopsis thaliana landsberg
ggttcatcagtttggattgtggtctacccgcgaatgaaccatctccttatacagagccgaggactggattgcagttttcttcggacgcagcattcatccagagtggaaaaattggtaggattcaagcaaatctggagcctgacttcctgaagccatcaacgacgatgagatattttccagagggaaaacgaaactgctacaatctaaatgtcaccagcgacaccaactatctgatcaaggccacattcgtatatggaaattacgatggtcttaatgttgggccaaacttcgacctttacttcggtccgaatttgtggactacg

SEQ ID NO: 191273 - DNA, 321 bp, Arabidopsis thaliana landsberg
atggctcttcttaatctcctaggaaccataaatatgccgatggaatactacgaagaagacgaagggattcactttgatccaacgtaccaagaaagctaagaggtgaagacggcatagacttcatagtgatgaaggatgtttatgccaaggagccatgattgctggaccattccaacaattcttttttcaaggaagacgagtggtactatttctcgacaagaactcagaacactgagaagaagattggttgtggtaagtactcaaagcggaatatcaccggagagaacaacgatggcatcgaccgtgggaatgggagggtga

SEQ ID NO: 191274 - DNA, 340 bp, Arabidopsis thaliana landsberg
  unsure (1)..(340): unsure at all n locations
atgcgggaaatttgcgaggatggatgtaagttnnnnnnnnnnnnnnnnnnnnnnnnnnnnngatttttctacttttgcagtgtttcagaatcttttcgacttctgcttcggttctgtcaaaccataagtttccattttcttttgaaacaaatcaaacaaaatgaatattttaattccttttggtttattcatttttatagtttgttgtgcagttagctttgcaattggcagaaaaaggtccgaggattctgaagatttgggtaaattggaaggttcagtgccaagtaaaccatcatctccggcgacttttccggtgaatatcatggagatcccctcttag

SEQ ID NO: 191275 - DNA, 1250 bp, Arabidopsis thaliana landsberg
ctccctcaatctccactctctccccaaggtaattctactgttcatcctttgtttttttttcccaattcttgtagcttctaaattcggtttctttctctgtgaattttgaaggcttcttctgggttgggccaatggaagagtgggttccggtacgaattgttgggtagctccgtttctaggaaccgattgtttgtttctcctgtggtgattcatcaccgaagtccgagacttccggcgatcaaagcggcgtataactcagatggaggctcgaagcgtagtagggtttataaggagtcacaagcggctagtggttttcctaatgctaaagtgcagcagattgcgtcttccgtcttgcccttgggatcatttgctgtcgtcactttcggtacgagcattgctaggagagctagttttgtttatccgtcacttctcaaaacttggactagtattactgtgttttcttctttcatgtggaagtaatagagcggaaattagtttgcttgtcatgtaattcggtgattgctatctatacgagaatagtaatgataaaagtttcgtcttttctctcaaatcttctatactaatttgtgttttcagctgacagttttgtggaaagtggttgggaagttcatgtcgcctaagtctccaaagacttctgctggagaaaacaactcttctacacagggagtgaaatggtcgatcggggccggtactaatttgttacaaggatttgctgctaaggttgatagagaggccaagcagaggcttaatgaatttgcaaaagaacttaggtccttcagaagtgttgacatgtcaggtgcattgaatgattttaactgttatgacattacttattactgatttacattagaattaaatgtgatctgtagtgccatcttccttttgtcttaatatacgcaaatatagctcacctgtatattttatcttgcaggatgcaactttggagatgaaggattattctttcttgctgaaagccttgggtataatcaggttatagttcgctccttctttcacatctgctatctaccaactcattagagtcctgatattcttatgttgattgactaaccatacccatgtttgtgtttcagactgtagaggaagtcagtttttctgcaaatggaattacagctgcaggagttaaagcctttgatggtgttcttcaatcaaatattatgttaaaaattcttaatctttctggaaaccctatcggtgatgaaggagctaag

SEQ ID NO: 191276 - DNA, 263 bp, Arabidopsis thaliana landsberg
atggatacgacgtgtttggtgttaacttgggtgggatctagggttccaatagaaaccatcgaagaagacggcgtaagttcaatctctttctgcgtttttgaatcaattttttaattattcaacttctaggttttctcctacaggtattcgattgggaagcatcagtcaaagaaatcgacatggcttgtctgaaaacgacaaacgctcatccaccaattacggcaaatctcactaagccacctgcgaaaagacaatctactctc

SEQ ID NO: 191277 - DNA, 1333 bp, Arabidopsis thaliana landsberg
atggtcagacttattgtggtggcaatgcgactccccgatgccagctccggtacatcgactgtcctgaagagtgccctaccgaaatgttccccaactctcagaacaaaatttgttgggttgattgctttaaacccctttgcgaggccgtgtgtcggggtaattatttaaccaccaatttctttttgtaattgatgatataccaatgcagtttaaaattagaattaatagaatttcatcattttgattaattttagattttgaaaatatgttttaagatttggatatgatcttttgtagcggtaaaacccaactgcgaatcctatggatcaatttgtctagatccgaggttcataggtggtgatggaattgtgttctacttccatggaaagagcaatgaacattttagcattgtctcggaccctgactttcagatcaatgctaggttcactggtcatagacctgctggccgcactagagactttacatggatccaagctctcggcttcctcttcaactcccacaaattttcccttgagacaatcaaagtcgccacttgggacagcaaccttgatcacctcaagttcactatcgacggccaagatttaattatccctcaagaaactttatccacttggtaatcatagaaactcaaattttatcctatcatttttgtaggttgcgattgtttcaacttttaaacgtcatctttgtctattcgtttagattttcatgtaaacactcattattttaatgcatattatcaggtactcatccgacaaagacatcaagattgaaaggttgacagagaagaacagtgtgatcgtgactatcaaagacaaagctgagatcatggtcaacgtggttccagtgaccaaagaagatgatagaatccacaactacaaattacctgtagatgactgttttgcccattttgaggtccagttcaagtttattaatctgtccccaaaagtcgatggaatcttgggacgcacttatagacccgattttaagaatccggctaaaccaggagtcgtaatgccagtggtgggaggtgaagatagctttaggacatcttctctgctctctcatgtttgcaaaacttgtttgttctctgaagatcccgccgttgcgagtggctctgtcaagcccaaaagtacatacgcattgttagattgcagccgtggtgcgtcttccggctatggactcgtctgcagaaagtagttaccaatacaaactcagtttgctaagaattacagatattaaaagtatattgttatgtgtggatgtcggattcggtccacttcggactaatccgcattcaatgggcttcaag

SEQ ID NO: 191278 - DNA, 169 bp, Arabidopsis thaliana landsberg
ctgggacgcagcgttttacatgttgatgactgcagctttgatctctggattgttgctcactacgcttattatagaagaagtgaaaactttgttgtatggatcttctgaagaagatcatgaagtcgctgctgcttctacatcaagacctcccattgatgtcctcatatga

SEQ ID NO: 191279 - DNA, 476 bp, Arabidopsis thaliana landsberg
gtgatttggagctgtttgcgagcaaattggaagaaacgagccagaactagaagacatactcgaccaccaggtcgtgtgcatccaacaccatacccgacccccaagtcgagtaactttggagcctttcttcccacctagtcgaccccctggtcgagtatcctcagctcaggccactcgatgacgccactcgaccccctggtcgagtatcacttcgccacaccacctgaccacactcgaccattcactctaccaagttacttgactccctggtcgagtatcatcactcaccaccatcaccatcactcgaccggacactcgatcacgtcttcacactctacttaaatccgcactcaaccagacaagatgagcccaaggaagagaagaagagaagacaaagtgtttggaagcagcctggacctccatcggatcacgaagcccatctctgcccattatcattcgatgggccgggcgattag

SEQ ID NO: 191280 - DNA, 220 bp, Arabidopsis thaliana landsberg
atgaggatcgtggagaatgtgtttgatgggtacaagataacatatggtaaagcttggagggctaagcagtgtgcgtggaagatgatatatggggactgggagtctgggtacgagcagctacctgttcttttaaatgcaatgaaggcgatcaatccagacatgcattatgagtacatccctaaaccaaatgcatggattgatgggagacagatattcttcc

SEQ ID NO: 191281 - DNA, 94 bp, Arabidopsis thaliana landsberg
atgagaactctcgcaacttgcgaaacgaaataccttgtgatgatggaattgcttcttccatttatcgacgactacgaagagttcttggctaaaa

SEQ ID NO: 191282 - DNA, 470 bp, Arabidopsis thaliana landsberg
atgacggctccgcgccaccacgatgtttcagtcattgaacgtgtccccacgagcacactcgggtacccgtcgttgaatgtcggtcagcttagccgcagccccatgacgaccagcacggatgtgcatacgtattcattcgtgctgcgggtgcgtcatgcgcgcgcaactcgcgatcgaatgcgacctgcgcgccatgcatcgatccctagccacagcacgatccgcgccaccagaaagcgtttcgcaaacacgcaatgttgcattgcgatgaatgcgatatggcgcctgtcatgaatacgtatgcaggaaatgcttcgctgcggaaagcccggcctaccatgcgatcacgcggccgaaaacgatttggcagcgcacctgccgacggtcgtcgccgacggaagcgcgggggaatccagccaacaagatcgacggcgacacactttttgcgggaggggaacacatggttctga

SEQ ID NO: 191283 - DNA, 59 bp, Arabidopsis thaliana landsberg
cagagatttccaccaaaacaggaactaaaacacaagatgaagattatgatgatgattaa

SEQ ID NO: 191284 - DNA, 324 bp, Arabidopsis thaliana landsberg
atggtccgggaggaagaggtgaaagaacaggaggaacaggtagcatattaccatcaacacctcgggccccaggccatataagagttggggcaaatggaggcatgaagacaggggtgacagaagtgcccggaattggcgacatgccaggagtaagagaatgaatgggactgggtggtggcattccaaggtttgcaaatggtgaccccatgataggcattggaatggcaccttgttggttttctctgccaccggcaggtcttcctttcccaccccttaagggtctgttccctctagtgccttgtggagtctgataaccacgattag

SEQ ID NO: 191285 - DNA, 192 bp, Arabidopsis thaliana landsberg
agcgagttgctcgcccgccagtggcgggggagtagcccgttcgtcaatgccctgcttgattctcgttccgttggccttcctcgtggccatgtgtgcggtgctgttccttttgagcgctgccagagtggctttgccgtgattggcgctcgtcagcgcgaaggcaagctagcgcttgccttatttagtgcttga

SEQ ID NO: 191286 - DNA, 393 bp, Arabidopsis thaliana landsberg
acaacaatcctcgtcactgccatgtctcaaattcagagctttgagagatcaattatttaccggtgaggctaatgatgaaggctgttgaaaaaatctctgcaaaatacttttcttccatgtaaagcttctaactttttctatctctctctctctctcctctgttgtttctgtagagaggaatagaagatgatgggcccattttccaactgtgattgttctctttatatttctttctcctgtggaggctagcaaaggccacgacgttgtggttgtcaaattggcataaagttttccacttttttactctgattttttctcccatttctctctcactttttctttgcctttgcccaattcagagaactaatggctttgtcggtcatcgatagataa

SEQ ID NO: 191287 - DNA, 134 bp, Arabidopsis thaliana landsberg
gtgctggcagggcctcgcaactgctgcgccgcaaacaagggcctttgagtctccgtgcatcagagaagcccaaacttttgttcgataacccgaatccactcatccgcttcaagaggatcttctgccttaaatag

SEQ ID NO: 191288 - DNA, 445 bp, Arabidopsis thaliana landsberg
atgaatcttatccctgtaacaatttcgaaagagtctgatctcgataaagatgagaagtcactggtcctggataagccggagcaagatgaactcaggactgccgagagagatgataaagctgaagaggaactcaagactgcagagagagatgatagtgctgaagagaaaatccaggagccagacgcgcagataagctctgagaatggaaatgttgcttctgagaacacaaagccaagcgatagacgagcttcattacctgcaaagattgaaaatcatcatcaagacgatgggcttacacagagtgggagaaaaatcccaagctatatggctccaactgcatctgcaaaggcaagaataagaggacaagggtctccgaggatagctcaagagaagcctgagaaaaatgggacaacacggcgccactctcttcctcctgcagccaatg

SEQ ID NO: 191289 - DNA, 228 bp, Arabidopsis thaliana landsberg
atggatctgtgtaagcaaatccgtacctgagtcttgaccaagtggcccaactttgcgagggccgtgcctggtgtccaatgtgtcttccctccttgtatgcggacgaagctggtctccgtgtgttccgcagcggtgctaaatcgaccagacgctgaggtccgcatcggtggtactgatcatacttttcggtgtctgtcaagcgtagatgacccaagccataacgcccag

SEQ ID NO: 191290 - DNA, 328 bp, Arabidopsis thaliana landsberg
tatcatcgcggtcaacgggaagaacacaactgttttaatggaagggctccctggactgaactatctccttgcagagaaagacggaaaaaacccgagtgaagactttcggatacccgggaaacagcagtcggttatctccttcaccaagaaactgactcctggaatcaaagttggttccaaagatgggtttcccaccaaagtactcttcaacggccaggaatgttcactcccttctgtactacccacgagcaacagtcacaggaaacatgtatccacctttcttctcatcctgacaccatttttggctctactgtttcttcggatttaa

SEQ ID NO: 191291 - DNA, 455 bp, Arabidopsis thaliana landsberg
atgaattgttattctatctggaataagaatttcaagctcttcttcttatctgtagtggtacgcaaatggctggctcgtaaactcttaaaatagtacgcaacagaagaacaaccctcgcaatgagaagaaaaaaacgagaagaaagtcaacaaagagggtttccgaagacaaggtagtatttttgcctgatgtatgcgtctctgagttatccgctgctgaaacttattatctctcttgtttaggaacttctttcagagcagtttgaggtccaaccttgtgttcttgctgatctccagagccgggttctgaaagtcgaagcagctataatgcagaaggaagatgaaaacactgcattgcaggaggagttgcaacgatttgaggaaagatggttagagaacgaaacaagaatgaagtcaatggaggacacatggcaaaagcatatgtcgtcaatgcag

SEQ ID NO: 191292 - DNA, 950 bp, Arabidopsis thaliana landsberg
atggattcgaagatcaaaaagcctgctaatttaatcgaagacgcagacattgatgggggttccgagagtgattctaccattagtagcgttttaagtttggaagatgactccgtggttgatgtttctggtcaaaatctggagttttctcttctggataatgtcgatgattctgtgaaaggtctctacttcttcaggaatgtattcaatttgattcccaaatcgattggagggcttgggagattaaggaagcttaagtttttcagtaacgagatcgatttgtttccgccggagttagggaatttggtgaatttggagtatcttcaggtcaagatatcgtcaccgggttttggcgacggtttatcgtgggacaagcttaagggtttgaaggagcttgagcttactaaagtccctaaacgatcttcggctttgacccttttgagcgagatttctgggctcaagtgtttgacgaggctctctgtttgtcacttctcaattaggtaaaaagcttactcctttatgctctgttgctttagttgctgcttcttaatactacgtagcattgataactcaagcatgtggtggattttgacagtttctgttggtggtccgtgtagaatttccaggaaacgtaagttagaaaattattgattgtgatacgtttggtggctgcttaatgatgtgttttttagcatgctctaggtgattgttgtactttattacttttgatgtttaattggatatctagattgttgttatgaagaaaatttgtgaaatcgattggactttagaattgagtttagggtattcattgcttcaaattacattggattgcatttaaccctgtctcccacttgtttgtagatatcttcccccggagattggatgtcttaagagtctggagtatctggatctctcctttaacaagattaagagtttgcctaacgagatag

SEQ ID NO: 191293 - DNA, 413 bp, Arabidopsis thaliana landsberg
gagccagaaacccctcgaccgacaaaaccgtgccagcagccagaccgcccagcatgagcgccacgtcacccagtgccacggccgcgatctcgagttcgacatggcgggatccccccgcttctgtcacgtcggacgcatgccccagtttcatttccaaggccggcacacctgccggggtgtacctaagcggcgagacttccaccaccgaagcgtccagctcgagcctgttcacgccctggcctggcagccgtacgggtttactttgcctgtgccgcgccagccgtttccgaagtggccttgcgggcttcttcgcgctcgaccgacttcatcatgatggacggcgccgtttccgcatgcttggccttgaccacgaagtggcgcaacacggcatcgttgtacggaaagaatgttga

SEQ ID NO: 191294 - DNA, 2439 bp, Arabidopsis thaliana landsberg
atgaaaagagcttgtgaaaacgtcaatggtgagaatgctcgagtttgtgatgatggaaatgatgttagaggaggtgatgatgacaatcacatttttaatgttggaatccaagctaaaagaacggccacaaaacaacttggtgaaggtctgatacgttcatgagaagttggcacgtgtgagaactgaagtgagagattggagtcacgtgtgaagaagcttataaatagtaagagagagtagagagaaaagcatcctgcgtgatcattgatgtgtaaagaggattagagctttatgtgctctgttcttgggagataagattggagaactgtaactccaagcttatcgatttagggtttgtttcattgtaattggattcaaagataagaaataccaaggattacactttcattcttatcaaatggtgcgttagtgtgctcggatcgaatcgaacgcaagaagattagggtttcaaaagttggggatttttgtcaatcgcaatgtgtcttgagggatttcccaccttcattggtgtgactcatgaattgcgatcatggatttcatggctggaggatttctttgtttgggagaatttcacggacgacgaagatgattcttttttgatcttgggaacatttgagggattgtttgatgctgagatttggcgatagaaaagatccggaactaatcagattgcttgccgaacaagatcaatttttaagggaaaggagagacgaggcaaagatccggaggatgaagacaacaacgattaacccacaagaagcaactccttcaatggccacgactcaagaaacgattccagtggagaaattgcataattctctggaggtcactgacgaatcttcgaatcaagttgataatgaagtctcaggtgagaacggaacgatagatgatgcgacattgctaagtccacagctacttgtctctgattctgaaaatgtgaggaacaacgaacttatggcaataacttcagtggtggaaaacttagaaactgtggtgatgaaggcaaagatttaggagagcagtaaaatggatgtggttaacagttatgttgtgaggattcaacaagtgacaagtatcaccacaaacatgtccgcacaccaggtgttcgatcaaatgtatcaccttaaagaacggctggaaacgaagaagaagcttaaagggttgaaatcgtggatgttcaaatacaattttgagaagagaatacttgagaaacgacacaatcgtggctggttacatacttggagcagaagagtaacttgtaggaaaatcaagagtgcaaaactagaggttacttcagaactaaaggaagctaattcattgtgggacaatcgagaagtttttggttttgtgcaagaggaaatgcagactgcttgtaagcttaggagaatctactgtaaagtggttaccatacaccaaatttttcaagctccacttgagatggcaattcctcctacgaagggacataaacaggtactagaacaattatgtgacacacttggagaggtagatagggtagcgttgcaatctgatattggcgctaatgtctctaaatcaaaaaaacattgtgagtcagtcacatggattcaagaccatagagtggaagaaattaataagcaagctgttgcttacggagaagctgtcatgatatctctaaatgagacggatgtattgcagtcttcttgggaacaccaaatgttttctcacagacctacaagactactaagtagaaggaaacagaggaagtgctttaagtcttggagatttaaattcaaacaggtgaaagaaggaaataagcaacaacacaatctcttccgacaaatgggtactataacgatcttgtggtggtggcttcaaaatggaagcaaggtgcagtggcatatcttgattgtcaagagggtgagtgagatttttggggagttaaaaagggttcaggccagcaatgcaatcatctatgttctgtcctatggcaatcatcattataagttgtcatggcatttcaagctcatctattggcagtttctgtattcttttaagactgaattatatgaagaggctgtcacaggaactgaacacttccaacatcatgagcaagacaagtttttaacgacttggttgctcaagtttgataagtcatgcgttcaaggggagctgattgcttatgaaggggagattgtcggattttacacaacaattggggacagagacatctatttttctgtgtggcattgttggagaaagaagaaactgcatatcattaacctacaacaattggccacagttttgcacagctatgagaaaccaaaactaggagacttcagtcaatcttatctactagttattaataaaaacaaattatttttgaaaatgaaagagaaaggaatcgaacttggcttattcacaaaaatacatcgaccttaa

SEQ ID NO: 191295 - DNA, 221 bp, Arabidopsis thaliana landsberg
ggcatcaacgacgaagctggaccgacgccaacggtatagaaacaaagagccattccaattttggagactccggtgggattgttgcggtggaggaagcggagttagtggcggtgctgagggaggctcatccgtacgtaaagttacatagagacagtaaatttgtcgtaatgttgtcggcggagcttcttgactccggttcgaccctcgacggcattctcaag

SEQ ID NO: 191296 - DNA, 778 bp, Arabidopsis thaliana landsberg
gtggtctatatgcaccaagtttgatgattggtgctgctgttggtgctgtatttgggggttcggctgctaagattattaacagagctattcctggtaatgctgctgttgctcaaccacaagcttatgctctggtattgtattccctttgacgcaggcccttgcttcagtgcagttttcttaaattaaattttagtactgtccaatttgattgttgtgaaatctgacacattaagatgccatcgttttatgtgatgcaggttggaatggcagcgacactagcttcaatgtgctctgttcccttaacatcagtattactgctgttcgagctaacgaaagattatagaattttgcttcccctcatggtaaatattctctttcccgttctgtttcagtgatgcttattgtataaactcacttaatagaggcggattcataacatattcccgaatttgcctgtttaactaattgatcagtaaagcccttgttgacactatgaaatgtaccactgaccatgtcgttgtaatactatgtttataaccagaggtccagggctagtttgtacgtagataaaaacattccttttccatttaacattctatattctggttcatattttgattaagctgttattgatattatctctctgtcgatatctatgaacagggagcagttggtttagcaatatgggttccctctgtggcaaaccaaggcaaagagagtgattcatctgaaggtcgtagcacaggaagaggatactcttctctttcaccttccgaac

SEQ ID NO: 191297 - DNA, 129 bp, Arabidopsis thaliana landsberg
attgctataacagggaaaggcttctgcaaatcgtctgcaatcgcgacagagctgatcataagcaacattctgaggatagggaaagttaatgtgataggagatgttatattgtttctaggaaagctttgt

SEQ ID NO: 191298 - DNA, 1441 bp, Arabidopsis thaliana landsberg
atggcagagattttgtttctgcttttaagaactctcgtcgtgttttcatgtgctctttcgatctgtaattgtcttcaagatgctgcgttggacaataatggaaactttttcacggtctcgagcttcaggtaccctgaatccgaagtcagaccctacgatacacgttacatcagaggtctgttttaatctgagattcaagctttttcagctgctgaatgatgatttgaaattcagcaaatggaattggatttgttatatctgatcagttgcttctggattatgatcattttggactatcttcttttggttgatgctatctgattctctgtttgattccgtacagttgatttgcctccatggttctcatcattgaatgttgctatcgaatctgatgtagacatcgtgagtattacagatctttctcctccaaattttgtttttggtattcaaataaatatgtaagtaattgctatttattgtatgtagactgcaaagagcatttcgaagatttccaaaagtcttcttcctgttatatgctttcgagatggtagtcctcctctgcctgatgcctcaaccaacgctcttcaaggattaggtacgatttaggtaacaacatgctagttagcttcttttgtctggtcaaagagatcatataccttcttactattttagggaattgagaaagtttttttttatttttttgatgttttgtagagctaggacggttctttaatggatcttttgaaagagctcaagatagtgagattgcacaacagtgttaccctatgcagaagaatataaccttgagattgaccaatgaacaggttttaaattacttcttgtgtgttaggacttttttagatgatgagtttcttttctttttttaacgttattgtttccagatatctcctggagcttggtatgttggtctctttaacggaattggggcgactaggactcaggggaaaatggtaacactccctttataaaacttctgcctttagtgtttgtttgttctgattttgatttcttataatttggatactgcacagattgttcgctcctctgcgttttcatttagtgccaacattagtgttgaaggttgtaaaaccgctacaatgtgggggcctttctgcaaccagactatttatccgctttcatgttctcggttcgataaccagacagcaagtgttatttcttgcgctgattcttttcctagttcttgtctgactggtgctgaaacgaagacatatgctttagatgtagatggaatagctgaacagttagttattatggcatccaatgtcaaagtagattccaatgaaagttatctcatgtgttacgcccgttttgaagcctgtgctttagagactctgcatgattacgctgctgatatacataaagttgccttaattgttaacaaaccgaaagctggtcgatg

SEQ ID NO: 191299 - DNA, 102 bp, Arabidopsis thaliana landsberg
atatggatagagaaaacactctctcatgttcaggacactggaattgagaatgattatgcaaatctgatagagagactgagacaagcatcacatcatgcttag

SEQ ID NO: 191300 - DNA, 124 bp, Arabidopsis thaliana landsberg
atgaagaaaagagaagaagctccaagaagaagaagaagaagtcgcagaagatgtgtcgtgtacaaagatcaacgacacataaagaagaaggacacaagtcaacatgaagaaagagttgggcttt

SEQ ID NO: 191301 - DNA, 377 bp, Arabidopsis thaliana landsberg
gttcttcaatggttcttccgttgttttcagcaaatggcatcctttctcgattaagttcaatatttcttggttttgcgcctccatttcttcttctgtctattgggtatctctctttacaagacttagttatacattaaagtccactggttatatggcttgttctcatgtttccaccatttgtttgcagatatgaagctgtattttacagtgcacttgccgttgtgcttatggcatggatattgtttgagaatgcttctcatcattctagcaaagtaaaagaatcgtctctgtcagaaaataacacagaggaacatatcactatcggaagcgatgaaagatacttgcagctatctgatgtgcggattcctttggttttt

SEQ ID NO: 191302 - DNA, 93 bp, Arabidopsis thaliana landsberg
atgcagctcagcgcatctcagttacgctatctcaaaccagttcagattgctctccgacagtatgacgagaagcttcaggacataaaccacaaa

SEQ ID NO: 191303 - DNA, 411 bp, Arabidopsis thaliana landsberg
ctgatcaccgcgggactgctccgcgagtccgcgcaatcggccggcccggcgcccagggccgcggggcgcccccacgtcccgctggagatcgacacggccagcgtcgtggcctgcgggctgcacatcaccatcaagtactccgcgcttgcgctcctggacctgcgcggccgtgtcatcgcgctggagcggctgccgcatcgcggcagcggcccgcgggacgtgatcgcgcgcgcggcggagcgttttcccggcttcctcgctcagcacgctgaggggcgttcggctgcgggcctgggggtgtccgtcggcggctgggtggaccgggacgacggtatcgtcgtcgagcacgcgcggctcggctggcgggacgtgcccgtccgccggctgctggcggaggcgacgcgacccccg

SEQ ID NO: 191304 - DNA, 590 bp, Arabidopsis thaliana landsberg
gtggtatcttagctctgcatccccttaggaacgactttggagcttcttcacctttactaggtcgtattttagccctgcatcccctttggaacaactttggagcttcttcacctttactaggtggtattttagctctgcatccccttaggaacgactttggaccttattcacctttactaggtggtattttagtttgagatccccttaggaacgactttggagtctcttcaccttttacttagttggtatttcagctctgcatccccttaggaacgactttggagctaagctctgcatccccttaggaacaactttggagcttcttcaccttttacttaggtgacatttaagctttgcattcccttaggaacgactttggagcttcttcacattttatttaggtgggatcttagctgtgcattcccttatgaacgacttttgagcttcataacttactctacgctcccttaggaacgtctttggagcttcggaacatactctgcactcccttaggaacgtctttggagcttcgaaatttggttttgtcacactcgatggtgtaaccacaggtttattacatcgagttgaag

SEQ ID NO: 191305 - DNA, 98 bp, Arabidopsis thaliana landsberg
atggagatgggtcgtctggtcttcgggttgtgtttgattcttattgtgggtacgtttcttgaattctccggcggtgctacggcggcgaagggagtaac

SEQ ID NO: 191306 - DNA, 206 bp, Arabidopsis thaliana landsberg
atgaataatccaagatcggttagtcctttggtttctccagcaaaccactcagatctattagaaaaccaacgtcaatccggttctggagatttctcaagattagagaaacgaatcggagcgaggaagatgaagtttcattccaagtctatgccccgaggtgccatgtttcttgatcaagaagcatctagaaacttccacgacaagag

SEQ ID NO: 191307 - DNA, 78 bp, Arabidopsis thaliana landsberg
atgatccaagcaaacatccgttgcaaacagaaagcctcagggccagctgtggacacgtatgtggcagaatcccctggt

SEQ ID NO: 191308 - DNA, 620 bp, Arabidopsis thaliana landsberg
atggattggtcattctcaagcaaagtcggttctggtcctcagtttctttcttttgggacatcccaacaagaaacgcgtgtaaacacagtcaatgatcatttgctttcttctgctgcaatggatcaaaaccagagaacttacttcagctcactacaggttaggctatttcttgaaaagaaaaaaagtagtgataaagtgtgatttagtgaccttgtaagaaagcttggcaattggtttagtttcttctggtctcaaaattgatacaaaatgatctcaggaagacagagtgttcccaggttccagtcagcaagaccaaacaaccatcacagtctccatgtccgaaccaaactacatcaacagtttcataaaccaccaacatttaggaggatctcctatcatggcacctccagtttcagtatttcctgctccaaccactattaggcatgcactgcattctatcttcttctgtttaacatcagatacagaacctctttacttctatagttgactcgagctcctttatgttcatctccagatcttcttcaaaaccacttccccctcagttgacaatcttttatgccggttcagtattagtttaccaagacatagctcctgaaaag

SEQ ID NO: 191309 - DNA, 306 bp, Arabidopsis thaliana landsberg
atggacagtggaatgccgacgctgatgctcggaaatgacagctttttagtagatacggtgaatgacctgctgcggttggaagccggtacttctcaggcgattcattttgcggacatggaggataagggcacacattatgcattgaggtattatcctcaaacaaaaaatctggtatcctatgacaaagattcgcccttcctggatctgaaaatccgtccgctcaaagagattgatcccaaagggatatccaggcgctacggaatttccttgaaggagatggaaaacaaaaccgattatgacatcatt

SEQ ID NO: 191310 - DNA, 535 bp, Arabidopsis thaliana landsberg
ctaaggtttctcaccagtttcctctataacggactccaatatttgaactcgttaaagcctcttcttcctatcaacctttctctctcggaacctctcaatcctacttcaatttccaggtactaattcgtttttttctttcttctcgtaatcttccaagtcgatttaggtctactttgattgttggaaaattgatcttttaggaatcgatcgttgatcaaaagagatagcagttataaatacttgttcttgctttttttcaacttcaaagttcagtatcttctggtaaatttcgaatcaaggatcaatagcaatcttagttttggatttctgcaggagaagttgttttcttagttttggattctctgatacagtagaatttcccctgaaccttctatggctcctaagaattccagctggaacccttttgatgatgagaaggaggctgctaagagtttcagtttgaacccttttgatgatgatgatgatgacaaggaggttgagaaaagattcacttcatccttgaagcccttcggag

SEQ ID NO: 191311 - DNA, 248 bp, Arabidopsis thaliana landsberg
cggctggcaccgcacgtcgccaggtcggtggtggcgctggcgaagaggtggcgggccatggcctccgccgcgggaggcgaggtggaggtggacgtcgcggagtggtaccaggccgtcgccgaggaggccatcacgcgcgctacgttcggcagcagctacgactccggccgcgtcgtgttccgcatgcaggcgcgcctcatggccttcgcctccgaggccttccgcaaggtcttcgtccctgggtacag

SEQ ID NO: 191312 - DNA, 416 bp, Arabidopsis thaliana landsberg
aattatcgttgttgtttcccctgttaccacgtccgcctcggcgaaatccagaagagtcggtggaggtgtccatgggagcagcggcggcggcagagcgagaagaacgagagcggttggtggtggaggaagaaggaggagtgggggcaagtgaggaagaagaagaagaagaaagacgagcgcgtttgctgcgggtggtgggaccagaggcagagggaggaggaggaggagaagaagaagaagaagatggggcagctgaggtcgcctccgcccgcttgcggctccgagtttccatacaaaggaagaaaccccgagtttccgattcgctcgatcagaaagattctgatcggacactcgctcgcatctcactcagatcaattcactccagggatccaattgaaactcgcacgaaaccctaa

SEQ ID NO: 191313 - DNA, 276 bp, Arabidopsis thaliana landsberg
atggaactgattggaccattcgaacaggtagcaaatcctatcaatattatcttcatatccacctttcctggtatacaatcaaattataagaaaaagattctaccaaaccaggtttttatggaaataagctgtcctgatggtggaaatggaggaaggaataactcttccctagcaactcacgaggaaattcatccaaccgggatgataagtgtggttgctaatcttacaccttggtcagatcataaccaaagtccccgtaacatgtatcagtgtcag

SEQ ID NO: 191314 - DNA, 132 bp, Arabidopsis thaliana landsberg
atgagcctacttgttgaaaatctggtgtattgcgctcttcgtgaacgttacatgtcgtaccccaagattgaaaatttggttgtagcccctaatgtgaagcatttggtgatgaacccgattgtggatcatttg

SEQ ID NO: 191315 - DNA, 647 bp, Arabidopsis thaliana landsberg
gtgagcacctaagaactagacacataaatgactcaactttgtgtaccttatgtggaaacgaggaatcagccctgcgcttattcttcaagtgtccctttgccaagcaagtctgggacctcgctcctttcaaaaattctttatccggcgatcgtattccatctctgagagcaggaatcgaagcctccaaactcttgatttgtcttcctccaatgggcttaaacgcagggcctctgctgccttggatagtttgggcgatctggatagccagaaaccaaaagatttttaacaacaaaagctattctcagatggacactctatctcatgcaattaccctggctagggaatggcaaaaagcacagggccaattggatcccacaaagaagaagagcatccggaaaactcgaagaggtcaggaaacagaatctcacctctgtttcacagatgctccgtggtctgaaagctccaaatctgcaggtttcggttggatcatcaaatcccgtcgatctggttttcgcagcaaaggatcagcatcggattcccatatcagatccctggttgttgctgaggcaatcatcattcaactggcattgaagcagagccttcgattagggatcacggatcttgcaatcgtctcagatgccaaacag

SEQ ID NO: 191316 - DNA, 100 bp, Arabidopsis thaliana landsberg
atgcggcttgtacgggtcaagaatgaagtagtgaaagtactcccagttgccagagaaggcggcgcgtcagctcaggatcatatgcccccctgtcatggtg

SEQ ID NO: 191317 - DNA, 634 bp, Arabidopsis thaliana landsberg
atggcttcttctccgagttccaaggcaaaaaccttcaaatccccaaccaaaactccaactaaaatgtatcgcaaatcgtatctatctccatcttcaacttcactcactcctccccaaaccccagaaactctcactcctcttcgtagatcttctcgtcatgtttcccgtaaaatcaatctggaaaatgacccaatcgatcttccagaaagagaatcaatcgaagaaatcaatctaattcgaaaacctagaaaacgaaccaatgatattgttgttgcagagaagtcgaagaagaagaagatagatccggaagtttccttctctcctgtttcaccaattcgatctgagacgaagaagacgaagaagaagaagagagtttattacaacaaagtcgaattcgacgaaaccgaattcgaaatcggtgatgatgtttacgttaaaagaacagaagacgcgaatccagatgaagaagaagaagaagatccagaaatcgaagattgtcagatctgcttcaaatcacatactaacacaataatgattgaatgtgatgattgtttaggtggatttcatttgaatcgcttgaaaccgccattgaaggaagttcctgaaggtgattggatctgtcaattctgtgagg

SEQ ID NO: 191318 - DNA, 803 bp, Arabidopsis thaliana landsberg
atggcttcgattccacttcctccccggttaatagctctcggcgaagaacctcgtggtgaaagggttaatgtttaccagaagatgaaaaccctctgcggtatattcaacgctctcgatgacgatgaacgacaatacctttctcggtctcctttcgctagactgttggagttccccaacaatcctgcttggtctgctagttttgggatttttattttgggtaggcagttggaggtgactaagcctaacgagatttgggtactattcgcgggtacacctattcggttttctctgagggagttcaagatcgtcactggattgccctgcggtaggtatccgagtttgaagatgaagaagaaaaaaggcactgcgggaaagacgattcctttcaacagtaagttgtttggccttgaggaggatgtaaccgttgatagggttattacaatgttgaagaggagggttgtttcagatcctggtatgaggatccaatgtgcttgctttgccatttttgatgggtttcttgtccctatatctcactatcccaagattattaaatcccacgccaaaatggttgaagatgtggatgcctttcttgcttatccttggggcgttacacgtttgagatgatgattaagtcgataaaagagagggaaatcgaacaattggcaagtacgtgttttgttgttcagggattgttgtatgctttgcaattggtcgttttacaagccgctccagccattcaagatagtcctgttatcgacaaccatattgattccgattcgaaaggtgccgaaaacgatgtttaa

SEQ ID NO: 191319 - DNA, 372 bp, Arabidopsis thaliana landsberg
ctgagatagctccataccctctccgacccaagtaaactgattttccatgttatggagatttggttctctaacttattgctttagagttttgatgtcattgtacaagtttaatgctattatttttgtgaattaggtacaaccttgcagagtagctttggtaagagtttgccttaagagttttgtcatcaaagagcacacatggtgtgaagtttttggtatacacggagagatgacaagggtttttgatattccaggtacgaacgagaaagccttttgatagaagttgatgttttggagcccaaacagaagaaacaagagaaacatttaggcgtattttgcggtgtgaagactaccttctctgacgacgattga

SEQ ID NO: 191320 - DNA, 1650 bp, Arabidopsis thaliana landsberg
atggggaaggacgcgtttacaagatattcttgcgatccagactatagatatctccacgaacgcgtctctgatctattcgcaaatcagctaaagaaagatcttgagttttttacatcggacaaaccaaacgaaatctctcttgctgctaaatggtgtccatcgcttgactcttcgtttgacaaagcaactcttctctgcgagagcattgctaggaagatctttactcgagaatcattccctgaatacgaaggcgttgaagaagctcactatgcatacagagttcgtgatcggctaaggaaagatgttcttgttcctctgcgtaaaactctgcaactgcctgaagtatatatgggagcgagaaactgggatattcttccgtacaaccgtgtagcatcagtggcgatgaagtcgtacaaggagatattcttgaagcacgacgcagagaggtttcagcaatatcttgacgatgcaaaggcggggaaaaccaaggtagctgctggtgctgtgttgcctcatgagataatcagagagttagacggtggagacggtggacaagtagcagagctgcaatggaagagaacggtagatgatatgaaagagaaaggttctttgaggaattgtatagctgtctgtgacgtttcagggtctatgaatggtgaaccaatggaggtttgtgtggctttgggtctgctagtctctgagctatctgaagagccatggaaaggaaagcttataacattcagccaaaatccggagttgcatttggtgcaaggagacgatttgagatcaaaaacagagtttgtggagagaatgcaatgggatatgaacactgattttcagaaagtgtttgatttgattcttaaagtggccgtggaaagcaagcttaagccggaagacatgatcaagagggtgtttgtgttcagtgacatggagtttgatgaagcggcgtcgtcgtcacattattcaagaccaggctatgcatttttaaggcagcatccaagtaatccaagtaatggatgggaaacggattatgaagtgattgtgaggaagtataaacagaatgggtatggagacgttgtgccggagatagtgttttggaacttgagggattcgagagcaacgcctgtgccgggaaacaagaaaggagtggctttggtaagtgggttttccaaaaaatgttcttggattacgatggagagattgatcccgtaatgatcatggaggctgctatagctaaagatgagtataagtcgcttgttgtaattgattaagaagctttactgtttttttgggttttggttttgtattcctgtttgttggttgaagctttcactgcaatttattttaataaatttggcccagtgattatacttttttttctgaaccaagtaatcgatacgagaccactaacctggcttttattcatcaatcgatgctctctctacatgtaacctgcttcaatctctcatcagcttcaaaactctgatatatttaatcttatgggatcaggggagagagcaacttttcgccttcattcatcacaacactcatatttcgccggaaacaatcactcgtatcatcggatctcggcgtttagaaatcagaaaccgacgactttggcgagcaaaccttggatggtctcggaaatga

SEQ ID NO: 191321 - DNA, 423 bp, Arabidopsis thaliana landsberg
atgcgcgacacaacatggctcgagcgacttggcctggctctgcgaaccgccatggcttgtctcatcgtgagcttaaccactttgtacggtcccaaaccactaagacacttcacaacgtttccagccttttcttacctgaccacaatcttgatctggctctccgatgctgaaccaacatacggcgaagttctcaagtgctgtcttgatgtctcttacgccacttttcagacaatagccattgcgctagtgagtgtcttggtggttggaccagcttcactagggaatggcttggtggctccagttgctgtggctctagcttcattcatagtggctttccccgtgtccacgagtctgctgactaaacggattgcctttgggcaaattgaagtagtctacgtgacttttgtggtgttcaatggagag

SEQ ID NO: 191322 - DNA, 37 bp, Arabidopsis thaliana landsberg
atgtgtaaagtcgcttatgttcaacatcgaaacagag

SEQ ID NO: 191323 - DNA, 548 bp, Arabidopsis thaliana landsberg
atggcgagaggttagatagagtaaagtttaggtaaaatgaattttatatagctcctttacgtctttgtcaatttcatacttttatcaacaagacatatttccgacttcgattcaaagtcgtacattggaaaattatgctttagaaaaaacaaacttgacgaccaaaaatattttttaaaacttaaaaataaaaaaaactgttaataaaaaaagtttcaaaaatagcttgagcaatgcatgaaagagagctgggagtgatagtagaagcaaaaaaaaacctttcaggagatatatataacccaaaggccaaagctctatattagaacacaaacattaaacattaggcatggaaaactctcaattagtttcgatcactttcttagcttacactataatcatatcaatcggctccatcaactgcatagacaacaataatcttgtaacaaaccaatccgctctgttcgtgtttggagattctgtgttcgatgctggaaataacaactacatcgatactttctctagtgtccggtctaattactggccgtatg

SEQ ID NO: 191324 - DNA, 352 bp, Arabidopsis thaliana landsberg
tatatgttcttaaccacttatacgtactaatgcagaagcttcccaaggaggaacgtcgtgcagtacgtgccactaataaatcttctagttgtttggaagatacaaactctcttccggttggaaacctccaggtatccatcaaaataaaaatgttgttccttcagaattatctattatgatgcgccctcatttctggtgactcatgtgttgctcatgcttgttaatatctcttttcattcttttgtttgtggtttcctaacaggttcatcgtgttttaggatgccgaatccaaggtctgactaaaacctcgctgtgtagtgctctttcagatgacttgtgttcggataattaa

SEQ ID NO: 191325 - DNA, 380 bp, Arabidopsis thaliana landsberg
tcgaaagaattttgcccgattccgtttttgcagctgcagctaaacccattgggcagcgtttccgcctgttgcttttcgggtgaggtgccggtgggaaccgttccagcccaaggtatccaggaaatttggaacggcgaaaaaatgcaggcctggcgcagggaatttctcgaagggaatatccgcacctgccgcggccctatcgacacattccagtgccacaaaaattatcggcatttgattccctccgtggagctcgtggaagtgcagagccagggcccacggcgcttggatctgcgcctcaacggcaaatgcaacctgcagtgccagatgtgcgatgtatggaagcagccaaacggcatttatgacggaagcgacttctg

SEQ ID NO: 191326 - DNA, 602 bp, Arabidopsis thaliana landsberg
ccatcctcgcttacagccgccagaaacttacttcaactgtggagttcttatcacaaactggtctcacagaagaacagatagggagaatcctaacccgatgtccagacatcatgagttacagtgtagaagacaagctccgtccaactatggagtactttagatcgctaaatgtcgatgttgcggttctcctacatcgatgtccccaaacgtttggattaagcatagagtcgaatttgaagccagtaacagagttcttcctcgaaaagggttttggtttagatgaaattggaatcatgatctctagatatggagctttgtacacattcagcttgaaagagaatgtcatgccgaaatgggattactttcagacaatggactatccgaaatccgagcttgtgaagttccctcagttttttgggtacagtttacaagagaggatcaagccgagatatgagctggttcagagaagtggagtgagactgctgttgaaccaggttttatcgctgtcgggaattgagttcgagaaagttgttaagaagaagatgatgaaacttgtgtctaataacgtaattgctgaacaaagtagtggtggtttgttgtga

SEQ ID NO: 191327 - DNA, 108 bp, Arabidopsis thaliana landsberg
tacccagtcattgtttctagtctagcgatgtgggataattatcacttacacacatcctaccgtttaatggtactgctatccaacaacgcgctgttctcttacacatga

SEQ ID NO: 191328 - DNA, 503 bp, Arabidopsis thaliana landsberg
atgaaattgcagagaagctgctatgtaaggattctaaacgagtttgaggagattctgcttcagaaataccagcagcggaacatagagcgagaggaagccatcctctggagggggaaagcggacgtctttaaggctaccttctccacgaaagacacatggaatcatatccgaacatcatcaaatcagagggcgtggcatacaggagtttggttcgctcacgcaacgccaaaattctctttttgtgcttggctcgcagttaggaatcgactttccatggttgatcgtatgatgacatggaacaatgggacacccacgacctgtgttttttgctctagccctatggaaacacgagaccatctgtttttccaatgccactattcttctgaaatctggacttcaatcgcaaagaatgtgtacaaagatggtttttccacagattggtctgctgtggtgaattacatatctgattctcagcctgatcgcatccagaatttcttatctag

SEQ ID NO: 191329 - DNA, 143 bp, Arabidopsis thaliana landsberg
atgggtgatattttcctgcaaaatatcggtcgtaaaagtttctatgatgaatttggttacctctatgcgactgtcggaggatacgatgcccgcgtgaaatacaataccatctcgcattatgccgcggatcgaacacggatcgc

SEQ ID NO: 191330 - DNA, 1190 bp, Arabidopsis thaliana landsberg
atgctcaagaggcttcctgaatcgtttggagacttgaaatctcttcaccgtctgtacatgaaggaaactttggtctcagagttgccagaaagtttcggaaacctctcaaatttaatggtactggaaatgctgaagaagcctctttttagaatttctgagagtaatgttccaggtacaagcgaagaacctcgttttgtagaagtaccaaactctttctcaaagctcttgaagcttgaggaactagatgcttgcagctggagaatatcgggtaaaatccctgatgatcttgagaagctttcgtgtttgatgaaactgaatctggggaataattattttcatagtcttccgtctagcctcgtaaagttatcaaatctccaagaattttcattacgtgactgccgagagctcaagcgtcttccccctcttccatgtaaactggagcagctaaacctagcaaactgtttctcattggagagtgtatccgacctttcagagttaacgatcttgacggatctcaatctcacaaactgtgcgaaagtggttgatattccaggcctagagcacttgatggctctgaaaagattatacatgaccggatgtaactccaactacgcccttgcagtaaagaaaagactttccaaggtgattccaaaaactccacagaatctcatcatggcctatttaaaaacatttcttacacctcttttgatttgttactgcaggcttctttgaagatgatgcggaatctgagcttgcctggaaacagggtcccggactggttctcgcaaggccctgtcacattctcagctcaaccgaacagagagctcagaggtgtaatcattgctgttgttgtggctcttaacgatgaaaccgaagatgacgactatcagctgcctgatgtgatggaggttcaagcccaaattcataaacttgatcatcacaaatgcaccaacacattgcatctctctggagtgcctagaacaaataacgatcagctccacatctgccgatactcagcttttcacccactggttacgatgttgaaagacgggtacaccatacaggtgatcaaacgaaacccaccaatcaaacaaggcgttgagctaaagatgcacggcattcatctcgtttacgagggggataatgaattggaaggcagagaaaatacattacccgaggctcaacaaacg

SEQ ID NO: 191331 - DNA, 177 bp, Arabidopsis thaliana landsberg
gagatccatgatggcttagacttctcttctgatgaagatggagggtactcttttggaatattctctgtgaaattttcaacagatggacgagaagttgttgctgggagcagtgatgattccatttatgtttatgacctcgaagcaaatcgagtttcactccggactgttgcacacacg

SEQ ID NO: 191332 - DNA, 371 bp, Arabidopsis thaliana landsberg
gtgccgcctgtcccgccgtggagttaatgcgacgaggcgagtggttggcggggcggccgtcggcgtgcgcgagccattcgaggaacgggtcacgggcgcgttgtcttcacgccgtgagagggggttgtcttgctgcccccggatgggacgtgagcttggttgacgacgtgaccgctgtcccgcccgcctgccaccgtcattactgtcggcccactttcggtcgcattgaccagccggccaagctggcgctggtgggtcgtgcgctgggtcgcctcgagtcgcggtattggttccgcaatcgaggaggcgaggtggtggcgcaagtggcggtgcagttgcttgcatgcagcatcggcgcgccggttgcatga

SEQ ID NO: 191333 - DNA, 178 bp, Arabidopsis thaliana landsberg
atgaacctagaaactaaaaccacagatctaacaaaatcatgccaaattccagatttcgatttcaggtcgaaggctttgaagatttacctgagcagctttataggcggtgagagtcttaaactcagccacgaagataacgaatttgaaagtgatagagaggaggttacgttcctcgacg

SEQ ID NO: 191334 - DNA, 730 bp, Arabidopsis thaliana landsberg
ggttggatactttttctcgggagagtgaaactaatgagcccgctgaaatgcttgttgaagatacttctcagtctcaggggtttgcaccttgggtcgatggttctcaatctgtcgaaaatatggtaagattggatatctggagctgattctcaaggatactggagagcaactttttaattgtggttttaacatttatgtgcaggaaaatgcttgcaatcacatgtcaaactcagatacaatattttcacctgttctgaatgatgaactggatggaactggtcgaggtacatgttcctgttgtagttttggtataaggtatcctttgtttgacatataataagctaatagatttctttcctcagtatttacagcaggaaattctgtgatctgggaaacccccaggtggggagccgacgagagcagcaacaagatttgctttgacaaccaaacgtgcaacgtttctgatttctacatttctgacgttcttattgcgagcttgccgtttgatgagagtggaaacaacgatgcgttcactgaaataagccccttgcctcattacatctttcctgagcagtatatggtactaccttacttagaagatggatcagccaacaaagatgatattaagtcagatactgacaagattaatctcgataaccatgacttgtttctggcattcaaccggacaagatcgtacaatgtggaaccagatgatcgtgctgaatctgaa

SEQ ID NO: 191335 - DNA, 466 bp, Arabidopsis thaliana landsberg
atgctccaactgatccaacgatcggaaacgctaataatcctcttgttaaagctttcgacggtggagatgaagttgacggtgatggcggtggtggtggtggtggaagaggaaattgactcggaggactcgctggaaattgaatcggacatgatttacaaatcgagccagtaccagaacagagcttatcagattgtggataaacaccacaagagcaaagagaggatgatgatgattcaacgcaaggacctggtaaaacttctgggaaagggaggaagattctggagaaatttgtaggactccaacacatgattgagagattacttgaaatcaacccgcacattagacccggacccgaggaaatcgattcgaaagagatcgaatccgcgacattgttgaatctctctgctcctccgccccaacataccacagaattattcgagattcgcatcgcgcaggtgaaatttga

SEQ ID NO: 191336 - DNA, 136 bp, Arabidopsis thaliana landsberg
atggctcacacttcgattaggtttgggattggtaggtttaccacgaaggaagagattgataaagcgggcgagcttacggttaaacaagttgagaagttgagggaaatgagcccgctttatgaaatggttaaagaag

SEQ ID NO: 191337 - DNA, 898 bp, Arabidopsis thaliana landsberg
atggagaaactggcccgacagcaatacctgaagaacaagaatcctaaagattgtgcgcttctctatatagctttaaatagagttcaagttttggctggtcttttcaaattaagcaaggatgagaaagataaacccttggtggtttttctttcacgcaattttcaggttgtgtacacaaaccatattcttgttgggattctagggtctttttcacctttttttctgtacaacttctggcatctaggatatcatattgagtaacatgtctccttatttttacaggaagagaaaaataaggcagcagccttgaaaaatgcatatgtactaatgggtaaacaccaactggaactggctataggtttctttctccttggaggtgaagcttcatctgcaataaatgtttgtgtgaaaaatcttcaggatgagcagcttgcgctcgtaatttgccggcttattgatgggcagggtggggccctggaaagtaatcttataaagaaatatatactcccatctgctgttcagagaggagacttttggctagcaagccttcttaaggtggttataattgtttgcaaatattgttatcttgtcaaatacctttcttgcttggtgttacaaattatgactatgaagttgtccctggtttatacagtgggaattaggagagtaccaccggtcaattcttgctatggctgggtgtctagagaaccctgctactgagagctctactgtttcttcaaatcacgtctcttttgtggatcctagtattggcctatactgcctcatgttggcaaccaaaaatagtatgaagaacgcattgggggaaagaactgcctcaactcttagtagatgggcatccttaatggctgctaccgccttcagcagatgtgggctcccg

SEQ ID NO: 191338 - DNA, 443 bp, Arabidopsis thaliana landsberg
atgtcctccgaggattgggatctcttcgccgtcgtcagaagctgcagctcttctgtttccaccaccaattcttgtgctggtcatgaagacgacataggaaactgtaaacaacaacaagatcctcctcctcctcctctgtttcaagcttcttcttcttgcaacgagttacaagattcttgcaaaccatttttacccgttactactactactactactacttggtctcctcctcctctacttcctcctcctaaagcctcatcaccatctcccaatatcttactaaaacaagaacaagtacttctcgaatcacaagatcaaaaacctcctcttagtgttagggttttcccaccatccacttcttcttcttctgtctttgtttttagaggtcaacgcgaccagcttcttcaacaacaatcccaacctccccttcgatctagaaaaag

SEQ ID NO: 191339 - DNA, 1373 bp, Arabidopsis thaliana landsberg
atggagcatgttgctcaagaattgaacggtttagaaccaaatttgacaggtagccaaggagcaacaaatcccaacagtggaaacccaactgttaacggtgtgaacagagttaacttttccccttctagtgcaagagctgcaatgaatcgagtagccagtgttgcttcaggatctttagtggttagctcaggattgcctgtgcgtagaacaccaggcactgctgtaccagcgcatgtaagaggtgaattaaacacagcgataatcggtttaggtgatgacggtggctatggcggaggatgggttcctcttgtggctcttaaaaaggttttgcgtggtatccttaaatatcttggagtactgtggctatttgctcagttaccagatctcttaagagagatcttgggttccatcttgaaggataacgaaggcgctctcttgaatttagaccaagaacaaccagccttacgcttctttgtcgggtaagccaaaccaagaaacttatgctcaatcttgaaggattatgcttaagcttatctattgttttgtttttttgttgtttttgtttttgcagtggctatgtgtttgcggtgagtgtccatagagttcagctccttcttcaagtccttagcgtaaggcgattccatcaccaagcacaacaaaatggttcttctgctgcggctcaagaggagttaacccaatccgagattggagaaatctgcgattatttcagccgccgtgtcgcatcagaaccgtatgatgcctcaagagttgcctctttcataacactcctcacgttacccatatcggtcttgagagagtttctgaaactgatagcttggaaaaaaggattatcccaatcacaacaagctggagagattgctcctgcacagagacctcgaatcgagctatgtctagagaaccattccggtacagatttagacaacaattgtgcagctaaaagcaatatccattacgaccggccgcacaacactgttgactttgcgctaaccgttgttcttgatcctgtgcacataccccatataaacgcggctggaggagcagcatggttgccttactgtgtatcagttaggttaagatacacatttggcgaaaatcctagcgtgacgtttcttggaatggaaggaagtcatggaggtcgagcttgttggcagcgagtggacgattgggagaaatgtaaacagagagtgagccgtacagtggaagtcaacggttctgctgcaggagatttgactcagggaaaactcaagttggttgcagatagtgtccagagaacattgcatctatgtcttcaaggtctgagagaaggtggtaataataataaaaacactcatcaaaaggaatttaccatatag

SEQ ID NO: 191340 - DNA, 387 bp, Arabidopsis thaliana landsberg
atgactgtgaatttaatggcgatcgctgaatcaaagccgtcggaggtaggatttgcaagatgcgaatgttgcggtatgaaggaggaatacacggcgggttatatagagagcgtacggtgtctatacgccgggaaatttatttgtggtctctgctctgaggcagttaagtacgagattttccgttgtggaaaaaaacagagacgaattggcgtcgacgaggctttggcgattcatatgaagttttgcggcgagtttgttgcttctccgtctccgacggttgatttcatatttgccatcggagagatatttaagagaagattaattctgaatttgccaagtgtcttgacgtcagcagcgtcgttgccgccggctgttgacggtggagag

SEQ ID NO: 191341 - DNA, 232 bp, Arabidopsis thaliana landsberg
atgagtagcacactggtcaggctcgaccctagcggacttaaagcggtaacatgcaagggttgggtcattacctctaatatcttagtggtcccaagcgaagaagccaaggtactccccatttcattttttgtttgttttaccctaggccaccttcgcaggcctttcctctgcattgctggtggtgtcctcaatctcctcttttgaagaggatggggtcgtcgtatctgaatga

SEQ ID NO: 191342 - DNA, 115 bp, Arabidopsis thaliana landsberg
atgaagagctcttcgatttctcttaaatataaagactattctttgaacctgattgattctcctggtcatatggatttctgtagtgaagtctcaacagctgctcggttaagtgacg

SEQ ID NO: 191343 - DNA, 314 bp, Arabidopsis thaliana landsberg
atgcgtcaccaggagagtcaagatgaagttaatgagtcaagtggttttgtggagaacaatgttgtgaatgaacctttatggctgatgaaggtatctgtatgtctgtttggtagagtgtccagtcggtggctcacatccgtatccggcaccgaaggaggaggcattgtctgacgttgattgctgttgccccataggtgggtttggtcatgttatattattaggtaatgagctttgtgacagagcagtactgggactgtaacctcaactcagtgagccttcttcttcgaagaaaaaggaaacggatagagaatcag

SEQ ID NO: 191344 - DNA, 258 bp, Arabidopsis thaliana landsberg
atctgacggagaatcgacaccggaccattgtatcacaacggaatcgccagatcgattgagagcattaggggaaattgaaatggtcgctttagaatcagcagaggaaacgaagacggagacgaagagaaggaggaagaaagagaaattaacgatcatggcgacggaggaacgtaagaataaatgttgccggagcaccggagatggaagatatataaacagttgttcaaacgacgacgtttttaccgttcgttatgattg

SEQ ID NO: 191345 - DNA, 312 bp, Arabidopsis thaliana landsberg
atgctcttcgtgggtcaaaacccggagataacggctacaaccgctgagtactgtctttatgcacttcctattttttttaccaatactctgcttcagccgttacgagtttatctaaggtcctagcgagtgactaaaccaatgatgtggtgtactttagtagctatggtgttccatgtgccgttgaattattggcttgtgatggtgaagcattggggtgttcttggtgtggctattgcatctgttgtgacgaatttgatcatggttgtgcttttggttggttatgtttggatgagtgggatgttgcggaagaga

SEQ ID NO: 191346 - DNA, 401 bp, Arabidopsis thaliana landsberg
atggtttacagtgtagttgtagaaacatccccaactaaaatccgagttgattatagtttcgagaaccaattcccattgtatgtagtcatagctatccggcttcctaatcagcccaaagaggccccaggaaattgcagagttaaagaagcaacttatagagttacttgagaaagggtttattcgtcctagttcatctccttggggtgcacctgtactttttgtgaagaagaaggatggtagtatgaagttgtgcattgactaccggcaattaaatcaagtcacgataaaaaacaagtatcccctacctaggatcgacgatctacttgatcagcttcaaggagcaaattggttttcaaagattgatttacgatcaggctatcaccaagtgcgaatccgggatg

SEQ ID NO: 191347 - DNA, 105 bp, Arabidopsis thaliana landsberg
agaaacacggtggactcggtcaccgaggtgggcagtcagcattggactcatctgtcatctccgggcaaaacgtgctccatcaaccatcgcaggctcgcagcctag

SEQ ID NO: 191348 - DNA, 225 bp, Arabidopsis thaliana landsberg
aggcagcttccatagttactgtgcctaacactctcgatattgcctccaaccatggtgttattgtcacatccaaatctgagtctctttctgaaagctatacaatcagtttagtcaatgatcttctagagaagcctatagtagagaagcttgtcaagaaagatgcgataatacatgatggacggacactcctaattaacacttggataatatctggggcagagcatg

SEQ ID NO: 191349 - DNA, 204 bp, Arabidopsis thaliana landsberg
atctggtccagtcaactcccaaaaccgctgtagaacaacgctgtcataccatccgaacccggtgctttgtccagattaagcgagaaaagagcgcgcttaacttcttctgggaaatctctctagtgagtctctgattcatatcttcagatatcattactggcacatcccgaagagtggaatggaagttttatggctctgaggtga

SEQ ID NO: 191350 - DNA, 454 bp, Arabidopsis thaliana landsberg
atggagtacttcttcttcagcgtctccttgtcgaacctccccttggacttgtgcttgctagaggtatcctcccgcttacccttgcgccgaccagagtggtcgcgcgggccaacttcagacttatccttcttggagcaactggcaatgaagtggtcggggtcgctgcagttgaagcatccatccttcaacccgccacaatgccagttctggcagttgttgtggaacagcgtgaaccgactagccacaagcaccagctcctcatccctaaggatctccacctacttctctataatggtcaataaagaagatagagcaaacaaagcaggtgaggggttagaagcagaacaacctcccagagaccagggccatggtgggtgcactagggttctcaatcttggcctaggtctggtggtcaatctcattggacttcagcttgttgaaaagctcatccatg

SEQ ID NO: 191351 - DNA, 225 bp, Arabidopsis thaliana landsberg
aagagtgattcgattgcaaatgtttttgtcgatgttttttccaatggtcaaaggtgtgatagggttctcctctccgtgtcggcgattattcctttctctctatatggtgtgtaccatgatctgaagtgtatatctcagcagcataagaggtttcctcccaagagaggaacatgtgaggagcgaaacagtgcggtcccaagaagaagtgtaatggccttgaagtag

SEQ ID NO: 191352 - DNA, 112 bp, Arabidopsis thaliana landsberg
atggacaaggcagccggtccgctagtcggcacgcacgacttcaccgcgttccgcgcggtcggctgctccgccgcgacgacggtgcggacgatcgaagcggcgtcggtgcggc

SEQ ID NO: 191353 - DNA, 354 bp, Arabidopsis thaliana landsberg
atggctaagaaactgggttatcaggtagaaactgcagggttatcgagagtttcagtggcagatggtcgaaaactgaaagttgagggcaagattcgtgactttgagtggaagctgcaatctactaaatttcagtctgatattttgttgattccattacaaggtgtggatatggttttaggggtacagtggcttgaaacgttgggtcctatttcttgggaatttaagaagctcgaaatgagattcaagtttgcaaatcaaaaggtattgttacatggcattcacagtggttctgtccgtgagatgaaggttcagaaattacagaaacttaaggaggaggaggttcagttagccatg

SEQ ID NO: 191354 - DNA, 297 bp, Arabidopsis thaliana landsberg
atggccgagaaagtccatgagatcgccggaaagataactcctttctgccggaaaatagttcacgtgaacagaaaatggagaatcatcgagagggtatcgatctttggagatttctttaggtttctatggagaaaaattgtttcttgttcaagtatcatcgaaaaacctattctttaccggcgaatcgttcacaagatttcttccaccgcgggcgatatctttgacggagacgacgatactacgacagaacctactgtttccggtagaaggtttggttcaagttcggattcggatttg

SEQ ID NO: 191355 - DNA, 121 bp, Arabidopsis thaliana landsberg
atgccaatggcaggctccgctgccgcagctctgcccgccctcgggccccagcgggggcgcatgagcagggcgcagggcgctcctgtttggtcaatcgaccccacatctccacctcccgccg

SEQ ID NO: 191356 - DNA, 224 bp, Arabidopsis thaliana landsberg
gtgaattaggtacttttggactcaacttgggcgtttctagcacaaggagtggactagctcgagttcgtgcgatcaaaggaaggacatggagtatactcggggtatctactcggttggagatcgagtggagcacacaagggagaggcaaggactatactcgaccaaaccactcggctgtaggtctgagtggagcacatgatgaagaagagaagctgctcgattga

SEQ ID NO: 191357 - DNA, 359 bp, Arabidopsis thaliana landsberg
atttaggtctcctgataatggtgaaaacagagttagtatagtagatgaagagcaagggacgtatagacctcccgggaatgccgaaaactcgaatgtgtttaaatcttcaagcggacacgatagagaaaacatgtctacacgtcaggttgcaactacattgggttacattcatcagattctttttcaagtaagtcttcctgagatttttaagtgtcaaaacatgttacgttctctgtttctgaagtctgaacatgtttttggatttgcagacttgtgcaggagctgtattgctcacagatggtgtgttttggttcattatctatccttttctcacagctaaagatttcaatctcgacttt

SEQ ID NO: 191358 - DNA, 317 bp, Arabidopsis thaliana landsberg
ttttgaacgtggaaagcaacagaatcaacgacacgtttcccttctggttgagttctctaccgaagctacaagttcttgtattacgctccaatgcattccatggaccaatacatgaagccacattccctgagttgcgaatcatcgatatatcacataatcgcttcaatggaactttgccaacagagtactttgtgaagtggagtgctatgtcatcacttggaaaaaacgaagaccagtctaacgaaaagtacatgggatcaggcctttactaccaagattcaatggttttgatgaataaaggtgtagcgatggagctg

SEQ ID NO: 191359 - DNA, 689 bp, Arabidopsis thaliana landsberg
atgaagccaaactctccaagaaattttcatttaaacgatgttttactaggcaccagagttgtgcttgaagatgacattgggaacacaagcttccggttggaagatcataggggtacaatagctgtgacattgagttatgtgggagcttttcaccttacacaagaagaggtattcatctcagttaaattcctatgaatcatttctcatttgaattccaaattcgatcagtctctgtattttcttttgttcaggtccttttctgtagaagatttcagataactctattccgagttcttttagatcacagtgtggaaaatttgatggaggcattgaatggattgcatctcagagatggggtggcacttgattatctactagttccatccactcattcacatgaaacatctcttattgattgggaagtgatcagatccgtgaatctaacttctcatgaggttttggaaaaacacgaaaattgttctaccaacggtgcttctcgcattctacacacaaaagacggcttgttttgtacttgtgtcgtacaaaatgcattggtttacacaccacataatggatacgtctactgcacaaaaggtgttctcaacaatctaaacggaaattcattattgaccaagagaaattctggcgatcagacttacattgagtactacgaggaaaggtgcatataa

SEQ ID NO: 191360 - DNA, 2178 bp, Arabidopsis thaliana landsberg
atgaaagagcacgagaagccatggttgattcgagagaaaggggaaaaaatagacggagcagctctgtttaacgacgatgaagatagtggcggagagagaagtggccacggcggcgaaggcgatgccgatatagaaagcggcgtcatagctccgcctcgtgttcttcgatggttcctatctgttccgtcaaacagttcatattattttattttatacttttaaaataaatcaaaattatcaattttttatttatgttattttataattcattccatttactttagacattcttataataaattacattaaattaaatttagattaagaaatctgaaacccgaatcaaattttttatgttgaatatattttgatacaaaattttaagttttagatattttaagtaaattcgaatcccaattcaaaaacttgatccggtctgaatctgaagtcttaaaatatctaaaccactttttaatttctaaatctgaaatacccaacacgaataatctgacctgaacccaacacaattagctgaatactcacgcctgttaaattcgatgttatttttcaagtgtttgtttgcattttttaatttaagcagtctaaaatctttaaataatatatttgaaatttaacatgaaaaatgttattctgaaaaaatgaaaattaaattccaaaatagcaccataataataaaattaatttactacatagtccatttttacaggtttcatcatttgcttctactgtgaatttttaaatgaatacttaaagaaaaatatcataaagatatgtcgaattttgactaattaatagttcttgatgctatctgatgttttaaaacttcctcattggttatgtatcaattctcaaatctttgaccagtaccaatgacatgactagactcgccaacttatatatgtatggaagaacgaatatatggctaagtactaactactaagtactacgacgacaaagaaataaccattcacaagtctaaattatttttgctcaaaaatgatgaacgtttctctcaaactttcatttctggtttttattttggtcatcatgtctagtaagtattttttaatttatttaaatttaaaataaaagtcattaaaaatattttcaaaaatattttttatttggtgagttaaaacaaattcagaacatttaataagttagtatactaagaaagtgatgaatgaatagatcttggatcagaagcaagggaactagccggtgttaacgagatattcgaaattgctgcgcgaagttcaaacaatgccggcaccgctagggccttgcagcaagccccaccttgcaagagggatgttgattgtagctttgaatgtcccaagggaggattctgcaatgatcgtcttggcacatgtgattgtttctaattgtattatttgatttctaatctacttttatcaataaagtttatccaccaattcttaagacttgatactaacgaggaaatgttttcaaaagatcggttgtgattacctttggtgaacctataatctttttcaacaaactatagaatattgactctttggattcccacacaacattaatctcctcacgtttatttgcatagtttctctcgctgaaaggcaaacctcgcagaactgactgaggaatgtatggtgaacccaagatctcgtttacaaaaccatgcagaattgactgagacttacaagttgatcccaataactcttccatcaatgtcaaccagtttactcaccaagattatacatacaaatggtctgaaatcactggcggtcattctcttttccaaatatgcggtccacacaactcataactcactatttagtttataagactgcaaagtttttatgtcgaaacttacaagatatggagtttggatgatttaggttgttcgtttcgtcgccgcagctacctgcggctgcggcagacgcagctatttatgttcgtttagtaaaacgcagcggcaaacgcagcattttgcggcgaaaatttttggacgccgattaattttagcgtcgataattaaaagctgcggttgcggcagcgttggcggcagcaaaacgaacaacaacctgcggtaggtttgtcgcagccgcagccgctgccgctgccgcaaccgccggcggtaacgaaacgaacatgcttcattataatctgtga

SEQ ID NO: 191361 - DNA, 231 bp, Arabidopsis thaliana landsberg
atggccggttcaagggatagctctgatgtttctccaagtaacatcatagagccgacttgggaaaccttgccggctgacgagcagctccagttcgaggagcacaaggagcagatgatccaggaggcgaaagcaaaattcttggccaacttcaaagtggacaggaacaacaaggtcgtccgacatcgggcgacggatccgcgttcgctccaacccacgccagatatccccaat

SEQ ID NO: 191362 - DNA, 2874 bp, Arabidopsis thaliana landsberg
atggttcttctgatgggtgccgagaataatcttatggaagaaacaacagctgttaccgaagaagattcctatgatgatgagtttccctgcggagatccacaagttgagcctcgtgttggagatgaatttcaggtcgacattcctcctatgatgtctgcaaccaagcgtgctgtgtttctttcgactcctgttgctttggatgattcgtcatattcttttctcatcggactacctgtccaagtcatgtggatagacaaacatagaagagggcaaggaaatggagatgacaatgttgacatgaaccagtccttgaagtctttaagagccaaaaaaagccgttgctctgccaagatcagaggaaagagtgacaagaattcggaaaccaagaagcaaagatcgaatcttgaggctgttcctgtgataccgtccagttcttgggaagatttggaggtggctagctttgttcttggtctgtatacatttgggaagaactttactcaggtgaagaatttcatggagaacaaaggaataggagagatcatgttgttttactatgggaagttctacaattctgcaaagtaccacagttggtctgaatcccgaaagaagcgcaaccgcaaatgtgtatttggaagaacgctctattcaggttggaggcaacaacaattgttaacccgtttgatgccttctattcctgatgaacctcagaaacagatacttgtggatgtgagtctctttcacatcctaatgcggaatgcttaaccactgtatatttgttttttcattgatcttactattcgcaggtctcaaagtcatttgctgaaggtactatcactctagagaaatacgtaagtgcagtgaagaatcttgtgggtctcaggcttctggtagacgctgtggcgattggtaaagaaaaagaagatctcacggttcctacatcaacaccaatgaagaccaaaccatggttcactgtttcttcaaaatcttctttggtccctggagaaggggattacaattccctcacatcggctggcataataaatcagttaactggctgttctcgtctgagcaaagcccgttgcaatgatatattctggggcgctgtatggccgcgtttgctagccagaggatggcgttcacagcagcccgaggaccgaggctatttcaaatctaaggactacattgttttcattgtccctggcgtgaaaaagttttcaagacaagagcttgtcaaaggagatcattactttgattccgtcagtgatattctaacaaaggttgtgtcagagcctgaacttcttgagaatgaaacaggaggagtggctgcagagaatccttctgaccagtcagatgaagagtcttccccgtctgatagtctaagacaccgttacctcaggtctccatgttctaaccgtggaactctgggaatgaaattcactgttgtggacactagtttggctactggaggaaagttgtgtgatttacggaatctgaatgcagagtgtttagtagtttctgagccaaaggctcgtctagaagctaaagattcttctgtgcttaaaaattctctggacagtcagaatgtggaaaagtctcaagtgaggcctctggatgccaagaaccatgtggatgacccaatgcggttcacgattgttgatacgagtgtggaccactgcgaaaaattatctgggtttaggagatggagatgtttaccaagtgatgacacaagaaggggtcatgtaggggctgattctggtataaaggaagagaagactttagagaaggctaaggatccatcaaagagggttattaagcctcggtctacccctcgagcagaaactaattattatgctgtagattctgcaccatatttgaaacgcagacggctcagtgcttgcatttccagagagagtccagtgtccaaacatttactaggtgataatgacacaaaaatgactatttgtcttgaatcagagcagcaaagtatatgtgtggtccaacaacaaactagcacttgtgaagagatgaatcaggacaaagagattgtgccgttggttgagcatatgaacttaaagtctgatcaatcaaaaaagactggaactgggctatcttcttcgcttgttgagattcaagaaacgacagcgattgaaccaagcggattaaattccaacactggtgtcgacaagaactgttcaccagagaaaataagaactgcccatgaactcatttcggcagaaccaaaaacaaatgggatctgttcagtgtcagagttggacaaaaaacgagcttccagtgatctggaacaaaaacaagtatttgagcttccttccatttcaggctcaaacaatagatctccttccaatgatctgggaacttctcaagaaatgggttcatctgaacaacaacacaaccaacaaattaagacagatggtcctagaagacagagcacaagaaagcgaccattgaccactcgggctctggaagctctggaatccgactttcttataaccaagagaatgaaaagcacaactaaaccagaaccgagaaaacatgaaagttcaacgaagaaaaagcgctcagctaaagcatgtaacagaaatgggagtgcagacttggagcacagaggagaagatagaagcagttttacaaagaaatcaccaacaagtaagcccttggatcaaatagaggattcaaagcctagctatcttctcaatgaagcaagaactgagagtaaggctctggatcaagtacaggagtcaaggccggttctaactgaataccgtaaacttccaccgattgtattgaagcttccattcaggcgtggctaaggagctcaacggacttaagtctgaaagttttgatcgcgggatgtga

SEQ ID NO: 191363 - DNA, 410 bp, Arabidopsis thaliana landsberg
atgacttctaatgccttatgtggtgagtctaccattggacttgctggtaactacactagctatccccatagcttgggactaataacaaagacatccacatttatctcaagtcccattagaataaagcaggcaactgaagaattctagcacggcacttccaaaaggtaacgtggtaaagtccaataaagttcgaatttttggcaacaaaagaactcacccatttgcgcggtggaggactccaatccattcctaatggaagcggcgatgttccgtcatgcctgtgcttgggcggactccgtctctgcatcatctccaccaaactttacctaagtctctctctatctccagctctccggaatccgaatttgatattccgatcagaatcaatcggagacacgatcgagtactaa

SEQ ID NO: 191364 - DNA, 382 bp, Arabidopsis thaliana landsberg
atggtcgttcaggatggctacgatttgctcaggttcgtcctgcaaatggatatgctctcgcacatcatcggcaaaactatccagcaaggcggagtaagcattggcgttgatattggggtatcgcgtcctggccaaatgccaaatgccctgctcgacattgaactcctctccttgtttcaagcagaacgaaagaaaagcggtatccatctcctgccgcgcaaagaaatccacaatttcccgagaacggcggcgcaataatggatcatcgctcaaaaggtgtggtcgcaaccaatcaaccgcttgggaaccacacgaaacaagtttctcccggatagtttggtaaactgcgtcatcctcatcgccaagcaaactgatgagtgcg

SEQ ID NO: 191365 - DNA, 170 bp, Arabidopsis thaliana landsberg
agaaacaagccgtgaagatgatttacggaagaaaggaagcaagcgtggtcgttaatagtagaggagaatgtggccaccggaaagagcttgggccaaagcaaaacgagactgagaacgaaattcacggcggcccaagatgttctcccaagacagatgtagattatatttaa

SEQ ID NO: 191366 - DNA, 374 bp, Arabidopsis thaliana landsberg
gcaattattttaaatttgtatcaccttattattcaacaaaacccatcagcttggacacggtaactactgctaagaatgacccatatgcctctctacgcatccgggaatttaacttttacctcattatccgttttgccgttgtattcgcccttaccatgcagttcacgatcattgaatggaaggtgtatgccctttcccatgatccgtttacgctggggctcataggcctggcagaagtgatacctgccctggtgctggcgccctttgccgggcacctggtagataagcgggaaaaaagaggcatgctgctggcctgcatggctgcctacattgttattggcacagcgctgttcctgcttacgtgggaccgcgcg

SEQ ID NO: 191367 - DNA, 141 bp, Arabidopsis thaliana landsberg
catccttccgagctaaaaaggtgccgcctcctcggatgcattggaggacgacattgcgtcagtccgagtgaccacgctacgaggaccgtttcgacccggcccggcttcaggctatcagaacgttctgactttgaaagctaa

SEQ ID NO: 191368 - DNA, 273 bp, Arabidopsis thaliana landsberg
gccacgcgcaacctctgcgtcgccgaggccgcctgggtcgaccaggagacccacgagcaggccgacggccgcatcccgtggagccgcttccagaccctcgtggccggcaaggtcgcggcggccgcgccgcacctggtccgcgagcgcgaggagcgcgccgcgcgcgcccggttcgcgcgcaagctgcgcccgctcccgggcgacgagcaggccggcatggcgacgttcatggtgcgcgcgccgctgccggtggtcgacacactggacgccgcg

SEQ ID NO: 191369 - DNA, 78 bp, Arabidopsis thaliana landsberg
atggtctatgcgaccaccattgtagtggcggcgcccctaatacaggagttacggggcattattgacgagttccttggt

SEQ ID NO: 191370 - DNA, 138 bp, Arabidopsis thaliana landsberg
tgctctccgaaccgtgcgggaaggttttccatcacacggctcaccaacttgatcttccggcgggaaccgtatgtccaaacaggcctagaaaaacaggtaccaattgccactaaagtgtacgaaaaaatccgtgcttag

SEQ ID NO: 191371 - DNA, 724 bp, Arabidopsis thaliana landsberg
gaaacattttgcggcgaatttggaaatcttcaaaacttcaataagtggcgagattgaattcccgtcagatattggtgtcgatcgatatctacgcggttttggtgtgtagattgcttctacagcataagttgtctattttgctccaaaatgatccatagtctccaaatgtatcccaaatatgtaaagaccataaaaaatctatagaagactctagaaataacagaaagactgtaaaaactatacctatatcacaactaaaagcagtgaaaatcgaggtatatcaattccctagacttagcttatgcttgccctcaagcaaaacataaaagccaaacccgtggaagaggtttgaaaacgcaggaactcccaacattctctagcctattgccatgatcatctaaactaaatccacatgcctaacaagtctaatcaaatcctaagcaacatgtacttctctgcaagcttacacaacattctagattccattcctaagttccacaattatatccactggctttcatcgctgggtctcatcaaacaagctaacactcaagatccttctagactcattcatctactataccatgacaaatcgacctttttttttttttctttctttggtgttctttctcttccccagacgttattctttttagagagtaaacaaaggagaactcgcatactggatcgacaccctcggtatttttccaacatttgtaattga

SEQ ID NO: 191372 - DNA, 282 bp, Arabidopsis thaliana landsberg
  unsure (1)..(282): unsure at all n locations
atctccgaggccacggtaaaattcgaaaaagagcatcgcatcgtcattccatatcccgacccaaagcccgcaaaagacgccccatacaaggtctcttattcgccgccgtcacagtgcaatgttgtgggaagctannnnnnnnnnnnnnnnnnnnnnnnnnnnnnnnnnnnnnnnnnnnntatggtcgtccagatgccctcgtcactattccaagaaaaggcctacacgaacatgcgatacttttatcgccgagcctactacattgcgtatattgccgcgcgc

SEQ ID NO: 191373 - DNA, 314 bp, Arabidopsis thaliana landsberg
ctttgcatccacatgagaagataggttcaatggatgtaacaaatttcttgatgtgcaagaaagagccacggccactggagaaagtggaaggtataagagagagtagagctcggataggccatggatggaaaactactcatcttcttcggtttttattaggatatattccttacaatcacaaacctaactctacaagtcaaaaggactatagatcattcggtgatgggaacgcttattgtatagaggagtaccaacaagagtttcaaaggattaccaaaataaaggaataccaacgagagtttcaaaggttctag

SEQ ID NO: 191374 - DNA, 334 bp, Arabidopsis thaliana landsberg
atggtatttgagggaggtaggttaggtaggttgattagtacgtataactatgagtctttgatcgataatagatcttaaaatccttaatttggttgtcagttagcaatcagttccaagtatttaagagtcttaagaaatcaaaattaaaagattactctttttcaactttcctttttttgggattctccccaaagataatatgtttgtgttggcttcacaggtgaaaaagctagtagcgacgtatactaaattacaaattaaatacaatggcatccgcagaaaagcagagaaagcaaacattgacgagggaaaatacaaagaaaggcaatactaa

SEQ ID NO: 191375 - DNA, 153 bp, Arabidopsis thaliana landsberg
gttgtcccggttacgtcaccggatatagtcggtcaaaaaggcacgtgcatcgtcgtgcagtgtgtggcgtttcttttggtggtgagacgcgtggcgaggcacgtgcgctattttaacgtgaatgattcacgagatgcgaagcggcagttttaa

SEQ ID NO: 191376 - DNA, 333 bp, Arabidopsis thaliana landsberg
atgaagattgaagagagagagagagagagctccccacttgaaatcgacacctctcatcgccatgagagaggtgagtaatagtcgagaagagctaaaatccgagagaagaattaaggagaaaccctaagatagattgaagatcaaaatggttgaatcgatactcgaaatcgtgagctaatgatgcaagtgagaaagaagaaaaaggagggattttggagccaagtagcaaaaatcgcgatgaagaaactaaagagaaacggaaacttctggctgacgaacaagttaaaattcacgatttggtcacttctaatgcgttcaacatttttcagtcat

SEQ ID NO: 191377 - DNA, 371 bp, Arabidopsis thaliana landsberg
atggccaagtacgaggctctgcttaacggattgctcatcgccatcgagctcggagttcggtgcctcagacgctcgtggcgactcgcagcttgtcatcgatcaagtcctgaagaactcacacttccacgacccgaagatggaggcctactgcgatgaggttcggtgcctagaagacaagttctacgggcttgagctcaaccacatcacacgacgatacaacgagactgcggacgagctggctaagatagcctcgggacggacaacggttcccccggacgtcttctctcgagacctacatcaaccctccgtcaagaccgacgacacgcccgaggcaccctcggctcagcccgaggcaccctcggcccccgagg

SEQ ID NO: 191378 - DNA, 74 bp, Arabidopsis thaliana landsberg
atgagtcaagaaggatatgggtacgatgtaccggctcctcttttcgcctacatagaccgggaaatgaccctttg

SEQ ID NO: 191379 - DNA, 810 bp, Arabidopsis thaliana landsberg
atgtggactgggaagactcccagtttgtcttttctgaagatttggggttgtgaggtttacgtcaagcgactacagtcggataaactcactccaaaatcggacaagtgcatgttcgtgggatatccaaaggaaactttaggatattacttttaccaccggtcagagggcaaagtgtttgtcgcccggaacggtgtgttcttagagaaagagtttctcaaaagagagaaaagtaaacaaaaggtgtatcttgaagaagttcaggatgagccagtgggacaagattcaacaagtgatgctaatgtagcagaacaagttgagacgtctatggcaagagaatcaccaccacaaccacgaaggtcagcaaggcttcgcgaggcacgaggagaagtgctattgttgggcaatggggaagtgttgttgttagacaacgacgaacctgcaacatattcagaagcgatgatggacccagattccgagaaatggcatgtcgccatgagatccgagatagattccatgggagaaaatcaagtttggaacttggttgacccgcctgatggtgttagacctatagaatgcaaatggatctataagaagaagaaagacatggatggaaatgttcacatctataaggctcgacttgttgcaaagggttttcgacaagttcaaggagttgactatgacgagacattctcgccagtagcgatgcttaaatctattcggatcattctagctattgccgcatatttcgattatgagatttggcagatggatgtcaaaacagctttccttaatggaaacctagatgaggac

SEQ ID NO: 191380 - DNA, 414 bp, Arabidopsis thaliana landsberg
gtccaaagcgatcaccatgaggtggtggcagaccttattcaaaccagctttctattttcaattccgacggatggtccaatgtcgttttctacgccccgtgtttctgtgcaatggattcttcggtttgagttcctaactactcctaagagtgtggacttaagcaggtattactcccaatactcaaacgatccattctctggttgagtcttttgaagtgctcaagttgttgaagtcagtttctggttctgttttgtggtaatttacaggtacgaacatccattgttagtaccggaaagggaaaaaagcgaatgggttcttccgattactgtacatgcaccgccgcctcggacatcaggtgctcaaaaccgtggagataagctttttggtttggagccgtcttggattcgtagctaa

SEQ ID NO: 191381 - DNA, 95 bp, Arabidopsis thaliana landsberg
atggtgatgccaaagcaaggaaaaatcatcagccgattcaacatagctaaagaatcaacatgtagaagcacagatacgggaccacctgtgacagg

SEQ ID NO: 191382 - DNA, 126 bp, Arabidopsis thaliana landsberg
atgatgaaactaaatgtaatcctcatcgatcaaagtagagagtccaaaagaatcacacttatatgtgaacctcccattgtaggaacaataaccagtggaaccaaaatcaatgatcccaacaatgag

SEQ ID NO: 191383 - DNA, 734 bp, Arabidopsis thaliana landsberg
aactaagaagtttgacgaataaagggacagcaccactatcaataatgaccctagtgttctcagatgtccctgaagcgatattggtaagcgcccaagctgcctcaaactatagttatacaagcaaagcaaacagcaaaagccatcagcatatgaatcaaagcaccaagctacacttagatataagaaaggcaagctcacctgaagttgagtgaagtcatccctggaaagaaattgcacaatgcgaggaacaacaccagattgaacaacttcattgattggaggatttcgctctacaaaaaattcaaccaaccacaataagcaaaaactaaaacccacaaaacaatcaaaccctaaacgccatgttaagagatttataaatcacgtaccaattgaaagcaatctcctgaagctagccgtcgcctccaattgtaagtctctatcctctgacattactccagcaatcatctgttgtatattctccaactgcaattgaatcagggcaacttattatctaacctcaagcaatgcagattctgaaattagggttcagtaaaccccaaaattcagtactcctgatccaattatttatctaggtaactagatcagaagctttcgatttcattttaattcaccgagataccctaactagttctcaatctaaattcggtaccaaacataaacgagagaaacacaatcaattagatatagaacacgaagaacgtactctcgtttcc

SEQ ID NO: 191384 - DNA, 126 bp, Arabidopsis thaliana landsberg
aggcaaatcaagaaaagatcgttgaagctggaggcctgacatcgttgctaatgcttctcagaagctacgaagatgaaactgtgcgaagagttgccgctggtgcgatcgccaatctcgcaatgaacg

SEQ ID NO: 191385 - DNA, 216 bp, Arabidopsis thaliana landsberg
atgtgcaggattgccggaataatttccgaaaaattatctccagacgagatcagggaaaatgttgctgttatgtgtaatgccatgaagcatggggggccggacgataatggtatttacgcggacgaacaggctggcattgtactagggcaccgaaggctttcaataatagatttgagtgataaagggcatcagccgatgcctgatgtcggcaaacgg

SEQ ID NO: 191386 - DNA, 108 bp, Arabidopsis thaliana landsberg
atgaggctgcatcgtcatcgttggtttccggtggaattggattatgggttccatgattgggtgattttggttgatttgggggatgagtatcagatgatggttgagaag

SEQ ID NO: 191387 - DNA, 110 bp, Arabidopsis thaliana landsberg
atggcgaggtcggagccagcacatcaaaggtcccagctttcgggctccacttccctctcgtccttttttgcctcattagatggacaacgccaagcagtggcaaagaataa

SEQ ID NO: 191388 - DNA, 356 bp, Arabidopsis thaliana landsberg
attttctaagcattcacattttccacacatttctgaaggaatcgaaagatgttcttacccggcaaggacgcagatggcgtaggaaagagcgaacagtacgatacacagctccgaccaccgaatcgccatggaaacggaaatcggatctctcccaaggattactccaacctgagattcgtttcgattttaacaatgaaacctcacagaatgaacaagaacgaagatcttcttcgctgatttttatgattggaaaactcgaatcactctctctacttgttttcgtggaaacgattccaaaactcgagcctcgtggtcgggttacgtgtacactgcaatgcttaaccaatcaggattaa

SEQ ID NO: 191389 - DNA, 172 bp, Arabidopsis thaliana landsberg
atgggtatcgttgaaaacattcgttcccttaaatttgaagtgaaaatcgtggaagctagaaacgtagagctcgagtcatcgccaaccactctcttcgttaggttctatctccatgcagggaatagcagtaagattgaactacaccctccagagatccgttcgagatcagact

SEQ ID NO: 191390 - DNA, 103 bp, Arabidopsis thaliana landsberg
gtcttatttgcgccgggtggtgtagcaagaaatgtagctgattgcatcttcaagcttggaattacaccttttatgattggtactttagggcttgatggtccag

SEQ ID NO: 191391 - DNA, 183 bp, Arabidopsis thaliana landsberg
gcgctggtaccactgccaataagcgtcgtcgccggtgcgcgtggccagcaatgccgcgcaggccagcgactcggcctgcacccagtggtatttgtcgtcgtcgcagatcgagccatccggcgcgaagccgtagcacaggccgtcgaattcgtcgtcccacgcgcgcgcgacggcggtgtctaa

SEQ ID NO: 191392 - DNA, 250 bp, Arabidopsis thaliana landsberg
atgcatctttctagtcgtaccactggtttagggaacaccagaggaaggacttgtcggaaggactgttgcaattggctgcagaagttattagcgccagattcgtcggatatgaggtggatgagtgtgcataacgacagttagggttttatttaagctaacagctctaatcatcgccacatttggttttgtctaaccagatttgaggttgtggcggtcacggatgacgcttgtgttggtttcagcgctggag

SEQ ID NO: 191393 - DNA, 569 bp, Arabidopsis thaliana landsberg
gtttgcttgatgatgataaggaatatatccacggtattgaggaggctaatttttggtattctcctaagtatgtttgcaagttgtttgttattatgcttatttccgaaagcttgagttccccagccgttgtatgggaacacacttggaagatactgtctgaagattttaagaggaaactaagaaatcagttagaacgtgcaggttagttaaattattatttttaaattaaatatacaattttatagatgtttttagaaatattttagtacattcaatcttatattaatttatatgcagaatacatattgcctgacgaagacaggattcgattatgtttacaagagctgcaaaaaatattaaaaaggcatggaacagatctttggaggtataagatgttgcctcagcttgaaccaggcgatgaacctgcctttaatcagttgatcctcgatgagcgcaactacaactgtgagtcattgaaaacaaaacatgataattggttaaagatgctaactgctgaacagaagaaggtatataatggaataatggatgttgtccttaatgacaaatga

SEQ ID NO: 191394 - DNA, 210 bp, Arabidopsis thaliana landsberg
atgaaagttactctcaatcgattgcgaaatggcttgctggccggtttcctggtcatcgccggcaatctttccgtatcagcccagcaatcccatttgatcaggggtacggtcacatctgcggataatgaacccctggcaggtgtcaccgtcacggaaaccggtcattcttatggtaccaccacagatatcggaggcgcttattctctcaag

SEQ ID NO: 191395 - DNA, 525 bp, Arabidopsis thaliana landsberg
atggctttttctgttttgaaacagtcgaaggtgagacaagcgttttcaccgttgacgataccaacgtttatggtgatttaaccctttgtgaccagggtttaacgactaccacgaccacgactaccacaactgaagcgccggtaacaacgaccaccacaactacaaccacaactgaagcgccggtaacaactactacgaccaccacgactactaccgaagcaccagtaacgaccaccacaactactacgaccacaactgaggctccggtaacgacaacaacgaccacaacaacgaccacatcaggttttgttgaatatactattactagtaactcatacctgaattcaacgctcgcatgtgctggttatgatgtagacccgaccaccacggtatatacaccggataatggcgcccctgatacggtaactatcttctacacagactttggcgttacgccatttgcgggagatgatggctattacgcatgggagcaggcctccaacccgggtgcaggaaggtgaacag

SEQ ID NO: 191396 - DNA, 418 bp, Arabidopsis thaliana landsberg
ccggtgtaaacacgctcttgaggtttcgttatgagcgtcttcatagtttttgtgaagtctgtggcatgctcactcatgattcaggagcatgtctcattcttaatggtggtcctgattccaattctgaaggtgatgatgatgacgacatgcctaatgctgacccaccaaatcagaatcaaggtgttgttatacggaaattgcagaggatgaggagaatgggggacctggtttgcagccagtgattgctgaacctgatgaagagacacatgcccttgaagatattgatcctttgcacaatgctttggaggaggatgctgatctcggagacaaccaacgcgacctttatagtcgatactccgctgtcattcatccacgacttgatatcatggagcagacaatgaaaactcaagacgcaatg

SEQ ID NO: 191397 - DNA, 1179 bp, Arabidopsis thaliana landsberg
agtcgaactacgttgcccgcgggacacgtaccatgtgcacttggagatagcggcccggtggcgctgctgatggccaccctacagggcgaggacgcgtccccgtgtaccgaggtcaaccatcaccaaggctgcctcgagcatctaccgacgcatctcccgcactctctgtcatgcaaggaagccacgagcagcagcctgtatgaccacagtcgccgacgtctggagccgtgcggacaacgccagctggttctgctcatgttgcactgctgccttgatttgcagcagcccttgctcaaccttctggagcgtggcttgcatctttgcgagaacagcccttacgttggtccacaagtcccccatcgatggagctggtgattgctgagccgtggttgcacctagtggtgtcgcccatggggacggagacgccatcaacgaagatgatgtgacaaaatttggcgttgtccctggggatgggcacgccgacgtccaggatgtggtaacaaaattggcaggcgatgttgcccatggagatagggacgccggttgccaggatggcgtgacgaaggtggcatgcggcgcagcccatggagatggggacgtcggttgccaggacgacgtgatgaaggtgacatgcagcagagtccatggagatgtggacgtcggttgtcagaatgacgccacgaaattggcggcagaagccatgagatcagatcgaaacccaagctatccgataccagatgttatggtcgctagatcggtgaaggattggagaggggtatcgatgggcaggaaggttcgccggggcctctgtccacggccgagcaaaacaagggttctcccttctaattcttgcctactttatttctcatccattgattacataaataggttagttggccgcccctatctagctagagatccttatctccttaaaactctcctaaaaactctcaacaactactaattgataaccttcctagataatctcaactaatctcctagataatctcaactaatcttatctctaactatccttatctaatcctccttagaggcccatcgctgctgtaccgcatcccctccgtggcctccttaggccctgacactacacccctcctggacaagcagctcgtcctcaagctgcagcatgacaagtgctcaaatatcgagtctacttga

SEQ ID NO: 191398 - DNA, 100 bp, Arabidopsis thaliana landsberg
aattggcgaagccagcgcgagttcggcgcatgccaaagaagacgacctgagtacgaaccataatttactaaggttcataaatcaaaatgaattattttaa

SEQ ID NO: 191399 - DNA, 563 bp, Arabidopsis thaliana landsberg
tcagctctcttgaccaccgtggaggctctaagcggttagattggcaggcggaggaaagcgaaaatggagacaagatcctagaagtggatacttggaagcctcattatcatcccaaaccgttacgttcagagagaaacaatgagtctccgaggaaacgacaacaatctttgttgggtccgagaagtacagagaatagtcctcaagttggttctagtgggtcaagaagaagaactccttttacgccgacgtcaagaagcgagtattcttggggatgtaataactattactactcgggttatcacccgaattacatggctaacactgagtcttataaagctaaagttcggtcacaaagtgcgccgaaacagagagttgaggtctctaatgagaccagtggctacaagagatctgttcagggacagtattactactacacagcggtagaagaagagagtttggatgttggaagcgctggttactacggcggaggaggaggcgattctgatcgattgaatcggaaccaaagtgcgaaatcgaggatgcattcttcgtttcttgtttag

SEQ ID NO: 191400 - DNA, 485 bp, Arabidopsis thaliana landsberg
ctggggccggcccgatgccgcgttctacgcgctcaaggaatacgacctcggtgtcgaagccgatgtgcgctacaactacgaagccggctgggcggaaatgtcgccggtcgcacgcgtggtgatggagccgatgccgtactggccgaagcatcaggacaagctgcgtttccagtccattttcttcgccacgccggacagcgccaaaggcacgtcgtttctcaatgtctggccctacgatcagcacagtttcccggacttgtacggttacgtgccggcgttcaaacgtgttcgccagtttccgaccgatcagcgattcgagccattgatcccggggtcgaccttgtacctctcggatgcctggacagcgggcgatccgctctatacctggggcaactacaagatcatcggtcgcggaccgaccctggctgcggtgtccggcggctggaacgccgatcacccgaactgggagcacaagacgcacggtg

SEQ ID NO: 191401 - DNA, 314 bp, Arabidopsis thaliana landsberg
gccctttgggtggagttgcagcaccaacttctacagtagtgactacgcctgttgaagtacctgcgccaaagcaacagaagaataagcggagaggtggtgagtctctcaagaagaaaaacgatgtccctaagaaggaacaacagttggtagataggttcgccaatgttactgctccaagtggattgctgacggaattgaacccgggaatcattaaccatgtcaggactaagaaacaggtctgctcaattattgaagctttgattcgaagtagtaatgatgatgctaccacgagggaaagacatgccaatttcaat

SEQ ID NO: 191402 - DNA, 4462 bp, Arabidopsis thaliana landsberg
gtacttctctttgtttgtttacaagttgtactcttggccttcatctttgggaacactgtcaagaccgtcttcgagtccatcatcttcttattcatcgtacacccttacgatgttggtgatcggtgtgagattgacagtgtacaggtatgtgcatgcgcctttgaaatgtaacccgcaagaatcttgtaaactggctaaccaaatgttaatgaaatgaaatccagttggtggtggaggagatgaacatactcactaccgtgttcttgcgatacgacaatctgaagattatgtatccgaatagtcttttgtggcagaaatcaatcaacaattactaccgcagtccggatatgggagatgcaatcgagttctgtgtccacattactactcctcttgaaaaaatcttccgtgatcaaacagagaatatcgaagtaagacttaccgatatttttatgcttatgcgcgtttttataccgatatgctaactaacttaccgcaatgtagctacatcgacaacaagccggagtattggtacccacaagccaaaatcattgtaaaagatttggaagatttgcacatagtaagactagcaatatggccatgtcacaggattaatcaccaagacatggctgaaagatggacaagaagagccgtcttagtcgaagaagtgattaagatactcctcgagctcgacattcaacaccggttttatccgctcgatatcaatgtccgaacaatgcctaccgttgtctctagcagagttccacctggctggtcacaaaaccaacctgcctgaaattttgatgaacaacacaacacttttcattttgcctcaaaggagtcaacaattttgtaaccaaacaaacattaatctaattaattagttcatataaccacaattttgaccttttcaagattcattaatcacaattcaagagttcttcacgaatcaatcaagtatctatgactctactcttacattacatgtgcttaggattaagtagcaactataatctctaaagtctaaattaatcttccctaattcaaacttaagcctaatctcatctacccattgaaatcattattcaataaccaagctagttcttgcctgttaagcagagatattaataaacaacaaagaaaagaatcaaaaccaacgtataaccttgttaatgatgaagataagaacgaaaggaaacaagaacaatattgtatgcacgcaaagactaagagaaatcttgtgttgggtgttgttaaatgttaataaatgtgcccaccctaaaacgaaaacaatcaaagtccaaacttagaacatgagatgtgtaaaacaccttcattaaatttagtgatcgttttttatcgaatgacaaattaattactatattaagtcattatccaactcatagtggttttaaaaactcctaaaccaaattataattgttagtaagttaagtaacagagaacaaaataatactcgtaactcttgtttccaaactataacgtaacttttgttcatcatcttcacagtttctgtttctgtttctaaagattctaaattttgtgttttttttttcctttttctttcgattatttttgattttctgatggaattccgcaaaccctttaagtctcatagctcgtataaacagattataagcaccggaaatcaaaacgagaagacaaagaagaagaagaaactggcgaatcttgacgatggcgacattgctaaaactcagagctctgggtctagtttcgatggaaacagctataagttctggcaagacattgcaacagatgattatacaaagagcgggagtttcgatttcccgcaataccgtgaggagatcacactcgatgtaaacgaagaaacagaggaaacagaggatgtcagcaacaacaacaatttgtccggttctaaagaaacgagagtctctttcaaaataaacagttcaggaactaataatatgtctggttctgtacgttcttgtacatcttcgacttcgttttcatcggccacaatgcggttaaatttagagcagcagttggaggatgaaggagaggtggttgtaagatgttcatcggtgaggaaaacagagcttgtttcgagggcgaaggcgagatcgaggttgatagatccgccacaagaagaggaacaacaatactcgagctggatcgggacatcggatcagttaagatcaggtttacttgggagacactctgatgatattgatgaagaagatgattcttcggctgaagaagatgttccagtggaatatcgaaagttgaaaatggacgcgataacgttgcttcaatggatgagcttaatcgcactcgtagtggcgttagtgtgagtctagcgcttcatacttggagaaatgctactctatggagccttcatctgtggaaatgggaagtggtcttgctggttctcatctgcgggaggctggtttcgggatgcggaatacgaatcatcgtcttctttatcgaaagaaacttcctattgaggaaacgggttctttacttcgtatacggtgtgaagactgctgttcagaactgtctctggcttggcctcgtgctcgtcgcttggcatttcttgttcgacaagaaagtagaaagggaaacacaaagcgacgttcttcttctcgtatctaaaatattagtgtgtttcttgttgagcacggtcttatggctgatcaagacactggtggtgaaagttttagcatcttcgttccacgttagtacctactttgatcggattcaagaagctctgtttcatcattacttgatcgagacgttatctggacctccaatgcttgagttaagcaggattgaggaagaggaagatcggacgcaagatgagatctacaagatgcagaaaggagcagctgatttatcgcccgaactttgttccaaagagtttcctcaggaaaaaagtggaagtacaatgaacatgaagttctctccaatcattccgaagacgggtggtgataacggaatcacaatggatgatttacacaagatgaatcagaaaaacgtttcagcttggaacatgaagagactgatgaagattgtgagaaatgtttccctgactacgttggacgaacaagcgcttcaaaacacgtgtgaagatgaatccactcgacagatacggagcgaaaaagaagctaaagcagctgcaaggaagattttcaagaacgtagctcaacctggcacaaagtgagtatacaatttctctactttctttaaaaagatttctttcctaggacctaataaatccataatctgaatgtatataaatagacacatatacctggaggacttgatgagatttttgcgagtagacgaggcgatgaagacaatgtgtctcttcgaaggcgccttagtgaccaaaaagattactaaatcagccttgaagaactggctggtactacttcttgttcatagaaaatgttgattcttatgattatgtatatatgtcactaaagtattgattctgcttaattaggtaaatgctttcagagagagaagagcacttgccttaacactcaatgacaccaaaacagcagtgaacaaactccatcacatgattagttttctcactgccattgtcatcatagtcatatggctgatccttcttgaaatcgctacttccaagtatcttctctttttaacttcacaagttgtactcttagccttcatgtttgggaactctctcaagaccgtcttcgagtcaatcatcttcctcttcatcattcacccttacgatgttggtgatcggttactcatcgacactgtagaggtaactaaaaaaccaatatgtgtttgttttgagtctgtttactaaatcttatatataggctaatttaacaagatcaaaattgtagatggtggtggaggaaatgaacattctcacaacagtgttcttgagagctgacaatctgaagattgtgtatccaaatattcttctgtggcagaaagcaatccacaattacaaccgtagtccggatatgggagatgaagtcacatgctgtgtccacattactactcctcctgaaaagattgctgcaatcaaacagagaatatcaaggtaaacaatcatgcacttgtcctagtgtcttaagtttatatattatgacaggatgataacgatcgttttttttcgcgaaaaccgcagttacatcgacaacaagccagagtattggtatccaaaagctgatatcattgttaaggatgtggaagatttgaacattgtgaggatagcaatatggctatgtcataaaattaaccatcaaaacatgggagagagatttacaagaagagcgttgttgatcgaggaagtaatcaaaatcctcctcgaactcgacattcaataccggtttcatccacttgatatcaatgttaaaaccatgccaacagttgtctcgagcagagttccacctgcctggtcacaaaaccctgattcaag

SEQ ID NO: 191403 - DNA, 108 bp, Arabidopsis thaliana landsberg
atggtgttcacattggtttctgcagcgaaagattgggtagatgaaaacgtaaaagaagagataaaagaagaacctgaaattgatgccagtcaaattaatttggaagag

SEQ ID NO: 191404 - DNA, 427 bp, Arabidopsis thaliana landsberg
ctatgatcggcagtacagtcagccctttcgcttaagcaacagcggcgcctcggcggccccggcgtcaggcaaaattgttaacacgtcctatgcggcgtatctgcaggggacctacgagatcgtcgatgatctcaacttcacggccggcattcgctatacgatcgacaagcgtcgggtggactacgcatcgcggacagaaaaccgccgggtatattacgatgacctgggtctcacgttcgttccgagctgcaacatgaccgatgcaaataacgttcggttctcatacgacaattgcttcgtagatgtgcgcaaaacgtttagtgatccaacctggaacctcagtctggattatcgactgaacccaaacgtgctggtgtacttcacccagcggcgcgggtatcgctcgggaagcttcaataatcgcgcg

SEQ ID NO: 191405 - DNA, 193 bp, Arabidopsis thaliana landsberg
atggagactggtcagttcgagaggactttgattgttgctgaggaagggagttttgttgagtatttagaaggatgtactgctccttcttatgacacgaatcagcttcatgctgctgtggttgagctttattgcgggaaaggagctgagattaagtactctaccgtgcagaattggtatgctggggatgaacaag

SEQ ID NO: 191406 - DNA, 191 bp, Arabidopsis thaliana landsberg
aaccatcttcctcgagttctatgaggactttgttccttgtacgcgcacactaccggtgtttagtgccgacagcgcaccacggggtaacccacgtagagcttttggaaggacgacaacgtcgattgctactcgatgatatgtgtaggggaacgtcggaacacaggggatttatacaggttcgggttgcgcaa

SEQ ID NO: 191407 - DNA, 151 bp, Arabidopsis thaliana landsberg
gttttatgaagacgctttggaacttgatctatttgctttccgtctttttatttgtgattacataattttcctagcaatcgagacgagagccttgtgttacctaattcaaaagctaaactcaaaaccctacaaacaaaactttaaaccataa

SEQ ID NO: 191408 - DNA, 84 bp, Arabidopsis thaliana landsberg
atggaaggagtaaagaaagcaaaagaaagcgagtatcctaatgaaaatagtaatgcattcatcgaaacaagtagagaagttcat

SEQ ID NO: 191409 - DNA, 537 bp, Arabidopsis thaliana landsberg
atgaggaaaagtaacttctccagacagaatgttttcaacaaaattgaagttttgcaacttgagattcgtgatcaggtgatgatttctattctgcaggatcttccacaactgtgtctggaggatagactcttgagggaagaattgcagaacctagagtttgttccaactgtaaatggtcctcttaagcgcccatctgttttacacgatcctcgtaatgaagagttatatgctttgttggaagattcagattgtttccctgctagcggattccagggatctgctatcttggacatgcttcaaggtttgggccttaaaacaactgtttctcctgagacaatattggagagtgcacgattggtggagcgattgatgcacaaggatctggaaaaggcacattcacgaggtaaagtgcttttttcatttttagaagtcaatgctgtgaagtggctgcctgatcagtcgagtgaggatgatggagctataaacaggatattttcaagagctgcgacggctttcagaccacgaaatctgacgtga

SEQ ID NO: 191410 - DNA, 434 bp, Arabidopsis thaliana landsberg
aagccgccgctggttggcaagttcaatctgacgcacacggtcgcggacatccgtcgcttcgtcgacgcgtgagtggcagtggctgctgtcgcgtgctgctgtgctgaccgctgtcgtgtgtctccatcatgctcgtgtggattactctctgcctggtggcatcgcttcgcgccctcctcctcgccgtcttgctactgctcattgctgcttgcttcgcttgctgcacagtgcgcacccgctaccggcgggctacgcctacaagctgatcaacacgagcacgcgcccgcaaaaggagctgaccgatgactcggccacgatccagaaggctgggctgtcgaatgcggtgctggtgcaggagttggaccagctgcgtccgtcgtctgcagcgcccaaggcagcggtagctgcgtcgtctacaccggcttcgtctgccg

SEQ ID NO: 191411 - DNA, 66 bp, Arabidopsis thaliana landsberg
atgatcgaccgtaaaatcctgggcatccagcatctctacgggcgacctgtttatgcacgatccaag

SEQ ID NO: 191412 - DNA, 394 bp, Arabidopsis thaliana landsberg
ttcaaacacaacctttatctttttctcaagatccaagtatttttggttcatcctcctttttaccaaaaagggttgctatagaaagacaagccataaaaaggaagcaatcaacgggcaaagaaaaagaacatatcccaagcacctcaaagcctcaaactccacccgaaagaaatgacaaacaatttatggtggaacatgccaacccaatcactactttccttgagaaggttgcttatcaagaaagaaatcctaagcggcaaaccacgacaacaatgtctgaaaatataaaggatgaaccagccgaagaggtcttaatcccgcatttcatgatggccgaaccaactgtagaagaaaaggacatggagagcgatgatggcagaatctatgaagaaag

SEQ ID NO: 191413 - DNA, 237 bp, Arabidopsis thaliana landsberg
atgcgagctggccgtagcccaggtgcccggtcgggtcccaagttctcgggctggtatgttgatgctgtcaacggtttgctggagccgagtttgcgagagcagcccccgagcctccgcacagagcgagaggatgttcaaggacagactcggctttttccatatgcccctgcgtcgcctttctgcaaggagggggaaagcgccatgttccctcgaagggcgccgaacatggtgtcacca

SEQ ID NO: 191414 - DNA, 450 bp, Arabidopsis thaliana landsberg
atgcgccccgagaccactcagctcgagcgtctggtggaagggctgcggggcatgttcctgccgttggccgagcacaaggggctggcgttcgaggtcacggtcgatcgccaggtgccggccactttgttcaccgatcgccagcgcctggagcaaattctcaagaacctgctgtcgaatgccatcaagttcaccgagcgcgggcaggttagcctgagcatcagccatgagcctgccaacggtatcgtgttcgccgtgcgcgacagcggcatcggcatcgctcccgaccagcaacaggccatcttcggtgccttccaccaggtcgatggcaccagcaaccgtcgttatggcggcacgggcctgggcctgtcgatttcccgcgatctggcccatttgctgggtggccagatcagtgtgcagagtgcgctgggccaaggcagcgtgttcagcctg

SEQ ID NO: 191415 - DNA, 43 bp, Arabidopsis thaliana landsberg
ataccctatccggtgaacgatgtcggccatacgggtaaagaga

SEQ ID NO: 191416 - DNA, 237 bp, Arabidopsis thaliana landsberg
atgcatcttgtgaagaaagcacatcaaacaccagtgaaacgtcaaagcgataaacctcttgtagaaaagtaagacgacctcaaccatcctttaaattctcactacagacacaagtttttattttcacctcttcttattttcacacaaggggtaacgcggtgatgagatcagcggctagaaagaacgctagcgaacaaattgagcttgtgatggacacagatgtaaatgcaagtgctg

SEQ ID NO: 191417 - DNA, 103 bp, Arabidopsis thaliana landsberg
gagaccgggtctgcaactacccgcgcgcaaaaggtggcatcagcagcggtgaagatcgcgatggcggcggcgttcgttacggggaagatgaccgagctgacgg

SEQ ID NO: 191418 - DNA, 588 bp, Arabidopsis thaliana landsberg
  unsure (1)..(588): unsure at all n locations
atgcttctggtaaccgccagcaatgggaatttccaaaacaaagatgttgaagaaggctgggaattggttgagaacctagctcaatcagatggtaattcaacgaagactgcgacaggaccatcagaggcaccgaatcagaagctggacaggattctttttagcgagcagaagcatgtgcactttcttattgatgacgagcagtatcaagtccaagatggagagggtaaccagttagaagaggccaagtacatcaccaacaactagagtagttacaaagggtacaggaagttcaaaagaangaaggccaacctctcctaccgcagcaccaacggttctaatcctcaggatcaggtgtatcctccacagcaacaacaaggtcagaacaaaccttttgttccctaaaaccaaggtttcgttcccaagcagcaatttcaggggaactactagcaaccaccaccacctgggtttgcacctcagcaaaaccaaggtcctgctgctcttaatgctgaaatgaaacagatggtccaacaactactacatggacaagcatctagctccatggaaattgctaagaagttatccgaatag

SEQ ID NO: 191419 - DNA, 180 bp, Arabidopsis thaliana landsberg
gtgcagctctttgacgagacgcctgtacgtgctgaccagcgtacgattattcgtgaaggtcgccagcagatcgtgaaattcgacattcaacggatagtaggcctcgacgttgcgggcatccgccgattccttcatcgtttcgacccacccccgtcagttgctccagctgttccgaaatga

SEQ ID NO: 191420 - DNA, 306 bp, Arabidopsis thaliana landsberg
atgccaacgccaccaagtagaaagtcggtgagaggagattatttcatggtctactaaatcctaattgaagcattcctctcatcgcttataattcataggtgcacttaccgcgcaatataatctaaacaaaacgaagctttcgcaacccccaaaataagcataattaattttatggtaaataagtagaattaattttaccgtgaagctttcgcaaccctcaaaatatatgagactcttgacgggcttctgttcccttagatcctcaataaccgcatcacatctgaacgattcgcaagtggagagaag

SEQ ID NO: 191421 - DNA, 294 bp, Arabidopsis thaliana landsberg
gcctacgccaatagccgaacgagcagctcagagcgttttgatatcatgctgctaatcgccctgatgcttcaactaacatgttggcttgcgggcgttcatgctcagaaacaaggttgggacaagcacttccaggctaacacagtcagaaatcgaaacgtactctcaacagttcgcttaggcatggaagttttgcggcattctggctacacaataacaagggaagacttactcgtggctgcaaccctactagctcaaaatttattcacacatggttacgctttggggaaattatga

SEQ ID NO: 191422 - DNA, 264 bp, Arabidopsis thaliana landsberg
atggagagcctggaagaaagagtgtttatgttcatggatgaacaatattatttttccaattccaatgaatcagagctgcatatgcatcatcatccctctgtgtctgtggagaacatatcgtgggaaaacaacaccgacttcgatgactcacccgagagaactttgtattggaaatctcagatcgcactgcttcaggaaattttagagcgataccatttaagtggatcaaaattgagacgagaggttggtcgaatcataaaagag

SEQ ID NO: 191423 - DNA, 255 bp, Arabidopsis thaliana landsberg
cgaaagcggagttcggacaatggtgtgtagccgatggacagataccagataatgtgatacaagcagccgtagactgggcttgtcaaacaggtggagcagactgcagtacgattcagcctaaccagccttgcttcttgcccaacactgtcaaggaccatgcctctgttgtcttcaataactattaccagcgttataagcgcaacggcggttcctgtaacttcaacagcactgcatttatcacacaaaccgacccta

SEQ ID NO: 191424 - DNA, 2026 bp, Arabidopsis thaliana landsberg
atggctatcacctactcctccgccgacgagctcggaaacaccactgagggttttctggaaatccgagaaaatacctccggtggatggaaatcagcgaggctcatcatcggtaaataaacatgatatttacttttttagcaacaaaaaaattgatttagttccttacttcattattatttctgccgggaattttgctaatttctctttgtttttgtttctaaaaattttgtagttgtacaaatggcggagcgattcgcttactttggtatagcgtcaaacctaataatgtacttgacgggaccgttaggtgagtcaacagctgcagcggcagcgaatgtcaatgcttggactggaacggtggcgtttctgccgcttctcgggggctttctcgctgactcgtatctcggtcgtttccgtactataatcatctcatcttctctctatatcttggtagataaaaaaatttcctctctaacgtttctataatcagagtttcgttacagattttgatgattaacgaaaacaaaacaaacagggacttgggttgctgtctttttcaaccatgattccttctcatcagtccaaagattcgaatcagctgcaagagactatcttcttcttctctctttatcttgtagcaataggacaaggcggttacaacccgtgtattaaggtatttggagcggatcaattcgatggaaatgatcataaagaggcaagagacaagagttcattcttcaactggttgatgtttggaaactgtattagcatattgacgactcgtttggtctctacctacattcaagagaacctaagctggtcactagggtttggtattcctagtgtttccatgttgctttctctgtttctcttcctccttggaactacctcttaccgttttagtactgagagagtaggaaagaaaaacccttttgccagaatcagtcgtgtattcatggaggctttaaagaacagaagacaacccgatttagatattgctaacgcgaacgccaacgagactctccttctcctggctcaccagagttccaaacagttcaggtaacataattaacagcgatgttcttttgagaatcttcttgttcataccatcttggtttctattagtgaatccacgtcgatatattagagaagaaatgtatattgttccatctaggtttttatatataccaactgatatttagatgaaaaattattataagaaaacgaagtttatagtttcttttcttgtatactatgcagattcctagacagggcagctatttcttgtgaattggctgaaattgaagaagcaaaggcggttcttaggcttattcccatatggataacttctgtagtctacaccattgtacatgcacaatcccctactttttttacaaagcaaggagccacaatggacaggtcaatctcaccaggactcttagttcctgcagctacacttcaaagtttcataaacctctcagtagtcgttttcatcccaatctacgaccgcttactcgtcccattcgcaaggtccttcactcaaaactcatcaggtatcacaacgctacaaaggattggtacagggattttcctctccattcttgctatggtattagccgcattggtcgagacaaaaaggctccaagccgcccgggatgaactctccataccgatgagcgtgtggtggctgattccacagtatgttatctttggagtctcagatatgttcacaatggtgggtttacaagagttcttctacggccaagtccctagtgagcttaggagcgttggtatggctttgaacctaagcatatacggggcgggaaactacctaagcagctttatgatatcagtcattgataaaatcacgaaccagtatggtcaaaggagctggttcgataatgacttggaccaagctcatctagattacttctactggctactggcttgtctcggcttcattggtttcgccttctacttatggttcgccaagtcatatgtctacagcagatcaaacaccttttaa

SEQ ID NO: 191425 - DNA, 113 bp, Arabidopsis thaliana landsberg
atcttaacatcacgaacgacaccatcggcaccgtgtggtacacgaagagaagtatcacgcacttcacgagacttgtctccaaagatagcgtgcaagagacgttcttcagctga

SEQ ID NO: 191426 - DNA, 180 bp, Arabidopsis thaliana landsberg
tgagaaacttggacgagctacgctaaactacccaacctatgacaaggagttgtatgccttgttccgagctctccaaacgtggcaacactacttatggcctaaagagttcgtcattcacactgatcatgagtcgctaaaacacttgaagggccagcagaaacttaacaagagacatgcgag

SEQ ID NO: 191427 - DNA, 120 bp, Arabidopsis thaliana landsberg
aggaagatgaagaagacgaaggagcaggagaatcagggttttggagtgatgcgatataatttatacaacgtgacgtcgggattcgaggaggctacgggtaaaagacgatattgggcttag

SEQ ID NO: 191428 - DNA, 150 bp, Arabidopsis thaliana landsberg
atgactgtcaggtctccgaacaatactaactgtgatgaggatgagatgaacatgcatgcaccacaatcattcaataccatagccaaggtgttagagctgatgatggttcctaaatgtactgtctccccccaggcgcatcgtcctgtaatg

SEQ ID NO: 191429 - DNA, 526 bp, Arabidopsis thaliana landsberg
aagaggaagttgtcggacatgttaggtcctcagtggagcaaggaagagttagagcgcttttatgaaggataccgcaaattcggaaaagaatggaaaaaggttagttcaattagcaaaatagacattatttacgatttggtatatgatttgtagtaaaacattacattattccaaaagaagggtaataaattgctgccatagtttccgccaaatgttatgggtatgggaatgtcatttttataatcactttggtttgcagaaccagcaatatttatggtgttttttcatctatggttgtaggttgctggatttgtacatagccgttctgcagaaatggtagaggccttatacactatgaataaggtcagcatgttctcctccttccttgatttgtattgtgatctttgtctaaacattttccacttatattatgccatctgtactttaggcttacttgtctcttccggaaggcactgcatctgtggttggcctaactgcaatgatgacggatcactactctgttctg

SEQ ID NO: 191430 - DNA, 187 bp, Arabidopsis thaliana landsberg
aggcgagtggacgagtggtcaccttccttcaaagacgacaagacgtggagacaaggtgacaagacgtggagacaagcaagaagcagtcagcggatgtgggcctgcggtctacgctggcactggtctggccatctgcgtgactgtggacagccgttgcaaacaatttgcaaaaaaacagcggctctag

SEQ ID NO: 191431 - DNA, 513 bp, Arabidopsis thaliana landsberg
  unsure (1)..(513): unsure at all n locations
atgctcgagctgcgtatccgcgcctgccacgtcaccggctcgttcgccgccagcaccaaccgcaagggcgtcaattccggcatcgaccgcatcaagactccggcgaagttcaactacagccggctggcgcacccgnnnnnnnnnnnnnnnnnnnnnnnnnnnnnnnnnnnggagcggctgccggcggcgcgcgccttcatccgcgagcaccagctcaacgaaacgatcgacggcgacgtgaacgacgtcggtatcatcgtcatgggcggcctcaccagcagcgtcctgcgggcgatggagcggctcggtcttgccgacgtgttcggcacctcgaaactgccgatgctggtgctgaacgtggtctatccgctggtgcccgagcagattcgtgagttctgcgcgggcaagcgcgccgtgttgatcgtcgaggaaggctatcccgactacatcgagcaggcggtcaacctcgccctgcgccgcgccgacatccagacccgcgaaataaacaaggac

SEQ ID NO: 191432 - DNA, 492 bp, Arabidopsis thaliana landsberg
atggatactttccggcaaggtagatgtttgaggatgtcagatttgaaatgtttggtggatctgaaattgaaggtgaaagaaatattcaaaatggagaaacgtacggtttttgtggagcttagctacatgtttgaggacaaattggcagtgttgagagggatagaggaaggtccaacccagattaaagacgattggcaattcaggtttttcaaatctctaagcttaggagacaaatctgtgaacctatttgtctgcttcagagagacagatgggactattgtcggacgggaggaagagatgttagggagtttgcagagttgtgatgatagtaggttagaaagaggatcttcgtcgagagggtttggggaggttgggtactttggaggcctaatgtgtgcagttgtcgagagagcgaagacagtagatgaggacaaaggcagaggtagcaaaaggactgtttcagatatttgggaaataaatgatgaagattta

SEQ ID NO: 191433 - DNA, 241 bp, Arabidopsis thaliana landsberg
atggaggtagatgcttgtccctgtagcagttgttgtagtatttgtttcatgtcagcatcaggagcagcatgaccttggtgttgttgaggtgcaaatccaggtggtggttgctgctagtagttcccttgaaattgttgtttggaaacaaaatcttggttgtaaggaacaaaagtttgttctaaccttgttgttgttgtggtggatacacttgatcctgtggattaacaacgttggatctacg

SEQ ID NO: 191434 - DNA, 627 bp, Arabidopsis thaliana landsberg
atgcacgtgagattgacgcacgtggtctgaatttaagagctaaagaagtaagtagatttggagatcatattatgatattacgagttactttcttttgatcatcataaaacataaaccggttctaagtcgtacaaagaggatgaatgggtcgcggactcgtgtggacagatattgggcacatgcgtttgggtcacccagggttcctagttcgatcgtgaagttttgatgtcgaacacatcaacacagtatattttggaagtacataaccaataatatcagcacacattgttgataattgataaatccaaattagctatgtaatttgtaactaatgggatatttttttatctattgcattggaaaatcacaacatcagtgatgtacaatccgttaccatagctactagtacatcttccattaaagttttatttatcgacatatttagtttttttccttatatattgttcccacctttgcggaaccataataagtggacctcgtcaatgctccaaggtccttgagagggagaccaatccagccttcccatcagttcaagaaatgcggtggtcggtggaaaatgttgagtgtcgtggcaaccatggacacggccgtgtcatcaccccttaa

SEQ ID NO: 191435 - DNA, 159 bp, Arabidopsis thaliana landsberg
actaaggctaagagagcggttgctgctatgatttcaagatctaaagaagatggtgagaccaccaactcagatctgacagaggaagaaacagtcatcaaactgcagaatgaacttttgtcctcttctcactggtggacagttaaaagtctatcagcttaa

SEQ ID NO: 191436 - DNA, 180 bp, Arabidopsis thaliana landsberg
aataaatacgaagatactttcacgttcgaattaacggacctgaatgaagcaatcgtcggaagactccagcccagcatcgcagtcttatattcgctgattcaaacaccgggaagtgtcgtcgagttatgtcgcaggagctttacgatgtcgtttcatacgactaaacattttttttattct

SEQ ID NO: 191437 - DNA, 297 bp, Arabidopsis thaliana landsberg
atgagtcgcgaagaggcttggctgcgtaagaaaaagaaacgcccactggatctccttcctcgcagcaagagtgtcacgaatgatgatatcgaggagcttaaaggctgtttcgagcttggttttgggtttgaaacagaatctcctgatttgaatccaaggctctcccatacaatccccgctcttgatctgtactgcgcgttcatagacaatacagcaaccatttgtctcggacgtcttcattcgcgtcggatcatgaagtcagcaactccaacaacatcacgaccatcgtcgacaaag

SEQ ID NO: 191438 - DNA, 220 bp, Arabidopsis thaliana landsberg
atggattgcgaaaccctaattgaatcggcgatcaggattctgaacacatcagacccgcacgaaaaagcacgacttggcgattcgatagccgtgaaatggcttcaaggtgcaatcgccgaaccctacgatcccaccgtcgacttccccgtcccggacagaccggctcgacttccggtgaaactggtgtctccaagtttgatgccgaagctgggaagagctg

SEQ ID NO: 191439 - DNA, 341 bp, Arabidopsis thaliana landsberg
atgggtgcactggtggaggcgatcaactcaggcgagatattccgttatatcaagaaaccctgggacgacctggagctcaaaaccgctatccagaacgcttacgaagtatatgagacccggctggcgctgaagaacaagatcagggaactggaaaggaccaatgacgaactgaaccgtttcgtatatagtacctcccatgacctgcgctcacctcttgcaaacatcctcggtatcctgaatgtggccaagctgcaatccccctcggaagaccccacaggtttttacgatatgatcgagggatgcgtgaacaagatggatatgttcatccacaagatcatcga

SEQ ID NO: 191440 - DNA, 33 bp, Arabidopsis thaliana landsberg
atgggaaatggaggaattgtgaatgaagtgtcg

SEQ ID NO: 191441 - DNA, 332 bp, Arabidopsis thaliana landsberg
atgtccagcgagtttgccgtacctcacatcacattgagttccgcgtaccgtcaagcccagcgggccactgcggcgtggctggaactggacgacgcggcgcgaccggcgcgttttgccctgccggccgtctggtccgcactggacgccgtcgagcacggtcgcctggcgcgctggctggcatggcagcacgtggcggccgacacccagggcaaccaccggttggccgcgcgcatcgagcgcctggacagcacgctggacggcgtcatgtcacgcgccctgagccaattgcccggccagcgcacgagcctgcggcgccacctgcgggccagtgc

SEQ ID NO: 191442 - DNA, 76 bp, Arabidopsis thaliana landsberg
atgcctgagatttacttgccgaagcaacagaagctgcagggtggttacccacatactctgggatataaggcgagtg

SEQ ID NO: 191443 - DNA, 935 bp, Arabidopsis thaliana landsberg
atggttagggagcctggtgatcctgcgcctaatacagttgaatacagacatggtctaactcctccaatgaaggatgctcgaaagaggagatttcgtcgagagcctgaccttaatgtaattttcatttgttgttatctatccatcaacattgtttcactaatacttgtgattatgattgaaagtctgtagtgaaacgtatcttttggaactccaaagttctttctattaagttaacatattgatttgccaaaatgttgcagccggagcttgtacagcgggttgagagagacttgttgaatatattgagtggcggaacggtagaaaatgtaagcttttctttctattttcgacacatgatgtgtctatatttgctccttggatttagtaacttcatttatttgaactttttttggtgtaggtacatgagcaagaggaaccagctacgaacgagaatgctagtaatgcaagtaagaaagtatcttcttcttcacctacacctgttgaaaagcctgaagctcctgagacaggcactagtaatccaacaggagttgaaccggagagaagtgaatcagaagattctgatgattcaatgtgagtttattattatataaagagatttttcttacgaaagcttagagtttgcgcaagtcctgtcttagaaaatcatggataattatgtccccatgatttgatgatgtcttgttcgacctttttcaatggaaaagttgttttgcgttcaaactacaccaaagattctgtttattctagttcaattacggttatttcttgaagacagtttcaggaatgaaccaaagattgatagtaaaagaaaaaccttagacttaaagaacaagaaccaagacattgttgatgctaaacctatcaaaagctggaatctaatccaaacaccaaccatcgccttcattaaactttaa

SEQ ID NO: 191444 - DNA, 640 bp, Arabidopsis thaliana landsberg
atgcctgcttttgaccaggtatattgtaactttctcaccttttcgtttaggtgtttgaccgtagttttgtatgtgcatgatctctttgtattcccttgggcatattaagaatagactagttaatggtatcgagggcatgaagtcacatctgaattactgaacgtggagcaactctttttgttcatacatgatattgccacttgtctgtcttgttgtttcattttggtaaaatctatattactccatgggtgagcataatattttgccaaatccacttttactagctgccagaggagaggaagcttaatttactcagagctcttgctgagatgtccccatacacaacagctcaggtagcacgtcagatacttccatcaatagttcagctcttaaaggtacctcttacgaaccaaattctcatcttgtcttcatatcttatattaagaatttatggacatacatattatttactgttatcatttctctggtgtatattcttattttgaacgtaaacactgtaactgttacgatttgctctcagaagtacatgcctgctaggaaaactggggaagaaatgaacttcacatatgtcgagtgcctgttatacgtgctacatcatttggcgcacaaggttgtctaa

SEQ ID NO: 191445 - DNA, 593 bp, Arabidopsis thaliana landsberg
atgttcacggtcccaagaaacgccggtaagtccctttttctttatattgcaatttgtttgcttgtggctttcaagagttaatcctggttgtttctttggcttgtatcgccatccaaacgggaatcagacagaaacaaagtatagttctgtgatttctcgattgttaattggattttttgtttttggttttaatgtgaaattggattttaagttgaacaaatgcaacatcaccattgtataaacatgatgatctccacagtttatgaaggttttttgcacgtatatatatagagaaaatctttcaagagtttttacgtttgtctcactaatttcgtcttccattctctcgtctttaaagacataaacatttatgtgattacaacctagttccatcaatcgtcagaaaactttcatgtaaaaaaaaaaaaaaaaacatttggtgaaaacttactaataactcttttcctaacaaaaataacttctctaagaaaaacaaaaattacagaattttggtgaaaagaaatttgtgtatcgtttcaatgtaaagcatgacttatccagtcatccttcacacagttttgatggttatgtgt

SEQ ID NO: 191446 - DNA, 355 bp, Arabidopsis thaliana landsberg
acgcaatctggtcacgcatgaattgacgagaacattcacacttggcatccgatggtctttcgacaaccgaacactcggtagtattattctcaccagaaacgtgatccgccaaagtctcgttcggaccgtcaatcccttgcgggatatgggtccagcagaactctgccgcccacgtttctctttcttcaatcttcagttttcaaagaacagacatcgcagacgcggtgtcgtggcccggttcgcttttggcttagggcctgtcgagtgtcgctcacgcggctctcatgatttcgtccaacttcgcgaaactcagaggcgaacctctttgtcgccagcagcgtcgccgccgtcgttg

SEQ ID NO: 191447 - DNA, 138 bp, Arabidopsis thaliana landsberg
atgttagaacgtgaagaagaagtggaagtcaccgaagaaaggacaccaccaccctcggattctcaagcaggcaactgcttctactttgatatttgtggatccgagccagactcaccccgtgaacgaaggcaagccccg

SEQ ID NO: 191448 - DNA, 107 bp, Arabidopsis thaliana landsberg
tcttgtggactctctttttcgataaagcagtattaaggacttgcttttgtgaaatccaagctttgtttggtccggagaaagtgagcaacacggttcgaacaaagtga

SEQ ID NO: 191449 - DNA, 390 bp, Arabidopsis thaliana landsberg
ggccaccaaacagtttcacactcagccagcaacacctaccttgttccatatgattataacaatgttgatattggtctcctacctgatgctagaaaacgatctttcggattgcctttatcgagtacaaattgtgctagacggtcacagactccttgggctcaaagttcatctgagaactcttgttctgaattgtctttcgtcaaccccagcgagcaactaacgtccttctatgggtcaaggttatcttcgtccataaacgttggaactacaaataagcgggtagcacccgtagaggagtatccaatgaagaaccataaagtccccaagttgctgccaatgcaaggtggcttaaattatgttaaagaatttctttgcaggccagcaaattag

SEQ ID NO: 191450 - DNA, 77 bp, Arabidopsis thaliana landsberg
tgttacaatggcgtcttcttgagcgtcaacaagacaaagggtttggtaaacagaaaacgacccaaggacaaatgaaa

SEQ ID NO: 191451 - DNA, 591 bp, Arabidopsis thaliana landsberg
atggaggattcgagctctatcgattcgattttggaatttttgcggaagaatcattttatgagagctgaagctgcgttgattagtgagctttctaagaaaccaagttcaaatgggtctcttcaaaagcttaactttgaggataattgtgtgagcaagttgttggataagaagaagcaaggcgggagtagccaagcattgggtcttcacaacgatagtcacatttctgatgaattggttgtgaaagagatacaatgtggagctgccaataacttacacgagagtaatcttatgaatgatgtttctgttcagacacaaagtggtaatgcagatttttgggaggagagattcacgtttgctgaaggatttgaggataccgagctcgatttacctccctggaaccatacctctactgatattgtagctgactctgaggaatacagtatcaatccaagtaaaagaggctttgtgaatccacggagttcaaagcaatcaagtcatgaaaaggttcctgaacctggtaaaagcaataaagtggttgtggaagacgtcttctcttcttttgagaagatacggactggaagctctagccag

SEQ ID NO: 191452 - DNA, 665 bp, Arabidopsis thaliana landsberg
ggtcggattcaagaataagattgtgggatattgaatctgcacgcaacaccctggtgaactttgaaactggacgcatccagactaacaaaggaatccaattagatacaagcgatgatccagctctggtatttgttccatgcatgaagactgtgaaggtagtcaccaacttactattgtatcagcatatcttctcattccattacctggattatttaatgaattgtgctgcaactgtatataaggcttttggcatgtggtcgggtagaacaacactgatgcttcgtggacactacgaaagcgtgaacacttgctgctttaattccaatgatcaggtatgacttaatccttataacctttccacgagtcattggactttgtaggtttgcaaagtttgcttgaacacacctctaaatccgagttacttgtcatacttgctcataggaactatacacaagtggctcagatagacaaatacttgtgtggtcaccaggcggaacagtggaagatgaaatggtcagaactcagaaccatattctattactacttcaaattctcatacatcaattgttacacgagtcttcttgtttatgtcattttgatcaaaatttgactatttgcaggtgcaagatgaagtagccgaagataaagacaattggagcgactga

SEQ ID NO: 191453 - DNA, 162 bp, Arabidopsis thaliana landsberg
gtatttgcattagagcgatttactatctttcaacaactatttccatccagttttcctttaatggttgagtgggcaaagatatataaaccgtataccaaaaattgtgccaacagaagtgggggacactatcaagagatgcttgtagacatgaaggaagatgag

SEQ ID NO: 191454 - DNA, 604 bp, Arabidopsis thaliana landsberg
atggagagaagaagaacggcattggtattgtttgtggtagtggtggtgttgacgtggcaagagggtgtattggggaaatggttagagtcgacggcgaaggaaaagaccggttcatgggctggttgggtctccgacaaaatcaccacgtaagtgatatctaatatccgaaactgaaacacacctgtggttgaatctgtcctttacgtaaccatcacgttgatccaattcagtctataatttctctcatttggatgttaagtacgtgtttagtgagattagtaatgtcttattgcgttttttattggaatctttagattcgttcactacattggatatttacgcatgtatttggccgtagttaagtgagtgattgagaggtaacgttttacttcttttcccagtggatttggtactaagaaagaagaaacaggaatttatcaaaaatctaaagatgaagcaagaaaagcggctcaagccgcggaaaactatgcttatgacaaggcaaattacgtcaaggactctgcttacgacaatgcaggttacgccaaggattttgctgagaacaaggcagagtacgcaaaggatttcgcttatgacaagggtg

SEQ ID NO: 191455 - DNA, 379 bp, Arabidopsis thaliana landsberg
atgtcgatacatatttgcaagaacggttatatgctaggctatgaggtgtgggtgcaccacggtgaggatccatctcctcgtattgtatcggaagttcagtcacatgaagaggaggactacgataggatggaagagatgcttgacgatgtacgccatgagcttctaaccgtcaattcggagaaccccggtcaacccaccgagtttgaggatccagctacacctaaggttcagaagttcttcgagctccttaaagctgccgaagagccgttgcatgagcacacaaaagtgactgtccttgtatttgtgacacgacttatggctattaagtctaagtttgcattctcaaacaactgctacaacgcagcttccaacttgatca

SEQ ID NO: 191456 - DNA, 421 bp, Arabidopsis thaliana landsberg
atgtccgaggccatctcggcgttctgccggacctttggcctcggcgacgttccctcgggcagctccccctatagtcgcctgtgggccttggctggccacgtgcgcagagactccgtggggcgctgcaccacgacgttagggggccttcgcgtcctcgcttcccactatgacgtggacttggagtgggtcagcgaggggtactgcatacccgacgaagaggaggccgcccgtagccgaggtccgaagcttgacgcggctgccgatgggccacgcgcttacattggcttccgtcttcgatgtggagatctgttcgcctgcgtcgccagtccgaagtcgggccatattccgccgctggcgggcatgatgccgatggtgctgctcttcagcctgcgacacctgagcctgtcgggaaaagtatgtt

SEQ ID NO: 191457 - DNA, 391 bp, Arabidopsis thaliana landsberg
ccgggcctgaaggactccgacgggtcaccggtcaaggtcgaagacttcgcctacgcgatcaagcgctccttcgccaaggacagtgtcggcgccaacggcaccggctaccaggtggagtacctcaagggtggcgacaagtacaagggcccctacaagcagccggacgcaaacttcgcgggtgtgagcacccagggcgacaacacgctgatcttccacctgaccaagaaggtgccgtcggtcaactacttcaccagctttccggagttcagcccggtgccgaagtccgctgacacgaaggccgcctaccagaagaagccgttgaccaccggcccctacaagatcgacagctacaccatcggccagaagatcatgttgtcgcgcaacaccggct

SEQ ID NO: 191458 - DNA, 55 bp, Arabidopsis thaliana landsberg
atgaattgcaaagttggttgtgttactcatcgttgtgtttctactgaaaatctta

SEQ ID NO: 191459 - DNA, 29 bp, Arabidopsis thaliana landsberg
tagcctttgttgctggcacagcgacttaa

SEQ ID NO: 191460 - DNA, 87 bp, Arabidopsis thaliana landsberg
atgaagaagaagaatcaaacggtgtcgttttggctgaggcttattttgctcactgtggatttggtgagagattgtgggagaagaaag

SEQ ID NO: 191461 - DNA, 407 bp, Arabidopsis thaliana landsberg
atgatatcgcaaaaggatttgcgaattgaatgcagtgagaagtagagtaggagttagtggttgaagtaagttaatgcaaagattaaagtagataattaagtgttgctatataatagaccgtaatgttggttatgtttgatcatcgggcagtgcactctgcaaataaacaaacatacttcaaaaaaatatggggcgtctcgttagtggtgctactcttttggctttgttatgtttccatgtttttgtggtgaatgttgtagcgagagatgtgagctcgggaagagatgaggatgagaagacgttagttggaggaggaaagggtggtggctttggcggtggatttggaggaggagccggtggtggagttggaggaggagccggtggtggctttggaggaggagcaggcg

SEQ ID NO: 191462 - DNA, 601 bp, Arabidopsis thaliana landsberg
gctcttgttgctgctgagaatttgagcaagaaggctaaagaagagaatcataaggttagggatatactaaaacaagcgattaacgaagctaatgttgcgaaagaagcagctgggattgcgagagctgagaattcgaatttgaaggatgccttgttggataaggaagaggaactgcagtttgctttgaaggagattgagagagtgaaggttaatgaagctgtggctaatgacaatgttaagaagttgaagaagatgctgtctgaaatagaggtagctatggaggaagagaaacagagaagcttaaacagacaagagttgatgccaaaggaagttgtagaagttgttgagaagaagattgaggagaaggagaagaaggaagagaagaaagaaaacaagaaggagaagaaagagagcaagaaggagaagaaagaacatagcgagaagaaagaagacaaggagaagaaagagcagacacatcagaacttcgataagaggatgattgggaaaacttgtagtttcagtatcatgaagctagctcatcacaatcacaaccacaagcacaacaaagaaacatcagaggaagagacaaaaaacgcaaacg

SEQ ID NO: 191463 - DNA, 648 bp, Arabidopsis thaliana landsberg
atgaccagaaataggtacgtggaaaactaacacgttcaaggcagctgatcagttggtcaaatctagcccgacctttgatcaattattgtctaaatatgtgaaatgaaggctggccccagcgaccgcccaccaaaccgaccttgcttgcccacccaggagcgacagatagttaggccaattggaccacctcaccaatcggaaaggacgagaggtcataatgttcaattaagacctaacgcacctgcgtggacacctccacctccacatacacccatgtcatgtcattatacatacataccaccttaccatatatcccgaattagatgtggggcgcgcaccatatccattcgggataccacaataccccgcctgggggcacctcaatcatcttttttgacaggttgacacctccagtacaagaccgattgagatcccctcaatctggtccacgagcacaggcccagcaagattgccgaacaacttggctccaaaggctgactaatccggcaggggggcatacagctacaacctccaacagtacaataaaaggagacgtcattaaaataggaacgacagatgtcgtcatacaacaaaataacgaagggccgatgatttttggtgaatcggccaacacaaacaaaaaagaag

SEQ ID NO: 191464 - DNA, 172 bp, Arabidopsis thaliana landsberg
cgccatgacggtagccaatctaaggaatgcaacattaaacctattctgggtggccagcctagagcatcgactagctttgagtataaagaataaagactacaccccggaacttttgaccacaacactgaccccgctctttggggaatctaacatgcctaccagatcaacgtag

SEQ ID NO: 191465 - DNA, 349 bp, Arabidopsis thaliana landsberg
  unsure (1)..(349): unsure at all n locations
atgggcggcatcgcggnnnnnnnnnnnnnnnnnnnnnnnnnnnnnnccggctgtgacgccaatgtctatccgcccatgagtacccagctggaagcacaaggcatagaactgattgaaggctttgaccctggccagacctccctgaatcctgatatgtatgcgatcggcaatgtggtcacgcgtggcaatccgctgatggaagaaatcctcaatcgcggcctgccgtatatttcggggccgcaatggctggccgaacatgtattgcaaggcaaatgggtgctggcagtggcgggcacgcatggcaagaccaccactttttccatgctggcctgggtgctggaatatgccg

SEQ ID NO: 191466 - DNA, 859 bp, Arabidopsis thaliana landsberg
gtcatttctgaattcagtttttgagctattgttgagagtttgggcagtttcccgagatcataaggtgagtccctgatctcttttagcattatactccactttacgttttaatagtattgcgcgtttcagtttaaaaatattattcaagagattaccaaggtaagaacatggttcgtaaatgttcacagactattattttataacaaagacaatgaagaaagatggtatgtaactttattaagataaaaataagaaatgaaagtttgttttcgggtttttctttcctcttcccccagtaatgtatctttgaaattcataatatggagagatacatctctagaagatattgctagttagttattcacttgctctccagacatgtctcgtgactttaaagtgtgcctcttctgctgaataaggtacgagtatcaactgtagacgctctgggtcaaatggtcggtcttatcacgcggacacaactgaaatcagcattaccaaggcttattccagcaatacttgaactgtaagttctattttttattctatgtttcgttctactcaagctttacttctcaaaggcccagcgaatagtatattcgttgtctgcttcatatattactccacaaataaagctttgctacgttagaaagaagtatgtacaaagacatgagatgcttttcgtgtaaatttgtcttctttttttttttaattctaattgtagtgatcattcattcctttcatttcaatttttaggtataagaaagatcatgatgatgctcttttggcgacatgtagtcttcacaaccttttaaatgcctcgttactttctgagtctggtcctccactgcttgattttgag

SEQ ID NO: 191467 - DNA, 662 bp, Arabidopsis thaliana landsberg
atgacaccttctaatgagaaagtccacgccaaaacatttgaaggatgtaatgagttgactgacgtgaattcagagttctgtaggatcaaagaggatggacaaggacgagaaaggtataggactactgagttgtcattctaaggtgacttttgtttaatgtggtctgtaggatagattcaagtcacaatcactgataataggagagttcctgcgattttcaaacctctccaccagatttgttcttttgtttgcttgaggacaagcaaagtctaagtctgggcgagttgataacacgacttttttgcctgttttagctattgttttcttatgtttcagagagcatttagtgccattccagagccaataagaggagaaacacgtattttaggtgccaagaaggttttgagaattttgaagctaaaagtatcaaaaggcgatcattctagttcttcggaagtttagcctgcggtcgaggtcttgccaaaaccggcatgagggtatctcggtggcattcgaaagctagaagagtcaagattcacgttgaagtcaaatcaaagcaatttatgaagtcgtttggaagatatgacccgaagagtgaagacatgtcaagaattggctgtttggaaataatgtccaaaacacatccggctgatgagacttga

SEQ ID NO: 191468 - DNA, 344 bp, Arabidopsis thaliana landsberg
ggaatctagagaacgccgtgaacttcttcgcgtatctggaaaatgggatattgatccgagaactttatgctctgttcttcagctctgtgctgattcgaaatctctcaaagatggtaaagaagttgataactttattcgtggtaatgggtttgtgatagattcgaatttgggatcgaaactctctcttatgtatacaaattgtggagatttgaaagaagcaagtagagtgttcgatgaggttaagatcgagaaagcattgttctggaatattttgatgaatgagcttgcaaaatctggtgactttagtgggagtattggattgtttaagaagatgatgagttctg

SEQ ID NO: 191469 - DNA, 268 bp, Arabidopsis thaliana landsberg
atgtaaagctgactacatcgttggaactaccaggtacatccaggtcggcgtccgggctccagccctctggatagtacgcctgcgctatgataacttcagggagttgggatcgatcagcgctgagcacgccgagcggctgggacgacgaaagctgaaaccgaacaaaagcgcctggaacgggaactctgccagtagcgtcaggggcgctcgcaaaagcctgcccacgaagctttgtgaccacactgtccgagtcagtgtcacggcatga

SEQ ID NO: 191470 - DNA, 29 bp, Arabidopsis thaliana landsberg
tatcaaaagcaacgttagatgctaaataa

SEQ ID NO: 191471 - DNA, 213 bp, Arabidopsis thaliana landsberg
aaatcgaaaccaataacgagaagagaaactcaggagaaaagaggactggaatgtttagaagagatacgaaccaccattgtcacccttataccgatccgagcgattaaacgaaggccggtcacgagagacttctccgggctcatagtctccggcggcgttgcgaccgtcttctctgtcgttgcttccggagggacgtacgacgagactgctgat

SEQ ID NO: 191472 - DNA, 550 bp, Arabidopsis thaliana landsberg
atgacccccgaggaagttatcgggcattttgtaagttttgagtgcatgatagaaggctcgaggaaaatcaacgagcttggcgacccatccgaagcccaacccgttgcattcaaggcaacggaggagaagaaggaggtgtctacaccaagtagacaaccaatagacgcctccaagctcgacaatgaggaaatggcgctcgtcatcaagagcttccgccaaatcctcaagcaaaggagggggaaggactacaagtcccgctccaagaaggtttgctacaaatgtggtaaggctcggtcattttatcgctaaatgccctttgtctagtgatagtgacagggataacgacaagagggggaagaataaggtgaaacacagatattacaagaagaagggcggcgatgcccatgtttgccgcgagtgggactccgacgagagctccatcgactcctcctccgacgatgaggccggtaacatcgctgtcaacaagggacttctcttccccaacgtcggccacaagtgcctcatggcaaaggatggcaaaaagaagaag

SEQ ID NO: 191473 - DNA, 201 bp, Arabidopsis thaliana landsberg
atgttcattggttactctattaatcaaaaggggtataaatgttatgtaccggaaacaagaaaagttcttatctctagagatgtgaagtttctcgagtctaaaagctactatgataagaagaattgggaagatattcaagatcttactcactctccctcggatagagctgcaaatctccgaatcatccttggaagacttggt

SEQ ID NO: 191474 - DNA, 153 bp, Arabidopsis thaliana landsberg
gaactactgatcaagcagccatttatggaggccgatacggtgcataaacccaatttacaccttcagcccgaaaaaaaacgactggggcgtgccgcaattgaactgggtatagctgaattaacgccttggacaatagataaatatattcgtaag

SEQ ID NO: 191475 - DNA, 67 bp, Arabidopsis thaliana landsberg
atgactagtaatatcaaatctggaccgtcgattagatacatgtggtggaccgtgaagcagacgagcg

SEQ ID NO: 191476 - DNA, 72 bp, Arabidopsis thaliana landsberg
atggttggagcatttcgtcgaacactttgtgtgcgctcctattcacgcggccttcatcaagaagaagaagag

SEQ ID NO: 191477 - DNA, 222 bp, Arabidopsis thaliana landsberg
agttggtccgttacgcgcctgaggatgtcagcaccgagtccaggaagatggcctgttttctgaaaggactaagacccgagcttaagaccatccttgccagccaggacctcctcaacttctctcacctctccaacaaggctatccaagtggaaagggcaaaagaggaagaaaaagggcacctcaagaggaaattccaagttcttcgagctcaacagcaagaac

SEQ ID NO: 191478 - DNA, 130 bp, Arabidopsis thaliana landsberg
aaagtacactcgacacctttgtgtggaagaacatgctttcaagtctctcccttgtggaattaaggagacaaaagacaaacaagtagtgattaagttttatttgatctctcaattgtttaagctctattag

SEQ ID NO: 191479 - DNA, 318 bp, Arabidopsis thaliana landsberg
atggagaaccatcttcaacattccttaaccatcattcctaaaccggatctaatcaaagaagaacaacgttatcacgaagatacggtgagcttgcaagcggagaggattttgcatgccatgaccttccccatggttctcaaaactgctttggagcttggcgttatcgacatgatcacttctgtagatgacggcgtgtggctctcgccttctgagatcgctcttggtctcccaaccaagcccaccaatctggaggcaccagtattgctggaccggatgctagttttgttagccagccactcaatcttgaagtaccgtacg

SEQ ID NO: 191480 - DNA, 370 bp, Arabidopsis thaliana landsberg
atggatcaagagaaggtattggccgtgaagggcagagctccgccccaacatcaagtgtttgtaagtttccgaggcagcgacgttcgctataacttcttcagctttcttaaagacgcattgataaagaatggtatcaacgtggtaacggacgaggacgcacctaggggaaaaccaatcgatgagaatcttttgaagcttataaaagactcgaggatcgctgtcgtgatcttctcggaaaactatccggagtccacttggtgcttagacgagttggtggagatcgagaaacaaatggatcttaagatgcttgattcttgtcctatcttttttgaggttgagacttgtcacgttaaacttcaggtcgcaagaa

SEQ ID NO: 191481 - DNA, 1372 bp, Arabidopsis thaliana landsberg
attactaaaccgcaatttatcgataatccggagcacaaactgcggaacattgtggttgagatcctcaatcgtcttccacacagtgaggttcttcgtccctttgttcaggacctcttgaaggttgcaatgcaggtgctcaccgcagataatgaagaaaacggtttgatttgcattcggataatctttgaccttcttaggaattttaggcccacgctagaaaacgaggttcaaccgtttttagactttgtctgcaaaatctattcgattttcagatttactgtcagccattttttcgataatgttaaaatggaagaagtgaagcctatggagatgcctacgtcttctgatcagtcccttacccctaccccacctatcgggaatgtgcagcttaatccgagtactcggtcattcaagataatcacagagagcccccttgttgttatgttccttttccagctgtatagccgactcgttcagaccaacattcctcatttacttccactgatggttgctgctatatctgtccctggacctgagaatgtcccttcacatttgaagcctcagttcatagagttaaaaggtgcacaggttaaggtgagacaatgtttcttcgtaaggaagggaatcaaagctttctacattgttggaaatattattatatcaaggcctacaccgactcattgtttgatctgaattatattgtttgtaactgggagatgacatgatatattgacttttgttttcggatcatttgcagacggtttcttttttgacttatttgctaaaaagttgtgccgaatatatccgtccgcatgaagaaagcatatgcaaaagcattgtaaatttgcttgtgacgtgttcagattctgcttctatcagaaaggtggaaaaccttatgttccttttcgtcagtatgttttctctggtgacacagttaagggagtgcagctaaagatttacttttcattacatgaaatgcaggaactcttagtctcattaaagcatgtgcttgggacggatttcaagagaggcttatttcctctgattgacactcttttagatgagaggtatgaggcttaaggcatctgaaattcgaaaatttcgaaaattttcatatttctgaaggagatgtttggttaactcaagcacagcttttgtccgcatatagtttatctagttgaagtatctataaacaagtattgacttttttcaggtattcttctttgtcttctgtgttagggttctagttggaactgggcgagcatgttttgagtctttgaggcctttggcttacagcctactcgcggagattgttcaccatgttcgcggagatctttctctcgcacaggtttttactgatgcagaactttaa

SEQ ID NO: 191482 - DNA, 957 bp, Arabidopsis thaliana landsberg
atgttcaccctcattcaaacttcaaaaccacttgacccaattgaaaagtggcgcctaaagacccctagagcaccctggcaaagtgtgaacccaaccctaagtcggttgacacgacttggcacaagtttaatctcggtgtggacatcactgacagcgccaacttcccagccccgtatctctctaaccagacccgatcttcccttggaacttacatgaactaggtagccctaggtgcagggaagaaatcttacacaagccatagggcgagattcgcacgtttggctgctcaggaggcgcaagaacaagggcagaaagcaaaggccacgtgttcgacgcgctctgagctcgccagagcacgcacgacgcgcgccccgcgtgccccgcgtcgcgccaaagcccagccggcgccatggcccgcgcccgcgcctataaagcacccagggaccttgaccgtacccctccgcgcgcgctcgacctcaccggagcaagagatcgccggagcttgccctgcagacagcgtgccagtggccgcctgatcccccgccaccgtagaccggccagcagagccatccccaaccccatccaacccttggaatagattctacgtgcctcggtgaagctcccagagcgaggaatcgagctctgcctcaccggagacgctagatcaagatcaccggacttcacccgaccgccggcgaacgtagaccgagctccacggtgagttattcttcgattccttgcatgggtcgactcgttagcaccccgtgaagctccccgtgcccttggattgacctatatcgccgtggataggctggagcactcgctgccgacgagctcgcccgcctgtgcacgtggaccgccgattccggccatcaccgttgtcgagccgtaccttgtcgtgaccgcaaggacctcccgaagccaaccccacccttcaccggacctccctcgccgccg

SEQ ID NO: 191483 - DNA, 573 bp, Arabidopsis thaliana landsberg
atggttaatacgccggaggagtggcccatttttgcatcagagttaaaagatttcgagtattttaagaatcaacttgtatcttttaatattatgcatgttccccgtactagtaatatccgagcagattatcttgcgaaatgtgcaagaactcgcggattctatttttcccatgtaagttcaacggttctcgattggctctctttaaacgagagcgcttatccgtagaataatatatggagttttaacccggaaaaaaaaaatactcgcctatagtttgctttaaaaaaaagtttcttccaaccaacaaaagcactcacctaatcttacaaccgtgatttttgaccaatgtttttgttcatatctcttcaaaaaaaaatttatactataatgagcattataatatattttctatcacatattattgtgcagaaattaagtatcaagttaaaggcaagttttagcaaaaacacgatttacggaattagcaacatttacacggacgatcgcatatttcagacaagacaaatacagaggataaaatatcataaaagggaaaatgacgacacaaattat

SEQ ID NO: 191484 - DNA, 357 bp, Arabidopsis thaliana landsberg
aagcctgattctgcccgtaaaaagcacctgctcgtattaccggtgatctccaaatccatagaaaccggctggtcattcggtaccgcggcttcgtttactttccggccctttcattcagatactgtttcgcgtacttccaatgtgcaggcgctggggatctattccaccaagaaacagctggtggtggcgatcaacggctcccaatattttaaaaaagaacgatatatcctgaatgagcagttttccttcagttctttcccggataaattctgggggcttgggaaaaccacggccgacagcgccgaagaagcctatcgctttaaacaatattatatatatgcgcacctgatgcgtaag

SEQ ID NO: 191485 - DNA, 109 bp, Arabidopsis thaliana landsberg
ttgaaacatgatcttgaagattgccgtgttatgtaccgtgaaggactcgatggaagtccttttcacacgttgctcgttgaaggttacatggatggtcctatccacgaat

SEQ ID NO: 191486 - DNA, 139 bp, Arabidopsis thaliana landsberg
ctcgccacgaggatgccacgtgcttggagacattaccacatcgccataggtcgttgtggacaacccatttaccgcctggggccttacctcaccgagcgccacgacagttgccctccggtgactcaccccccttccggtc

SEQ ID NO: 191487 - DNA, 120 bp, Arabidopsis thaliana landsberg
aaagaatcattccacaagtcaaagcccaagaaagactcatacatatacaacggatctctgttcacttgttatagctacgaagaagacgagagaaagagatcatcacacacgcaagcataa

SEQ ID NO: 191488 - DNA, 600 bp, Arabidopsis thaliana landsberg
atggcagccgaaacgaaggttcaggtttcagatccagaggcagagtttcttaattcgaagcaggagactggatacgagtgggagcttttcaaggagaacgtccggccattgaagagaggtcgcaatgtatggtattctcaaccacgctctcaaatctcactctgaccaccaattgagaaagaatctcatcgagaaacgcaggtactgatttcaatctcacatctttgctcttgggttttagtctaatcgctcgattcttgtctaattttgtgttgtttttgtgaattaggaatttgattgaagccattgatgagtatgaaggagatgaccctttatctccatggatagagtgagttccttttatcattcttgattgggttgttgaaaaattgaaatttttcttgaaccaatctttatgctgtgaccaatttgtaaactgagcttcttaattggtttctttggaaggtgtataaaatgggtacaagaggcttttccaccaggaggagaatgttcaggactgttagtgatatatgagcaatgtgttcgtaaattttggcactctgaacgttacaaggatgatcttcgttatcttaaagtctg

SEQ ID NO: 191489 - DNA, 198 bp, Arabidopsis thaliana landsberg
atggcactaatggtgaaagctgaaggtggaaatggagggaagcgatgggatgatggattcgattatgagggtgtaacaaagatatatgtacgaggaggtcttgaaggcattcagttcatcaagtttgactatgtcaaagatggtaaaactattactggaccaattcatggtgtctctggacgtggattgacacacacg

SEQ ID NO: 191490 - DNA, 2626 bp, Arabidopsis thaliana landsberg
atgggctttaggcaaggccttacaacaacaaaacgggtacaaaataagaaggtaacgactgacaaatctggtgacccgagatcggacccggaggttgatcggaaaacaaggaaacacgtccaatagtaccagcgattacaagaagcactgcttcgcggctacgacggcaaggacaaactcaatgacagaagtaatcagttcccaacgccaagtcgatcccgacgacaaacctgaacctgcaacacttcttccggtatgaaccgaaacctagaaaatccggaacccaatccctctaatccttaacctagcaaaaagagagaacctaaaaatctaacacccagactccagatctgtcaagaaaacaaaaccttgtacgagcaaagccaacctcaaatccggttagacaaaaactaaaacatggaagctgagaggtttagtggctcaaaccaagcctccacggccaagatccaagattagccgaaacagatctacaagaaaagtcgttaatcgtctcaacaaacagcctaaacccaccaatccgccttcatgactccgccgcaacccacagcacccaccgcaaacatatgagccgcaagaaaactccaccaccatgcctccgacgtccataaccagaagatttagcaggggagatttctcaaaaatgtcgagatagaagccacagatgcatcacgaaccagattaaccatacgcagctgtcggagaagaaagctcgctcacccccactttattgaataaaaaccaaacctgcaatgaagatctaaaacaagaaaagaaaccggaaagtagatctgttttttttttctcttgaggagagagaagagagaacgattggaacgattgtccccttaaatcatcttttcctgctacaatattctattgtatcaacaattacagttttaaatctgctgtgtcacctttctctttgaaagaatgatcgtcattttcttttgcttaaattatcttcaaagtttttttccttcctgaacgaagattcttcatagaagatgcaaaggttttttttttctctaacttttttccgggtcgcccgcaaaaccgcggtctttaataggcatccatgaattaatccgcaatccaaacggaccattcccgcgagacccgctatttttttttctccattatataggcctgaacctgccccacaatatccctaaacgggccaggcctgcggaccagaggcccgattaacatccctaaacataataaatgacatctgaattaaatgtaggtacatattgtgtaggcattgttgcaagtgaaaagaattcagcatacgatttcaaataaagaatgatccaagatcctcatttccaagttataattaaagctttccgggtcattaagtatactaattctgacccgattagctttttttaaaatgtacttcaaaaatgttaatttagatattggatacccaattagttaatcatgtcggaccgagtcagatcagattttcgaacataaatctttatctctccgaattgaaccaaatattaaaccaaaccaatttgtaaaaagaaaaatcggtttggtttggatcaatagaatcgggtcgcatcaaaactgcatgcatgcctagttctgtccatgctggaaagaaaacccacctacactagaaagttttctttaaagaaaagcgcgagagaagtttaggttttgtaaatttccaacttttaaccacattttttaaagacaaaaaatagtgaaaatggtaaataatatcccgcgtgtcccactctgaaactggcgccaaaatcgaggttaatactaaaaatgcccaaatcaatcagatagaactaaaaccctagaaccacccaaaacaatcaacatctccgatgaaatcacgatctctaaagctccgggaagcccataaattcggcggaagcgccgccttctgctctatcctctgggaccacaaagccgaacatttcgtcacttcatcttcttcggatccctcaatctccgtccacgatggactctcaacctccacattacccccgacgattctccgtcatcaccaagacggcgtcacctccttggctcttagcaacgactctactctcctcgcctctggatctatcgatcattgcgtcaagctctacaagttcccaagtatattattcaaatcacttcttctcattctcaatctcaattacatttcaattcgtgttgataagtttttgattttgccttaggtggggaatttcagacgaacattactagatttacacttccgattcgcgtgcttgcgtttaacggctcagggagtctattagcagctgcaggagatgacgaaggaatcaaacttatcaatacatttgatggttcgattgttagagttttgaaagggcacaaaggaccagtgaccggcttagatttccatcctaatggtgagcttttagcttcgattgacacaactggtactgtgttatgctgggaacttcaaaacggaatcgtttcgtttacccttaagggtgttgcgccagataccggtttcaacacttccattgtgaatattcccagatggagccctgatcgaagacctctcgctgtgcctggtttgagaaacgatgttgataatgtatga

SEQ ID NO: 191491 - DNA, 389 bp, Arabidopsis thaliana landsberg
ccaataaaaaagtctacctggaaattttcaataacagtgtacttatatccaattcgcaacaaagcatcaaccgaataatcggtacgtatgaagccggggcaaccctggagcaatccaccaccttaaaattcaaattattcaacgatagtccgcagaaagtatcgtatcgtcattttgaccgggatcagcaagtcactttaagttgcctgacaggaacaaatcacacgaccgttcaactgttaaacggacaagtttcctcttcggaatccgattcgaaagaacttcccaaattaaatcccttgcgcctggacgataacctgcgcagtttaaacccgattccgggatccaacaacctgctggcaattacgcaatccaacaccctttatttg

SEQ ID NO: 191492 - DNA, 125 bp, Arabidopsis thaliana landsberg
gaagaaagagcctttgtttcagccgcgggatttggaaaacggtttagcggcaataaaagatggaggacttgttgttttgacaggaacagcagttgttgctgcgggtgtaaccacagaacgttctg

SEQ ID NO: 191493 - DNA, 33 bp, Arabidopsis thaliana landsberg
aatcaaccatcttcttttgtctttcgtgtttaa

SEQ ID NO: 191494 - DNA, 233 bp, Arabidopsis thaliana landsberg
gtgaaattaattcaaagatccgacctaaaaatcgttctcgattaactggagaaagaagatggaaatcaaatcacgaaagtgaattttttgaagagatcatcgacgtacttacctcaatatcggaaaggatcatcggcgatcctctctataagaacaaagaacttgaaagatttagggtttttttctgtttggaagaagaagaaggagcgtgcagaaattttgatttctcatga

SEQ ID NO: 191495 - DNA, 365 bp, Arabidopsis thaliana landsberg
aggtcctcgaaaactgctcgcgaaaacgttcttgctcgcactcgctaccgtatcggtgtttgtcgtaggttctaaattcactagaccattcatgaatcctgccattgtaagttcatactcgtcctactcaagaattgttaattcatttttattacattttgaaatgaatcttgatatatagtcttgtggtatatattgtgatgcaggcgtttgggtgggcatatatctacaagtctcacaacacatgggaccatttttatgtgtattggatcagctcctacaccggagctattttatctgcgatgctctttagaattatatttccggctccacctctggttcagaaaaaacagaagatagcttga

SEQ ID NO: 191496 - DNA, 328 bp, Arabidopsis thaliana landsberg
atggcaggggccagcgtggaaacccccccgctgccgggttccggctcgcaaactccgctggctgagcagaacccgccagttcgtcggaatacggaccaggaggaacggcgcgttactgacggaacttgtgtcgggcccggaggattactccagagcatcctcgatcacttgagtcgccaggaggctagaacggaagcacgattcgccaccctagccactgcacaagcgcattcaatggacgaaatcaatcgtctgcaagccagccgaacttcagtccataggcccatatttgaaagcatcgagcatcatccccaaaacagtatcgccg

SEQ ID NO: 191497 - DNA, 372 bp, Arabidopsis thaliana landsberg
gaggtttactcgcgaaagaggatctaaattggtatttttgatcacaaggatttttactcaaaagttcaatgctccctacaataattggtcctatgtgccattggataaaagacaaagattgtttttagagtttgcggtaagcttcatgtatatctccaactttccttatactatactatttaatctttcaagttttcactaacttcttacttttttgtagaagactcacacccgggatcccttaataacagggacagtccaatattacttcaatgagatcgttaagaggcgcttgaaggacatggttagcattgcaaggacaactcgagagcagcctccatggattggagaaactctgtgggggaacaatgt

SEQ ID NO: 191498 - DNA, 112 bp, Arabidopsis thaliana landsberg
cgcatcgaccctaacccctcaccttgggccaccaaaacccacaagtaggttattggtgcgcttggcgttcctcgaacccaagacctcaccctttaacaactttcgcacatga

SEQ ID NO: 191499 - DNA, 264 bp, Arabidopsis thaliana landsberg
atgtatcactccatgattgatcctgctttatttaatgatcatgacagcacgtacagaggtaccgacaaaaaggtgtatgagcatgcgccttttgacaattactctgtattctccatgtgggatacttatagggccctgaatccgctttacaccctgatacaaagaccgcgggtgacagattttatcaattccatgctggccatatacagacagcagggtaagctgcccgtctggcatctgaacggcaatgaaaccaactgtatg

SEQ ID NO: 191500 - DNA, 61 bp, Arabidopsis thaliana landsberg
aagtagacgcgtagatccagagattgtagaattttcgggtacgacgaagaagaaggcttga

SEQ ID NO: 191501 - DNA, 444 bp, Arabidopsis thaliana landsberg
aatctgctccggtcaagtcatcttagacctctcttcggccgtcaaggagcttgtcgagaacagtctcgacgctggagccaccagtatagagattaaccttcgagactacggcgaagactattttcaggtcattgacaatggttgtggcatttccccaaccaatttcaaggtttgtgtccaaattcgccgacgaacttttgatgatttgggattctgatttttgccctattgaagtaggtctttcgtctatgtgtgtgggattacaggttcttgcacttaagcatcatacttctaaattagaggatttcacagatcttttgaatttgactactcatggttctagaggagaagccttgagctctctctgcgcattgggaaatctcactgtggaaacaagaacaaagaatgagccagttgctacgctcttgacgtttgatcattctg

SEQ ID NO: 191502 - DNA, 135 bp, Arabidopsis thaliana landsberg
atgattgtctagcaataagtgccttatgcggctctgtacaagctaaaatcgagctgctttacaatctgatgaccttggactgtacagagctaccactcgctgaacaattatactatgtacagaacaatgattcct

SEQ ID NO: 191503 - DNA, 435 bp, Arabidopsis thaliana landsberg
acaactggagtattattctaaatccagttcctaaattcaggtttaagccctttgcaaggaaatatttgctgggcccaatctttcaaaagatctccatcaattgttttgttacaggtagaatataacatatatacattgtaacaaataaatattttgttcaaaaatctaaccaattttggataatacttagatatagaatttttctgactatattaacgcatttagaagagaaaccgtaacattagctttttatttctttgggctaaatccgtaaacattagctaaatgcctaaatctcagtctcactcctctgttttgtataaaacattttaagaaataatacgataccgagataccgagattacagatatacccctgggctgttataacgaacaaaccgatttaacacgtgctcctcacgtgaaaaagagctaa

SEQ ID NO: 191504 - DNA, 565 bp, Arabidopsis thaliana landsberg
gttcttaccaatatgctcgatttcagatttcttagatcattgctttccttttgtgaaggaactagaccctcctccgtggctaaacagaatgcgagaaattgggtacccaccaggatacttaggtaagctttctgctctgttttattagcattcatggacatggaaaagaagtggattttgttggtatcgcacaagagctaaactaaactagatgttctcacactttccattgtgtgcttatgtctctagctccagaagatgatcatttgtctggaataactatattcggagaagaggtggagactcgggaggagatagagagtgaggatggggaaattttggaaaaagcaaaccctcctccagagccacaaatgaaaaagaccgtcgagtttccgggaattaacgctcccttcccagaaaacgcagatgagtggctttgggaagctgcaccttcacataggaacagcagcagaagcggccgatggcaacaacaaaaaacaagcagaggacatgattacagagacgatggtccgctcggcgttgaaccatcaaattatcctcctag

SEQ ID NO: 191505 - DNA, 290 bp, Arabidopsis thaliana landsberg
atgccccactatgttcatagcagccttattcgtaatagccagaaattggaaagagcccagatgccccttaacagaggaatggatacagaaaatgtggtacacagcgcctgccccaatccaatcgcgcggaacctgagactgtggtacatagggaagcaggctacccaggcctgatctggggcacaagtcccttctgctcgactcgagccccgggctaccttgccagcagagtcttgcccaacacccgcaagggcccacacgggactccccacgggatcctaagacctctg

SEQ ID NO: 191506 - DNA, 111 bp, Arabidopsis thaliana landsberg
agtcgcttggaagacgtatctgaacaagaaaaggttgagcttcaggatggttgtgttgttaagcagtgcaatcaattggccccagtatgtggaatagttgacgttaagtag

SEQ ID NO: 191507 - DNA, 939 bp, Arabidopsis thaliana landsberg
atggctgggactgcttccaaaacaacaagctgcaaagcgtatagaagaccttgtaccgcaacacacgttgtggcgagttgttcaacttccctctcttttattgaggtcatcatcatctcgaaagacaatcgaccccaagggtaagacaaaaaaccctgtagatcctcggccatttccgcgtgatctttaattattttagggtaatgcgatgtgggcagcaaaaacctatcaacaagagccaaacaagcataacgcgcagccttatttcgcgatcggtaacaacccttttcttaagcatcgtaataaccctttcaactgtgacatcttcttctagaccgaacagggtactgtaataggggatttgcttccccccgtccctctcttcttcttcttctgaactttaggatatttgccacacggaagcccggtaacaatcttaaactcccttaacgaaaatcttaccggagtcccagcgaacactacccaaatctcgtgggggttaaaatttccaattgcctactcagtaataggagtccgaaactcgctgagaacaccggtttattcggaaaatctaaaagcccacccaatgaattgttgaggatgaaggattgctcttattcgtcgatagcgttaataatcctagacagtgtttttattttgtggtacacgtttaccctttcgccaagcggctcctctccaaatgcaatcaaccggttgggtaattcgacagactccatctagaacaaaaaaaaattgattaaactagaaccgccatgtgaaagaaccctaaccggagctgaattagaattcaaacattaccttagaaatagaaacgcagcgccgaagagtttactccggaggagactaattatcacgggctccgccgaggatgatgtttggatatcggaccaaaaaagatgcaactcaatgagactttaa

SEQ ID NO: 191508 - DNA, 128 bp, Arabidopsis thaliana landsberg
gaagaagcgacgaaaccctagagggagagagagagaagagtagagcggtgtctggtctgagatttgtttctcggaaaaccgctgatggttttgtgaagcgcggttttgttggcgagcaaaaggtttga

SEQ ID NO: 191509 - DNA, 97 bp, Arabidopsis thaliana landsberg
atgaagatggacaaaagatatcttgttgtggaccaaaaggtcgataagtttgataagttgatccgatggacttggaagctctccgtgtctacgacta

SEQ ID NO: 191510 - DNA, 1145 bp, Arabidopsis thaliana landsberg
  unsure (1)..(1145): unsure at all n locations
ttaagagagaaacaagtacaaaggaacaaggattctaagatcccaaagtttaaaggacaacaaaggtaggcattcccaacaccataagaagaaaagctaacacacaaataaggtacatcaacaatggttccatgagagctataatccaaacacttgaagggaatttgttacttttaagatcaaggattgttgacaaatcttccacgaacaaagtagtggatgagagtatggttactgtcaaaagacttagtaacgttaacaagggcgccaaagacatgaatctcgtcgggacgagaagtactacaccaagtagtgcttttgnnnnnnnnnnnnnnnnnnnnnngtaaaggaaggaggatcgtcgaggcttagaaagattgatgcgagaccgtaacagaacaggtgggtcctctctcccaagaagaccaaggagattaaggaattccacacaaagcttgtagtcgggaagcttgatccaaactcgggaaggaaagatggttgggatgttcttgaagttggtcgatatagatgtcggcatgaagtactttgatagagggctttggtgaccannnnnnnnnnnnnnnnnnnntggacgcatcaaaactagaccaagagacttcaaaaagcaaacataaagcatagccctagataaacctagcaccaaggttcttagagactgtttgcaggagcatagcaatgagggtgattcgccattcaaatggtgtccatggccactcaaaacagagaaacgacgcctacattgggacagactctgcaaattgcagaaagaaacaaacctgggcttaattggtaaaggacttgggtcgcaaaatatgggcttgggccgcaggggaaatgggccaacaatggttatagggcccataaaggaaaaccctagaaaccagattgctgggcaagaagcgttggaggcgcggcggctacggtggaggggtacggaccgcgtcgttggagcagatatcttcgataaagcaagagtcagggtgagaaagctgtatggcggatccgacacggaggatgaaaccacggctgaaagttttgcaacagatcgatggagaaaaccttgggagcaaagagggcccgtggatctagggacgatatggcgatggagacaaatctcaaaatag

SEQ ID NO: 191511 - DNA, 37 bp, Arabidopsis thaliana landsberg
atgggcataaggatgagtgcgaaaaccagcaacaaag

SEQ ID NO: 191512 - DNA, 666 bp, Arabidopsis thaliana landsberg
atgaatggccctaagaatacctcggcacccgcccctaaggcgccctccgcggtcagccagcagaacaagactccgtatcaaggaagggcacgtgtaaatcacgtcgatgctcaggaagctcagcaggctccgggagtagtactcggtgagttccttgttgaatttactcccgctaccgtactttttgattcaggagcatcccactctttcatagccactagctttgtggaaaaatatggcattccctctactcccctagagattcctttggtcacccgaaccccggggtccgaccttctatgccagctaaaatgttcccaagtcagaatccttttaagtggggtagtattcctggcagacttaaccgtcttgccatcccaaggaattgatgtgatcttagggatggattggctaactaagcacaaaggcatcatcagttgcgcagacaagacagtcctcctcaccgaccggcagggaaagtcagtctcttgtcaggcacagccacccgccagtgacccaatgaagttcaatctagcaacggaaagtatatcagtagtagaagaattcatggacgtatttccagaagaattaccaggaatgccaccagaaagagaagtggagttctacatagatctgatccctggaacagcacccatcgcaaaatga

SEQ ID NO: 191513 - DNA, 143 bp, Arabidopsis thaliana landsberg
atggtggtcaatgacaaggagaaggagtccttcctcaatgagccaagggacgacaagcccactgactctggctcaagtcataagaagaaggacgggaagaagaagaggcacatcaagaagatagtctactacgactgcgacga

SEQ ID NO: 191514 - DNA, 581 bp, Arabidopsis thaliana landsberg
atggtggcgctggcgaagtatgtctgggcgacgacttcgtacggcaggcagccgtctgttgaagtttttgcgaagaattattgtttgcattggcagaagaggatggttggggacggagttgcccagttcgggtcatgcacattcacgccgaagaccggcaagaccacaatgccagtagtggagttggttccgtgcgcccgcaacaagtggggcaattggaatgaattttggttttacgttgcggagggtactgtcgaaggccataaaggtctccctgtgtctgagatgtgctctcattattactctgcgtatccgccttttgaagtggcagaggaagatgcagacgaaggggcccttcggtgcgccgccggtcagagcagtgggcgtgatttagttgaagagtttgtggcgtatggggtgtggccttgcgcacggttgggtgctgggtgaagtgtgcctcgccagatgccttttcacggagggagggttgtgcgacacctgccttcgcactgaatctgcggaacccgatccggctgcctttgtgcgcgaccggaggacggggccgtgcggctcgtggggcc

SEQ ID NO: 191515 - DNA, 49 bp, Arabidopsis thaliana landsberg
atgaggctgacggccggtgtggcgccaaggcatggctacgacggcatag

SEQ ID NO: 191516 - DNA, 315 bp, Arabidopsis thaliana landsberg
caggtgcgggtggctgaacggaactgggctgactgcgaagaccgcgccgcacgcttcgaggaaggccgttcaatcgtcatggctgaaatgaagctggcgctggtcgagaacaagatcgccaagagcatggccgcagcggaagacgtggtgcgaacgtcagaagaatggaagtcctacgtcaagaagatgcacgaagctcgccatgccgcgaacctcgcacgggcggactggcgcgcattagatcgtgattattgggccgtcgcttccgccgaagcaagctcacggcttgaaatgaagctcgcgaggggcgcatga

SEQ ID NO: 191517 - DNA, 181 bp, Arabidopsis thaliana landsberg
caaatattttaggagtcaaagaaagaacattcaatgcgagtggaaacattgatgtcgaagttcccacagatgtttccaccaaagcaaaccacttgagctgttcaataaaagccttgcaacacttgccatataatcggaaaatagataacaatacaaacgaacctctgagatattcgacaag

SEQ ID NO: 191518 - DNA, 330 bp, Arabidopsis thaliana landsberg
atgccccttcctgtgttccagaaagagaggctaagatccctgagcccgactagttttgatatagatcccggaattggtccattgaaattgttttctcccatgtacaagtatccaagttcggaatgtgaagagatattcccaatctcaagcggaccgctgaagtcgtttcttcgcaagtcaagtacaatcaacgaagggatcatgaagagagaagagggaatggatccagaaaatgaattttcactaatatcaaaagacaccagtttggggaggctactcatgttagatgggagcatacctttcaactggttagaaccaaggtcgatccag

SEQ ID NO: 191519 - DNA, 387 bp, Arabidopsis thaliana landsberg
gaaagcttctcaatgttcgtaaatccgatatggacaccgaaacgagcattgcagacgatagaagcgaaagccggttctcttcagatagccattcaggtaaaaacttactctgcagtacacaaagtaaaaccggttccaccagtttgatttgttacacattttaggaacagtaagttcgacatcgagtcatcaattctcatcaacacctttactcttccaacgaatccaagccctaacaaccgtgaaccagaaggttggaacaaacattggaaaacagaacaatgaaccgcatcatcatcatcataacagagctgggtctctagacgtggatgaatcaaagttactgaaccagaagggcttttatcgaacaagcagctccggaatcgg

SEQ ID NO: 191520 - DNA, 177 bp, Arabidopsis thaliana landsberg
gtgtccctgatagtacctttaagagtgctttgggggaacactgcagatagggaaaaaagacaggcgatcaattccggcgccctggtgaattttctcattgttaagcggttaatagattctagaggatgctatccggcgctaaaatccatgacaatcctttataaactgagtatttag

SEQ ID NO: 191521 - DNA, 83 bp, Arabidopsis thaliana landsberg
atggcctatgaagtcatcaaggttatcgcaatcgtgggcgttgcattgatcatcatcatcatgatgctgttgggttatgcatg

SEQ ID NO: 191522 - DNA, 530 bp, Arabidopsis thaliana landsberg
cattgctttgcatacacactcgagtttgaaaaggacactatagctagctgtttggcaaaacgtacacgaatctcaaaagattgcaaatggatattttggttcaaattcgatcgacaaaaacttgtgagtattatggtatagaaagatccataacgattctggtattattacgacaaatgtaatgtcaagttcgtaagaaaacaaaaactctacgggatgtcccattctttatgtttgtgatcgataaagtcataagtgggtactgtatgtggaccaacaatgtcatgtgcacgcagatttctgaaatatttcgttattcaaaaatcaaaataaagagagtgagtcagagtaaaagaatctccactgtcttttgttgtgttgcccttacagagttttggtgtttgatttgaaccattaattattatcatcaatagtctatcaacaacaacaacaacaacaacaacaacaacaacaacaacaacaacaacaacaacaacaacaacaacaacaacaacaaaactcttacatag

SEQ ID NO: 191523 - DNA, 602 bp, Arabidopsis thaliana landsberg
acagcgtttgcgtcaaccatgtcagatctatcgccagaaagattcaaacttgccgttacttctccttcttccataccggaatcttcttcggctttacaattacaccattcctatagtcgcaaacagaaatctctcggacttctttgtaccaagttagtgcctttttactaaacccattttatttatttgttgttgaatttagttctgattagtgttcttcgtaaactcagtttcttagctttgtataatcgagaagggattgaaatggttgggcttgatgatgctgcctcgaaattaggtattgcccactttgtgtttgtgatttttattttcatttctgattttacatcttaatttcttgattggggtttttggggtttatttcaggagtggagagacgaagaatctatgatattgttaatgttctggagagtgttggggtgagacttgtttctccactactttgttttttttcagaatccagaagtgttatgtttgcttaattcgagttttgtctaatttaggttttaacaagaagagcaaagaatcagtatacgtggaaagggttttccgcaattccaggagcattgaaggagctacaa

SEQ ID NO: 191524 - DNA, 83 bp, Arabidopsis thaliana landsberg
atgcctataccgataattggcatagctatgtaccgaacacagactaatacaagtacaaccatcggtttgacatgccgaagaac

SEQ ID NO: 191525 - DNA, 293 bp, Arabidopsis thaliana landsberg
atgtcagagagtactaatgaagatagtggagcaggaagatcatcagtggaagagaattcaaatggacaaagaagtcaatcagaagaagcaatcgctgagtggcgttcgtctgaacaagttgagaatggaactccttctacatctccaccgtattgggacatcgatgatgatgacgattttggatcaaaaccatctcaactatttgggaaaaatacttggacgattgagaaattttcagatatcaacaaacgagagctccgtggcgatgtttttgaagtcgggggttacaaatg

SEQ ID NO: 191526 - DNA, 77 bp, Arabidopsis thaliana landsberg
tctcaacatatgtgatgcaggttggttgtggtgaagaagaagaacacatttgtttagcttatgaaaacaaccgttag

SEQ ID NO: 191527 - DNA, 732 bp, Arabidopsis thaliana landsberg
atggcgattatagtagtaacaacgatcttcatccttctgtctttcgcactctatctaactatcagaatcttcaccggaaaatccagaaacgacaagaggtatactcctgtacacgccacaatctttgatcttttcttccacagccacaaattatacgattacgagacagagatcgcgaggacaaagcctactttcaggttcttgagtccaggacagagcgagatattcactgcagatcctcggaacgtggagcatattctcaagacaagattccataactatagtaaaggacccgttggtacagtgaatcttgcggatcttctgggacatgggatcttcgctgttgatggagagaaatggaaacaacaaaggaagctcgtgagctttgagttctccactagagttttaagaaattttagctactctgtttttcggacaagtgcttctaagcttgtcggttttattgcggagtttgctctctctggaaaatcttttgattttcaggtacgtttcgaaactgaccaaactcattatttccgaatttggaaactctaatgatgtctttttgttatatgttttgttttgaggtaggatatgttgatgaaatgtacattggactccatctttaaagttggattcggtgtggagttaggatgtctagatgggtttagcaaagaaggggaagagttcatgaaggcttttgatgaaggcaacggcgcaactagttccagg

SEQ ID NO: 191528 - DNA, 521 bp, Arabidopsis thaliana landsberg
attgatggacctgaaaagaatcagttttcaccaatctacaacacaaagtttgaggggaagctgaataaaaaaggcataaattatacaagtcctaaaggatcatcagttactaatactaagcctagttcaataaaacaaaatgagtacctcaagaaccttaccagcttggattctattaagtctcctattgttatacactcagaaatagatccacaagcaaacacagatttgtcactccaattttgtactagcggtagcagtaaacccggaggagaagctgttgttggttctaagatccttttgtcagaacgtttggaagatgaaaaccagaatgggtctcccaatgtgatgaaaactcaatcatatagaagaaactttgctgagtttaacaatgaaactcaaaagaagcccaaaactctgcctcggcgtgaacaagttgcttcaaactgctctgcaatagagtctttgtctggtataagtgcatcttcttatgatattgccagagtgaaaagtgaaaaaag

SEQ ID NO: 191529 - DNA, 3099 bp, Arabidopsis thaliana landsberg
  unsure (1)..(3099): unsure at all n locations
catggagcccaggcccacacgtcactgaactggcgcgccggttgctacgtgcgagcaactgcaccgcccctcgcgccactaccgcgcctcctcgactacggaattagtaccgcgactcgaggcaaccctgtgtatgacccaacagtgccagccaggcacatcggtcacgagccagtcagccgcgggagaagacgcgacggtcgatgcggccaaaaataggccggtagtaatggcggtggcaagcgggcggaagcagcggtcacgtcgtcagccaagctcacgtcccctcatgggacagcgagagaaccctctcccacggcgtgaagacagcgcgctcgtgttccattccgcaaacagctcggcacgcgcaacggctgccccgcgaacaactcgccccgtcgcatcaactccgcggcgggacaggcggtgcttctggcgggagaggcaggcgacgttcgccttcgccgtaataaccgcgccaaaaaaggtacgccgcgtcgttcgatttcgtaccctttttccgttttttcctctttctctatctcttacaacaggaccggaaagggattccccgaaaagggtccttccccgtgaaggaaccgggctccgagcccccctactgatcagaggttcgaaggttggcccctcggaagggttcaacaaccgcctcagatcgcgtgggccctacacccactactggtcagaggttcgaaggccggcccctcggaagggttccacggccgcctcaggctgctcgggctccgcgcccattactgatcaggggttcgaaggctggcccccgaagggttcacagccgcctcagacgccgagcgagggatgaccatgggtacgttcgatacatgaccaaggctcgggttgcgctcccgaggtaccctaggacatttccgagaccagcgggagcgatcttgtaacggaatcccatcagagggaggcatcgagccctctgaccccgtcgccaggggaccgggtccggcagatcacccgcaggtacttatgggcgtgcctctgggcccctagccgacccccaacgaacggggcacggacgtccacttggattacccgcttgcagctcaccggagacaccatgttcagtgcccatcgagggtaacatggcgctctcccccccccccctcctccttgcggaaaggcgacgtaggggcgtatgtaacaagccgagtctgtccctgatcgtcctctcgccctgtgtggaggctcgggggctgctctcgcagacccggctccggccaaatcgttgacagcgtcaacataccagcccgaggacttgggccccgaccgtgcaccgacggctacggccagttcgcatgagggaacaaccagacctgctgaagcgttacgcaaggcattaagacctcgaaggagtgaaaccactcctccgaggcctcgggggctatcnanccggccgtcgcgcgcacccaccggaacagaacgcaaccgagaaaggctggtccccttgcaaaaatgtgcgacaaaagcctccaagcgagtgctaacactcccttcgaggctcgggggctactgtcggggaccataattaggggtaccctcaagacgcctaattctcagctggtaacccccatcagcataaagctgcaaaggcctgatgggtacgattaagtcagggatcagtccacacgagtgacttgatcacgcttcacccgagcctagcctcgccaaaggcagccgacctcgaggggtttccgtctcgcccgaggccccccttttatggcggacacatctccggctcgcccgagctttgccttcgctaagaagcaaccctgactaaatcgccgcgccgaccgaccgagtcgaaggagcatttaacgcaaaggtggcctgacacctttatcctgacgcgcgccccccggcagagccgaagtgaccgccgtcacttcgccgctccactgaccggtctgacagaaggacagcgccgttgcgccactccgactgcagtgccacttgacagagtgaggctgacaggcagtcaggccttgcaaaggcaccataggaaacgtccgtccgcccgaccccagggctcggactcgggctaggccccggaagacggcgaacctccgctccgcccgacccagggctcggactcgggctaagtcccggaagacggcgaactccgctccgcccgacccagggctcggactcgggctcagtcccagaagacgacgaactccgcttcgcccgaccccagggctcggactcgggctaagacccggaagacgacgaaactccgcctcgcccgaccccagggctcggactccgccctggcctcggtcaaacgatctccgcctcgcccgacccgggggctcggactcggcctcggcaacggaagacagactcgacctcggcttcggaggagcccccacgtcaccctgcctagggcacaggcccgccacgtcaacaggaagcgccatcatcgtcctaccccgaatcgactcgggtcacggagaacaagaccggcgtctcatccggccacgtccgccggannnnnnnnnnnnnnnnnnnnngagctctatgacgacggcggcccccagctctcttacggaagcaggacgacgtcagcagggactcgaccgctccaacagctgtccctccgccacgtccgccgcacctccgacagccacgacatcacgccagcagggtgcccagatctctctggctgccacattggcatgtacctagggcgctagctctccctccgctagacacgtagcgctctgctacaccccccattgtacacctggatcctctccttacggctataaaaggaaggaccagggctctcgtacgagagggttggccgcgcgggagaacgggccggcgcataagcgtctcgctctctcccacgcgaacgcttgtaaccccctattgcaagcgcatccatccgccctgggcacagcacaacacgaaggccgaggttcccctttactgttctcccccctttgtgtaccgtctcccgccgacccatctaggctgggacacgcagcgacaatttactcgtcggtccagggaccccccggggtcgaaacgccgacatctacaagtgtg

SEQ ID NO: 191530 - DNA, 502 bp, Arabidopsis thaliana landsberg
atcgccagaattaggaaaagatcgatggtgtggttcttcggatattttttatcctgatgggtcgccgattgcgttagataattgcccaatggcgatgacagtaaagaccggtaagcctcaggaaaatagtttagtcactattaagcaaccaaacggaacctttaaaaatttaaagatattctctcggcccatctttaatgaacaaggtgttttaaatggtgctcataatgctttaattgacgttactgaaaaccatgaacaggaagtaagaaacgcatttctttccgctattgtagaatcttcggacgatgctattattagcaaagggttagacggtacaataaaaacttggaattgcgctgccgagcgtatcttcgggtacacggaggcggaagcggtaggaaaatctattttgatactcattccggcatcaagacggcaagaagaagatattatacttaatagcattaaaaacggaagacgcgttgaacatttcgagacg

SEQ ID NO: 191531 - DNA, 297 bp, Arabidopsis thaliana landsberg
ctctcttacgcttcaatctcctctaaagcggcccttttcatgtctccctttccgttggcgccgctcttatcgcggcggagtcaggagctcaacgacggagactcatggtagcaaaaaagaagctttggtgtcggaaacggcgactacatcgattgaattgaaaagggtctatccatttcacgaaattgaacccaagtggcaacgttattgggaagataaccgaattttccggacaccagacgatgttgatacttcgaaacctaagttctacgtcctcgacatgtttccatatccaag

SEQ ID NO: 191532 - DNA, 718 bp, Arabidopsis thaliana landsberg
atgatgtctatggcaagagcttggttctgtgttgtcctagctcgaaacctatacaagcttgggtctatattgtgaggggagatctgtgcaaaaagattaagatagatggagtgcaatgtaggtctcagtcctctgtttatgttcccagtttgatcaccataacttgagagacttttgctgaatctagtgaacaagaagaacttttacaagtttgatttccattgttgctttcttgttttatttattttaacatttaggtctaaattcattgttatacagatcaaactgaaccaaacttcatgtggttggttctggtatgaatcactttctaggtcttttttttttttggactcgtcatcatcggcggaggaagatggcgactatctggcacacgagtgtttgggtctcttagctcatcaaagaacatctttattcatggattttagagcttccgatgctgatttcaaacaaactatgaaagtatcctcatattaggtgataatggatacactattagtagcattccttgtgcaagggtgaggtttttcattccttcgatttcgacaagctgatcgactccactattgccaggaaacagaggctgcataccgagaacaaaaatcatataggtattgcaaaagtagtgctccaacctatccaagaagcagtttcagccatcacacaacctgtggaccatagatatgtctacgggttgtga

SEQ ID NO: 191533 - DNA, 97 bp, Arabidopsis thaliana landsberg
atggtaaaaacagagacggtagtgttggaattcaaccagtacacagtcggatcaaggtggagaagaacgatgatcatgagagatcataaagaggaag

SEQ ID NO: 191534 - DNA, 48 bp, Arabidopsis thaliana landsberg
attattgtcagagatattcgcaacatcatctccgaaggcgtcatatag

SEQ ID NO: 191535 - DNA, 54 bp, Arabidopsis thaliana landsberg
atggagttattggtcgtcgttgtgatatcggctgacaatccattcaaaacagtg

SEQ ID NO: 191536 - DNA, 1080 bp, Arabidopsis thaliana landsberg
atgaatatggaattggataaagcaatctttgagatgacgatcaacgatgatagtcctttaattctatcaaatcaacctcagtttagttcgattgagaggaatagttgcagtcttattggaagatttctgaatccctctcatcaacggatgtctaattggatattagatatgcctagaatctggaggatctactctagagttcgtggggttgctctatctcaagaaagatttcattttttctttaaatcaaatgatgatttacttgaaatcttgaaaacaggagtttggactcaagatgagtggtgtgttataatggatcgatgggtagaaaagccacctgaggagtatttgatgatccttccgatttggattcgtcttcgtaatattccggttaattattaaacggaggagacgataaagaaaattgcagggtgtgttggtcaggtggtaaaggttgaattagatttggagaaatctcaggcacaggattatgtgagagttcaagttaatttggatgttagaaatcctctgcgtaactccaagtcagttcaggtgccttcaggtgaagtggtttcagtcacttttgattatgagcgaattaggaaacgttgcttcttctgtcaaagattaactcatgataaagttgattgcccttatcgtcaacaagaaaatcagaatattcattctgaccacttacagaggatggttcctgagaaggaattgaatattcctttaacccaatcctcgttggggtgtgagtttcaagatgctgtgatagataaagggttgaaggaaaggttaggggttttggataatcagagaggtgtggtttctattgatcattccaactctccttcaagttctccaccaggccttttggtatctcaagatatgtttcagtcctgtaaggaaaagcctagctctgatttcctggatttggattttgtggcaaattgtccatcttctcttgataggccgagttcgtctgggttgagtattaaacagaaacatccgagatcaaggaaagagattgagtctaggaagacggcgctaatctctttagaaacgtctaagaaagag

SEQ ID NO: 191537 - DNA, 299 bp, Arabidopsis thaliana landsberg
atgacaaaccttgaatgctcgaaaagccttttgaatgcgaataacagcgacttctacggtaagcttagtagaagcagcagagcttgattcaaccggtttgacacggtttgatgtttcagaatgtacctaataataacatatttaaagtcatctacgacaagaaagaaaaagagaatgaaacagagtttttttcactaacgttgcctcgatttgatttgttcttctttgttccgtttagacagatgattgagcggagcagccatccagatcccataacagaagactggctcagtttaaag

SEQ ID NO: 191538 - DNA, 490 bp, Arabidopsis thaliana landsberg
atggctacccctatagtgttagaagagagcactacagacatgatccttggtatgtcatggttaagaatggcaaatgcagtatatacactgtgctaagggaaccatagaactcaccagttccacaggacaaggatttgaagttgaagttgcagtaactaccaccatcagattagcgacattcttagtagatgagaagtttgtaggtgacaacatccatgcaattagagattttccagatgtctttccagaggagttattagggatgccaccagatatggaagttgagctggtcattgatctcttacctaggactgctcctatttctaaacgaccatataggatgtctgtagaagaactaaaggagcttaagaagcaattaacggaattacaagaggctgagtacattcgtccgaattcttcaccttgggggagcgctagttctatttgtgcagaaaaaagatggatcataaaggatgtgcgtggattatag

SEQ ID NO: 191539 - DNA, 1135 bp, Arabidopsis thaliana landsberg
gtcattgacattgaagaagaaagttgatgttcatagagtttatatgcttagagaagcttttacattgtttgattttgaggatgagagtattgaagatcttaggatgttgcttatgcggtgtgttgtttcgccgttgtatgtgaagactgaagatggtcagagatttgtttcttttgctttcgggcttagtcgacagttgatgaaatctggtcttgctgttgttaaggctcagattcctttggggagcaaatctgtgcttgaaggttttggtgggattttgtttagagcttggaaagaagtggagctagatttaaaaggtgagattgaagatgggtttttgcaggggattattgatagcgctattcacgctagttcttgcgcctttgctgcctcgttaaggagggttttgggcgggtttattagtcagcggacaactcaaggtgttgagaagcttctctttactcttgctgagcctatgatatttcgctcgttacaggtttgtttcttaacttttttgcctttatcttaaagaagtaacattggggtgataagctaagtcatttcctagcagtctttagttttctagctgaaactgttttcttggctattttagttgacattgtttgattatttggtaggaagtgattttgctgctcttatcttatttcaggttgcaaattcaaatgttcgtttaaatgctttacatttgcttctggatcttttccccatggaggatccagatgcaagaaaagaagcaaaagatactttgcttgacaaacagttctacttgttggaaaaattattgagtgatgaatgcccagatgtgaggtctgtagctgtggaaggtctctgtcgagttttctatcttttctgggaagtgatcccatcagcaacaattaccaaggtcctcacgaaaattttcgatgatatgtcacatgaatcgtgcagtgaggttagactttcaacggttaatggtataacttatctcctcgcgaacccacaatcccatggcattcttaaagtgattctgccaagactggggcatttgatgctagatagtgttacttcagtacgcgttgccatggtagatctactgcttcttatacgagatgttcgcgctttccagtttaacacg

SEQ ID NO: 191540 - DNA, 60 bp, Arabidopsis thaliana landsberg
atgaaacagacctaccactactaccgccacgtgacggtcatacccaaagaaacgaaactt

SEQ ID NO: 191541 - DNA, 336 bp, Arabidopsis thaliana landsberg
atgaatcttttagaggtattgtttttatggataagagaaagcgctaaggatttgtactgctttagcttaatgttttatcaaatcggcacaaaaaaaactggtaacaatggtaagcactaagcagttactaatccgaccaattcaagtttactattctgatcactaaccatgtatcgcaacagtacaggatgtactaaaaccagtataataaaatgagcgtttaatacctaatattttttgttgaaataaaaatatctcatctaattatttgtagcctcaaaatacttcgaatatagactattggtgatatcaaatccggaagctaacagccgttaa

SEQ ID NO: 191542 - DNA, 122 bp, Arabidopsis thaliana landsberg
acttagtattcattgtcgtgaaagtagcacaaacaaaggatatggtcgatgtaacataccaaattgtcatcacagcattcatcgtgaatgtgaagatgagcgtatctatccgtgcaacctaa

SEQ ID NO: 191543 - DNA, 418 bp, Arabidopsis thaliana landsberg
gcactgacaaagctagagtaccttgacatctggggaagcaacgtaaccaaccaaggagctgtcagtattctcaaattttctaacttgagcttcctaaacctctcgtggacaagcatcacacagactccaaacattccgcaccttgaatgcttacacatgaacacgtgcaccattgtctccgaaccaaaaactcatagctcattagcttccttgaaaaagctagttttatcgggagctaatttcagtgccgagacagagtccttgtcctttaccaacaaaagctgtataacctacttagacgtttccaagacttccctcaaaaacttcagcttcttagaaactatgtttaacctagaacatcttgatctgagctccacagctttcggggatgattctgttgggtttgtagcatgtgttg

SEQ ID NO: 191544 - DNA, 317 bp, Arabidopsis thaliana landsberg
atgtacgaaatgctagtaggatatccgccgttttattcagatgatcctatgtcaacttgtagaaaggtaattttcggaaacaaaaatgacaaggaaaacatagaaacaatcataagaatgaaattttttaaccttacagtgacactgacatcacatcaaactcttgttcctgtttttggttgcagatagtaaactggaaaagtcatttgaagtttccagaggaagcaatattgtcaagggaggcaaaggatcttattaacagtctgttgtgcagtgtcagacgtaggcttggttccaaaggtgctgatgaaataaag

SEQ ID NO: 191545 - DNA, 147 bp, Arabidopsis thaliana landsberg
gcccaggacagaacgagagcgtcacgttgacgcccgtagtcagccaacctaggctcccagaacgaatcacgttcgcccaagtcattcgaccgtgagtgtcgttcctcactaacgcggcctaaggctttgcaacccgtacagcgatac

SEQ ID NO: 191546 - DNA, 402 bp, Arabidopsis thaliana landsberg
  unsure (1)..(402): unsure at all n locations
atgggtaagtacctattggatcctgagcttgaacaagatgtagtataaggaaaaaaatcacaaagaacacacaacgtctctccatttttctacttgactttctaaaaagagattttgacatttagcaaacagagatgagctttcactttatgatatcaatccatggatataatatgagacacttctcaaataggcatttaaaaacaaattgactcattgatgaattaataaaaatgacacanagtacataccacgttcgagacttctaccttgtcctcaatacaagaccattgactcattgacaattctgttccagctactcttcttcctaaggccgtcacgtttatcctacgtctacacgttgtaattgcattcagaattgatataaacgggaagctatga

SEQ ID NO: 191547 - DNA, 159 bp, Arabidopsis thaliana landsberg
gcccagtagatccaatgtgcaaggtggtgcaagctcctctagtgactcctcaatctataaatatcaattttaaccccttaaaacccaatatgctggtaaattatgcttttggacaatacgtacttatatgtgaagctcctaaacatgatgcgatttaca

SEQ ID NO: 191548 - DNA, 89 bp, Arabidopsis thaliana landsberg
gaaaaacaagaacaaacagataccgtggcaaattcttatccgttggactaagaatcatagatctcgtcgttggatatcgtcggatttga

SEQ ID NO: 191549 - DNA, 230 bp, Arabidopsis thaliana landsberg
atgggttgtctcttcggttgcttccgtgctaaagacgacgaatctactactgattccgtttctcaagccaaacataacgtaattctaatcgtttccttctgtttttccagatctttgatttgcaattcagtgttcaattcagctgtttcagtgttaacatctttggtttgatgattttcagagaggtcatgagtcgaagaatcgtttgtcagctttgtttctatctgaag

SEQ ID NO: 191550 - DNA, 300 bp, Arabidopsis thaliana landsberg
atcaagtcatagccttaaatcgcgtagtgtacaagaacaagtcttttcagagattaaagagatggtaattaacatgatattgccgagttacctcatattagcccctgtaatctcactggtatggcctccaatgaccctgctagatatcaaatttcgaagcccaatatgggtgcaacaaattggaaccaattttaccgagaagccaacaggctgaagcgatggataagattctggagagttttaggaaactcagggaaggcctgtttgcgacagagactctagatatttttgccgcagaag

SEQ ID NO: 191551 - DNA, 322 bp, Arabidopsis thaliana landsberg
tagaatttcaaaaaagaggtcttccacatactcacatcatcgtttggatgaatcctagatacaagtttcctacagctgatgaaattgacaagattatctttgctgaaattctagataaagaaaaagatccagagttatatcaagttgtctcggaatgtatgttggtgaatttgaattctccatgcgaaaatggtaaatgttccaagttttatccaaagaagcatgttgagaacacgtctcttgacaatgaaggttatccaatatatagacgcaaagataatgttcgtttcatcaagaagaataaattacaatgcgacaacac

SEQ ID NO: 191552 - DNA, 128 bp, Arabidopsis thaliana landsberg
gacagcgaatgattctgacgggttacgaatgtcccagagacggcatgtcgtgtcttggtttcccgttgctaagattagaccattcgggtgccaagcagatgcaaatgagtagtctttgtggcctctga

SEQ ID NO: 191553 - DNA, 454 bp, Arabidopsis thaliana landsberg
atggaaccatcagtttcagtccctagtgacactgccacaagactggctgttacagatatagctgatccactacttgacccagacggatttgctgataaaacatatggattctgcagcattagaatctttttgtaagatgtttggtttaccaaatagttatagagaaatgaatgtcatgaatgaagaaagtaacctttccttggaggccacgtgcgctccaaccatctgggatggagaaagatcgaaaatgagcccattcacttaaactggctttgcccaagatcacagcaccagattctctcagtcttttaacaacacccgcgtctcgagccacgaccgaaccaagcaaggcaaacgagccagccgtggtgttaagcttgtccttggtagatatggaatccttgagaagaaccggaacaccgtgcaagataggaagcttagtggagtttttaag

SEQ ID NO: 191554 - DNA, 339 bp, Arabidopsis thaliana landsberg
atggtgtttttctccaatgattttgcacagcagatgggtgtacatgggaaggtaaatccagcaatttctgtgatggtaagttacggtgggctggtggttggagacttgcttagcgaagtgatcagtcagctttgaaaaagccggaagaagacagttgtactctttttattcctcaccgcagctgtcattataggatatttcaatttgtacaacgcgacgcctacagccttttactggatatgctttgctttgggggttactgtaggctactgggctatctttatcaccatcgcggccgagcaacttggaaccaatctgcgggccacagtaactaacacg

SEQ ID NO: 191555 - DNA, 1182 bp, Arabidopsis thaliana landsberg
atggccgaagactctaattcttccgaatcaatcattgttaacgtcaccggagatgataataagtcggctttgttcggtaagtacgatctcggtaagctcctcggtagcggcgcgtttgccaaagtctaccaagcggaggatcttcaaaacggcggcgaaagcgttgcgatcaaagtcgtacaaaaaaaacgtttgaaagacggtttaacggcgcacgttaagagagaaatatctgtcatgcgccgcctccgtcatcctcatatcgtgctcctctccgaagtcctcgccacaaagacgaagatctacttcgtcatggagctagccaaaggtggtgagctcttctcaagagtcaccagcaaccgtttcacagagagtcttagccggaaatatttccggcaattgatctccgccgtgagatactgccacgcaagaggagttttccaccgtgatttgaagccggagaatctcctcctcgacgagaatcgagatctgaaggtttcagacttcggtctcagtgcgatgaaggagcagatccaccccgacggaatgctacatacgctctgtggaactccggcttacgtagcaccggagcttcttttgaagaaaggctacgacggttctaaagctgatatttggtcatgcggcgtcgttttgtttcttctcaacgcaggctacttgccgtttcgtgatccaaacatcatgggactctaccggaaaatccacaaggctcaatacaagttaccggattggacatcttcagatctgcggaaactcctccgccgtctcttggagccaaatccggaactgcgaatcaccgtggaggagattctaaaggatccgtggttcaatcatggagtagatccaagcgaaatcatcggaatccaagccgatgattacgatctggaagaaaacggtaaaattctaaacgcgttcgatttgatttcttcggcgtcgagctcgaatctctccggtttgtttggaaatttcgtgacgccggatcattgcgaccagtttgtatccgatgagagtacggccgttattatgaggaaggtcgaggaagttgcgaagcagttaaatttgagaatcgcgaagaagaaggagagagcgataaagcttgaaggtccacatggagtagctaatgtcgtcgttaaagttcgccggctaacaaatgaactagtgatg

SEQ ID NO: 191556 - DNA, 268 bp, Arabidopsis thaliana landsberg
tgaaatgaagttcaaggcgtttctgactgaaaatggtgtgaatctcttagagaagaggtttcttccagcgtttgacaaaatggggaagaattgtcatcttcttctcactaaagaacacttgttcttcctccataaccttctcaatggtgatggagttcaatgcattgctcagtttcgcaaagatgttctctttgatgattaccgtatctcgagccagaacgaggaccgtatcgctttctccttagatgttgctcttctgtatcgagcg

SEQ ID NO: 191557 - DNA, 1177 bp, Arabidopsis thaliana landsberg
gaaatgcacagagtttaccccaaagcttgttgagttttatacgaagctgaaggagaataaggaggattttgagattgtgttgatttctcttgaagatgatgaggagtcttttaatatggacttcaagaccaagccatggctagcactgccgttcaacgacaaaagtggatcgaaattggctcggcatttcatgctgtcaacactaccgacgctggtcattcttgggcctgatggaaaaacccgtcactcgaatgtcgctgaagctattgatgactatggagttcttgcgtatcctttcactccagagaagtttcaagaactcaaggagatagaaaatgcaaaggtagaggctcaaacactcgagtcacttcttgtctcaggtgatctcaactacgttctcggaaaagatggggcaaaggtatagctctcaataccctcttcattttctaaacactgttcttcaaggctgatctgaaccaacctgtaaaaatttggctttctttgttaggtgcttgtttcggatctggtggggaagaccattctaatgtacttctcagctcactggtgtcctccttgtcgcgcttttacaccaaagcttgttgaagtatacaagcagataaaggagcggaatgaagcgtttgaattgatcttcatctccagtgaccgtgaccaggaatcattcgatgagtactattcgcaaatgccgtggctggctcttccatttggtgatcctaggaaagcatccttggcaaaaacctttaaggttggtgggatcccaatgctagcagctctgggaccaactgggcaaaccgtaacaaaagaagcaagggaccttgtcgtagcccatggagccgatgcttacccttttactgaggaacgtttgaaggagattgaagttaagtacgatgagatggcaaaagagtggcctaagaagctgaaacatgttctccatgaagaacatgagctagaactaactcgtgttcaggtttacacatgcgataagtgtgaggaagaagggacaatatggtcttaccattgcgacgaatgcgactttgatcttcacgccaagtgtgctttaaacgaggacacaaaagaaaacggcgatgaggctgtgaaagaaggtggcgagtccaaagatggttgggtttgtgaaggaaacgtatgcaccaaggcctga

SEQ ID NO: 191558 - DNA, 1028 bp, Arabidopsis thaliana landsberg
atgagcagtgggcataagggtccaaatgtacgtaacttttttaaatggcaacgtggtgaatcatcatcgtctttgactactggattgcttcataatgagtcacacgagattgagctatctaactacggaggaataccaagtcctggtagtgagagcccatcgggacttcttaatggagagagtttaaatgttcaaccaattgctgatttggatctttttgtcgaaaggctctacagctactacagagacaaaggactttggtgtattatagtaaagtgggctgttgagcttctaagtctgggcttcatcatatgcttctctgggtttttcttgctgtatgttgattggaatggtcttcagaatgcaaaatgtggaatggatgcagttgaatcaggaactaaaccatgtgatcttgtcaaagaagctatccatccgcatcctttatcccctttcacgctcacaactgctataattgttggatatttggccctcttctctgtgtactggctcttctgcttcttaaggttttttgcccagttgaaagatactttggactttcggcacttttattacaacaagtaagttggaagttgcaacatgctatgaatagttattgctagagcaaaacatgcattttaggtcataattgattttctttctttttgttgtaaatttgcagtctccatgtcacagacaatgaaatccttactatgccatgggcaacagtccttgagaaggttgttcagttacaaagctcacaatgcctttgtgtggttaaggatctttctgctcatgatatggttatgcgccttatgcggaaagaaaactacttgattggaatgctcaacaaaggtttgctttctttcccaatttcccattggatccctggtgctggtccagcagtcaaatccgcaccagatgggacacagtatcaccttgtattgacaaagacccttgagtggacccttaactggtgcatattgcagagcatgtttgactggtatgctattctccacgctaatctttga

SEQ ID NO: 191559 - DNA, 352 bp, Arabidopsis thaliana landsberg
atgatgattgatttggagtttggaacagatgacctttcccctcgccaggaacaccccgccttcacgcgggtttttcgggcccgaggcaatgaatatgccgctggcatattggtcgttgaggtattggcgatgcgcgtccaggtgtgcctcgatggcgtcaagcggtttcaggtaggtaagatccactacgtacattatttgtattcctgtgaagtgagggtgtcgttgcaagtcagtttccatgaaaacgggtcgctgcaaatggcgccggatcgaccaccggttgcgactgcgtcatcatttcagcaagaagcctgccggtgaccggcccgagagtcagaccgtgatgggc

SEQ ID NO: 191560 - DNA, 518 bp, Arabidopsis thaliana landsberg
tttgtcgaagcactgactgttaccctcaggttcttcgaaacgctatgccttatgttctgccaaacgaaacgtacaattttgtgagcaatttaaagcttgcaagttatataactaactaactagcttcaatggctaaaggaatgaggatgtgtaccatgtgcctcaaagccatgtctagagacgacctagaaagagttctcccgaagcccaaggtcgtgttatcgtcatgttttggaggtggaagtttcctcatgttcacaactctttccaccatttgagtccccatcaacacaggattcacatcattactaatcttcgatcgtcccgttgatctgtcacctgaactgtagactctgcttcttgaggttgagacaggtctagcacgtgtttcagggatttttggagttgtacatttagcactagaaactgattttccaaccgaggatgaacgaggaaaagcagatgctcgtgtattggatttgattgaagtggttatactttctgaatttgatttctga

SEQ ID NO: 191561 - DNA, 110 bp, Arabidopsis thaliana landsberg
atggatcaacaacaccagctcatacgaagatcccagatccgagaaattgggtttctgtggaaaagcaaaaagacgtggaatcgagaatgtttgcgtcttcaggacattag

SEQ ID NO: 191562 - DNA, 242 bp, Arabidopsis thaliana landsberg
atggaatttcgtttacgtcatggaaagaaaaactgctacatgggacatcgccggtttcttcctcataatcataatttcaggaaagataaggagcattttgatggttgtattgaaacaagggctgctcctattacaccaccaggaactgttattctcaatattgatgtaattttgggaaagaatgtagattctcttggaaagaagaggcgcatgatagaagctcagaaaaatcagtggaggaa

SEQ ID NO: 191563 - DNA, 100 bp, Arabidopsis thaliana landsberg
ctcagatgtttattcctatccggaagatgacagtgttttggacccgctcctggctgagcatctggcccattttggaattgacttctcgtcgatgcagaag

SEQ ID NO: 191564 - DNA, 326 bp, Arabidopsis thaliana landsberg
gttggtaatggtgaaattgcaagcttctggtatgatgtgtggactcctcttggtcttctcttacattactttgccgattttggtccaagaagcctcaggattccactgaatgtcacagtttcctctgtttgcaacgagaatgactggaatttacctcatgcgagctctgaccaagctttttgtaggctcatctaacaactatgtgacatagtctatgtctctcccttcactcaactccagggacgaaaattatggctggttcgttgacggtcttaagtgtacaagtttctcttctgcgaaaacttggtcggctctctgacccttag

SEQ ID NO: 191565 - DNA, 418 bp, Arabidopsis thaliana landsberg
atggagaaacctccttataccacacgtgtgcctcgaaagtctactcttgagtattatcttgaccaagtattgccaattctcacgaggagacatgtaagactatgtcacctaagaatcaaattgttttagttactttatcaaatagaatcataggtattactattcatctttagttttatcatcttatagctaattcatgtttgttgaaatcttgcaggttttacaattgacaaagtttgactacagactagcaaatgatctagatgaagacatgcaaaagttgcgctgcagggtcaactatcatgctttaagattcacaaagcggatacaatcagttgggatgaaagtggtcaagaggatgagaaagatggccaaacgttttattgctgtccacttgaggtttattaagtttctttaa

SEQ ID NO: 191566 - DNA, 226 bp, Arabidopsis thaliana landsberg
atgagcgtgctagcgccactcccttggggagtccacgtgccatctacggcccagcagagcaagccgccgtccaaccgggtatcggacaaggctgcacccagcgtcgaaacgttcgatcgcatcgtcgacgactatcagcgccgtctgtacggtttcgccctgcgcatgaccggaaaccgaaaagacgaaaaagagatcgtgcaggacgcgttcgtgcgcgcctacc

SEQ ID NO: 191567 - DNA, 342 bp, Arabidopsis thaliana landsberg
atgagttgccatgaatcttctcgccttctctttaccgactttgaatgcgagataggaactcataatgaagtgtcgggcagcatctacctcatcatccgaagaatagacaccggtagcatgacttttcggatccatcgggcaaagactttcagaaatctcaagtccaagatccgcggcctttttaatatgcaggacgagttcaggatttccctcgatcgccttccattctctttctttgagaaactctccctgcgcaagggcatcgagaatttgtttggcagaccatgtgaagaaattcagatgcccgatattttcaacatcatcaacacaaacaacggcgtg

SEQ ID NO: 191568 - DNA, 406 bp, Arabidopsis thaliana landsberg
cgggcgggtcgcggggacgatcagcgttctgggcgtcggcgtgcccctcgtcgccggggccggcctcgcgctcgcgttcgagggacacgtcgcgatcaccgtgcccgggatcagcggctgggtgaccgcggcgttcgtcggcgtcaccctcgcgatcacggcctttccgatgctggcccggatcatcatcgaacggggcctgtcgggcacacggttcgggtcactggcactggcctgcggcgggatcgacgacatggccgcgtggctcatgctggccggggtgctcagcctcgcctcggggaaatcctggccgatcacgaaggccctggccggcgcggtgatcttcgcggcgatcctggtcttcgtggtcaggccgcttgtgaaccgctacctgcgcggaacttcg

SEQ ID NO: 191569 - DNA, 148 bp, Arabidopsis thaliana landsberg
atgggcctattcttccacttactgttgtttgaacaagtctcatattccaagttccaacgattgaaattcatgaataagcaacggcccttgtttagtaaagagtttggattggagctaaatcccctaagtgaagaaatatccaaaaata

SEQ ID NO: 191570 - DNA, 738 bp, Arabidopsis thaliana landsberg
atggttcgggaacaattcatgaacgtggctcgtctttttggaaggtgaaacaattttattttttggcaatcttgaaagaaatttatatacacaataaaagatatgatttttaattatatataaacaaaagtgttaatttaatatttcctctttttttcatattcaatatatccagcaaggactgcctgcttctaaacggcctaccgtgagtttatctttttctcactaaaattcattctgaattctaaaatgaaaatattttatttatttatatacattgatcgtcgtcaatattttggaaagttcctgatgaattctttttttctttcaatttttcttacagcaattgcattttcaaagatgcaacgatctcatgataactggaataacctcattcaacagtccaaaaaaccatatatcgattagcgaatgcaaaagagttaaaataacgaagataaaactcgtagcaccccacgatagtcctaacactgatggaattaatatctcagaatcaagtgatgtcgatatatacgacacagttattggaactggtatatatagctagatatttctcttgcacactcactaattaaaaagtaatctcaaatggtattttaagattatttaattttaaaatttcttataaaactttccaggagatgattgtgtagctattaacagcggaagtatgaatatcaatatcgcaaggatgaattgtggacctggtcatggaataag

SEQ ID NO: 191571 - DNA, 183 bp, Arabidopsis thaliana landsberg
accccggacgactccctttcggaagagcattcaacaccaaggacccgaactttccggcgacaacttcaggaacaaaagaagaatattccgtcttggtctcctgctcgcctccgcaaccaaccaccgccgacttagaaacaggagggatctctccggagaagatgactggaacaaactctccgg

SEQ ID NO: 191572 - DNA, 129 bp, Arabidopsis thaliana landsberg
aagaaaaagataagacagagacagaataaacccaagaaaaccagaccaaatcaagaacagagtgaaacagagcaaatccggaacagagagaaaaacagagcaaatccggaccagagaaaagagagatag

SEQ ID NO: 191573 - DNA, 504 bp, Arabidopsis thaliana landsberg
  unsure (1)..(504): unsure at all n locations
atgtcaccatcgccttccgtggcgcaggagcaggagcgccagcagccgttcagtggtgggatgctcgggaacgtgaagcaggagaaccagaaccagccgctgcggcccttcttcgacgagtggcccgggacgcgggcggactcgtggccgccggagatggacggcgcccgcgggccggcaggacctccttctcctcctccaccacccagctctccatctccatcccgatgcccagatgtgagctgcatctcagaaaccagaactcttgattctgttcgctgcccgaatcatgcttgactgaaacttgttttctgcaggcgactgacgaggaaccgtcgatcgggcggccactagacggtggnactcacgctcactagtgcgtgtcgcctggagtggagatcgatcgtcacgccgccgccgcctacgccctcgtcctacctatttgttttgccgtagtgtattgtaccgacctcattaagaacagaacagaacagaagtctctgt

SEQ ID NO: 191574 - DNA, 98 bp, Arabidopsis thaliana landsberg
tgaataaacaactaaacgataaagaacgtgtggcggctgcactagagaatccaaacctcgtggagatggttgatgaatgcctgccatcagaagagtga

SEQ ID NO: 191575 - DNA, 451 bp, Arabidopsis thaliana landsberg
gggaatggtggagccagacgggatcgaaccgacgacctcatgcttgcaaagcacgcgctctcccagctgagctatggcccctgataccttccgtggaggaaaaatggtgggcctgggaggacttgaacctccgacctcacgcttatcaagcgcgcgctctaaccaactgagctacaagccctcagaccgcaccttcgatcggctcgcctccgagacgaagtctcgaaaggccgacctgccgtcgcggcttgtgccgcgccctcgcggagcgccagcagccgaaagctgcggtacggcgcgcgagcgcaggtcaaagtcactcgtgaagaaagagaaacgaaggcggcagatccgcttttgtatgtgcgacgtgaagattgactatcttccgtcttgttccaagagaaccgaaaggcagaggctcatcgccccatctaaaagacgggaatga

SEQ ID NO: 191576 - DNA, 905 bp, Arabidopsis thaliana landsberg
aaaaaaaaaggggagaagaaaatgaaaaggttcttcaagaagaactaagtcctcgggacgatagagaaaagtatgagattttcattaactatgcccatgatggaatcatatgggatagagatgatattgatgatgaaaatggaatattcttcttttctttatctaaagagatcgatcatgagaatgatgatccggatccaatgacattatccgagtgccagaaaaggtcggattgggagaaatggaaaaatgccatgcaagttaagttgcacttccttaataaaaaaaatgtctttggacctgttggacacaagtgggtatttgtgcgaaaaagaaatgagcaaaatgagatcacacgatataaagcccgacttgttgcacaaggtttctctcaaagaccaggagttgattatgaagaaacatattctccggtcatggatgcaattacattcaggtacttaatgagtctttcggcatctaataatttagatatgtaccttatggatgtagtgacagcttatttctatggatctcttgataatgatttatatatgaaaatcccggatggattaaaagttcccaaggcattagactcatcaaagtctaaagatatatatgcggtcaaattacagcgatcactttacagattgaaacaatccgaacgcatgtggtataatcgttaaagcgattatctacttaagaaagggtatgtaaataatgaaatctgcccttgcgtcttcattaagaaatccccttcgggatttgtgatcattgttgtttatgttgatgacctaaatataattggaactccaaaggagattgatgatgcacgaactcatatgaaagaagagtttgaaatgaaagatcttggaaaagacaaaattttgtctcggtctccaaattga

SEQ ID NO: 191577 - DNA, 427 bp, Arabidopsis thaliana landsberg
cttttagaggagggtgacggaaaggatcaaatcactttgaggtcgaagcttgaacttcctgtccaggtaattatctatggtggctgttttgtcttagtaagtacccaaattatcagtcaatgggggatcgtgttccacacttccgctgttatgtccaaacttagtagttccatagcgttctttaatgttcttatgtcctcttatatagaggtctactttcgtttctaaagcctgttattatttctactgaagcattattttctttattaataattcattatattttactttggatagaaagtatctggcaaaaaaatattaattactaaaccatgctggttgcaggcagttttgaatttgcaggttcctgccgaacattccaaagaagtgaatgattgtaagaatctgatcaagacactggtgatgg

SEQ ID NO: 191578 - DNA, 780 bp, Arabidopsis thaliana landsberg
atgaattgggaaccaggttttgatgacatggacagtatatatgcttcccctgatgatttccgacaaatgagggagcgtaacaaggctaaaggacttcaccttcttgagtttttcgttaaaaaatgtcatgatattggggtaaacgactcctttaaactcattgatagatccatatctgtctttatgtccctcacttgtatcacagtaacttttggtggctctgatacatggtagttgttgaacttgtaggttgggtgcgaggcctggatcaggaaaggtgatcccacagaattgatatgccatgaagtgaggcgagtccggccagattttctggttgtgggaagtcgtggtctcggcccattccaaaagtatgtacaatcctcacacacgcctcaagaagacttattcttgctttacagttataccatatcgattagtcattatgtagtctcaaatgacttgttggtttcgggaaaaatacagatcaagagtttattagaaatcctgagacctttttcttgcatatgatgattgatgacacctcatggaaatcaatcactgcttatgctttagactttatactgcaccgagaatcgtcattagctcttgtacttgcttgagcttgaaatcacagatattgatcaagttcacatttgtttaccactggacagggtatttgttggaacagtgagtgaattttgtgtgaagcatgcagaatgcccagtcatcacaatcaaacgcactgctgaagaatctccacaagatccagctgatgactaa

SEQ ID NO: 191579 - DNA, 2988 bp, Arabidopsis thaliana landsberg
atgactaaacgagttaaaatggaattgcatagcattagaaaaaacttttcggaaaatgaaaaggtgataaagtttccattgatgattagtctagcgccgggtggaataaaaattgactggggaacaagaaagcgacagaatctgaaagccaagagggcaagaggattatcttcgtattctaacgttgacaaccaaacaccgaggttaagcttgtaaaatgtgtcattttggactaattaattcaagaatcttcatgggatcatgtgcatttccttaatctaatgttttattggttactgtaatattctaaggatattttcttatacgcaaattttaaatctttgacatttaaggtgacggttcttcatatgccattatgcttttccacttctctaagaacaattatttttaaaatgtaatacataataattcaatgactctaaccaaataaataattacctgtaaagaagaacttgttatgtggccatgtgcatagaggtttagttccctaatgaagtattcacttccaatggacacgccgaacatacattgacacaggaattaatgcggaaagtatcaattacttcttcgatggaattttatattccatttgttatgtactatacattcttaagaaactaagcatttattttaaaaaaatttaattagataattcattaacttaaaataaattttaattttatactattagatttaatttattatagtttaatttaatttaactcaaattaatttaatgaaaataaacttaatttttcattttattttaaattgctgattaaaatcaaatttatttatttagttttatttttattgcatattaaattaactagttttttttttgtaatcgttatgttgttcgtttagcattcgctggcaaccaatgactaatgaatgggaccagtcgcaggaggtcgatgaaatttcacacgtatatgtattctcattttcttttatttacgaagacaaagatgatatgatgatttgatgatgctgcggtcactactcgctgcttctttacatccaattcaaattataatgcctctatgattttctgcaaatacttatctcttaaggagtattaaaatgggaattatttcatcttatatatagttaaaccataatctctcaaaagtaatgttcgtgatcgagtcatgcattgaaataaattaaccatattttggatatgcatctttggaagtgaaagcagaccaaatcagagatgagtgttgcacacgtttgtttctgtttgaccattctcatattacttcaacttttgtcttttatgttgtttttgttctgccctgttttctttctcattgctatgtctctatcctctgtttcttcttcccatcttctctctgttttacttttaatcttttgtcctgtatatgaaactttttatttgctacattggatatgataatttttatttcaattcttgcatccaagttttatttactttctctgagtttttctaatgggaaattgctttgggttttccgcaaaagtaggtaatagagaaagtccttatcgtggtatgcaaccaaacatctctcttctctaagatttctctacttcttgtcatatcttatttctgattataaagtcttaaattgagttgagacatctttgatttgattaactgttgattcatcaggttcgtcaagaatctctgccaaaagaagtcaatcgtctcggctttcaagcttaacaatacaatcatcatcttacaacgatgacacgagtgtggcgtctcttcaaacgcctagaagtgaaggagagctcttagcatcgcccacgctaaaggcatttacgtttaacgagctaaagacagccactaggaatttcagacccgatagtgttatcggtgaaggcggtttcggttatgtctacaaaggatggatcgatgaacgcactttatcgccttcaaaaccagggtcaggcatggtcgttgctgtcaaaagcttaaagaagaagggtttcaaggacacaggcagtggttggtacgcttatataattaattatcctctgaatcagttttaggtctttagccgtagaaaccaaaatcgaaacctaaataaggaattgttgatttaacaggcggaggttgattgtcttgggaggcttcaccatatgaatcttgtgaaactaattggatattgctcgaagggtgatcatattcggcttttggtgtatgagtacatgccaaagggaagcttggagaatcatctctttagacgtaagaaaacttgtctctcaagtaaagatcaatgctcaaattatctcgagagcctttgcgaatgtgatagcaagattcaaatgtatagttgttattgtataacagatttagaaaatttagttggttttatattcacaaattttcatttattttaaaaagttgaaatcaggactattatgtaggtggggcagaaccgattccgtggagaacaaggattaaagtggctatcggtgcggcgagagggcttgctttccttcatgaagctcaagtcatatacagagacttcaaggcctccaatattctacttgattcggtacaactggataacaaatttacatgtttttgttcatcaaatttcaatcatagaaattttgagatttaatgcaaaccaaacaaaataatatgttgagtttgattgaaaaataaaactaatcggttcatgacatattatggtttaagttttggttttgaccgagcacttccgtttgatttatatgtccatctttacgtaggaattcaatgcaaagctttctgattttggattggcgaaagtaggaccaaccggagacagaacacacgtatcaacccaagtgatgggaactcaaggctatgcagcacctgaatacgttgccactggtcggataacagccaaaagtgacgtctacagcttcggtgtggtcttgctagagttactgtcgggacgtctgaccgtagacaaaacgaaa

SEQ ID NO: 191580 - DNA, 456 bp, Arabidopsis thaliana landsberg
atgggtgttatggagaagaaacttcgttcactaaaatgccaagtgagaatagtagaagcaagaaacgtagagatcaagtcacaagctagtactctgttcgttagattctatctctctgcaggacacaacagaaagatcgaagtaaacacgagagagctctcttcgaaatcagaccaactcatgtgggatcaatcttttggtctggagtgtcaaggggacgaagcagctgtcaaagaattgaagcaacagagagtcgtttttgaactacggaggaagaaaatatcgacgtttcttaggaaatcatctaaatctgaggttgttgggagaggagaggtttcttgggaatcggttttcgagtcgccaggcatggagattgagagacttgtggtgatgggtgaatccaaaaattgggtattggaagatgaaagacctttgttgttgaagatagctataaag

SEQ ID NO: 191581 - DNA, 848 bp, Arabidopsis thaliana landsberg
atggtgatgttatctaaaagcaaagaagagtcgtatcattctccttgtaaacatcatgaaaaagagggtcggtgttgggtgagagttttgggttacgtgtcggcaacaaagctaagacacttgtgatttgtgatcattactgggacgccaattctttcttcaaccgaagactaagattcttcaaagattattgaccttctttttttatgaggtttcaaagtttagaagctaaaacaaattaaattgagaaagagttgtttgaaaagttgatagagactagaaactacttttctccgtaagaattgcttttgtttgacgaaagaagataagtgtgtggggacatatagattaaccgggtggtaagcttagaggattctaattgggattattattggatatcaaattaaaccaaaaccggagcttgacaaattcatatacaatcgaaatcattttttcaaaaggatcaccagaaaaataaaaacaatgtccgtaggagattaaaatcgtatccaaggttgaatgttgggagtgtcaaatttgtacagagcatcaaatcaaagtaagaaaaatgtctgatgacttcagaatttcagatcaatcccacgctcatgagtggagcccataaagtccatcaaactcagatgtgatagacaaccacgtcacgtggatcttttgtttcgttctttcccatgtagaaaatcgtagccgttcgatttacggtcaaacatacgattttagattcgacggcgggtcttatcaatttccatctttgctcgagaggatttgctttagaccggaaaattaaacattcgatatttgtgtttccgttattactaaaaagatcatag

SEQ ID NO: 191582 - DNA, 43 bp, Arabidopsis thaliana landsberg
atgatcgtccgctgtaatgatcgtccgctcaatagggttattg

SEQ ID NO: 191583 - DNA, 257 bp, Arabidopsis thaliana landsberg
atgcccaatatcaaagattccggtaagtgaaagccattcatactcaatttcatagagttatttggagtattgatcaacgaatctggaatttgggtataacatgtctaaggagaatctacgaattgatgcaagagaagatatcaagtaacatcaataacattagacgattatggagtttcatcgaagagatgataaccaagaacgacgatctcatcaatttgggattgaatctgaaaaggaaagaaacggttgactag

SEQ ID NO: 191584 - DNA, 900 bp, Arabidopsis thaliana landsberg
atgaagaaggctctgcagcttgtcatcgagtatgcagtcgagtggtgtgatggtgatactcgacttcctggtagagtatgcagtcaagtggtgtgatggtgatactcaacttcctggtagagtgatgaggtcgagtagttgtctggcaaagggatgaagtcactcgacctgggggtcgagtgatgtgatcgagtggtggtcatgagatggagatgaagacactcgacctgggggtcaagtgttgtggtagagtggcggtgtcttctactcgacctgggggtcgagtggtctcttgagatcttgaagctcctactcgacctttgggtcgagtggtttgtcatgatcaggtccgcttcttccagttagctcgtggacaactccaaatcccctgaaaacaacacaaatatgcaacatgcatgcaaaactatcctaaacatgcaaagtgatgacaaatgatgtgaaatggtataaaacagtgatgatatgatgctaaaatgatgacaaatggatgctcaaaacaagcaaaatacacacttatcagttactaacagtgagtggtcaggatgctaacttccatgtatatccacttggatttgttgttgtggacagcgagaataacgattcttggacttggttctttacgaacttggagcggatcattgcagacagcaaaactctgactatattatcagatagacactcgtcaatccgtgttgctgttaaaagagttttttctgcaagcaaatcatggggcttgtattattcacctttgtaggaatatccaagctaagtacaagaacaaagctttgacgcagttagtaaaaaatgcaggatatgcgtttaccggtacaaagtttaaagagctttatggtcaaattgaatccacgaaccaaaattgcg

SEQ ID NO: 191585 - DNA, 361 bp, Arabidopsis thaliana landsberg
gacataatggagctggtaaaagcacaacaatatcaatgcttgttggccttcttcccccaacgtctggagatgccctgatacttggaaacagtattataacaaacatggtaaattttttctgttgctattacttgaatctctaattttcttgcataaccaaaaaactctgacctataagctactaagatatgcatttttgttttctagcatcagttgaataccatctgtatgttttttatgctgttatttcccctattcttgcatttttgtttctgactatacgactctcttttggtaggatgagatacggaaagaactaggtgtttgccctcagcatgacatcctctttccagaactgaca

SEQ ID NO: 191586 - DNA, 162 bp, Arabidopsis thaliana landsberg
atgagaaaacttgctacaccgcgactgacagaaagcggcagtcgacgacttggtggaggtggtggagactcctccgctgggaagtcgagctctggatctggtggttttgggtttggtagaaacctatctaaaagctccatcgacatggccttgagacacatg

SEQ ID NO: 191587 - DNA, 114 bp, Arabidopsis thaliana landsberg
cttggaagcaccgcgagcgaggtagaagggcgacatgggtgccggtggccggccgccggcagaggtcgtgttatggcaccccgaattggagccaaggccaaggaggaggcttga

SEQ ID NO: 191588 - DNA, 287 bp, Arabidopsis thaliana landsberg
atgcttaccttggtggtcgatccggcgttgaaggaaggacagtggaacagcaagttctggaggtgaggcttcaaaaaaatatgtatcttttatcttggctttgaagcttgtcatggacaagagtctaagcctttacacagatacttttagttactgcattgatatgtttatagagaggcttgtaatgctagcatcattagctattttggttttattgttggtatacagtcaaatccagttcatgaagctttaggcaacgctaaatctctcaggaataacaactccag

SEQ ID NO: 191589 - DNA, 267 bp, Arabidopsis thaliana landsberg
atgatgaaaaaacggaagaggcaagtctccaaggaagatgttgccctaaccatatcttcttcagtgggtgaatatggagagaactcgggtacgttgccaattgatctcatggtcgaaatactctccagggtgcctgcgaaatcggccgcgaggttccgttgcgtgtcaaatgattggaattctcttctccgcagtccatatctcaccaacctgttcctgaagaggtctcggctcggccacgtctcttatcaagtttctaagctgagg

SEQ ID NO: 191590 - DNA, 205 bp, Arabidopsis thaliana landsberg
aggttttatctagtagggagtgataggaataaaagattcttcagagtgttgaagattgatcgttcagagccatctgagcttaatattagtgaagatcctgttgtatattcgcctcaagagatcaagagtctgcttcagcgtatcgctgaaggcaatcgtgccacgggaggattggcttttgtggccaaagtctatggaattgctg

SEQ ID NO: 191591 - DNA, 104 bp, Arabidopsis thaliana landsberg
atgggactgattacctataactgtcaactttgttaccgttatccgtttcctgtcttggcaaactttacgctaagtttgggcttcatcgttacaattaaatcaag

SEQ ID NO: 191592 - DNA, 132 bp, Arabidopsis thaliana landsberg
ttaacggttaattggtatgtcgatgttcagcttgaaactgttcatttctccgagtggtttaacgctgttgttaagcgcatagtagagcatcggaatatcatggacaaaacttgggggagagatgaagtggtg

SEQ ID NO: 191593 - DNA, 770 bp, Arabidopsis thaliana landsberg
cctcgggcaagggcagccgaccccggaggattcacgtctcgcccgagggcccccttaagcaacggacacaccttcggctcgcccaaggcccagtcttcgccaagaagcaaccttggcccgatcgccacgccgaccgaccatatcgcaggagcatttaatgcaaaggtggcctgacaccttatctcgacgcgcacccttcagtcgatagagccgaagtgaccgcagtcacttcgccgctccactgaccggcctgacaaaaggacagcgccgcctgcgccgcttcgactgctgtgccactcgacagagtgaggctgacagcagccaagtccggcctcaggcgccatggggaactccgcttcgcccgaccccagggctcggactcgggctcagccccggaagacgacgaactccgcttcgcccgaccccagggctcagactcgggctcagccccggaagacgatgaactccgcatcgcccgaccccagggctcggactcgggcttagccccggaagacgacgaactccgcatcgcccgaccccagggctcggacttgggctcagccccggaagacgacgaactccgcatcgcccgaccccagggctcggactcgggctcagccccggaagacgacgaactccgcttcgcccgacccaagggctcgaactcgggctcagccccggaagacgacgaactccacttcgcccgaccccagggctcggactcgggctcagccccggaagacgacgaactccgcttcgcccgaccctag

SEQ ID NO: 191594 - DNA, 445 bp, Arabidopsis thaliana landsberg
atgaagttacttcacttctcctcgacaattgattttgatcttggtgattatattgttcatattatcaatatgatgcagttactgcagaacatagaagaagtttcaaaaaccactaaagccatttttttgaaaatgttctcatactccaaaaggcttcgtttcattgagtatagtaatagttacactcatgctgttgaaatctggtgtgcagtaagggagtgagcaatggaagtatcgcagatgccacttcaatgcagggagcaactgcaccagaattctcagattgagccgagcaaggcggatgtttagcagctggttgtcacccttcgtcattttaggccacattgtgacaatgacactgattatccaacaggtttagcttccgattggtgattgaaggtaacccttttatgatctctcttctccctcagttttatgtaactaa

SEQ ID NO: 191595 - DNA, 168 bp, Arabidopsis thaliana landsberg
ataaatagtgtcgatgttgtcgacgagtactgcatgcacactccaatctatgcgagagcttggaccttgacaatgttgtacatagaattttgtggggttccacatgatagtgatcccaccacttttggtcctacggttaaagctgtgttgagggataaggatacataa

SEQ ID NO: 191596 - DNA, 79 bp, Arabidopsis thaliana landsberg
atggtccccatccagcaagttcttgtgattgtgggtgagtttgggctgcccatgattgtgggtgaagaagtgcttgtgg

SEQ ID NO: 191597 - DNA, 513 bp, Arabidopsis thaliana landsberg
atgaattatccttccacgtgtaagtttgagtgacgtgtcatgctaattattcttaacaaaggcaaaactactcttgtcttgttcctcctgtcgtgtaagctagcaactgtaattttgctattggtctactaacgtgtttagatattcttccacttgcattaccttttctttttattcgacattatagaatgtattaattgttaacggtttagggaaactacttaattatatggtttacaaacaaaaaaaaaacataatggtgtcaacaaaaaaaatcacaaaggcaataaattaaagaaaacaggtgcatgtggttcgtttacttagttgcatagaatagaaagatgctgctacaaaatatccttccgtgttctcgcttatccttaagccgtatgcacattttgtaccttcaccttccacacgtgtgcatgtatatatccacacgcactacaaatctgcattaatggtacggtcatcgttgaaacgactacgttcggtgaccttcgtgcttaa

SEQ ID NO: 191598 - DNA, 425 bp, Arabidopsis thaliana landsberg
atgcgctttctcacaaggtttcttaggcgcctgtggccgcaaagtcttgccgggcaattggtcgtgttcctgctggcggcgatcgttgtcgcgcaggcgattgccttcgtcgtcgttaccgacgaacgccgggtcgcggtcgagcgcacgacacgcgatcaggtcgtggcgcgcacggtcgattttgcgcgcctcgtcgccgaaagtccggtcgatctgcagaatcgcatgatgcgcaatgcgtcggatcggcggttgcgcttcgacatttcggataccggcctacttgaacacgccgatatggacgaacgcgacgaggcgctcgaacggcgcattggcgatgaactcggcccactcgcgcgggaggtccgcgtcgttaatgagacaaacggcatcaacccacgcttccgtgcgagaaagggcgg

SEQ ID NO: 191599 - DNA, 302 bp, Arabidopsis thaliana landsberg
atgaggatcatcatcaggtttcagatgatgcttccccaattggggaaagaaggtatagaatttgatttggtagaattaggttcaatgaaggttatgctcgatgaaatcatcaactatgttcagtcattgcaacaacaagttgagggtaagaatatcccaacaatgcaagttacttgaaacgctcaagttagtttggtcacaagcatggtctgaaagaggttttcattcttgacaagctgcttttattttcttcagtttttgtctatgaaacttgcgacggtgaatccagaaatcaacattga

SEQ ID NO: 191600 - DNA, 94 bp, Arabidopsis thaliana landsberg
agaaacttgaacaacgtgagtgtgacgaaccggaccggtttgtttcaccgacactgattgtaaaaataagattggtgttggtttctacgtgtcg

SEQ ID NO: 191601 - DNA, 126 bp, Arabidopsis thaliana landsberg
atggctaagttactgaagctaggctattttaacgaagacaagagggagctaattcgcttcgggggagaggaagttaccccgaagcccgaaaaagatgaggtggtggtttttaaaagcttcttcaaa

SEQ ID NO: 191602 - DNA, 169 bp, Arabidopsis thaliana landsberg
tactatactaacacaaaatcgaatcaacatgatgaacagcgacgatgacgatgaaccgagaggatatctgattctccgaccggaagagctccggccatgggaactagttaatttgttattctccggagatataaagaaaccgagatcagtggagagctcggaaacctaa

SEQ ID NO: 191603 - DNA, 115 bp, Arabidopsis thaliana landsberg
aagaaatcaagaaatggatcatggagaaatgagcactaaggaaactaccactttgaagcttatacccgggtacgaaaatgtgatggagctcgagcaaagaagacaagagctgaag

SEQ ID NO: 191604 - DNA, 82 bp, Arabidopsis thaliana landsberg
atggagcagcggagaaaccagaatgctgtccaacagcaagacgatgaagaataccccgcgcggacctttccctgtcgaacag

SEQ ID NO: 191605 - DNA, 3 bp, Arabidopsis thaliana landsberg
atg

SEQ ID NO: 191606 - DNA, 171 bp, Arabidopsis thaliana landsberg
atcagaaaatccaggcccttttcaaatttgcttttgagaagattttctttcgaagtcggaagcgctattggccctcatgcatcgactatatgctccatgaggaactaagtatcatgtcaagtaatcatcattggatcctcttgatagtacgaatatctagcctactaaccg

SEQ ID NO: 191607 - DNA, 744 bp, Arabidopsis thaliana landsberg
atggctcgtcttagacacactgcatggaagtctgtcatccccttcttaccctctcatctcgctgagcgtccgcttcgccatccagtgaccggtcagtctagccatttggagaggctacaccaccacctgcatgaggagcaggaacgtcgacgacaggagcaggagcaggagcagcatggctcttctttctcgcatcagcaggagatagagtctgtgaggagctgctcccccgagcttccgctggaggcgccccctgcaccaccactgagcgccccagccgctggagtagttactggaggagacccagacgacagaggtggcgacagcatcttgagcttcggcaccgacctttccgccgaccaggagttggaaggatgggttgctcgacccatcactcgcgacgctgctcgcgggtgtcacttccacgatgagctcgacaccctgctacgccaggcactcgaccagcgtacttggtccatcgagtatcgctgtgtggtcttccagcatagtcgcggggtctacccggaccgctgggaggcgacctgcttggtgcgccgtccggagaacagtctacggggtgcagaggtctgctcagagcactattccatctctgagcgggactcagctaaggcggccatgcaagatgctgcacggcgtgcgctttcgcactactgctcagtgctcggtggggtagctgacggtctcaacctaaagtattaccccgccgtccatctggtagcatag

SEQ ID NO: 191608 - DNA, 265 bp, Arabidopsis thaliana landsberg
atggagctaaaaataaacttattctacatattatatgatgagaataatatgtggtaaggttgggaaatacacaacggttgcacaatgtgcaggacaatgaatcatcaggaacacacagatagaacataaaattacgaacatcaaacacttcctctacagcaaaaatagaagtgaaatcggatgcctaaccaacaaatcctgtgactttcagcatatcaaactcgtaaatatcttagatgtcatgattatggttgcttcccactaa

SEQ ID NO: 191609 - DNA, 526 bp, Arabidopsis thaliana landsberg
atgaagaagaagaagaagagaaagagaagagttaaggaaagaaaattaagatactcgaagactacgaaaggtacgggactgtgacctaattacgtgacagacttatttcattggtaacgttcacgtgtctatgacattacgttcgcattttaattggttgattgataacattcatcaccacatcacacatgcatatttgttttcttttatggtaagccaaaacaatggtaaccgatacttttctacttcaacggataacaaaactggaaacatataaatcaatgtcaaaaattcgctaaacagtaaacacctaataaataatcaatgtaaaagaattattctatagtttttagtatttttttctattagtaagttttacacacaaaatttgacttgtggaagtatagtatgggagccgtttatgtctgactctttccactggttttggtccatttgattagattacatgaaaattaactatacttttaaatggttcacaccattggaacaattggctgcaagttag

SEQ ID NO: 191610 - DNA, 295 bp, Arabidopsis thaliana landsberg
atggcaaataagcacgaggcccgcgagcccggcacgaagcccgctgtttgggcccggtccgagcccggcacggcccagttctatgtgggtccaggccggcccggcacgaataagcgggccgggttcggataggaaactaggcacagttgactagcgcggcacggcccgtttacccctaagcctgttaagccccttttttacactaaaacgtgcttaccgacccgtttagcccgcttttcggtccgcttttttcgtgctaaacgggtcggacccgctgcggactgggctccgatag

SEQ ID NO: 191611 - DNA, 159 bp, Arabidopsis thaliana landsberg
ttacaaacaaatccgaaatatttcagaaactccagcatgaaatcaccacaagaagaataaaactaatcggggaaagagttacagattatacaataacggagcttactcggcgacaaacttgcggacagcaccgaattgatcggagagaagatcgaaaag

SEQ ID NO: 191612 - DNA, 484 bp, Arabidopsis thaliana landsberg
aaggatggagaaatcatccatcggattctattgacatttctttctccgaaacgactcttgaagaaaccgtggcgatgaatgtggagtgtcctggagtagtagtagtctctgtacctgaaaatggttccacgattcttgaagagaataaggttggtgaagagattaaggaaagctctgagatttctactacagaaggcgatcgacttggagatgatgtgctcaagataaaggatgttgttgagactgatgggttcgtcgtatctatctctgatatgaaagaaagtttgaactcggagaagaagggacaagattctgatggtcagaggattgtggaggctgagaagataatattgttcgctgaaatcgtagatggttccacgtttcttgaagagaataaggatctgcaacagattaaggaagtctctgagatttctacagaaagtgatcaatttgcagatgatgtgtacaagatagaggatgattc

SEQ ID NO: 191613 - DNA, 50 bp, Arabidopsis thaliana landsberg
atggaccatgggcttacaaagacttcacggttactacaatacaaacgtac

SEQ ID NO: 191614 - DNA, 597 bp, Arabidopsis thaliana landsberg
ttagtcgtcgtctccacatggcgactgaaaccctagaattgaaaacaccacaattagcagatactgttgctgttaccgagaaggacacagagacgaagaagaaggatgaagtagagaaagatgaggccatggaggagaaaggagaagaaattgatggagaaaaagttaaatcgccggtgactccagtcagtgagagacctataagggagaggaagaggactggccgttacgttatagatactcctcctcgatcctccgggaacaagcctctgtcaattacacaggtataaatatgtaaagttgcttcctttatcaatttttgggttgagttttggacattgaatagttctagtttcgtttggttgtttcagggtcgtggaacacggcttaaggaaattccaaatggtatgttaatttatcacatttggtgatttgggttctttatcttattagatttagatttggtgttactctttgaaagccaaatttagtctgatagagttgttaactgtttcagttgcttataaactgtccaagagaaaacctgatgacaacctcttcttacttcacaccattctttacggcaaaaaagcaaag

SEQ ID NO: 191615 - DNA, 626 bp, Arabidopsis thaliana landsberg
atgacccaaggtagccctcctataccgaatgcaaaacatccgaagtagacctaaccaaatttaatttaagatttcttataacaagttaataccaaaaatttaaaataaaaataaaaatttgcatgaaaaaatgaataaatccttgaaagaaaatgaaagattttaccagaatgtttacgaagacgaaaattgggatcaattcaggaagcacattcatttgctgtctcagaaacaaacaaaaaaaaaacatattataagacgaggattgttttgtccaaaaaaaaaagaggcgaggattgtaatattgatagttatctcatattagtccaatatagaaattctacaagagtaacctgtaacgtgaagctaactccaataagcaaggatccgatggacattccaacagcagaagcctatgataatgtttatcaagagaatgttaataattattatactgttatatttgtaagtctatatataaactggatttttctaaccaataggagtggtcgtcttccccatctatccacattaatcaaaccaaccaaagcttttgggatctacaaggagtaaaaaataatcatagaggtataatcgaaatagctttgagaaatttaatatcgtaa

SEQ ID NO: 191616 - DNA, 113 bp, Arabidopsis thaliana landsberg
tgaaatatagagtgagcatgagcctcctggttatctctcgatgtggtatgggccgcccaaggcgatggatggagggtattaatttatttcctaaccaaaacattcgtctttaa

SEQ ID NO: 191617 - DNA, 147 bp, Arabidopsis thaliana landsberg
aatctgtcggaaagttttgacgggttattgatggggagacatgtgatgcgtgttttatttcgcttcagatttttacctgaaaaaccacacgactactgcaagtgcacaatatatcggagtagtattttaggatcgaatccacaatga

SEQ ID NO: 191618 - DNA, 127 bp, Arabidopsis thaliana landsberg
atggaactcgcggagattgcattcttgagaagtaacccaagtgcgtccgcggagaggaggctcataactaacgccggtgatcggaaaggtcatagctttcaagtcggtgaagaagaaacattgaacg

SEQ ID NO: 191619 - DNA, 1583 bp, Arabidopsis thaliana landsberg
gtttttatgcaataaatcgagaatgatagcgacaatgatgaaatcatgttcgtcattacgtcggaatggtgttttactgttttttggtgaatctattgtggtttcttatgttgttacactatttctatgtcggttcatgttctcggaatgtatgtctagtcaccggcgatttcgattcaaccgttgttttgctatgtccggcgattgcctcgtgaatcttttggctttgttagccgtgtgtttggtcatactaacatctgatgttagttatgcgatagttcccgggcgtcagtatgatctactatgggcgttccgaagtttaacacaaatcctatcggatttgatatgtcaccatcgaccggcacggaaaccaccatggaggcaatatgttgaggaggagttggaggctaataggagaatcagaagatggtttataccatatcaacaaaaatggggtttagggaaaccaagatcaatgacatctctttctatatgagagttttgatcaattcgaaggtttagcgatgtaacgaatggatcactgcctatgattttcgtatgcgttaccggtattttatctgtaaaaagaagatgattctcaagcaagaaagtcacaccaaattgacggaaatgatgaagacgattaagtacttgactaagaaagcagagtgtaatttactttatcatttattcgttacataaaccattggttgtatctatactatcattgataattttgtatacagtaattgatatgaatgaagtattttatatctttttaaaaagaatatagttaataaaatataagatttaaaagaaaattaaggctacaaatataagatatctttgtaaattttgttaagacaatatttttgtaagatagattttgtaagaattgaaactgaaaataaacaatagatttaaacttttttaccaaaaatgtatatcactatatgtactctgaagattgtaaaattaagtcactcattatactactctttccttttctctgcttaccttgtaaatactattgtacccctatattatattttaaattttatattatccttagcctaatattatgtcagacaacaaatattattgtcccgcatgattgatgagaaataccattgtctagcatgactgatgagaaactaaaggcgcaagtggaaaggataatcaaaggtgtatttgactaatttttggaaaatctagtcgttgatgctggtaattcaaaaagtgatgtatcttcagacgatggtcctaaatctaacaatgaagccgccaatgttgaacaaaattccaatccagtttccactccgaagtccaacaatgaaatcgctgatggagatcaaacccccaatccactgtcgagtcaacttgtatctatgcagtctgaatatacccttccttcttttgacggagaccaagatatatctgttgcagatgacgttgtttctttctacaatttggtggatgtaccggacgatcggaggggtggtggaacactttttcatgatgagaaggaatttcagattagcggatatgagtggtactttgttaatatttgtcgtaccatgtaa

SEQ ID NO: 191620 - DNA, 490 bp, Arabidopsis thaliana landsberg
atggggaaacatatcgcgagttcaatcatccgaaaaagcaatcaaatgattcaaggttacgtattggggtttaaaaattattaccatgcttatcttgccttgcatcaaagagaaatcccaagcaatatacgaattttcagattccaccatcaatgagatctagataaacaaaaagaacatgcatcaatacttacgccagactcaaacgaaagtgcttatcatatgctttcgtttttttgccagcagaaaatctgaatgctacatactacagtcatcaacatcacttttcacgtttttgaacatgacaatttcagatggaacaagtgtcaagagtcttagaatggcaataagtttcagtttcattaataaccaaaagcatctacggagaacatattacctcataggttctcccagcttgaacgattatctccttgtactcctcattgtccctaagaagtataaacacttagagctagaaatcgtgaattga

SEQ ID NO: 191621 - DNA, 186 bp, Arabidopsis thaliana landsberg
agcattggcctcaaaatccgcagagccaagaagaagaaaaagaaaaatcataaaaacagagaccgtagagtggcagcgaagaagaataagaacaaagatgcacctcatgaaaccgatgcaagtacaattgacaaagctgcaactagtaactttacaaaccagacattattctttgttgctgcttga

SEQ ID NO: 191622 - DNA, 689 bp, Arabidopsis thaliana landsberg
atgaagaagatagatgcatacatagatttcttgcccacgcttgtcattacaatagtagaaaacgttaggcaaaagcaagaatccggtaagaactatacgaatgatgaatctgtttataagaacatgagcaaaagttggttcagtttgtaatgtgttcaaaagtgattcgtgatccgttttttgatctctcttgtagttttggaggaaaccttagcttaagtgatccgtttcgtgagcgctcttgtacttttggaggaagcaaacccggcccatttattggttttcttacaagcttttgcagaaatacacacatatatatgtataagccatatgggtatatatcacttgcttataaccatatgagtataactgaaatgtatggtcaagctggcatgacttacaaaaatcagttcaactcggtaaatacgtgaagcaattgaatacatttccttttagcatgtcgtttgacaaattgctgaaacaaagattggttgcgtcgatttgagctcacaattctgtacccttcttcagtgttcatagcatcaaacaaataaatcaccaatgttgtcttagaaacatgtacaaagactgaaagcacacataacagagatgagtttaggaaaattcttacacgtaaacgatttttcggaggattctcacttaagaacttccccaagaataatctatag

SEQ ID NO: 191623 - DNA, 751 bp, Arabidopsis thaliana landsberg
  unsure (1)..(751): unsure at all n locations
ccaaaatatcatagtcaggcagttttgggtgaacctggtgaccgctcgagtcccgtctggactcaccggactgaggagcctgaggcggtgctcggtttggcgggagagaagaaacacgaccctgtgatggttcatctggctctgtctcttcctcgtagtagnnnnnnnnnnnnnnnnnnnnnnnnnnnnnnnnnnnnnnnnnnnnnnnnnnagagttgtagctgtgtctcctcctcattgtttcttttgcttctgcttcggtattggtatactcttcctcgtagtcagattcattaatacccggattgttgtagctgtgtctcctacccattcctctgttttctgcaccaggttttgcgtaataggaacttgtttcggagtctcgtgattgtcttcttgaacctggatgatgatgatgatgatccatgtactgtgaatccttctggtgtgttgaatgatcagaagatacagagaactccttgttgctgctgtctcttctggtagctaataaggaggctacttgtgctgctgcaactgcctgtttggctaattctgtagctgttccgctgctgactcggtgtcatgataatgcgtgttgatgctcatgctactagtcgatctgatgagcaaaacaacaataagacttcattgtttcagatcccttatttcaagctaacgactggaatggatacataccttggcactgctttggtaggatcaataggctcgttgatagctgcacgattaactg

SEQ ID NO: 191624 - DNA, 131 bp, Arabidopsis thaliana landsberg
atcgtggttatgatgactcttaccatcatcacgtacacgacgaacaattaccaccatcggattttgaagtggagacctttgatgaccggaggaacggtggtgcagccgttgatactgtgggattcagatga

SEQ ID NO: 191625 - DNA, 353 bp, Arabidopsis thaliana landsberg
atgccgttcttcgactatccgcaagagagtcgaaaagtgatctactccacccatgcgatcgagtcggtgaacatgagcttgcgtaagatccccaagaatcgtggctcgtttcgcgccgacttatgcgctgatcgctattgttttatctggccgtgagcgacatcagtaaaagatggcccataccgatccgcaattgcaaagatgcgttgactcgttttgccatccagttagaagacaggatgcccatccgttcacccaccgatcgttcacacgaaaatcaggacacgcccgcagtcgttgcattgtcctgttcggattcttcgtcggaagggagtagagcagcgtcaatttga

SEQ ID NO: 191626 - DNA, 45 bp, Arabidopsis thaliana landsberg
atgacaatcctgcagatgccactgcttcgatttgttgcaggctga

SEQ ID NO: 191627 - DNA, 628 bp, Arabidopsis thaliana landsberg
  unsure (1)..(628): unsure at all n locations
atggagtcattaaacagcgtgagaattgcggtttggccaacacatcgaatgaatcatcaagatatgggagagaaatgggctcgaaggtctcaacttgttgaagagattgccaaaatttgcagagagcttgacattgagtatagattgtatcctcttgatatcaatgtccgaaacttgcccacttctacggctttgcctgtttccgaccgtcttccaccaaannnnnnnnnnnnnnnnnnnnnnnnnnnnnnnnnaactatagataaaactttttatatagtttggatcaagaggttctgttttctcatttttcttttatgagctctacaaatttagaattaggattggatacttgatgattactctactttaatgtgatgtataaattttggctctctcaatctgcatagtggtctcatagtgtttttgccttttggatttttggtttatgaatactgcttctaatttcggttagtccaaacttaacggtatttctcttttctttttcccggtttaactgaattggtcaattgatgtaactcttcccccagggatagtaaacaagatgattaagcatgacgcaaaatataacagacaccttttgaaaaatcatgttaagccaaattga

SEQ ID NO: 191628 - DNA, 253 bp, Arabidopsis thaliana landsberg
cattctgctaaagctcaagctgctaagtgcacaaccataatggagaagatcctccattctcttcctaaggatgcatttgagacatcttcaaaacctcttaagaggtatgtcaagctactttttgacaatggaattaactcagatgaagcaaagctgctgtccatggacatcagtgcaatcatgctgcctaaggtcaagaaggagaaggcacaaagagtggacattgttgtgtacatccgcaccatcactcctg

SEQ ID NO: 191629 - DNA, 108 bp, Arabidopsis thaliana landsberg
atagtttctcacagccatggaaagtggagaatccgcataaacgtacaattacaagctttatatggtccctcgactcttattctcttctcagtctttgcaactaaatag

SEQ ID NO: 191630 - DNA, 52 bp, Arabidopsis thaliana landsberg
atgaaattaataatgaggaatgatgcagagattggagataaagaggggcaaa

SEQ ID NO: 191631 - DNA, 387 bp, Arabidopsis thaliana landsberg
attgtaggtgaactaaatgcagtgaaaaacgctttagccattgtatcatctcgtctaagggagagtcagcatcgtgatcggagtaatttccaagggcgttcacattcaccagaacggtcgtttgcagctgcgggggatgattacatgccacagctaagaagacaatcatccgataggtttcctcgtggtaattttagaaataacaacttcagttctcgccagtccaactatgcagaagaagctccagcagttccagttggtgagaatgtctactccgaagagcttgtgttccagattctctgcccagctgacaagattgttcgggttgttggggaatcgcaaggaataattgatttgcttcagaacgagatcggcgtggacgttaga

SEQ ID NO: 191632 - DNA, 96 bp, Arabidopsis thaliana landsberg
ataaatctctcgcaagacactctccaggagaaagatcaaagagaaccggaacaagattcttcttgtttgcgaaaaaccgtagctcctcaatcgtaa

SEQ ID NO: 191633 - DNA, 119 bp, Arabidopsis thaliana landsberg
caaaaacaataagatacatacgactcgataatcttttccaaaaaaagaagagaatcgataatcttactaacgcccctaatgagtcaatgacccgaccctcatcattggaaatgtcttga

SEQ ID NO: 191634 - DNA, 600 bp, Arabidopsis thaliana landsberg
ttcgagaacaatcgagtttcgagcatcacaagaccatgtcatccaatctaccgtccatggttcctccataaactataaccatttaataatcaaaaccgattcaaaggtcatcaaatttaaaaagtcttaaacattatggagataaccagaataaacaagtacctgggaatcagaagaggactcttccctgcaagttacacattaattcgtggaatgtgaagttttttgttcctattgtggagttttactgtttgagttagaatttttctgtgattgagcgtgaattgtgttttcttttttattcttttgaatatgcatgcgtttggaagtgtgtttgtgttatgtttttgtgtgtttaaatttcgtttgagcgtgaatttgtgttttagaattttgttgtgattgagcgtgaatttgtgtttttgccatctttgatctattttttgccatacatgatgaacaagccacaggccagaggactagtctgtggccagtttgtggtaagagagagagatacttacctcaacccttgtatgctgaaacttttggtctttgcagcttaaagattttttttttgaacgtgaagtacctgatcaataa

SEQ ID NO: 191635 - DNA, 1187 bp, Arabidopsis thaliana landsberg
atcatcactgcaaagttcagacaacccaaatgttaacagaccaggtaacagagatgaaatctcctatccgaaacaatggggagaagattcaccaacctacaagtgaccatcttgtcccctgcagcattaaaagagatactccagacggtagaagaatgaccactgagtgaagattaaaggcaacatatattactatacgcataaaagaaatatcaagaaaacaatagcatcaaggtaggaaaatttcaacatgtgagaagtaaagaagagacaaatagaggatatacttgttaagttcacttaaggtttgtacacaattctaatcaccatcttcatcctcagagcaccaaatctgttaatagaaacagaaacattgcagttaaatgcttatatatatatagatatgccaccaattcatgaaagcacatttgaagcattgttctcttaaccttgatagtgttgtcataactgcaagagaacaaaacatccatggtgggatgccacaagaccatcttaacatcttctgaatgaccagttaacactgcaatagtatcaaattcatcgtcctcctctggtagtatttcccaaatccagacagacttgtctctaccacaagttgcaagcaacgaaccagatgcattccatgatacacttttgacttcgctttcatgtccctaagaaaattccacgagattttaaaaagtcaagaaacccagagggacatcaaagccctaaaaattttacaataaatttcagttgtcaacaaacacataaaggataggcctttgagatagtacatctagtacccgtaaaacagagacagtttcggagtcagtagcaaaaatttcccaaacgcaagtagtgccatcgaaacttgcagtggccaataacttcccacacggtgaccaagctaacgacttcacacttcttgtgtgcacaccttccaaaacagcctgaccaatcacgaagcttcatgttcattagtgacacattatctaacaacatcaaattcgaaagaaagagagaagagagaccttgcaggtccaggaacgagtaagagaactctgctcccagattcgtacggtcttatcggcactgcaggaagcaataacaccgtcagcggcgggattccaggcgacgtttcaaacacgatcagtgtgaccttcaagtttctgaaccctctctaa

SEQ ID NO: 191636 - DNA, 133 bp, Arabidopsis thaliana landsberg
acgatgtcttaaagcttgtgaggaaacttacgcaagtgattttcctttgaagacaataggagaagcaactgcagcaaagaggcagaaaagtatgtggagctgtagccagaaacagaaagcagatgaattttag

SEQ ID NO: 191637 - DNA, 7 bp, Arabidopsis thaliana landsberg
atggcag

SEQ ID NO: 191638 - DNA, 130 bp, Arabidopsis thaliana landsberg
atgactacaacttccgccttcggacaactgctctttatcaactctgagaacggtgcctactgcaacggaaatgagctctggaacaacctccaggaccacagagggatcgatgaaacgaaagaagtggcat

SEQ ID NO: 191639 - DNA, 241 bp, Arabidopsis thaliana landsberg
atggggaagaagaccgcctcttatggttatataacttttatctattgctatagtgcttcattgtgtgagttgattaattacgtgtatagaaacgcatacgaatttgaatgtaccaatttgccggcatcacgcatatggtttatgattaggctggatctctcatgcattagcgactggattgaaaggtgtccctggcgttcatgtaactgatactcccactatggcatcaataggaataatg

SEQ ID NO: 191640 - DNA, 81 bp, Arabidopsis thaliana landsberg
agggtgtcgatcgacaccctgatagtgtcggtcgacacaaccgtgaaagtctgccatgggaacgtgattgtcaatctgaag

SEQ ID NO: 191641 - DNA, 309 bp, Arabidopsis thaliana landsberg
atgcctgctaatctgcttatacttgttggtggctttgaggcaaaacttagggaacaggtcagacttacaattagaggcacttgagtgtagtttattgagtctaagctgcactagtttgtggattgagtttaagctgcacagatttcccactttggttctgtttttagtctaattttcctcctgcttggtttctcgtttctcatgtgtgattctgttctgtttgattccttgtaggtgtggtcaagtcttcatcagcttgcctcgtgtttggttctgttcttttctcaaacttactaccactggctgtaa

SEQ ID NO: 191642 - DNA, 162 bp, Arabidopsis thaliana landsberg
atgccttatgatcttcgtgggtcttcgtcttggcttgcaggagcgaagcggccaaacagtcctcctggtcgacgacgtccttggcctatccgttggctcatgcgtagcgccttcgtccgagcagacgcctgcgggagcagccttcatccgtgcggacgaaag

SEQ ID NO: 191643 - DNA, 380 bp, Arabidopsis thaliana landsberg
gaggacagatgcccctgtcagatgaccgagctgaaggactacatcgaccagcgggaccaggcgtacgcgttctggctggacatgatggccgcgcgccgcgactacgagcaggcgaaggccggcggcaacgcggcggtcatcagcgtcgcgcagaaggcctacaacgcggcatacgcggcgtggcaggccgaccagaaggccggcaccaagtgagcagggtcgcgccgtactggaaagccgtggtcggtttcgtcgcgccgggtgctgcgctgatcatcgcgaacggcggcgccatgtccggccgggattggatcgtggccgcggcgacctgtgtcgtgaccggcgcgacggtgtacgccgtaccgaaccggacggagtag

SEQ ID NO: 191644 - DNA, 395 bp, Arabidopsis thaliana landsberg
gagaggctcgagctcgtgcatggggacttgtgtggcccagtgacgccagccacaccaggaggacgacgctacttcatgctgctcgtcgacgatctctcccgctacatgtggggtgatgatccttggcagcaagggagaggctgcgaacgccatcaggcgtgtgcaggtcgctgcgaaggcggagtgcggccgcaagctacgcgtgctgcgcaccgacaacggcggctgagttcgcgtcgtactgcgcggatgagggcgttcagcgccactactccgcgctgtacaacccgcagcagaacggcatcgtcgagcggcgcacgcagacggttgtggggatggctcgggctctcctcaagcagagaggaatggcggctgtcttctggggagagacgatg

SEQ ID NO: 191645 - DNA, 112 bp, Arabidopsis thaliana landsberg
gttgatagaagaatgctggcatgagaaacctgcaaagcgaccaactttcagagagatcattaaacgacttgagtccattcttcaccacatgggtcacaagcgacaatggagg

SEQ ID NO: 191646 - DNA, 495 bp, Arabidopsis thaliana landsberg
cccgaacctgccgcgcgcgctgggcctgtgccgcaagctgggcctgaagttcgacatcatggcgaccagcttcttcttaggaaaacgcaatgtcgtgccgtcggccaattcgggcatgcccttgtggcaggacaagctgttcatcttcctgatgaagaacgccgccaacccgaccgaattcttccatatcccgccgggacgggtggtggagctgggcacgcaggtcacagtttaagcaagatgccccaccaccacgccctgcgggcgcggtccccctccccagcaagctggggaggcataaggacgacggcgcggggagatttccccttgcgtcgcggggcttaaaaccctaaagcgcgcgtgaattcgcaaacaagggtttcgctcatgtcctctcccgtcgataagcccgtccgaaaagtcgttctcgcctattcgggcggtctggacacctcgatcattctgaagtggctgcaaaccgagtacggggcggag

SEQ ID NO: 191647 - DNA, 428 bp, Arabidopsis thaliana landsberg
ggtttcgatggcgccatcggcttcgaattcgttccctcgtccgcagccaccgcggaaagcctcggcttcctgccggcctggcgtgcgcagcaggaccacaccaggagaagagcatgatcgtttccatcaatccggccgacggccgcgagcttgcgcgccatgcgctgcacgccgatgcccatgtcgaccgcgcgctcggcgcggcgaagacggcgcaggccgcctggaggaaggtgccggtcgccgggcgctgcaccctgctggccgcgatggcccgcgtgctgcgcgccggcaaggcccgctatgcggcgatgatcacccgcgagatgggcaagccgatcgcccaggcggaggccgagatcgagaaatgcgaaaataactgcgacttctacgccgagaacgccgcaaaattcctggcggacgagccc

SEQ ID NO: 191648 - DNA, 247 bp, Arabidopsis thaliana landsberg
atgatgatgactcaaaggatctctccttctaataagcgtcggagagtctcttttgttagagattttcctcaatttagtgttaaagatgaaagtgacattggtggtgatgatgttgctaccataaaagagaacttggatggtaaagaagatggtcactgtgttggtgtagcttatcgcgatcaccataggcctaacgaggaatcgcatgattcgattatgaataaggctggcttttatgtagctgatg

SEQ ID NO: 191649 - DNA, 218 bp, Arabidopsis thaliana landsberg
gctcctacggccatttcccctctccaccaggtaaaccagatcctgcaactccagaagaaccaaaagaatcatcggaagagaaaggtccagacttatcatcgtttactccagtgaaactccacggaacgtcattccgattacgaccattcccgtcaccatttcctccgccgccgctactgttagtcgaaagcggacgaataaacgaagagaagatctga

SEQ ID NO: 191650 - DNA, 114 bp, Arabidopsis thaliana landsberg
ctcaaagtcacagccactacgaccaggatagagctcgttactcgcattttagagctaaagattgtaattcatgaatcaagcaacgaaacgatacttgatggttacaaagagtaa

SEQ ID NO: 191651 - DNA, 173 bp, Arabidopsis thaliana landsberg
ggaacatattagagaccagagtcatcggaccaggactgaatccaacgccaccgttaaagaacatctcactaaacggccgtggaggaagagataaagtcggacgcgacggagctccggtggacttcgatgtcgacggagcttcttccttttccgacatcgatccccaaaattaa

SEQ ID NO: 191652 - DNA, 118 bp, Arabidopsis thaliana landsberg
ccaaaggatccctccaacaaccatctttaagaatattgatcgagagatccggaacaccatctctggtagacgatacaagaacagatggaggaagctgatgcttctttggattcgatag

SEQ ID NO: 191653 - DNA, 205 bp, Arabidopsis thaliana landsberg
ctttgtcgctggactttagatccatcatcgctagctccttctataggtttaccgccgccggcctgacaaattttgctgtacgttcttataattctggccatgactccaacgaatctttagatctcaattcaaaaattcttcaaaaaaagctccacctcaaaaccttaaaaggtccacttcataccagtcttcataccagtcggtg

SEQ ID NO: 191654 - DNA, 183 bp, Arabidopsis thaliana landsberg
cccatccgattccaagcacactcaacgtcttatcctacggagctaaaccagacggctcaaaagactcaaccaaagccttcttagccgcatgggacgttgcttgtgcatccgctaatcctacaactataatcgtaccaaaaggacggttcttggtcgggaaccttgtttttcatggcaacgagt

SEQ ID NO: 191655 - DNA, 289 bp, Arabidopsis thaliana landsberg
atgcttttccggtcgtgtgttggtatggtgtcccggtactcgagagctctactcccgacgataacaatctctagccggatcgctactattgttcttccgtttgcattaactcgcggaagaaagatccataccatgtcgaaggatgaggaatggtggaagaaaataagaaaaagtcctcccgttgatgaattgatgttggagtcggtggtagaggtcttcactgactctaccaagtatagcaaagtcaaaccttggcagactcttaaccaagaatcatatgggggctctg

SEQ ID NO: 191656 - DNA, 62 bp, Arabidopsis thaliana landsberg
aagttcagtttgatgagagtctaagtcgtgtaagtaatggtaatgagaaaagagatttatga

SEQ ID NO: 191657 - DNA, 90 bp, Arabidopsis thaliana landsberg
atgtggactaatacattcataaataatgcagccatcgacgacgaccatcaagcaacttttatatgtggaaagttttttcaaaaattatta

SEQ ID NO: 191658 - DNA, 219 bp, Arabidopsis thaliana landsberg
cccatcccgtcacggtaaagttggagcataccgatgtcaaggcggcattgaagcgcattctttggggccagggtctggattacaagattgtggggaaaaccatttttctcaagaaagcagaccggaaggccgagaagatgccggagcctgttgcccctacactccatatagaaaacgcacccattgaagtgcggggcacgataaaagactctgccactg

SEQ ID NO: 191659 - DNA, 431 bp, Arabidopsis thaliana landsberg
atgtcatatgcgtacgggtacgctgtcagcgatatcattgctgtactgggtctcttcgaacgaatagcaatcgaattgcggaactttaagaatgcaccggcgcatttccaacaactcggtgcagaaattgatcttctgcaaaatgcgatgaggcatgcccttcgcctgattccacaaaatgacgctcatcgcgaaaccctcgaacgcgtcagagccattgttatgcactgcctgacacctctacaagcgctgattaataaaatgcggaccaaggaatccaacctgggacactttcgcacatcgaagagtttgagccacattgggactcgaattcattggtcaatgatagccaagcatgatattgacgaggttcgcattactataacgtcagaaacagtggccatcaacatgctccttattgcccagtcatt

SEQ ID NO: 191660 - DNA, 510 bp, Arabidopsis thaliana landsberg
gtgggccccaccacggccccctctctcctctcctctccttcctccttccaagcgctgccgccaggtgcctgcgcgccccgcacctgtgcccgaccccgatcgcgcccgttcggatccagcaacggaaaccgtcgtgaccctctccctccgtcctcccccacgttctctcttcattagtgaagaaaccgactgccattaatggctttgaagacaccgatgtcgttactccctccctggctctacctctcctcctctctctataaataggaattgcctgagctcctctctccctccccgagctccctctctctcacgctctccccactcccgagctcgtcgtcgaccacgcccacaccgtccgctggagctccgcttggccgcgcccttgccctgcccggaccgtacgccgtcgtccacgcccgcgcagtgccccggctgaaccgtccgcacctcgctcgcctcgtccgcgccctgtccgccgacctccctgtacatgggcacaagcccaag

SEQ ID NO: 191661 - DNA, 419 bp, Arabidopsis thaliana landsberg
atgggcgcccgcgccggccagcgcccgagtcatcgcggcgcccagatgcccgcgcgcccccgaaacgaaggcggtttttccatccaggcggaaaagcgcttgagacatgatggtgcggccctgccctgccttgagaagctgcacccacagggtaatcaagtgttttcgaaccccgccggcctcttgcgctgcagtgcagcaatgagaggcgcggcaggggccacttgaggccaccccgtccgccacattaaagttgcagtgctcctgacaattcggcccagggagaggcaaggaccctccgggcccgaccacgcacataaggaaacgtcgatgaagaccacctatctcagcgccgccagctttgccgtcctgctggccgccgagatcgctgtcggccgcctttgccgccgtcgagccca

SEQ ID NO: 191662 - DNA, 333 bp, Arabidopsis thaliana landsberg
atgctgcacgagtatgtgtcggtccagcgcatcgcgctggagacggcacggcggctgtccgacccgaacgccctcgcccatgtgcactatgagctcggacacgcctactccaagctgggcaaggtatcgcatgccgaggcgcagctgtcccgggcgttcgagctgttcacccgggtgggcgacaaggccaacatcggccgggtggagcacgcgctggccgtgctgctgcacatgcagggacggtggaccgaggcgctcccgcacgcgacggaggcgctgcggttgcgccggctcttcggggggcacgcggcggtcgcgtattcggagaacgcg

SEQ ID NO: 191663 - DNA, 1540 bp, Arabidopsis thaliana landsberg
  unsure (1)..(1540): unsure at all n locations
aaaacagaagagagggacgaaaagaaacacacttccgtcaccaccgggactacctttgatcggaaaccttcatcaactcggccgccaccctcaccgatcactatgctctctcagccaccggtacggtcctcttatgcttcttcactttggccgtgtccccgttcttgtagtatcttcagctgaattggctagagacgttttgaagacgcatgaccgtgttttcgcaagccggccacggtcaaaaatcttcgagaaacttctttacgataagcatgatgtggcctcagctccttatggagagtactggaggcaaatgaaaagtgtgtgcgtcctccatctattcagcaacaaaatggtacgatcctttcgagaagtgagagaagaagagatcagtctgatgatggaaaagatcaggaaatcgatttcgttgccggtaaatctaagcaagatcttggtgagtttaactaacgatgtgatatgtaaagttgctttgggacggaaatacggtggtgaaacggattttaaggagttaatggagagactaaataaactattggggacgtttagtgtggggagttatgtaccttggcttgcgtggattgattggatccgcggtttagactgtcaactagaaaagacggcaaacgatgttgataagttctttgagagagttgtgcaagatcatgtcgatggaaacagagatatgactgattttgtggatgtattgctcgctattcaaagagataagaccgtcgggtttgaaatcaaccgtgttagcataaaggcaattgtcatggtgaggaaacacacttttgaatgataccaattcagatttatgatgttttattgtgtaatgttttttttttttacaacatgatgtgttagtaagtatataacagtagttcttgttttggttttaacttttcagaatgtttttgtgggtggtacggatacatcgtctacacttatggaatgggcaatgacagagcttctacgtcatccaaagtgtctgaaaagactccaagaagaagtccgcacgatttgcaaggataaatcaagtgtgtcagaagaagaaattcaaaacatgagctacttaaaagctgtaatcaaagaggcactcaggctccatcctccacttccattgatggttcctcacgaatcaacacaagatgtcagattaggagatcaccacataccagccggtacacaggtattgatcaatgcatgggcaatcgggagagaggctgcgacgtggggaccagacgtggaggagtttagaccagagaggcatttagattcgtctgttgattaccggggtcaggcttttnnnnnnnnnnnnnnnnnnnnnnnnngaaggatttgtccagcnnnnnnnnnnnnnnnnnnnttgaatgaggttgttttggctaacttagtgcatcggtttgattggagattatcagtcgaatctacagaagatcagaccgaggtcgctgaatcaacgggtattgcgatccaccgcatgttcccactctacgccattgcatcaaatactacttga

SEQ ID NO: 191664 - DNA, 507 bp, Arabidopsis thaliana landsberg
atgagaccacagaacaccttcgagttcgtcggcccacgagcccttcttggctgcgagccgtttcttcaagctgtcgaggatcatcttgtttgcgggttcggcttgaccgttcccttgggggtatcgtggtgtatatttgctaagacggattccccacttatcgcaaaaaccttagaaatgggtcgatatgaattgcgagccgttgtctgtaacgatcttgtaagggatcccgtggtgacataggatgtgtttccacacaacaccttttcgacttgagcgtccttgatgctggcgtacgattcggcctctatccatttagagaagtaatcggttaagacaaaaactaacttcttttacttcgaggcgtgcatcgggctgattatgtccaacgaccaacgcataaatggatatggtgaggcgattgataaagctcggccggtggatggatcgttggtgcgtgcctttggcatttttcgcatcgtttggagaacttttcgcaatccttga

SEQ ID NO: 191665 - DNA, 86 bp, Arabidopsis thaliana landsberg
attcgtgctttgagaccttcgatgagggaagaatcttgactccactcgccgacctggatcttattaatttggcagtgtctcggtga

SEQ ID NO: 191666 - DNA, 426 bp, Arabidopsis thaliana landsberg
gcaattttttgggcgatcgacgccatttgcttgttctccactggagatttttttccgaccagagatgttcgcagaattccttctagagtcttcaacgccggtttttgtctgccaaatgacaatggtagttattcttctcccctctttacgggaggtaatcgtcaaccaaaaccgtcatggatcattctatttaaccctttcaatcatctattcctttttctctcaccactgttttaccaactcgacaaaaaccaacaatcaattatgagtgattttctaagaaagtttgtccaagatctgaatttgggaatcgacgatgctccaaatttcctgtcacaggaattcgtctcacaggcgttcgctgttaaccgcttctcactaatcgtcacaccagtgaatccccgaaaaaaaacctacgagcgttaa

SEQ ID NO: 191667 - DNA, 81 bp, Arabidopsis thaliana landsberg
ggttttgaaaacggcaaaatatctttcaagggttttattggaataaccaaatttggttcttataagatatctttcatgtga

SEQ ID NO: 191668 - DNA, 114 bp, Arabidopsis thaliana landsberg
atgtcggaagagatggtacaccgcatagtcctttgtttccagaaagactgtaaaaagatgcagattattgagataatggatcaaagaacaaagccatggataatgagaaggaag

SEQ ID NO: 191669 - DNA, 230 bp, Arabidopsis thaliana landsberg
atgttagcagttgtatcgatgtatgaagatcgctttgacctctacattcttcaaacccaggttatcaacaaccttgatggtagtgacgatacagaaagccttagttggtggagaaagttcacactgggaaaaactaaagctgccccatcatcacccttgcgatactccataatcagcgacttttcattgcccgttaaacgaaccaaggagcttaaagctctatcgggatg

SEQ ID NO: 191670 - DNA, 171 bp, Arabidopsis thaliana landsberg
tttggtactgtcttgtttggagttgatagatgagattgggaaaagttccagggttttcaatggtatctttggactgctcatcatcatgttacaacatgaaatgggtgatgatgatgatgagggatatgatggtcgtgggcccatatccatcatcatcatccaatctcgacc

SEQ ID NO: 191671 - DNA, 61 bp, Arabidopsis thaliana landsberg
atgttcccctgggcgtatcatcgagcagcaatcgacgttgtcgtcctttcaaaagctctac

SEQ ID NO: 191672 - DNA, 200 bp, Arabidopsis thaliana landsberg
tttgaatgggacgctttatttttcgcaacggggggattcttataatcgtaggccaggacttatggttctcgatttctatggtaaacccaaagattgtcactttataccgctccccgatcatgctttgaatcgcaacaaaacatgtttggctacatccagcggttttgtcatgtatatcaaaacattagctcaaccgggag

SEQ ID NO: 191673 - DNA, 147 bp, Arabidopsis thaliana landsberg
gcaagtcttcaagtgaaacagctgatttttaggctgttacaacgagatccgaagaaaagactaggttgttttgaaggagcaaatgaagtcaagcaacattctttcttcaaaggcataaattgggctctgattcgatgcacggtataa

SEQ ID NO: 191674 - DNA, 271 bp, Arabidopsis thaliana landsberg
atggtgcatgtcaacagtggaaatttaaaagtagctgatgaaaaaccggtgcaatatatccttacggtcccgcggggaggagcctacagcctggtattggcagacggtactaaagtatggctcaatgcagattccaggttgatctatccttcccgttttgacggtgatacccgcgagatcagcctggtgggagaggcttattttgaaatagaaaaagatgcggaacatccgttcattgtacatacggaaaagcaaagcatcaaagtattgg

SEQ ID NO: 191675 - DNA, 2354 bp, Arabidopsis thaliana landsberg
agtcaaatgtagtacttgatgttcatcagatagcttgcggtgtaaggcacatcgctcttgtgacaagacaaggtgaagtctttacatggggagaagaagctggaggaaggcttggacatggtattcaagtcgacgttagtcgtccaaaacttgttgagtttcttgctcttaccaacatagattttgttgcttgtggagaatatcatacttgtgctgtatctacgtccggagatttgtttacttggggagatggaatccataatgttggacttttgggacatggaagtgatcttagtcattggataccgaaaagagtctctggtcctgtggaaggacttcaagtcttgtctgttgcgtgtggcacgtggcattccgcgcttgcgactgctaatggaaaactattcacttttggtgatggagcgtttggtgttcttggacatggagatagagagagtgtttcataccctaaagaagtgaaaatgttgagtggtcttaaaaccatgaaagtagcttgtggcgtgtggcatacggtagctatagttgaagttatgaatcagaccggtactagtacctcatctagaaagttgtttacttggggcgatggtgataaaaataggctaggacatggaaataaagagacttatcttcttccaacttgtgtatcttcactaattgactacaactttaaccaaatcgcgtgtggtcatacattcacagttgcgctcacaacctcaggacatgtttttactatgggagggacttcacatggtcagcttggtagctcgaattcggatggtaaattgccttgcttggttcaagatcgattggttggtgaattcgttgaagagatatcatgtggggatcatcatgttgctgtcctgacatcgagaagtgaagtctttacttggggaaaaggttcaaatggaagactaggacatggggacaaggatgatcgaaaaacgcctacattagttgaagctctaagggagaggcatgtgaagagtatatcatgtggttccaactttacatcaagtatatgcatccataagtgggtctcaggagctgatcaatctgtttgttctggttgtcgtcaagcatttggttttacgagaaagaggcataattgttatacctgtggtttagtgcattgccatgcgtgtagttccaagaaagctttaaaagcagcattagctccaactccggggaagccacatcgagtatgtgatgcttgttacacaaaacttaaagctggagagtctggttataactctaatgttgctaatagaaattccacaactctacacggtcactagatgggacaggaagaccagacagagatataaggtcttcaaggattctactgtcccccaaaacagaaccagtcaagtattctgaggttaggtcatcaagatctgaatcttctattgtcagagcttcacaagttccagctctccagcaacttagagatgttgcgttcccaagctcgcttagcgcaattcaaaatgcctttaaacccgttgcctcatcttcaacatcgacacttcctttaggtacaagagcatcaagaagaacaagccctccacgcagctctggattttccaggggcatgattgatactttgaagaaatctaacggtgttataaacaaagaaatgacaaaattgcaaagccaggttcgtaatcttatctcgaaattctcaggtttattaaacagaaaattggatctaatacattaataaacacttacagattaaaaatttgaaagagaaatgtgataatcaaggtacagagatccaaagactaaagaaaacagcaagagaagcttctgacttagctgtaaaacattcttcaaagcataaggcagcaacagaggtcatgaaatctgtcgctgaacatgtaagcttcttcttatatataaaacatgcttaatagatttttttccttgggaaacaagcaatgagactttaaaaaactttatttatcacagttgagagagttaaaagagaaactacctcctgaagtatcaagatgtgaagcttttgaatccatgaattctcaagcagaagcctatctaaatgcgagtgaagcatctgaatcatctttacctagaacatccttgggaatgggtcaacgagatccaaccccttctacaaacacacaagatcaaaacatagaggaaaaaccatcatctaatggaggtaacatgagatctcaagaaccttcagggacaacagaagcttcatcatcgtctaaaggaggagggaaagaacttatcgaacaatttgaacccggtgtttatgttacttatgtattgcacaaaaatggcgggaagatctttagaagagttagattcag

SEQ ID NO: 191676 - DNA, 459 bp, Arabidopsis thaliana landsberg
atggatcacttctcggtcgacggcacgctggtcgaggcttgggcgtcgatgaagagcgtcaagccgaagagttcgccgtcggacgccgaccgggggaacggctcgagcgagccgccggcagagggcggcgggcgcaacgcggaagcggacttccacggtcagaagaggtcgaacgacacgcatgcctcgaccaccgactccgaggccaggctctatcgcaaggggaaaggcaaggaggccaagctctgcttcatggggcatgggctgatggagaaccgccacggcttgctggtcgatgcgtgcctgacgttggccgacgggcatgcggagcgggtggcggcgctgcacatgatcgagcctcgcgccgaccggccacaagcgatcacactcggcgccgacaaggcctatgatgctgaggacttcatcaatgagctgcgctcgatgacagtgacaccgcac

SEQ ID NO: 191677 - DNA, 290 bp, Arabidopsis thaliana landsberg
atgcagtatttgtctggacaagagaacattgttgagatcaaaggtgcttatgaagatagacaatcgatacatttggtgatggagttgtgtggtggtagtgaattgttcgataggattatagctcaaggacattactctgagaaagcagctgctggtgttattagatcggttttgaatgttgttcagatttgtcatttcatgggagtgattcatcgtgatctcaagcctgagaattttctgctcgctagtacaaatgaaaatgctatgcttaaagctactgattttggatt

SEQ ID NO: 191678 - DNA, 249 bp, Arabidopsis thaliana landsberg
atggagggactcttgtcactccaatcttggaacatgcagcttgaaaactggtacgtggtagtggtttcgtcaatgcgtctgctaactgatcatgagttgagacatgagagacacgtagtgcactagcttgtataagatttcgaataaaataatcaaagatatgattctctccttaatatatgaaaaggaaccagttttggaactcaacggtcatcatcgttgttgcaattgttgctcaaagccggaaag

SEQ ID NO: 191679 - DNA, 31 bp, Arabidopsis thaliana landsberg
ggtagaggagtatgctgttataaataattaa

SEQ ID NO: 191680 - DNA, 379 bp, Arabidopsis thaliana landsberg
atgcaccgtatgttacaagaaatgggcagaaaaattgttcgcattcagtccattggccatcctggagaacgagaatttctggtggatccaaatgatatacgttatgtactcaatgcatgcactgtaagttttttagaaatatatttgatccttacataactcaagatatgaggtttaagagatgtcatctgataaacgatgaattgtatgggtttgtctgtttctcattaatatcatatttttcagggtactcaaaaggttttaggtatatcgctggattcaaggaatattggtgggttgtatgtacataagagtgcttacacccgcatgcgtaatctccgtttcttagaaattaattcgaagaactttgaaaaagcag

SEQ ID NO: 191681 - DNA, 271 bp, Arabidopsis thaliana landsberg
tttcttccaaaacgttacgaatgagtatttgaaccaccaatgtaacaacacacaagggacatacacgcggggtagtacgttagggaagaatcttaaccaagtcatccgtaacatctctcacctccatcttcgctacggttacacctacaactccagtgttgaggcttacgaagttagtaaagatcccaacattgtcttcgttttgctccagtgccgtggtgactcttacgggtccaagtgccactcctgcctcgacacagccttctctggg

SEQ ID NO: 191682 - DNA, 314 bp, Arabidopsis thaliana landsberg
aggcagatttcgacttctccctgcacattccaccactgaaattaattaaaatcaattttcaaattcaagatgagacaatacttgtagaagttaaaatgcccagaacatacttgtatagaagtaagggaggggaaacagccagtaatagagctgcagacacccatacaattgatttcgatgataggaagagcatagccaactttgctgaatacagacaggtcaagatccagactgccttttgtccaattcggtggtcagcaaacagtcttctcaccacagccaatcctattagcgacgtcaagataaccatgtag

SEQ ID NO: 191683 - DNA, 174 bp, Arabidopsis thaliana landsberg
catgtttttaagagctaacgtagctgtagaaaaaccccccgcagcctatcatccgtccagggcgcaaagaagcggcaaacgaggcgaggcgacgatggcgcgataccggcacttcgactaccggcagcccaagatgatcgccgtgtcctacgaccggcagcagctgccgggcaa

SEQ ID NO: 191684 - DNA, 115 bp, Arabidopsis thaliana landsberg
gatctgcggtcatgattccgtaagccccaccgaaccaaattcctctgtaatgaaacgtcccaccagctctgaccacgcttctggtgcaccaagtaaacagatcgtgtttgtttag

SEQ ID NO: 191685 - DNA, 522 bp, Arabidopsis thaliana landsberg
atgaacgcgactagctgtagctctataacccttaacgaccccatcaaacctccactgccacctcctatcgccgtcatccccgaccaccgtcccttctcactggatgacgccgttttgtccacgtcggttcttggaccaaccgcaagagacacgcctgacatgatgattcaaatggataagaatgtagttgacagtgcagaagcttgtaggagtactagaatttatgaagaagggagcacttgttgacgtagttccacgtgaaggttgagtgatgtacacgtgtcaaagtgaagtcgtgagtgttcattgcctgattttcaacgtgtcatgtcatatgttgcaatgatatcagtctcttaatatcgatttaatgggtttttgtttagtctcgtgtcatgtcattttgtttattattgattagtttttttaatttttgttttcttccatcttttagtcgattgtggatatagagctgtaccctcggtagatatacacaatccggttttggctcgagcagtggtc

SEQ ID NO: 191686 - DNA, 348 bp, Arabidopsis thaliana landsberg
atgggtgcgaatgcgctgtacgcgtatgcgcaactgggcgccatgggctattcgtcgtatgcgcccgaatttttgtcgacgcgtgacgggcaggcgctgggtcaggcctacgcggtggtggcgcaaatgacgccgctgatcctcgcccatcagggcaccggaaaaatggtgggcgtgctgccgccgacgcggttcgacgggcatgtcgatctgcaaccgcagaccgtggttttcggccactacacgatgacgatcgactttcaccagcctggttcgacgtcggacaaggcgcaggatactgtcgcgcacggtggcctgatcatccagaccggaccggacgatcttccg

SEQ ID NO: 191687 - DNA, 148 bp, Arabidopsis thaliana landsberg
  unsure (1)..(148): unsure at all n locations
atgagcnnnnnnnnnnnnnnnnnnnnnnnnnnnnnnnnnnnnnnnnnncgcagcctgctcgtcgacggcatgttcggacgcagcagacagcgcctactcagtgagctcctgctcgatgagttccagatcagcgagataattcttctca

SEQ ID NO: 191688 - DNA, 1363 bp, Arabidopsis thaliana landsberg
atgagatataggatccagctcaaaccttctggcttggaacgagggtccggtgatcctcgtactggtaagttgtgtagcacaatcggaaaaaaatagttgtggtctaagatttgagttttccgttaaaaccagtgattatgccggagacgagtcacgtcgcgatctcactggtcacagatcggatcgatcatttgcctctccggcaactcagatcggagatcgttcctccagctccgactcgatcccaatcttctattgattggcttcccgacttcgctggttactcatggcttgcttacggagcatccactctcgtcgtcatctctcatctaccttctcctctccgcggcgaagattccacgaacggaccattttcccgtcagattctagaggtttccggcgaaccagttactgcagtttgctggtctcctgtaacgccgtctgtaggcgagctcgctgttggctctgggaactatatcttcctcttcgcgcgtgatttgaaaggtaagcctcgatacatcttccttgttattcttcggtctttggagttcagtttttgagcaaatggtttggattgtgataccattgggttacgacagaatggttatcccatcttctgggttcaattagtatagtgatatattaatgtgtctttatcttaaatttgtatgtctttactcatattcaggttctttttgttggagtcagaatgccatactggtgcaggaaacaatagttgaagcgattgagtggacaggatccggggatgggataatagttggtggaactgatattgttctgtggaagagaaggaaccaatcttgggaaatagcttggaagttctctggggatcaccttcaggatctggtttcctccacctggtcattcgagggtccttttgccacagcaacttcttggaggaagtttccagctgagtgtgacgacgcaggaaaaagtgtcttggcctattatagtgatggtgaatcatatcataactttgaattgcctcatcctcagagaatatccatgattcagtggagaccgatggctgcagaacagtctgcaataggtataggtaaatcaatgaggaatgtgctaatgacatgttgcttggatggggcagtaaggttatggtgtgaggtagatggtggaaagacaaaaaaaggcatgaaagatgtgcctgatcataaaaaatcgttttgcgtggcagctgtgatagagataaatcaggtcttggatggctgtttgggtagagatttatttcttttttggggaactcgtacagggggtatattcaaaaccatcgaaggtactaatcaagttttttctatggaaaagtacgataatgagaatgttggaaaat

SEQ ID NO: 191689 - DNA, 1193 bp, Arabidopsis thaliana landsberg
aatatacttggcattgacgtgtttgtcatatgtaggtggttatgcttctacaagttcacccttgtatgccctgaaaaagattccatcaacacaagtagatgactcattgttagttcaagcttctgatatttgctcgtctcggcattctgatgttccagagataggtagtaatagcaacaaaggtaatgctgcaagagttttctctcagcttgccttcctcttatttagaagctgggagatagcggattaggctcatgttggtatcaatttactttggatgtctctgtttcaggtaatggctcacaagtagcagatatggtgcaaagaaagcctggtcgcggtgaaacaacactctctgttagctgttcggataagatagctcgatggaatgttcttggagttcaaggtttctgtaccctgaattttgacagataatttgttgtgtaatttaagatttgcttattgggattttctctctttgtgtgttcttacttcaggggcattgctttaccaagtcctccagcctgtgtatatttctaccatcaccgttggacaatctctgcacagtcctgacaatttttctttagctgatcacttgcgaagatctttgtatgagaggatcctcccattatcggatgaacttctgacttccttccgtttgaacaaggttcactagctgctttataccaatgtatcatggaaattgcagtagttactagcatatatcgtgctaattcctttccagccactgttttttgtagctccagtaccaccatcagagtttcagcattcagaaactgcgcaagctactttaacatgcgggttagttttcaatactcttcctcacatgacatgtgtgtcctttctttgtttcttaaaaggtggtgtgatctatttgttggctcttagatattccttgtgttggaactattctggcttacacgaagttattcttggaacaaccggtagaaagcaaggcacatcagctaaaggagctctgtatccgtctactcaatcatctatatgcaagtaaggggatgagccttgttatccaagcatgaccttcattatttgtagttgatatcatattcatatatttttctagacagcggttactggagctattcttgaaagaaactcatggacacaaaagggaatcttccaagtcaaaaaaatcgtaccgagaactgaag

SEQ ID NO: 191690 - DNA, 252 bp, Arabidopsis thaliana landsberg
atggctttagcttggtgcgttgtacgcaggtcagcatctaagtttgcttccgtttatggtggccgagtccgatctatctccgccgttgcgaaccgcgcctctctagctcgcaacccatcttcaattcgtccattcgtctctcgcgccttaaattactcgacggctattgatcgaattagctccgagcaaacgcttatccgagttattgactccgaaatcaactctgctttgcaatccgataatatcgattcg

SEQ ID NO: 191691 - DNA, 478 bp, Arabidopsis thaliana landsberg
ggagaggtggaagaagaatcacctagaaccctaattgaagatcagagagacgtggaggaatctaaaaccatccctgaagatcaaaaagatggtgaggagtcaaaaaccctaagtgaagatcaagtagatgtgaaggaatccaaaaccctaattgaagatcaaggagatgaggaagaatctaaaaccctagatgaagatttggatgaaacagaggaagagagtggagagtgccctttatgccagttcataaagggaggtgagtgtaaagaagcattcacagaattggagaattgttgcgacgaagcaaagaagaacaatgaagatcacgtaagtaaatgtaaggaggcaagactcatctttaagacttgcatgtatgataaccctgtttactatgagccccttcttgctggtgaggctagagcgatggccaagatgttgagcgagttgttgaacgcggaaaaggaagctattatggctg

SEQ ID NO: 191692 - DNA, 587 bp, Arabidopsis thaliana landsberg
atggttggctctttaagatctcatggcatcgatatcgctgaatcaatggaaatcaccaaaaaagagaagatctatgtagcagtgacagagaaagatctagaaagcaagtctagtctcgtttgggcgatacagaacagtggaggcaaagagttttgcatcgtccatgttcatcaacctatccgtaagtaattaaacatccacaagaatctttttatgcagaggttaaggattatttggttaactttggagtatcttgtgttcttgatttcaagcgggggagatgtttcacgagcagaaattgcgtctctacagaaaagagaaggagaaagcacataagaatttggagaagtaccttcaaatatgcaggcaaatgcaggtatctacgtatatccttacttcttatccatgtgttttgatggtagaagagatgtttggttttaaatttccagtcaaattgtgaattaggtcactgcagagatcatatatattgaaacggattcggtagagaaaggtatcctccaattgatatctcagcgcggagtcaccaaactcgttatgggagcagcagctgatagacactattcaat

SEQ ID NO: 191693 - DNA, 104 bp, Arabidopsis thaliana landsberg
catacttgcatttggagtgttttgcagatgaattaggtacttttggactcaacttggaggtttctagcacaagggatggacagactcgagttcgggggacctaa

SEQ ID NO: 191694 - DNA, 155 bp, Arabidopsis thaliana landsberg
agtctcaggtgtgctctagaagggttcactctcttgtcgaggtgtggagcttagaaaccggaccatctcggagaaaccaaacgatcgtggacgcgcaactcgattgcgctgtgtggcacgcgagccattccgacggtgactggtccttacgatga

SEQ ID NO: 191695 - DNA, 135 bp, Arabidopsis thaliana landsberg
atggtgcgctttgacccggccgccggactcagaagaggaggcatcatctactgtgctgtatacgttctattggactcgaagtattggttgccagccagtcggtggatattgatacgattgccaaacaagatatat

SEQ ID NO: 191696 - DNA, 263 bp, Arabidopsis thaliana landsberg
atgaatgcccaaacacatatccgaagccatactctcagccattattttcttagagacaatcacacatcagctctgcattcccttaggaacgactttggagcttcttcgccttttactttcggcgaaatcagtgttgacttttcgctgtaagctctgcattcccttaggaacgactttggagtctcttcaccttttacttaggtgacatttaagctctgcatccccttaggaacgactttggagcttcttcaccttttacttag

SEQ ID NO: 191697 - DNA, 155 bp, Arabidopsis thaliana landsberg
tggtcggcccaattatacttcgaatgttagttattgtatgccgatttcggcttgaggaatggcaattactggaatcggagatcgcagatactggaattggattgaaacagaagaatgaatgtacaatatttccgaaactcattgaacttaagtag

SEQ ID NO: 191698 - DNA, 130 bp, Arabidopsis thaliana landsberg
atatacataccatctgttggacaagaatggaatccacatggtgagagagggcatggaaagcgtaacaactagtattagagccgaaccggacgagtgtggagacacgtacactaattcactgttggagtaa

SEQ ID NO: 191699 - DNA, 99 bp, Arabidopsis thaliana landsberg
atggcgatcccgacaaagtccattggtgatgaatctcccaggtccaaatcttttcaccctgatgctgcgtcagaggcgacttatctgtatatacatatg

SEQ ID NO: 191700 - DNA, 155 bp, Arabidopsis thaliana landsberg
caaaccagactcgatgtggtacacttgttcacagtcccaattgtatggccgatctagtcactaaggttatacgtcctgtcaacgggatcatagaatattggtctccgctgttcgtgcaagaaacacatccaccattggatcatgaagacaagtag

SEQ ID NO: 191701 - DNA, 187 bp, Arabidopsis thaliana landsberg
gggcgtaccgaacgttgctgacttcaacacatgggctaggaaactcatgtcgggcaatctgccctcgcccgtcgcctcaagctatagtgccctgatgggcgaaattggacgactggatttaacaaggcgccgcatccttgcgagagcttttcagctagccactctcggtcccgaacttcctcggtag

SEQ ID NO: 191702 - DNA, 129 bp, Arabidopsis thaliana landsberg
atatttttagctattttcttggaattttcagtgaatttatggatcatccccggaaataacggaaactgcgagccaaaaaatcaacaaaagaatagaaaatacgagctgaattgtgacgtcatcttgtga

SEQ ID NO: 191703 - DNA, 1104 bp, Arabidopsis thaliana landsberg
  unsure (1)..(1104): unsure at all n locations
atgtcgacctcctcttcttccgctgtcgctacgccgccggccgacgcctcgtctgaggagacgctgagtagtttggtggcggaggagttgcgcaccgacgattctgtggattttggcgtgtcgcggatgtcgtcggtccgcgtgcaagatatgcagaggctgggttactttggcggcggagttgctcgtgtcccggggacggaggaagtccccgagccggaacgangntatggttgtgttcgaggcgttcttcgccgctggtctctgcctgcctgcgcaccgatttgttggcgaagtcctgcgcaggtttaatgttcagatacatcagctgactccgaatgccgtggtggctctgtcgaagtatgtctgggcgacgacttcgtatggcggacggccatcagtcgaagtctttgcgaagtactattgcctgcactggcagaagaggatgattggagatgaagttgcccagtttgggtcctgcacgtttacgccgaagaccggcaagaccacgatgcaggtagttgacttggttccttgcgcccgcaacaagtggggaaactggaatgagttttggttttatgtcgctgagggtaccgtcgaagaccatggaggggctccccggtgtccgagatgtgttcgtcatttgtactcagcatacccgcccttcgaggtggcggaggaggatgcggacgaaggggcccttcggtgcgccgccggtcagagcagtgggcgcgatttggttgaagagttcgtggcgtacggggtctggcccttggcgcacggctgggcgctgggcgaagtgtgccctcgccagatgccctttcacggagggagggtggtgcgaagtcctgccttcgcactgaatttgcgaaaccgtgacccggccgcctttgtgcgtgatgcggaggacttggcggtgcggctcgtggggcgttacgtgccgaggacggaaggccagcgcagctttgacatccgtgggtcaaatgaacgtttgaacagggtcttcgaattaaatcaactgcgtacgacggctaccctggtcaagacgaagcggaccgccgtgggaagaaaccggcggtggagactggaggcgaccctgcgctg

SEQ ID NO: 191704 - DNA, 279 bp, Arabidopsis thaliana landsberg
ggaaatcaggaattcatggttttggcatttttgcaaagcttcctcacagggcgggagatatggtgagcatactcaacttgaacgggacatttcatctttagaaagtgtcactcatggaaatattgtatgattcttgtgcagatgattgaatataccggagaacttgttagaccgtcaatagctgacaaaagagaacaactcatctacaattcaatggtggtacgtatttctgacttaacttactttctacattttgatgttatggagaagattctataa
